United States Patent Application Publication US 2018/0305689 A1 - sequence listing, part 164

SEQ ID NO: 2398200 - RNA, 19 nt, Artificial Sequence
  Description of Artificial Sequence: Synthetic oligonucleotide
  Sense strand starting at position 3108 of SEQ ID NO: 1886272
agaugcaauccuugaaucu

SEQ ID NO: 2398201 - RNA, 19 nt, Artificial Sequence
  Description of Artificial Sequence: Synthetic oligonucleotide
  Antisense strand to SEQ ID NO: 2398200
agauucaaggauugcaucu

SEQ ID NO: 2398202 - RNA, 19 nt, Artificial Sequence
  Description of Artificial Sequence: Synthetic oligonucleotide
  Sense strand starting at position 3118 of SEQ ID NO: 1886272
cuugaaucuccgugaccca

SEQ ID NO: 2398203 - RNA, 19 nt, Artificial Sequence
  Description of Artificial Sequence: Synthetic oligonucleotide
  Antisense strand to SEQ ID NO: 2398202
ugggucacggagauucaag

SEQ ID NO: 2398204 - RNA, 19 nt, Artificial Sequence
  Description of Artificial Sequence: Synthetic oligonucleotide
  Sense strand starting at position 3119 of SEQ ID NO: 1886272
uugaaucuccgugacccaa

SEQ ID NO: 2398205 - RNA, 19 nt, Artificial Sequence
  Description of Artificial Sequence: Synthetic oligonucleotide
  Antisense strand to SEQ ID NO: 2398204
uugggucacggagauucaa

SEQ ID NO: 2398206 - RNA, 19 nt, Artificial Sequence
  Description of Artificial Sequence: Synthetic oligonucleotide
  Sense strand starting at position 3299 of SEQ ID NO: 1886272
ucgaguugggcagaaggaa

SEQ ID NO: 2398207 - RNA, 19 nt, Artificial Sequence
  Description of Artificial Sequence: Synthetic oligonucleotide
  Antisense strand to SEQ ID NO: 2398206
uuccuucugcccaacucga

SEQ ID NO: 2398208 - RNA, 19 nt, Artificial Sequence
  Description of Artificial Sequence: Synthetic oligonucleotide
  Sense strand starting at position 3392 of SEQ ID NO: 1886272
aaagcugccuccuggagaa

SEQ ID NO: 2398209 - RNA, 19 nt, Artificial Sequence
  Description of Artificial Sequence: Synthetic oligonucleotide
  Antisense strand to SEQ ID NO: 2398208
uucuccaggaggcagcuuu

SEQ ID NO: 2398210 - RNA, 19 nt, Artificial Sequence
  Description of Artificial Sequence: Synthetic oligonucleotide
  Sense strand starting at position 3434 of SEQ ID NO: 1886272
cagguuggcugccugagaa

SEQ ID NO: 2398211 - RNA, 19 nt, Artificial Sequence
  Description of Artificial Sequence: Synthetic oligonucleotide
  Antisense strand to SEQ ID NO: 2398210
uucucaggcagccaaccug

SEQ ID NO: 2398212 - RNA, 19 nt, Artificial Sequence
  Description of Artificial Sequence: Synthetic oligonucleotide
  Sense strand starting at position 3530 of SEQ ID NO: 1886272
cucaccuaugucggucaau

SEQ ID NO: 2398213 - RNA, 19 nt, Artificial Sequence
  Description of Artificial Sequence: Synthetic oligonucleotide
  Antisense strand to SEQ ID NO: 2398212
auugaccgacauaggugag

SEQ ID NO: 2398214 - RNA, 19 nt, Artificial Sequence
  Description of Artificial Sequence: Synthetic oligonucleotide
  Sense strand starting at position 78 of SEQ ID NO: 1886273
gguucucaucaucgaucca

SEQ ID NO: 2398215 - RNA, 19 nt, Artificial Sequence
  Description of Artificial Sequence: Synthetic oligonucleotide
  Antisense strand to SEQ ID NO: 2398214
uggaucgaugaugagaacc

SEQ ID NO: 2398216 - RNA, 19 nt, Artificial Sequence
  Description of Artificial Sequence: Synthetic oligonucleotide
  Sense strand starting at position 300 of SEQ ID NO: 1886273
aggacauguguccaaccau

SEQ ID NO: 2398217 - RNA, 19 nt, Artificial Sequence
  Description of Artificial Sequence: Synthetic oligonucleotide
  Antisense strand to SEQ ID NO: 2398216
augguuggacacauguccu

SEQ ID NO: 2398218 - RNA, 19 nt, Artificial Sequence
  Description of Artificial Sequence: Synthetic oligonucleotide
  Sense strand starting at position 405 of SEQ ID NO: 1886273
gggaaacacugauguguca

SEQ ID NO: 2398219 - RNA, 19 nt, Artificial Sequence
  Description of Artificial Sequence: Synthetic oligonucleotide
  Antisense strand to SEQ ID NO: 2398218
ugacacaucaguguuuccc

SEQ ID NO: 2398220 - RNA, 19 nt, Artificial Sequence
  Description of Artificial Sequence: Synthetic oligonucleotide
  Sense strand starting at position 412 of SEQ ID NO: 1886273
acugaugugucauagauca

SEQ ID NO: 2398221 - RNA, 19 nt, Artificial Sequence
  Description of Artificial Sequence: Synthetic oligonucleotide
  Antisense strand to SEQ ID NO: 2398220
ugaucuaugacacaucagu

SEQ ID NO: 2398222 - RNA, 19 nt, Artificial Sequence
  Description of Artificial Sequence: Synthetic oligonucleotide
  Sense strand starting at position 581 of SEQ ID NO: 1886273
guaucuggauccuugggua

SEQ ID NO: 2398223 - RNA, 19 nt, Artificial Sequence
  Description of Artificial Sequence: Synthetic oligonucleotide
  Antisense strand to SEQ ID NO: 2398222
uacccaaggauccagauac

SEQ ID NO: 2398224 - RNA, 19 nt, Artificial Sequence
  Description of Artificial Sequence: Synthetic oligonucleotide
  Sense strand starting at position 773 of SEQ ID NO: 1886273
ucuggugugucccaaucca

SEQ ID NO: 2398225 - RNA, 19 nt, Artificial Sequence
  Description of Artificial Sequence: Synthetic oligonucleotide
  Antisense strand to SEQ ID NO: 2398224
uggauugggacacaccaga

SEQ ID NO: 2398226 - RNA, 19 nt, Artificial Sequence
  Description of Artificial Sequence: Synthetic oligonucleotide
  Sense strand starting at position 841 of SEQ ID NO: 1886273
ccgggagacauaugguauc

SEQ ID NO: 2398227 - RNA, 19 nt, Artificial Sequence
  Description of Artificial Sequence: Synthetic oligonucleotide
  Antisense strand to SEQ ID NO: 2398226
gauaccauaugucucccgg

SEQ ID NO: 2398228 - RNA, 19 nt, Artificial Sequence
  Description of Artificial Sequence: Synthetic oligonucleotide
  Sense strand starting at position 854 of SEQ ID NO: 1886273
gguaucuucuccuuucuuu

SEQ ID NO: 2398229 - RNA, 19 nt, Artificial Sequence
  Description of Artificial Sequence: Synthetic oligonucleotide
  Antisense strand to SEQ ID NO: 2398228
aaagaaaggagaagauacc

SEQ ID NO: 2398230 - RNA, 19 nt, Artificial Sequence
  Description of Artificial Sequence: Synthetic oligonucleotide
  Sense strand starting at position 911 of SEQ ID NO: 1886273
uuguccuaauggcugagaa

SEQ ID NO: 2398231 - RNA, 19 nt, Artificial Sequence
  Description of Artificial Sequence: Synthetic oligonucleotide
  Antisense strand to SEQ ID NO: 2398230
uucucagccauuaggacaa

SEQ ID NO: 2398232 - RNA, 19 nt, Artificial Sequence
  Description of Artificial Sequence: Synthetic oligonucleotide
  Sense strand starting at position 912 of SEQ ID NO: 1886273
uguccuaauggcugagaag

SEQ ID NO: 2398233 - RNA, 19 nt, Artificial Sequence
  Description of Artificial Sequence: Synthetic oligonucleotide
  Antisense strand to SEQ ID NO: 2398232
cuucucagccauuaggaca

SEQ ID NO: 2398234 - RNA, 19 nt, Artificial Sequence
  Description of Artificial Sequence: Synthetic oligonucleotide
  Sense strand starting at position 1217 of SEQ ID NO: 1886273
cuggguuugcugcaaucca

SEQ ID NO: 2398235 - RNA, 19 nt, Artificial Sequence
  Description of Artificial Sequence: Synthetic oligonucleotide
  Antisense strand to SEQ ID NO: 2398234
uggauugcagcaaacccag

SEQ ID NO: 2398236 - RNA, 19 nt, Artificial Sequence
  Description of Artificial Sequence: Synthetic oligonucleotide
  Sense strand starting at position 1224 of SEQ ID NO: 1886273
ugcugcaauccaugaaucu

SEQ ID NO: 2398237 - RNA, 19 nt, Artificial Sequence
  Description of Artificial Sequence: Synthetic oligonucleotide
  Antisense strand to SEQ ID NO: 2398236
agauucauggauugcagca

SEQ ID NO: 2398238 - RNA, 19 nt, Artificial Sequence
  Description of Artificial Sequence: Synthetic oligonucleotide
  Sense strand starting at position 1345 of SEQ ID NO: 1886273
guggccuggccauguuaga

SEQ ID NO: 2398239 - RNA, 19 nt, Artificial Sequence
  Description of Artificial Sequence: Synthetic oligonucleotide
  Antisense strand to SEQ ID NO: 2398238
ucuaacauggccaggccac

SEQ ID NO: 2398240 - RNA, 19 nt, Artificial Sequence
  Description of Artificial Sequence: Synthetic oligonucleotide
  Sense strand starting at position 1421 of SEQ ID NO: 1886273
cccuuuccugccuggacaa

SEQ ID NO: 2398241 - RNA, 19 nt, Artificial Sequence
  Description of Artificial Sequence: Synthetic oligonucleotide
  Antisense strand to SEQ ID NO: 2398240
uuguccaggcaggaaaggg

SEQ ID NO: 2398242 - RNA, 19 nt, Artificial Sequence
  Description of Artificial Sequence: Synthetic oligonucleotide
  Sense strand starting at position 1478 of SEQ ID NO: 1886273
uaugucugauucccaagga

SEQ ID NO: 2398243 - RNA, 19 nt, Artificial Sequence
  Description of Artificial Sequence: Synthetic oligonucleotide
  Antisense strand to SEQ ID NO: 2398242
uccuugggaaucagacaua

SEQ ID NO: 2398244 - RNA, 19 nt, Artificial Sequence
  Description of Artificial Sequence: Synthetic oligonucleotide
  Sense strand starting at position 1479 of SEQ ID NO: 1886273
augucugauucccaaggaa

SEQ ID NO: 2398245 - RNA, 19 nt, Artificial Sequence
  Description of Artificial Sequence: Synthetic oligonucleotide
  Antisense strand to SEQ ID NO: 2398244
uuccuugggaaucagacau

SEQ ID NO: 2398246 - RNA, 19 nt, Artificial Sequence
  Description of Artificial Sequence: Synthetic oligonucleotide
  Sense strand starting at position 1629 of SEQ ID NO: 1886273
cucaccuaugcucgucaau

SEQ ID NO: 2398247 - RNA, 19 nt, Artificial Sequence
  Description of Artificial Sequence: Synthetic oligonucleotide
  Antisense strand to SEQ ID NO: 2398246
auugacgagcauaggugag

SEQ ID NO: 2398248 - RNA, 19 nt, Artificial Sequence
  Description of Artificial Sequence: Synthetic oligonucleotide
  Sense strand starting at position 1767 of SEQ ID NO: 1886273
gaaagucuggugugccuaa

SEQ ID NO: 2398249 - RNA, 19 nt, Artificial Sequence
  Description of Artificial Sequence: Synthetic oligonucleotide
  Antisense strand to SEQ ID NO: 2398248
uuaggcacaccagacuuuc

SEQ ID NO: 2398250 - RNA, 19 nt, Artificial Sequence
  Description of Artificial Sequence: Synthetic oligonucleotide
  Sense strand starting at position 1774 of SEQ ID NO: 1886273
uggugugccuaauagagga

SEQ ID NO: 2398251 - RNA, 19 nt, Artificial Sequence
  Description of Artificial Sequence: Synthetic oligonucleotide
  Antisense strand to SEQ ID NO: 2398250
uccucuauuaggcacacca

SEQ ID NO: 2398252 - RNA, 19 nt, Artificial Sequence
  Description of Artificial Sequence: Synthetic oligonucleotide
  Sense strand starting at position 2094 of SEQ ID NO: 1886273
gcccgaguuucagugcaau

SEQ ID NO: 2398253 - RNA, 19 nt, Artificial Sequence
  Description of Artificial Sequence: Synthetic oligonucleotide
  Antisense strand to SEQ ID NO: 2398252
auugcacugaaacucgggc

SEQ ID NO: 2398254 - RNA, 19 nt, Artificial Sequence
  Description of Artificial Sequence: Synthetic oligonucleotide
  Sense strand starting at position 2179 of SEQ ID NO: 1886273
gggucaccaucucaaggaa

SEQ ID NO: 2398255 - RNA, 19 nt, Artificial Sequence
  Description of Artificial Sequence: Synthetic oligonucleotide
  Antisense strand to SEQ ID NO: 2398254
uuccuugagauggugaccc

SEQ ID NO: 2398256 - RNA, 19 nt, Artificial Sequence
  Description of Artificial Sequence: Synthetic oligonucleotide
  Sense strand starting at position 2309 of SEQ ID NO: 1886273
guggaauacuuacccauca

SEQ ID NO: 2398257 - RNA, 19 nt, Artificial Sequence
  Description of Artificial Sequence: Synthetic oligonucleotide
  Antisense strand to SEQ ID NO: 2398256
ugauggguaaguauuccac

SEQ ID NO: 2398258 - RNA, 19 nt, Artificial Sequence
  Description of Artificial Sequence: Synthetic oligonucleotide
  Sense strand starting at position 2548 of SEQ ID NO: 1886273
ggcccauaugccugaugcu

SEQ ID NO: 2398259 - RNA, 19 nt, Artificial Sequence
  Description of Artificial Sequence: Synthetic oligonucleotide
  Antisense strand to SEQ ID NO: 2398258
agcaucaggcauaugggcc

SEQ ID NO: 2398260 - RNA, 19 nt, Artificial Sequence
  Description of Artificial Sequence: Synthetic oligonucleotide
  Sense strand starting at position 2624 of SEQ ID NO: 1886273
ugcuguaucugggcacaua

SEQ ID NO: 2398261 - RNA, 19 nt, Artificial Sequence
  Description of Artificial Sequence: Synthetic oligonucleotide
  Antisense strand to SEQ ID NO: 2398260
uaugugcccagauacagca

SEQ ID NO: 2398262 - RNA, 19 nt, Artificial Sequence
  Description of Artificial Sequence: Synthetic oligonucleotide
  Sense strand starting at position 2676 of SEQ ID NO: 1886273
ugcuuucucuggugaguuu

SEQ ID NO: 2398263 - RNA, 19 nt, Artificial Sequence
  Description of Artificial Sequence: Synthetic oligonucleotide
  Antisense strand to SEQ ID NO: 2398262
aaacucaccagagaaagca

SEQ ID NO: 2398264 - RNA, 19 nt, Artificial Sequence
  Description of Artificial Sequence: Synthetic oligonucleotide
  Sense strand starting at position 3133 of SEQ ID NO: 1886273
gaccaugugucaggugcaa

SEQ ID NO: 2398265 - RNA, 19 nt, Artificial Sequence
  Description of Artificial Sequence: Synthetic oligonucleotide
  Antisense strand to SEQ ID NO: 2398264
uugcaccugacacaugguc

SEQ ID NO: 2398266 - RNA, 19 nt, Artificial Sequence
  Description of Artificial Sequence: Synthetic oligonucleotide
  Sense strand starting at position 3135 of SEQ ID NO: 1886273
ccaugugucaggugcaauc

SEQ ID NO: 2398267 - RNA, 19 nt, Artificial Sequence
  Description of Artificial Sequence: Synthetic oligonucleotide
  Antisense strand to SEQ ID NO: 2398266
gauugcaccugacacaugg

SEQ ID NO: 2398268 - RNA, 19 nt, Artificial Sequence
  Description of Artificial Sequence: Synthetic oligonucleotide
  Sense strand starting at position 3144 of SEQ ID NO: 1886273
aggugcaauccuugaaucu

SEQ ID NO: 2398269 - RNA, 19 nt, Artificial Sequence
  Description of Artificial Sequence: Synthetic oligonucleotide
  Antisense strand to SEQ ID NO: 2398268
agauucaaggauugcaccu

SEQ ID NO: 2398270 - RNA, 19 nt, Artificial Sequence
  Description of Artificial Sequence: Synthetic oligonucleotide
  Sense strand starting at position 3145 of SEQ ID NO: 1886273
ggugcaauccuugaaucuc

SEQ ID NO: 2398271 - RNA, 19 nt, Artificial Sequence
  Description of Artificial Sequence: Synthetic oligonucleotide
  Antisense strand to SEQ ID NO: 2398270
gagauucaaggauugcacc

SEQ ID NO: 2398272 - RNA, 19 nt, Artificial Sequence
  Description of Artificial Sequence: Synthetic oligonucleotide
  Sense strand starting at position 3194 of SEQ ID NO: 1886273
accuuucuccagggacaaa

SEQ ID NO: 2398273 - RNA, 19 nt, Artificial Sequence
  Description of Artificial Sequence: Synthetic oligonucleotide
  Antisense strand to SEQ ID NO: 2398272
uuugucccuggagaaaggu

SEQ ID NO: 2398274 - RNA, 19 nt, Artificial Sequence
  Description of Artificial Sequence: Synthetic oligonucleotide
  Sense strand starting at position 3390 of SEQ ID NO: 1886273
gguuccuguuucccaggaa

SEQ ID NO: 2398275 - RNA, 19 nt, Artificial Sequence
  Description of Artificial Sequence: Synthetic oligonucleotide
  Antisense strand to SEQ ID NO: 2398274
uuccugggaaacaggaacc

SEQ ID NO: 2398276 - RNA, 19 nt, Artificial Sequence
  Description of Artificial Sequence: Synthetic oligonucleotide
  Sense strand starting at position 3449 of SEQ ID NO: 1886273
caguuuggcucccugagga

SEQ ID NO: 2398277 - RNA, 19 nt, Artificial Sequence
  Description of Artificial Sequence: Synthetic oligonucleotide
  Antisense strand to SEQ ID NO: 2398276
uccucagggagccaaacug

SEQ ID NO: 2398278 - RNA, 19 nt, Artificial Sequence
  Description of Artificial Sequence: Synthetic oligonucleotide
  Sense strand starting at position 3974 of SEQ ID NO: 1886273
ggaagagaccaguguugag

SEQ ID NO: 2398279 - RNA, 19 nt, Artificial Sequence
  Description of Artificial Sequence: Synthetic oligonucleotide
  Antisense strand to SEQ ID NO: 2398278
cucaacacuggucucuucc

SEQ ID NO: 2398280 - RNA, 19 nt, Artificial Sequence
  Description of Artificial Sequence: Synthetic oligonucleotide
  Sense strand starting at position 25 of SEQ ID NO: 1886274
agugucuucuuccaacaua

SEQ ID NO: 2398281 - RNA, 19 nt, Artificial Sequence
  Description of Artificial Sequence: Synthetic oligonucleotide
  Antisense strand to SEQ ID NO: 2398280
uauguuggaagaagacacu

SEQ ID NO: 2398282 - RNA, 19 nt, Artificial Sequence
  Description of Artificial Sequence: Synthetic oligonucleotide
  Sense strand starting at position 361 of SEQ ID NO: 1886274
gggccucacguaugagcaa

SEQ ID NO: 2398283 - RNA, 19 nt, Artificial Sequence
  Description of Artificial Sequence: Synthetic oligonucleotide
  Antisense strand to SEQ ID NO: 2398282
uugcucauacgugaggccc

SEQ ID NO: 2398284 - RNA, 19 nt, Artificial Sequence
  Description of Artificial Sequence: Synthetic oligonucleotide
  Sense strand starting at position 395 of SEQ ID NO: 1886274
gggauacccacgugaugga

SEQ ID NO: 2398285 - RNA, 19 nt, Artificial Sequence
  Description of Artificial Sequence: Synthetic oligonucleotide
  Antisense strand to SEQ ID NO: 2398284
uccaucacguggguauccc

SEQ ID NO: 2398286 - RNA, 19 nt, Artificial Sequence
  Description of Artificial Sequence: Synthetic oligonucleotide
  Sense strand starting at position 513 of SEQ ID NO: 1886274
gcaagaugccugggcuguu

SEQ ID NO: 2398287 - RNA, 19 nt, Artificial Sequence
  Description of Artificial Sequence: Synthetic oligonucleotide
  Antisense strand to SEQ ID NO: 2398286
aacagcccaggcaucuugc

SEQ ID NO: 2398288 - RNA, 19 nt, Artificial Sequence
  Description of Artificial Sequence: Synthetic oligonucleotide
  Sense strand starting at position 800 of SEQ ID NO: 1886274
ggguccucaucuugcguua

SEQ ID NO: 2398289 - RNA, 19 nt, Artificial Sequence
  Description of Artificial Sequence: Synthetic oligonucleotide
  Antisense strand to SEQ ID NO: 2398288
uaacgcaagaugaggaccc

SEQ ID NO: 2398290 - RNA, 19 nt, Artificial Sequence
  Description of Artificial Sequence: Synthetic oligonucleotide
  Sense strand starting at position 802 of SEQ ID NO: 1886274
guccucaucuugcguuaca

SEQ ID NO: 2398291 - RNA, 19 nt, Artificial Sequence
  Description of Artificial Sequence: Synthetic oligonucleotide
  Antisense strand to SEQ ID NO: 2398290
uguaacgcaagaugaggac

SEQ ID NO: 2398292 - RNA, 19 nt, Artificial Sequence
  Description of Artificial Sequence: Synthetic oligonucleotide
  Sense strand starting at position 839 of SEQ ID NO: 1886274
aggccacacuuggucaaua

SEQ ID NO: 2398293 - RNA, 19 nt, Artificial Sequence
  Description of Artificial Sequence: Synthetic oligonucleotide
  Antisense strand to SEQ ID NO: 2398292
uauugaccaaguguggccu

SEQ ID NO: 2398294 - RNA, 19 nt, Artificial Sequence
  Description of Artificial Sequence: Synthetic oligonucleotide
  Sense strand starting at position 840 of SEQ ID NO: 1886274
ggccacacuuggucaauaa

SEQ ID NO: 2398295 - RNA, 19 nt, Artificial Sequence
  Description of Artificial Sequence: Synthetic oligonucleotide
  Antisense strand to SEQ ID NO: 2398294
uuauugaccaaguguggcc

SEQ ID NO: 2398296 - RNA, 19 nt, Artificial Sequence
  Description of Artificial Sequence: Synthetic oligonucleotide
  Sense strand starting at position 1373 of SEQ ID NO: 1886274
ugaccagccuuccgaguuu

SEQ ID NO: 2398297 - RNA, 19 nt, Artificial Sequence
  Description of Artificial Sequence: Synthetic oligonucleotide
  Antisense strand to SEQ ID NO: 2398296
aaacucggaaggcugguca

SEQ ID NO: 2398298 - RNA, 19 nt, Artificial Sequence
  Description of Artificial Sequence: Synthetic oligonucleotide
  Sense strand starting at position 1404 of SEQ ID NO: 1886274
gcgcuauguugggcugaag

SEQ ID NO: 2398299 - RNA, 19 nt, Artificial Sequence
  Description of Artificial Sequence: Synthetic oligonucleotide
  Antisense strand to SEQ ID NO: 2398298
cuucagcccaacauagcgc

SEQ ID NO: 2398300 - RNA, 19 nt, Artificial Sequence
  Description of Artificial Sequence: Synthetic oligonucleotide
  Sense strand starting at position 1464 of SEQ ID NO: 1886274
ucaagaaaugcgugcuccu

SEQ ID NO: 2398301 - RNA, 19 nt, Artificial Sequence
  Description of Artificial Sequence: Synthetic oligonucleotide
  Antisense strand to SEQ ID NO: 2398300
aggagcacgcauuucuuga

SEQ ID NO: 2398302 - RNA, 19 nt, Artificial Sequence
  Description of Artificial Sequence: Synthetic oligonucleotide
  Sense strand starting at position 1473 of SEQ ID NO: 1886274
gcgugcuccuaggaucaga

SEQ ID NO: 2398303 - RNA, 19 nt, Artificial Sequence
  Description of Artificial Sequence: Synthetic oligonucleotide
  Antisense strand to SEQ ID NO: 2398302
ucugauccuaggagcacgc

SEQ ID NO: 2398304 - RNA, 19 nt, Artificial Sequence
  Description of Artificial Sequence: Synthetic oligonucleotide
  Sense strand starting at position 2291 of SEQ ID NO: 1886274
ugagauccaugugaaauac

SEQ ID NO: 2398305 - RNA, 19 nt, Artificial Sequence
  Description of Artificial Sequence: Synthetic oligonucleotide
  Antisense strand to SEQ ID NO: 2398304
guauuucacauggaucuca

SEQ ID NO: 2398306 - RNA, 19 nt, Artificial Sequence
  Description of Artificial Sequence: Synthetic oligonucleotide
  Sense strand starting at position 2308 of SEQ ID NO: 1886274
acugacuugucacugacau

SEQ ID NO: 2398307 - RNA, 19 nt, Artificial Sequence
  Description of Artificial Sequence: Synthetic oligonucleotide
  Antisense strand to SEQ ID NO: 2398306
augucagugacaagucagu

SEQ ID NO: 2398308 - RNA, 19 nt, Artificial Sequence
  Description of Artificial Sequence: Synthetic oligonucleotide
  Sense strand starting at position 2309 of SEQ ID NO: 1886274
cugacuugucacugacaug

SEQ ID NO: 2398309 - RNA, 19 nt, Artificial Sequence
  Description of Artificial Sequence: Synthetic oligonucleotide
  Antisense strand to SEQ ID NO: 2398308
caugucagugacaagucag

SEQ ID NO: 2398310 - RNA, 19 nt, Artificial Sequence
  Description of Artificial Sequence: Synthetic oligonucleotide
  Sense strand starting at position 2605 of SEQ ID NO: 1886274
cuaagcauguacuggaaau

SEQ ID NO: 2398311 - RNA, 19 nt, Artificial Sequence
  Description of Artificial Sequence: Synthetic oligonucleotide
  Antisense strand to SEQ ID NO: 2398310
auuuccaguacaugcuuag

SEQ ID NO: 2398312 - RNA, 19 nt, Artificial Sequence
  Description of Artificial Sequence: Synthetic oligonucleotide
  Sense strand starting at position 2778 of SEQ ID NO: 1886274
gugauaccauggcucagaa

SEQ ID NO: 2398313 - RNA, 19 nt, Artificial Sequence
  Description of Artificial Sequence: Synthetic oligonucleotide
  Antisense strand to SEQ ID NO: 2398312
uucugagccaugguaucac

SEQ ID NO: 2398314 - RNA, 19 nt, Artificial Sequence
  Description of Artificial Sequence: Synthetic oligonucleotide
  Sense strand starting at position 2858 of SEQ ID NO: 1886274
ggccacccuucgugacauu

SEQ ID NO: 2398315 - RNA, 19 nt, Artificial Sequence
  Description of Artificial Sequence: Synthetic oligonucleotide
  Antisense strand to SEQ ID NO: 2398314
aaugucacgaaggguggcc

SEQ ID NO: 2398316 - RNA, 19 nt, Artificial Sequence
  Description of Artificial Sequence: Synthetic oligonucleotide
  Sense strand starting at position 3049 of SEQ ID NO: 1886274
cccauugcucaauagggau

SEQ ID NO: 2398317 - RNA, 19 nt, Artificial Sequence
  Description of Artificial Sequence: Synthetic oligonucleotide
  Antisense strand to SEQ ID NO: 2398316
aucccuauugagcaauggg

SEQ ID NO: 2398318 - RNA, 19 nt, Artificial Sequence
  Description of Artificial Sequence: Synthetic oligonucleotide
  Sense strand starting at position 3100 of SEQ ID NO: 1886274
ccuugaaucuccgugacca

SEQ ID NO: 2398319 - RNA, 19 nt, Artificial Sequence
  Description of Artificial Sequence: Synthetic oligonucleotide
  Antisense strand to SEQ ID NO: 2398318
uggucacggagauucaagg

SEQ ID NO: 2398320 - RNA, 19 nt, Artificial Sequence
  Description of Artificial Sequence: Synthetic oligonucleotide
  Sense strand starting at position 3101 of SEQ ID NO: 1886274
cuugaaucuccgugaccaa

SEQ ID NO: 2398321 - RNA, 19 nt, Artificial Sequence
  Description of Artificial Sequence: Synthetic oligonucleotide
  Antisense strand to SEQ ID NO: 2398320
uuggucacggagauucaag

SEQ ID NO: 2398322 - RNA, 19 nt, Artificial Sequence
  Description of Artificial Sequence: Synthetic oligonucleotide
  Sense strand starting at position 3102 of SEQ ID NO: 1886274
uugaaucuccgugaccaaa

SEQ ID NO: 2398323 - RNA, 19 nt, Artificial Sequence
  Description of Artificial Sequence: Synthetic oligonucleotide
  Antisense strand to SEQ ID NO: 2398322
uuuggucacggagauucaa

SEQ ID NO: 2398324 - RNA, 19 nt, Artificial Sequence
  Description of Artificial Sequence: Synthetic oligonucleotide
  Sense strand starting at position 3212 of SEQ ID NO: 1886274
ggcaguccuggagaccuua

SEQ ID NO: 2398325 - RNA, 19 nt, Artificial Sequence
  Description of Artificial Sequence: Synthetic oligonucleotide
  Antisense strand to SEQ ID NO: 2398324
uaaggucuccaggacugcc

SEQ ID NO: 2398326 - RNA, 19 nt, Artificial Sequence
  Description of Artificial Sequence: Synthetic oligonucleotide
  Sense strand starting at position 3457 of SEQ ID NO: 1886274
cggucuagcucaugaccaa

SEQ ID NO: 2398327 - RNA, 19 nt, Artificial Sequence
  Description of Artificial Sequence: Synthetic oligonucleotide
  Antisense strand to SEQ ID NO: 2398326
uuggucaugagcuagaccg

SEQ ID NO: 2398328 - RNA, 19 nt, Artificial Sequence
  Description of Artificial Sequence: Synthetic oligonucleotide
  Sense strand starting at position 3458 of SEQ ID NO: 1886274
ggucuagcucaugaccaau

SEQ ID NO: 2398329 - RNA, 19 nt, Artificial Sequence
  Description of Artificial Sequence: Synthetic oligonucleotide
  Antisense strand to SEQ ID NO: 2398328
auuggucaugagcuagacc

SEQ ID NO: 2398330 - RNA, 19 nt, Artificial Sequence
  Description of Artificial Sequence: Synthetic oligonucleotide
  Sense strand starting at position 3927 of SEQ ID NO: 1886274
cagcuuagugcagaagacu

SEQ ID NO: 2398331 - RNA, 19 nt, Artificial Sequence
  Description of Artificial Sequence: Synthetic oligonucleotide
  Antisense strand to SEQ ID NO: 2398330
agucuucugcacuaagcug

SEQ ID NO: 2398332 - RNA, 19 nt, Artificial Sequence
  Description of Artificial Sequence: Synthetic oligonucleotide
  Sense strand starting at position 144 of SEQ ID NO: 1886275
gaucaaucaccucgugcau

SEQ ID NO: 2398333 - RNA, 19 nt, Artificial Sequence
  Description of Artificial Sequence: Synthetic oligonucleotide
  Antisense strand to SEQ ID NO: 2398332
augcacgaggugauugauc

SEQ ID NO: 2398334 - RNA, 19 nt, Artificial Sequence
  Description of Artificial Sequence: Synthetic oligonucleotide
  Sense strand starting at position 401 of SEQ ID NO: 1886275
cuuaucuuccacggacaca

SEQ ID NO: 2398335 - RNA, 19 nt, Artificial Sequence
  Description of Artificial Sequence: Synthetic oligonucleotide
  Antisense strand to SEQ ID NO: 2398334
uguguccguggaagauaag

SEQ ID NO: 2398336 - RNA, 19 nt, Artificial Sequence
  Description of Artificial Sequence: Synthetic oligonucleotide
  Sense strand starting at position 420 of SEQ ID NO: 1886275
ugugaugagagccauguga

SEQ ID NO: 2398337 - RNA, 19 nt, Artificial Sequence
  Description of Artificial Sequence: Synthetic oligonucleotide
  Antisense strand to SEQ ID NO: 2398336
ucacauggcucucaucaca

SEQ ID NO: 2398338 - RNA, 19 nt, Artificial Sequence
  Description of Artificial Sequence: Synthetic oligonucleotide
  Sense strand starting at position 422 of SEQ ID NO: 1886275
ugaugagagccaugugaaa

SEQ ID NO: 2398339 - RNA, 19 nt, Artificial Sequence
  Description of Artificial Sequence: Synthetic oligonucleotide
  Antisense strand to SEQ ID NO: 2398338
uuucacauggcucucauca

SEQ ID NO: 2398340 - RNA, 19 nt, Artificial Sequence
  Description of Artificial Sequence: Synthetic oligonucleotide
  Sense strand starting at position 424 of SEQ ID NO: 1886275
augagagccaugugaaaua

SEQ ID NO: 2398341 - RNA, 19 nt, Artificial Sequence
  Description of Artificial Sequence: Synthetic oligonucleotide
  Antisense strand to SEQ ID NO: 2398340
uauuucacauggcucucau

SEQ ID NO: 2398342 - RNA, 19 nt, Artificial Sequence
  Description of Artificial Sequence: Synthetic oligonucleotide
  Sense strand starting at position 513 of SEQ ID NO: 1886275
guucauugggcuugggaua

SEQ ID NO: 2398343 - RNA, 19 nt, Artificial Sequence
  Description of Artificial Sequence: Synthetic oligonucleotide
  Antisense strand to SEQ ID NO: 2398342
uaucccaagcccaaugaac

SEQ ID NO: 2398344 - RNA, 19 nt, Artificial Sequence
  Description of Artificial Sequence: Synthetic oligonucleotide
  Sense strand starting at position 639 of SEQ ID NO: 1886275
ggucauuagccaggucaug

SEQ ID NO: 2398345 - RNA, 19 nt, Artificial Sequence
  Description of Artificial Sequence: Synthetic oligonucleotide
  Antisense strand to SEQ ID NO: 2398344
caugaccuggcuaaugacc

SEQ ID NO: 2398346 - RNA, 19 nt, Artificial Sequence
  Description of Artificial Sequence: Synthetic oligonucleotide
  Sense strand starting at position 757 of SEQ ID NO: 1886275
cuaagcaugcacuggaaau

SEQ ID NO: 2398347 - RNA, 19 nt, Artificial Sequence
  Description of Artificial Sequence: Synthetic oligonucleotide
  Antisense strand to SEQ ID NO: 2398346
auuuccagugcaugcuuag

SEQ ID NO: 2398348 - RNA, 19 nt, Artificial Sequence
  Description of Artificial Sequence: Synthetic oligonucleotide
  Sense strand starting at position 771 of SEQ ID NO: 1886275
gaaaucacagcuugaguca

SEQ ID NO: 2398349 - RNA, 19 nt, Artificial Sequence
  Description of Artificial Sequence: Synthetic oligonucleotide
  Antisense strand to SEQ ID NO: 2398348
ugacucaagcugugauuuc

SEQ ID NO: 2398350 - RNA, 19 nt, Artificial Sequence
  Description of Artificial Sequence: Synthetic oligonucleotide
  Sense strand starting at position 778 of SEQ ID NO: 1886275
cagcuugagucacaugcuu

SEQ ID NO: 2398351 - RNA, 19 nt, Artificial Sequence
  Description of Artificial Sequence: Synthetic oligonucleotide
  Antisense strand to SEQ ID NO: 2398350
aagcaugugacucaagcug

SEQ ID NO: 2398352 - RNA, 19 nt, Artificial Sequence
  Description of Artificial Sequence: Synthetic oligonucleotide
  Sense strand starting at position 821 of SEQ ID NO: 1886275
cccgcauaucuccgacaca

SEQ ID NO: 2398353 - RNA, 19 nt, Artificial Sequence
  Description of Artificial Sequence: Synthetic oligonucleotide
  Antisense strand to SEQ ID NO: 2398352
ugugucggagauaugcggg

SEQ ID NO: 2398354 - RNA, 19 nt, Artificial Sequence
  Description of Artificial Sequence: Synthetic oligonucleotide
  Sense strand starting at position 824 of SEQ ID NO: 1886275
gcauaucuccgacacacuu

SEQ ID NO: 2398355 - RNA, 19 nt, Artificial Sequence
  Description of Artificial Sequence: Synthetic oligonucleotide
  Antisense strand to SEQ ID NO: 2398354
aagugugucggagauaugc

SEQ ID NO: 2398356 - RNA, 19 nt, Artificial Sequence
  Description of Artificial Sequence: Synthetic oligonucleotide
  Sense strand starting at position 840 of SEQ ID NO: 1886275
cuugaacaaucaggagaca

SEQ ID NO: 2398357 - RNA, 19 nt, Artificial Sequence
  Description of Artificial Sequence: Synthetic oligonucleotide
  Antisense strand to SEQ ID NO: 2398356
ugucuccugauuguucaag

SEQ ID NO: 2398358 - RNA, 19 nt, Artificial Sequence
  Description of Artificial Sequence: Synthetic oligonucleotide
  Sense strand starting at position 947 of SEQ ID NO: 1886275
uaggaaaggucccucgaca

SEQ ID NO: 2398359 - RNA, 19 nt, Artificial Sequence
  Description of Artificial Sequence: Synthetic oligonucleotide
  Antisense strand to SEQ ID NO: 2398358
ugucgagggaccuuuccua

SEQ ID NO: 2398360 - RNA, 19 nt, Artificial Sequence
  Description of Artificial Sequence: Synthetic oligonucleotide
  Sense strand starting at position 997 of SEQ ID NO: 1886275
uaugacgcuugaucucaga

SEQ ID NO: 2398361 - RNA, 19 nt, Artificial Sequence
  Description of Artificial Sequence: Synthetic oligonucleotide
  Antisense strand to SEQ ID NO: 2398360
ucugagaucaagcgucaua

SEQ ID NO: 2398362 - RNA, 19 nt, Artificial Sequence
  Description of Artificial Sequence: Synthetic oligonucleotide
  Sense strand starting at position 1000 of SEQ ID NO: 1886275
gacgcuugaucucagagau

SEQ ID NO: 2398363 - RNA, 19 nt, Artificial Sequence
  Description of Artificial Sequence: Synthetic oligonucleotide
  Antisense strand to SEQ ID NO: 2398362
aucucugagaucaagcguc

SEQ ID NO: 2398364 - RNA, 19 nt, Artificial Sequence
  Description of Artificial Sequence: Synthetic oligonucleotide
  Sense strand starting at position 1019 of SEQ ID NO: 1886275
aggguaaucuccagcggga

SEQ ID NO: 2398365 - RNA, 19 nt, Artificial Sequence
  Description of Artificial Sequence: Synthetic oligonucleotide
  Antisense strand to SEQ ID NO: 2398364
ucccgcuggagauuacccu

SEQ ID NO: 2398366 - RNA, 19 nt, Artificial Sequence
  Description of Artificial Sequence: Synthetic oligonucleotide
  Sense strand starting at position 1021 of SEQ ID NO: 1886275
gguaaucuccagcgggaug

SEQ ID NO: 2398367 - RNA, 19 nt, Artificial Sequence
  Description of Artificial Sequence: Synthetic oligonucleotide
  Antisense strand to SEQ ID NO: 2398366
caucccgcuggagauuacc

SEQ ID NO: 2398368 - RNA, 19 nt, Artificial Sequence
  Description of Artificial Sequence: Synthetic oligonucleotide
  Sense strand starting at position 1107 of SEQ ID NO: 1886275
agagcucugccuugacuca

SEQ ID NO: 2398369 - RNA, 19 nt, Artificial Sequence
  Description of Artificial Sequence: Synthetic oligonucleotide
  Antisense strand to SEQ ID NO: 2398368
ugagucaaggcagagcucu

SEQ ID NO: 2398370 - RNA, 19 nt, Artificial Sequence
  Description of Artificial Sequence: Synthetic oligonucleotide
  Sense strand starting at position 1171 of SEQ ID NO: 1886275
acuggaauggcccauuacu

SEQ ID NO: 2398371 - RNA, 19 nt, Artificial Sequence
  Description of Artificial Sequence: Synthetic oligonucleotide
  Antisense strand to SEQ ID NO: 2398370
aguaaugggccauuccagu

SEQ ID NO: 2398372 - RNA, 19 nt, Artificial Sequence
  Description of Artificial Sequence: Synthetic oligonucleotide
  Sense strand starting at position 1458 of SEQ ID NO: 1886275
guauccuccuugggucuaa

SEQ ID NO: 2398373 - RNA, 19 nt, Artificial Sequence
  Description of Artificial Sequence: Synthetic oligonucleotide
  Antisense strand to SEQ ID NO: 2398372
uuagacccaaggaggauac

SEQ ID NO: 2398374 - RNA, 19 nt, Artificial Sequence
  Description of Artificial Sequence: Synthetic oligonucleotide
  Sense strand starting at position 1508 of SEQ ID NO: 1886275
gucucucccaggugggaau

SEQ ID NO: 2398375 - RNA, 19 nt, Artificial Sequence
  Description of Artificial Sequence: Synthetic oligonucleotide
  Antisense strand to SEQ ID NO: 2398374
auucccaccugggagagac

SEQ ID NO: 2398376 - RNA, 19 nt, Artificial Sequence
  Description of Artificial Sequence: Synthetic oligonucleotide
  Sense strand starting at position 1889 of SEQ ID NO: 1886275
agugucuucuuccaacaua

SEQ ID NO: 2398377 - RNA, 19 nt, Artificial Sequence
  Description of Artificial Sequence: Synthetic oligonucleotide
  Antisense strand to SEQ ID NO: 2398376
uauguuggaagaagacacu

SEQ ID NO: 2398378 - RNA, 19 nt, Artificial Sequence
  Description of Artificial Sequence: Synthetic oligonucleotide
  Sense strand starting at position 2225 of SEQ ID NO: 1886275
gggccucacguaugagcaa

SEQ ID NO: 2398379 - RNA, 19 nt, Artificial Sequence
  Description of Artificial Sequence: Synthetic oligonucleotide
  Antisense strand to SEQ ID NO: 2398378
uugcucauacgugaggccc

SEQ ID NO: 2398380 - RNA, 19 nt, Artificial Sequence
  Description of Artificial Sequence: Synthetic oligonucleotide
  Sense strand starting at position 2259 of SEQ ID NO: 1886275
gggauacccacgugaugga

SEQ ID NO: 2398381 - RNA, 19 nt, Artificial Sequence
  Description of Artificial Sequence: Synthetic oligonucleotide
  Antisense strand to SEQ ID NO: 2398380
uccaucacguggguauccc

SEQ ID NO: 2398382 - RNA, 19 nt, Artificial Sequence
  Description of Artificial Sequence: Synthetic oligonucleotide
  Sense strand starting at position 2377 of SEQ ID NO: 1886275
gcaagaugccugggcuguu

SEQ ID NO: 2398383 - RNA, 19 nt, Artificial Sequence
  Description of Artificial Sequence: Synthetic oligonucleotide
  Antisense strand to SEQ ID NO: 2398382
aacagcccaggcaucuugc

SEQ ID NO: 2398384 - RNA, 19 nt, Artificial Sequence
  Description of Artificial Sequence: Synthetic oligonucleotide
  Sense strand starting at position 2664 of SEQ ID NO: 1886275
ggguccucaucuugcguua

SEQ ID NO: 2398385 - RNA, 19 nt, Artificial Sequence
  Description of Artificial Sequence: Synthetic oligonucleotide
  Antisense strand to SEQ ID NO: 2398384
uaacgcaagaugaggaccc

SEQ ID NO: 2398386 - RNA, 19 nt, Artificial Sequence
  Description of Artificial Sequence: Synthetic oligonucleotide
  Sense strand starting at position 2666 of SEQ ID NO: 1886275
guccucaucuugcguuaca

SEQ ID NO: 2398387 - RNA, 19 nt, Artificial Sequence
  Description of Artificial Sequence: Synthetic oligonucleotide
  Antisense strand to SEQ ID NO: 2398386
uguaacgcaagaugaggac

SEQ ID NO: 2398388 - RNA, 19 nt, Artificial Sequence
  Description of Artificial Sequence: Synthetic oligonucleotide
  Sense strand starting at position 2703 of SEQ ID NO: 1886275
aggccacacuuggucaaua

SEQ ID NO: 2398389 - RNA, 19 nt, Artificial Sequence
  Description of Artificial Sequence: Synthetic oligonucleotide
  Antisense strand to SEQ ID NO: 2398388
uauugaccaaguguggccu

SEQ ID NO: 2398390 - RNA, 19 nt, Artificial Sequence
  Description of Artificial Sequence: Synthetic oligonucleotide
  Sense strand starting at position 2704 of SEQ ID NO: 1886275
ggccacacuuggucaauaa

SEQ ID NO: 2398391 - RNA, 19 nt, Artificial Sequence
  Description of Artificial Sequence: Synthetic oligonucleotide
  Antisense strand to SEQ ID NO: 2398390
uuauugaccaaguguggcc

SEQ ID NO: 2398392 - RNA, 19 nt, Artificial Sequence
  Description of Artificial Sequence: Synthetic oligonucleotide
  Sense strand starting at position 3237 of SEQ ID NO: 1886275
ugaccagccuuccgaguuu

SEQ ID NO: 2398393 - RNA, 19 nt, Artificial Sequence
  Description of Artificial Sequence: Synthetic oligonucleotide
  Antisense strand to SEQ ID NO: 2398392
aaacucggaaggcugguca

SEQ ID NO: 2398394 - RNA, 19 nt, Artificial Sequence
  Description of Artificial Sequence: Synthetic oligonucleotide
  Sense strand starting at position 3268 of SEQ ID NO: 1886275
gcgcuauguugggcugaag

SEQ ID NO: 2398395 - RNA, 19 nt, Artificial Sequence
  Description of Artificial Sequence: Synthetic oligonucleotide
  Antisense strand to SEQ ID NO: 2398394
cuucagcccaacauagcgc

SEQ ID NO: 2398396 - RNA, 19 nt, Artificial Sequence
  Description of Artificial Sequence: Synthetic oligonucleotide
  Sense strand starting at position 3328 of SEQ ID NO: 1886275
ucaagaaaugcgugcuccu

SEQ ID NO: 2398397 - RNA, 19 nt, Artificial Sequence
  Description of Artificial Sequence: Synthetic oligonucleotide
  Antisense strand to SEQ ID NO: 2398396
aggagcacgcauuucuuga

SEQ ID NO: 2398398 - RNA, 19 nt, Artificial Sequence
  Description of Artificial Sequence: Synthetic oligonucleotide
  Sense strand starting at position 3337 of SEQ ID NO: 1886275
gcgugcuccuaggaucaga

SEQ ID NO: 2398399 - RNA, 19 nt, Artificial Sequence
  Description of Artificial Sequence: Synthetic oligonucleotide
  Antisense strand to SEQ ID NO: 2398398
ucugauccuaggagcacgc

SEQ ID NO: 2398400 - RNA, 19 nt, Artificial Sequence
  Description of Artificial Sequence: Synthetic oligonucleotide
  Sense strand starting at position 404 of SEQ ID NO: 1886276
gggauacccaugugaugga

SEQ ID NO: 2398401 - RNA, 19 nt, Artificial Sequence
  Description of Artificial Sequence: Synthetic oligonucleotide
  Antisense strand to SEQ ID NO: 2398400
uccaucacauggguauccc

SEQ ID NO: 2398402 - RNA, 19 nt, Artificial Sequence
  Description of Artificial Sequence: Synthetic oligonucleotide
  Sense strand starting at position 838 of SEQ ID NO: 1886276
ggucccacuuggucaauaa

SEQ ID NO: 2398403 - RNA, 19 nt, Artificial Sequence
  Description of Artificial Sequence: Synthetic oligonucleotide
  Antisense strand to SEQ ID NO: 2398402
uuauugaccaagugggacc

SEQ ID NO: 2398404 - RNA, 19 nt, Artificial Sequence
  Description of Artificial Sequence: Synthetic oligonucleotide
  Sense strand starting at position 1381 of SEQ ID NO: 1886276
cgcugaguuucagcuggga

SEQ ID NO: 2398405 - RNA, 19 nt, Artificial Sequence
  Description of Artificial Sequence: Synthetic oligonucleotide
  Antisense strand to SEQ ID NO: 2398404
ucccagcugaaacucagcg

SEQ ID NO: 2398406 - RNA, 19 nt, Artificial Sequence
  Description of Artificial Sequence: Synthetic oligonucleotide
  Sense strand starting at position 1402 of SEQ ID NO: 1886276
ugcucuauguugggcugaa

SEQ ID NO: 2398407 - RNA, 19 nt, Artificial Sequence
  Description of Artificial Sequence: Synthetic oligonucleotide
  Antisense strand to SEQ ID NO: 2398406
uucagcccaacauagagca

SEQ ID NO: 2398408 - RNA, 19 nt, Artificial Sequence
  Description of Artificial Sequence: Synthetic oligonucleotide
  Sense strand starting at position 1403 of SEQ ID NO: 1886276
gcucuauguugggcugaag

SEQ ID NO: 2398409 - RNA, 19 nt, Artificial Sequence
  Description of Artificial Sequence: Synthetic oligonucleotide
  Antisense strand to SEQ ID NO: 2398408
cuucagcccaacauagagc

SEQ ID NO: 2398410 - RNA, 19 nt, Artificial Sequence
  Description of Artificial Sequence: Synthetic oligonucleotide
  Sense strand starting at position 1472 of SEQ ID NO: 1886276
gcaugcuccuagggucaga

SEQ ID NO: 2398411 - RNA, 19 nt, Artificial Sequence
  Description of Artificial Sequence: Synthetic oligonucleotide
  Antisense strand to SEQ ID NO: 2398410
ucugacccuaggagcaugc

SEQ ID NO: 2398412 - RNA, 19 nt, Artificial Sequence
  Description of Artificial Sequence: Synthetic oligonucleotide
  Sense strand starting at position 2011 of SEQ ID NO: 1886276
gaucaaucaccucgugcau

SEQ ID NO: 2398413 - RNA, 19 nt, Artificial Sequence
  Description of Artificial Sequence: Synthetic oligonucleotide
  Antisense strand to SEQ ID NO: 2398412
augcacgaggugauugauc

SEQ ID NO: 2398414 - RNA, 19 nt, Artificial Sequence
  Description of Artificial Sequence: Synthetic oligonucleotide
  Sense strand starting at position 2268 of SEQ ID NO: 1886276
cuuaucuuccacggacaca

SEQ ID NO: 2398415 - RNA, 19 nt, Artificial Sequence
  Description of Artificial Sequence: Synthetic oligonucleotide
  Antisense strand to SEQ ID NO: 2398414
uguguccguggaagauaag

SEQ ID NO: 2398416 - RNA, 19 nt, Artificial Sequence
  Description of Artificial Sequence: Synthetic oligonucleotide
  Sense strand starting at position 2287 of SEQ ID NO: 1886276
ugugaugagagccauguga

SEQ ID NO: 2398417 - RNA, 19 nt, Artificial Sequence
  Description of Artificial Sequence: Synthetic oligonucleotide
  Antisense strand to SEQ ID NO: 2398416
ucacauggcucucaucaca

SEQ ID NO: 2398418 - RNA, 19 nt, Artificial Sequence
  Description of Artificial Sequence: Synthetic oligonucleotide
  Sense strand starting at position 2289 of SEQ ID NO: 1886276
ugaugagagccaugugaaa

SEQ ID NO: 2398419 - RNA, 19 nt, Artificial Sequence
  Description of Artificial Sequence: Synthetic oligonucleotide
  Antisense strand to SEQ ID NO: 2398418
uuucacauggcucucauca

SEQ ID NO: 2398420 - RNA, 19 nt, Artificial Sequence
  Description of Artificial Sequence: Synthetic oligonucleotide
  Sense strand starting at position 2291 of SEQ ID NO: 1886276
augagagccaugugaaaua

SEQ ID NO: 2398421 - RNA, 19 nt, Artificial Sequence
  Description of Artificial Sequence: Synthetic oligonucleotide
  Antisense strand to SEQ ID NO: 2398420
uauuucacauggcucucau

SEQ ID NO: 2398422 - RNA, 19 nt, Artificial Sequence
  Description of Artificial Sequence: Synthetic oligonucleotide
  Sense strand starting at position 2380 of SEQ ID NO: 1886276
guucauugggcuugggaua

SEQ ID NO: 2398423 - RNA, 19 nt, Artificial Sequence
  Description of Artificial Sequence: Synthetic oligonucleotide
  Antisense strand to SEQ ID NO: 2398422
uaucccaagcccaaugaac

SEQ ID NO: 2398424 - RNA, 19 nt, Artificial Sequence
  Description of Artificial Sequence: Synthetic oligonucleotide
  Sense strand starting at position 2506 of SEQ ID NO: 1886276
ggucauuagccaggucaug

SEQ ID NO: 2398425 - RNA, 19 nt, Artificial Sequence
  Description of Artificial Sequence: Synthetic oligonucleotide
  Antisense strand to SEQ ID NO: 2398424
caugaccuggcuaaugacc

SEQ ID NO: 2398426 - RNA, 19 nt, Artificial Sequence
  Description of Artificial Sequence: Synthetic oligonucleotide
  Sense strand starting at position 2624 of SEQ ID NO: 1886276
cuaagcaugcacuggaaau

SEQ ID NO: 2398427 - RNA, 19 nt, Artificial Sequence
  Description of Artificial Sequence: Synthetic oligonucleotide
  Antisense strand to SEQ ID NO: 2398426
auuuccagugcaugcuuag

SEQ ID NO: 2398428 - RNA, 19 nt, Artificial Sequence
  Description of Artificial Sequence: Synthetic oligonucleotide
  Sense strand starting at position 2638 of SEQ ID NO: 1886276
gaaaucacagcuugaguca

SEQ ID NO: 2398429 - RNA, 19 nt, Artificial Sequence
  Description of Artificial Sequence: Synthetic oligonucleotide
  Antisense strand to SEQ ID NO: 2398428
ugacucaagcugugauuuc

SEQ ID NO: 2398430 - RNA, 19 nt, Artificial Sequence
  Description of Artificial Sequence: Synthetic oligonucleotide
  Sense strand starting at position 2645 of SEQ ID NO: 1886276
cagcuugagucacaugcuu

SEQ ID NO: 2398431 - RNA, 19 nt, Artificial Sequence
  Description of Artificial Sequence: Synthetic oligonucleotide
  Antisense strand to SEQ ID NO: 2398430
aagcaugugacucaagcug

SEQ ID NO: 2398432 - RNA, 19 nt, Artificial Sequence
  Description of Artificial Sequence: Synthetic oligonucleotide
  Sense strand starting at position 2688 of SEQ ID NO: 1886276
cccgcauaucuccgacaca

SEQ ID NO: 2398433 - RNA, 19 nt, Artificial Sequence
  Description of Artificial Sequence: Synthetic oligonucleotide
  Antisense strand to SEQ ID NO: 2398432
ugugucggagauaugcggg

SEQ ID NO: 2398434 - RNA, 19 nt, Artificial Sequence
  Description of Artificial Sequence: Synthetic oligonucleotide
  Sense strand starting at position 2691 of SEQ ID NO: 1886276
gcauaucuccgacacacuu

SEQ ID NO: 2398435 - RNA, 19 nt, Artificial Sequence
  Description of Artificial Sequence: Synthetic oligonucleotide
  Antisense strand to SEQ ID NO: 2398434
aagugugucggagauaugc

SEQ ID NO: 2398436 - RNA, 19 nt, Artificial Sequence
  Description of Artificial Sequence: Synthetic oligonucleotide
  Sense strand starting at position 2707 of SEQ ID NO: 1886276
cuugaacaaucaggagaca

SEQ ID NO: 2398437 - RNA, 19 nt, Artificial Sequence
  Description of Artificial Sequence: Synthetic oligonucleotide
  Antisense strand to SEQ ID NO: 2398436
ugucuccugauuguucaag

SEQ ID NO: 2398438 - RNA, 19 nt, Artificial Sequence
  Description of Artificial Sequence: Synthetic oligonucleotide
  Sense strand starting at position 2814 of SEQ ID NO: 1886276
uaggaaaggucccucgaca

SEQ ID NO: 2398439 - RNA, 19 nt, Artificial Sequence
  Description of Artificial Sequence: Synthetic oligonucleotide
  Antisense strand to SEQ ID NO: 2398438
ugucgagggaccuuuccua

SEQ ID NO: 2398440 - RNA, 19 nt, Artificial Sequence
  Description of Artificial Sequence: Synthetic oligonucleotide
  Sense strand starting at position 2864 of SEQ ID NO: 1886276
uaugacgcuugaucucaga

SEQ ID NO: 2398441 - RNA, 19 nt, Artificial Sequence
  Description of Artificial Sequence: Synthetic oligonucleotide
  Antisense strand to SEQ ID NO: 2398440
ucugagaucaagcgucaua

SEQ ID NO: 2398442 - RNA, 19 nt, Artificial Sequence
  Description of Artificial Sequence: Synthetic oligonucleotide
  Sense strand starting at position 2867 of SEQ ID NO: 1886276
gacgcuugaucucagagau

SEQ ID NO: 2398443 - RNA, 19 nt, Artificial Sequence
  Description of Artificial Sequence: Synthetic oligonucleotide
  Antisense strand to SEQ ID NO: 2398442
aucucugagaucaagcguc

SEQ ID NO: 2398444 - RNA, 19 nt, Artificial Sequence
  Description of Artificial Sequence: Synthetic oligonucleotide
  Sense strand starting at position 2886 of SEQ ID NO: 1886276
aggguaaucuccagcggga

SEQ ID NO: 2398445 - RNA, 19 nt, Artificial Sequence
  Description of Artificial Sequence: Synthetic oligonucleotide
  Antisense strand to SEQ ID NO: 2398444
ucccgcuggagauuacccu

SEQ ID NO: 2398446 - RNA, 19 nt, Artificial Sequence
  Description of Artificial Sequence: Synthetic oligonucleotide
  Sense strand starting at position 2888 of SEQ ID NO: 1886276
gguaaucuccagcgggaug

SEQ ID NO: 2398447 - RNA, 19 nt, Artificial Sequence
  Description of Artificial Sequence: Synthetic oligonucleotide
  Antisense strand to SEQ ID NO: 2398446
caucccgcuggagauuacc

SEQ ID NO: 2398448 - RNA, 19 nt, Artificial Sequence
  Description of Artificial Sequence: Synthetic oligonucleotide
  Sense strand starting at position 2974 of SEQ ID NO: 1886276
agagcucugccuugacuca

SEQ ID NO: 2398449 - RNA, 19 nt, Artificial Sequence
  Description of Artificial Sequence: Synthetic oligonucleotide
  Antisense strand to SEQ ID NO: 2398448
ugagucaaggcagagcucu

SEQ ID NO: 2398450 - RNA, 19 nt, Artificial Sequence
  Description of Artificial Sequence: Synthetic oligonucleotide
  Sense strand starting at position 3038 of SEQ ID NO: 1886276
acuggaauggcccauuacu

SEQ ID NO: 2398451 - RNA, 19 nt, Artificial Sequence
  Description of Artificial Sequence: Synthetic oligonucleotide
  Antisense strand to SEQ ID NO: 2398450
aguaaugggccauuccagu

SEQ ID NO: 2398452 - RNA, 19 nt, Artificial Sequence
  Description of Artificial Sequence: Synthetic oligonucleotide
  Sense strand starting at position 3325 of SEQ ID NO: 1886276
guauccuccuugggucuaa

SEQ ID NO: 2398453 - RNA, 19 nt, Artificial Sequence
  Description of Artificial Sequence: Synthetic oligonucleotide
  Antisense strand to SEQ ID NO: 2398452
uuagacccaaggaggauac

SEQ ID NO: 2398454 - RNA, 19 nt, Artificial Sequence
  Description of Artificial Sequence: Synthetic oligonucleotide
  Sense strand starting at position 3375 of SEQ ID NO: 1886276
gucucucccaggugggaau

SEQ ID NO: 2398455 - RNA, 19 nt, Artificial Sequence
  Description of Artificial Sequence: Synthetic oligonucleotide
  Antisense strand to SEQ ID NO: 2398454
auucccaccugggagagac

SEQ ID NO: 2398456 - RNA, 19 nt, Artificial Sequence
  Description of Artificial Sequence: Synthetic oligonucleotide
  Sense strand starting at position 3756 of SEQ ID NO: 1886276
agugucuucuuccaacaua

SEQ ID NO: 2398457 - RNA, 19 nt, Artificial Sequence
  Description of Artificial Sequence: Synthetic oligonucleotide
  Antisense strand to SEQ ID NO: 2398456
uauguuggaagaagacacu

SEQ ID NO: 2398458 - RNA, 19 nt, Artificial Sequence
  Description of Artificial Sequence: Synthetic oligonucleotide
  Sense strand starting at position 305 of SEQ ID NO: 1886277
uggucauuuacgcgaggaa

SEQ ID NO: 2398459 - RNA, 19 nt, Artificial Sequence
  Description of Artificial Sequence: Synthetic oligonucleotide
  Antisense strand to SEQ ID NO: 2398458
uuccucgcguaaaugacca

SEQ ID NO: 2398460 - RNA, 19 nt, Artificial Sequence
  Description of Artificial Sequence: Synthetic oligonucleotide
  Sense strand starting at position 362 of SEQ ID NO: 1886277
gucacaggguucgagcaaa

SEQ ID NO: 2398461 - RNA, 19 nt, Artificial Sequence
  Description of Artificial Sequence: Synthetic oligonucleotide
  Antisense strand to SEQ ID NO: 2398460
uuugcucgaacccugugac

SEQ ID NO: 2398462 - RNA, 19 nt, Artificial Sequence
  Description of Artificial Sequence: Synthetic oligonucleotide
  Sense strand starting at position 444 of SEQ ID NO: 1886277
gcucgaaucugggcugcau

SEQ ID NO: 2398463 - RNA, 19 nt, Artificial Sequence
  Description of Artificial Sequence: Synthetic oligonucleotide
  Antisense strand to SEQ ID NO: 2398462
augcagcccagauucgagc

SEQ ID NO: 2398464 - RNA, 19 nt, Artificial Sequence
  Description of Artificial Sequence: Synthetic oligonucleotide
  Sense strand starting at position 791 of SEQ ID NO: 1886277
ucagaaguagccugggcau

SEQ ID NO: 2398465 - RNA, 19 nt, Artificial Sequence
  Description of Artificial Sequence: Synthetic oligonucleotide
  Antisense strand to SEQ ID NO: 2398464
augcccaggcuacuucuga

SEQ ID NO: 2398466 - RNA, 19 nt, Artificial Sequence
  Description of Artificial Sequence: Synthetic oligonucleotide
  Sense strand starting at position 806 of SEQ ID NO: 1886277
gcaucaaauugccaggaca

SEQ ID NO: 2398467 - RNA, 19 nt, Artificial Sequence
  Description of Artificial Sequence: Synthetic oligonucleotide
  Antisense strand to SEQ ID NO: 2398466
uguccuggcaauuugaugc

SEQ ID NO: 2398468 - RNA, 19 nt, Artificial Sequence
  Description of Artificial Sequence: Synthetic oligonucleotide
  Sense strand starting at position 874 of SEQ ID NO: 1886277
cuccacuuccgguagggau

SEQ ID NO: 2398469 - RNA, 19 nt, Artificial Sequence
  Description of Artificial Sequence: Synthetic oligonucleotide
  Antisense strand to SEQ ID NO: 2398468
aucccuaccggaaguggag

SEQ ID NO: 2398470 - RNA, 19 nt, Artificial Sequence
  Description of Artificial Sequence: Synthetic oligonucleotide
  Sense strand starting at position 933 of SEQ ID NO: 1886277
ccacgauucccagggccaa

SEQ ID NO: 2398471 - RNA, 19 nt, Artificial Sequence
  Description of Artificial Sequence: Synthetic oligonucleotide
  Antisense strand to SEQ ID NO: 2398470
uuggcccugggaaucgugg

SEQ ID NO: 2398472 - RNA, 19 nt, Artificial Sequence
  Description of Artificial Sequence: Synthetic oligonucleotide
  Sense strand starting at position 934 of SEQ ID NO: 1886277
cacgauucccagggccaaa

SEQ ID NO: 2398473 - RNA, 19 nt, Artificial Sequence
  Description of Artificial Sequence: Synthetic oligonucleotide
  Antisense strand to SEQ ID NO: 2398472
uuuggcccugggaaucgug

SEQ ID NO: 2398474 - RNA, 19 nt, Artificial Sequence
  Description of Artificial Sequence: Synthetic oligonucleotide
  Sense strand starting at position 1035 of SEQ ID NO: 1886277
gggauagcccauugcucaa

SEQ ID NO: 2398475 - RNA, 19 nt, Artificial Sequence
  Description of Artificial Sequence: Synthetic oligonucleotide
  Antisense strand to SEQ ID NO: 2398474
uugagcaaugggcuauccc

SEQ ID NO: 2398476 - RNA, 19 nt, Artificial Sequence
  Description of Artificial Sequence: Synthetic oligonucleotide
  Sense strand starting at position 1289 of SEQ ID NO: 1886277
gucaauaaguccugugcga

SEQ ID NO: 2398477 - RNA, 19 nt, Artificial Sequence
  Description of Artificial Sequence: Synthetic oligonucleotide
  Antisense strand to SEQ ID NO: 2398476
ucgcacaggacuuauugac

SEQ ID NO: 2398478 - RNA, 19 nt, Artificial Sequence
  Description of Artificial Sequence: Synthetic oligonucleotide
  Sense strand starting at position 1291 of SEQ ID NO: 1886277
caauaaguccugugcgauc

SEQ ID NO: 2398479 - RNA, 19 nt, Artificial Sequence
  Description of Artificial Sequence: Synthetic oligonucleotide
  Antisense strand to SEQ ID NO: 2398478
gaucgcacaggacuuauug

SEQ ID NO: 2398480 - RNA, 19 nt, Artificial Sequence
  Description of Artificial Sequence: Synthetic oligonucleotide
  Sense strand starting at position 1300 of SEQ ID NO: 1886277
cugugcgauccuuaaaucu

SEQ ID NO: 2398481 - RNA, 19 nt, Artificial Sequence
  Description of Artificial Sequence: Synthetic oligonucleotide
  Antisense strand to SEQ ID NO: 2398480
agauuuaaggaucgcacag

SEQ ID NO: 2398482 - RNA, 19 nt, Artificial Sequence
  Description of Artificial Sequence: Synthetic oligonucleotide
  Sense strand starting at position 1393 of SEQ ID NO: 1886277
acuguauuggguugaagga

SEQ ID NO: 2398483 - RNA, 19 nt, Artificial Sequence
  Description of Artificial Sequence: Synthetic oligonucleotide
  Antisense strand to SEQ ID NO: 2398482
uccuucaacccaauacagu

SEQ ID NO: 2398484 - RNA, 19 nt, Artificial Sequence
  Description of Artificial Sequence: Synthetic oligonucleotide
  Sense strand starting at position 1460 of SEQ ID NO: 1886277
gcguccuucuugggaucaa

SEQ ID NO: 2398485 - RNA, 19 nt, Artificial Sequence
  Description of Artificial Sequence: Synthetic oligonucleotide
  Antisense strand to SEQ ID NO: 2398484
uugaucccaagaaggacgc

SEQ ID NO: 2398486 - RNA, 19 nt, Artificial Sequence
  Description of Artificial Sequence: Synthetic oligonucleotide
  Sense strand starting at position 1461 of SEQ ID NO: 1886277
cguccuucuugggaucaau

SEQ ID NO: 2398487 - RNA, 19 nt, Artificial Sequence
  Description of Artificial Sequence: Synthetic oligonucleotide
  Antisense strand to SEQ ID NO: 2398486
auugaucccaagaaggacg

SEQ ID NO: 2398488 - RNA, 19 nt, Artificial Sequence
  Description of Artificial Sequence: Synthetic oligonucleotide
  Sense strand starting at position 1471 of SEQ ID NO: 1886277
gggaucaauuaacaaggaa

SEQ ID NO: 2398489 - RNA, 19 nt, Artificial Sequence
  Description of Artificial Sequence: Synthetic oligonucleotide
  Antisense strand to SEQ ID NO: 2398488
uuccuuguuaauugauccc

SEQ ID NO: 2398490 - RNA, 19 nt, Artificial Sequence
  Description of Artificial Sequence: Synthetic oligonucleotide
  Sense strand starting at position 1531 of SEQ ID NO: 1886277
aggucagcucccuaaggaa

SEQ ID NO: 2398491 - RNA, 19 nt, Artificial Sequence
  Description of Artificial Sequence: Synthetic oligonucleotide
  Antisense strand to SEQ ID NO: 2398490
uuccuuagggagcugaccu

SEQ ID NO: 2398492 - RNA, 19 nt, Artificial Sequence
  Description of Artificial Sequence: Synthetic oligonucleotide
  Sense strand starting at position 2207 of SEQ ID NO: 1886277
guggacauguguccaaaug

SEQ ID NO: 2398493 - RNA, 19 nt, Artificial Sequence
  Description of Artificial Sequence: Synthetic oligonucleotide
  Antisense strand to SEQ ID NO: 2398492
cauuuggacacauguccac

SEQ ID NO: 2398494 - RNA, 19 nt, Artificial Sequence
  Description of Artificial Sequence: Synthetic oligonucleotide
  Sense strand starting at position 2312 of SEQ ID NO: 1886277
gugaaacacugauguguca

SEQ ID NO: 2398495 - RNA, 19 nt, Artificial Sequence
  Description of Artificial Sequence: Synthetic oligonucleotide
  Antisense strand to SEQ ID NO: 2398494
ugacacaucaguguuucac

SEQ ID NO: 2398496 - RNA, 19 nt, Artificial Sequence
  Description of Artificial Sequence: Synthetic oligonucleotide
  Sense strand starting at position 2319 of SEQ ID NO: 1886277
acugaugugucauggacac

SEQ ID NO: 2398497 - RNA, 19 nt, Artificial Sequence
  Description of Artificial Sequence: Synthetic oligonucleotide
  Antisense strand to SEQ ID NO: 2398496
guguccaugacacaucagu

SEQ ID NO: 2398498 - RNA, 19 nt, Artificial Sequence
  Description of Artificial Sequence: Synthetic oligonucleotide
  Sense strand starting at position 2321 of SEQ ID NO: 1886277
ugaugugucauggacacag

SEQ ID NO: 2398499 - RNA, 19 nt, Artificial Sequence
  Description of Artificial Sequence: Synthetic oligonucleotide
  Antisense strand to SEQ ID NO: 2398498
cuguguccaugacacauca

SEQ ID NO: 2398500 - RNA, 19 nt, Artificial Sequence
  Description of Artificial Sequence: Synthetic oligonucleotide
  Sense strand starting at position 2670 of SEQ ID NO: 1886277
ccucguguguucucugaua

SEQ ID NO: 2398501 - RNA, 19 nt, Artificial Sequence
  Description of Artificial Sequence: Synthetic oligonucleotide
  Antisense strand to SEQ ID NO: 2398500
uaucagagaacacacgagg

SEQ ID NO: 2398502 - RNA, 19 nt, Artificial Sequence
  Description of Artificial Sequence: Synthetic oligonucleotide
  Sense strand starting at position 2672 of SEQ ID NO: 1886277
ucguguguucucugauaug

SEQ ID NO: 2398503 - RNA, 19 nt, Artificial Sequence
  Description of Artificial Sequence: Synthetic oligonucleotide
  Antisense strand to SEQ ID NO: 2398502
cauaucagagaacacacga

SEQ ID NO: 2398504 - RNA, 19 nt, Artificial Sequence
  Description of Artificial Sequence: Synthetic oligonucleotide
  Sense strand starting at position 3051 of SEQ ID NO: 1886277
ugggauggcccauagcuua

SEQ ID NO: 2398505 - RNA, 19 nt, Artificial Sequence
  Description of Artificial Sequence: Synthetic oligonucleotide
  Antisense strand to SEQ ID NO: 2398504
uaagcuaugggccauccca

SEQ ID NO: 2398506 - RNA, 19 nt, Artificial Sequence
  Description of Artificial Sequence: Synthetic oligonucleotide
  Sense strand starting at position 3233 of SEQ ID NO: 1886277
auccuagaggccugacuua

SEQ ID NO: 2398507 - RNA, 19 nt, Artificial Sequence
  Description of Artificial Sequence: Synthetic oligonucleotide
  Antisense strand to SEQ ID NO: 2398506
uaagucaggccucuaggau

SEQ ID NO: 2398508 - RNA, 19 nt, Artificial Sequence
  Description of Artificial Sequence: Synthetic oligonucleotide
  Sense strand starting at position 3245 of SEQ ID NO: 1886277
ugacuuaagcaccgaguuu

SEQ ID NO: 2398509 - RNA, 19 nt, Artificial Sequence
  Description of Artificial Sequence: Synthetic oligonucleotide
  Antisense strand to SEQ ID NO: 2398508
aaacucggugcuuaaguca

SEQ ID NO: 2398510 - RNA, 19 nt, Artificial Sequence
  Description of Artificial Sequence: Synthetic oligonucleotide
  Sense strand starting at position 3356 of SEQ ID NO: 1886277
ggguccgauuccuaaggaa

SEQ ID NO: 2398511 - RNA, 19 nt, Artificial Sequence
  Description of Artificial Sequence: Synthetic oligonucleotide
  Antisense strand to SEQ ID NO: 2398510
uuccuuaggaaucggaccc

SEQ ID NO: 2398512 - RNA, 19 nt, Artificial Sequence
  Description of Artificial Sequence: Synthetic oligonucleotide
  Sense strand starting at position 3411 of SEQ ID NO: 1886277
cgggucaguuccugaggaa

SEQ ID NO: 2398513 - RNA, 19 nt, Artificial Sequence
  Description of Artificial Sequence: Synthetic oligonucleotide
  Antisense strand to SEQ ID NO: 2398512
uuccucaggaacugacccg

SEQ ID NO: 2398514 - RNA, 19 nt, Artificial Sequence
  Description of Artificial Sequence: Synthetic oligonucleotide
  Sense strand starting at position 89 of SEQ ID NO: 1886278
ggauauacucaccacagcu

SEQ ID NO: 2398515 - RNA, 19 nt, Artificial Sequence
  Description of Artificial Sequence: Synthetic oligonucleotide
  Antisense strand to SEQ ID NO: 2398514
agcuguggugaguauaucc

SEQ ID NO: 2398516 - RNA, 19 nt, Artificial Sequence
  Description of Artificial Sequence: Synthetic oligonucleotide
  Sense strand starting at position 295 of SEQ ID NO: 1886278
guaagagauacccacguaa

SEQ ID NO: 2398517 - RNA, 19 nt, Artificial Sequence
  Description of Artificial Sequence: Synthetic oligonucleotide
  Antisense strand to SEQ ID NO: 2398516
uuacguggguaucucuuac

SEQ ID NO: 2398518 - RNA, 19 nt, Artificial Sequence
  Description of Artificial Sequence: Synthetic oligonucleotide
  Sense strand starting at position 297 of SEQ ID NO: 1886278
aagagauacccacguaaug

SEQ ID NO: 2398519 - RNA, 19 nt, Artificial Sequence
  Description of Artificial Sequence: Synthetic oligonucleotide
  Antisense strand to SEQ ID NO: 2398518
cauuacguggguaucucuu

SEQ ID NO: 2398520 - RNA, 19 nt, Artificial Sequence
  Description of Artificial Sequence: Synthetic oligonucleotide
  Sense strand starting at position 333 of SEQ ID NO: 1886278
cgacucaucauggaugcuu

SEQ ID NO: 2398521 - RNA, 19 nt, Artificial Sequence
  Description of Artificial Sequence: Synthetic oligonucleotide
  Antisense strand to SEQ ID NO: 2398520
aagcauccaugaugagucg

SEQ ID NO: 2398522 - RNA, 19 nt, Artificial Sequence
  Description of Artificial Sequence: Synthetic oligonucleotide
  Sense strand starting at position 713 of SEQ ID NO: 1886278
ggugaccacuugucucaga

SEQ ID NO: 2398523 - RNA, 19 nt, Artificial Sequence
  Description of Artificial Sequence: Synthetic oligonucleotide
  Antisense strand to SEQ ID NO: 2398522
ucugagacaaguggucacc

SEQ ID NO: 2398524 - RNA, 19 nt, Artificial Sequence
  Description of Artificial Sequence: Synthetic oligonucleotide
  Sense strand starting at position 714 of SEQ ID NO: 1886278
gugaccacuugucucagaa

SEQ ID NO: 2398525 - RNA, 19 nt, Artificial Sequence
  Description of Artificial Sequence: Synthetic oligonucleotide
  Antisense strand to SEQ ID NO: 2398524
uucugagacaaguggucac

SEQ ID NO: 2398526 - RNA, 19 nt, Artificial Sequence
  Description of Artificial Sequence: Synthetic oligonucleotide
  Sense strand starting at position 716 of SEQ ID NO: 1886278
gaccacuugucucagaaga

SEQ ID NO: 2398527 - RNA, 19 nt, Artificial Sequence
  Description of Artificial Sequence: Synthetic oligonucleotide
  Antisense strand to SEQ ID NO: 2398526
ucuucugagacaagugguc

SEQ ID NO: 2398528 - RNA, 19 nt, Artificial Sequence
  Description of Artificial Sequence: Synthetic oligonucleotide
  Sense strand starting at position 718 of SEQ ID NO: 1886278
ccacuugucucagaagaac

SEQ ID NO: 2398529 - RNA, 19 nt, Artificial Sequence
  Description of Artificial Sequence: Synthetic oligonucleotide
  Antisense strand to SEQ ID NO: 2398528
guucuucugagacaagugg

SEQ ID NO: 2398530 - RNA, 19 nt, Artificial Sequence
  Description of Artificial Sequence: Synthetic oligonucleotide
  Sense strand starting at position 745 of SEQ ID NO: 1886278
gcaaauucccaguauagga

SEQ ID NO: 2398531 - RNA, 19 nt, Artificial Sequence
  Description of Artificial Sequence: Synthetic oligonucleotide
  Antisense strand to SEQ ID NO: 2398530
uccuauacugggaauuugc

SEQ ID NO: 2398532 - RNA, 19 nt, Artificial Sequence
  Description of Artificial Sequence: Synthetic oligonucleotide
  Sense strand starting at position 788 of SEQ ID NO: 1886278
ucagaaugccacuguuaac

SEQ ID NO: 2398533 - RNA, 19 nt, Artificial Sequence
  Description of Artificial Sequence: Synthetic oligonucleotide
  Antisense strand to SEQ ID NO: 2398532
guuaacaguggcauucuga

SEQ ID NO: 2398534 - RNA, 19 nt, Artificial Sequence
  Description of Artificial Sequence: Synthetic oligonucleotide
  Sense strand starting at position 798 of SEQ ID NO: 1886278
acuguuaaccguuacucaa

SEQ ID NO: 2398535 - RNA, 19 nt, Artificial Sequence
  Description of Artificial Sequence: Synthetic oligonucleotide
  Antisense strand to SEQ ID NO: 2398534
uugaguaacgguuaacagu

SEQ ID NO: 2398536 - RNA, 19 nt, Artificial Sequence
  Description of Artificial Sequence: Synthetic oligonucleotide
  Sense strand starting at position 808 of SEQ ID NO: 1886278
guuacucaaacucggagaa

SEQ ID NO: 2398537 - RNA, 19 nt, Artificial Sequence
  Description of Artificial Sequence: Synthetic oligonucleotide
  Antisense strand to SEQ ID NO: 2398536
uucuccgaguuugaguaac

SEQ ID NO: 2398538 - RNA, 19 nt, Artificial Sequence
  Description of Artificial Sequence: Synthetic oligonucleotide
  Sense strand starting at position 809 of SEQ ID NO: 1886278
uuacucaaacucggagaau

SEQ ID NO: 2398539 - RNA, 19 nt, Artificial Sequence
  Description of Artificial Sequence: Synthetic oligonucleotide
  Antisense strand to SEQ ID NO: 2398538
auucuccgaguuugaguaa

SEQ ID NO: 2398540 - RNA, 19 nt, Artificial Sequence
  Description of Artificial Sequence: Synthetic oligonucleotide
  Sense strand starting at position 810 of SEQ ID NO: 1886278
uacucaaacucggagaaug

SEQ ID NO: 2398541 - RNA, 19 nt, Artificial Sequence
  Description of Artificial Sequence: Synthetic oligonucleotide
  Antisense strand to SEQ ID NO: 2398540
cauucuccgaguuugagua

SEQ ID NO: 2398542 - RNA, 19 nt, Artificial Sequence
  Description of Artificial Sequence: Synthetic oligonucleotide
  Sense strand starting at position 822 of SEQ ID NO: 1886278
gagaauggguuacccucaa

SEQ ID NO: 2398543 - RNA, 19 nt, Artificial Sequence
  Description of Artificial Sequence: Synthetic oligonucleotide
  Antisense strand to SEQ ID NO: 2398542
uugaggguaacccauucuc

SEQ ID NO: 2398544 - RNA, 19 nt, Artificial Sequence
  Description of Artificial Sequence: Synthetic oligonucleotide
  Sense strand starting at position 916 of SEQ ID NO: 1886278
ggaucucagccuugacuca

SEQ ID NO: 2398545 - RNA, 19 nt, Artificial Sequence
  Description of Artificial Sequence: Synthetic oligonucleotide
  Antisense strand to SEQ ID NO: 2398544
ugagucaaggcugagaucc

SEQ ID NO: 2398546 - RNA, 19 nt, Artificial Sequence
  Description of Artificial Sequence: Synthetic oligonucleotide
  Sense strand starting at position 1021 of SEQ ID NO: 1886278
ggucacaggugggaugaaa

SEQ ID NO: 2398547 - RNA, 19 nt, Artificial Sequence
  Description of Artificial Sequence: Synthetic oligonucleotide
  Antisense strand to SEQ ID NO: 2398546
uuucaucccaccugugacc

SEQ ID NO: 2398548 - RNA, 19 nt, Artificial Sequence
  Description of Artificial Sequence: Synthetic oligonucleotide
  Sense strand starting at position 1272 of SEQ ID NO: 1886278
aagacauccuccuugggua

SEQ ID NO: 2398549 - RNA, 19 nt, Artificial Sequence
  Description of Artificial Sequence: Synthetic oligonucleotide
  Antisense strand to SEQ ID NO: 2398548
uacccaaggaggaugucuu

SEQ ID NO: 2398550 - RNA, 19 nt, Artificial Sequence
  Description of Artificial Sequence: Synthetic oligonucleotide
  Sense strand starting at position 1273 of SEQ ID NO: 1886278
agacauccuccuuggguaa

SEQ ID NO: 2398551 - RNA, 19 nt, Artificial Sequence
  Description of Artificial Sequence: Synthetic oligonucleotide
  Antisense strand to SEQ ID NO: 2398550
uuacccaaggaggaugucu

SEQ ID NO: 2398552 - RNA, 19 nt, Artificial Sequence
  Description of Artificial Sequence: Synthetic oligonucleotide
  Sense strand starting at position 1275 of SEQ ID NO: 1886278
acauccuccuuggguaaga

SEQ ID NO: 2398553 - RNA, 19 nt, Artificial Sequence
  Description of Artificial Sequence: Synthetic oligonucleotide
  Antisense strand to SEQ ID NO: 2398552
ucuuacccaaggaggaugu

SEQ ID NO: 2398554 - RNA, 19 nt, Artificial Sequence
  Description of Artificial Sequence: Synthetic oligonucleotide
  Sense strand starting at position 1276 of SEQ ID NO: 1886278
cauccuccuuggguaagau

SEQ ID NO: 2398555 - RNA, 19 nt, Artificial Sequence
  Description of Artificial Sequence: Synthetic oligonucleotide
  Antisense strand to SEQ ID NO: 2398554
aucuuacccaaggaggaug

SEQ ID NO: 2398556 - RNA, 19 nt, Artificial Sequence
  Description of Artificial Sequence: Synthetic oligonucleotide
  Sense strand starting at position 1277 of SEQ ID NO: 1886278
auccuccuuggguaagauu

SEQ ID NO: 2398557 - RNA, 19 nt, Artificial Sequence
  Description of Artificial Sequence: Synthetic oligonucleotide
  Antisense strand to SEQ ID NO: 2398556
aaucuuacccaaggaggau

SEQ ID NO: 2398558 - RNA, 19 nt, Artificial Sequence
  Description of Artificial Sequence: Synthetic oligonucleotide
  Sense strand starting at position 1286 of SEQ ID NO: 1886278
ggguaagauucccaaggaa

SEQ ID NO: 2398559 - RNA, 19 nt, Artificial Sequence
  Description of Artificial Sequence: Synthetic oligonucleotide
  Antisense strand to SEQ ID NO: 2398558
uuccuugggaaucuuaccc

SEQ ID NO: 2398560 - RNA, 19 nt, Artificial Sequence
  Description of Artificial Sequence: Synthetic oligonucleotide
  Sense strand starting at position 1483 of SEQ ID NO: 1886278
gaagcuaugcacuguugca

SEQ ID NO: 2398561 - RNA, 19 nt, Artificial Sequence
  Description of Artificial Sequence: Synthetic oligonucleotide
  Antisense strand to SEQ ID NO: 2398560
ugcaacagugcauagcuuc

SEQ ID NO: 2398562 - RNA, 19 nt, Artificial Sequence
  Description of Artificial Sequence: Synthetic oligonucleotide
  Sense strand starting at position 1509 of SEQ ID NO: 1886278
cagucacauggugggaauu

SEQ ID NO: 2398563 - RNA, 19 nt, Artificial Sequence
  Description of Artificial Sequence: Synthetic oligonucleotide
  Antisense strand to SEQ ID NO: 2398562
aauucccaccaugugacug

SEQ ID NO: 2398564 - RNA, 19 nt, Artificial Sequence
  Description of Artificial Sequence: Synthetic oligonucleotide
  Sense strand starting at position 1511 of SEQ ID NO: 1886278
gucacauggugggaauuga

SEQ ID NO: 2398565 - RNA, 19 nt, Artificial Sequence
  Description of Artificial Sequence: Synthetic oligonucleotide
  Antisense strand to SEQ ID NO: 2398564
ucaauucccaccaugugac

SEQ ID NO: 2398566 - RNA, 19 nt, Artificial Sequence
  Description of Artificial Sequence: Synthetic oligonucleotide
  Sense strand starting at position 1886 of SEQ ID NO: 1886278
cccggcauccucugccaaa

SEQ ID NO: 2398567 - RNA, 19 nt, Artificial Sequence
  Description of Artificial Sequence: Synthetic oligonucleotide
  Antisense strand to SEQ ID NO: 2398566
uuuggcagaggaugccggg

SEQ ID NO: 2398568 - RNA, 19 nt, Artificial Sequence
  Description of Artificial Sequence: Synthetic oligonucleotide
  Sense strand starting at position 2162 of SEQ ID NO: 1886278
guggaagucuuccucaagu

SEQ ID NO: 2398569 - RNA, 19 nt, Artificial Sequence
  Description of Artificial Sequence: Synthetic oligonucleotide
  Antisense strand to SEQ ID NO: 2398568
acuugaggaagacuuccac

SEQ ID NO: 2398570 - RNA, 19 nt, Artificial Sequence
  Description of Artificial Sequence: Synthetic oligonucleotide
  Sense strand starting at position 2164 of SEQ ID NO: 1886278
ggaagucuuccucaagucu

SEQ ID NO: 2398571 - RNA, 19 nt, Artificial Sequence
  Description of Artificial Sequence: Synthetic oligonucleotide
  Antisense strand to SEQ ID NO: 2398570
agacuugaggaagacuucc

SEQ ID NO: 2398572 - RNA, 19 nt, Artificial Sequence
  Description of Artificial Sequence: Synthetic oligonucleotide
  Sense strand starting at position 2373 of SEQ ID NO: 1886278
ggucacuggucucagguaa

SEQ ID NO: 2398573 - RNA, 19 nt, Artificial Sequence
  Description of Artificial Sequence: Synthetic oligonucleotide
  Antisense strand to SEQ ID NO: 2398572
uuaccugagaccagugacc

SEQ ID NO: 2398574 - RNA, 19 nt, Artificial Sequence
  Description of Artificial Sequence: Synthetic oligonucleotide
  Sense strand starting at position 2760 of SEQ ID NO: 1886278
guggcucugccagggauaa

SEQ ID NO: 2398575 - RNA, 19 nt, Artificial Sequence
  Description of Artificial Sequence: Synthetic oligonucleotide
  Antisense strand to SEQ ID NO: 2398574
uuaucccuggcagagccac

SEQ ID NO: 2398576 - RNA, 19 nt, Artificial Sequence
  Description of Artificial Sequence: Synthetic oligonucleotide
  Sense strand starting at position 2761 of SEQ ID NO: 1886278
uggcucugccagggauaau

SEQ ID NO: 2398577 - RNA, 19 nt, Artificial Sequence
  Description of Artificial Sequence: Synthetic oligonucleotide
  Antisense strand to SEQ ID NO: 2398576
auuaucccuggcagagcca

SEQ ID NO: 2398578 - RNA, 19 nt, Artificial Sequence
  Description of Artificial Sequence: Synthetic oligonucleotide
  Sense strand starting at position 2762 of SEQ ID NO: 1886278
ggcucugccagggauaaua

SEQ ID NO: 2398579 - RNA, 19 nt, Artificial Sequence
  Description of Artificial Sequence: Synthetic oligonucleotide
  Antisense strand to SEQ ID NO: 2398578
uauuaucccuggcagagcc

SEQ ID NO: 2398580 - RNA, 19 nt, Artificial Sequence
  Description of Artificial Sequence: Synthetic oligonucleotide
  Sense strand starting at position 2812 of SEQ ID NO: 1886278
cuagguucggccuaagugu

SEQ ID NO: 2398581 - RNA, 19 nt, Artificial Sequence
  Description of Artificial Sequence: Synthetic oligonucleotide
  Antisense strand to SEQ ID NO: 2398580
acacuuaggccgaaccuag

SEQ ID NO: 2398582 - RNA, 19 nt, Artificial Sequence
  Description of Artificial Sequence: Synthetic oligonucleotide
  Sense strand starting at position 2955 of SEQ ID NO: 1886278
accagagcucagugcaaga

SEQ ID NO: 2398583 - RNA, 19 nt, Artificial Sequence
  Description of Artificial Sequence: Synthetic oligonucleotide
  Antisense strand to SEQ ID NO: 2398582
ucuugcacugagcucuggu

SEQ ID NO: 2398584 - RNA, 19 nt, Artificial Sequence
  Description of Artificial Sequence: Synthetic oligonucleotide
  Sense strand starting at position 3117 of SEQ ID NO: 1886278
caaccagggccucauguau

SEQ ID NO: 2398585 - RNA, 19 nt, Artificial Sequence
  Description of Artificial Sequence: Synthetic oligonucleotide
  Antisense strand to SEQ ID NO: 2398584
auacaugaggcccugguug

SEQ ID NO: 2398586 - RNA, 19 nt, Artificial Sequence
  Description of Artificial Sequence: Synthetic oligonucleotide
  Sense strand starting at position 3157 of SEQ ID NO: 1886278
gggauacccuuguaaugga

SEQ ID NO: 2398587 - RNA, 19 nt, Artificial Sequence
  Description of Artificial Sequence: Synthetic oligonucleotide
  Antisense strand to SEQ ID NO: 2398586
uccauuacaaggguauccc

SEQ ID NO: 2398588 - RNA, 19 nt, Artificial Sequence
  Description of Artificial Sequence: Synthetic oligonucleotide
  Sense strand starting at position 3171 of SEQ ID NO: 1886278
auggaauccuuacagaaca

SEQ ID NO: 2398589 - RNA, 19 nt, Artificial Sequence
  Description of Artificial Sequence: Synthetic oligonucleotide
  Antisense strand to SEQ ID NO: 2398588
uguucuguaaggauuccau

SEQ ID NO: 2398590 - RNA, 19 nt, Artificial Sequence
  Description of Artificial Sequence: Synthetic oligonucleotide
  Sense strand starting at position 3551 of SEQ ID NO: 1886278
acauucuuucucugaugag

SEQ ID NO: 2398591 - RNA, 19 nt, Artificial Sequence
  Description of Artificial Sequence: Synthetic oligonucleotide
  Antisense strand to SEQ ID NO: 2398590
cucaucagagaaagaaugu

SEQ ID NO: 2398592 - RNA, 19 nt, Artificial Sequence
  Description of Artificial Sequence: Synthetic oligonucleotide
  Sense strand starting at position 3971 of SEQ ID NO: 1886278
gguggcauuccuugaaucu

SEQ ID NO: 2398593 - RNA, 19 nt, Artificial Sequence
  Description of Artificial Sequence: Synthetic oligonucleotide
  Antisense strand to SEQ ID NO: 2398592
agauucaaggaaugccacc

SEQ ID NO: 2398594 - RNA, 19 nt, Artificial Sequence
  Description of Artificial Sequence: Synthetic oligonucleotide
  Sense strand starting at position 259 of SEQ ID NO: 1886279
augcaagucuuccuccagu

SEQ ID NO: 2398595 - RNA, 19 nt, Artificial Sequence
  Description of Artificial Sequence: Synthetic oligonucleotide
  Antisense strand to SEQ ID NO: 2398594
acuggaggaagacuugcau

SEQ ID NO: 2398596 - RNA, 19 nt, Artificial Sequence
  Description of Artificial Sequence: Synthetic oligonucleotide
  Sense strand starting at position 384 of SEQ ID NO: 1886279
ugugaugugauccauguga

SEQ ID NO: 2398597 - RNA, 19 nt, Artificial Sequence
  Description of Artificial Sequence: Synthetic oligonucleotide
  Antisense strand to SEQ ID NO: 2398596
ucacauggaucacaucaca

SEQ ID NO: 2398598 - RNA, 19 nt, Artificial Sequence
  Description of Artificial Sequence: Synthetic oligonucleotide
  Sense strand starting at position 386 of SEQ ID NO: 1886279
ugaugugauccaugugaau

SEQ ID NO: 2398599 - RNA, 19 nt, Artificial Sequence
  Description of Artificial Sequence: Synthetic oligonucleotide
  Antisense strand to SEQ ID NO: 2398598
auucacauggaucacauca

SEQ ID NO: 2398600 - RNA, 19 nt, Artificial Sequence
  Description of Artificial Sequence: Synthetic oligonucleotide
  Sense strand starting at position 397 of SEQ ID NO: 1886279
augugaauuacugagucgu

SEQ ID NO: 2398601 - RNA, 19 nt, Artificial Sequence
  Description of Artificial Sequence: Synthetic oligonucleotide
  Antisense strand to SEQ ID NO: 2398600
acgacucaguaauucacau

SEQ ID NO: 2398602 - RNA, 19 nt, Artificial Sequence
  Description of Artificial Sequence: Synthetic oligonucleotide
  Sense strand starting at position 399 of SEQ ID NO: 1886279
gugaauuacugagucguca

SEQ ID NO: 2398603 - RNA, 19 nt, Artificial Sequence
  Description of Artificial Sequence: Synthetic oligonucleotide
  Antisense strand to SEQ ID NO: 2398602
ugacgacucaguaauucac

SEQ ID NO: 2398604 - RNA, 19 nt, Artificial Sequence
  Description of Artificial Sequence: Synthetic oligonucleotide
  Sense strand starting at position 403 of SEQ ID NO: 1886279
auuacugagucgucacgga

SEQ ID NO: 2398605 - RNA, 19 nt, Artificial Sequence
  Description of Artificial Sequence: Synthetic oligonucleotide
  Antisense strand to SEQ ID NO: 2398604
uccgugacgacucaguaau

SEQ ID NO: 2398606 - RNA, 19 nt, Artificial Sequence
  Description of Artificial Sequence: Synthetic oligonucleotide
  Sense strand starting at position 728 of SEQ ID NO: 1886279
ccaagugugcauuggaaau

SEQ ID NO: 2398607 - RNA, 19 nt, Artificial Sequence
  Description of Artificial Sequence: Synthetic oligonucleotide
  Antisense strand to SEQ ID NO: 2398606
auuuccaaugcacacuugg

SEQ ID NO: 2398608 - RNA, 19 nt, Artificial Sequence
  Description of Artificial Sequence: Synthetic oligonucleotide
  Sense strand starting at position 730 of SEQ ID NO: 1886279
aagugugcauuggaaauca

SEQ ID NO: 2398609 - RNA, 19 nt, Artificial Sequence
  Description of Artificial Sequence: Synthetic oligonucleotide
  Antisense strand to SEQ ID NO: 2398608
ugauuuccaaugcacacuu

SEQ ID NO: 2398610 - RNA, 19 nt, Artificial Sequence
  Description of Artificial Sequence: Synthetic oligonucleotide
  Sense strand starting at position 1365 of SEQ ID NO: 1886279
accagaucaccgcaucuua

SEQ ID NO: 2398611 - RNA, 19 nt, Artificial Sequence
  Description of Artificial Sequence: Synthetic oligonucleotide
  Antisense strand to SEQ ID NO: 2398610
uaagaugcggugaucuggu

SEQ ID NO: 2398612 - RNA, 19 nt, Artificial Sequence
  Description of Artificial Sequence: Synthetic oligonucleotide
  Sense strand starting at position 1461 of SEQ ID NO: 1886279
auggguccuccuuggguua

SEQ ID NO: 2398613 - RNA, 19 nt, Artificial Sequence
  Description of Artificial Sequence: Synthetic oligonucleotide
  Antisense strand to SEQ ID NO: 2398612
uaacccaaggaggacccau

SEQ ID NO: 2398614 - RNA, 19 nt, Artificial Sequence
  Description of Artificial Sequence: Synthetic oligonucleotide
  Sense strand starting at position 1513 of SEQ ID NO: 1886279
uucccucccgggugaaauu

SEQ ID NO: 2398615 - RNA, 19 nt, Artificial Sequence
  Description of Artificial Sequence: Synthetic oligonucleotide
  Antisense strand to SEQ ID NO: 2398614
aauuucacccgggagggaa

SEQ ID NO: 2398616 - RNA, 19 nt, Artificial Sequence
  Description of Artificial Sequence: Synthetic oligonucleotide
  Sense strand starting at position 1591 of SEQ ID NO: 1886279
uggucuggcucaugaccaa

SEQ ID NO: 2398617 - RNA, 19 nt, Artificial Sequence
  Description of Artificial Sequence: Synthetic oligonucleotide
  Antisense strand to SEQ ID NO: 2398616
uuggucaugagccagacca

SEQ ID NO: 2398618 - RNA, 19 nt, Artificial Sequence
  Description of Artificial Sequence: Synthetic oligonucleotide
  Sense strand starting at position 1667 of SEQ ID NO: 1886279
ggcagagcucacugaaaga

SEQ ID NO: 2398619 - RNA, 19 nt, Artificial Sequence
  Description of Artificial Sequence: Synthetic oligonucleotide
  Antisense strand to SEQ ID NO: 2398618
ucuuucagugagcucugcc

SEQ ID NO: 2398620 - RNA, 19 nt, Artificial Sequence
  Description of Artificial Sequence: Synthetic oligonucleotide
  Sense strand starting at position 2045 of SEQ ID NO: 1886279
gccagaugugcucagcaca

SEQ ID NO: 2398621 - RNA, 19 nt, Artificial Sequence
  Description of Artificial Sequence: Synthetic oligonucleotide
  Antisense strand to SEQ ID NO: 2398620
ugugcugagcacaucuggc

SEQ ID NO: 2398622 - RNA, 19 nt, Artificial Sequence
  Description of Artificial Sequence: Synthetic oligonucleotide
  Sense strand starting at position 2136 of SEQ ID NO: 1886279
uggacacugucccaugaaa

SEQ ID NO: 2398623 - RNA, 19 nt, Artificial Sequence
  Description of Artificial Sequence: Synthetic oligonucleotide
  Antisense strand to SEQ ID NO: 2398622
uuucaugggacagugucca

SEQ ID NO: 2398624 - RNA, 19 nt, Artificial Sequence
  Description of Artificial Sequence: Synthetic oligonucleotide
  Sense strand starting at position 2281 of SEQ ID NO: 1886279
cgugaugagauccaugcaa

SEQ ID NO: 2398625 - RNA, 19 nt, Artificial Sequence
  Description of Artificial Sequence: Synthetic oligonucleotide
  Antisense strand to SEQ ID NO: 2398624
uugcauggaucucaucacg

SEQ ID NO: 2398626 - RNA, 19 nt, Artificial Sequence
  Description of Artificial Sequence: Synthetic oligonucleotide
  Sense strand starting at position 2303 of SEQ ID NO: 1886279
auugacuugucaccaaugu

SEQ ID NO: 2398627 - RNA, 19 nt, Artificial Sequence
  Description of Artificial Sequence: Synthetic oligonucleotide
  Antisense strand to SEQ ID NO: 2398626
acauuggugacaagucaau

SEQ ID NO: 2398628 - RNA, 19 nt, Artificial Sequence
  Description of Artificial Sequence: Synthetic oligonucleotide
  Sense strand starting at position 2304 of SEQ ID NO: 1886279
uugacuugucaccaaugua

SEQ ID NO: 2398629 - RNA, 19 nt, Artificial Sequence
  Description of Artificial Sequence: Synthetic oligonucleotide
  Antisense strand to SEQ ID NO: 2398628
uacauuggugacaagucaa

SEQ ID NO: 2398630 - RNA, 19 nt, Artificial Sequence
  Description of Artificial Sequence: Synthetic oligonucleotide
  Sense strand starting at position 2752 of SEQ ID NO: 1886279
uuugcuuggucccaagauc

SEQ ID NO: 2398631 - RNA, 19 nt, Artificial Sequence
  Description of Artificial Sequence: Synthetic oligonucleotide
  Antisense strand to SEQ ID NO: 2398630
gaucuugggaccaagcaaa

SEQ ID NO: 2398632 - RNA, 19 nt, Artificial Sequence
  Description of Artificial Sequence: Synthetic oligonucleotide
  Sense strand starting at position 2816 of SEQ ID NO: 1886279
acaaauucucaguacaggu

SEQ ID NO: 2398633 - RNA, 19 nt, Artificial Sequence
  Description of Artificial Sequence: Synthetic oligonucleotide
  Antisense strand to SEQ ID NO: 2398632
accuguacugagaauuugu

SEQ ID NO: 2398634 - RNA, 19 nt, Artificial Sequence
  Description of Artificial Sequence: Synthetic oligonucleotide
  Sense strand starting at position 3070 of SEQ ID NO: 1886279
ggugcagcauccuugaauc

SEQ ID NO: 2398635 - RNA, 19 nt, Artificial Sequence
  Description of Artificial Sequence: Synthetic oligonucleotide
  Antisense strand to SEQ ID NO: 2398634
gauucaaggaugcugcacc

SEQ ID NO: 2398636 - RNA, 19 nt, Artificial Sequence
  Description of Artificial Sequence: Synthetic oligonucleotide
  Sense strand starting at position 3081 of SEQ ID NO: 1886279
cuugaaucucugcgacuca

SEQ ID NO: 2398637 - RNA, 19 nt, Artificial Sequence
  Description of Artificial Sequence: Synthetic oligonucleotide
  Antisense strand to SEQ ID NO: 2398636
ugagucgcagagauucaag

SEQ ID NO: 2398638 - RNA, 19 nt, Artificial Sequence
  Description of Artificial Sequence: Synthetic oligonucleotide
  Sense strand starting at position 3082 of SEQ ID NO: 1886279
uugaaucucugcgacucaa

SEQ ID NO: 2398639 - RNA, 19 nt, Artificial Sequence
  Description of Artificial Sequence: Synthetic oligonucleotide
  Antisense strand to SEQ ID NO: 2398638
uugagucgcagagauucaa

SEQ ID NO: 2398640 - RNA, 19 nt, Artificial Sequence
  Description of Artificial Sequence: Synthetic oligonucleotide
  Sense strand starting at position 3370 of SEQ ID NO: 1886279
uuggcugucugagacaacu

SEQ ID NO: 2398641 - RNA, 19 nt, Artificial Sequence
  Description of Artificial Sequence: Synthetic oligonucleotide
  Antisense strand to SEQ ID NO: 2398640
aguugucucagacagccaa

SEQ ID NO: 2398642 - RNA, 19 nt, Artificial Sequence
  Description of Artificial Sequence: Synthetic oligonucleotide
  Sense strand starting at position 3885 of SEQ ID NO: 1886279
ggauauggucaucacagcu

SEQ ID NO: 2398643 - RNA, 19 nt, Artificial Sequence
  Description of Artificial Sequence: Synthetic oligonucleotide
  Antisense strand to SEQ ID NO: 2398642
agcugugaugaccauaucc

SEQ ID NO: 2398644 - RNA, 19 nt, Artificial Sequence
  Description of Artificial Sequence: Synthetic oligonucleotide
  Sense strand starting at position 1171 of SEQ ID NO: 1886280
ccauuaagauggcccauua

SEQ ID NO: 2398645 - RNA, 19 nt, Artificial Sequence
  Description of Artificial Sequence: Synthetic oligonucleotide
  Antisense strand to SEQ ID NO: 2398644
uaaugggccaucuuaaugg

SEQ ID NO: 2398646 - RNA, 19 nt, Artificial Sequence
  Description of Artificial Sequence: Synthetic oligonucleotide
  Sense strand starting at position 1288 of SEQ ID NO: 1886280
ggagaacuccagugugagc

SEQ ID NO: 2398647 - RNA, 19 nt, Artificial Sequence
  Description of Artificial Sequence: Synthetic oligonucleotide
  Antisense strand to SEQ ID NO: 2398646
gcucacacuggaguucucc

SEQ ID NO: 2398648 - RNA, 19 nt, Artificial Sequence
  Description of Artificial Sequence: Synthetic oligonucleotide
  Sense strand starting at position 1397 of SEQ ID NO: 1886280
ugcuguauguugggcugaa

SEQ ID NO: 2398649 - RNA, 19 nt, Artificial Sequence
  Description of Artificial Sequence: Synthetic oligonucleotide
  Antisense strand to SEQ ID NO: 2398648
uucagcccaacauacagca

SEQ ID NO: 2398650 - RNA, 19 nt, Artificial Sequence
  Description of Artificial Sequence: Synthetic oligonucleotide
  Sense strand starting at position 1398 of SEQ ID NO: 1886280
gcuguauguugggcugaag

SEQ ID NO: 2398651 - RNA, 19 nt, Artificial Sequence
  Description of Artificial Sequence: Synthetic oligonucleotide
  Antisense strand to SEQ ID NO: 2398650
cuucagcccaacauacagc

SEQ ID NO: 2398652 - RNA, 19 nt, Artificial Sequence
  Description of Artificial Sequence: Synthetic oligonucleotide
  Sense strand starting at position 1401 of SEQ ID NO: 1886280
guauguugggcugaaggaa

SEQ ID NO: 2398653 - RNA, 19 nt, Artificial Sequence
  Description of Artificial Sequence: Synthetic oligonucleotide
  Antisense strand to SEQ ID NO: 2398652
uuccuucagcccaacauac

SEQ ID NO: 2398654 - RNA, 19 nt, Artificial Sequence
  Description of Artificial Sequence: Synthetic oligonucleotide
  Sense strand starting at position 1467 of SEQ ID NO: 1886280
gcgugcuccuagggucaga

SEQ ID NO: 2398655 - RNA, 19 nt, Artificial Sequence
  Description of Artificial Sequence: Synthetic oligonucleotide
  Antisense strand to SEQ ID NO: 2398654
ucugacccuaggagcacgc

SEQ ID NO: 2398656 - RNA, 19 nt, Artificial Sequence
  Description of Artificial Sequence: Synthetic oligonucleotide
  Sense strand starting at position 2257 of SEQ ID NO: 1886280
gggauacccaugugaugga

SEQ ID NO: 2398657 - RNA, 19 nt, Artificial Sequence
  Description of Artificial Sequence: Synthetic oligonucleotide
  Antisense strand to SEQ ID NO: 2398656
uccaucacauggguauccc

SEQ ID NO: 2398658 - RNA, 19 nt, Artificial Sequence
  Description of Artificial Sequence: Synthetic oligonucleotide
  Sense strand starting at position 2691 of SEQ ID NO: 1886280
ggucccacuuggucaauaa

SEQ ID NO: 2398659 - RNA, 19 nt, Artificial Sequence
  Description of Artificial Sequence: Synthetic oligonucleotide
  Antisense strand to SEQ ID NO: 2398658
uuauugaccaagugggacc

SEQ ID NO: 2398660 - RNA, 19 nt, Artificial Sequence
  Description of Artificial Sequence: Synthetic oligonucleotide
  Sense strand starting at position 3234 of SEQ ID NO: 1886280
cgcugaguuucagcuggga

SEQ ID NO: 2398661 - RNA, 19 nt, Artificial Sequence
  Description of Artificial Sequence: Synthetic oligonucleotide
  Antisense strand to SEQ ID NO: 2398660
ucccagcugaaacucagcg

SEQ ID NO: 2398662 - RNA, 19 nt, Artificial Sequence
  Description of Artificial Sequence: Synthetic oligonucleotide
  Sense strand starting at position 3255 of SEQ ID NO: 1886280
ugcucuauguugggcugaa

SEQ ID NO: 2398663 - RNA, 19 nt, Artificial Sequence
  Description of Artificial Sequence: Synthetic oligonucleotide
  Antisense strand to SEQ ID NO: 2398662
uucagcccaacauagagca

SEQ ID NO: 2398664 - RNA, 19 nt, Artificial Sequence
  Description of Artificial Sequence: Synthetic oligonucleotide
  Sense strand starting at position 3256 of SEQ ID NO: 1886280
gcucuauguugggcugaag

SEQ ID NO: 2398665 - RNA, 19 nt, Artificial Sequence
  Description of Artificial Sequence: Synthetic oligonucleotide
  Antisense strand to SEQ ID NO: 2398664
cuucagcccaacauagagc

SEQ ID NO: 2398666 - RNA, 19 nt, Artificial Sequence
  Description of Artificial Sequence: Synthetic oligonucleotide
  Sense strand starting at position 3325 of SEQ ID NO: 1886280
gcaugcuccuagggucaga

SEQ ID NO: 2398667 - RNA, 19 nt, Artificial Sequence
  Description of Artificial Sequence: Synthetic oligonucleotide
  Antisense strand to SEQ ID NO: 2398666
ucugacccuaggagcaugc

SEQ ID NO: 2398668 - RNA, 19 nt, Artificial Sequence
  Description of Artificial Sequence: Synthetic oligonucleotide
  Sense strand starting at position 3864 of SEQ ID NO: 1886280
gaucaaucaccucgugcau

SEQ ID NO: 2398669 - RNA, 19 nt, Artificial Sequence
  Description of Artificial Sequence: Synthetic oligonucleotide
  Antisense strand to SEQ ID NO: 2398668
augcacgaggugauugauc

SEQ ID NO: 2398670 - RNA, 19 nt, Artificial Sequence
  Description of Artificial Sequence: Synthetic oligonucleotide
  Sense strand starting at position 672 of SEQ ID NO: 1886281
gccucacagcuccaugaga

SEQ ID NO: 2398671 - RNA, 19 nt, Artificial Sequence
  Description of Artificial Sequence: Synthetic oligonucleotide
  Antisense strand to SEQ ID NO: 2398670
ucucauggagcugugaggc

SEQ ID NO: 2398672 - RNA, 19 nt, Artificial Sequence
  Description of Artificial Sequence: Synthetic oligonucleotide
  Sense strand starting at position 674 of SEQ ID NO: 1886281
cucacagcuccaugagaag

SEQ ID NO: 2398673 - RNA, 19 nt, Artificial Sequence
  Description of Artificial Sequence: Synthetic oligonucleotide
  Antisense strand to SEQ ID NO: 2398672
cuucucauggagcugugag

SEQ ID NO: 2398674 - RNA, 19 nt, Artificial Sequence
  Description of Artificial Sequence: Synthetic oligonucleotide
  Sense strand starting at position 746 of SEQ ID NO: 1886281
augggauccacguggaaca

SEQ ID NO: 2398675 - RNA, 19 nt, Artificial Sequence
  Description of Artificial Sequence: Synthetic oligonucleotide
  Antisense strand to SEQ ID NO: 2398674
uguuccacguggaucccau

SEQ ID NO: 2398676 - RNA, 19 nt, Artificial Sequence
  Description of Artificial Sequence: Synthetic oligonucleotide
  Sense strand starting at position 1120 of SEQ ID NO: 1886281
gccacaugcuuucuauggu

SEQ ID NO: 2398677 - RNA, 19 nt, Artificial Sequence
  Description of Artificial Sequence: Synthetic oligonucleotide
  Antisense strand to SEQ ID NO: 2398676
accauagaaagcauguggc

SEQ ID NO: 2398678 - RNA, 19 nt, Artificial Sequence
  Description of Artificial Sequence: Synthetic oligonucleotide
  Sense strand starting at position 1124 of SEQ ID NO: 1886281
caugcuuucuauggugagu

SEQ ID NO: 2398679 - RNA, 19 nt, Artificial Sequence
  Description of Artificial Sequence: Synthetic oligonucleotide
  Antisense strand to SEQ ID NO: 2398678
acucaccauagaaagcaug

SEQ ID NO: 2398680 - RNA, 19 nt, Artificial Sequence
  Description of Artificial Sequence: Synthetic oligonucleotide
  Sense strand starting at position 1212 of SEQ ID NO: 1886281
uggcguauuucucaaugga

SEQ ID NO: 2398681 - RNA, 19 nt, Artificial Sequence
  Description of Artificial Sequence: Synthetic oligonucleotide
  Antisense strand to SEQ ID NO: 2398680
uccauugagaaauacgcca

SEQ ID NO: 2398682 - RNA, 19 nt, Artificial Sequence
  Description of Artificial Sequence: Synthetic oligonucleotide
  Sense strand starting at position 1353 of SEQ ID NO: 1886281
ugagaaauccuccaggccu

SEQ ID NO: 2398683 - RNA, 19 nt, Artificial Sequence
  Description of Artificial Sequence: Synthetic oligonucleotide
  Antisense strand to SEQ ID NO: 2398682
aggccuggaggauuucuca

SEQ ID NO: 2398684 - RNA, 19 nt, Artificial Sequence
  Description of Artificial Sequence: Synthetic oligonucleotide
  Sense strand starting at position 1378 of SEQ ID NO: 1886281
agcacugagucucaacaga

SEQ ID NO: 2398685 - RNA, 19 nt, Artificial Sequence
  Description of Artificial Sequence: Synthetic oligonucleotide
  Antisense strand to SEQ ID NO: 2398684
ucuguugagacucagugcu

SEQ ID NO: 2398686 - RNA, 19 nt, Artificial Sequence
  Description of Artificial Sequence: Synthetic oligonucleotide
  Sense strand starting at position 1443 of SEQ ID NO: 1886281
ccgucacuccugcagagau

SEQ ID NO: 2398687 - RNA, 19 nt, Artificial Sequence
  Description of Artificial Sequence: Synthetic oligonucleotide
  Antisense strand to SEQ ID NO: 2398686
aucucugcaggagugacgg

SEQ ID NO: 2398688 - RNA, 19 nt, Artificial Sequence
  Description of Artificial Sequence: Synthetic oligonucleotide
  Sense strand starting at position 1445 of SEQ ID NO: 1886281
gucacuccugcagagauca

SEQ ID NO: 2398689 - RNA, 19 nt, Artificial Sequence
  Description of Artificial Sequence: Synthetic oligonucleotide
  Antisense strand to SEQ ID NO: 2398688
ugaucucugcaggagugac

SEQ ID NO: 2398690 - RNA, 19 nt, Artificial Sequence
  Description of Artificial Sequence: Synthetic oligonucleotide
  Sense strand starting at position 1453 of SEQ ID NO: 1886281
ugcagagaucagggaaguu

SEQ ID NO: 2398691 - RNA, 19 nt, Artificial Sequence
  Description of Artificial Sequence: Synthetic oligonucleotide
  Antisense strand to SEQ ID NO: 2398690
aacuucccugaucucugca

SEQ ID NO: 2398692 - RNA, 19 nt, Artificial Sequence
  Description of Artificial Sequence: Synthetic oligonucleotide
  Sense strand starting at position 1462 of SEQ ID NO: 1886281
cagggaaguuauccuccuu

SEQ ID NO: 2398693 - RNA, 19 nt, Artificial Sequence
  Description of Artificial Sequence: Synthetic oligonucleotide
  Antisense strand to SEQ ID NO: 2398692
aaggaggauaacuucccug

SEQ ID NO: 2398694 - RNA, 19 nt, Artificial Sequence
  Description of Artificial Sequence: Synthetic oligonucleotide
  Sense strand starting at position 1520 of SEQ ID NO: 1886281
auaccucucugaugggaau

SEQ ID NO: 2398695 - RNA, 19 nt, Artificial Sequence
  Description of Artificial Sequence: Synthetic oligonucleotide
  Antisense strand to SEQ ID NO: 2398694
auucccaucagagagguau

SEQ ID NO: 2398696 - RNA, 19 nt, Artificial Sequence
  Description of Artificial Sequence: Synthetic oligonucleotide
  Sense strand starting at position 1540 of SEQ ID NO: 1886281
cagguugguucccugagga

SEQ ID NO: 2398697 - RNA, 19 nt, Artificial Sequence
  Description of Artificial Sequence: Synthetic oligonucleotide
  Antisense strand to SEQ ID NO: 2398696
uccucagggaaccaaccug

SEQ ID NO: 2398698 - RNA, 19 nt, Artificial Sequence
  Description of Artificial Sequence: Synthetic oligonucleotide
  Sense strand starting at position 1604 of SEQ ID NO: 1886281
cgguucauggcccaugaca

SEQ ID NO: 2398699 - RNA, 19 nt, Artificial Sequence
  Description of Artificial Sequence: Synthetic oligonucleotide
  Antisense strand to SEQ ID NO: 2398698
ugucaugggccaugaaccg

SEQ ID NO: 2398700 - RNA, 19 nt, Artificial Sequence
  Description of Artificial Sequence: Synthetic oligonucleotide
  Sense strand starting at position 2832 of SEQ ID NO: 1886281
ccauuaagauggcccauua

SEQ ID NO: 2398701 - RNA, 19 nt, Artificial Sequence
  Description of Artificial Sequence: Synthetic oligonucleotide
  Antisense strand to SEQ ID NO: 2398700
uaaugggccaucuuaaugg

SEQ ID NO: 2398702 - RNA, 19 nt, Artificial Sequence
  Description of Artificial Sequence: Synthetic oligonucleotide
  Sense strand starting at position 2949 of SEQ ID NO: 1886281
ggagaacuccagugugagc

SEQ ID NO: 2398703 - RNA, 19 nt, Artificial Sequence
  Description of Artificial Sequence: Synthetic oligonucleotide
  Antisense strand to SEQ ID NO: 2398702
gcucacacuggaguucucc

SEQ ID NO: 2398704 - RNA, 19 nt, Artificial Sequence
  Description of Artificial Sequence: Synthetic oligonucleotide
  Sense strand starting at position 3058 of SEQ ID NO: 1886281
ugcuguauguugggcugaa

SEQ ID NO: 2398705 - RNA, 19 nt, Artificial Sequence
  Description of Artificial Sequence: Synthetic oligonucleotide
  Antisense strand to SEQ ID NO: 2398704
uucagcccaacauacagca

SEQ ID NO: 2398706 - RNA, 19 nt, Artificial Sequence
  Description of Artificial Sequence: Synthetic oligonucleotide
  Sense strand starting at position 3059 of SEQ ID NO: 1886281
gcuguauguugggcugaag

SEQ ID NO: 2398707 - RNA, 19 nt, Artificial Sequence
  Description of Artificial Sequence: Synthetic oligonucleotide
  Antisense strand to SEQ ID NO: 2398706
cuucagcccaacauacagc

SEQ ID NO: 2398708 - RNA, 19 nt, Artificial Sequence
  Description of Artificial Sequence: Synthetic oligonucleotide
  Sense strand starting at position 3062 of SEQ ID NO: 1886281
guauguugggcugaaggaa

SEQ ID NO: 2398709 - RNA, 19 nt, Artificial Sequence
  Description of Artificial Sequence: Synthetic oligonucleotide
  Antisense strand to SEQ ID NO: 2398708
uuccuucagcccaacauac

SEQ ID NO: 2398710 - RNA, 19 nt, Artificial Sequence
  Description of Artificial Sequence: Synthetic oligonucleotide
  Sense strand starting at position 3128 of SEQ ID NO: 1886281
gcgugcuccuagggucaga

SEQ ID NO: 2398711 - RNA, 19 nt, Artificial Sequence
  Description of Artificial Sequence: Synthetic oligonucleotide
  Antisense strand to SEQ ID NO: 2398710
ucugacccuaggagcacgc

SEQ ID NO: 2398712 - RNA, 19 nt, Artificial Sequence
  Description of Artificial Sequence: Synthetic oligonucleotide
  Sense strand starting at position 3918 of SEQ ID NO: 1886281
gggauacccaugugaugga

SEQ ID NO: 2398713 - RNA, 19 nt, Artificial Sequence
  Description of Artificial Sequence: Synthetic oligonucleotide
  Antisense strand to SEQ ID NO: 2398712
uccaucacauggguauccc

SEQ ID NO: 2398714 - RNA, 19 nt, Artificial Sequence
  Description of Artificial Sequence: Synthetic oligonucleotide
  Sense strand starting at position 366 of SEQ ID NO: 1886282
caugguuuacuguauauga

SEQ ID NO: 2398715 - RNA, 19 nt, Artificial Sequence
  Description of Artificial Sequence: Synthetic oligonucleotide
  Antisense strand to SEQ ID NO: 2398714
ucauauacaguaaaccaug

SEQ ID NO: 2398716 - RNA, 19 nt, Artificial Sequence
  Description of Artificial Sequence: Synthetic oligonucleotide
  Sense strand starting at position 368 of SEQ ID NO: 1886282
ugguuuacuguauaugaac

SEQ ID NO: 2398717 - RNA, 19 nt, Artificial Sequence
  Description of Artificial Sequence: Synthetic oligonucleotide
  Antisense strand to SEQ ID NO: 2398716
guucauauacaguaaacca

SEQ ID NO: 2398718 - RNA, 19 nt, Artificial Sequence
  Description of Artificial Sequence: Synthetic oligonucleotide
  Sense strand starting at position 508 of SEQ ID NO: 1886282
ugugaacccucaucaaaug

SEQ ID NO: 2398719 - RNA, 19 nt, Artificial Sequence
  Description of Artificial Sequence: Synthetic oligonucleotide
  Antisense strand to SEQ ID NO: 2398718
cauuugaugaggguucaca

SEQ ID NO: 2398720 - RNA, 19 nt, Artificial Sequence
  Description of Artificial Sequence: Synthetic oligonucleotide
  Sense strand starting at position 1280 of SEQ ID NO: 1886282
aaaguuuaccagugaguaa

SEQ ID NO: 2398721 - RNA, 19 nt, Artificial Sequence
  Description of Artificial Sequence: Synthetic oligonucleotide
  Antisense strand to SEQ ID NO: 2398720
uuacucacugguaaacuuu

SEQ ID NO: 2398722 - RNA, 19 nt, Artificial Sequence
  Description of Artificial Sequence: Synthetic oligonucleotide
  Sense strand starting at position 1293 of SEQ ID NO: 1886282
gaguaaacuggccauacca

SEQ ID NO: 2398723 - RNA, 19 nt, Artificial Sequence
  Description of Artificial Sequence: Synthetic oligonucleotide
  Antisense strand to SEQ ID NO: 2398722
ugguauggccaguuuacuc

SEQ ID NO: 2398724 - RNA, 19 nt, Artificial Sequence
  Description of Artificial Sequence: Synthetic oligonucleotide
  Sense strand starting at position 1295 of SEQ ID NO: 1886282
guaaacuggccauaccauu

SEQ ID NO: 2398725 - RNA, 19 nt, Artificial Sequence
  Description of Artificial Sequence: Synthetic oligonucleotide
  Antisense strand to SEQ ID NO: 2398724
aaugguauggccaguuuac

SEQ ID NO: 2398726 - RNA, 19 nt, Artificial Sequence
  Description of Artificial Sequence: Synthetic oligonucleotide
  Sense strand starting at position 1378 of SEQ ID NO: 1886282
aagugaacacugcauguua

SEQ ID NO: 2398727 - RNA, 19 nt, Artificial Sequence
  Description of Artificial Sequence: Synthetic oligonucleotide
  Antisense strand to SEQ ID NO: 2398726
uaacaugcaguguucacuu

SEQ ID NO: 2398728 - RNA, 19 nt, Artificial Sequence
  Description of Artificial Sequence: Synthetic oligonucleotide
  Sense strand starting at position 1401 of SEQ ID NO: 1886282
gggcauuauuaaucaagug

SEQ ID NO: 2398729 - RNA, 19 nt, Artificial Sequence
  Description of Artificial Sequence: Synthetic oligonucleotide
  Antisense strand to SEQ ID NO: 2398728
cacuugauuaauaaugccc

SEQ ID NO: 2398730 - RNA, 19 nt, Artificial Sequence
  Description of Artificial Sequence: Synthetic oligonucleotide
  Sense strand starting at position 1487 of SEQ ID NO: 1886282
uugucauagcaucauauca

SEQ ID NO: 2398731 - RNA, 19 nt, Artificial Sequence
  Description of Artificial Sequence: Synthetic oligonucleotide
  Antisense strand to SEQ ID NO: 2398730
ugauaugaugcuaugacaa

SEQ ID NO: 2398732 - RNA, 19 nt, Artificial Sequence
  Description of Artificial Sequence: Synthetic oligonucleotide
  Sense strand starting at position 1511 of SEQ ID NO: 1886282
gucagucacucacugagaa

SEQ ID NO: 2398733 - RNA, 19 nt, Artificial Sequence
  Description of Artificial Sequence: Synthetic oligonucleotide
  Antisense strand to SEQ ID NO: 2398732
uucucagugagugacugac

SEQ ID NO: 2398734 - RNA, 19 nt, Artificial Sequence
  Description of Artificial Sequence: Synthetic oligonucleotide
  Sense strand starting at position 1591 of SEQ ID NO: 1886282
ucaucacuagccuagugau

SEQ ID NO: 2398735 - RNA, 19 nt, Artificial Sequence
  Description of Artificial Sequence: Synthetic oligonucleotide
  Antisense strand to SEQ ID NO: 2398734
aucacuaggcuagugauga

SEQ ID NO: 2398736 - RNA, 19 nt, Artificial Sequence
  Description of Artificial Sequence: Synthetic oligonucleotide
  Sense strand starting at position 1597 of SEQ ID NO: 1886282
cuagccuagugaucuauuu

SEQ ID NO: 2398737 - RNA, 19 nt, Artificial Sequence
  Description of Artificial Sequence: Synthetic oligonucleotide
  Antisense strand to SEQ ID NO: 2398736
aaauagaucacuaggcuag

SEQ ID NO: 2398738 - RNA, 19 nt, Artificial Sequence
  Description of Artificial Sequence: Synthetic oligonucleotide
  Sense strand starting at position 1933 of SEQ ID NO: 1886282
auguuaagucuccacauaa

SEQ ID NO: 2398739 - RNA, 19 nt, Artificial Sequence
  Description of Artificial Sequence: Synthetic oligonucleotide
  Antisense strand to SEQ ID NO: 2398738
uuauguggagacuuaacau

SEQ ID NO: 2398740 - RNA, 19 nt, Artificial Sequence
  Description of Artificial Sequence: Synthetic oligonucleotide
  Sense strand starting at position 2028 of SEQ ID NO: 1886282
gguuaaucuauggagucau

SEQ ID NO: 2398741 - RNA, 19 nt, Artificial Sequence
  Description of Artificial Sequence: Synthetic oligonucleotide
  Antisense strand to SEQ ID NO: 2398740
augacuccauagauuaacc

SEQ ID NO: 2398742 - RNA, 19 nt, Artificial Sequence
  Description of Artificial Sequence: Synthetic oligonucleotide
  Sense strand starting at position 2101 of SEQ ID NO: 1886282
uguucuaugguggauugga

SEQ ID NO: 2398743 - RNA, 19 nt, Artificial Sequence
  Description of Artificial Sequence: Synthetic oligonucleotide
  Antisense strand to SEQ ID NO: 2398742
uccaauccaccauagaaca

SEQ ID NO: 2398744 - RNA, 19 nt, Artificial Sequence
  Description of Artificial Sequence: Synthetic oligonucleotide
  Sense strand starting at position 2137 of SEQ ID NO: 1886282
gcuggauaucuggauggua

SEQ ID NO: 2398745 - RNA, 19 nt, Artificial Sequence
  Description of Artificial Sequence: Synthetic oligonucleotide
  Antisense strand to SEQ ID NO: 2398744
uaccauccagauauccagc

SEQ ID NO: 2398746 - RNA, 19 nt, Artificial Sequence
  Description of Artificial Sequence: Synthetic oligonucleotide
  Sense strand starting at position 2139 of SEQ ID NO: 1886282
uggauaucuggaugguaua

SEQ ID NO: 2398747 - RNA, 19 nt, Artificial Sequence
  Description of Artificial Sequence: Synthetic oligonucleotide
  Antisense strand to SEQ ID NO: 2398746
uauaccauccagauaucca

SEQ ID NO: 2398748 - RNA, 19 nt, Artificial Sequence
  Description of Artificial Sequence: Synthetic oligonucleotide
  Sense strand starting at position 2311 of SEQ ID NO: 1886282
gaaauagcccauuauguag

SEQ ID NO: 2398749 - RNA, 19 nt, Artificial Sequence
  Description of Artificial Sequence: Synthetic oligonucleotide
  Antisense strand to SEQ ID NO: 2398748
cuacauaaugggcuauuuc

SEQ ID NO: 2398750 - RNA, 19 nt, Artificial Sequence
  Description of Artificial Sequence: Synthetic oligonucleotide
  Sense strand starting at position 2322 of SEQ ID NO: 1886282
uuauguagucuauagacca

SEQ ID NO: 2398751 - RNA, 19 nt, Artificial Sequence
  Description of Artificial Sequence: Synthetic oligonucleotide
  Antisense strand to SEQ ID NO: 2398750
uggucuauagacuacauaa

SEQ ID NO: 2398752 - RNA, 19 nt, Artificial Sequence
  Description of Artificial Sequence: Synthetic oligonucleotide
  Sense strand starting at position 2371 of SEQ ID NO: 1886282
cagguuucuugacuuugga

SEQ ID NO: 2398753 - RNA, 19 nt, Artificial Sequence
  Description of Artificial Sequence: Synthetic oligonucleotide
  Antisense strand to SEQ ID NO: 2398752
uccaaagucaagaaaccug

SEQ ID NO: 2398754 - RNA, 19 nt, Artificial Sequence
  Description of Artificial Sequence: Synthetic oligonucleotide
  Sense strand starting at position 2374 of SEQ ID NO: 1886282
guuucuugacuuuggagaa

SEQ ID NO: 2398755 - RNA, 19 nt, Artificial Sequence
  Description of Artificial Sequence: Synthetic oligonucleotide
  Antisense strand to SEQ ID NO: 2398754
uucuccaaagucaagaaac

SEQ ID NO: 2398756 - RNA, 19 nt, Artificial Sequence
  Description of Artificial Sequence: Synthetic oligonucleotide
  Sense strand starting at position 2420 of SEQ ID NO: 1886282
ggaugaugccacugaucau

SEQ ID NO: 2398757 - RNA, 19 nt, Artificial Sequence
  Description of Artificial Sequence: Synthetic oligonucleotide
  Antisense strand to SEQ ID NO: 2398756
augaucaguggcaucaucc

SEQ ID NO: 2398758 - RNA, 19 nt, Artificial Sequence
  Description of Artificial Sequence: Synthetic oligonucleotide
  Sense strand starting at position 2452 of SEQ ID NO: 1886282
aauugagguggccauauca

SEQ ID NO: 2398759 - RNA, 19 nt, Artificial Sequence
  Description of Artificial Sequence: Synthetic oligonucleotide
  Antisense strand to SEQ ID NO: 2398758
ugauauggccaccucaauu

SEQ ID NO: 2398760 - RNA, 19 nt, Artificial Sequence
  Description of Artificial Sequence: Synthetic oligonucleotide
  Sense strand starting at position 2636 of SEQ ID NO: 1886282
cuagcuuuccaaugggaag

SEQ ID NO: 2398761 - RNA, 19 nt, Artificial Sequence
  Description of Artificial Sequence: Synthetic oligonucleotide
  Antisense strand to SEQ ID NO: 2398760
cuucccauuggaaagcuag

SEQ ID NO: 2398762 - RNA, 19 nt, Artificial Sequence
  Description of Artificial Sequence: Synthetic oligonucleotide
  Sense strand starting at position 2722 of SEQ ID NO: 1886282
gccuuuguugcguuccuaa

SEQ ID NO: 2398763 - RNA, 19 nt, Artificial Sequence
  Description of Artificial Sequence: Synthetic oligonucleotide
  Antisense strand to SEQ ID NO: 2398762
uuaggaacgcaacaaaggc

SEQ ID NO: 2398764 - RNA, 19 nt, Artificial Sequence
  Description of Artificial Sequence: Synthetic oligonucleotide
  Sense strand starting at position 2834 of SEQ ID NO: 1886282
uuguuuaaccuccaaguau

SEQ ID NO: 2398765 - RNA, 19 nt, Artificial Sequence
  Description of Artificial Sequence: Synthetic oligonucleotide
  Antisense strand to SEQ ID NO: 2398764
auacuuggagguuaaacaa

SEQ ID NO: 2398766 - RNA, 19 nt, Artificial Sequence
  Description of Artificial Sequence: Synthetic oligonucleotide
  Sense strand starting at position 2907 of SEQ ID NO: 1886282
guagucugagaacauacuu

SEQ ID NO: 2398767 - RNA, 19 nt, Artificial Sequence
  Description of Artificial Sequence: Synthetic oligonucleotide
  Antisense strand to SEQ ID NO: 2398766
aaguauguucucagacuac

SEQ ID NO: 2398768 - RNA, 19 nt, Artificial Sequence
  Description of Artificial Sequence: Synthetic oligonucleotide
  Sense strand starting at position 3040 of SEQ ID NO: 1886282
gguaaagugguccauagau

SEQ ID NO: 2398769 - RNA, 19 nt, Artificial Sequence
  Description of Artificial Sequence: Synthetic oligonucleotide
  Antisense strand to SEQ ID NO: 2398768
aucuauggaccacuuuacc

SEQ ID NO: 2398770 - RNA, 19 nt, Artificial Sequence
  Description of Artificial Sequence: Synthetic oligonucleotide
  Sense strand starting at position 3042 of SEQ ID NO: 1886282
uaaagugguccauagaugu

SEQ ID NO: 2398771 - RNA, 19 nt, Artificial Sequence
  Description of Artificial Sequence: Synthetic oligonucleotide
  Antisense strand to SEQ ID NO: 2398770
acaucuauggaccacuuua

SEQ ID NO: 2398772 - RNA, 19 nt, Artificial Sequence
  Description of Artificial Sequence: Synthetic oligonucleotide
  Sense strand starting at position 3059 of SEQ ID NO: 1886282
gucaguuacauauaguuga

SEQ ID NO: 2398773 - RNA, 19 nt, Artificial Sequence
  Description of Artificial Sequence: Synthetic oligonucleotide
  Antisense strand to SEQ ID NO: 2398772
ucaacuauauguaacugac

SEQ ID NO: 2398774 - RNA, 19 nt, Artificial Sequence
  Description of Artificial Sequence: Synthetic oligonucleotide
  Sense strand starting at position 3090 of SEQ ID NO: 1886282
uuugaucaugauugaucau

SEQ ID NO: 2398775 - RNA, 19 nt, Artificial Sequence
  Description of Artificial Sequence: Synthetic oligonucleotide
  Antisense strand to SEQ ID NO: 2398774
augaucaaucaugaucaaa

SEQ ID NO: 2398776 - RNA, 19 nt, Artificial Sequence
  Description of Artificial Sequence: Synthetic oligonucleotide
  Sense strand starting at position 3093 of SEQ ID NO: 1886282
gaucaugauugaucauguu

SEQ ID NO: 2398777 - RNA, 19 nt, Artificial Sequence
  Description of Artificial Sequence: Synthetic oligonucleotide
  Antisense strand to SEQ ID NO: 2398776
aacaugaucaaucaugauc

SEQ ID NO: 2398778 - RNA, 19 nt, Artificial Sequence
  Description of Artificial Sequence: Synthetic oligonucleotide
  Sense strand starting at position 3152 of SEQ ID NO: 1886282
cugauagagggaugccaau

SEQ ID NO: 2398779 - RNA, 19 nt, Artificial Sequence
  Description of Artificial Sequence: Synthetic oligonucleotide
  Antisense strand to SEQ ID NO: 2398778
auuggcaucccucuaucag

SEQ ID NO: 2398780 - RNA, 19 nt, Artificial Sequence
  Description of Artificial Sequence: Synthetic oligonucleotide
  Sense strand starting at position 3196 of SEQ ID NO: 1886282
ucuauuucucuaugcaguu

SEQ ID NO: 2398781 - RNA, 19 nt, Artificial Sequence
  Description of Artificial Sequence: Synthetic oligonucleotide
  Antisense strand to SEQ ID NO: 2398780
aacugcauagagaaauaga

SEQ ID NO: 2398782 - RNA, 19 nt, Artificial Sequence
  Description of Artificial Sequence: Synthetic oligonucleotide
  Sense strand starting at position 3403 of SEQ ID NO: 1886282
uaauguuagcaugggauau

SEQ ID NO: 2398783 - RNA, 19 nt, Artificial Sequence
  Description of Artificial Sequence: Synthetic oligonucleotide
  Antisense strand to SEQ ID NO: 2398782
auaucccaugcuaacauua

SEQ ID NO: 2398784 - RNA, 19 nt, Artificial Sequence
  Description of Artificial Sequence: Synthetic oligonucleotide
  Sense strand starting at position 3407 of SEQ ID NO: 1886282
guuagcaugggauaucuuu

SEQ ID NO: 2398785 - RNA, 19 nt, Artificial Sequence
  Description of Artificial Sequence: Synthetic oligonucleotide
  Antisense strand to SEQ ID NO: 2398784
aaagauaucccaugcuaac

SEQ ID NO: 2398786 - RNA, 19 nt, Artificial Sequence
  Description of Artificial Sequence: Synthetic oligonucleotide
  Sense strand starting at position 3415 of SEQ ID NO: 1886282
gggauaucuuucucuauuc

SEQ ID NO: 2398787 - RNA, 19 nt, Artificial Sequence
  Description of Artificial Sequence: Synthetic oligonucleotide
  Antisense strand to SEQ ID NO: 2398786
gaauagagaaagauauccc

SEQ ID NO: 2398788 - RNA, 19 nt, Artificial Sequence
  Description of Artificial Sequence: Synthetic oligonucleotide
  Sense strand starting at position 3735 of SEQ ID NO: 1886282
agauuaguauacucaguau

SEQ ID NO: 2398789 - RNA, 19 nt, Artificial Sequence
  Description of Artificial Sequence: Synthetic oligonucleotide
  Antisense strand to SEQ ID NO: 2398788
auacugaguauacuaaucu

SEQ ID NO: 2398790 - RNA, 19 nt, Artificial Sequence
  Description of Artificial Sequence: Synthetic oligonucleotide
  Sense strand starting at position 3780 of SEQ ID NO: 1886282
ccuuguaauuuguuacuuu

SEQ ID NO: 2398791 - RNA, 19 nt, Artificial Sequence
  Description of Artificial Sequence: Synthetic oligonucleotide
  Antisense strand to SEQ ID NO: 2398790
aaaguaacaaauuacaagg

SEQ ID NO: 2398792 - RNA, 19 nt, Artificial Sequence
  Description of Artificial Sequence: Synthetic oligonucleotide
  Sense strand starting at position 3838 of SEQ ID NO: 1886282
uugagcauuguauaagauu

SEQ ID NO: 2398793 - RNA, 19 nt, Artificial Sequence
  Description of Artificial Sequence: Synthetic oligonucleotide
  Antisense strand to SEQ ID NO: 2398792
aaucuuauacaaugcucaa

SEQ ID NO: 2398794 - RNA, 19 nt, Artificial Sequence
  Description of Artificial Sequence: Synthetic oligonucleotide
  Sense strand starting at position 77 of SEQ ID NO: 1886283
auuauuacgucuccugaag

SEQ ID NO: 2398795 - RNA, 19 nt, Artificial Sequence
  Description of Artificial Sequence: Synthetic oligonucleotide
  Antisense strand to SEQ ID NO: 2398794
cuucaggagacguaauaau

SEQ ID NO: 2398796 - RNA, 19 nt, Artificial Sequence
  Description of Artificial Sequence: Synthetic oligonucleotide
  Sense strand starting at position 111 of SEQ ID NO: 1886283
auauuuacguugucuugua

SEQ ID NO: 2398797 - RNA, 19 nt, Artificial Sequence
  Description of Artificial Sequence: Synthetic oligonucleotide
  Antisense strand to SEQ ID NO: 2398796
uacaagacaacguaaauau

SEQ ID NO: 2398798 - RNA, 19 nt, Artificial Sequence
  Description of Artificial Sequence: Synthetic oligonucleotide
  Sense strand starting at position 112 of SEQ ID NO: 1886283
uauuuacguugucuuguaa

SEQ ID NO: 2398799 - RNA, 19 nt, Artificial Sequence
  Description of Artificial Sequence: Synthetic oligonucleotide
  Antisense strand to SEQ ID NO: 2398798
uuacaagacaacguaaaua

SEQ ID NO: 2398800 - RNA, 19 nt, Artificial Sequence
  Description of Artificial Sequence: Synthetic oligonucleotide
  Sense strand starting at position 255 of SEQ ID NO: 1886283
agucuuuaucuacaggcau

SEQ ID NO: 2398801 - RNA, 19 nt, Artificial Sequence
  Description of Artificial Sequence: Synthetic oligonucleotide
  Antisense strand to SEQ ID NO: 2398800
augccuguagauaaagacu

SEQ ID NO: 2398802 - RNA, 19 nt, Artificial Sequence
  Description of Artificial Sequence: Synthetic oligonucleotide
  Sense strand starting at position 392 of SEQ ID NO: 1886283
gcucuagaccauugacuca

SEQ ID NO: 2398803 - RNA, 19 nt, Artificial Sequence
  Description of Artificial Sequence: Synthetic oligonucleotide
  Antisense strand to SEQ ID NO: 2398802
ugagucaauggucuagagc

SEQ ID NO: 2398804 - RNA, 19 nt, Artificial Sequence
  Description of Artificial Sequence: Synthetic oligonucleotide
  Sense strand starting at position 445 of SEQ ID NO: 1886283
gacacugaguaaucugcga

SEQ ID NO: 2398805 - RNA, 19 nt, Artificial Sequence
  Description of Artificial Sequence: Synthetic oligonucleotide
  Antisense strand to SEQ ID NO: 2398804
ucgcagauuacucaguguc

SEQ ID NO: 2398806 - RNA, 19 nt, Artificial Sequence
  Description of Artificial Sequence: Synthetic oligonucleotide
  Sense strand starting at position 452 of SEQ ID NO: 1886283
aguaaucugcgauauuauc

SEQ ID NO: 2398807 - RNA, 19 nt, Artificial Sequence
  Description of Artificial Sequence: Synthetic oligonucleotide
  Antisense strand to SEQ ID NO: 2398806
gauaauaucgcagauuacu

SEQ ID NO: 2398808 - RNA, 19 nt, Artificial Sequence
  Description of Artificial Sequence: Synthetic oligonucleotide
  Sense strand starting at position 1085 of SEQ ID NO: 1886283
ggguuuauuucuucugagc

SEQ ID NO: 2398809 - RNA, 19 nt, Artificial Sequence
  Description of Artificial Sequence: Synthetic oligonucleotide
  Antisense strand to SEQ ID NO: 2398808
gcucagaagaaauaaaccc

SEQ ID NO: 2398810 - RNA, 19 nt, Artificial Sequence
  Description of Artificial Sequence: Synthetic oligonucleotide
  Sense strand starting at position 1099 of SEQ ID NO: 1886283
ugagcaugugcuuaaccuu

SEQ ID NO: 2398811 - RNA, 19 nt, Artificial Sequence
  Description of Artificial Sequence: Synthetic oligonucleotide
  Antisense strand to SEQ ID NO: 2398810
aagguuaagcacaugcuca

SEQ ID NO: 2398812 - RNA, 19 nt, Artificial Sequence
  Description of Artificial Sequence: Synthetic oligonucleotide
  Sense strand starting at position 1541 of SEQ ID NO: 1886283
agauuaccugaagguguaa

SEQ ID NO: 2398813 - RNA, 19 nt, Artificial Sequence
  Description of Artificial Sequence: Synthetic oligonucleotide
  Antisense strand to SEQ ID NO: 2398812
uuacaccuucagguaaucu

SEQ ID NO: 2398814 - RNA, 19 nt, Artificial Sequence
  Description of Artificial Sequence: Synthetic oligonucleotide
  Sense strand starting at position 1577 of SEQ ID NO: 1886283
gggagucuuccauagcuca

SEQ ID NO: 2398815 - RNA, 19 nt, Artificial Sequence
  Description of Artificial Sequence: Synthetic oligonucleotide
  Antisense strand to SEQ ID NO: 2398814
ugagcuauggaagacuccc

SEQ ID NO: 2398816 - RNA, 19 nt, Artificial Sequence
  Description of Artificial Sequence: Synthetic oligonucleotide
  Sense strand starting at position 1588 of SEQ ID NO: 1886283
auagcucaauguucuagau

SEQ ID NO: 2398817 - RNA, 19 nt, Artificial Sequence
  Description of Artificial Sequence: Synthetic oligonucleotide
  Antisense strand to SEQ ID NO: 2398816
aucuagaacauugagcuau

SEQ ID NO: 2398818 - RNA, 19 nt, Artificial Sequence
  Description of Artificial Sequence: Synthetic oligonucleotide
  Sense strand starting at position 1608 of SEQ ID NO: 1886283
gaauauacacgucgguaaa

SEQ ID NO: 2398819 - RNA, 19 nt, Artificial Sequence
  Description of Artificial Sequence: Synthetic oligonucleotide
  Antisense strand to SEQ ID NO: 2398818
uuuaccgacguguauauuc

SEQ ID NO: 2398820 - RNA, 19 nt, Artificial Sequence
  Description of Artificial Sequence: Synthetic oligonucleotide
  Sense strand starting at position 1762 of SEQ ID NO: 1886283
aagcuuauaggcugagaau

SEQ ID NO: 2398821 - RNA, 19 nt, Artificial Sequence
  Description of Artificial Sequence: Synthetic oligonucleotide
  Antisense strand to SEQ ID NO: 2398820
auucucagccuauaagcuu

SEQ ID NO: 2398822 - RNA, 19 nt, Artificial Sequence
  Description of Artificial Sequence: Synthetic oligonucleotide
  Sense strand starting at position 1763 of SEQ ID NO: 1886283
agcuuauaggcugagaauu

SEQ ID NO: 2398823 - RNA, 19 nt, Artificial Sequence
  Description of Artificial Sequence: Synthetic oligonucleotide
  Antisense strand to SEQ ID NO: 2398822
aauucucagccuauaagcu

SEQ ID NO: 2398824 - RNA, 19 nt, Artificial Sequence
  Description of Artificial Sequence: Synthetic oligonucleotide
  Sense strand starting at position 2201 of SEQ ID NO: 1886283
acaucucaccuguguauau

SEQ ID NO: 2398825 - RNA, 19 nt, Artificial Sequence
  Description of Artificial Sequence: Synthetic oligonucleotide
  Antisense strand to SEQ ID NO: 2398824
auauacacaggugagaugu

SEQ ID NO: 2398826 - RNA, 19 nt, Artificial Sequence
  Description of Artificial Sequence: Synthetic oligonucleotide
  Sense strand starting at position 2212 of SEQ ID NO: 1886283
guguauaugagucauguuu

SEQ ID NO: 2398827 - RNA, 19 nt, Artificial Sequence
  Description of Artificial Sequence: Synthetic oligonucleotide
  Antisense strand to SEQ ID NO: 2398826
aaacaugacucauauacac

SEQ ID NO: 2398828 - RNA, 19 nt, Artificial Sequence
  Description of Artificial Sequence: Synthetic oligonucleotide
  Sense strand starting at position 2218 of SEQ ID NO: 1886283
augagucauguuuguuaau

SEQ ID NO: 2398829 - RNA, 19 nt, Artificial Sequence
  Description of Artificial Sequence: Synthetic oligonucleotide
  Antisense strand to SEQ ID NO: 2398828
auuaacaaacaugacucau

SEQ ID NO: 2398830 - RNA, 19 nt, Artificial Sequence
  Description of Artificial Sequence: Synthetic oligonucleotide
  Sense strand starting at position 2326 of SEQ ID NO: 1886283
gucacuuggcuuuggagaa

SEQ ID NO: 2398831 - RNA, 19 nt, Artificial Sequence
  Description of Artificial Sequence: Synthetic oligonucleotide
  Antisense strand to SEQ ID NO: 2398830
uucuccaaagccaagugac

SEQ ID NO: 2398832 - RNA, 19 nt, Artificial Sequence
  Description of Artificial Sequence: Synthetic oligonucleotide
  Sense strand starting at position 2407 of SEQ ID NO: 1886283
gaagcuguaucaguaacaa

SEQ ID NO: 2398833 - RNA, 19 nt, Artificial Sequence
  Description of Artificial Sequence: Synthetic oligonucleotide
  Antisense strand to SEQ ID NO: 2398832
uuguuacugauacagcuuc

SEQ ID NO: 2398834 - RNA, 19 nt, Artificial Sequence
  Description of Artificial Sequence: Synthetic oligonucleotide
  Sense strand starting at position 2430 of SEQ ID NO: 1886283
caugguuuacuguauauga

SEQ ID NO: 2398835 - RNA, 19 nt, Artificial Sequence
  Description of Artificial Sequence: Synthetic oligonucleotide
  Antisense strand to SEQ ID NO: 2398834
ucauauacaguaaaccaug

SEQ ID NO: 2398836 - RNA, 19 nt, Artificial Sequence
  Description of Artificial Sequence: Synthetic oligonucleotide
  Sense strand starting at position 2432 of SEQ ID NO: 1886283
ugguuuacuguauaugaac

SEQ ID NO: 2398837 - RNA, 19 nt, Artificial Sequence
  Description of Artificial Sequence: Synthetic oligonucleotide
  Antisense strand to SEQ ID NO: 2398836
guucauauacaguaaacca

SEQ ID NO: 2398838 - RNA, 19 nt, Artificial Sequence
  Description of Artificial Sequence: Synthetic oligonucleotide
  Sense strand starting at position 2502 of SEQ ID NO: 1886283
aucaguuaucagggcacau

SEQ ID NO: 2398839 - RNA, 19 nt, Artificial Sequence
  Description of Artificial Sequence: Synthetic oligonucleotide
  Antisense strand to SEQ ID NO: 2398838
augugcccugauaacugau

SEQ ID NO: 2398840 - RNA, 19 nt, Artificial Sequence
  Description of Artificial Sequence: Synthetic oligonucleotide
  Sense strand starting at position 2572 of SEQ ID NO: 1886283
ugugaacccucaucaaaug

SEQ ID NO: 2398841 - RNA, 19 nt, Artificial Sequence
  Description of Artificial Sequence: Synthetic oligonucleotide
  Antisense strand to SEQ ID NO: 2398840
cauuugaugaggguucaca

SEQ ID NO: 2398842 - RNA, 19 nt, Artificial Sequence
  Description of Artificial Sequence: Synthetic oligonucleotide
  Sense strand starting at position 2948 of SEQ ID NO: 1886283
gguagagguuaaucuaugu

SEQ ID NO: 2398843 - RNA, 19 nt, Artificial Sequence
  Description of Artificial Sequence: Synthetic oligonucleotide
  Antisense strand to SEQ ID NO: 2398842
acauagauuaaccucuacc

SEQ ID NO: 2398844 - RNA, 19 nt, Artificial Sequence
  Description of Artificial Sequence: Synthetic oligonucleotide
  Sense strand starting at position 2952 of SEQ ID NO: 1886283
gagguuaaucuaugucuac

SEQ ID NO: 2398845 - RNA, 19 nt, Artificial Sequence
  Description of Artificial Sequence: Synthetic oligonucleotide
  Antisense strand to SEQ ID NO: 2398844
guagacauagauuaaccuc

SEQ ID NO: 2398846 - RNA, 19 nt, Artificial Sequence
  Description of Artificial Sequence: Synthetic oligonucleotide
  Sense strand starting at position 2953 of SEQ ID NO: 1886283
agguuaaucuaugucuacu

SEQ ID NO: 2398847 - RNA, 19 nt, Artificial Sequence
  Description of Artificial Sequence: Synthetic oligonucleotide
  Antisense strand to SEQ ID NO: 2398846
aguagacauagauuaaccu

SEQ ID NO: 2398848 - RNA, 19 nt, Artificial Sequence
  Description of Artificial Sequence: Synthetic oligonucleotide
  Sense strand starting at position 3315 of SEQ ID NO: 1886283
uguccacuggcaugauauu

SEQ ID NO: 2398849 - RNA, 19 nt, Artificial Sequence
  Description of Artificial Sequence: Synthetic oligonucleotide
  Antisense strand to SEQ ID NO: 2398848
aauaucaugccaguggaca

SEQ ID NO: 2398850 - RNA, 19 nt, Artificial Sequence
  Description of Artificial Sequence: Synthetic oligonucleotide
  Sense strand starting at position 3344 of SEQ ID NO: 1886283
aaaguuuaccagugaguaa

SEQ ID NO: 2398851 - RNA, 19 nt, Artificial Sequence
  Description of Artificial Sequence: Synthetic oligonucleotide
  Antisense strand to SEQ ID NO: 2398850
uuacucacugguaaacuuu

SEQ ID NO: 2398852 - RNA, 19 nt, Artificial Sequence
  Description of Artificial Sequence: Synthetic oligonucleotide
  Sense strand starting at position 3357 of SEQ ID NO: 1886283
gaguaaacuggccauacca

SEQ ID NO: 2398853 - RNA, 19 nt, Artificial Sequence
  Description of Artificial Sequence: Synthetic oligonucleotide
  Antisense strand to SEQ ID NO: 2398852
ugguauggccaguuuacuc

SEQ ID NO: 2398854 - RNA, 19 nt, Artificial Sequence
  Description of Artificial Sequence: Synthetic oligonucleotide
  Sense strand starting at position 3359 of SEQ ID NO: 1886283
guaaacuggccauaccauu

SEQ ID NO: 2398855 - RNA, 19 nt, Artificial Sequence
  Description of Artificial Sequence: Synthetic oligonucleotide
  Antisense strand to SEQ ID NO: 2398854
aaugguauggccaguuuac

SEQ ID NO: 2398856 - RNA, 19 nt, Artificial Sequence
  Description of Artificial Sequence: Synthetic oligonucleotide
  Sense strand starting at position 3419 of SEQ ID NO: 1886283
gauguaguuguauauaugu

SEQ ID NO: 2398857 - RNA, 19 nt, Artificial Sequence
  Description of Artificial Sequence: Synthetic oligonucleotide
  Antisense strand to SEQ ID NO: 2398856
acauauauacaacuacauc

SEQ ID NO: 2398858 - RNA, 19 nt, Artificial Sequence
  Description of Artificial Sequence: Synthetic oligonucleotide
  Sense strand starting at position 3442 of SEQ ID NO: 1886283
aagugaacacugcauguua

SEQ ID NO: 2398859 - RNA, 19 nt, Artificial Sequence
  Description of Artificial Sequence: Synthetic oligonucleotide
  Antisense strand to SEQ ID NO: 2398858
uaacaugcaguguucacuu

SEQ ID NO: 2398860 - RNA, 19 nt, Artificial Sequence
  Description of Artificial Sequence: Synthetic oligonucleotide
  Sense strand starting at position 3444 of SEQ ID NO: 1886283
gugaacacugcauguuaga

SEQ ID NO: 2398861 - RNA, 19 nt, Artificial Sequence
  Description of Artificial Sequence: Synthetic oligonucleotide
  Antisense strand to SEQ ID NO: 2398860
ucuaacaugcaguguucac

SEQ ID NO: 2398862 - RNA, 19 nt, Artificial Sequence
  Description of Artificial Sequence: Synthetic oligonucleotide
  Sense strand starting at position 3455 of SEQ ID NO: 1886283
auguuagauugggcauuau

SEQ ID NO: 2398863 - RNA, 19 nt, Artificial Sequence
  Description of Artificial Sequence: Synthetic oligonucleotide
  Antisense strand to SEQ ID NO: 2398862
auaaugcccaaucuaacau

SEQ ID NO: 2398864 - RNA, 19 nt, Artificial Sequence
  Description of Artificial Sequence: Synthetic oligonucleotide
  Sense strand starting at position 3465 of SEQ ID NO: 1886283
gggcauuauuaaucaagug

SEQ ID NO: 2398865 - RNA, 19 nt, Artificial Sequence
  Description of Artificial Sequence: Synthetic oligonucleotide
  Antisense strand to SEQ ID NO: 2398864
cacuugauuaauaaugccc

SEQ ID NO: 2398866 - RNA, 19 nt, Artificial Sequence
  Description of Artificial Sequence: Synthetic oligonucleotide
  Sense strand starting at position 3551 of SEQ ID NO: 1886283
uugucauagcaucauauca

SEQ ID NO: 2398867 - RNA, 19 nt, Artificial Sequence
  Description of Artificial Sequence: Synthetic oligonucleotide
  Antisense strand to SEQ ID NO: 2398866
ugauaugaugcuaugacaa

SEQ ID NO: 2398868 - RNA, 19 nt, Artificial Sequence
  Description of Artificial Sequence: Synthetic oligonucleotide
  Sense strand starting at position 3575 of SEQ ID NO: 1886283
gucagucacucacugagaa

SEQ ID NO: 2398869 - RNA, 19 nt, Artificial Sequence
  Description of Artificial Sequence: Synthetic oligonucleotide
  Antisense strand to SEQ ID NO: 2398868
uucucagugagugacugac

SEQ ID NO: 2398870 - RNA, 19 nt, Artificial Sequence
  Description of Artificial Sequence: Synthetic oligonucleotide
  Sense strand starting at position 3655 of SEQ ID NO: 1886283
ucaucacuagccuagugau

SEQ ID NO: 2398871 - RNA, 19 nt, Artificial Sequence
  Description of Artificial Sequence: Synthetic oligonucleotide
  Antisense strand to SEQ ID NO: 2398870
aucacuaggcuagugauga

SEQ ID NO: 2398872 - RNA, 19 nt, Artificial Sequence
  Description of Artificial Sequence: Synthetic oligonucleotide
  Sense strand starting at position 3661 of SEQ ID NO: 1886283
cuagccuagugaucuauuu

SEQ ID NO: 2398873 - RNA, 19 nt, Artificial Sequence
  Description of Artificial Sequence: Synthetic oligonucleotide
  Antisense strand to SEQ ID NO: 2398872
aaauagaucacuaggcuag

SEQ ID NO: 2398874 - RNA, 19 nt, Artificial Sequence
  Description of Artificial Sequence: Synthetic oligonucleotide
  Sense strand starting at position 187 of SEQ ID NO: 1886284
caaucaaucguagggcaaa

SEQ ID NO: 2398875 - RNA, 19 nt, Artificial Sequence
  Description of Artificial Sequence: Synthetic oligonucleotide
  Antisense strand to SEQ ID NO: 2398874
uuugcccuacgauugauug

SEQ ID NO: 2398876 - RNA, 19 nt, Artificial Sequence
  Description of Artificial Sequence: Synthetic oligonucleotide
  Sense strand starting at position 217 of SEQ ID NO: 1886284
ucucaugaggauugcauca

SEQ ID NO: 2398877 - RNA, 19 nt, Artificial Sequence
  Description of Artificial Sequence: Synthetic oligonucleotide
  Antisense strand to SEQ ID NO: 2398876
ugaugcaauccucaugaga

SEQ ID NO: 2398878 - RNA, 19 nt, Artificial Sequence
  Description of Artificial Sequence: Synthetic oligonucleotide
  Sense strand starting at position 222 of SEQ ID NO: 1886284
ugaggauugcaucacaugu

SEQ ID NO: 2398879 - RNA, 19 nt, Artificial Sequence
  Description of Artificial Sequence: Synthetic oligonucleotide
  Antisense strand to SEQ ID NO: 2398878
acaugugaugcaauccuca

SEQ ID NO: 2398880 - RNA, 19 nt, Artificial Sequence
  Description of Artificial Sequence: Synthetic oligonucleotide
  Sense strand starting at position 239 of SEQ ID NO: 1886284
gugucagucaaucauugag

SEQ ID NO: 2398881 - RNA, 19 nt, Artificial Sequence
  Description of Artificial Sequence: Synthetic oligonucleotide
  Antisense strand to SEQ ID NO: 2398880
cucaaugauugacugacac

SEQ ID NO: 2398882 - RNA, 19 nt, Artificial Sequence
  Description of Artificial Sequence: Synthetic oligonucleotide
  Sense strand starting at position 241 of SEQ ID NO: 1886284
gucagucaaucauugagaa

SEQ ID NO: 2398883 - RNA, 19 nt, Artificial Sequence
  Description of Artificial Sequence: Synthetic oligonucleotide
  Antisense strand to SEQ ID NO: 2398882
uucucaaugauugacugac

SEQ ID NO: 2398884 - RNA, 19 nt, Artificial Sequence
  Description of Artificial Sequence: Synthetic oligonucleotide
  Sense strand starting at position 242 of SEQ ID NO: 1886284
ucagucaaucauugagaag

SEQ ID NO: 2398885 - RNA, 19 nt, Artificial Sequence
  Description of Artificial Sequence: Synthetic oligonucleotide
  Antisense strand to SEQ ID NO: 2398884
cuucucaaugauugacuga

SEQ ID NO: 2398886 - RNA, 19 nt, Artificial Sequence
  Description of Artificial Sequence: Synthetic oligonucleotide
  Sense strand starting at position 567 of SEQ ID NO: 1886284
auaagauuccauugccaga

SEQ ID NO: 2398887 - RNA, 19 nt, Artificial Sequence
  Description of Artificial Sequence: Synthetic oligonucleotide
  Antisense strand to SEQ ID NO: 2398886
ucuggcaauggaaucuuau

SEQ ID NO: 2398888 - RNA, 19 nt, Artificial Sequence
  Description of Artificial Sequence: Synthetic oligonucleotide
  Sense strand starting at position 777 of SEQ ID NO: 1886284
augcuuaccagagaugguu

SEQ ID NO: 2398889 - RNA, 19 nt, Artificial Sequence
  Description of Artificial Sequence: Synthetic oligonucleotide
  Antisense strand to SEQ ID NO: 2398888
aaccaucucugguaagcau

SEQ ID NO: 2398890 - RNA, 19 nt, Artificial Sequence
  Description of Artificial Sequence: Synthetic oligonucleotide
  Sense strand starting at position 785 of SEQ ID NO: 1886284
cagagaugguuuccuuaaa

SEQ ID NO: 2398891 - RNA, 19 nt, Artificial Sequence
  Description of Artificial Sequence: Synthetic oligonucleotide
  Antisense strand to SEQ ID NO: 2398890
uuuaaggaaaccaucucug

SEQ ID NO: 2398892 - RNA, 19 nt, Artificial Sequence
  Description of Artificial Sequence: Synthetic oligonucleotide
  Sense strand starting at position 925 of SEQ ID NO: 1886284
aagaguaggcuauagucaa

SEQ ID NO: 2398893 - RNA, 19 nt, Artificial Sequence
  Description of Artificial Sequence: Synthetic oligonucleotide
  Antisense strand to SEQ ID NO: 2398892
uugacuauagccuacucuu

SEQ ID NO: 2398894 - RNA, 19 nt, Artificial Sequence
  Description of Artificial Sequence: Synthetic oligonucleotide
  Sense strand starting at position 937 of SEQ ID NO: 1886284
uagucaaagggugggauua

SEQ ID NO: 2398895 - RNA, 19 nt, Artificial Sequence
  Description of Artificial Sequence: Synthetic oligonucleotide
  Antisense strand to SEQ ID NO: 2398894
uaaucccacccuuugacua

SEQ ID NO: 2398896 - RNA, 19 nt, Artificial Sequence
  Description of Artificial Sequence: Synthetic oligonucleotide
  Sense strand starting at position 949 of SEQ ID NO: 1886284
gggauuacaucucuuauau

SEQ ID NO: 2398897 - RNA, 19 nt, Artificial Sequence
  Description of Artificial Sequence: Synthetic oligonucleotide
  Antisense strand to SEQ ID NO: 2398896
auauaagagauguaauccc

SEQ ID NO: 2398898 - RNA, 19 nt, Artificial Sequence
  Description of Artificial Sequence: Synthetic oligonucleotide
  Sense strand starting at position 959 of SEQ ID NO: 1886284
cucuuauaugugcaugacu

SEQ ID NO: 2398899 - RNA, 19 nt, Artificial Sequence
  Description of Artificial Sequence: Synthetic oligonucleotide
  Antisense strand to SEQ ID NO: 2398898
agucaugcacauauaagag

SEQ ID NO: 2398900 - RNA, 19 nt, Artificial Sequence
  Description of Artificial Sequence: Synthetic oligonucleotide
  Sense strand starting at position 1001 of SEQ ID NO: 1886284
acaagacugagauguguga

SEQ ID NO: 2398901 - RNA, 19 nt, Artificial Sequence
  Description of Artificial Sequence: Synthetic oligonucleotide
  Antisense strand to SEQ ID NO: 2398900
ucacacaucucagucuugu

SEQ ID NO: 2398902 - RNA, 19 nt, Artificial Sequence
  Description of Artificial Sequence: Synthetic oligonucleotide
  Sense strand starting at position 1003 of SEQ ID NO: 1886284
aagacugagaugugugaua

SEQ ID NO: 2398903 - RNA, 19 nt, Artificial Sequence
  Description of Artificial Sequence: Synthetic oligonucleotide
  Antisense strand to SEQ ID NO: 2398902
uaucacacaucucagucuu

SEQ ID NO: 2398904 - RNA, 19 nt, Artificial Sequence
  Description of Artificial Sequence: Synthetic oligonucleotide
  Sense strand starting at position 1005 of SEQ ID NO: 1886284
gacugagaugugugauacu

SEQ ID NO: 2398905 - RNA, 19 nt, Artificial Sequence
  Description of Artificial Sequence: Synthetic oligonucleotide
  Antisense strand to SEQ ID NO: 2398904
aguaucacacaucucaguc

SEQ ID NO: 2398906 - RNA, 19 nt, Artificial Sequence
  Description of Artificial Sequence: Synthetic oligonucleotide
  Sense strand starting at position 1112 of SEQ ID NO: 1886284
ugaccugguaagggauuau

SEQ ID NO: 2398907 - RNA, 19 nt, Artificial Sequence
  Description of Artificial Sequence: Synthetic oligonucleotide
  Antisense strand to SEQ ID NO: 2398906
auaaucccuuaccagguca

SEQ ID NO: 2398908 - RNA, 19 nt, Artificial Sequence
  Description of Artificial Sequence: Synthetic oligonucleotide
  Sense strand starting at position 1260 of SEQ ID NO: 1886284
ucagacuaccuguauugua

SEQ ID NO: 2398909 - RNA, 19 nt, Artificial Sequence
  Description of Artificial Sequence: Synthetic oligonucleotide
  Antisense strand to SEQ ID NO: 2398908
uacaauacagguagucuga

SEQ ID NO: 2398910 - RNA, 19 nt, Artificial Sequence
  Description of Artificial Sequence: Synthetic oligonucleotide
  Sense strand starting at position 1352 of SEQ ID NO: 1886284
ugaguagugccucaaugau

SEQ ID NO: 2398911 - RNA, 19 nt, Artificial Sequence
  Description of Artificial Sequence: Synthetic oligonucleotide
  Antisense strand to SEQ ID NO: 2398910
aucauugaggcacuacuca

SEQ ID NO: 2398912 - RNA, 19 nt, Artificial Sequence
  Description of Artificial Sequence: Synthetic oligonucleotide
  Sense strand starting at position 1423 of SEQ ID NO: 1886284
aggauugucuauuugugca

SEQ ID NO: 2398913 - RNA, 19 nt, Artificial Sequence
  Description of Artificial Sequence: Synthetic oligonucleotide
  Antisense strand to SEQ ID NO: 2398912
ugcacaaauagacaauccu

SEQ ID NO: 2398914 - RNA, 19 nt, Artificial Sequence
  Description of Artificial Sequence: Synthetic oligonucleotide
  Sense strand starting at position 1425 of SEQ ID NO: 1886284
gauugucuauuugugcaau

SEQ ID NO: 2398915 - RNA, 19 nt, Artificial Sequence
  Description of Artificial Sequence: Synthetic oligonucleotide
  Antisense strand to SEQ ID NO: 2398914
auugcacaaauagacaauc

SEQ ID NO: 2398916 - RNA, 19 nt, Artificial Sequence
  Description of Artificial Sequence: Synthetic oligonucleotide
  Sense strand starting at position 1427 of SEQ ID NO: 1886284
uugucuauuugugcaauca

SEQ ID NO: 2398917 - RNA, 19 nt, Artificial Sequence
  Description of Artificial Sequence: Synthetic oligonucleotide
  Antisense strand to SEQ ID NO: 2398916
ugauugcacaaauagacaa

SEQ ID NO: 2398918 - RNA, 19 nt, Artificial Sequence
  Description of Artificial Sequence: Synthetic oligonucleotide
  Sense strand starting at position 1447 of SEQ ID NO: 1886284
uaaagaguugauugcaaug

SEQ ID NO: 2398919 - RNA, 19 nt, Artificial Sequence
  Description of Artificial Sequence: Synthetic oligonucleotide
  Antisense strand to SEQ ID NO: 2398918
cauugcaaucaacucuuua

SEQ ID NO: 2398920 - RNA, 19 nt, Artificial Sequence
  Description of Artificial Sequence: Synthetic oligonucleotide
  Sense strand starting at position 1452 of SEQ ID NO: 1886284
aguugauugcaaugaauua

SEQ ID NO: 2398921 - RNA, 19 nt, Artificial Sequence
  Description of Artificial Sequence: Synthetic oligonucleotide
  Antisense strand to SEQ ID NO: 2398920
uaauucauugcaaucaacu

SEQ ID NO: 2398922 - RNA, 19 nt, Artificial Sequence
  Description of Artificial Sequence: Synthetic oligonucleotide
  Sense strand starting at position 1555 of SEQ ID NO: 1886284
aucagucacucauuggaaa

SEQ ID NO: 2398923 - RNA, 19 nt, Artificial Sequence
  Description of Artificial Sequence: Synthetic oligonucleotide
  Antisense strand to SEQ ID NO: 2398922
uuuccaaugagugacugau

SEQ ID NO: 2398924 - RNA, 19 nt, Artificial Sequence
  Description of Artificial Sequence: Synthetic oligonucleotide
  Sense strand starting at position 1556 of SEQ ID NO: 1886284
ucagucacucauuggaaag

SEQ ID NO: 2398925 - RNA, 19 nt, Artificial Sequence
  Description of Artificial Sequence: Synthetic oligonucleotide
  Antisense strand to SEQ ID NO: 2398924
cuuuccaaugagugacuga

SEQ ID NO: 2398926 - RNA, 19 nt, Artificial Sequence
  Description of Artificial Sequence: Synthetic oligonucleotide
  Sense strand starting at position 1573 of SEQ ID NO: 1886284
agaauagaucauugcucac

SEQ ID NO: 2398927 - RNA, 19 nt, Artificial Sequence
  Description of Artificial Sequence: Synthetic oligonucleotide
  Antisense strand to SEQ ID NO: 2398926
gugagcaaugaucuauucu

SEQ ID NO: 2398928 - RNA, 19 nt, Artificial Sequence
  Description of Artificial Sequence: Synthetic oligonucleotide
  Sense strand starting at position 1694 of SEQ ID NO: 1886284
auauaauccguguaaugac

SEQ ID NO: 2398929 - RNA, 19 nt, Artificial Sequence
  Description of Artificial Sequence: Synthetic oligonucleotide
  Antisense strand to SEQ ID NO: 2398928
gucauuacacggauuauau

SEQ ID NO: 2398930 - RNA, 19 nt, Artificial Sequence
  Description of Artificial Sequence: Synthetic oligonucleotide
  Sense strand starting at position 1713 of SEQ ID NO: 1886284
acaccucuugcuggaugaa

SEQ ID NO: 2398931 - RNA, 19 nt, Artificial Sequence
  Description of Artificial Sequence: Synthetic oligonucleotide
  Antisense strand to SEQ ID NO: 2398930
uucauccagcaagaggugu

SEQ ID NO: 2398932 - RNA, 19 nt, Artificial Sequence
  Description of Artificial Sequence: Synthetic oligonucleotide
  Sense strand starting at position 1844 of SEQ ID NO: 1886284
gguagaggcaaaugaugua

SEQ ID NO: 2398933 - RNA, 19 nt, Artificial Sequence
  Description of Artificial Sequence: Synthetic oligonucleotide
  Antisense strand to SEQ ID NO: 2398932
uacaucauuugccucuacc

SEQ ID NO: 2398934 - RNA, 19 nt, Artificial Sequence
  Description of Artificial Sequence: Synthetic oligonucleotide
  Sense strand starting at position 2037 of SEQ ID NO: 1886284
auauuuacguugucuugua

SEQ ID NO: 2398935 - RNA, 19 nt, Artificial Sequence
  Description of Artificial Sequence: Synthetic oligonucleotide
  Antisense strand to SEQ ID NO: 2398934
uacaagacaacguaaauau

SEQ ID NO: 2398936 - RNA, 19 nt, Artificial Sequence
  Description of Artificial Sequence: Synthetic oligonucleotide
  Sense strand starting at position 2038 of SEQ ID NO: 1886284
uauuuacguugucuuguaa

SEQ ID NO: 2398937 - RNA, 19 nt, Artificial Sequence
  Description of Artificial Sequence: Synthetic oligonucleotide
  Antisense strand to SEQ ID NO: 2398936
uuacaagacaacguaaaua

SEQ ID NO: 2398938 - RNA, 19 nt, Artificial Sequence
  Description of Artificial Sequence: Synthetic oligonucleotide
  Sense strand starting at position 2181 of SEQ ID NO: 1886284
agucuuuaucuacaggcau

SEQ ID NO: 2398939 - RNA, 19 nt, Artificial Sequence
  Description of Artificial Sequence: Synthetic oligonucleotide
  Antisense strand to SEQ ID NO: 2398938
augccuguagauaaagacu

SEQ ID NO: 2398940 - RNA, 19 nt, Artificial Sequence
  Description of Artificial Sequence: Synthetic oligonucleotide
  Sense strand starting at position 2318 of SEQ ID NO: 1886284
gcucuagaccauugacuca

SEQ ID NO: 2398941 - RNA, 19 nt, Artificial Sequence
  Description of Artificial Sequence: Synthetic oligonucleotide
  Antisense strand to SEQ ID NO: 2398940
ugagucaauggucuagagc

SEQ ID NO: 2398942 - RNA, 19 nt, Artificial Sequence
  Description of Artificial Sequence: Synthetic oligonucleotide
  Sense strand starting at position 2378 of SEQ ID NO: 1886284
aguaaucugcgauauuauc

SEQ ID NO: 2398943 - RNA, 19 nt, Artificial Sequence
  Description of Artificial Sequence: Synthetic oligonucleotide
  Antisense strand to SEQ ID NO: 2398942
gauaauaucgcagauuacu

SEQ ID NO: 2398944 - RNA, 19 nt, Artificial Sequence
  Description of Artificial Sequence: Synthetic oligonucleotide
  Sense strand starting at position 3011 of SEQ ID NO: 1886284
ggguuuauuucuucugagc

SEQ ID NO: 2398945 - RNA, 19 nt, Artificial Sequence
  Description of Artificial Sequence: Synthetic oligonucleotide
  Antisense strand to SEQ ID NO: 2398944
gcucagaagaaauaaaccc

SEQ ID NO: 2398946 - RNA, 19 nt, Artificial Sequence
  Description of Artificial Sequence: Synthetic oligonucleotide
  Sense strand starting at position 3467 of SEQ ID NO: 1886284
agauuaccugaagguguaa

SEQ ID NO: 2398947 - RNA, 19 nt, Artificial Sequence
  Description of Artificial Sequence: Synthetic oligonucleotide
  Antisense strand to SEQ ID NO: 2398946
uuacaccuucagguaaucu

SEQ ID NO: 2398948 - RNA, 19 nt, Artificial Sequence
  Description of Artificial Sequence: Synthetic oligonucleotide
  Sense strand starting at position 3503 of SEQ ID NO: 1886284
gggagucuuccauagcuca

SEQ ID NO: 2398949 - RNA, 19 nt, Artificial Sequence
  Description of Artificial Sequence: Synthetic oligonucleotide
  Antisense strand to SEQ ID NO: 2398948
ugagcuauggaagacuccc

SEQ ID NO: 2398950 - RNA, 19 nt, Artificial Sequence
  Description of Artificial Sequence: Synthetic oligonucleotide
  Sense strand starting at position 3688 of SEQ ID NO: 1886284
aagcuuauaggcugagaau

SEQ ID NO: 2398951 - RNA, 19 nt, Artificial Sequence
  Description of Artificial Sequence: Synthetic oligonucleotide
  Antisense strand to SEQ ID NO: 2398950
auucucagccuauaagcuu

SEQ ID NO: 2398952 - RNA, 19 nt, Artificial Sequence
  Description of Artificial Sequence: Synthetic oligonucleotide
  Sense strand starting at position 3689 of SEQ ID NO: 1886284
agcuuauaggcugagaauu

SEQ ID NO: 2398953 - RNA, 19 nt, Artificial Sequence
  Description of Artificial Sequence: Synthetic oligonucleotide
  Antisense strand to SEQ ID NO: 2398952
aauucucagccuauaagcu

SEQ ID NO: 2398954 - RNA, 19 nt, Artificial Sequence
  Description of Artificial Sequence: Synthetic oligonucleotide
  Sense strand starting at position 23 of SEQ ID NO: 1886285
agaauugauaaguggucuu

SEQ ID NO: 2398955 - RNA, 19 nt, Artificial Sequence
  Description of Artificial Sequence: Synthetic oligonucleotide
  Antisense strand to SEQ ID NO: 2398954
aagaccacuuaucaauucu

SEQ ID NO: 2398956 - RNA, 19 nt, Artificial Sequence
  Description of Artificial Sequence: Synthetic oligonucleotide
  Sense strand starting at position 33 of SEQ ID NO: 1886285
aguggucuucuagaagcua

SEQ ID NO: 2398957 - RNA, 19 nt, Artificial Sequence
  Description of Artificial Sequence: Synthetic oligonucleotide
  Antisense strand to SEQ ID NO: 2398956
uagcuucuagaagaccacu

SEQ ID NO: 2398958 - RNA, 19 nt, Artificial Sequence
  Description of Artificial Sequence: Synthetic oligonucleotide
  Sense strand starting at position 181 of SEQ ID NO: 1886285
aaggucuuauuguugaaac

SEQ ID NO: 2398959 - RNA, 19 nt, Artificial Sequence
  Description of Artificial Sequence: Synthetic oligonucleotide
  Antisense strand to SEQ ID NO: 2398958
guuucaacaauaagaccuu

SEQ ID NO: 2398960 - RNA, 19 nt, Artificial Sequence
  Description of Artificial Sequence: Synthetic oligonucleotide
  Sense strand starting at position 183 of SEQ ID NO: 1886285
ggucuuauuguugaaacaa

SEQ ID NO: 2398961 - RNA, 19 nt, Artificial Sequence
  Description of Artificial Sequence: Synthetic oligonucleotide
  Antisense strand to SEQ ID NO: 2398960
uuguuucaacaauaagacc

SEQ ID NO: 2398962 - RNA, 19 nt, Artificial Sequence
  Description of Artificial Sequence: Synthetic oligonucleotide
  Sense strand starting at position 260 of SEQ ID NO: 1886285
uccuuaaauccugguugaa

SEQ ID NO: 2398963 - RNA, 19 nt, Artificial Sequence
  Description of Artificial Sequence: Synthetic oligonucleotide
  Antisense strand to SEQ ID NO: 2398962
uucaaccaggauuuaagga

SEQ ID NO: 2398964 - RNA, 19 nt, Artificial Sequence
  Description of Artificial Sequence: Synthetic oligonucleotide
  Sense strand starting at position 262 of SEQ ID NO: 1886285
cuuaaauccugguugaaag

SEQ ID NO: 2398965 - RNA, 19 nt, Artificial Sequence
  Description of Artificial Sequence: Synthetic oligonucleotide
  Antisense strand to SEQ ID NO: 2398964
cuuucaaccaggauuuaag

SEQ ID NO: 2398966 - RNA, 19 nt, Artificial Sequence
  Description of Artificial Sequence: Synthetic oligonucleotide
  Sense strand starting at position 263 of SEQ ID NO: 1886285
uuaaauccugguugaaagu

SEQ ID NO: 2398967 - RNA, 19 nt, Artificial Sequence
  Description of Artificial Sequence: Synthetic oligonucleotide
  Antisense strand to SEQ ID NO: 2398966
acuuucaaccaggauuuaa

SEQ ID NO: 2398968 - RNA, 19 nt, Artificial Sequence
  Description of Artificial Sequence: Synthetic oligonucleotide
  Sense strand starting at position 264 of SEQ ID NO: 1886285
uaaauccugguugaaaguu

SEQ ID NO: 2398969 - RNA, 19 nt, Artificial Sequence
  Description of Artificial Sequence: Synthetic oligonucleotide
  Antisense strand to SEQ ID NO: 2398968
aacuuucaaccaggauuua

SEQ ID NO: 2398970 - RNA, 19 nt, Artificial Sequence
  Description of Artificial Sequence: Synthetic oligonucleotide
  Sense strand starting at position 532 of SEQ ID NO: 1886285
cuauacaggucucuugaau

SEQ ID NO: 2398971 - RNA, 19 nt, Artificial Sequence
  Description of Artificial Sequence: Synthetic oligonucleotide
  Antisense strand to SEQ ID NO: 2398970
auucaagagaccuguauag

SEQ ID NO: 2398972 - RNA, 19 nt, Artificial Sequence
  Description of Artificial Sequence: Synthetic oligonucleotide
  Sense strand starting at position 599 of SEQ ID NO: 1886285
aucagucuuguuuacauau

SEQ ID NO: 2398973 - RNA, 19 nt, Artificial Sequence
  Description of Artificial Sequence: Synthetic oligonucleotide
  Antisense strand to SEQ ID NO: 2398972
auauguaaacaagacugau

SEQ ID NO: 2398974 - RNA, 19 nt, Artificial Sequence
  Description of Artificial Sequence: Synthetic oligonucleotide
  Sense strand starting at position 1063 of SEQ ID NO: 1886285
aaucauguggccugaagga

SEQ ID NO: 2398975 - RNA, 19 nt, Artificial Sequence
  Description of Artificial Sequence: Synthetic oligonucleotide
  Antisense strand to SEQ ID NO: 2398974
uccuucaggccacaugauu

SEQ ID NO: 2398976 - RNA, 19 nt, Artificial Sequence
  Description of Artificial Sequence: Synthetic oligonucleotide
  Sense strand starting at position 1099 of SEQ ID NO: 1886285
ucauauaaguguccauaaa

SEQ ID NO: 2398977 - RNA, 19 nt, Artificial Sequence
  Description of Artificial Sequence: Synthetic oligonucleotide
  Antisense strand to SEQ ID NO: 2398976
uuuauggacacuuauauga

SEQ ID NO: 2398978 - RNA, 19 nt, Artificial Sequence
  Description of Artificial Sequence: Synthetic oligonucleotide
  Sense strand starting at position 1175 of SEQ ID NO: 1886285
agccaaagguacuugagaa

SEQ ID NO: 2398979 - RNA, 19 nt, Artificial Sequence
  Description of Artificial Sequence: Synthetic oligonucleotide
  Antisense strand to SEQ ID NO: 2398978
uucucaaguaccuuuggcu

SEQ ID NO: 2398980 - RNA, 19 nt, Artificial Sequence
  Description of Artificial Sequence: Synthetic oligonucleotide
  Sense strand starting at position 1176 of SEQ ID NO: 1886285
gccaaagguacuugagaaa

SEQ ID NO: 2398981 - RNA, 19 nt, Artificial Sequence
  Description of Artificial Sequence: Synthetic oligonucleotide
  Antisense strand to SEQ ID NO: 2398980
uuucucaaguaccuuuggc

SEQ ID NO: 2398982 - RNA, 19 nt, Artificial Sequence
  Description of Artificial Sequence: Synthetic oligonucleotide
  Sense strand starting at position 1488 of SEQ ID NO: 1886285
ugaggauugcaucacaugu

SEQ ID NO: 2398983 - RNA, 19 nt, Artificial Sequence
  Description of Artificial Sequence: Synthetic oligonucleotide
  Antisense strand to SEQ ID NO: 2398982
acaugugaugcaauccuca

SEQ ID NO: 2398984 - RNA, 19 nt, Artificial Sequence
  Description of Artificial Sequence: Synthetic oligonucleotide
  Sense strand starting at position 1507 of SEQ ID NO: 1886285
gucagucaaucauugagaa

SEQ ID NO: 2398985 - RNA, 19 nt, Artificial Sequence
  Description of Artificial Sequence: Synthetic oligonucleotide
  Antisense strand to SEQ ID NO: 2398984
uucucaaugauugacugac

SEQ ID NO: 2398986 - RNA, 19 nt, Artificial Sequence
  Description of Artificial Sequence: Synthetic oligonucleotide
  Sense strand starting at position 1508 of SEQ ID NO: 1886285
ucagucaaucauugagaag

SEQ ID NO: 2398987 - RNA, 19 nt, Artificial Sequence
  Description of Artificial Sequence: Synthetic oligonucleotide
  Antisense strand to SEQ ID NO: 2398986
cuucucaaugauugacuga

SEQ ID NO: 2398988 - RNA, 19 nt, Artificial Sequence
  Description of Artificial Sequence: Synthetic oligonucleotide
  Sense strand starting at position 1833 of SEQ ID NO: 1886285
auaagauuccauugccaga

SEQ ID NO: 2398989 - RNA, 19 nt, Artificial Sequence
  Description of Artificial Sequence: Synthetic oligonucleotide
  Antisense strand to SEQ ID NO: 2398988
ucuggcaauggaaucuuau

SEQ ID NO: 2398990 - RNA, 19 nt, Artificial Sequence
  Description of Artificial Sequence: Synthetic oligonucleotide
  Sense strand starting at position 2043 of SEQ ID NO: 1886285
augcuuaccagagaugguu

SEQ ID NO: 2398991 - RNA, 19 nt, Artificial Sequence
  Description of Artificial Sequence: Synthetic oligonucleotide
  Antisense strand to SEQ ID NO: 2398990
aaccaucucugguaagcau

SEQ ID NO: 2398992 - RNA, 19 nt, Artificial Sequence
  Description of Artificial Sequence: Synthetic oligonucleotide
  Sense strand starting at position 2051 of SEQ ID NO: 1886285
cagagaugguuuccuuaaa

SEQ ID NO: 2398993 - RNA, 19 nt, Artificial Sequence
  Description of Artificial Sequence: Synthetic oligonucleotide
  Antisense strand to SEQ ID NO: 2398992
uuuaaggaaaccaucucug

SEQ ID NO: 2398994 - RNA, 19 nt, Artificial Sequence
  Description of Artificial Sequence: Synthetic oligonucleotide
  Sense strand starting at position 2191 of SEQ ID NO: 1886285
aagaguaggcuauagucaa

SEQ ID NO: 2398995 - RNA, 19 nt, Artificial Sequence
  Description of Artificial Sequence: Synthetic oligonucleotide
  Antisense strand to SEQ ID NO: 2398994
uugacuauagccuacucuu

SEQ ID NO: 2398996 - RNA, 19 nt, Artificial Sequence
  Description of Artificial Sequence: Synthetic oligonucleotide
  Sense strand starting at position 2203 of SEQ ID NO: 1886285
uagucaaagggugggauua

SEQ ID NO: 2398997 - RNA, 19 nt, Artificial Sequence
  Description of Artificial Sequence: Synthetic oligonucleotide
  Antisense strand to SEQ ID NO: 2398996
uaaucccacccuuugacua

SEQ ID NO: 2398998 - RNA, 19 nt, Artificial Sequence
  Description of Artificial Sequence: Synthetic oligonucleotide
  Sense strand starting at position 2215 of SEQ ID NO: 1886285
gggauuacaucucuuauau

SEQ ID NO: 2398999 - RNA, 19 nt, Artificial Sequence
  Description of Artificial Sequence: Synthetic oligonucleotide
  Antisense strand to SEQ ID NO: 2398998
auauaagagauguaauccc

SEQ ID NO: 2399000 - RNA, 19 nt, Artificial Sequence
  Description of Artificial Sequence: Synthetic oligonucleotide
  Sense strand starting at position 2269 of SEQ ID NO: 1886285
aagacugagaugugugaua

SEQ ID NO: 2399001 - RNA, 19 nt, Artificial Sequence
  Description of Artificial Sequence: Synthetic oligonucleotide
  Antisense strand to SEQ ID NO: 2399000
uaucacacaucucagucuu

SEQ ID NO: 2399002 - RNA, 19 nt, Artificial Sequence
  Description of Artificial Sequence: Synthetic oligonucleotide
  Sense strand starting at position 2271 of SEQ ID NO: 1886285
gacugagaugugugauacu

SEQ ID NO: 2399003 - RNA, 19 nt, Artificial Sequence
  Description of Artificial Sequence: Synthetic oligonucleotide
  Antisense strand to SEQ ID NO: 2399002
aguaucacacaucucaguc

SEQ ID NO: 2399004 - RNA, 19 nt, Artificial Sequence
  Description of Artificial Sequence: Synthetic oligonucleotide
  Sense strand starting at position 2526 of SEQ ID NO: 1886285
ucagacuaccuguauugua

SEQ ID NO: 2399005 - RNA, 19 nt, Artificial Sequence
  Description of Artificial Sequence: Synthetic oligonucleotide
  Antisense strand to SEQ ID NO: 2399004
uacaauacagguagucuga

SEQ ID NO: 2399006 - RNA, 19 nt, Artificial Sequence
  Description of Artificial Sequence: Synthetic oligonucleotide
  Sense strand starting at position 2618 of SEQ ID NO: 1886285
ugaguagugccucaaugau

SEQ ID NO: 2399007 - RNA, 19 nt, Artificial Sequence
  Description of Artificial Sequence: Synthetic oligonucleotide
  Antisense strand to SEQ ID NO: 2399006
aucauugaggcacuacuca

SEQ ID NO: 2399008 - RNA, 19 nt, Artificial Sequence
  Description of Artificial Sequence: Synthetic oligonucleotide
  Sense strand starting at position 2689 of SEQ ID NO: 1886285
aggauugucuauuugugca

SEQ ID NO: 2399009 - RNA, 19 nt, Artificial Sequence
  Description of Artificial Sequence: Synthetic oligonucleotide
  Antisense strand to SEQ ID NO: 2399008
ugcacaaauagacaauccu

SEQ ID NO: 2399010 - RNA, 19 nt, Artificial Sequence
  Description of Artificial Sequence: Synthetic oligonucleotide
  Sense strand starting at position 2691 of SEQ ID NO: 1886285
gauugucuauuugugcaau

SEQ ID NO: 2399011 - RNA, 19 nt, Artificial Sequence
  Description of Artificial Sequence: Synthetic oligonucleotide
  Antisense strand to SEQ ID NO: 2399010
auugcacaaauagacaauc

SEQ ID NO: 2399012 - RNA, 19 nt, Artificial Sequence
  Description of Artificial Sequence: Synthetic oligonucleotide
  Sense strand starting at position 2693 of SEQ ID NO: 1886285
uugucuauuugugcaauca

SEQ ID NO: 2399013 - RNA, 19 nt, Artificial Sequence
  Description of Artificial Sequence: Synthetic oligonucleotide
  Antisense strand to SEQ ID NO: 2399012
ugauugcacaaauagacaa

SEQ ID NO: 2399014 - RNA, 19 nt, Artificial Sequence
  Description of Artificial Sequence: Synthetic oligonucleotide
  Sense strand starting at position 2713 of SEQ ID NO: 1886285
uaaagaguugauugcaaug

SEQ ID NO: 2399015 - RNA, 19 nt, Artificial Sequence
  Description of Artificial Sequence: Synthetic oligonucleotide
  Antisense strand to SEQ ID NO: 2399014
cauugcaaucaacucuuua

SEQ ID NO: 2399016 - RNA, 19 nt, Artificial Sequence
  Description of Artificial Sequence: Synthetic oligonucleotide
  Sense strand starting at position 2718 of SEQ ID NO: 1886285
aguugauugcaaugaauua

SEQ ID NO: 2399017 - RNA, 19 nt, Artificial Sequence
  Description of Artificial Sequence: Synthetic oligonucleotide
  Antisense strand to SEQ ID NO: 2399016
uaauucauugcaaucaacu

SEQ ID NO: 2399018 - RNA, 19 nt, Artificial Sequence
  Description of Artificial Sequence: Synthetic oligonucleotide
  Sense strand starting at position 2821 of SEQ ID NO: 1886285
aucagucacucauuggaaa

SEQ ID NO: 2399019 - RNA, 19 nt, Artificial Sequence
  Description of Artificial Sequence: Synthetic oligonucleotide
  Antisense strand to SEQ ID NO: 2399018
uuuccaaugagugacugau

SEQ ID NO: 2399020 - RNA, 19 nt, Artificial Sequence
  Description of Artificial Sequence: Synthetic oligonucleotide
  Sense strand starting at position 2822 of SEQ ID NO: 1886285
ucagucacucauuggaaag

SEQ ID NO: 2399021 - RNA, 19 nt, Artificial Sequence
  Description of Artificial Sequence: Synthetic oligonucleotide
  Antisense strand to SEQ ID NO: 2399020
cuuuccaaugagugacuga

SEQ ID NO: 2399022 - RNA, 19 nt, Artificial Sequence
  Description of Artificial Sequence: Synthetic oligonucleotide
  Sense strand starting at position 2960 of SEQ ID NO: 1886285
auauaauccguguaaugac

SEQ ID NO: 2399023 - RNA, 19 nt, Artificial Sequence
  Description of Artificial Sequence: Synthetic oligonucleotide
  Antisense strand to SEQ ID NO: 2399022
gucauuacacggauuauau

SEQ ID NO: 2399024 - RNA, 19 nt, Artificial Sequence
  Description of Artificial Sequence: Synthetic oligonucleotide
  Sense strand starting at position 2979 of SEQ ID NO: 1886285
acaccucuugcuggaugaa

SEQ ID NO: 2399025 - RNA, 19 nt, Artificial Sequence
  Description of Artificial Sequence: Synthetic oligonucleotide
  Antisense strand to SEQ ID NO: 2399024
uucauccagcaagaggugu

SEQ ID NO: 2399026 - RNA, 19 nt, Artificial Sequence
  Description of Artificial Sequence: Synthetic oligonucleotide
  Sense strand starting at position 3110 of SEQ ID NO: 1886285
gguagaggcaaaugaugua

SEQ ID NO: 2399027 - RNA, 19 nt, Artificial Sequence
  Description of Artificial Sequence: Synthetic oligonucleotide
  Antisense strand to SEQ ID NO: 2399026
uacaucauuugccucuacc

SEQ ID NO: 2399028 - RNA, 19 nt, Artificial Sequence
  Description of Artificial Sequence: Synthetic oligonucleotide
  Sense strand starting at position 3303 of SEQ ID NO: 1886285
auauuuacguugucuugua

SEQ ID NO: 2399029 - RNA, 19 nt, Artificial Sequence
  Description of Artificial Sequence: Synthetic oligonucleotide
  Antisense strand to SEQ ID NO: 2399028
uacaagacaacguaaauau

SEQ ID NO: 2399030 - RNA, 19 nt, Artificial Sequence
  Description of Artificial Sequence: Synthetic oligonucleotide
  Sense strand starting at position 3304 of SEQ ID NO: 1886285
uauuuacguugucuuguaa

SEQ ID NO: 2399031 - RNA, 19 nt, Artificial Sequence
  Description of Artificial Sequence: Synthetic oligonucleotide
  Antisense strand to SEQ ID NO: 2399030
uuacaagacaacguaaaua

SEQ ID NO: 2399032 - RNA, 19 nt, Artificial Sequence
  Description of Artificial Sequence: Synthetic oligonucleotide
  Sense strand starting at position 3447 of SEQ ID NO: 1886285
agucuuuaucuacaggcau

SEQ ID NO: 2399033 - RNA, 19 nt, Artificial Sequence
  Description of Artificial Sequence: Synthetic oligonucleotide
  Antisense strand to SEQ ID NO: 2399032
augccuguagauaaagacu

SEQ ID NO: 2399034 - RNA, 19 nt, Artificial Sequence
  Description of Artificial Sequence: Synthetic oligonucleotide
  Sense strand starting at position 544 of SEQ ID NO: 1886286
ccauguaaacaguaacgau

SEQ ID NO: 2399035 - RNA, 19 nt, Artificial Sequence
  Description of Artificial Sequence: Synthetic oligonucleotide
  Antisense strand to SEQ ID NO: 2399034
aucguuacuguuuacaugg

SEQ ID NO: 2399036 - RNA, 19 nt, Artificial Sequence
  Description of Artificial Sequence: Synthetic oligonucleotide
  Sense strand starting at position 553 of SEQ ID NO: 1886286
caguaacgaucaugaaugu

SEQ ID NO: 2399037 - RNA, 19 nt, Artificial Sequence
  Description of Artificial Sequence: Synthetic oligonucleotide
  Antisense strand to SEQ ID NO: 2399036
acauucaugaucguuacug

SEQ ID NO: 2399038 - RNA, 19 nt, Artificial Sequence
  Description of Artificial Sequence: Synthetic oligonucleotide
  Sense strand starting at position 673 of SEQ ID NO: 1886286
caaguaggcugaccugaau

SEQ ID NO: 2399039 - RNA, 19 nt, Artificial Sequence
  Description of Artificial Sequence: Synthetic oligonucleotide
  Antisense strand to SEQ ID NO: 2399038
auucaggucagccuacuug

SEQ ID NO: 2399040 - RNA, 19 nt, Artificial Sequence
  Description of Artificial Sequence: Synthetic oligonucleotide
  Sense strand starting at position 816 of SEQ ID NO: 1886286
aggccaugcucagucaauc

SEQ ID NO: 2399041 - RNA, 19 nt, Artificial Sequence
  Description of Artificial Sequence: Synthetic oligonucleotide
  Antisense strand to SEQ ID NO: 2399040
gauugacugagcauggccu

SEQ ID NO: 2399042 - RNA, 19 nt, Artificial Sequence
  Description of Artificial Sequence: Synthetic oligonucleotide
  Sense strand starting at position 822 of SEQ ID NO: 1886286
ugcucagucaaucagggaa

SEQ ID NO: 2399043 - RNA, 19 nt, Artificial Sequence
  Description of Artificial Sequence: Synthetic oligonucleotide
  Antisense strand to SEQ ID NO: 2399042
uucccugauugacugagca

SEQ ID NO: 2399044 - RNA, 19 nt, Artificial Sequence
  Description of Artificial Sequence: Synthetic oligonucleotide
  Sense strand starting at position 1005 of SEQ ID NO: 1886286
ugaccuuuagcgggacaca

SEQ ID NO: 2399045 - RNA, 19 nt, Artificial Sequence
  Description of Artificial Sequence: Synthetic oligonucleotide
  Antisense strand to SEQ ID NO: 2399044
ugugucccgcuaaagguca

SEQ ID NO: 2399046 - RNA, 19 nt, Artificial Sequence
  Description of Artificial Sequence: Synthetic oligonucleotide
  Sense strand starting at position 1161 of SEQ ID NO: 1886286
ggcccauugcucuacaggu

SEQ ID NO: 2399047 - RNA, 19 nt, Artificial Sequence
  Description of Artificial Sequence: Synthetic oligonucleotide
  Antisense strand to SEQ ID NO: 2399046
accuguagagcaaugggcc

SEQ ID NO: 2399048 - RNA, 19 nt, Artificial Sequence
  Description of Artificial Sequence: Synthetic oligonucleotide
  Sense strand starting at position 1362 of SEQ ID NO: 1886286
ugacuugugcacugagucu

SEQ ID NO: 2399049 - RNA, 19 nt, Artificial Sequence
  Description of Artificial Sequence: Synthetic oligonucleotide
  Antisense strand to SEQ ID NO: 2399048
agacucagugcacaaguca

SEQ ID NO: 2399050 - RNA, 19 nt, Artificial Sequence
  Description of Artificial Sequence: Synthetic oligonucleotide
  Sense strand starting at position 1395 of SEQ ID NO: 1886286
acugcauugaguugaagga

SEQ ID NO: 2399051 - RNA, 19 nt, Artificial Sequence
  Description of Artificial Sequence: Synthetic oligonucleotide
  Antisense strand to SEQ ID NO: 2399050
uccuucaacucaaugcagu

SEQ ID NO: 2399052 - RNA, 19 nt, Artificial Sequence
  Description of Artificial Sequence: Synthetic oligonucleotide
  Sense strand starting at position 1662 of SEQ ID NO: 1886286
ggcagaagagcucgcugaa

SEQ ID NO: 2399053 - RNA, 19 nt, Artificial Sequence
  Description of Artificial Sequence: Synthetic oligonucleotide
  Antisense strand to SEQ ID NO: 2399052
uucagcgagcucuucugcc

SEQ ID NO: 2399054 - RNA, 19 nt, Artificial Sequence
  Description of Artificial Sequence: Synthetic oligonucleotide
  Sense strand starting at position 1984 of SEQ ID NO: 1886286
gguucucaucaucgaucca

SEQ ID NO: 2399055 - RNA, 19 nt, Artificial Sequence
  Description of Artificial Sequence: Synthetic oligonucleotide
  Antisense strand to SEQ ID NO: 2399054
uggaucgaugaugagaacc

SEQ ID NO: 2399056 - RNA, 19 nt, Artificial Sequence
  Description of Artificial Sequence: Synthetic oligonucleotide
  Sense strand starting at position 2206 of SEQ ID NO: 1886286
aggacauguguccaaccau

SEQ ID NO: 2399057 - RNA, 19 nt, Artificial Sequence
  Description of Artificial Sequence: Synthetic oligonucleotide
  Antisense strand to SEQ ID NO: 2399056
augguuggacacauguccu

SEQ ID NO: 2399058 - RNA, 19 nt, Artificial Sequence
  Description of Artificial Sequence: Synthetic oligonucleotide
  Sense strand starting at position 2311 of SEQ ID NO: 1886286
gggaaacacugauguguca

SEQ ID NO: 2399059 - RNA, 19 nt, Artificial Sequence
  Description of Artificial Sequence: Synthetic oligonucleotide
  Antisense strand to SEQ ID NO: 2399058
ugacacaucaguguuuccc

SEQ ID NO: 2399060 - RNA, 19 nt, Artificial Sequence
  Description of Artificial Sequence: Synthetic oligonucleotide
  Sense strand starting at position 2318 of SEQ ID NO: 1886286
acugaugugucauagauca

SEQ ID NO: 2399061 - RNA, 19 nt, Artificial Sequence
  Description of Artificial Sequence: Synthetic oligonucleotide
  Antisense strand to SEQ ID NO: 2399060
ugaucuaugacacaucagu

SEQ ID NO: 2399062 - RNA, 19 nt, Artificial Sequence
  Description of Artificial Sequence: Synthetic oligonucleotide
  Sense strand starting at position 2487 of SEQ ID NO: 1886286
guaucuggauccuugggua

SEQ ID NO: 2399063 - RNA, 19 nt, Artificial Sequence
  Description of Artificial Sequence: Synthetic oligonucleotide
  Antisense strand to SEQ ID NO: 2399062
uacccaaggauccagauac

SEQ ID NO: 2399064 - RNA, 19 nt, Artificial Sequence
  Description of Artificial Sequence: Synthetic oligonucleotide
  Sense strand starting at position 2679 of SEQ ID NO: 1886286
ucuggugugucccaaucca

SEQ ID NO: 2399065 - RNA, 19 nt, Artificial Sequence
  Description of Artificial Sequence: Synthetic oligonucleotide
  Antisense strand to SEQ ID NO: 2399064
uggauugggacacaccaga

SEQ ID NO: 2399066 - RNA, 19 nt, Artificial Sequence
  Description of Artificial Sequence: Synthetic oligonucleotide
  Sense strand starting at position 2747 of SEQ ID NO: 1886286
ccgggagacauaugguauc

SEQ ID NO: 2399067 - RNA, 19 nt, Artificial Sequence
  Description of Artificial Sequence: Synthetic oligonucleotide
  Antisense strand to SEQ ID NO: 2399066
gauaccauaugucucccgg

SEQ ID NO: 2399068 - RNA, 19 nt, Artificial Sequence
  Description of Artificial Sequence: Synthetic oligonucleotide
  Sense strand starting at position 2760 of SEQ ID NO: 1886286
gguaucuucuccuuucuuu

SEQ ID NO: 2399069 - RNA, 19 nt, Artificial Sequence
  Description of Artificial Sequence: Synthetic oligonucleotide
  Antisense strand to SEQ ID NO: 2399068
aaagaaaggagaagauacc

SEQ ID NO: 2399070 - RNA, 19 nt, Artificial Sequence
  Description of Artificial Sequence: Synthetic oligonucleotide
  Sense strand starting at position 2817 of SEQ ID NO: 1886286
uuguccuaauggcugagaa

SEQ ID NO: 2399071 - RNA, 19 nt, Artificial Sequence
  Description of Artificial Sequence: Synthetic oligonucleotide
  Antisense strand to SEQ ID NO: 2399070
uucucagccauuaggacaa

SEQ ID NO: 2399072 - RNA, 19 nt, Artificial Sequence
  Description of Artificial Sequence: Synthetic oligonucleotide
  Sense strand starting at position 2818 of SEQ ID NO: 1886286
uguccuaauggcugagaag

SEQ ID NO: 2399073 - RNA, 19 nt, Artificial Sequence
  Description of Artificial Sequence: Synthetic oligonucleotide
  Antisense strand to SEQ ID NO: 2399072
cuucucagccauuaggaca

SEQ ID NO: 2399074 - RNA, 19 nt, Artificial Sequence
  Description of Artificial Sequence: Synthetic oligonucleotide
  Sense strand starting at position 3123 of SEQ ID NO: 1886286
cuggguuugcugcaaucca

SEQ ID NO: 2399075 - RNA, 19 nt, Artificial Sequence
  Description of Artificial Sequence: Synthetic oligonucleotide
  Antisense strand to SEQ ID NO: 2399074
uggauugcagcaaacccag

SEQ ID NO: 2399076 - RNA, 19 nt, Artificial Sequence
  Description of Artificial Sequence: Synthetic oligonucleotide
  Sense strand starting at position 3130 of SEQ ID NO: 1886286
ugcugcaauccaugaaucu

SEQ ID NO: 2399077 - RNA, 19 nt, Artificial Sequence
  Description of Artificial Sequence: Synthetic oligonucleotide
  Antisense strand to SEQ ID NO: 2399076
agauucauggauugcagca

SEQ ID NO: 2399078 - RNA, 19 nt, Artificial Sequence
  Description of Artificial Sequence: Synthetic oligonucleotide
  Sense strand starting at position 3251 of SEQ ID NO: 1886286
guggccuggccauguuaga

SEQ ID NO: 2399079 - RNA, 19 nt, Artificial Sequence
  Description of Artificial Sequence: Synthetic oligonucleotide
  Antisense strand to SEQ ID NO: 2399078
ucuaacauggccaggccac

SEQ ID NO: 2399080 - RNA, 19 nt, Artificial Sequence
  Description of Artificial Sequence: Synthetic oligonucleotide
  Sense strand starting at position 3327 of SEQ ID NO: 1886286
cccuuuccugccuggacaa

SEQ ID NO: 2399081 - RNA, 19 nt, Artificial Sequence
  Description of Artificial Sequence: Synthetic oligonucleotide
  Antisense strand to SEQ ID NO: 2399080
uuguccaggcaggaaaggg

SEQ ID NO: 2399082 - RNA, 19 nt, Artificial Sequence
  Description of Artificial Sequence: Synthetic oligonucleotide
  Sense strand starting at position 3384 of SEQ ID NO: 1886286
uaugucugauucccaagga

SEQ ID NO: 2399083 - RNA, 19 nt, Artificial Sequence
  Description of Artificial Sequence: Synthetic oligonucleotide
  Antisense strand to SEQ ID NO: 2399082
uccuugggaaucagacaua

SEQ ID NO: 2399084 - RNA, 19 nt, Artificial Sequence
  Description of Artificial Sequence: Synthetic oligonucleotide
  Sense strand starting at position 3385 of SEQ ID NO: 1886286
augucugauucccaaggaa

SEQ ID NO: 2399085 - RNA, 19 nt, Artificial Sequence
  Description of Artificial Sequence: Synthetic oligonucleotide
  Antisense strand to SEQ ID NO: 2399084
uuccuugggaaucagacau

SEQ ID NO: 2399086 - RNA, 19 nt, Artificial Sequence
  Description of Artificial Sequence: Synthetic oligonucleotide
  Sense strand starting at position 3535 of SEQ ID NO: 1886286
cucaccuaugcucgucaau

SEQ ID NO: 2399087 - RNA, 19 nt, Artificial Sequence
  Description of Artificial Sequence: Synthetic oligonucleotide
  Antisense strand to SEQ ID NO: 2399086
auugacgagcauaggugag

SEQ ID NO: 2399088 - RNA, 19 nt, Artificial Sequence
  Description of Artificial Sequence: Synthetic oligonucleotide
  Sense strand starting at position 3673 of SEQ ID NO: 1886286
gaaagucuggugugccuaa

SEQ ID NO: 2399089 - RNA, 19 nt, Artificial Sequence
  Description of Artificial Sequence: Synthetic oligonucleotide
  Antisense strand to SEQ ID NO: 2399088
uuaggcacaccagacuuuc

SEQ ID NO: 2399090 - RNA, 19 nt, Artificial Sequence
  Description of Artificial Sequence: Synthetic oligonucleotide
  Sense strand starting at position 3680 of SEQ ID NO: 1886286
uggugugccuaauagagga

SEQ ID NO: 2399091 - RNA, 19 nt, Artificial Sequence
  Description of Artificial Sequence: Synthetic oligonucleotide
  Antisense strand to SEQ ID NO: 2399090
uccucuauuaggcacacca

SEQ ID NO: 2399092 - RNA, 19 nt, Artificial Sequence
  Description of Artificial Sequence: Synthetic oligonucleotide
  Sense strand starting at position 260 of SEQ ID NO: 1886287
uggcaagucuuccuccaca

SEQ ID NO: 2399093 - RNA, 19 nt, Artificial Sequence
  Description of Artificial Sequence: Synthetic oligonucleotide
  Antisense strand to SEQ ID NO: 2399092
uguggaggaagacuugcca

SEQ ID NO: 2399094 - RNA, 19 nt, Artificial Sequence
  Description of Artificial Sequence: Synthetic oligonucleotide
  Sense strand starting at position 302 of SEQ ID NO: 1886287
gaagacauguguccaacca

SEQ ID NO: 2399095 - RNA, 19 nt, Artificial Sequence
  Description of Artificial Sequence: Synthetic oligonucleotide
  Antisense strand to SEQ ID NO: 2399094
ugguuggacacaugucuuc

SEQ ID NO: 2399096 - RNA, 19 nt, Artificial Sequence
  Description of Artificial Sequence: Synthetic oligonucleotide
  Sense strand starting at position 323 of SEQ ID NO: 1886287
ggcucagaccucuauacag

SEQ ID NO: 2399097 - RNA, 19 nt, Artificial Sequence
  Description of Artificial Sequence: Synthetic oligonucleotide
  Antisense strand to SEQ ID NO: 2399096
cuguauagaggucugagcc

SEQ ID NO: 2399098 - RNA, 19 nt, Artificial Sequence
  Description of Artificial Sequence: Synthetic oligonucleotide
  Sense strand starting at position 408 of SEQ ID NO: 1886287
gugaaacacugaugugucu

SEQ ID NO: 2399099 - RNA, 19 nt, Artificial Sequence
  Description of Artificial Sequence: Synthetic oligonucleotide
  Antisense strand to SEQ ID NO: 2399098
agacacaucaguguuucac

SEQ ID NO: 2399100 - RNA, 19 nt, Artificial Sequence
  Description of Artificial Sequence: Synthetic oligonucleotide
  Sense strand starting at position 415 of SEQ ID NO: 1886287
acugaugugucucagacgu

SEQ ID NO: 2399101 - RNA, 19 nt, Artificial Sequence
  Description of Artificial Sequence: Synthetic oligonucleotide
  Antisense strand to SEQ ID NO: 2399100
acgucugagacacaucagu

SEQ ID NO: 2399102 - RNA, 19 nt, Artificial Sequence
  Description of Artificial Sequence: Synthetic oligonucleotide
  Sense strand starting at position 887 of SEQ ID NO: 1886287
cggagaugaccucauggcu

SEQ ID NO: 2399103 - RNA, 19 nt, Artificial Sequence
  Description of Artificial Sequence: Synthetic oligonucleotide
  Antisense strand to SEQ ID NO: 2399102
agccaugaggucaucuccg

SEQ ID NO: 2399104 - RNA, 19 nt, Artificial Sequence
  Description of Artificial Sequence: Synthetic oligonucleotide
  Sense strand starting at position 910 of SEQ ID NO: 1886287
agcagucuggacugcaaau

SEQ ID NO: 2399105 - RNA, 19 nt, Artificial Sequence
  Description of Artificial Sequence: Synthetic oligonucleotide
  Antisense strand to SEQ ID NO: 2399104
auuugcaguccagacugcu

SEQ ID NO: 2399106 - RNA, 19 nt, Artificial Sequence
  Description of Artificial Sequence: Synthetic oligonucleotide
  Sense strand starting at position 1093 of SEQ ID NO: 1886287
ggagcuagucuugacccaa

SEQ ID NO: 2399107 - RNA, 19 nt, Artificial Sequence
  Description of Artificial Sequence: Synthetic oligonucleotide
  Antisense strand to SEQ ID NO: 2399106
uugggucaagacuagcucc

SEQ ID NO: 2399108 - RNA, 19 nt, Artificial Sequence
  Description of Artificial Sequence: Synthetic oligonucleotide
  Sense strand starting at position 1191 of SEQ ID NO: 1886287
cauugagggauauggguuu

SEQ ID NO: 2399109 - RNA, 19 nt, Artificial Sequence
  Description of Artificial Sequence: Synthetic oligonucleotide
  Antisense strand to SEQ ID NO: 2399108
aaacccauaucccucaaug

SEQ ID NO: 2399110 - RNA, 19 nt, Artificial Sequence
  Description of Artificial Sequence: Synthetic oligonucleotide
  Sense strand starting at position 1197 of SEQ ID NO: 1886287
gggauauggguuuggugca

SEQ ID NO: 2399111 - RNA, 19 nt, Artificial Sequence
  Description of Artificial Sequence: Synthetic oligonucleotide
  Antisense strand to SEQ ID NO: 2399110
ugcaccaaacccauauccc

SEQ ID NO: 2399112 - RNA, 19 nt, Artificial Sequence
  Description of Artificial Sequence: Synthetic oligonucleotide
  Sense strand starting at position 1198 of SEQ ID NO: 1886287
ggauauggguuuggugcaa

SEQ ID NO: 2399113 - RNA, 19 nt, Artificial Sequence
  Description of Artificial Sequence: Synthetic oligonucleotide
  Antisense strand to SEQ ID NO: 2399112
uugcaccaaacccauaucc

SEQ ID NO: 2399114 - RNA, 19 nt, Artificial Sequence
  Description of Artificial Sequence: Synthetic oligonucleotide
  Sense strand starting at position 1209 of SEQ ID NO: 1886287
uggugcaauccuugaagcu

SEQ ID NO: 2399115 - RNA, 19 nt, Artificial Sequence
  Description of Artificial Sequence: Synthetic oligonucleotide
  Antisense strand to SEQ ID NO: 2399114
agcuucaaggauugcacca

SEQ ID NO: 2399116 - RNA, 19 nt, Artificial Sequence
  Description of Artificial Sequence: Synthetic oligonucleotide
  Sense strand starting at position 1210 of SEQ ID NO: 1886287
ggugcaauccuugaagcuc

SEQ ID NO: 2399117 - RNA, 19 nt, Artificial Sequence
  Description of Artificial Sequence: Synthetic oligonucleotide
  Antisense strand to SEQ ID NO: 2399116
gagcuucaaggauugcacc

SEQ ID NO: 2399118 - RNA, 19 nt, Artificial Sequence
  Description of Artificial Sequence: Synthetic oligonucleotide
  Sense strand starting at position 1284 of SEQ ID NO: 1886287
ccaugagaugucuguggug

SEQ ID NO: 2399119 - RNA, 19 nt, Artificial Sequence
  Description of Artificial Sequence: Synthetic oligonucleotide
  Antisense strand to SEQ ID NO: 2399118
caccacagacaucucaugg

SEQ ID NO: 2399120 - RNA, 19 nt, Artificial Sequence
  Description of Artificial Sequence: Synthetic oligonucleotide
  Sense strand starting at position 1466 of SEQ ID NO: 1886287
gccuccuccuugugucaga

SEQ ID NO: 2399121 - RNA, 19 nt, Artificial Sequence
  Description of Artificial Sequence: Synthetic oligonucleotide
  Antisense strand to SEQ ID NO: 2399120
ucugacacaaggaggaggc

SEQ ID NO: 2399122 - RNA, 19 nt, Artificial Sequence
  Description of Artificial Sequence: Synthetic oligonucleotide
  Sense strand starting at position 1467 of SEQ ID NO: 1886287
ccuccuccuugugucagau

SEQ ID NO: 2399123 - RNA, 19 nt, Artificial Sequence
  Description of Artificial Sequence: Synthetic oligonucleotide
  Antisense strand to SEQ ID NO: 2399122
aucugacacaaggaggagg

SEQ ID NO: 2399124 - RNA, 19 nt, Artificial Sequence
  Description of Artificial Sequence: Synthetic oligonucleotide
  Sense strand starting at position 1477 of SEQ ID NO: 1886287
gugucagauucccaaggaa

SEQ ID NO: 2399125 - RNA, 19 nt, Artificial Sequence
  Description of Artificial Sequence: Synthetic oligonucleotide
  Antisense strand to SEQ ID NO: 2399124
uuccuugggaaucugacac

SEQ ID NO: 2399126 - RNA, 19 nt, Artificial Sequence
  Description of Artificial Sequence: Synthetic oligonucleotide
  Sense strand starting at position 1879 of SEQ ID NO: 1886287
ccuugugauucccagcauc

SEQ ID NO: 2399127 - RNA, 19 nt, Artificial Sequence
  Description of Artificial Sequence: Synthetic oligonucleotide
  Antisense strand to SEQ ID NO: 2399126
gaugcugggaaucacaagg

SEQ ID NO: 2399128 - RNA, 19 nt, Artificial Sequence
  Description of Artificial Sequence: Synthetic oligonucleotide
  Sense strand starting at position 2286 of SEQ ID NO: 1886287
ggacucaugugaugggauc

SEQ ID NO: 2399129 - RNA, 19 nt, Artificial Sequence
  Description of Artificial Sequence: Synthetic oligonucleotide
  Antisense strand to SEQ ID NO: 2399128
gaucccaucacaugagucc

SEQ ID NO: 2399130 - RNA, 19 nt, Artificial Sequence
  Description of Artificial Sequence: Synthetic oligonucleotide
  Sense strand starting at position 2297 of SEQ ID NO: 1886287
augggauccaugugaaacg

SEQ ID NO: 2399131 - RNA, 19 nt, Artificial Sequence
  Description of Artificial Sequence: Synthetic oligonucleotide
  Antisense strand to SEQ ID NO: 2399130
cguuucacauggaucccau

SEQ ID NO: 2399132 - RNA, 19 nt, Artificial Sequence
  Description of Artificial Sequence: Synthetic oligonucleotide
  Sense strand starting at position 2533 of SEQ ID NO: 1886287
caaggaagcuugcucugaa

SEQ ID NO: 2399133 - RNA, 19 nt, Artificial Sequence
  Description of Artificial Sequence: Synthetic oligonucleotide
  Antisense strand to SEQ ID NO: 2399132
uucagagcaagcuuccuug

SEQ ID NO: 2399134 - RNA, 19 nt, Artificial Sequence
  Description of Artificial Sequence: Synthetic oligonucleotide
  Sense strand starting at position 2534 of SEQ ID NO: 1886287
aaggaagcuugcucugaag

SEQ ID NO: 2399135 - RNA, 19 nt, Artificial Sequence
  Description of Artificial Sequence: Synthetic oligonucleotide
  Antisense strand to SEQ ID NO: 2399134
cuucagagcaagcuuccuu

SEQ ID NO: 2399136 - RNA, 19 nt, Artificial Sequence
  Description of Artificial Sequence: Synthetic oligonucleotide
  Sense strand starting at position 2536 of SEQ ID NO: 1886287
ggaagcuugcucugaagcu

SEQ ID NO: 2399137 - RNA, 19 nt, Artificial Sequence
  Description of Artificial Sequence: Synthetic oligonucleotide
  Antisense strand to SEQ ID NO: 2399136
agcuucagagcaagcuucc

SEQ ID NO: 2399138 - RNA, 19 nt, Artificial Sequence
  Description of Artificial Sequence: Synthetic oligonucleotide
  Sense strand starting at position 2537 of SEQ ID NO: 1886287
gaagcuugcucugaagcua

SEQ ID NO: 2399139 - RNA, 19 nt, Artificial Sequence
  Description of Artificial Sequence: Synthetic oligonucleotide
  Antisense strand to SEQ ID NO: 2399138
uagcuucagagcaagcuuc

SEQ ID NO: 2399140 - RNA, 19 nt, Artificial Sequence
  Description of Artificial Sequence: Synthetic oligonucleotide
  Sense strand starting at position 3508 of SEQ ID NO: 1886287
gggucaccaucucgaggaa

SEQ ID NO: 2399141 - RNA, 19 nt, Artificial Sequence
  Description of Artificial Sequence: Synthetic oligonucleotide
  Antisense strand to SEQ ID NO: 2399140
uuccucgagauggugaccc

SEQ ID NO: 2399142 - RNA, 19 nt, Artificial Sequence
  Description of Artificial Sequence: Synthetic oligonucleotide
  Sense strand starting at position 3637 of SEQ ID NO: 1886287
guggaauacuggcccauca

SEQ ID NO: 2399143 - RNA, 19 nt, Artificial Sequence
  Description of Artificial Sequence: Synthetic oligonucleotide
  Antisense strand to SEQ ID NO: 2399142
ugaugggccaguauuccac

SEQ ID NO: 2399144 - RNA, 19 nt, Artificial Sequence
  Description of Artificial Sequence: Synthetic oligonucleotide
  Sense strand starting at position 183 of SEQ ID NO: 1886288
ccaggaagugcccaaucuu

SEQ ID NO: 2399145 - RNA, 19 nt, Artificial Sequence
  Description of Artificial Sequence: Synthetic oligonucleotide
  Antisense strand to SEQ ID NO: 2399144
aagauugggcacuuccugg

SEQ ID NO: 2399146 - RNA, 19 nt, Artificial Sequence
  Description of Artificial Sequence: Synthetic oligonucleotide
  Sense strand starting at position 410 of SEQ ID NO: 1886288
agaacacuggcuugucaca

SEQ ID NO: 2399147 - RNA, 19 nt, Artificial Sequence
  Description of Artificial Sequence: Synthetic oligonucleotide
  Antisense strand to SEQ ID NO: 2399146
ugugacaagccaguguucu

SEQ ID NO: 2399148 - RNA, 19 nt, Artificial Sequence
  Description of Artificial Sequence: Synthetic oligonucleotide
  Sense strand starting at position 412 of SEQ ID NO: 1886288
aacacuggcuugucacaga

SEQ ID NO: 2399149 - RNA, 19 nt, Artificial Sequence
  Description of Artificial Sequence: Synthetic oligonucleotide
  Antisense strand to SEQ ID NO: 2399148
ucugugacaagccaguguu

SEQ ID NO: 2399150 - RNA, 19 nt, Artificial Sequence
  Description of Artificial Sequence: Synthetic oligonucleotide
  Sense strand starting at position 851 of SEQ ID NO: 1886288
gacacauggugacuucuuu

SEQ ID NO: 2399151 - RNA, 19 nt, Artificial Sequence
  Description of Artificial Sequence: Synthetic oligonucleotide
  Antisense strand to SEQ ID NO: 2399150
aaagaagucaccauguguc

SEQ ID NO: 2399152 - RNA, 19 nt, Artificial Sequence
  Description of Artificial Sequence: Synthetic oligonucleotide
  Sense strand starting at position 1058 of SEQ ID NO: 1886288
acugaucccuuggccuaaa

SEQ ID NO: 2399153 - RNA, 19 nt, Artificial Sequence
  Description of Artificial Sequence: Synthetic oligonucleotide
  Antisense strand to SEQ ID NO: 2399152
uuuaggccaagggaucagu

SEQ ID NO: 2399154 - RNA, 19 nt, Artificial Sequence
  Description of Artificial Sequence: Synthetic oligonucleotide
  Sense strand starting at position 1122 of SEQ ID NO: 1886288
agagcucagccuugaccaa

SEQ ID NO: 2399155 - RNA, 19 nt, Artificial Sequence
  Description of Artificial Sequence: Synthetic oligonucleotide
  Antisense strand to SEQ ID NO: 2399154
uuggucaaggcugagcucu

SEQ ID NO: 2399156 - RNA, 19 nt, Artificial Sequence
  Description of Artificial Sequence: Synthetic oligonucleotide
  Sense strand starting at position 1230 of SEQ ID NO: 1886288
ggcuauaaauccuguguga

SEQ ID NO: 2399157 - RNA, 19 nt, Artificial Sequence
  Description of Artificial Sequence: Synthetic oligonucleotide
  Antisense strand to SEQ ID NO: 2399156
ucacacaggauuuauagcc

SEQ ID NO: 2399158 - RNA, 19 nt, Artificial Sequence
  Description of Artificial Sequence: Synthetic oligonucleotide
  Sense strand starting at position 1241 of SEQ ID NO: 1886288
cugugugauccuuaaauau

SEQ ID NO: 2399159 - RNA, 19 nt, Artificial Sequence
  Description of Artificial Sequence: Synthetic oligonucleotide
  Antisense strand to SEQ ID NO: 2399158
auauuuaaggaucacacag

SEQ ID NO: 2399160 - RNA, 19 nt, Artificial Sequence
  Description of Artificial Sequence: Synthetic oligonucleotide
  Sense strand starting at position 1368 of SEQ ID NO: 1886288
gucaguccucgaggccaga

SEQ ID NO: 2399161 - RNA, 19 nt, Artificial Sequence
  Description of Artificial Sequence: Synthetic oligonucleotide
  Antisense strand to SEQ ID NO: 2399160
ucuggccucgaggacugac

SEQ ID NO: 2399162 - RNA, 19 nt, Artificial Sequence
  Description of Artificial Sequence: Synthetic oligonucleotide
  Sense strand starting at position 1417 of SEQ ID NO: 1886288
ccugcaugagauugaagga

SEQ ID NO: 2399163 - RNA, 19 nt, Artificial Sequence
  Description of Artificial Sequence: Synthetic oligonucleotide
  Antisense strand to SEQ ID NO: 2399162
uccuucaaucucaugcagg

SEQ ID NO: 2399164 - RNA, 19 nt, Artificial Sequence
  Description of Artificial Sequence: Synthetic oligonucleotide
  Sense strand starting at position 1864 of SEQ ID NO: 1886288
uuggucauuccagggaacu

SEQ ID NO: 2399165 - RNA, 19 nt, Artificial Sequence
  Description of Artificial Sequence: Synthetic oligonucleotide
  Antisense strand to SEQ ID NO: 2399164
aguucccuggaaugaccaa

SEQ ID NO: 2399166 - RNA, 19 nt, Artificial Sequence
  Description of Artificial Sequence: Synthetic oligonucleotide
  Sense strand starting at position 1865 of SEQ ID NO: 1886288
uggucauuccagggaacuc

SEQ ID NO: 2399167 - RNA, 19 nt, Artificial Sequence
  Description of Artificial Sequence: Synthetic oligonucleotide
  Antisense strand to SEQ ID NO: 2399166
gaguucccuggaaugacca

SEQ ID NO: 2399168 - RNA, 19 nt, Artificial Sequence
  Description of Artificial Sequence: Synthetic oligonucleotide
  Sense strand starting at position 2310 of SEQ ID NO: 1886288
uggucauuuacgcgaggaa

SEQ ID NO: 2399169 - RNA, 19 nt, Artificial Sequence
  Description of Artificial Sequence: Synthetic oligonucleotide
  Antisense strand to SEQ ID NO: 2399168
uuccucgcguaaaugacca

SEQ ID NO: 2399170 - RNA, 19 nt, Artificial Sequence
  Description of Artificial Sequence: Synthetic oligonucleotide
  Sense strand starting at position 2367 of SEQ ID NO: 1886288
gucacaggguucgagcaaa

SEQ ID NO: 2399171 - RNA, 19 nt, Artificial Sequence
  Description of Artificial Sequence: Synthetic oligonucleotide
  Antisense strand to SEQ ID NO: 2399170
uuugcucgaacccugugac

SEQ ID NO: 2399172 - RNA, 19 nt, Artificial Sequence
  Description of Artificial Sequence: Synthetic oligonucleotide
  Sense strand starting at position 2449 of SEQ ID NO: 1886288
gcucgaaucugggcugcau

SEQ ID NO: 2399173 - RNA, 19 nt, Artificial Sequence
  Description of Artificial Sequence: Synthetic oligonucleotide
  Antisense strand to SEQ ID NO: 2399172
augcagcccagauucgagc

SEQ ID NO: 2399174 - RNA, 19 nt, Artificial Sequence
  Description of Artificial Sequence: Synthetic oligonucleotide
  Sense strand starting at position 2796 of SEQ ID NO: 1886288
ucagaaguagccugggcau

SEQ ID NO: 2399175 - RNA, 19 nt, Artificial Sequence
  Description of Artificial Sequence: Synthetic oligonucleotide
  Antisense strand to SEQ ID NO: 2399174
augcccaggcuacuucuga

SEQ ID NO: 2399176 - RNA, 19 nt, Artificial Sequence
  Description of Artificial Sequence: Synthetic oligonucleotide
  Sense strand starting at position 2811 of SEQ ID NO: 1886288
gcaucaaauugccaggaca

SEQ ID NO: 2399177 - RNA, 19 nt, Artificial Sequence
  Description of Artificial Sequence: Synthetic oligonucleotide
  Antisense strand to SEQ ID NO: 2399176
uguccuggcaauuugaugc

SEQ ID NO: 2399178 - RNA, 19 nt, Artificial Sequence
  Description of Artificial Sequence: Synthetic oligonucleotide
  Sense strand starting at position 2879 of SEQ ID NO: 1886288
cuccacuuccgguagggau

SEQ ID NO: 2399179 - RNA, 19 nt, Artificial Sequence
  Description of Artificial Sequence: Synthetic oligonucleotide
  Antisense strand to SEQ ID NO: 2399178
aucccuaccggaaguggag

SEQ ID NO: 2399180 - RNA, 19 nt, Artificial Sequence
  Description of Artificial Sequence: Synthetic oligonucleotide
  Sense strand starting at position 2938 of SEQ ID NO: 1886288
ccacgauucccagggccaa

SEQ ID NO: 2399181 - RNA, 19 nt, Artificial Sequence
  Description of Artificial Sequence: Synthetic oligonucleotide
  Antisense strand to SEQ ID NO: 2399180
uuggcccugggaaucgugg

SEQ ID NO: 2399182 - RNA, 19 nt, Artificial Sequence
  Description of Artificial Sequence: Synthetic oligonucleotide
  Sense strand starting at position 2939 of SEQ ID NO: 1886288
cacgauucccagggccaaa

SEQ ID NO: 2399183 - RNA, 19 nt, Artificial Sequence
  Description of Artificial Sequence: Synthetic oligonucleotide
  Antisense strand to SEQ ID NO: 2399182
uuuggcccugggaaucgug

SEQ ID NO: 2399184 - RNA, 19 nt, Artificial Sequence
  Description of Artificial Sequence: Synthetic oligonucleotide
  Sense strand starting at position 3040 of SEQ ID NO: 1886288
gggauagcccauugcucaa

SEQ ID NO: 2399185 - RNA, 19 nt, Artificial Sequence
  Description of Artificial Sequence: Synthetic oligonucleotide
  Antisense strand to SEQ ID NO: 2399184
uugagcaaugggcuauccc

SEQ ID NO: 2399186 - RNA, 19 nt, Artificial Sequence
  Description of Artificial Sequence: Synthetic oligonucleotide
  Sense strand starting at position 3294 of SEQ ID NO: 1886288
gucaauaaguccugugcga

SEQ ID NO: 2399187 - RNA, 19 nt, Artificial Sequence
  Description of Artificial Sequence: Synthetic oligonucleotide
  Antisense strand to SEQ ID NO: 2399186
ucgcacaggacuuauugac

SEQ ID NO: 2399188 - RNA, 19 nt, Artificial Sequence
  Description of Artificial Sequence: Synthetic oligonucleotide
  Sense strand starting at position 3296 of SEQ ID NO: 1886288
caauaaguccugugcgauc

SEQ ID NO: 2399189 - RNA, 19 nt, Artificial Sequence
  Description of Artificial Sequence: Synthetic oligonucleotide
  Antisense strand to SEQ ID NO: 2399188
gaucgcacaggacuuauug

SEQ ID NO: 2399190 - RNA, 19 nt, Artificial Sequence
  Description of Artificial Sequence: Synthetic oligonucleotide
  Sense strand starting at position 3305 of SEQ ID NO: 1886288
cugugcgauccuuaaaucu

SEQ ID NO: 2399191 - RNA, 19 nt, Artificial Sequence
  Description of Artificial Sequence: Synthetic oligonucleotide
  Antisense strand to SEQ ID NO: 2399190
agauuuaaggaucgcacag

SEQ ID NO: 2399192 - RNA, 19 nt, Artificial Sequence
  Description of Artificial Sequence: Synthetic oligonucleotide
  Sense strand starting at position 3398 of SEQ ID NO: 1886288
acuguauuggguugaagga

SEQ ID NO: 2399193 - RNA, 19 nt, Artificial Sequence
  Description of Artificial Sequence: Synthetic oligonucleotide
  Antisense strand to SEQ ID NO: 2399192
uccuucaacccaauacagu

SEQ ID NO: 2399194 - RNA, 19 nt, Artificial Sequence
  Description of Artificial Sequence: Synthetic oligonucleotide
  Sense strand starting at position 3465 of SEQ ID NO: 1886288
gcguccuucuugggaucaa

SEQ ID NO: 2399195 - RNA, 19 nt, Artificial Sequence
  Description of Artificial Sequence: Synthetic oligonucleotide
  Antisense strand to SEQ ID NO: 2399194
uugaucccaagaaggacgc

SEQ ID NO: 2399196 - RNA, 19 nt, Artificial Sequence
  Description of Artificial Sequence: Synthetic oligonucleotide
  Sense strand starting at position 3466 of SEQ ID NO: 1886288
cguccuucuugggaucaau

SEQ ID NO: 2399197 - RNA, 19 nt, Artificial Sequence
  Description of Artificial Sequence: Synthetic oligonucleotide
  Antisense strand to SEQ ID NO: 2399196
auugaucccaagaaggacg

SEQ ID NO: 2399198 - RNA, 19 nt, Artificial Sequence
  Description of Artificial Sequence: Synthetic oligonucleotide
  Sense strand starting at position 3476 of SEQ ID NO: 1886288
gggaucaauuaacaaggaa

SEQ ID NO: 2399199 - RNA, 19 nt, Artificial Sequence
  Description of Artificial Sequence: Synthetic oligonucleotide
  Antisense strand to SEQ ID NO: 2399198
uuccuuguuaauugauccc

SEQ ID NO: 2399200 - RNA, 19 nt, Artificial Sequence
  Description of Artificial Sequence: Synthetic oligonucleotide
  Sense strand starting at position 3536 of SEQ ID NO: 1886288
aggucagcucccuaaggaa

SEQ ID NO: 2399201 - RNA, 19 nt, Artificial Sequence
  Description of Artificial Sequence: Synthetic oligonucleotide
  Antisense strand to SEQ ID NO: 2399200
uuccuuagggagcugaccu

SEQ ID NO: 2399202 - RNA, 19 nt, Artificial Sequence
  Description of Artificial Sequence: Synthetic oligonucleotide
  Sense strand starting at position 312 of SEQ ID NO: 1886289
aggaguaagacagguguga

SEQ ID NO: 2399203 - RNA, 19 nt, Artificial Sequence
  Description of Artificial Sequence: Synthetic oligonucleotide
  Antisense strand to SEQ ID NO: 2399202
ucacaccugucuuacuccu

SEQ ID NO: 2399204 - RNA, 19 nt, Artificial Sequence
  Description of Artificial Sequence: Synthetic oligonucleotide
  Sense strand starting at position 314 of SEQ ID NO: 1886289
gaguaagacaggugugaaa

SEQ ID NO: 2399205 - RNA, 19 nt, Artificial Sequence
  Description of Artificial Sequence: Synthetic oligonucleotide
  Antisense strand to SEQ ID NO: 2399204
uuucacaccugucuuacuc

SEQ ID NO: 2399206 - RNA, 19 nt, Artificial Sequence
  Description of Artificial Sequence: Synthetic oligonucleotide
  Sense strand starting at position 745 of SEQ ID NO: 1886289
cccagcauguccuagaaau

SEQ ID NO: 2399207 - RNA, 19 nt, Artificial Sequence
  Description of Artificial Sequence: Synthetic oligonucleotide
  Antisense strand to SEQ ID NO: 2399206
auuucuaggacaugcuggg

SEQ ID NO: 2399208 - RNA, 19 nt, Artificial Sequence
  Description of Artificial Sequence: Synthetic oligonucleotide
  Sense strand starting at position 747 of SEQ ID NO: 1886289
cagcauguccuagaaauug

SEQ ID NO: 2399209 - RNA, 19 nt, Artificial Sequence
  Description of Artificial Sequence: Synthetic oligonucleotide
  Antisense strand to SEQ ID NO: 2399208
caauuucuaggacaugcug

SEQ ID NO: 2399210 - RNA, 19 nt, Artificial Sequence
  Description of Artificial Sequence: Synthetic oligonucleotide
  Sense strand starting at position 874 of SEQ ID NO: 1886289
ggugacuucuccuuuccuu

SEQ ID NO: 2399211 - RNA, 19 nt, Artificial Sequence
  Description of Artificial Sequence: Synthetic oligonucleotide
  Antisense strand to SEQ ID NO: 2399210
aaggaaaggagaagucacc

SEQ ID NO: 2399212 - RNA, 19 nt, Artificial Sequence
  Description of Artificial Sequence: Synthetic oligonucleotide
  Sense strand starting at position 937 of SEQ ID NO: 1886289
gcagcaugcguggcauauu

SEQ ID NO: 2399213 - RNA, 19 nt, Artificial Sequence
  Description of Artificial Sequence: Synthetic oligonucleotide
  Antisense strand to SEQ ID NO: 2399212
aauaugccacgcaugcugc

SEQ ID NO: 2399214 - RNA, 19 nt, Artificial Sequence
  Description of Artificial Sequence: Synthetic oligonucleotide
  Sense strand starting at position 1242 of SEQ ID NO: 1886289
ggcaauaauucgugugcga

SEQ ID NO: 2399215 - RNA, 19 nt, Artificial Sequence
  Description of Artificial Sequence: Synthetic oligonucleotide
  Antisense strand to SEQ ID NO: 2399214
ucgcacacgaauuauugcc

SEQ ID NO: 2399216 - RNA, 19 nt, Artificial Sequence
  Description of Artificial Sequence: Synthetic oligonucleotide
  Sense strand starting at position 1243 of SEQ ID NO: 1886289
gcaauaauucgugugcgau

SEQ ID NO: 2399217 - RNA, 19 nt, Artificial Sequence
  Description of Artificial Sequence: Synthetic oligonucleotide
  Antisense strand to SEQ ID NO: 2399216
aucgcacacgaauuauugc

SEQ ID NO: 2399218 - RNA, 19 nt, Artificial Sequence
  Description of Artificial Sequence: Synthetic oligonucleotide
  Sense strand starting at position 1244 of SEQ ID NO: 1886289
caauaauucgugugcgauu

SEQ ID NO: 2399219 - RNA, 19 nt, Artificial Sequence
  Description of Artificial Sequence: Synthetic oligonucleotide
  Antisense strand to SEQ ID NO: 2399218
aaucgcacacgaauuauug

SEQ ID NO: 2399220 - RNA, 19 nt, Artificial Sequence
  Description of Artificial Sequence: Synthetic oligonucleotide
  Sense strand starting at position 1245 of SEQ ID NO: 1886289
aauaauucgugugcgauuc

SEQ ID NO: 2399221 - RNA, 19 nt, Artificial Sequence
  Description of Artificial Sequence: Synthetic oligonucleotide
  Antisense strand to SEQ ID NO: 2399220
gaaucgcacacgaauuauu

SEQ ID NO: 2399222 - RNA, 19 nt, Artificial Sequence
  Description of Artificial Sequence: Synthetic oligonucleotide
  Sense strand starting at position 1246 of SEQ ID NO: 1886289
auaauucgugugcgauucu

SEQ ID NO: 2399223 - RNA, 19 nt, Artificial Sequence
  Description of Artificial Sequence: Synthetic oligonucleotide
  Antisense strand to SEQ ID NO: 2399222
agaaucgcacacgaauuau

SEQ ID NO: 2399224 - RNA, 19 nt, Artificial Sequence
  Description of Artificial Sequence: Synthetic oligonucleotide
  Sense strand starting at position 1247 of SEQ ID NO: 1886289
uaauucgugugcgauucuu

SEQ ID NO: 2399225 - RNA, 19 nt, Artificial Sequence
  Description of Artificial Sequence: Synthetic oligonucleotide
  Antisense strand to SEQ ID NO: 2399224
aagaaucgcacacgaauua

SEQ ID NO: 2399226 - RNA, 19 nt, Artificial Sequence
  Description of Artificial Sequence: Synthetic oligonucleotide
  Sense strand starting at position 1249 of SEQ ID NO: 1886289
auucgugugcgauucuuga

SEQ ID NO: 2399227 - RNA, 19 nt, Artificial Sequence
  Description of Artificial Sequence: Synthetic oligonucleotide
  Antisense strand to SEQ ID NO: 2399226
ucaagaaucgcacacgaau

SEQ ID NO: 2399228 - RNA, 19 nt, Artificial Sequence
  Description of Artificial Sequence: Synthetic oligonucleotide
  Sense strand starting at position 1251 of SEQ ID NO: 1886289
ucgugugcgauucuugaau

SEQ ID NO: 2399229 - RNA, 19 nt, Artificial Sequence
  Description of Artificial Sequence: Synthetic oligonucleotide
  Antisense strand to SEQ ID NO: 2399228
auucaagaaucgcacacga

SEQ ID NO: 2399230 - RNA, 19 nt, Artificial Sequence
  Description of Artificial Sequence: Synthetic oligonucleotide
  Sense strand starting at position 1253 of SEQ ID NO: 1886289
gugugcgauucuugaaucu

SEQ ID NO: 2399231 - RNA, 19 nt, Artificial Sequence
  Description of Artificial Sequence: Synthetic oligonucleotide
  Antisense strand to SEQ ID NO: 2399230
agauucaagaaucgcacac

SEQ ID NO: 2399232 - RNA, 19 nt, Artificial Sequence
  Description of Artificial Sequence: Synthetic oligonucleotide
  Sense strand starting at position 1277 of SEQ ID NO: 1886289
gcucgaauccauggguucu

SEQ ID NO: 2399233 - RNA, 19 nt, Artificial Sequence
  Description of Artificial Sequence: Synthetic oligonucleotide
  Antisense strand to SEQ ID NO: 2399232
agaacccauggauucgagc

SEQ ID NO: 2399234 - RNA, 19 nt, Artificial Sequence
  Description of Artificial Sequence: Synthetic oligonucleotide
  Sense strand starting at position 1278 of SEQ ID NO: 1886289
cucgaauccauggguucua

SEQ ID NO: 2399235 - RNA, 19 nt, Artificial Sequence
  Description of Artificial Sequence: Synthetic oligonucleotide
  Antisense strand to SEQ ID NO: 2399234
uagaacccauggauucgag

SEQ ID NO: 2399236 - RNA, 19 nt, Artificial Sequence
  Description of Artificial Sequence: Synthetic oligonucleotide
  Sense strand starting at position 1396 of SEQ ID NO: 1886289
agaccaaugcacugagacu

SEQ ID NO: 2399237 - RNA, 19 nt, Artificial Sequence
  Description of Artificial Sequence: Synthetic oligonucleotide
  Antisense strand to SEQ ID NO: 2399236
agucucagugcauuggucu

SEQ ID NO: 2399238 - RNA, 19 nt, Artificial Sequence
  Description of Artificial Sequence: Synthetic oligonucleotide
  Sense strand starting at position 1701 of SEQ ID NO: 1886289
ggacgagcucacugaaaca

SEQ ID NO: 2399239 - RNA, 19 nt, Artificial Sequence
  Description of Artificial Sequence: Synthetic oligonucleotide
  Antisense strand to SEQ ID NO: 2399238
uguuucagugagcucgucc

SEQ ID NO: 2399240 - RNA, 19 nt, Artificial Sequence
  Description of Artificial Sequence: Synthetic oligonucleotide
  Sense strand starting at position 2303 of SEQ ID NO: 1886289
ccauguaaacaguaacgau

SEQ ID NO: 2399241 - RNA, 19 nt, Artificial Sequence
  Description of Artificial Sequence: Synthetic oligonucleotide
  Antisense strand to SEQ ID NO: 2399240
aucguuacuguuuacaugg

SEQ ID NO: 2399242 - RNA, 19 nt, Artificial Sequence
  Description of Artificial Sequence: Synthetic oligonucleotide
  Sense strand starting at position 2312 of SEQ ID NO: 1886289
caguaacgaucaugaaugu

SEQ ID NO: 2399243 - RNA, 19 nt, Artificial Sequence
  Description of Artificial Sequence: Synthetic oligonucleotide
  Antisense strand to SEQ ID NO: 2399242
acauucaugaucguuacug

SEQ ID NO: 2399244 - RNA, 19 nt, Artificial Sequence
  Description of Artificial Sequence: Synthetic oligonucleotide
  Sense strand starting at position 2432 of SEQ ID NO: 1886289
caaguaggcugaccugaau

SEQ ID NO: 2399245 - RNA, 19 nt, Artificial Sequence
  Description of Artificial Sequence: Synthetic oligonucleotide
  Antisense strand to SEQ ID NO: 2399244
auucaggucagccuacuug

SEQ ID NO: 2399246 - RNA, 19 nt, Artificial Sequence
  Description of Artificial Sequence: Synthetic oligonucleotide
  Sense strand starting at position 2575 of SEQ ID NO: 1886289
aggccaugcucagucaauc

SEQ ID NO: 2399247 - RNA, 19 nt, Artificial Sequence
  Description of Artificial Sequence: Synthetic oligonucleotide
  Antisense strand to SEQ ID NO: 2399246
gauugacugagcauggccu

SEQ ID NO: 2399248 - RNA, 19 nt, Artificial Sequence
  Description of Artificial Sequence: Synthetic oligonucleotide
  Sense strand starting at position 2581 of SEQ ID NO: 1886289
ugcucagucaaucagggaa

SEQ ID NO: 2399249 - RNA, 19 nt, Artificial Sequence
  Description of Artificial Sequence: Synthetic oligonucleotide
  Antisense strand to SEQ ID NO: 2399248
uucccugauugacugagca

SEQ ID NO: 2399250 - RNA, 19 nt, Artificial Sequence
  Description of Artificial Sequence: Synthetic oligonucleotide
  Sense strand starting at position 2764 of SEQ ID NO: 1886289
ugaccuuuagcgggacaca

SEQ ID NO: 2399251 - RNA, 19 nt, Artificial Sequence
  Description of Artificial Sequence: Synthetic oligonucleotide
  Antisense strand to SEQ ID NO: 2399250
ugugucccgcuaaagguca

SEQ ID NO: 2399252 - RNA, 19 nt, Artificial Sequence
  Description of Artificial Sequence: Synthetic oligonucleotide
  Sense strand starting at position 2920 of SEQ ID NO: 1886289
ggcccauugcucuacaggu

SEQ ID NO: 2399253 - RNA, 19 nt, Artificial Sequence
  Description of Artificial Sequence: Synthetic oligonucleotide
  Antisense strand to SEQ ID NO: 2399252
accuguagagcaaugggcc

SEQ ID NO: 2399254 - RNA, 19 nt, Artificial Sequence
  Description of Artificial Sequence: Synthetic oligonucleotide
  Sense strand starting at position 3121 of SEQ ID NO: 1886289
ugacuugugcacugagucu

SEQ ID NO: 2399255 - RNA, 19 nt, Artificial Sequence
  Description of Artificial Sequence: Synthetic oligonucleotide
  Antisense strand to SEQ ID NO: 2399254
agacucagugcacaaguca

SEQ ID NO: 2399256 - RNA, 19 nt, Artificial Sequence
  Description of Artificial Sequence: Synthetic oligonucleotide
  Sense strand starting at position 3154 of SEQ ID NO: 1886289
acugcauugaguugaagga

SEQ ID NO: 2399257 - RNA, 19 nt, Artificial Sequence
  Description of Artificial Sequence: Synthetic oligonucleotide
  Antisense strand to SEQ ID NO: 2399256
uccuucaacucaaugcagu

SEQ ID NO: 2399258 - RNA, 19 nt, Artificial Sequence
  Description of Artificial Sequence: Synthetic oligonucleotide
  Sense strand starting at position 3421 of SEQ ID NO: 1886289
ggcagaagagcucgcugaa

SEQ ID NO: 2399259 - RNA, 19 nt, Artificial Sequence
  Description of Artificial Sequence: Synthetic oligonucleotide
  Antisense strand to SEQ ID NO: 2399258
uucagcgagcucuucugcc

SEQ ID NO: 2399260 - RNA, 19 nt, Artificial Sequence
  Description of Artificial Sequence: Synthetic oligonucleotide
  Sense strand starting at position 3743 of SEQ ID NO: 1886289
gguucucaucaucgaucca

SEQ ID NO: 2399261 - RNA, 19 nt, Artificial Sequence
  Description of Artificial Sequence: Synthetic oligonucleotide
  Antisense strand to SEQ ID NO: 2399260
uggaucgaugaugagaacc

SEQ ID NO: 2399262 - RNA, 19 nt, Artificial Sequence
  Description of Artificial Sequence: Synthetic oligonucleotide
  Sense strand starting at position 3965 of SEQ ID NO: 1886289
aggacauguguccaaccau

SEQ ID NO: 2399263 - RNA, 19 nt, Artificial Sequence
  Description of Artificial Sequence: Synthetic oligonucleotide
  Antisense strand to SEQ ID NO: 2399262
augguuggacacauguccu

SEQ ID NO: 2399264 - RNA, 19 nt, Artificial Sequence
  Description of Artificial Sequence: Synthetic oligonucleotide
  Sense strand starting at position 259 of SEQ ID NO: 1886290
gggucaccaucucgaggaa

SEQ ID NO: 2399265 - RNA, 19 nt, Artificial Sequence
  Description of Artificial Sequence: Synthetic oligonucleotide
  Antisense strand to SEQ ID NO: 2399264
uuccucgagauggugaccc

SEQ ID NO: 2399266 - RNA, 19 nt, Artificial Sequence
  Description of Artificial Sequence: Synthetic oligonucleotide
  Sense strand starting at position 388 of SEQ ID NO: 1886290
guggaauacuggcccauca

SEQ ID NO: 2399267 - RNA, 19 nt, Artificial Sequence
  Description of Artificial Sequence: Synthetic oligonucleotide
  Antisense strand to SEQ ID NO: 2399266
ugaugggccaguauuccac

SEQ ID NO: 2399268 - RNA, 19 nt, Artificial Sequence
  Description of Artificial Sequence: Synthetic oligonucleotide
  Sense strand starting at position 755 of SEQ ID NO: 1886290
ugcuuucucuggugagucu

SEQ ID NO: 2399269 - RNA, 19 nt, Artificial Sequence
  Description of Artificial Sequence: Synthetic oligonucleotide
  Antisense strand to SEQ ID NO: 2399268
agacucaccagagaaagca

SEQ ID NO: 2399270 - RNA, 19 nt, Artificial Sequence
  Description of Artificial Sequence: Synthetic oligonucleotide
  Sense strand starting at position 846 of SEQ ID NO: 1886290
cuccuuucuucggguccaa

SEQ ID NO: 2399271 - RNA, 19 nt, Artificial Sequence
  Description of Artificial Sequence: Synthetic oligonucleotide
  Antisense strand to SEQ ID NO: 2399270
uuggacccgaagaaaggag

SEQ ID NO: 2399272 - RNA, 19 nt, Artificial Sequence
  Description of Artificial Sequence: Synthetic oligonucleotide
  Sense strand starting at position 914 of SEQ ID NO: 1886290
gcaaauugccaggagcaga

SEQ ID NO: 2399273 - RNA, 19 nt, Artificial Sequence
  Description of Artificial Sequence: Synthetic oligonucleotide
  Antisense strand to SEQ ID NO: 2399272
ucugcuccuggcaauuugc

SEQ ID NO: 2399274 - RNA, 19 nt, Artificial Sequence
  Description of Artificial Sequence: Synthetic oligonucleotide
  Sense strand starting at position 1020 of SEQ ID NO: 1886290
gggugacuuucagugggau

SEQ ID NO: 2399275 - RNA, 19 nt, Artificial Sequence
  Description of Artificial Sequence: Synthetic oligonucleotide
  Antisense strand to SEQ ID NO: 2399274
aucccacugaaagucaccc

SEQ ID NO: 2399276 - RNA, 19 nt, Artificial Sequence
  Description of Artificial Sequence: Synthetic oligonucleotide
  Sense strand starting at position 1021 of SEQ ID NO: 1886290
ggugacuuucagugggaug

SEQ ID NO: 2399277 - RNA, 19 nt, Artificial Sequence
  Description of Artificial Sequence: Synthetic oligonucleotide
  Antisense strand to SEQ ID NO: 2399276
caucccacugaaagucacc

SEQ ID NO: 2399278 - RNA, 19 nt, Artificial Sequence
  Description of Artificial Sequence: Synthetic oligonucleotide
  Sense strand starting at position 1023 of SEQ ID NO: 1886290
ugacuuucagugggaugca

SEQ ID NO: 2399279 - RNA, 19 nt, Artificial Sequence
  Description of Artificial Sequence: Synthetic oligonucleotide
  Antisense strand to SEQ ID NO: 2399278
ugcaucccacugaaaguca

SEQ ID NO: 2399280 - RNA, 19 nt, Artificial Sequence
  Description of Artificial Sequence: Synthetic oligonucleotide
  Sense strand starting at position 1108 of SEQ ID NO: 1886290
agaggucagcuuugaccua

SEQ ID NO: 2399281 - RNA, 19 nt, Artificial Sequence
  Description of Artificial Sequence: Synthetic oligonucleotide
  Antisense strand to SEQ ID NO: 2399280
uaggucaaagcugaccucu

SEQ ID NO: 2399282 - RNA, 19 nt, Artificial Sequence
  Description of Artificial Sequence: Synthetic oligonucleotide
  Sense strand starting at position 1109 of SEQ ID NO: 1886290
gaggucagcuuugaccuaa

SEQ ID NO: 2399283 - RNA, 19 nt, Artificial Sequence
  Description of Artificial Sequence: Synthetic oligonucleotide
  Antisense strand to SEQ ID NO: 2399282
uuaggucaaagcugaccuc

SEQ ID NO: 2399284 - RNA, 19 nt, Artificial Sequence
  Description of Artificial Sequence: Synthetic oligonucleotide
  Sense strand starting at position 1212 of SEQ ID NO: 1886290
ggccaugugucaggugcaa

SEQ ID NO: 2399285 - RNA, 19 nt, Artificial Sequence
  Description of Artificial Sequence: Synthetic oligonucleotide
  Antisense strand to SEQ ID NO: 2399284
uugcaccugacacauggcc

SEQ ID NO: 2399286 - RNA, 19 nt, Artificial Sequence
  Description of Artificial Sequence: Synthetic oligonucleotide
  Sense strand starting at position 1273 of SEQ ID NO: 1886290
accuuucuccagggacaga

SEQ ID NO: 2399287 - RNA, 19 nt, Artificial Sequence
  Description of Artificial Sequence: Synthetic oligonucleotide
  Antisense strand to SEQ ID NO: 2399286
ucugucccuggagaaaggu

SEQ ID NO: 2399288 - RNA, 19 nt, Artificial Sequence
  Description of Artificial Sequence: Synthetic oligonucleotide
  Sense strand starting at position 1478 of SEQ ID NO: 1886290
gguucuuguuucccaggaa

SEQ ID NO: 2399289 - RNA, 19 nt, Artificial Sequence
  Description of Artificial Sequence: Synthetic oligonucleotide
  Antisense strand to SEQ ID NO: 2399288
uuccugggaaacaagaacc

SEQ ID NO: 2399290 - RNA, 19 nt, Artificial Sequence
  Description of Artificial Sequence: Synthetic oligonucleotide
  Sense strand starting at position 1479 of SEQ ID NO: 1886290
guucuuguuucccaggaag

SEQ ID NO: 2399291 - RNA, 19 nt, Artificial Sequence
  Description of Artificial Sequence: Synthetic oligonucleotide
  Antisense strand to SEQ ID NO: 2399290
cuuccugggaaacaagaac

SEQ ID NO: 2399292 - RNA, 19 nt, Artificial Sequence
  Description of Artificial Sequence: Synthetic oligonucleotide
  Sense strand starting at position 1481 of SEQ ID NO: 1886290
ucuuguuucccaggaaguc

SEQ ID NO: 2399293 - RNA, 19 nt, Artificial Sequence
  Description of Artificial Sequence: Synthetic oligonucleotide
  Antisense strand to SEQ ID NO: 2399292
gacuuccugggaaacaaga

SEQ ID NO: 2399294 - RNA, 19 nt, Artificial Sequence
  Description of Artificial Sequence: Synthetic oligonucleotide
  Sense strand starting at position 1651 of SEQ ID NO: 1886290
gggucuuccauguggaaga

SEQ ID NO: 2399295 - RNA, 19 nt, Artificial Sequence
  Description of Artificial Sequence: Synthetic oligonucleotide
  Antisense strand to SEQ ID NO: 2399294
ucuuccacauggaagaccc

SEQ ID NO: 2399296 - RNA, 19 nt, Artificial Sequence
  Description of Artificial Sequence: Synthetic oligonucleotide
  Sense strand starting at position 2200 of SEQ ID NO: 1886290
aggaguaagacagguguga

SEQ ID NO: 2399297 - RNA, 19 nt, Artificial Sequence
  Description of Artificial Sequence: Synthetic oligonucleotide
  Antisense strand to SEQ ID NO: 2399296
ucacaccugucuuacuccu

SEQ ID NO: 2399298 - RNA, 19 nt, Artificial Sequence
  Description of Artificial Sequence: Synthetic oligonucleotide
  Sense strand starting at position 2202 of SEQ ID NO: 1886290
gaguaagacaggugugaaa

SEQ ID NO: 2399299 - RNA, 19 nt, Artificial Sequence
  Description of Artificial Sequence: Synthetic oligonucleotide
  Antisense strand to SEQ ID NO: 2399298
uuucacaccugucuuacuc

SEQ ID NO: 2399300 - RNA, 19 nt, Artificial Sequence
  Description of Artificial Sequence: Synthetic oligonucleotide
  Sense strand starting at position 2633 of SEQ ID NO: 1886290
cccagcauguccuagaaau

SEQ ID NO: 2399301 - RNA, 19 nt, Artificial Sequence
  Description of Artificial Sequence: Synthetic oligonucleotide
  Antisense strand to SEQ ID NO: 2399300
auuucuaggacaugcuggg

SEQ ID NO: 2399302 - RNA, 19 nt, Artificial Sequence
  Description of Artificial Sequence: Synthetic oligonucleotide
  Sense strand starting at position 2635 of SEQ ID NO: 1886290
cagcauguccuagaaauug

SEQ ID NO: 2399303 - RNA, 19 nt, Artificial Sequence
  Description of Artificial Sequence: Synthetic oligonucleotide
  Antisense strand to SEQ ID NO: 2399302
caauuucuaggacaugcug

SEQ ID NO: 2399304 - RNA, 19 nt, Artificial Sequence
  Description of Artificial Sequence: Synthetic oligonucleotide
  Sense strand starting at position 2762 of SEQ ID NO: 1886290
ggugacuucuccuuuccuu

SEQ ID NO: 2399305 - RNA, 19 nt, Artificial Sequence
  Description of Artificial Sequence: Synthetic oligonucleotide
  Antisense strand to SEQ ID NO: 2399304
aaggaaaggagaagucacc

SEQ ID NO: 2399306 - RNA, 19 nt, Artificial Sequence
  Description of Artificial Sequence: Synthetic oligonucleotide
  Sense strand starting at position 2825 of SEQ ID NO: 1886290
gcagcaugcguggcauauu

SEQ ID NO: 2399307 - RNA, 19 nt, Artificial Sequence
  Description of Artificial Sequence: Synthetic oligonucleotide
  Antisense strand to SEQ ID NO: 2399306
aauaugccacgcaugcugc

SEQ ID NO: 2399308 - RNA, 19 nt, Artificial Sequence
  Description of Artificial Sequence: Synthetic oligonucleotide
  Sense strand starting at position 3130 of SEQ ID NO: 1886290
ggcaauaauucgugugcga

SEQ ID NO: 2399309 - RNA, 19 nt, Artificial Sequence
  Description of Artificial Sequence: Synthetic oligonucleotide
  Antisense strand to SEQ ID NO: 2399308
ucgcacacgaauuauugcc

SEQ ID NO: 2399310 - RNA, 19 nt, Artificial Sequence
  Description of Artificial Sequence: Synthetic oligonucleotide
  Sense strand starting at position 3131 of SEQ ID NO: 1886290
gcaauaauucgugugcgau

SEQ ID NO: 2399311 - RNA, 19 nt, Artificial Sequence
  Description of Artificial Sequence: Synthetic oligonucleotide
  Antisense strand to SEQ ID NO: 2399310
aucgcacacgaauuauugc

SEQ ID NO: 2399312 - RNA, 19 nt, Artificial Sequence
  Description of Artificial Sequence: Synthetic oligonucleotide
  Sense strand starting at position 3132 of SEQ ID NO: 1886290
caauaauucgugugcgauu

SEQ ID NO: 2399313 - RNA, 19 nt, Artificial Sequence
  Description of Artificial Sequence: Synthetic oligonucleotide
  Antisense strand to SEQ ID NO: 2399312
aaucgcacacgaauuauug

SEQ ID NO: 2399314 - RNA, 19 nt, Artificial Sequence
  Description of Artificial Sequence: Synthetic oligonucleotide
  Sense strand starting at position 3133 of SEQ ID NO: 1886290
aauaauucgugugcgauuc

SEQ ID NO: 2399315 - RNA, 19 nt, Artificial Sequence
  Description of Artificial Sequence: Synthetic oligonucleotide
  Antisense strand to SEQ ID NO: 2399314
gaaucgcacacgaauuauu

SEQ ID NO: 2399316 - RNA, 19 nt, Artificial Sequence
  Description of Artificial Sequence: Synthetic oligonucleotide
  Sense strand starting at position 3134 of SEQ ID NO: 1886290
auaauucgugugcgauucu

SEQ ID NO: 2399317 - RNA, 19 nt, Artificial Sequence
  Description of Artificial Sequence: Synthetic oligonucleotide
  Antisense strand to SEQ ID NO: 2399316
agaaucgcacacgaauuau

SEQ ID NO: 2399318 - RNA, 19 nt, Artificial Sequence
  Description of Artificial Sequence: Synthetic oligonucleotide
  Sense strand starting at position 3135 of SEQ ID NO: 1886290
uaauucgugugcgauucuu

SEQ ID NO: 2399319 - RNA, 19 nt, Artificial Sequence
  Description of Artificial Sequence: Synthetic oligonucleotide
  Antisense strand to SEQ ID NO: 2399318
aagaaucgcacacgaauua

SEQ ID NO: 2399320 - RNA, 19 nt, Artificial Sequence
  Description of Artificial Sequence: Synthetic oligonucleotide
  Sense strand starting at position 3137 of SEQ ID NO: 1886290
auucgugugcgauucuuga

SEQ ID NO: 2399321 - RNA, 19 nt, Artificial Sequence
  Description of Artificial Sequence: Synthetic oligonucleotide
  Antisense strand to SEQ ID NO: 2399320
ucaagaaucgcacacgaau

SEQ ID NO: 2399322 - RNA, 19 nt, Artificial Sequence
  Description of Artificial Sequence: Synthetic oligonucleotide
  Sense strand starting at position 3139 of SEQ ID NO: 1886290
ucgugugcgauucuugaau

SEQ ID NO: 2399323 - RNA, 19 nt, Artificial Sequence
  Description of Artificial Sequence: Synthetic oligonucleotide
  Antisense strand to SEQ ID NO: 2399322
auucaagaaucgcacacga

SEQ ID NO: 2399324 - RNA, 19 nt, Artificial Sequence
  Description of Artificial Sequence: Synthetic oligonucleotide
  Sense strand starting at position 3141 of SEQ ID NO: 1886290
gugugcgauucuugaaucu

SEQ ID NO: 2399325 - RNA, 19 nt, Artificial Sequence
  Description of Artificial Sequence: Synthetic oligonucleotide
  Antisense strand to SEQ ID NO: 2399324
agauucaagaaucgcacac

SEQ ID NO: 2399326 - RNA, 19 nt, Artificial Sequence
  Description of Artificial Sequence: Synthetic oligonucleotide
  Sense strand starting at position 3165 of SEQ ID NO: 1886290
gcucgaauccauggguucu

SEQ ID NO: 2399327 - RNA, 19 nt, Artificial Sequence
  Description of Artificial Sequence: Synthetic oligonucleotide
  Antisense strand to SEQ ID NO: 2399326
agaacccauggauucgagc

SEQ ID NO: 2399328 - RNA, 19 nt, Artificial Sequence
  Description of Artificial Sequence: Synthetic oligonucleotide
  Sense strand starting at position 3166 of SEQ ID NO: 1886290
cucgaauccauggguucua

SEQ ID NO: 2399329 - RNA, 19 nt, Artificial Sequence
  Description of Artificial Sequence: Synthetic oligonucleotide
  Antisense strand to SEQ ID NO: 2399328
uagaacccauggauucgag

SEQ ID NO: 2399330 - RNA, 19 nt, Artificial Sequence
  Description of Artificial Sequence: Synthetic oligonucleotide
  Sense strand starting at position 3284 of SEQ ID NO: 1886290
agaccaaugcacugagacu

SEQ ID NO: 2399331 - RNA, 19 nt, Artificial Sequence
  Description of Artificial Sequence: Synthetic oligonucleotide
  Antisense strand to SEQ ID NO: 2399330
agucucagugcauuggucu

SEQ ID NO: 2399332 - RNA, 19 nt, Artificial Sequence
  Description of Artificial Sequence: Synthetic oligonucleotide
  Sense strand starting at position 3589 of SEQ ID NO: 1886290
ggacgagcucacugaaaca

SEQ ID NO: 2399333 - RNA, 19 nt, Artificial Sequence
  Description of Artificial Sequence: Synthetic oligonucleotide
  Antisense strand to SEQ ID NO: 2399332
uguuucagugagcucgucc

SEQ ID NO: 2399334 - RNA, 19 nt, Artificial Sequence
  Description of Artificial Sequence: Synthetic oligonucleotide
  Sense strand starting at position 138 of SEQ ID NO: 1886291
gccuccuccuugugucaga

SEQ ID NO: 2399335 - RNA, 19 nt, Artificial Sequence
  Description of Artificial Sequence: Synthetic oligonucleotide
  Antisense strand to SEQ ID NO: 2399334
ucugacacaaggaggaggc

SEQ ID NO: 2399336 - RNA, 19 nt, Artificial Sequence
  Description of Artificial Sequence: Synthetic oligonucleotide
  Sense strand starting at position 139 of SEQ ID NO: 1886291
ccuccuccuugugucagau

SEQ ID NO: 2399337 - RNA, 19 nt, Artificial Sequence
  Description of Artificial Sequence: Synthetic oligonucleotide
  Antisense strand to SEQ ID NO: 2399336
aucugacacaaggaggagg

SEQ ID NO: 2399338 - RNA, 19 nt, Artificial Sequence
  Description of Artificial Sequence: Synthetic oligonucleotide
  Sense strand starting at position 149 of SEQ ID NO: 1886291
gugucagauucccaaggaa

SEQ ID NO: 2399339 - RNA, 19 nt, Artificial Sequence
  Description of Artificial Sequence: Synthetic oligonucleotide
  Antisense strand to SEQ ID NO: 2399338
uuccuugggaaucugacac

SEQ ID NO: 2399340 - RNA, 19 nt, Artificial Sequence
  Description of Artificial Sequence: Synthetic oligonucleotide
  Sense strand starting at position 551 of SEQ ID NO: 1886291
ccuugugauucccagcauc

SEQ ID NO: 2399341 - RNA, 19 nt, Artificial Sequence
  Description of Artificial Sequence: Synthetic oligonucleotide
  Antisense strand to SEQ ID NO: 2399340
gaugcugggaaucacaagg

SEQ ID NO: 2399342 - RNA, 19 nt, Artificial Sequence
  Description of Artificial Sequence: Synthetic oligonucleotide
  Sense strand starting at position 958 of SEQ ID NO: 1886291
ggacucaugugaugggauc

SEQ ID NO: 2399343 - RNA, 19 nt, Artificial Sequence
  Description of Artificial Sequence: Synthetic oligonucleotide
  Antisense strand to SEQ ID NO: 2399342
gaucccaucacaugagucc

SEQ ID NO: 2399344 - RNA, 19 nt, Artificial Sequence
  Description of Artificial Sequence: Synthetic oligonucleotide
  Sense strand starting at position 969 of SEQ ID NO: 1886291
augggauccaugugaaacg

SEQ ID NO: 2399345 - RNA, 19 nt, Artificial Sequence
  Description of Artificial Sequence: Synthetic oligonucleotide
  Antisense strand to SEQ ID NO: 2399344
cguuucacauggaucccau

SEQ ID NO: 2399346 - RNA, 19 nt, Artificial Sequence
  Description of Artificial Sequence: Synthetic oligonucleotide
  Sense strand starting at position 1205 of SEQ ID NO: 1886291
caaggaagcuugcucugaa

SEQ ID NO: 2399347 - RNA, 19 nt, Artificial Sequence
  Description of Artificial Sequence: Synthetic oligonucleotide
  Antisense strand to SEQ ID NO: 2399346
uucagagcaagcuuccuug

SEQ ID NO: 2399348 - RNA, 19 nt, Artificial Sequence
  Description of Artificial Sequence: Synthetic oligonucleotide
  Sense strand starting at position 1206 of SEQ ID NO: 1886291
aaggaagcuugcucugaag

SEQ ID NO: 2399349 - RNA, 19 nt, Artificial Sequence
  Description of Artificial Sequence: Synthetic oligonucleotide
  Antisense strand to SEQ ID NO: 2399348
cuucagagcaagcuuccuu

SEQ ID NO: 2399350 - RNA, 19 nt, Artificial Sequence
  Description of Artificial Sequence: Synthetic oligonucleotide
  Sense strand starting at position 1208 of SEQ ID NO: 1886291
ggaagcuugcucugaagcu

SEQ ID NO: 2399351 - RNA, 19 nt, Artificial Sequence
  Description of Artificial Sequence: Synthetic oligonucleotide
  Antisense strand to SEQ ID NO: 2399350
agcuucagagcaagcuucc

SEQ ID NO: 2399352 - RNA, 19 nt, Artificial Sequence
  Description of Artificial Sequence: Synthetic oligonucleotide
  Sense strand starting at position 1209 of SEQ ID NO: 1886291
gaagcuugcucugaagcua

SEQ ID NO: 2399353 - RNA, 19 nt, Artificial Sequence
  Description of Artificial Sequence: Synthetic oligonucleotide
  Antisense strand to SEQ ID NO: 2399352
uagcuucagagcaagcuuc

SEQ ID NO: 2399354 - RNA, 19 nt, Artificial Sequence
  Description of Artificial Sequence: Synthetic oligonucleotide
  Sense strand starting at position 2180 of SEQ ID NO: 1886291
gggucaccaucucgaggaa

SEQ ID NO: 2399355 - RNA, 19 nt, Artificial Sequence
  Description of Artificial Sequence: Synthetic oligonucleotide
  Antisense strand to SEQ ID NO: 2399354
uuccucgagauggugaccc

SEQ ID NO: 2399356 - RNA, 19 nt, Artificial Sequence
  Description of Artificial Sequence: Synthetic oligonucleotide
  Sense strand starting at position 2309 of SEQ ID NO: 1886291
guggaauacuggcccauca

SEQ ID NO: 2399357 - RNA, 19 nt, Artificial Sequence
  Description of Artificial Sequence: Synthetic oligonucleotide
  Antisense strand to SEQ ID NO: 2399356
ugaugggccaguauuccac

SEQ ID NO: 2399358 - RNA, 19 nt, Artificial Sequence
  Description of Artificial Sequence: Synthetic oligonucleotide
  Sense strand starting at position 2676 of SEQ ID NO: 1886291
ugcuuucucuggugagucu

SEQ ID NO: 2399359 - RNA, 19 nt, Artificial Sequence
  Description of Artificial Sequence: Synthetic oligonucleotide
  Antisense strand to SEQ ID NO: 2399358
agacucaccagagaaagca

SEQ ID NO: 2399360 - RNA, 19 nt, Artificial Sequence
  Description of Artificial Sequence: Synthetic oligonucleotide
  Sense strand starting at position 2767 of SEQ ID NO: 1886291
cuccuuucuucggguccaa

SEQ ID NO: 2399361 - RNA, 19 nt, Artificial Sequence
  Description of Artificial Sequence: Synthetic oligonucleotide
  Antisense strand to SEQ ID NO: 2399360
uuggacccgaagaaaggag

SEQ ID NO: 2399362 - RNA, 19 nt, Artificial Sequence
  Description of Artificial Sequence: Synthetic oligonucleotide
  Sense strand starting at position 2835 of SEQ ID NO: 1886291
gcaaauugccaggagcaga

SEQ ID NO: 2399363 - RNA, 19 nt, Artificial Sequence
  Description of Artificial Sequence: Synthetic oligonucleotide
  Antisense strand to SEQ ID NO: 2399362
ucugcuccuggcaauuugc

SEQ ID NO: 2399364 - RNA, 19 nt, Artificial Sequence
  Description of Artificial Sequence: Synthetic oligonucleotide
  Sense strand starting at position 2941 of SEQ ID NO: 1886291
gggugacuuucagugggau

SEQ ID NO: 2399365 - RNA, 19 nt, Artificial Sequence
  Description of Artificial Sequence: Synthetic oligonucleotide
  Antisense strand to SEQ ID NO: 2399364
aucccacugaaagucaccc

SEQ ID NO: 2399366 - RNA, 19 nt, Artificial Sequence
  Description of Artificial Sequence: Synthetic oligonucleotide
  Sense strand starting at position 2942 of SEQ ID NO: 1886291
ggugacuuucagugggaug

SEQ ID NO: 2399367 - RNA, 19 nt, Artificial Sequence
  Description of Artificial Sequence: Synthetic oligonucleotide
  Antisense strand to SEQ ID NO: 2399366
caucccacugaaagucacc

SEQ ID NO: 2399368 - RNA, 19 nt, Artificial Sequence
  Description of Artificial Sequence: Synthetic oligonucleotide
  Sense strand starting at position 2944 of SEQ ID NO: 1886291
ugacuuucagugggaugca

SEQ ID NO: 2399369 - RNA, 19 nt, Artificial Sequence
  Description of Artificial Sequence: Synthetic oligonucleotide
  Antisense strand to SEQ ID NO: 2399368
ugcaucccacugaaaguca

SEQ ID NO: 2399370 - RNA, 19 nt, Artificial Sequence
  Description of Artificial Sequence: Synthetic oligonucleotide
  Sense strand starting at position 3029 of SEQ ID NO: 1886291
agaggucagcuuugaccua

SEQ ID NO: 2399371 - RNA, 19 nt, Artificial Sequence
  Description of Artificial Sequence: Synthetic oligonucleotide
  Antisense strand to SEQ ID NO: 2399370
uaggucaaagcugaccucu

SEQ ID NO: 2399372 - RNA, 19 nt, Artificial Sequence
  Description of Artificial Sequence: Synthetic oligonucleotide
  Sense strand starting at position 3030 of SEQ ID NO: 1886291
gaggucagcuuugaccuaa

SEQ ID NO: 2399373 - RNA, 19 nt, Artificial Sequence
  Description of Artificial Sequence: Synthetic oligonucleotide
  Antisense strand to SEQ ID NO: 2399372
uuaggucaaagcugaccuc

SEQ ID NO: 2399374 - RNA, 19 nt, Artificial Sequence
  Description of Artificial Sequence: Synthetic oligonucleotide
  Sense strand starting at position 3133 of SEQ ID NO: 1886291
ggccaugugucaggugcaa

SEQ ID NO: 2399375 - RNA, 19 nt, Artificial Sequence
  Description of Artificial Sequence: Synthetic oligonucleotide
  Antisense strand to SEQ ID NO: 2399374
uugcaccugacacauggcc

SEQ ID NO: 2399376 - RNA, 19 nt, Artificial Sequence
  Description of Artificial Sequence: Synthetic oligonucleotide
  Sense strand starting at position 3194 of SEQ ID NO: 1886291
accuuucuccagggacaga

SEQ ID NO: 2399377 - RNA, 19 nt, Artificial Sequence
  Description of Artificial Sequence: Synthetic oligonucleotide
  Antisense strand to SEQ ID NO: 2399376
ucugucccuggagaaaggu

SEQ ID NO: 2399378 - RNA, 19 nt, Artificial Sequence
  Description of Artificial Sequence: Synthetic oligonucleotide
  Sense strand starting at position 3399 of SEQ ID NO: 1886291
gguucuuguuucccaggaa

SEQ ID NO: 2399379 - RNA, 19 nt, Artificial Sequence
  Description of Artificial Sequence: Synthetic oligonucleotide
  Antisense strand to SEQ ID NO: 2399378
uuccugggaaacaagaacc

SEQ ID NO: 2399380 - RNA, 19 nt, Artificial Sequence
  Description of Artificial Sequence: Synthetic oligonucleotide
  Sense strand starting at position 3400 of SEQ ID NO: 1886291
guucuuguuucccaggaag

SEQ ID NO: 2399381 - RNA, 19 nt, Artificial Sequence
  Description of Artificial Sequence: Synthetic oligonucleotide
  Antisense strand to SEQ ID NO: 2399380
cuuccugggaaacaagaac

SEQ ID NO: 2399382 - RNA, 19 nt, Artificial Sequence
  Description of Artificial Sequence: Synthetic oligonucleotide
  Sense strand starting at position 3402 of SEQ ID NO: 1886291
ucuuguuucccaggaaguc

SEQ ID NO: 2399383 - RNA, 19 nt, Artificial Sequence
  Description of Artificial Sequence: Synthetic oligonucleotide
  Antisense strand to SEQ ID NO: 2399382
gacuuccugggaaacaaga

SEQ ID NO: 2399384 - RNA, 19 nt, Artificial Sequence
  Description of Artificial Sequence: Synthetic oligonucleotide
  Sense strand starting at position 3572 of SEQ ID NO: 1886291
gggucuuccauguggaaga

SEQ ID NO: 2399385 - RNA, 19 nt, Artificial Sequence
  Description of Artificial Sequence: Synthetic oligonucleotide
  Antisense strand to SEQ ID NO: 2399384
ucuuccacauggaagaccc

SEQ ID NO: 2399386 - RNA, 19 nt, Artificial Sequence
  Description of Artificial Sequence: Synthetic oligonucleotide
  Sense strand starting at position 547 of SEQ ID NO: 1886292
ccauguaaacaguaacgau

SEQ ID NO: 2399387 - RNA, 19 nt, Artificial Sequence
  Description of Artificial Sequence: Synthetic oligonucleotide
  Antisense strand to SEQ ID NO: 2399386
aucguuacuguuuacaugg

SEQ ID NO: 2399388 - RNA, 19 nt, Artificial Sequence
  Description of Artificial Sequence: Synthetic oligonucleotide
  Sense strand starting at position 556 of SEQ ID NO: 1886292
caguaacgaucaugaaugu

SEQ ID NO: 2399389 - RNA, 19 nt, Artificial Sequence
  Description of Artificial Sequence: Synthetic oligonucleotide
  Antisense strand to SEQ ID NO: 2399388
acauucaugaucguuacug

SEQ ID NO: 2399390 - RNA, 19 nt, Artificial Sequence
  Description of Artificial Sequence: Synthetic oligonucleotide
  Sense strand starting at position 676 of SEQ ID NO: 1886292
caaguaggcugaccugaau

SEQ ID NO: 2399391 - RNA, 19 nt, Artificial Sequence
  Description of Artificial Sequence: Synthetic oligonucleotide
  Antisense strand to SEQ ID NO: 2399390
auucaggucagccuacuug

SEQ ID NO: 2399392 - RNA, 19 nt, Artificial Sequence
  Description of Artificial Sequence: Synthetic oligonucleotide
  Sense strand starting at position 819 of SEQ ID NO: 1886292
aggccaugcucagucaauc

SEQ ID NO: 2399393 - RNA, 19 nt, Artificial Sequence
  Description of Artificial Sequence: Synthetic oligonucleotide
  Antisense strand to SEQ ID NO: 2399392
gauugacugagcauggccu

SEQ ID NO: 2399394 - RNA, 19 nt, Artificial Sequence
  Description of Artificial Sequence: Synthetic oligonucleotide
  Sense strand starting at position 825 of SEQ ID NO: 1886292
ugcucagucaaucagggaa

SEQ ID NO: 2399395 - RNA, 19 nt, Artificial Sequence
  Description of Artificial Sequence: Synthetic oligonucleotide
  Antisense strand to SEQ ID NO: 2399394
uucccugauugacugagca

SEQ ID NO: 2399396 - RNA, 19 nt, Artificial Sequence
  Description of Artificial Sequence: Synthetic oligonucleotide
  Sense strand starting at position 1008 of SEQ ID NO: 1886292
ugaccuuuagcgggacaca

SEQ ID NO: 2399397 - RNA, 19 nt, Artificial Sequence
  Description of Artificial Sequence: Synthetic oligonucleotide
  Antisense strand to SEQ ID NO: 2399396
ugugucccgcuaaagguca

SEQ ID NO: 2399398 - RNA, 19 nt, Artificial Sequence
  Description of Artificial Sequence: Synthetic oligonucleotide
  Sense strand starting at position 1164 of SEQ ID NO: 1886292
ggcccauugcucuacaggu

SEQ ID NO: 2399399 - RNA, 19 nt, Artificial Sequence
  Description of Artificial Sequence: Synthetic oligonucleotide
  Antisense strand to SEQ ID NO: 2399398
accuguagagcaaugggcc

SEQ ID NO: 2399400 - RNA, 19 nt, Artificial Sequence
  Description of Artificial Sequence: Synthetic oligonucleotide
  Sense strand starting at position 1365 of SEQ ID NO: 1886292
ugacuugugcacugagucu

SEQ ID NO: 2399401 - RNA, 19 nt, Artificial Sequence
  Description of Artificial Sequence: Synthetic oligonucleotide
  Antisense strand to SEQ ID NO: 2399400
agacucagugcacaaguca

SEQ ID NO: 2399402 - RNA, 19 nt, Artificial Sequence
  Description of Artificial Sequence: Synthetic oligonucleotide
  Sense strand starting at position 1398 of SEQ ID NO: 1886292
acugcauugaguugaagga

SEQ ID NO: 2399403 - RNA, 19 nt, Artificial Sequence
  Description of Artificial Sequence: Synthetic oligonucleotide
  Antisense strand to SEQ ID NO: 2399402
uccuucaacucaaugcagu

SEQ ID NO: 2399404 - RNA, 19 nt, Artificial Sequence
  Description of Artificial Sequence: Synthetic oligonucleotide
  Sense strand starting at position 1665 of SEQ ID NO: 1886292
ggcagaagagcucgcugaa

SEQ ID NO: 2399405 - RNA, 19 nt, Artificial Sequence
  Description of Artificial Sequence: Synthetic oligonucleotide
  Antisense strand to SEQ ID NO: 2399404
uucagcgagcucuucugcc

SEQ ID NO: 2399406 - RNA, 19 nt, Artificial Sequence
  Description of Artificial Sequence: Synthetic oligonucleotide
  Sense strand starting at position 1987 of SEQ ID NO: 1886292
gguucucaucaucgaucca

SEQ ID NO: 2399407 - RNA, 19 nt, Artificial Sequence
  Description of Artificial Sequence: Synthetic oligonucleotide
  Antisense strand to SEQ ID NO: 2399406
uggaucgaugaugagaacc

SEQ ID NO: 2399408 - RNA, 19 nt, Artificial Sequence
  Description of Artificial Sequence: Synthetic oligonucleotide
  Sense strand starting at position 2209 of SEQ ID NO: 1886292
aggacauguguccaaccau

SEQ ID NO: 2399409 - RNA, 19 nt, Artificial Sequence
  Description of Artificial Sequence: Synthetic oligonucleotide
  Antisense strand to SEQ ID NO: 2399408
augguuggacacauguccu

SEQ ID NO: 2399410 - RNA, 19 nt, Artificial Sequence
  Description of Artificial Sequence: Synthetic oligonucleotide
  Sense strand starting at position 2314 of SEQ ID NO: 1886292
gggaaacacugauguguca

SEQ ID NO: 2399411 - RNA, 19 nt, Artificial Sequence
  Description of Artificial Sequence: Synthetic oligonucleotide
  Antisense strand to SEQ ID NO: 2399410
ugacacaucaguguuuccc

SEQ ID NO: 2399412 - RNA, 19 nt, Artificial Sequence
  Description of Artificial Sequence: Synthetic oligonucleotide
  Sense strand starting at position 2321 of SEQ ID NO: 1886292
acugaugugucauagauca

SEQ ID NO: 2399413 - RNA, 19 nt, Artificial Sequence
  Description of Artificial Sequence: Synthetic oligonucleotide
  Antisense strand to SEQ ID NO: 2399412
ugaucuaugacacaucagu

SEQ ID NO: 2399414 - RNA, 19 nt, Artificial Sequence
  Description of Artificial Sequence: Synthetic oligonucleotide
  Sense strand starting at position 2490 of SEQ ID NO: 1886292
guaucuggauccuugggua

SEQ ID NO: 2399415 - RNA, 19 nt, Artificial Sequence
  Description of Artificial Sequence: Synthetic oligonucleotide
  Antisense strand to SEQ ID NO: 2399414
uacccaaggauccagauac

SEQ ID NO: 2399416 - RNA, 19 nt, Artificial Sequence
  Description of Artificial Sequence: Synthetic oligonucleotide
  Sense strand starting at position 2682 of SEQ ID NO: 1886292
ucuggugugucccaaucca

SEQ ID NO: 2399417 - RNA, 19 nt, Artificial Sequence
  Description of Artificial Sequence: Synthetic oligonucleotide
  Antisense strand to SEQ ID NO: 2399416
uggauugggacacaccaga

SEQ ID NO: 2399418 - RNA, 19 nt, Artificial Sequence
  Description of Artificial Sequence: Synthetic oligonucleotide
  Sense strand starting at position 2750 of SEQ ID NO: 1886292
ccgggagacauaugguauc

SEQ ID NO: 2399419 - RNA, 19 nt, Artificial Sequence
  Description of Artificial Sequence: Synthetic oligonucleotide
  Antisense strand to SEQ ID NO: 2399418
gauaccauaugucucccgg

SEQ ID NO: 2399420 - RNA, 19 nt, Artificial Sequence
  Description of Artificial Sequence: Synthetic oligonucleotide
  Sense strand starting at position 2763 of SEQ ID NO: 1886292
gguaucuucuccuuucuuu

SEQ ID NO: 2399421 - RNA, 19 nt, Artificial Sequence
  Description of Artificial Sequence: Synthetic oligonucleotide
  Antisense strand to SEQ ID NO: 2399420
aaagaaaggagaagauacc

SEQ ID NO: 2399422 - RNA, 19 nt, Artificial Sequence
  Description of Artificial Sequence: Synthetic oligonucleotide
  Sense strand starting at position 2820 of SEQ ID NO: 1886292
uuguccuaauggcugagaa

SEQ ID NO: 2399423 - RNA, 19 nt, Artificial Sequence
  Description of Artificial Sequence: Synthetic oligonucleotide
  Antisense strand to SEQ ID NO: 2399422
uucucagccauuaggacaa

SEQ ID NO: 2399424 - RNA, 19 nt, Artificial Sequence
  Description of Artificial Sequence: Synthetic oligonucleotide
  Sense strand starting at position 2821 of SEQ ID NO: 1886292
uguccuaauggcugagaag

SEQ ID NO: 2399425 - RNA, 19 nt, Artificial Sequence
  Description of Artificial Sequence: Synthetic oligonucleotide
  Antisense strand to SEQ ID NO: 2399424
cuucucagccauuaggaca

SEQ ID NO: 2399426 - RNA, 19 nt, Artificial Sequence
  Description of Artificial Sequence: Synthetic oligonucleotide
  Sense strand starting at position 3126 of SEQ ID NO: 1886292
cuggguuugcugcaaucca

SEQ ID NO: 2399427 - RNA, 19 nt, Artificial Sequence
  Description of Artificial Sequence: Synthetic oligonucleotide
  Antisense strand to SEQ ID NO: 2399426
uggauugcagcaaacccag

SEQ ID NO: 2399428 - RNA, 19 nt, Artificial Sequence
  Description of Artificial Sequence: Synthetic oligonucleotide
  Sense strand starting at position 3133 of SEQ ID NO: 1886292
ugcugcaauccaugaaucu

SEQ ID NO: 2399429 - RNA, 19 nt, Artificial Sequence
  Description of Artificial Sequence: Synthetic oligonucleotide
  Antisense strand to SEQ ID NO: 2399428
agauucauggauugcagca

SEQ ID NO: 2399430 - RNA, 19 nt, Artificial Sequence
  Description of Artificial Sequence: Synthetic oligonucleotide
  Sense strand starting at position 3254 of SEQ ID NO: 1886292
guggccuggccauguuaga

SEQ ID NO: 2399431 - RNA, 19 nt, Artificial Sequence
  Description of Artificial Sequence: Synthetic oligonucleotide
  Antisense strand to SEQ ID NO: 2399430
ucuaacauggccaggccac

SEQ ID NO: 2399432 - RNA, 19 nt, Artificial Sequence
  Description of Artificial Sequence: Synthetic oligonucleotide
  Sense strand starting at position 3330 of SEQ ID NO: 1886292
cccuuuccugccuggacaa

SEQ ID NO: 2399433 - RNA, 19 nt, Artificial Sequence
  Description of Artificial Sequence: Synthetic oligonucleotide
  Antisense strand to SEQ ID NO: 2399432
uuguccaggcaggaaaggg

SEQ ID NO: 2399434 - RNA, 19 nt, Artificial Sequence
  Description of Artificial Sequence: Synthetic oligonucleotide
  Sense strand starting at position 3387 of SEQ ID NO: 1886292
uaugucugauucccaagga

SEQ ID NO: 2399435 - RNA, 19 nt, Artificial Sequence
  Description of Artificial Sequence: Synthetic oligonucleotide
  Antisense strand to SEQ ID NO: 2399434
uccuugggaaucagacaua

SEQ ID NO: 2399436 - RNA, 19 nt, Artificial Sequence
  Description of Artificial Sequence: Synthetic oligonucleotide
  Sense strand starting at position 3388 of SEQ ID NO: 1886292
augucugauucccaaggaa

SEQ ID NO: 2399437 - RNA, 19 nt, Artificial Sequence
  Description of Artificial Sequence: Synthetic oligonucleotide
  Antisense strand to SEQ ID NO: 2399436
uuccuugggaaucagacau

SEQ ID NO: 2399438 - RNA, 19 nt, Artificial Sequence
  Description of Artificial Sequence: Synthetic oligonucleotide
  Sense strand starting at position 3538 of SEQ ID NO: 1886292
cucaccuaugcucgucaau

SEQ ID NO: 2399439 - RNA, 19 nt, Artificial Sequence
  Description of Artificial Sequence: Synthetic oligonucleotide
  Antisense strand to SEQ ID NO: 2399438
auugacgagcauaggugag

SEQ ID NO: 2399440 - RNA, 19 nt, Artificial Sequence
  Description of Artificial Sequence: Synthetic oligonucleotide
  Sense strand starting at position 3676 of SEQ ID NO: 1886292
gaaagucuggugugccuaa

SEQ ID NO: 2399441 - RNA, 19 nt, Artificial Sequence
  Description of Artificial Sequence: Synthetic oligonucleotide
  Antisense strand to SEQ ID NO: 2399440
uuaggcacaccagacuuuc

SEQ ID NO: 2399442 - RNA, 19 nt, Artificial Sequence
  Description of Artificial Sequence: Synthetic oligonucleotide
  Sense strand starting at position 3683 of SEQ ID NO: 1886292
uggugugccuaauagagga

SEQ ID NO: 2399443 - RNA, 19 nt, Artificial Sequence
  Description of Artificial Sequence: Synthetic oligonucleotide
  Antisense strand to SEQ ID NO: 2399442
uccucuauuaggcacacca

SEQ ID NO: 2399444 - RNA, 19 nt, Artificial Sequence
  Description of Artificial Sequence: Synthetic oligonucleotide
  Sense strand starting at position 257 of SEQ ID NO: 1886293
uggcaagucuuccuccaca

SEQ ID NO: 2399445 - RNA, 19 nt, Artificial Sequence
  Description of Artificial Sequence: Synthetic oligonucleotide
  Antisense strand to SEQ ID NO: 2399444
uguggaggaagacuugcca

SEQ ID NO: 2399446 - RNA, 19 nt, Artificial Sequence
  Description of Artificial Sequence: Synthetic oligonucleotide
  Sense strand starting at position 299 of SEQ ID NO: 1886293
gaagacauguguccaacca

SEQ ID NO: 2399447 - RNA, 19 nt, Artificial Sequence
  Description of Artificial Sequence: Synthetic oligonucleotide
  Antisense strand to SEQ ID NO: 2399446
ugguuggacacaugucuuc

SEQ ID NO: 2399448 - RNA, 19 nt, Artificial Sequence
  Description of Artificial Sequence: Synthetic oligonucleotide
  Sense strand starting at position 320 of SEQ ID NO: 1886293
ggcucagaccucuauacag

SEQ ID NO: 2399449 - RNA, 19 nt, Artificial Sequence
  Description of Artificial Sequence: Synthetic oligonucleotide
  Antisense strand to SEQ ID NO: 2399448
cuguauagaggucugagcc

SEQ ID NO: 2399450 - RNA, 19 nt, Artificial Sequence
  Description of Artificial Sequence: Synthetic oligonucleotide
  Sense strand starting at position 405 of SEQ ID NO: 1886293
gugaaacacugaugugucu

SEQ ID NO: 2399451 - RNA, 19 nt, Artificial Sequence
  Description of Artificial Sequence: Synthetic oligonucleotide
  Antisense strand to SEQ ID NO: 2399450
agacacaucaguguuucac

SEQ ID NO: 2399452 - RNA, 19 nt, Artificial Sequence
  Description of Artificial Sequence: Synthetic oligonucleotide
  Sense strand starting at position 412 of SEQ ID NO: 1886293
acugaugugucucagacgu

SEQ ID NO: 2399453 - RNA, 19 nt, Artificial Sequence
  Description of Artificial Sequence: Synthetic oligonucleotide
  Antisense strand to SEQ ID NO: 2399452
acgucugagacacaucagu

SEQ ID NO: 2399454 - RNA, 19 nt, Artificial Sequence
  Description of Artificial Sequence: Synthetic oligonucleotide
  Sense strand starting at position 884 of SEQ ID NO: 1886293
cggagaugaccucauggcu

SEQ ID NO: 2399455 - RNA, 19 nt, Artificial Sequence
  Description of Artificial Sequence: Synthetic oligonucleotide
  Antisense strand to SEQ ID NO: 2399454
agccaugaggucaucuccg

SEQ ID NO: 2399456 - RNA, 19 nt, Artificial Sequence
  Description of Artificial Sequence: Synthetic oligonucleotide
  Sense strand starting at position 907 of SEQ ID NO: 1886293
agcagucuggacugcaaau

SEQ ID NO: 2399457 - RNA, 19 nt, Artificial Sequence
  Description of Artificial Sequence: Synthetic oligonucleotide
  Antisense strand to SEQ ID NO: 2399456
auuugcaguccagacugcu

SEQ ID NO: 2399458 - RNA, 19 nt, Artificial Sequence
  Description of Artificial Sequence: Synthetic oligonucleotide
  Sense strand starting at position 1090 of SEQ ID NO: 1886293
ggagcuagucuugacccaa

SEQ ID NO: 2399459 - RNA, 19 nt, Artificial Sequence
  Description of Artificial Sequence: Synthetic oligonucleotide
  Antisense strand to SEQ ID NO: 2399458
uugggucaagacuagcucc

SEQ ID NO: 2399460 - RNA, 19 nt, Artificial Sequence
  Description of Artificial Sequence: Synthetic oligonucleotide
  Sense strand starting at position 1188 of SEQ ID NO: 1886293
cauugagggauauggguuu

SEQ ID NO: 2399461 - RNA, 19 nt, Artificial Sequence
  Description of Artificial Sequence: Synthetic oligonucleotide
  Antisense strand to SEQ ID NO: 2399460
aaacccauaucccucaaug

SEQ ID NO: 2399462 - RNA, 19 nt, Artificial Sequence
  Description of Artificial Sequence: Synthetic oligonucleotide
  Sense strand starting at position 1194 of SEQ ID NO: 1886293
gggauauggguuuggugca

SEQ ID NO: 2399463 - RNA, 19 nt, Artificial Sequence
  Description of Artificial Sequence: Synthetic oligonucleotide
  Antisense strand to SEQ ID NO: 2399462
ugcaccaaacccauauccc

SEQ ID NO: 2399464 - RNA, 19 nt, Artificial Sequence
  Description of Artificial Sequence: Synthetic oligonucleotide
  Sense strand starting at position 1195 of SEQ ID NO: 1886293
ggauauggguuuggugcaa

SEQ ID NO: 2399465 - RNA, 19 nt, Artificial Sequence
  Description of Artificial Sequence: Synthetic oligonucleotide
  Antisense strand to SEQ ID NO: 2399464
uugcaccaaacccauaucc

SEQ ID NO: 2399466 - RNA, 19 nt, Artificial Sequence
  Description of Artificial Sequence: Synthetic oligonucleotide
  Sense strand starting at position 1206 of SEQ ID NO: 1886293
uggugcaauccuugaagcu

SEQ ID NO: 2399467 - RNA, 19 nt, Artificial Sequence
  Description of Artificial Sequence: Synthetic oligonucleotide
  Antisense strand to SEQ ID NO: 2399466
agcuucaaggauugcacca

SEQ ID NO: 2399468 - RNA, 19 nt, Artificial Sequence
  Description of Artificial Sequence: Synthetic oligonucleotide
  Sense strand starting at position 1207 of SEQ ID NO: 1886293
ggugcaauccuugaagcuc

SEQ ID NO: 2399469 - RNA, 19 nt, Artificial Sequence
  Description of Artificial Sequence: Synthetic oligonucleotide
  Antisense strand to SEQ ID NO: 2399468
gagcuucaaggauugcacc

SEQ ID NO: 2399470 - RNA, 19 nt, Artificial Sequence
  Description of Artificial Sequence: Synthetic oligonucleotide
  Sense strand starting at position 1281 of SEQ ID NO: 1886293
ccaugagaugucuguggug

SEQ ID NO: 2399471 - RNA, 19 nt, Artificial Sequence
  Description of Artificial Sequence: Synthetic oligonucleotide
  Antisense strand to SEQ ID NO: 2399470
caccacagacaucucaugg

SEQ ID NO: 2399472 - RNA, 19 nt, Artificial Sequence
  Description of Artificial Sequence: Synthetic oligonucleotide
  Sense strand starting at position 1463 of SEQ ID NO: 1886293
gccuccuccuugugucaga

SEQ ID NO: 2399473 - RNA, 19 nt, Artificial Sequence
  Description of Artificial Sequence: Synthetic oligonucleotide
  Antisense strand to SEQ ID NO: 2399472
ucugacacaaggaggaggc

SEQ ID NO: 2399474 - RNA, 19 nt, Artificial Sequence
  Description of Artificial Sequence: Synthetic oligonucleotide
  Sense strand starting at position 1464 of SEQ ID NO: 1886293
ccuccuccuugugucagau

SEQ ID NO: 2399475 - RNA, 19 nt, Artificial Sequence
  Description of Artificial Sequence: Synthetic oligonucleotide
  Antisense strand to SEQ ID NO: 2399474
aucugacacaaggaggagg

SEQ ID NO: 2399476 - RNA, 19 nt, Artificial Sequence
  Description of Artificial Sequence: Synthetic oligonucleotide
  Sense strand starting at position 1474 of SEQ ID NO: 1886293
gugucagauucccaaggaa

SEQ ID NO: 2399477 - RNA, 19 nt, Artificial Sequence
  Description of Artificial Sequence: Synthetic oligonucleotide
  Antisense strand to SEQ ID NO: 2399476
uuccuugggaaucugacac

SEQ ID NO: 2399478 - RNA, 19 nt, Artificial Sequence
  Description of Artificial Sequence: Synthetic oligonucleotide
  Sense strand starting at position 1876 of SEQ ID NO: 1886293
ccuugugauucccagcauc

SEQ ID NO: 2399479 - RNA, 19 nt, Artificial Sequence
  Description of Artificial Sequence: Synthetic oligonucleotide
  Antisense strand to SEQ ID NO: 2399478
gaugcugggaaucacaagg

SEQ ID NO: 2399480 - RNA, 19 nt, Artificial Sequence
  Description of Artificial Sequence: Synthetic oligonucleotide
  Sense strand starting at position 2283 of SEQ ID NO: 1886293
ggacucaugugaugggauc

SEQ ID NO: 2399481 - RNA, 19 nt, Artificial Sequence
  Description of Artificial Sequence: Synthetic oligonucleotide
  Antisense strand to SEQ ID NO: 2399480
gaucccaucacaugagucc

SEQ ID NO: 2399482 - RNA, 19 nt, Artificial Sequence
  Description of Artificial Sequence: Synthetic oligonucleotide
  Sense strand starting at position 2294 of SEQ ID NO: 1886293
augggauccaugugaaacg

SEQ ID NO: 2399483 - RNA, 19 nt, Artificial Sequence
  Description of Artificial Sequence: Synthetic oligonucleotide
  Antisense strand to SEQ ID NO: 2399482
cguuucacauggaucccau

SEQ ID NO: 2399484 - RNA, 19 nt, Artificial Sequence
  Description of Artificial Sequence: Synthetic oligonucleotide
  Sense strand starting at position 2530 of SEQ ID NO: 1886293
caaggaagcuugcucugaa

SEQ ID NO: 2399485 - RNA, 19 nt, Artificial Sequence
  Description of Artificial Sequence: Synthetic oligonucleotide
  Antisense strand to SEQ ID NO: 2399484
uucagagcaagcuuccuug

SEQ ID NO: 2399486 - RNA, 19 nt, Artificial Sequence
  Description of Artificial Sequence: Synthetic oligonucleotide
  Sense strand starting at position 2531 of SEQ ID NO: 1886293
aaggaagcuugcucugaag

SEQ ID NO: 2399487 - RNA, 19 nt, Artificial Sequence
  Description of Artificial Sequence: Synthetic oligonucleotide
  Antisense strand to SEQ ID NO: 2399486
cuucagagcaagcuuccuu

SEQ ID NO: 2399488 - RNA, 19 nt, Artificial Sequence
  Description of Artificial Sequence: Synthetic oligonucleotide
  Sense strand starting at position 2533 of SEQ ID NO: 1886293
ggaagcuugcucugaagcu

SEQ ID NO: 2399489 - RNA, 19 nt, Artificial Sequence
  Description of Artificial Sequence: Synthetic oligonucleotide
  Antisense strand to SEQ ID NO: 2399488
agcuucagagcaagcuucc

SEQ ID NO: 2399490 - RNA, 19 nt, Artificial Sequence
  Description of Artificial Sequence: Synthetic oligonucleotide
  Sense strand starting at position 2534 of SEQ ID NO: 1886293
gaagcuugcucugaagcua

SEQ ID NO: 2399491 - RNA, 19 nt, Artificial Sequence
  Description of Artificial Sequence: Synthetic oligonucleotide
  Antisense strand to SEQ ID NO: 2399490
uagcuucagagcaagcuuc

SEQ ID NO: 2399492 - RNA, 19 nt, Artificial Sequence
  Description of Artificial Sequence: Synthetic oligonucleotide
  Sense strand starting at position 3505 of SEQ ID NO: 1886293
gggucaccaucucgaggaa

SEQ ID NO: 2399493 - RNA, 19 nt, Artificial Sequence
  Description of Artificial Sequence: Synthetic oligonucleotide
  Antisense strand to SEQ ID NO: 2399492
uuccucgagauggugaccc

SEQ ID NO: 2399494 - RNA, 19 nt, Artificial Sequence
  Description of Artificial Sequence: Synthetic oligonucleotide
  Sense strand starting at position 3634 of SEQ ID NO: 1886293
guggaauacuggcccauca

SEQ ID NO: 2399495 - RNA, 19 nt, Artificial Sequence
  Description of Artificial Sequence: Synthetic oligonucleotide
  Antisense strand to SEQ ID NO: 2399494
ugaugggccaguauuccac

SEQ ID NO: 2399496 - RNA, 19 nt, Artificial Sequence
  Description of Artificial Sequence: Synthetic oligonucleotide
  Sense strand starting at position 180 of SEQ ID NO: 1886294
ccaggaagugcccaaucuu

SEQ ID NO: 2399497 - RNA, 19 nt, Artificial Sequence
  Description of Artificial Sequence: Synthetic oligonucleotide
  Antisense strand to SEQ ID NO: 2399496
aagauugggcacuuccugg

SEQ ID NO: 2399498 - RNA, 19 nt, Artificial Sequence
  Description of Artificial Sequence: Synthetic oligonucleotide
  Sense strand starting at position 407 of SEQ ID NO: 1886294
agaacacuggcuugucaca

SEQ ID NO: 2399499 - RNA, 19 nt, Artificial Sequence
  Description of Artificial Sequence: Synthetic oligonucleotide
  Antisense strand to SEQ ID NO: 2399498
ugugacaagccaguguucu

SEQ ID NO: 2399500 - RNA, 19 nt, Artificial Sequence
  Description of Artificial Sequence: Synthetic oligonucleotide
  Sense strand starting at position 409 of SEQ ID NO: 1886294
aacacuggcuugucacaga

SEQ ID NO: 2399501 - RNA, 19 nt, Artificial Sequence
  Description of Artificial Sequence: Synthetic oligonucleotide
  Antisense strand to SEQ ID NO: 2399500
ucugugacaagccaguguu

SEQ ID NO: 2399502 - RNA, 19 nt, Artificial Sequence
  Description of Artificial Sequence: Synthetic oligonucleotide
  Sense strand starting at position 848 of SEQ ID NO: 1886294
gacacauggugacuucuuu

SEQ ID NO: 2399503 - RNA, 19 nt, Artificial Sequence
  Description of Artificial Sequence: Synthetic oligonucleotide
  Antisense strand to SEQ ID NO: 2399502
aaagaagucaccauguguc

SEQ ID NO: 2399504 - RNA, 19 nt, Artificial Sequence
  Description of Artificial Sequence: Synthetic oligonucleotide
  Sense strand starting at position 1055 of SEQ ID NO: 1886294
acugaucccuuggccuaaa

SEQ ID NO: 2399505 - RNA, 19 nt, Artificial Sequence
  Description of Artificial Sequence: Synthetic oligonucleotide
  Antisense strand to SEQ ID NO: 2399504
uuuaggccaagggaucagu

SEQ ID NO: 2399506 - RNA, 19 nt, Artificial Sequence
  Description of Artificial Sequence: Synthetic oligonucleotide
  Sense strand starting at position 1119 of SEQ ID NO: 1886294
agagcucagccuugaccaa

SEQ ID NO: 2399507 - RNA, 19 nt, Artificial Sequence
  Description of Artificial Sequence: Synthetic oligonucleotide
  Antisense strand to SEQ ID NO: 2399506
uuggucaaggcugagcucu

SEQ ID NO: 2399508 - RNA, 19 nt, Artificial Sequence
  Description of Artificial Sequence: Synthetic oligonucleotide
  Sense strand starting at position 1227 of SEQ ID NO: 1886294
ggcuauaaauccuguguga

SEQ ID NO: 2399509 - RNA, 19 nt, Artificial Sequence
  Description of Artificial Sequence: Synthetic oligonucleotide
  Antisense strand to SEQ ID NO: 2399508
ucacacaggauuuauagcc

SEQ ID NO: 2399510 - RNA, 19 nt, Artificial Sequence
  Description of Artificial Sequence: Synthetic oligonucleotide
  Sense strand starting at position 1238 of SEQ ID NO: 1886294
cugugugauccuuaaauau

SEQ ID NO: 2399511 - RNA, 19 nt, Artificial Sequence
  Description of Artificial Sequence: Synthetic oligonucleotide
  Antisense strand to SEQ ID NO: 2399510
auauuuaaggaucacacag

SEQ ID NO: 2399512 - RNA, 19 nt, Artificial Sequence
  Description of Artificial Sequence: Synthetic oligonucleotide
  Sense strand starting at position 1365 of SEQ ID NO: 1886294
gucaguccucgaggccaga

SEQ ID NO: 2399513 - RNA, 19 nt, Artificial Sequence
  Description of Artificial Sequence: Synthetic oligonucleotide
  Antisense strand to SEQ ID NO: 2399512
ucuggccucgaggacugac

SEQ ID NO: 2399514 - RNA, 19 nt, Artificial Sequence
  Description of Artificial Sequence: Synthetic oligonucleotide
  Sense strand starting at position 1414 of SEQ ID NO: 1886294
ccugcaugagauugaagga

SEQ ID NO: 2399515 - RNA, 19 nt, Artificial Sequence
  Description of Artificial Sequence: Synthetic oligonucleotide
  Antisense strand to SEQ ID NO: 2399514
uccuucaaucucaugcagg

SEQ ID NO: 2399516 - RNA, 19 nt, Artificial Sequence
  Description of Artificial Sequence: Synthetic oligonucleotide
  Sense strand starting at position 1861 of SEQ ID NO: 1886294
uuggucauuccagggaacu

SEQ ID NO: 2399517 - RNA, 19 nt, Artificial Sequence
  Description of Artificial Sequence: Synthetic oligonucleotide
  Antisense strand to SEQ ID NO: 2399516
aguucccuggaaugaccaa

SEQ ID NO: 2399518 - RNA, 19 nt, Artificial Sequence
  Description of Artificial Sequence: Synthetic oligonucleotide
  Sense strand starting at position 1862 of SEQ ID NO: 1886294
uggucauuccagggaacuc

SEQ ID NO: 2399519 - RNA, 19 nt, Artificial Sequence
  Description of Artificial Sequence: Synthetic oligonucleotide
  Antisense strand to SEQ ID NO: 2399518
gaguucccuggaaugacca

SEQ ID NO: 2399520 - RNA, 19 nt, Artificial Sequence
  Description of Artificial Sequence: Synthetic oligonucleotide
  Sense strand starting at position 2307 of SEQ ID NO: 1886294
uggucauuuacgcgaggaa

SEQ ID NO: 2399521 - RNA, 19 nt, Artificial Sequence
  Description of Artificial Sequence: Synthetic oligonucleotide
  Antisense strand to SEQ ID NO: 2399520
uuccucgcguaaaugacca

SEQ ID NO: 2399522 - RNA, 19 nt, Artificial Sequence
  Description of Artificial Sequence: Synthetic oligonucleotide
  Sense strand starting at position 2364 of SEQ ID NO: 1886294
gucacaggguucgagcaaa

SEQ ID NO: 2399523 - RNA, 19 nt, Artificial Sequence
  Description of Artificial Sequence: Synthetic oligonucleotide
  Antisense strand to SEQ ID NO: 2399522
uuugcucgaacccugugac

SEQ ID NO: 2399524 - RNA, 19 nt, Artificial Sequence
  Description of Artificial Sequence: Synthetic oligonucleotide
  Sense strand starting at position 2446 of SEQ ID NO: 1886294
gcucgaaucugggcugcau

SEQ ID NO: 2399525 - RNA, 19 nt, Artificial Sequence
  Description of Artificial Sequence: Synthetic oligonucleotide
  Antisense strand to SEQ ID NO: 2399524
augcagcccagauucgagc

SEQ ID NO: 2399526 - RNA, 19 nt, Artificial Sequence
  Description of Artificial Sequence: Synthetic oligonucleotide
  Sense strand starting at position 2793 of SEQ ID NO: 1886294
ucagaaguagccugggcau

SEQ ID NO: 2399527 - RNA, 19 nt, Artificial Sequence
  Description of Artificial Sequence: Synthetic oligonucleotide
  Antisense strand to SEQ ID NO: 2399526
augcccaggcuacuucuga

SEQ ID NO: 2399528 - RNA, 19 nt, Artificial Sequence
  Description of Artificial Sequence: Synthetic oligonucleotide
  Sense strand starting at position 2808 of SEQ ID NO: 1886294
gcaucaaauugccaggaca

SEQ ID NO: 2399529 - RNA, 19 nt, Artificial Sequence
  Description of Artificial Sequence: Synthetic oligonucleotide
  Antisense strand to SEQ ID NO: 2399528
uguccuggcaauuugaugc

SEQ ID NO: 2399530 - RNA, 19 nt, Artificial Sequence
  Description of Artificial Sequence: Synthetic oligonucleotide
  Sense strand starting at position 2876 of SEQ ID NO: 1886294
cuccacuuccgguagggau

SEQ ID NO: 2399531 - RNA, 19 nt, Artificial Sequence
  Description of Artificial Sequence: Synthetic oligonucleotide
  Antisense strand to SEQ ID NO: 2399530
aucccuaccggaaguggag

SEQ ID NO: 2399532 - RNA, 19 nt, Artificial Sequence
  Description of Artificial Sequence: Synthetic oligonucleotide
  Sense strand starting at position 2935 of SEQ ID NO: 1886294
ccacgauucccagggccaa

SEQ ID NO: 2399533 - RNA, 19 nt, Artificial Sequence
  Description of Artificial Sequence: Synthetic oligonucleotide
  Antisense strand to SEQ ID NO: 2399532
uuggcccugggaaucgugg

SEQ ID NO: 2399534 - RNA, 19 nt, Artificial Sequence
  Description of Artificial Sequence: Synthetic oligonucleotide
  Sense strand starting at position 2936 of SEQ ID NO: 1886294
cacgauucccagggccaaa

SEQ ID NO: 2399535 - RNA, 19 nt, Artificial Sequence
  Description of Artificial Sequence: Synthetic oligonucleotide
  Antisense strand to SEQ ID NO: 2399534
uuuggcccugggaaucgug

SEQ ID NO: 2399536 - RNA, 19 nt, Artificial Sequence
  Description of Artificial Sequence: Synthetic oligonucleotide
  Sense strand starting at position 3037 of SEQ ID NO: 1886294
gggauagcccauugcucaa

SEQ ID NO: 2399537 - RNA, 19 nt, Artificial Sequence
  Description of Artificial Sequence: Synthetic oligonucleotide
  Antisense strand to SEQ ID NO: 2399536
uugagcaaugggcuauccc

SEQ ID NO: 2399538 - RNA, 19 nt, Artificial Sequence
  Description of Artificial Sequence: Synthetic oligonucleotide
  Sense strand starting at position 3291 of SEQ ID NO: 1886294
gucaauaaguccugugcga

SEQ ID NO: 2399539 - RNA, 19 nt, Artificial Sequence
  Description of Artificial Sequence: Synthetic oligonucleotide
  Antisense strand to SEQ ID NO: 2399538
ucgcacaggacuuauugac

SEQ ID NO: 2399540 - RNA, 19 nt, Artificial Sequence
  Description of Artificial Sequence: Synthetic oligonucleotide
  Sense strand starting at position 3293 of SEQ ID NO: 1886294
caauaaguccugugcgauc

SEQ ID NO: 2399541 - RNA, 19 nt, Artificial Sequence
  Description of Artificial Sequence: Synthetic oligonucleotide
  Antisense strand to SEQ ID NO: 2399540
gaucgcacaggacuuauug

SEQ ID NO: 2399542 - RNA, 19 nt, Artificial Sequence
  Description of Artificial Sequence: Synthetic oligonucleotide
  Sense strand starting at position 3302 of SEQ ID NO: 1886294
cugugcgauccuuaaaucu

SEQ ID NO: 2399543 - RNA, 19 nt, Artificial Sequence
  Description of Artificial Sequence: Synthetic oligonucleotide
  Antisense strand to SEQ ID NO: 2399542
agauuuaaggaucgcacag

SEQ ID NO: 2399544 - RNA, 19 nt, Artificial Sequence
  Description of Artificial Sequence: Synthetic oligonucleotide
  Sense strand starting at position 3395 of SEQ ID NO: 1886294
acuguauuggguugaagga

SEQ ID NO: 2399545 - RNA, 19 nt, Artificial Sequence
  Description of Artificial Sequence: Synthetic oligonucleotide
  Antisense strand to SEQ ID NO: 2399544
uccuucaacccaauacagu

SEQ ID NO: 2399546 - RNA, 19 nt, Artificial Sequence
  Description of Artificial Sequence: Synthetic oligonucleotide
  Sense strand starting at position 3462 of SEQ ID NO: 1886294
gcguccuucuugggaucaa

SEQ ID NO: 2399547 - RNA, 19 nt, Artificial Sequence
  Description of Artificial Sequence: Synthetic oligonucleotide
  Antisense strand to SEQ ID NO: 2399546
uugaucccaagaaggacgc

SEQ ID NO: 2399548 - RNA, 19 nt, Artificial Sequence
  Description of Artificial Sequence: Synthetic oligonucleotide
  Sense strand starting at position 3463 of SEQ ID NO: 1886294
cguccuucuugggaucaau

SEQ ID NO: 2399549 - RNA, 19 nt, Artificial Sequence
  Description of Artificial Sequence: Synthetic oligonucleotide
  Antisense strand to SEQ ID NO: 2399548
auugaucccaagaaggacg

SEQ ID NO: 2399550 - RNA, 19 nt, Artificial Sequence
  Description of Artificial Sequence: Synthetic oligonucleotide
  Sense strand starting at position 3473 of SEQ ID NO: 1886294
gggaucaauuaacaaggaa

SEQ ID NO: 2399551 - RNA, 19 nt, Artificial Sequence
  Description of Artificial Sequence: Synthetic oligonucleotide
  Antisense strand to SEQ ID NO: 2399550
uuccuuguuaauugauccc

SEQ ID NO: 2399552 - RNA, 19 nt, Artificial Sequence
  Description of Artificial Sequence: Synthetic oligonucleotide
  Sense strand starting at position 3533 of SEQ ID NO: 1886294
aggucagcucccuaaggaa

SEQ ID NO: 2399553 - RNA, 19 nt, Artificial Sequence
  Description of Artificial Sequence: Synthetic oligonucleotide
  Antisense strand to SEQ ID NO: 2399552
uuccuuagggagcugaccu

SEQ ID NO: 2399554 - RNA, 19 nt, Artificial Sequence
  Description of Artificial Sequence: Synthetic oligonucleotide
  Sense strand starting at position 48 of SEQ ID NO: 1886295
caaucaguaggaugugaau

SEQ ID NO: 2399555 - RNA, 19 nt, Artificial Sequence
  Description of Artificial Sequence: Synthetic oligonucleotide
  Antisense strand to SEQ ID NO: 2399554
auucacauccuacugauug

SEQ ID NO: 2399556 - RNA, 19 nt, Artificial Sequence
  Description of Artificial Sequence: Synthetic oligonucleotide
  Sense strand starting at position 158 of SEQ ID NO: 1886295
aucugauguccugagcaga

SEQ ID NO: 2399557 - RNA, 19 nt, Artificial Sequence
  Description of Artificial Sequence: Synthetic oligonucleotide
  Antisense strand to SEQ ID NO: 2399556
ucugcucaggacaucagau

SEQ ID NO: 2399558 - RNA, 19 nt, Artificial Sequence
  Description of Artificial Sequence: Synthetic oligonucleotide
  Sense strand starting at position 263 of SEQ ID NO: 1886295
agcacaucagccugaaacu

SEQ ID NO: 2399559 - RNA, 19 nt, Artificial Sequence
  Description of Artificial Sequence: Synthetic oligonucleotide
  Antisense strand to SEQ ID NO: 2399558
aguuucaggcugaugugcu

SEQ ID NO: 2399560 - RNA, 19 nt, Artificial Sequence
  Description of Artificial Sequence: Synthetic oligonucleotide
  Sense strand starting at position 264 of SEQ ID NO: 1886295
gcacaucagccugaaacuu

SEQ ID NO: 2399561 - RNA, 19 nt, Artificial Sequence
  Description of Artificial Sequence: Synthetic oligonucleotide
  Antisense strand to SEQ ID NO: 2399560
aaguuucaggcugaugugc

SEQ ID NO: 2399562 - RNA, 19 nt, Artificial Sequence
  Description of Artificial Sequence: Synthetic oligonucleotide
  Sense strand starting at position 272 of SEQ ID NO: 1886295
gccugaaacuuggcgucaa

SEQ ID NO: 2399563 - RNA, 19 nt, Artificial Sequence
  Description of Artificial Sequence: Synthetic oligonucleotide
  Antisense strand to SEQ ID NO: 2399562
uugacgccaaguuucaggc

SEQ ID NO: 2399564 - RNA, 19 nt, Artificial Sequence
  Description of Artificial Sequence: Synthetic oligonucleotide
  Sense strand starting at position 867 of SEQ ID NO: 1886295
ccguguugccuggaaugca

SEQ ID NO: 2399565 - RNA, 19 nt, Artificial Sequence
  Description of Artificial Sequence: Synthetic oligonucleotide
  Antisense strand to SEQ ID NO: 2399564
ugcauuccaggcaacacgg

SEQ ID NO: 2399566 - RNA, 19 nt, Artificial Sequence
  Description of Artificial Sequence: Synthetic oligonucleotide
  Sense strand starting at position 896 of SEQ ID NO: 1886295
cauggauagcuccaagugu

SEQ ID NO: 2399567 - RNA, 19 nt, Artificial Sequence
  Description of Artificial Sequence: Synthetic oligonucleotide
  Antisense strand to SEQ ID NO: 2399566
acacuuggagcuauccaug

SEQ ID NO: 2399568 - RNA, 19 nt, Artificial Sequence
  Description of Artificial Sequence: Synthetic oligonucleotide
  Sense strand starting at position 1017 of SEQ ID NO: 1886295
agagcaguauuugcucaua

SEQ ID NO: 2399569 - RNA, 19 nt, Artificial Sequence
  Description of Artificial Sequence: Synthetic oligonucleotide
  Antisense strand to SEQ ID NO: 2399568
uaugagcaaauacugcucu

SEQ ID NO: 2399570 - RNA, 19 nt, Artificial Sequence
  Description of Artificial Sequence: Synthetic oligonucleotide
  Sense strand starting at position 1019 of SEQ ID NO: 1886295
agcaguauuugcucauaca

SEQ ID NO: 2399571 - RNA, 19 nt, Artificial Sequence
  Description of Artificial Sequence: Synthetic oligonucleotide
  Antisense strand to SEQ ID NO: 2399570
uguaugagcaaauacugcu

SEQ ID NO: 2399572 - RNA, 19 nt, Artificial Sequence
  Description of Artificial Sequence: Synthetic oligonucleotide
  Sense strand starting at position 1022 of SEQ ID NO: 1886295
aguauuugcucauacaagc

SEQ ID NO: 2399573 - RNA, 19 nt, Artificial Sequence
  Description of Artificial Sequence: Synthetic oligonucleotide
  Antisense strand to SEQ ID NO: 2399572
gcuuguaugagcaaauacu

SEQ ID NO: 2399574 - RNA, 19 nt, Artificial Sequence
  Description of Artificial Sequence: Synthetic oligonucleotide
  Sense strand starting at position 1048 of SEQ ID NO: 1886295
gguggagccgcccaauaau

SEQ ID NO: 2399575 - RNA, 19 nt, Artificial Sequence
  Description of Artificial Sequence: Synthetic oligonucleotide
  Antisense strand to SEQ ID NO: 2399574
auuauugggcggcuccacc

SEQ ID NO: 2399576 - RNA, 19 nt, Artificial Sequence
  Description of Artificial Sequence: Synthetic oligonucleotide
  Sense strand starting at position 1088 of SEQ ID NO: 1886295
uaggaagauuugcacaaug

SEQ ID NO: 2399577 - RNA, 19 nt, Artificial Sequence
  Description of Artificial Sequence: Synthetic oligonucleotide
  Antisense strand to SEQ ID NO: 2399576
cauugugcaaaucuuccua

SEQ ID NO: 2399578 - RNA, 19 nt, Artificial Sequence
  Description of Artificial Sequence: Synthetic oligonucleotide
  Sense strand starting at position 1112 of SEQ ID NO: 1886295
gcccauuacucuccuggga

SEQ ID NO: 2399579 - RNA, 19 nt, Artificial Sequence
  Description of Artificial Sequence: Synthetic oligonucleotide
  Antisense strand to SEQ ID NO: 2399578
ucccaggagaguaaugggc

SEQ ID NO: 2399580 - RNA, 19 nt, Artificial Sequence
  Description of Artificial Sequence: Synthetic oligonucleotide
  Sense strand starting at position 1117 of SEQ ID NO: 1886295
uuacucuccugggaagacu

SEQ ID NO: 2399581 - RNA, 19 nt, Artificial Sequence
  Description of Artificial Sequence: Synthetic oligonucleotide
  Antisense strand to SEQ ID NO: 2399580
agucuucccaggagaguaa

SEQ ID NO: 2399582 - RNA, 19 nt, Artificial Sequence
  Description of Artificial Sequence: Synthetic oligonucleotide
  Sense strand starting at position 1282 of SEQ ID NO: 1886295
gacacucauguccauguga

SEQ ID NO: 2399583 - RNA, 19 nt, Artificial Sequence
  Description of Artificial Sequence: Synthetic oligonucleotide
  Antisense strand to SEQ ID NO: 2399582
ucacauggacaugaguguc

SEQ ID NO: 2399584 - RNA, 19 nt, Artificial Sequence
  Description of Artificial Sequence: Synthetic oligonucleotide
  Sense strand starting at position 1321 of SEQ ID NO: 1886295
uggaguaccuuccuaccua

SEQ ID NO: 2399585 - RNA, 19 nt, Artificial Sequence
  Description of Artificial Sequence: Synthetic oligonucleotide
  Antisense strand to SEQ ID NO: 2399584
uagguaggaagguacucca

SEQ ID NO: 2399586 - RNA, 19 nt, Artificial Sequence
  Description of Artificial Sequence: Synthetic oligonucleotide
  Sense strand starting at position 1558 of SEQ ID NO: 1886295
ggcucuccucgacaugaaa

SEQ ID NO: 2399587 - RNA, 19 nt, Artificial Sequence
  Description of Artificial Sequence: Synthetic oligonucleotide
  Antisense strand to SEQ ID NO: 2399586
uuucaugucgaggagagcc

SEQ ID NO: 2399588 - RNA, 19 nt, Artificial Sequence
  Description of Artificial Sequence: Synthetic oligonucleotide
  Sense strand starting at position 1587 of SEQ ID NO: 1886295
ggucuucugcacugagaug

SEQ ID NO: 2399589 - RNA, 19 nt, Artificial Sequence
  Description of Artificial Sequence: Synthetic oligonucleotide
  Antisense strand to SEQ ID NO: 2399588
caucucagugcagaagacc

SEQ ID NO: 2399590 - RNA, 19 nt, Artificial Sequence
  Description of Artificial Sequence: Synthetic oligonucleotide
  Sense strand starting at position 1588 of SEQ ID NO: 1886295
gucuucugcacugagauga

SEQ ID NO: 2399591 - RNA, 19 nt, Artificial Sequence
  Description of Artificial Sequence: Synthetic oligonucleotide
  Antisense strand to SEQ ID NO: 2399590
ucaucucagugcagaagac

SEQ ID NO: 2399592 - RNA, 19 nt, Artificial Sequence
  Description of Artificial Sequence: Synthetic oligonucleotide
  Sense strand starting at position 1635 of SEQ ID NO: 1886295
ggagcuuaccaguagcaca

SEQ ID NO: 2399593 - RNA, 19 nt, Artificial Sequence
  Description of Artificial Sequence: Synthetic oligonucleotide
  Antisense strand to SEQ ID NO: 2399592
ugugcuacugguaagcucc

SEQ ID NO: 2399594 - RNA, 19 nt, Artificial Sequence
  Description of Artificial Sequence: Synthetic oligonucleotide
  Sense strand starting at position 1780 of SEQ ID NO: 1886295
gagggaauguuccuaacgu

SEQ ID NO: 2399595 - RNA, 19 nt, Artificial Sequence
  Description of Artificial Sequence: Synthetic oligonucleotide
  Antisense strand to SEQ ID NO: 2399594
acguuaggaacauucccuc

SEQ ID NO: 2399596 - RNA, 19 nt, Artificial Sequence
  Description of Artificial Sequence: Synthetic oligonucleotide
  Sense strand starting at position 1781 of SEQ ID NO: 1886295
agggaauguuccuaacgug

SEQ ID NO: 2399597 - RNA, 19 nt, Artificial Sequence
  Description of Artificial Sequence: Synthetic oligonucleotide
  Antisense strand to SEQ ID NO: 2399596
cacguuaggaacauucccu

SEQ ID NO: 2399598 - RNA, 19 nt, Artificial Sequence
  Description of Artificial Sequence: Synthetic oligonucleotide
  Sense strand starting at position 2140 of SEQ ID NO: 1886295
uggaacuugccaugucauu

SEQ ID NO: 2399599 - RNA, 19 nt, Artificial Sequence
  Description of Artificial Sequence: Synthetic oligonucleotide
  Antisense strand to SEQ ID NO: 2399598
aaugacauggcaaguucca

SEQ ID NO: 2399600 - RNA, 19 nt, Artificial Sequence
  Description of Artificial Sequence: Synthetic oligonucleotide
  Sense strand starting at position 2149 of SEQ ID NO: 1886295
ccaugucauucgcugcuga

SEQ ID NO: 2399601 - RNA, 19 nt, Artificial Sequence
  Description of Artificial Sequence: Synthetic oligonucleotide
  Antisense strand to SEQ ID NO: 2399600
ucagcagcgaaugacaugg

SEQ ID NO: 2399602 - RNA, 19 nt, Artificial Sequence
  Description of Artificial Sequence: Synthetic oligonucleotide
  Sense strand starting at position 2168 of SEQ ID NO: 1886295
caaacagcuccuugaaggu

SEQ ID NO: 2399603 - RNA, 19 nt, Artificial Sequence
  Description of Artificial Sequence: Synthetic oligonucleotide
  Antisense strand to SEQ ID NO: 2399602
accuucaaggagcuguuug

SEQ ID NO: 2399604 - RNA, 19 nt, Artificial Sequence
  Description of Artificial Sequence: Synthetic oligonucleotide
  Sense strand starting at position 2174 of SEQ ID NO: 1886295
gcuccuugaagguauagga

SEQ ID NO: 2399605 - RNA, 19 nt, Artificial Sequence
  Description of Artificial Sequence: Synthetic oligonucleotide
  Antisense strand to SEQ ID NO: 2399604
uccuauaccuucaaggagc

SEQ ID NO: 2399606 - RNA, 19 nt, Artificial Sequence
  Description of Artificial Sequence: Synthetic oligonucleotide
  Sense strand starting at position 2229 of SEQ ID NO: 1886295
aggaaugcuuaccguccua

SEQ ID NO: 2399607 - RNA, 19 nt, Artificial Sequence
  Description of Artificial Sequence: Synthetic oligonucleotide
  Antisense strand to SEQ ID NO: 2399606
uaggacgguaagcauuccu

SEQ ID NO: 2399608 - RNA, 19 nt, Artificial Sequence
  Description of Artificial Sequence: Synthetic oligonucleotide
  Sense strand starting at position 2314 of SEQ ID NO: 1886295
cuccauugaucagaagaau

SEQ ID NO: 2399609 - RNA, 19 nt, Artificial Sequence
  Description of Artificial Sequence: Synthetic oligonucleotide
  Antisense strand to SEQ ID NO: 2399608
auucuucugaucaauggag

SEQ ID NO: 2399610 - RNA, 19 nt, Artificial Sequence
  Description of Artificial Sequence: Synthetic oligonucleotide
  Sense strand starting at position 2451 of SEQ ID NO: 1886295
gccauucucuacuguaguu

SEQ ID NO: 2399611 - RNA, 19 nt, Artificial Sequence
  Description of Artificial Sequence: Synthetic oligonucleotide
  Antisense strand to SEQ ID NO: 2399610
aacuacaguagagaauggc

SEQ ID NO: 2399612 - RNA, 19 nt, Artificial Sequence
  Description of Artificial Sequence: Synthetic oligonucleotide
  Sense strand starting at position 2535 of SEQ ID NO: 1886295
ccaugccauucuguggaua

SEQ ID NO: 2399613 - RNA, 19 nt, Artificial Sequence
  Description of Artificial Sequence: Synthetic oligonucleotide
  Antisense strand to SEQ ID NO: 2399612
uauccacagaauggcaugg

SEQ ID NO: 2399614 - RNA, 19 nt, Artificial Sequence
  Description of Artificial Sequence: Synthetic oligonucleotide
  Sense strand starting at position 2547 of SEQ ID NO: 1886295
guggauaccuagggaacau

SEQ ID NO: 2399615 - RNA, 19 nt, Artificial Sequence
  Description of Artificial Sequence: Synthetic oligonucleotide
  Antisense strand to SEQ ID NO: 2399614
auguucccuagguauccac

SEQ ID NO: 2399616 - RNA, 19 nt, Artificial Sequence
  Description of Artificial Sequence: Synthetic oligonucleotide
  Sense strand starting at position 2560 of SEQ ID NO: 1886295
gaacauguguggccagaac

SEQ ID NO: 2399617 - RNA, 19 nt, Artificial Sequence
  Description of Artificial Sequence: Synthetic oligonucleotide
  Antisense strand to SEQ ID NO: 2399616
guucuggccacacauguuc

SEQ ID NO: 2399618 - RNA, 19 nt, Artificial Sequence
  Description of Artificial Sequence: Synthetic oligonucleotide
  Sense strand starting at position 2589 of SEQ ID NO: 1886295
gcccguuucugcgucuauu

SEQ ID NO: 2399619 - RNA, 19 nt, Artificial Sequence
  Description of Artificial Sequence: Synthetic oligonucleotide
  Antisense strand to SEQ ID NO: 2399618
aauagacgcagaaacgggc

SEQ ID NO: 2399620 - RNA, 19 nt, Artificial Sequence
  Description of Artificial Sequence: Synthetic oligonucleotide
  Sense strand starting at position 2753 of SEQ ID NO: 1886295
gugcgcauauguuuccgaa

SEQ ID NO: 2399621 - RNA, 19 nt, Artificial Sequence
  Description of Artificial Sequence: Synthetic oligonucleotide
  Antisense strand to SEQ ID NO: 2399620
uucggaaacauaugcgcac

SEQ ID NO: 2399622 - RNA, 19 nt, Artificial Sequence
  Description of Artificial Sequence: Synthetic oligonucleotide
  Sense strand starting at position 2755 of SEQ ID NO: 1886295
gcgcauauguuuccgaaca

SEQ ID NO: 2399623 - RNA, 19 nt, Artificial Sequence
  Description of Artificial Sequence: Synthetic oligonucleotide
  Antisense strand to SEQ ID NO: 2399622
uguucggaaacauaugcgc

SEQ ID NO: 2399624 - RNA, 19 nt, Artificial Sequence
  Description of Artificial Sequence: Synthetic oligonucleotide
  Sense strand starting at position 2756 of SEQ ID NO: 1886295
cgcauauguuuccgaacac

SEQ ID NO: 2399625 - RNA, 19 nt, Artificial Sequence
  Description of Artificial Sequence: Synthetic oligonucleotide
  Antisense strand to SEQ ID NO: 2399624
guguucggaaacauaugcg

SEQ ID NO: 2399626 - RNA, 19 nt, Artificial Sequence
  Description of Artificial Sequence: Synthetic oligonucleotide
  Sense strand starting at position 2757 of SEQ ID NO: 1886295
gcauauguuuccgaacacu

SEQ ID NO: 2399627 - RNA, 19 nt, Artificial Sequence
  Description of Artificial Sequence: Synthetic oligonucleotide
  Antisense strand to SEQ ID NO: 2399626
aguguucggaaacauaugc

SEQ ID NO: 2399628 - RNA, 19 nt, Artificial Sequence
  Description of Artificial Sequence: Synthetic oligonucleotide
  Sense strand starting at position 2956 of SEQ ID NO: 1886295
gcuucugaugucuggaacu

SEQ ID NO: 2399629 - RNA, 19 nt, Artificial Sequence
  Description of Artificial Sequence: Synthetic oligonucleotide
  Antisense strand to SEQ ID NO: 2399628
aguuccagacaucagaagc

SEQ ID NO: 2399630 - RNA, 19 nt, Artificial Sequence
  Description of Artificial Sequence: Synthetic oligonucleotide
  Sense strand starting at position 3635 of SEQ ID NO: 1886295
auacuagaauacuggcaaa

SEQ ID NO: 2399631 - RNA, 19 nt, Artificial Sequence
  Description of Artificial Sequence: Synthetic oligonucleotide
  Antisense strand to SEQ ID NO: 2399630
uuugccaguauucuaguau

SEQ ID NO: 2399632 - RNA, 19 nt, Artificial Sequence
  Description of Artificial Sequence: Synthetic oligonucleotide
  Sense strand starting at position 3775 of SEQ ID NO: 1886295
acuggauauccgcaaauua

SEQ ID NO: 2399633 - RNA, 19 nt, Artificial Sequence
  Description of Artificial Sequence: Synthetic oligonucleotide
  Antisense strand to SEQ ID NO: 2399632
uaauuugcggauauccagu

SEQ ID NO: 2399634 - RNA, 19 nt, Artificial Sequence
  Description of Artificial Sequence: Synthetic oligonucleotide
  Sense strand starting at position 242 of SEQ ID NO: 1886296
acuuaccauccugagguau

SEQ ID NO: 2399635 - RNA, 19 nt, Artificial Sequence
  Description of Artificial Sequence: Synthetic oligonucleotide
  Antisense strand to SEQ ID NO: 2399634
auaccucaggaugguaagu

SEQ ID NO: 2399636 - RNA, 19 nt, Artificial Sequence
  Description of Artificial Sequence: Synthetic oligonucleotide
  Sense strand starting at position 282 of SEQ ID NO: 1886296
ugccaaacauguuuagaag

SEQ ID NO: 2399637 - RNA, 19 nt, Artificial Sequence
  Description of Artificial Sequence: Synthetic oligonucleotide
  Antisense strand to SEQ ID NO: 2399636
cuucuaaacauguuuggca

SEQ ID NO: 2399638 - RNA, 19 nt, Artificial Sequence
  Description of Artificial Sequence: Synthetic oligonucleotide
  Sense strand starting at position 399 of SEQ ID NO: 1886296
aacagugugcuugagaaag

SEQ ID NO: 2399639 - RNA, 19 nt, Artificial Sequence
  Description of Artificial Sequence: Synthetic oligonucleotide
  Antisense strand to SEQ ID NO: 2399638
cuuucucaagcacacuguu

SEQ ID NO: 2399640 - RNA, 19 nt, Artificial Sequence
  Description of Artificial Sequence: Synthetic oligonucleotide
  Sense strand starting at position 464 of SEQ ID NO: 1886296
uggaguaaucuguaucuac

SEQ ID NO: 2399641 - RNA, 19 nt, Artificial Sequence
  Description of Artificial Sequence: Synthetic oligonucleotide
  Antisense strand to SEQ ID NO: 2399640
guagauacagauuacucca

SEQ ID NO: 2399642 - RNA, 19 nt, Artificial Sequence
  Description of Artificial Sequence: Synthetic oligonucleotide
  Sense strand starting at position 574 of SEQ ID NO: 1886296
acuagagagcacuaagcau

SEQ ID NO: 2399643 - RNA, 19 nt, Artificial Sequence
  Description of Artificial Sequence: Synthetic oligonucleotide
  Antisense strand to SEQ ID NO: 2399642
augcuuagugcucucuagu

SEQ ID NO: 2399644 - RNA, 19 nt, Artificial Sequence
  Description of Artificial Sequence: Synthetic oligonucleotide
  Sense strand starting at position 580 of SEQ ID NO: 1886296
gagcacuaagcaugaagaa

SEQ ID NO: 2399645 - RNA, 19 nt, Artificial Sequence
  Description of Artificial Sequence: Synthetic oligonucleotide
  Antisense strand to SEQ ID NO: 2399644
uucuucaugcuuagugcuc

SEQ ID NO: 2399646 - RNA, 19 nt, Artificial Sequence
  Description of Artificial Sequence: Synthetic oligonucleotide
  Sense strand starting at position 643 of SEQ ID NO: 1886296
ucuccuggccaucagagaa

SEQ ID NO: 2399647 - RNA, 19 nt, Artificial Sequence
  Description of Artificial Sequence: Synthetic oligonucleotide
  Antisense strand to SEQ ID NO: 2399646
uucucugauggccaggaga

SEQ ID NO: 2399648 - RNA, 19 nt, Artificial Sequence
  Description of Artificial Sequence: Synthetic oligonucleotide
  Sense strand starting at position 661 of SEQ ID NO: 1886296
agacaaaggcuauggugau

SEQ ID NO: 2399649 - RNA, 19 nt, Artificial Sequence
  Description of Artificial Sequence: Synthetic oligonucleotide
  Antisense strand to SEQ ID NO: 2399648
aucaccauagccuuugucu

SEQ ID NO: 2399650 - RNA, 19 nt, Artificial Sequence
  Description of Artificial Sequence: Synthetic oligonucleotide
  Sense strand starting at position 674 of SEQ ID NO: 1886296
ggugauacuucagugagga

SEQ ID NO: 2399651 - RNA, 19 nt, Artificial Sequence
  Description of Artificial Sequence: Synthetic oligonucleotide
  Antisense strand to SEQ ID NO: 2399650
uccucacugaaguaucacc

SEQ ID NO: 2399652 - RNA, 19 nt, Artificial Sequence
  Description of Artificial Sequence: Synthetic oligonucleotide
  Sense strand starting at position 675 of SEQ ID NO: 1886296
gugauacuucagugaggag

SEQ ID NO: 2399653 - RNA, 19 nt, Artificial Sequence
  Description of Artificial Sequence: Synthetic oligonucleotide
  Antisense strand to SEQ ID NO: 2399652
cuccucacugaaguaucac

SEQ ID NO: 2399654 - RNA, 19 nt, Artificial Sequence
  Description of Artificial Sequence: Synthetic oligonucleotide
  Sense strand starting at position 868 of SEQ ID NO: 1886296
cuacaagauuucuaaggug

SEQ ID NO: 2399655 - RNA, 19 nt, Artificial Sequence
  Description of Artificial Sequence: Synthetic oligonucleotide
  Antisense strand to SEQ ID NO: 2399654
caccuuagaaaucuuguag

SEQ ID NO: 2399656 - RNA, 19 nt, Artificial Sequence
  Description of Artificial Sequence: Synthetic oligonucleotide
  Sense strand starting at position 1010 of SEQ ID NO: 1886296
agaagacugcugugaagaa

SEQ ID NO: 2399657 - RNA, 19 nt, Artificial Sequence
  Description of Artificial Sequence: Synthetic oligonucleotide
  Antisense strand to SEQ ID NO: 2399656
uucuucacagcagucuucu

SEQ ID NO: 2399658 - RNA, 19 nt, Artificial Sequence
  Description of Artificial Sequence: Synthetic oligonucleotide
  Sense strand starting at position 1057 of SEQ ID NO: 1886296
ucaggagacgcugagguau

SEQ ID NO: 2399659 - RNA, 19 nt, Artificial Sequence
  Description of Artificial Sequence: Synthetic oligonucleotide
  Antisense strand to SEQ ID NO: 2399658
auaccucagcgucuccuga

SEQ ID NO: 2399660 - RNA, 19 nt, Artificial Sequence
  Description of Artificial Sequence: Synthetic oligonucleotide
  Sense strand starting at position 1355 of SEQ ID NO: 1886296
cccuucuugggccaugaaa

SEQ ID NO: 2399661 - RNA, 19 nt, Artificial Sequence
  Description of Artificial Sequence: Synthetic oligonucleotide
  Antisense strand to SEQ ID NO: 2399660
uuucauggcccaagaaggg

SEQ ID NO: 2399662 - RNA, 19 nt, Artificial Sequence
  Description of Artificial Sequence: Synthetic oligonucleotide
  Sense strand starting at position 1357 of SEQ ID NO: 1886296
cuucuugggccaugaaauu

SEQ ID NO: 2399663 - RNA, 19 nt, Artificial Sequence
  Description of Artificial Sequence: Synthetic oligonucleotide
  Antisense strand to SEQ ID NO: 2399662
aauuucauggcccaagaag

SEQ ID NO: 2399664 - RNA, 19 nt, Artificial Sequence
  Description of Artificial Sequence: Synthetic oligonucleotide
  Sense strand starting at position 1366 of SEQ ID NO: 1886296
ccaugaaauuuggaauucu

SEQ ID NO: 2399665 - RNA, 19 nt, Artificial Sequence
  Description of Artificial Sequence: Synthetic oligonucleotide
  Antisense strand to SEQ ID NO: 2399664
agaauuccaaauuucaugg

SEQ ID NO: 2399666 - RNA, 19 nt, Artificial Sequence
  Description of Artificial Sequence: Synthetic oligonucleotide
  Sense strand starting at position 1424 of SEQ ID NO: 1886296
ggcuccuuuccagagagca

SEQ ID NO: 2399667 - RNA, 19 nt, Artificial Sequence
  Description of Artificial Sequence: Synthetic oligonucleotide
  Antisense strand to SEQ ID NO: 2399666
ugcucucuggaaaggagcc

SEQ ID NO: 2399668 - RNA, 19 nt, Artificial Sequence
  Description of Artificial Sequence: Synthetic oligonucleotide
  Sense strand starting at position 1580 of SEQ ID NO: 1886296
ggaauaaauugucuucuuc

SEQ ID NO: 2399669 - RNA, 19 nt, Artificial Sequence
  Description of Artificial Sequence: Synthetic oligonucleotide
  Antisense strand to SEQ ID NO: 2399668
gaagaagacaauuuauucc

SEQ ID NO: 2399670 - RNA, 19 nt, Artificial Sequence
  Description of Artificial Sequence: Synthetic oligonucleotide
  Sense strand starting at position 1870 of SEQ ID NO: 1886296
aaaucuaggcccugaugga

SEQ ID NO: 2399671 - RNA, 19 nt, Artificial Sequence
  Description of Artificial Sequence: Synthetic oligonucleotide
  Antisense strand to SEQ ID NO: 2399670
uccaucagggccuagauuu

SEQ ID NO: 2399672 - RNA, 19 nt, Artificial Sequence
  Description of Artificial Sequence: Synthetic oligonucleotide
  Sense strand starting at position 1892 of SEQ ID NO: 1886296
gcgugcuggaccucaguua

SEQ ID NO: 2399673 - RNA, 19 nt, Artificial Sequence
  Description of Artificial Sequence: Synthetic oligonucleotide
  Antisense strand to SEQ ID NO: 2399672
uaacugagguccagcacgc

SEQ ID NO: 2399674 - RNA, 19 nt, Artificial Sequence
  Description of Artificial Sequence: Synthetic oligonucleotide
  Sense strand starting at position 2150 of SEQ ID NO: 1886296
agaccauccuucuuggaca

SEQ ID NO: 2399675 - RNA, 19 nt, Artificial Sequence
  Description of Artificial Sequence: Synthetic oligonucleotide
  Antisense strand to SEQ ID NO: 2399674
uguccaagaaggauggucu

SEQ ID NO: 2399676 - RNA, 19 nt, Artificial Sequence
  Description of Artificial Sequence: Synthetic oligonucleotide
  Sense strand starting at position 2207 of SEQ ID NO: 1886296
agaggaaaugagugugcuu

SEQ ID NO: 2399677 - RNA, 19 nt, Artificial Sequence
  Description of Artificial Sequence: Synthetic oligonucleotide
  Antisense strand to SEQ ID NO: 2399676
aagcacacucauuuccucu

SEQ ID NO: 2399678 - RNA, 19 nt, Artificial Sequence
  Description of Artificial Sequence: Synthetic oligonucleotide
  Sense strand starting at position 2214 of SEQ ID NO: 1886296
augagugugcuucagaaag

SEQ ID NO: 2399679 - RNA, 19 nt, Artificial Sequence
  Description of Artificial Sequence: Synthetic oligonucleotide
  Antisense strand to SEQ ID NO: 2399678
cuuucugaagcacacucau

SEQ ID NO: 2399680 - RNA, 19 nt, Artificial Sequence
  Description of Artificial Sequence: Synthetic oligonucleotide
  Sense strand starting at position 2250 of SEQ ID NO: 1886296
ucaggaaggcuaugucaua

SEQ ID NO: 2399681 - RNA, 19 nt, Artificial Sequence
  Description of Artificial Sequence: Synthetic oligonucleotide
  Antisense strand to SEQ ID NO: 2399680
uaugacauagccuuccuga

SEQ ID NO: 2399682 - RNA, 19 nt, Artificial Sequence
  Description of Artificial Sequence: Synthetic oligonucleotide
  Sense strand starting at position 2251 of SEQ ID NO: 1886296
caggaaggcuaugucauau

SEQ ID NO: 2399683 - RNA, 19 nt, Artificial Sequence
  Description of Artificial Sequence: Synthetic oligonucleotide
  Antisense strand to SEQ ID NO: 2399682
auaugacauagccuuccug

SEQ ID NO: 2399684 - RNA, 19 nt, Artificial Sequence
  Description of Artificial Sequence: Synthetic oligonucleotide
  Sense strand starting at position 2267 of SEQ ID NO: 1886296
uauagacuccugugguaca

SEQ ID NO: 2399685 - RNA, 19 nt, Artificial Sequence
  Description of Artificial Sequence: Synthetic oligonucleotide
  Antisense strand to SEQ ID NO: 2399684
uguaccacaggagucuaua

SEQ ID NO: 2399686 - RNA, 19 nt, Artificial Sequence
  Description of Artificial Sequence: Synthetic oligonucleotide
  Sense strand starting at position 2572 of SEQ ID NO: 1886296
ggaaauauguacuuccuca

SEQ ID NO: 2399687 - RNA, 19 nt, Artificial Sequence
  Description of Artificial Sequence: Synthetic oligonucleotide
  Antisense strand to SEQ ID NO: 2399686
ugaggaaguacauauuucc

SEQ ID NO: 2399688 - RNA, 19 nt, Artificial Sequence
  Description of Artificial Sequence: Synthetic oligonucleotide
  Sense strand starting at position 2619 of SEQ ID NO: 1886296
ccaugaauguuggugaaag

SEQ ID NO: 2399689 - RNA, 19 nt, Artificial Sequence
  Description of Artificial Sequence: Synthetic oligonucleotide
  Antisense strand to SEQ ID NO: 2399688
cuuucaccaacauucaugg

SEQ ID NO: 2399690 - RNA, 19 nt, Artificial Sequence
  Description of Artificial Sequence: Synthetic oligonucleotide
  Sense strand starting at position 2640 of SEQ ID NO: 1886296
ugugauuggugaccagaac

SEQ ID NO: 2399691 - RNA, 19 nt, Artificial Sequence
  Description of Artificial Sequence: Synthetic oligonucleotide
  Antisense strand to SEQ ID NO: 2399690
guucuggucaccaaucaca

SEQ ID NO: 2399692 - RNA, 19 nt, Artificial Sequence
  Description of Artificial Sequence: Synthetic oligonucleotide
  Sense strand starting at position 2754 of SEQ ID NO: 1886296
gggcuacccaaguaugauu

SEQ ID NO: 2399693 - RNA, 19 nt, Artificial Sequence
  Description of Artificial Sequence: Synthetic oligonucleotide
  Antisense strand to SEQ ID NO: 2399692
aaucauacuuggguagccc

SEQ ID NO: 2399694 - RNA, 19 nt, Artificial Sequence
  Description of Artificial Sequence: Synthetic oligonucleotide
  Sense strand starting at position 2846 of SEQ ID NO: 1886296
agugaaguaccauguaaua

SEQ ID NO: 2399695 - RNA, 19 nt, Artificial Sequence
  Description of Artificial Sequence: Synthetic oligonucleotide
  Antisense strand to SEQ ID NO: 2399694
uauuacaugguacuucacu

SEQ ID NO: 2399696 - RNA, 19 nt, Artificial Sequence
  Description of Artificial Sequence: Synthetic oligonucleotide
  Sense strand starting at position 3060 of SEQ ID NO: 1886296
agccgaugaccuuaaacau

SEQ ID NO: 2399697 - RNA, 19 nt, Artificial Sequence
  Description of Artificial Sequence: Synthetic oligonucleotide
  Antisense strand to SEQ ID NO: 2399696
auguuuaaggucaucggcu

SEQ ID NO: 2399698 - RNA, 19 nt, Artificial Sequence
  Description of Artificial Sequence: Synthetic oligonucleotide
  Sense strand starting at position 3160 of SEQ ID NO: 1886296
ccauuaguggccuacugaa

SEQ ID NO: 2399699 - RNA, 19 nt, Artificial Sequence
  Description of Artificial Sequence: Synthetic oligonucleotide
  Antisense strand to SEQ ID NO: 2399698
uucaguaggccacuaaugg

SEQ ID NO: 2399700 - RNA, 19 nt, Artificial Sequence
  Description of Artificial Sequence: Synthetic oligonucleotide
  Sense strand starting at position 3493 of SEQ ID NO: 1886296
cuccuuggccuccaugauu

SEQ ID NO: 2399701 - RNA, 19 nt, Artificial Sequence
  Description of Artificial Sequence: Synthetic oligonucleotide
  Antisense strand to SEQ ID NO: 2399700
aaucauggaggccaaggag

SEQ ID NO: 2399702 - RNA, 19 nt, Artificial Sequence
  Description of Artificial Sequence: Synthetic oligonucleotide
  Sense strand starting at position 3496 of SEQ ID NO: 1886296
cuuggccuccaugauugau

SEQ ID NO: 2399703 - RNA, 19 nt, Artificial Sequence
  Description of Artificial Sequence: Synthetic oligonucleotide
  Antisense strand to SEQ ID NO: 2399702
aucaaucauggaggccaag

SEQ ID NO: 2399704 - RNA, 19 nt, Artificial Sequence
  Description of Artificial Sequence: Synthetic oligonucleotide
  Sense strand starting at position 3592 of SEQ ID NO: 1886296
gugcccauugcugcgagua

SEQ ID NO: 2399705 - RNA, 19 nt, Artificial Sequence
  Description of Artificial Sequence: Synthetic oligonucleotide
  Antisense strand to SEQ ID NO: 2399704
uacucgcagcaaugggcac

SEQ ID NO: 2399706 - RNA, 19 nt, Artificial Sequence
  Description of Artificial Sequence: Synthetic oligonucleotide
  Sense strand starting at position 3663 of SEQ ID NO: 1886296
ugagauucccacugcaaug

SEQ ID NO: 2399707 - RNA, 19 nt, Artificial Sequence
  Description of Artificial Sequence: Synthetic oligonucleotide
  Antisense strand to SEQ ID NO: 2399706
cauugcagugggaaucuca

SEQ ID NO: 2399708 - RNA, 19 nt, Artificial Sequence
  Description of Artificial Sequence: Synthetic oligonucleotide
  Sense strand starting at position 3781 of SEQ ID NO: 1886296
uggaaauaggccugauguc

SEQ ID NO: 2399709 - RNA, 19 nt, Artificial Sequence
  Description of Artificial Sequence: Synthetic oligonucleotide
  Antisense strand to SEQ ID NO: 2399708
gacaucaggccuauuucca

SEQ ID NO: 2399710 - RNA, 19 nt, Artificial Sequence
  Description of Artificial Sequence: Synthetic oligonucleotide
  Sense strand starting at position 3790 of SEQ ID NO: 1886296
gccugaugucccucgugua

SEQ ID NO: 2399711 - RNA, 19 nt, Artificial Sequence
  Description of Artificial Sequence: Synthetic oligonucleotide
  Antisense strand to SEQ ID NO: 2399710
uacacgagggacaucaggc

SEQ ID NO: 2399712 - RNA, 19 nt, Artificial Sequence
  Description of Artificial Sequence: Synthetic oligonucleotide
  Sense strand starting at position 3856 of SEQ ID NO: 1886296
cucugaugucgggaccaga

SEQ ID NO: 2399713 - RNA, 19 nt, Artificial Sequence
  Description of Artificial Sequence: Synthetic oligonucleotide
  Antisense strand to SEQ ID NO: 2399712
ucuggucccgacaucagag

SEQ ID NO: 2399714 - RNA, 19 nt, Artificial Sequence
  Description of Artificial Sequence: Synthetic oligonucleotide
  Sense strand starting at position 282 of SEQ ID NO: 1886297
auacgaguucaauguggau

SEQ ID NO: 2399715 - RNA, 19 nt, Artificial Sequence
  Description of Artificial Sequence: Synthetic oligonucleotide
  Antisense strand to SEQ ID NO: 2399714
auccacauugaacucguau

SEQ ID NO: 2399716 - RNA, 19 nt, Artificial Sequence
  Description of Artificial Sequence: Synthetic oligonucleotide
  Sense strand starting at position 424 of SEQ ID NO: 1886297
cgaacaaguguccaggaau

SEQ ID NO: 2399717 - RNA, 19 nt, Artificial Sequence
  Description of Artificial Sequence: Synthetic oligonucleotide
  Antisense strand to SEQ ID NO: 2399716
auuccuggacacuuguucg

SEQ ID NO: 2399718 - RNA, 19 nt, Artificial Sequence
  Description of Artificial Sequence: Synthetic oligonucleotide
  Sense strand starting at position 459 of SEQ ID NO: 1886297
aaaggaaagcaaugguauu

SEQ ID NO: 2399719 - RNA, 19 nt, Artificial Sequence
  Description of Artificial Sequence: Synthetic oligonucleotide
  Antisense strand to SEQ ID NO: 2399718
aauaccauugcuuuccuuu

SEQ ID NO: 2399720 - RNA, 19 nt, Artificial Sequence
  Description of Artificial Sequence: Synthetic oligonucleotide
  Sense strand starting at position 648 of SEQ ID NO: 1886297
gucucucagcuacagaagu

SEQ ID NO: 2399721 - RNA, 19 nt, Artificial Sequence
  Description of Artificial Sequence: Synthetic oligonucleotide
  Antisense strand to SEQ ID NO: 2399720
acuucuguagcugagagac

SEQ ID NO: 2399722 - RNA, 19 nt, Artificial Sequence
  Description of Artificial Sequence: Synthetic oligonucleotide
  Sense strand starting at position 682 of SEQ ID NO: 1886297
gcuugcauuugcccaaaga

SEQ ID NO: 2399723 - RNA, 19 nt, Artificial Sequence
  Description of Artificial Sequence: Synthetic oligonucleotide
  Antisense strand to SEQ ID NO: 2399722
ucuuugggcaaaugcaagc

SEQ ID NO: 2399724 - RNA, 19 nt, Artificial Sequence
  Description of Artificial Sequence: Synthetic oligonucleotide
  Sense strand starting at position 868 of SEQ ID NO: 1886297
aucauugauccaggcacaa

SEQ ID NO: 2399725 - RNA, 19 nt, Artificial Sequence
  Description of Artificial Sequence: Synthetic oligonucleotide
  Antisense strand to SEQ ID NO: 2399724
uugugccuggaucaaugau

SEQ ID NO: 2399726 - RNA, 19 nt, Artificial Sequence
  Description of Artificial Sequence: Synthetic oligonucleotide
  Sense strand starting at position 933 of SEQ ID NO: 1886297
gcuuacauucacgacggau

SEQ ID NO: 2399727 - RNA, 19 nt, Artificial Sequence
  Description of Artificial Sequence: Synthetic oligonucleotide
  Antisense strand to SEQ ID NO: 2399726
auccgucgugaauguaagc

SEQ ID NO: 2399728 - RNA, 19 nt, Artificial Sequence
  Description of Artificial Sequence: Synthetic oligonucleotide
  Sense strand starting at position 1085 of SEQ ID NO: 1886297
gaugaaacaugggcauguu

SEQ ID NO: 2399729 - RNA, 19 nt, Artificial Sequence
  Description of Artificial Sequence: Synthetic oligonucleotide
  Antisense strand to SEQ ID NO: 2399728
aacaugcccauguuucauc

SEQ ID NO: 2399730 - RNA, 19 nt, Artificial Sequence
  Description of Artificial Sequence: Synthetic oligonucleotide
  Sense strand starting at position 1086 of SEQ ID NO: 1886297
augaaacaugggcauguuu

SEQ ID NO: 2399731 - RNA, 19 nt, Artificial Sequence
  Description of Artificial Sequence: Synthetic oligonucleotide
  Antisense strand to SEQ ID NO: 2399730
aaacaugcccauguuucau

SEQ ID NO: 2399732 - RNA, 19 nt, Artificial Sequence
  Description of Artificial Sequence: Synthetic oligonucleotide
  Sense strand starting at position 1088 of SEQ ID NO: 1886297
gaaacaugggcauguuuga

SEQ ID NO: 2399733 - RNA, 19 nt, Artificial Sequence
  Description of Artificial Sequence: Synthetic oligonucleotide
  Antisense strand to SEQ ID NO: 2399732
ucaaacaugcccauguuuc

SEQ ID NO: 2399734 - RNA, 19 nt, Artificial Sequence
  Description of Artificial Sequence: Synthetic oligonucleotide
  Sense strand starting at position 1113 of SEQ ID NO: 1886297
cagacaugugcagagguua

SEQ ID NO: 2399735 - RNA, 19 nt, Artificial Sequence
  Description of Artificial Sequence: Synthetic oligonucleotide
  Antisense strand to SEQ ID NO: 2399734
uaaccucugcacaugucug

SEQ ID NO: 2399736 - RNA, 19 nt, Artificial Sequence
  Description of Artificial Sequence: Synthetic oligonucleotide
  Sense strand starting at position 1194 of SEQ ID NO: 1886297
uguuuauggacgcagaacu

SEQ ID NO: 2399737 - RNA, 19 nt, Artificial Sequence
  Description of Artificial Sequence: Synthetic oligonucleotide
  Antisense strand to SEQ ID NO: 2399736
aguucugcguccauaaaca

SEQ ID NO: 2399738 - RNA, 19 nt, Artificial Sequence
  Description of Artificial Sequence: Synthetic oligonucleotide
  Sense strand starting at position 1314 of SEQ ID NO: 1886297
accugcaaaguugaucaua

SEQ ID NO: 2399739 - RNA, 19 nt, Artificial Sequence
  Description of Artificial Sequence: Synthetic oligonucleotide
  Antisense strand to SEQ ID NO: 2399738
uaugaucaacuuugcaggu

SEQ ID NO: 2399740 - RNA, 19 nt, Artificial Sequence
  Description of Artificial Sequence: Synthetic oligonucleotide
  Sense strand starting at position 1316 of SEQ ID NO: 1886297
cugcaaaguugaucauaaa

SEQ ID NO: 2399741 - RNA, 19 nt, Artificial Sequence
  Description of Artificial Sequence: Synthetic oligonucleotide
  Antisense strand to SEQ ID NO: 2399740
uuuaugaucaacuuugcag

SEQ ID NO: 2399742 - RNA, 19 nt, Artificial Sequence
  Description of Artificial Sequence: Synthetic oligonucleotide
  Sense strand starting at position 1359 of SEQ ID NO: 1886297
cgaggaagccuuugaccua

SEQ ID NO: 2399743 - RNA, 19 nt, Artificial Sequence
  Description of Artificial Sequence: Synthetic oligonucleotide
  Antisense strand to SEQ ID NO: 2399742
uaggucaaaggcuuccucg

SEQ ID NO: 2399744 - RNA, 19 nt, Artificial Sequence
  Description of Artificial Sequence: Synthetic oligonucleotide
  Sense strand starting at position 1375 of SEQ ID NO: 1886297
cuacaccagguuugagaua

SEQ ID NO: 2399745 - RNA, 19 nt, Artificial Sequence
  Description of Artificial Sequence: Synthetic oligonucleotide
  Antisense strand to SEQ ID NO: 2399744
uaucucaaaccugguguag

SEQ ID NO: 2399746 - RNA, 19 nt, Artificial Sequence
  Description of Artificial Sequence: Synthetic oligonucleotide
  Sense strand starting at position 1380 of SEQ ID NO: 1886297
ccagguuugagauaagcca

SEQ ID NO: 2399747 - RNA, 19 nt, Artificial Sequence
  Description of Artificial Sequence: Synthetic oligonucleotide
  Antisense strand to SEQ ID NO: 2399746
uggcuuaucucaaaccugg

SEQ ID NO: 2399748 - RNA, 19 nt, Artificial Sequence
  Description of Artificial Sequence: Synthetic oligonucleotide
  Sense strand starting at position 2057 of SEQ ID NO: 1886297
acuuaccauccugagguau

SEQ ID NO: 2399749 - RNA, 19 nt, Artificial Sequence
  Description of Artificial Sequence: Synthetic oligonucleotide
  Antisense strand to SEQ ID NO: 2399748
auaccucaggaugguaagu

SEQ ID NO: 2399750 - RNA, 19 nt, Artificial Sequence
  Description of Artificial Sequence: Synthetic oligonucleotide
  Sense strand starting at position 2097 of SEQ ID NO: 1886297
ugccaaacauguuuagaag

SEQ ID NO: 2399751 - RNA, 19 nt, Artificial Sequence
  Description of Artificial Sequence: Synthetic oligonucleotide
  Antisense strand to SEQ ID NO: 2399750
cuucuaaacauguuuggca

SEQ ID NO: 2399752 - RNA, 19 nt, Artificial Sequence
  Description of Artificial Sequence: Synthetic oligonucleotide
  Sense strand starting at position 2214 of SEQ ID NO: 1886297
aacagugugcuugagaaag

SEQ ID NO: 2399753 - RNA, 19 nt, Artificial Sequence
  Description of Artificial Sequence: Synthetic oligonucleotide
  Antisense strand to SEQ ID NO: 2399752
cuuucucaagcacacuguu

SEQ ID NO: 2399754 - RNA, 19 nt, Artificial Sequence
  Description of Artificial Sequence: Synthetic oligonucleotide
  Sense strand starting at position 2279 of SEQ ID NO: 1886297
uggaguaaucuguaucuac

SEQ ID NO: 2399755 - RNA, 19 nt, Artificial Sequence
  Description of Artificial Sequence: Synthetic oligonucleotide
  Antisense strand to SEQ ID NO: 2399754
guagauacagauuacucca

SEQ ID NO: 2399756 - RNA, 19 nt, Artificial Sequence
  Description of Artificial Sequence: Synthetic oligonucleotide
  Sense strand starting at position 2389 of SEQ ID NO: 1886297
acuagagagcacuaagcau

SEQ ID NO: 2399757 - RNA, 19 nt, Artificial Sequence
  Description of Artificial Sequence: Synthetic oligonucleotide
  Antisense strand to SEQ ID NO: 2399756
augcuuagugcucucuagu

SEQ ID NO: 2399758 - RNA, 19 nt, Artificial Sequence
  Description of Artificial Sequence: Synthetic oligonucleotide
  Sense strand starting at position 2395 of SEQ ID NO: 1886297
gagcacuaagcaugaagaa

SEQ ID NO: 2399759 - RNA, 19 nt, Artificial Sequence
  Description of Artificial Sequence: Synthetic oligonucleotide
  Antisense strand to SEQ ID NO: 2399758
uucuucaugcuuagugcuc

SEQ ID NO: 2399760 - RNA, 19 nt, Artificial Sequence
  Description of Artificial Sequence: Synthetic oligonucleotide
  Sense strand starting at position 2458 of SEQ ID NO: 1886297
ucuccuggccaucagagaa

SEQ ID NO: 2399761 - RNA, 19 nt, Artificial Sequence
  Description of Artificial Sequence: Synthetic oligonucleotide
  Antisense strand to SEQ ID NO: 2399760
uucucugauggccaggaga

SEQ ID NO: 2399762 - RNA, 19 nt, Artificial Sequence
  Description of Artificial Sequence: Synthetic oligonucleotide
  Sense strand starting at position 2476 of SEQ ID NO: 1886297
agacaaaggcuauggugau

SEQ ID NO: 2399763 - RNA, 19 nt, Artificial Sequence
  Description of Artificial Sequence: Synthetic oligonucleotide
  Antisense strand to SEQ ID NO: 2399762
aucaccauagccuuugucu

SEQ ID NO: 2399764 - RNA, 19 nt, Artificial Sequence
  Description of Artificial Sequence: Synthetic oligonucleotide
  Sense strand starting at position 2489 of SEQ ID NO: 1886297
ggugauacuucagugagga

SEQ ID NO: 2399765 - RNA, 19 nt, Artificial Sequence
  Description of Artificial Sequence: Synthetic oligonucleotide
  Antisense strand to SEQ ID NO: 2399764
uccucacugaaguaucacc

SEQ ID NO: 2399766 - RNA, 19 nt, Artificial Sequence
  Description of Artificial Sequence: Synthetic oligonucleotide
  Sense strand starting at position 2490 of SEQ ID NO: 1886297
gugauacuucagugaggag

SEQ ID NO: 2399767 - RNA, 19 nt, Artificial Sequence
  Description of Artificial Sequence: Synthetic oligonucleotide
  Antisense strand to SEQ ID NO: 2399766
cuccucacugaaguaucac

SEQ ID NO: 2399768 - RNA, 19 nt, Artificial Sequence
  Description of Artificial Sequence: Synthetic oligonucleotide
  Sense strand starting at position 2683 of SEQ ID NO: 1886297
cuacaagauuucuaaggug

SEQ ID NO: 2399769 - RNA, 19 nt, Artificial Sequence
  Description of Artificial Sequence: Synthetic oligonucleotide
  Antisense strand to SEQ ID NO: 2399768
caccuuagaaaucuuguag

SEQ ID NO: 2399770 - RNA, 19 nt, Artificial Sequence
  Description of Artificial Sequence: Synthetic oligonucleotide
  Sense strand starting at position 2697 of SEQ ID NO: 1886297
aggugcugcagcuaagaaa

SEQ ID NO: 2399771 - RNA, 19 nt, Artificial Sequence
  Description of Artificial Sequence: Synthetic oligonucleotide
  Antisense strand to SEQ ID NO: 2399770
uuucuuagcugcagcaccu

SEQ ID NO: 2399772 - RNA, 19 nt, Artificial Sequence
  Description of Artificial Sequence: Synthetic oligonucleotide
  Sense strand starting at position 2825 of SEQ ID NO: 1886297
agaagacugcugugaagaa

SEQ ID NO: 2399773 - RNA, 19 nt, Artificial Sequence
  Description of Artificial Sequence: Synthetic oligonucleotide
  Antisense strand to SEQ ID NO: 2399772
uucuucacagcagucuucu

SEQ ID NO: 2399774 - RNA, 19 nt, Artificial Sequence
  Description of Artificial Sequence: Synthetic oligonucleotide
  Sense strand starting at position 2872 of SEQ ID NO: 1886297
ucaggagacgcugagguau

SEQ ID NO: 2399775 - RNA, 19 nt, Artificial Sequence
  Description of Artificial Sequence: Synthetic oligonucleotide
  Antisense strand to SEQ ID NO: 2399774
auaccucagcgucuccuga

SEQ ID NO: 2399776 - RNA, 19 nt, Artificial Sequence
  Description of Artificial Sequence: Synthetic oligonucleotide
  Sense strand starting at position 2880 of SEQ ID NO: 1886297
cgcugagguauauaagcaa

SEQ ID NO: 2399777 - RNA, 19 nt, Artificial Sequence
  Description of Artificial Sequence: Synthetic oligonucleotide
  Antisense strand to SEQ ID NO: 2399776
uugcuuauauaccucagcg

SEQ ID NO: 2399778 - RNA, 19 nt, Artificial Sequence
  Description of Artificial Sequence: Synthetic oligonucleotide
  Sense strand starting at position 3170 of SEQ ID NO: 1886297
cccuucuugggccaugaaa

SEQ ID NO: 2399779 - RNA, 19 nt, Artificial Sequence
  Description of Artificial Sequence: Synthetic oligonucleotide
  Antisense strand to SEQ ID NO: 2399778
uuucauggcccaagaaggg

SEQ ID NO: 2399780 - RNA, 19 nt, Artificial Sequence
  Description of Artificial Sequence: Synthetic oligonucleotide
  Sense strand starting at position 3172 of SEQ ID NO: 1886297
cuucuugggccaugaaauu

SEQ ID NO: 2399781 - RNA, 19 nt, Artificial Sequence
  Description of Artificial Sequence: Synthetic oligonucleotide
  Antisense strand to SEQ ID NO: 2399780
aauuucauggcccaagaag

SEQ ID NO: 2399782 - RNA, 19 nt, Artificial Sequence
  Description of Artificial Sequence: Synthetic oligonucleotide
  Sense strand starting at position 3181 of SEQ ID NO: 1886297
ccaugaaauuuggaauucu

SEQ ID NO: 2399783 - RNA, 19 nt, Artificial Sequence
  Description of Artificial Sequence: Synthetic oligonucleotide
  Antisense strand to SEQ ID NO: 2399782
agaauuccaaauuucaugg

SEQ ID NO: 2399784 - RNA, 19 nt, Artificial Sequence
  Description of Artificial Sequence: Synthetic oligonucleotide
  Sense strand starting at position 3239 of SEQ ID NO: 1886297
ggcuccuuuccagagagca

SEQ ID NO: 2399785 - RNA, 19 nt, Artificial Sequence
  Description of Artificial Sequence: Synthetic oligonucleotide
  Antisense strand to SEQ ID NO: 2399784
ugcucucuggaaaggagcc

SEQ ID NO: 2399786 - RNA, 19 nt, Artificial Sequence
  Description of Artificial Sequence: Synthetic oligonucleotide
  Sense strand starting at position 3395 of SEQ ID NO: 1886297
ggaauaaauugucuucuuc

SEQ ID NO: 2399787 - RNA, 19 nt, Artificial Sequence
  Description of Artificial Sequence: Synthetic oligonucleotide
  Antisense strand to SEQ ID NO: 2399786
gaagaagacaauuuauucc

SEQ ID NO: 2399788 - RNA, 19 nt, Artificial Sequence
  Description of Artificial Sequence: Synthetic oligonucleotide
  Sense strand starting at position 3685 of SEQ ID NO: 1886297
aaaucuaggcccugaugga

SEQ ID NO: 2399789 - RNA, 19 nt, Artificial Sequence
  Description of Artificial Sequence: Synthetic oligonucleotide
  Antisense strand to SEQ ID NO: 2399788
uccaucagggccuagauuu

SEQ ID NO: 2399790 - RNA, 19 nt, Artificial Sequence
  Description of Artificial Sequence: Synthetic oligonucleotide
  Sense strand starting at position 3707 of SEQ ID NO: 1886297
gcgugcuggaccucaguua

SEQ ID NO: 2399791 - RNA, 19 nt, Artificial Sequence
  Description of Artificial Sequence: Synthetic oligonucleotide
  Antisense strand to SEQ ID NO: 2399790
uaacugagguccagcacgc

SEQ ID NO: 2399792 - RNA, 19 nt, Artificial Sequence
  Description of Artificial Sequence: Synthetic oligonucleotide
  Sense strand starting at position 3965 of SEQ ID NO: 1886297
agaccauccuucuuggaca

SEQ ID NO: 2399793 - RNA, 19 nt, Artificial Sequence
  Description of Artificial Sequence: Synthetic oligonucleotide
  Antisense strand to SEQ ID NO: 2399792
uguccaagaaggauggucu

SEQ ID NO: 2399794 - RNA, 19 nt, Artificial Sequence
  Description of Artificial Sequence: Synthetic oligonucleotide
  Sense strand starting at position 275 of SEQ ID NO: 1886298
ugcuguauucuauaucuac

SEQ ID NO: 2399795 - RNA, 19 nt, Artificial Sequence
  Description of Artificial Sequence: Synthetic oligonucleotide
  Antisense strand to SEQ ID NO: 2399794
guagauauagaauacagca

SEQ ID NO: 2399796 - RNA, 19 nt, Artificial Sequence
  Description of Artificial Sequence: Synthetic oligonucleotide
  Sense strand starting at position 329 of SEQ ID NO: 1886298
cagauauacccaggcauga

SEQ ID NO: 2399797 - RNA, 19 nt, Artificial Sequence
  Description of Artificial Sequence: Synthetic oligonucleotide
  Antisense strand to SEQ ID NO: 2399796
ucaugccuggguauaucug

SEQ ID NO: 2399798 - RNA, 19 nt, Artificial Sequence
  Description of Artificial Sequence: Synthetic oligonucleotide
  Sense strand starting at position 393 of SEQ ID NO: 1886298
aacacuaagcgcgaagaau

SEQ ID NO: 2399799 - RNA, 19 nt, Artificial Sequence
  Description of Artificial Sequence: Synthetic oligonucleotide
  Antisense strand to SEQ ID NO: 2399798
auucuucgcgcuuaguguu

SEQ ID NO: 2399800 - RNA, 19 nt, Artificial Sequence
  Description of Artificial Sequence: Synthetic oligonucleotide
  Sense strand starting at position 455 of SEQ ID NO: 1886298
ucucuuggccaucagagaa

SEQ ID NO: 2399801 - RNA, 19 nt, Artificial Sequence
  Description of Artificial Sequence: Synthetic oligonucleotide
  Antisense strand to SEQ ID NO: 2399800
uucucugauggccaagaga

SEQ ID NO: 2399802 - RNA, 19 nt, Artificial Sequence
  Description of Artificial Sequence: Synthetic oligonucleotide
  Sense strand starting at position 520 of SEQ ID NO: 1886298
aguguuccagcacaaagaa

SEQ ID NO: 2399803 - RNA, 19 nt, Artificial Sequence
  Description of Artificial Sequence: Synthetic oligonucleotide
  Antisense strand to SEQ ID NO: 2399802
uucuuugugcuggaacacu

SEQ ID NO: 2399804 - RNA, 19 nt, Artificial Sequence
  Description of Artificial Sequence: Synthetic oligonucleotide
  Sense strand starting at position 691 of SEQ ID NO: 1886298
ggugcugucccugagaaca

SEQ ID NO: 2399805 - RNA, 19 nt, Artificial Sequence
  Description of Artificial Sequence: Synthetic oligonucleotide
  Antisense strand to SEQ ID NO: 2399804
uguucucagggacagcacc

SEQ ID NO: 2399806 - RNA, 19 nt, Artificial Sequence
  Description of Artificial Sequence: Synthetic oligonucleotide
  Sense strand starting at position 1085 of SEQ ID NO: 1886298
guagaaacccugggccaau

SEQ ID NO: 2399807 - RNA, 19 nt, Artificial Sequence
  Description of Artificial Sequence: Synthetic oligonucleotide
  Antisense strand to SEQ ID NO: 2399806
auuggcccaggguuucuac

SEQ ID NO: 2399808 - RNA, 19 nt, Artificial Sequence
  Description of Artificial Sequence: Synthetic oligonucleotide
  Sense strand starting at position 1096 of SEQ ID NO: 1886298
gggccaauaucugcucaaa

SEQ ID NO: 2399809 - RNA, 19 nt, Artificial Sequence
  Description of Artificial Sequence: Synthetic oligonucleotide
  Antisense strand to SEQ ID NO: 2399808
uuugagcagauauuggccc

SEQ ID NO: 2399810 - RNA, 19 nt, Artificial Sequence
  Description of Artificial Sequence: Synthetic oligonucleotide
  Sense strand starting at position 1098 of SEQ ID NO: 1886298
gccaauaucugcucaaaug

SEQ ID NO: 2399811 - RNA, 19 nt, Artificial Sequence
  Description of Artificial Sequence: Synthetic oligonucleotide
  Antisense strand to SEQ ID NO: 2399810
cauuugagcagauauuggc

SEQ ID NO: 2399812 - RNA, 19 nt, Artificial Sequence
  Description of Artificial Sequence: Synthetic oligonucleotide
  Sense strand starting at position 1404 of SEQ ID NO: 1886298
auacgaguucaauguggau

SEQ ID NO: 2399813 - RNA, 19 nt, Artificial Sequence
  Description of Artificial Sequence: Synthetic oligonucleotide
  Antisense strand to SEQ ID NO: 2399812
auccacauugaacucguau

SEQ ID NO: 2399814 - RNA, 19 nt, Artificial Sequence
  Description of Artificial Sequence: Synthetic oligonucleotide
  Sense strand starting at position 1485 of SEQ ID NO: 1886298
cccugaugcuacccaagua

SEQ ID NO: 2399815 - RNA, 19 nt, Artificial Sequence
  Description of Artificial Sequence: Synthetic oligonucleotide
  Antisense strand to SEQ ID NO: 2399814
uacuuggguagcaucaggg

SEQ ID NO: 2399816 - RNA, 19 nt, Artificial Sequence
  Description of Artificial Sequence: Synthetic oligonucleotide
  Sense strand starting at position 1546 of SEQ ID NO: 1886298
cgaacaaguguccaggaau

SEQ ID NO: 2399817 - RNA, 19 nt, Artificial Sequence
  Description of Artificial Sequence: Synthetic oligonucleotide
  Antisense strand to SEQ ID NO: 2399816
auuccuggacacuuguucg

SEQ ID NO: 2399818 - RNA, 19 nt, Artificial Sequence
  Description of Artificial Sequence: Synthetic oligonucleotide
  Sense strand starting at position 1581 of SEQ ID NO: 1886298
aaaggaaagcaaugguauu

SEQ ID NO: 2399819 - RNA, 19 nt, Artificial Sequence
  Description of Artificial Sequence: Synthetic oligonucleotide
  Antisense strand to SEQ ID NO: 2399818
aauaccauugcuuuccuuu

SEQ ID NO: 2399820 - RNA, 19 nt, Artificial Sequence
  Description of Artificial Sequence: Synthetic oligonucleotide
  Sense strand starting at position 1770 of SEQ ID NO: 1886298
gucucucagcuacagaagu

SEQ ID NO: 2399821 - RNA, 19 nt, Artificial Sequence
  Description of Artificial Sequence: Synthetic oligonucleotide
  Antisense strand to SEQ ID NO: 2399820
acuucuguagcugagagac

SEQ ID NO: 2399822 - RNA, 19 nt, Artificial Sequence
  Description of Artificial Sequence: Synthetic oligonucleotide
  Sense strand starting at position 1804 of SEQ ID NO: 1886298
gcuugcauuugcccaaaga

SEQ ID NO: 2399823 - RNA, 19 nt, Artificial Sequence
  Description of Artificial Sequence: Synthetic oligonucleotide
  Antisense strand to SEQ ID NO: 2399822
ucuuugggcaaaugcaagc

SEQ ID NO: 2399824 - RNA, 19 nt, Artificial Sequence
  Description of Artificial Sequence: Synthetic oligonucleotide
  Sense strand starting at position 1990 of SEQ ID NO: 1886298
aucauugauccaggcacaa

SEQ ID NO: 2399825 - RNA, 19 nt, Artificial Sequence
  Description of Artificial Sequence: Synthetic oligonucleotide
  Antisense strand to SEQ ID NO: 2399824
uugugccuggaucaaugau

SEQ ID NO: 2399826 - RNA, 19 nt, Artificial Sequence
  Description of Artificial Sequence: Synthetic oligonucleotide
  Sense strand starting at position 2055 of SEQ ID NO: 1886298
gcuuacauucacgacggau

SEQ ID NO: 2399827 - RNA, 19 nt, Artificial Sequence
  Description of Artificial Sequence: Synthetic oligonucleotide
  Antisense strand to SEQ ID NO: 2399826
auccgucgugaauguaagc

SEQ ID NO: 2399828 - RNA, 19 nt, Artificial Sequence
  Description of Artificial Sequence: Synthetic oligonucleotide
  Sense strand starting at position 2207 of SEQ ID NO: 1886298
gaugaaacaugggcauguu

SEQ ID NO: 2399829 - RNA, 19 nt, Artificial Sequence
  Description of Artificial Sequence: Synthetic oligonucleotide
  Antisense strand to SEQ ID NO: 2399828
aacaugcccauguuucauc

SEQ ID NO: 2399830 - RNA, 19 nt, Artificial Sequence
  Description of Artificial Sequence: Synthetic oligonucleotide
  Sense strand starting at position 2208 of SEQ ID NO: 1886298
augaaacaugggcauguuu

SEQ ID NO: 2399831 - RNA, 19 nt, Artificial Sequence
  Description of Artificial Sequence: Synthetic oligonucleotide
  Antisense strand to SEQ ID NO: 2399830
aaacaugcccauguuucau

SEQ ID NO: 2399832 - RNA, 19 nt, Artificial Sequence
  Description of Artificial Sequence: Synthetic oligonucleotide
  Sense strand starting at position 2210 of SEQ ID NO: 1886298
gaaacaugggcauguuuga

SEQ ID NO: 2399833 - RNA, 19 nt, Artificial Sequence
  Description of Artificial Sequence: Synthetic oligonucleotide
  Antisense strand to SEQ ID NO: 2399832
ucaaacaugcccauguuuc

SEQ ID NO: 2399834 - RNA, 19 nt, Artificial Sequence
  Description of Artificial Sequence: Synthetic oligonucleotide
  Sense strand starting at position 2235 of SEQ ID NO: 1886298
cagacaugugcagagguua

SEQ ID NO: 2399835 - RNA, 19 nt, Artificial Sequence
  Description of Artificial Sequence: Synthetic oligonucleotide
  Antisense strand to SEQ ID NO: 2399834
uaaccucugcacaugucug

SEQ ID NO: 2399836 - RNA, 19 nt, Artificial Sequence
  Description of Artificial Sequence: Synthetic oligonucleotide
  Sense strand starting at position 2316 of SEQ ID NO: 1886298
uguuuauggacgcagaacu

SEQ ID NO: 2399837 - RNA, 19 nt, Artificial Sequence
  Description of Artificial Sequence: Synthetic oligonucleotide
  Antisense strand to SEQ ID NO: 2399836
aguucugcguccauaaaca

SEQ ID NO: 2399838 - RNA, 19 nt, Artificial Sequence
  Description of Artificial Sequence: Synthetic oligonucleotide
  Sense strand starting at position 2436 of SEQ ID NO: 1886298
accugcaaaguugaucaua

SEQ ID NO: 2399839 - RNA, 19 nt, Artificial Sequence
  Description of Artificial Sequence: Synthetic oligonucleotide
  Antisense strand to SEQ ID NO: 2399838
uaugaucaacuuugcaggu

SEQ ID NO: 2399840 - RNA, 19 nt, Artificial Sequence
  Description of Artificial Sequence: Synthetic oligonucleotide
  Sense strand starting at position 2438 of SEQ ID NO: 1886298
cugcaaaguugaucauaaa

SEQ ID NO: 2399841 - RNA, 19 nt, Artificial Sequence
  Description of Artificial Sequence: Synthetic oligonucleotide
  Antisense strand to SEQ ID NO: 2399840
uuuaugaucaacuuugcag

SEQ ID NO: 2399842 - RNA, 19 nt, Artificial Sequence
  Description of Artificial Sequence: Synthetic oligonucleotide
  Sense strand starting at position 2481 of SEQ ID NO: 1886298
cgaggaagccuuugaccua

SEQ ID NO: 2399843 - RNA, 19 nt, Artificial Sequence
  Description of Artificial Sequence: Synthetic oligonucleotide
  Antisense strand to SEQ ID NO: 2399842
uaggucaaaggcuuccucg

SEQ ID NO: 2399844 - RNA, 19 nt, Artificial Sequence
  Description of Artificial Sequence: Synthetic oligonucleotide
  Sense strand starting at position 2497 of SEQ ID NO: 1886298
cuacaccagguuugagaua

SEQ ID NO: 2399845 - RNA, 19 nt, Artificial Sequence
  Description of Artificial Sequence: Synthetic oligonucleotide
  Antisense strand to SEQ ID NO: 2399844
uaucucaaaccugguguag

SEQ ID NO: 2399846 - RNA, 19 nt, Artificial Sequence
  Description of Artificial Sequence: Synthetic oligonucleotide
  Sense strand starting at position 2502 of SEQ ID NO: 1886298
ccagguuugagauaagcca

SEQ ID NO: 2399847 - RNA, 19 nt, Artificial Sequence
  Description of Artificial Sequence: Synthetic oligonucleotide
  Antisense strand to SEQ ID NO: 2399846
uggcuuaucucaaaccugg

SEQ ID NO: 2399848 - RNA, 19 nt, Artificial Sequence
  Description of Artificial Sequence: Synthetic oligonucleotide
  Sense strand starting at position 3179 of SEQ ID NO: 1886298
acuuaccauccugagguau

SEQ ID NO: 2399849 - RNA, 19 nt, Artificial Sequence
  Description of Artificial Sequence: Synthetic oligonucleotide
  Antisense strand to SEQ ID NO: 2399848
auaccucaggaugguaagu

SEQ ID NO: 2399850 - RNA, 19 nt, Artificial Sequence
  Description of Artificial Sequence: Synthetic oligonucleotide
  Sense strand starting at position 3219 of SEQ ID NO: 1886298
ugccaaacauguuuagaag

SEQ ID NO: 2399851 - RNA, 19 nt, Artificial Sequence
  Description of Artificial Sequence: Synthetic oligonucleotide
  Antisense strand to SEQ ID NO: 2399850
cuucuaaacauguuuggca

SEQ ID NO: 2399852 - RNA, 19 nt, Artificial Sequence
  Description of Artificial Sequence: Synthetic oligonucleotide
  Sense strand starting at position 3336 of SEQ ID NO: 1886298
aacagugugcuugagaaag

SEQ ID NO: 2399853 - RNA, 19 nt, Artificial Sequence
  Description of Artificial Sequence: Synthetic oligonucleotide
  Antisense strand to SEQ ID NO: 2399852
cuuucucaagcacacuguu

SEQ ID NO: 2399854 - RNA, 19 nt, Artificial Sequence
  Description of Artificial Sequence: Synthetic oligonucleotide
  Sense strand starting at position 3401 of SEQ ID NO: 1886298
uggaguaaucuguaucuac

SEQ ID NO: 2399855 - RNA, 19 nt, Artificial Sequence
  Description of Artificial Sequence: Synthetic oligonucleotide
  Antisense strand to SEQ ID NO: 2399854
guagauacagauuacucca

SEQ ID NO: 2399856 - RNA, 19 nt, Artificial Sequence
  Description of Artificial Sequence: Synthetic oligonucleotide
  Sense strand starting at position 3511 of SEQ ID NO: 1886298
acuagagagcacuaagcau

SEQ ID NO: 2399857 - RNA, 19 nt, Artificial Sequence
  Description of Artificial Sequence: Synthetic oligonucleotide
  Antisense strand to SEQ ID NO: 2399856
augcuuagugcucucuagu

SEQ ID NO: 2399858 - RNA, 19 nt, Artificial Sequence
  Description of Artificial Sequence: Synthetic oligonucleotide
  Sense strand starting at position 3517 of SEQ ID NO: 1886298
gagcacuaagcaugaagaa

SEQ ID NO: 2399859 - RNA, 19 nt, Artificial Sequence
  Description of Artificial Sequence: Synthetic oligonucleotide
  Antisense strand to SEQ ID NO: 2399858
uucuucaugcuuagugcuc

SEQ ID NO: 2399860 - RNA, 19 nt, Artificial Sequence
  Description of Artificial Sequence: Synthetic oligonucleotide
  Sense strand starting at position 3580 of SEQ ID NO: 1886298
ucuccuggccaucagagaa

SEQ ID NO: 2399861 - RNA, 19 nt, Artificial Sequence
  Description of Artificial Sequence: Synthetic oligonucleotide
  Antisense strand to SEQ ID NO: 2399860
uucucugauggccaggaga

SEQ ID NO: 2399862 - RNA, 19 nt, Artificial Sequence
  Description of Artificial Sequence: Synthetic oligonucleotide
  Sense strand starting at position 3598 of SEQ ID NO: 1886298
agacaaaggcuauggugau

SEQ ID NO: 2399863 - RNA, 19 nt, Artificial Sequence
  Description of Artificial Sequence: Synthetic oligonucleotide
  Antisense strand to SEQ ID NO: 2399862
aucaccauagccuuugucu

SEQ ID NO: 2399864 - RNA, 19 nt, Artificial Sequence
  Description of Artificial Sequence: Synthetic oligonucleotide
  Sense strand starting at position 3611 of SEQ ID NO: 1886298
ggugauacuucagugagga

SEQ ID NO: 2399865 - RNA, 19 nt, Artificial Sequence
  Description of Artificial Sequence: Synthetic oligonucleotide
  Antisense strand to SEQ ID NO: 2399864
uccucacugaaguaucacc

SEQ ID NO: 2399866 - RNA, 19 nt, Artificial Sequence
  Description of Artificial Sequence: Synthetic oligonucleotide
  Sense strand starting at position 3612 of SEQ ID NO: 1886298
gugauacuucagugaggag

SEQ ID NO: 2399867 - RNA, 19 nt, Artificial Sequence
  Description of Artificial Sequence: Synthetic oligonucleotide
  Antisense strand to SEQ ID NO: 2399866
cuccucacugaaguaucac

SEQ ID NO: 2399868 - RNA, 19 nt, Artificial Sequence
  Description of Artificial Sequence: Synthetic oligonucleotide
  Sense strand starting at position 3805 of SEQ ID NO: 1886298
cuacaagauuucuaaggug

SEQ ID NO: 2399869 - RNA, 19 nt, Artificial Sequence
  Description of Artificial Sequence: Synthetic oligonucleotide
  Antisense strand to SEQ ID NO: 2399868
caccuuagaaaucuuguag

SEQ ID NO: 2399870 - RNA, 19 nt, Artificial Sequence
  Description of Artificial Sequence: Synthetic oligonucleotide
  Sense strand starting at position 3819 of SEQ ID NO: 1886298
aggugcugcagcuaagaaa

SEQ ID NO: 2399871 - RNA, 19 nt, Artificial Sequence
  Description of Artificial Sequence: Synthetic oligonucleotide
  Antisense strand to SEQ ID NO: 2399870
uuucuuagcugcagcaccu

SEQ ID NO: 2399872 - RNA, 19 nt, Artificial Sequence
  Description of Artificial Sequence: Synthetic oligonucleotide
  Sense strand starting at position 3947 of SEQ ID NO: 1886298
agaagacugcugugaagaa

SEQ ID NO: 2399873 - RNA, 19 nt, Artificial Sequence
  Description of Artificial Sequence: Synthetic oligonucleotide
  Antisense strand to SEQ ID NO: 2399872
uucuucacagcagucuucu

SEQ ID NO: 2399874 - RNA, 19 nt, Artificial Sequence
  Description of Artificial Sequence: Synthetic oligonucleotide
  Sense strand starting at position 47 of SEQ ID NO: 1886299
cccugugguuuaucuggaa

SEQ ID NO: 2399875 - RNA, 19 nt, Artificial Sequence
  Description of Artificial Sequence: Synthetic oligonucleotide
  Antisense strand to SEQ ID NO: 2399874
uuccagauaaaccacaggg

SEQ ID NO: 2399876 - RNA, 19 nt, Artificial Sequence
  Description of Artificial Sequence: Synthetic oligonucleotide
  Sense strand starting at position 51 of SEQ ID NO: 1886299
gugguuuaucuggaauaug

SEQ ID NO: 2399877 - RNA, 19 nt, Artificial Sequence
  Description of Artificial Sequence: Synthetic oligonucleotide
  Antisense strand to SEQ ID NO: 2399876
cauauuccagauaaaccac

SEQ ID NO: 2399878 - RNA, 19 nt, Artificial Sequence
  Description of Artificial Sequence: Synthetic oligonucleotide
  Sense strand starting at position 99 of SEQ ID NO: 1886299
ccagaaauuuauggacaca

SEQ ID NO: 2399879 - RNA, 19 nt, Artificial Sequence
  Description of Artificial Sequence: Synthetic oligonucleotide
  Antisense strand to SEQ ID NO: 2399878
uguguccauaaauuucugg

SEQ ID NO: 2399880 - RNA, 19 nt, Artificial Sequence
  Description of Artificial Sequence: Synthetic oligonucleotide
  Sense strand starting at position 153 of SEQ ID NO: 1886299
gcaucaucccgcuaaagag

SEQ ID NO: 2399881 - RNA, 19 nt, Artificial Sequence
  Description of Artificial Sequence: Synthetic oligonucleotide
  Antisense strand to SEQ ID NO: 2399880
cucuuuagcgggaugaugc

SEQ ID NO: 2399882 - RNA, 19 nt, Artificial Sequence
  Description of Artificial Sequence: Synthetic oligonucleotide
  Sense strand starting at position 178 of SEQ ID NO: 1886299
uguugagcauccuucucaa

SEQ ID NO: 2399883 - RNA, 19 nt, Artificial Sequence
  Description of Artificial Sequence: Synthetic oligonucleotide
  Antisense strand to SEQ ID NO: 2399882
uugagaaggaugcucaaca

SEQ ID NO: 2399884 - RNA, 19 nt, Artificial Sequence
  Description of Artificial Sequence: Synthetic oligonucleotide
  Sense strand starting at position 271 of SEQ ID NO: 1886299
accuguaucugguuuggga

SEQ ID NO: 2399885 - RNA, 19 nt, Artificial Sequence
  Description of Artificial Sequence: Synthetic oligonucleotide
  Antisense strand to SEQ ID NO: 2399884
ucccaaaccagauacaggu

SEQ ID NO: 2399886 - RNA, 19 nt, Artificial Sequence
  Description of Artificial Sequence: Synthetic oligonucleotide
  Sense strand starting at position 273 of SEQ ID NO: 1886299
cuguaucugguuugggaua

SEQ ID NO: 2399887 - RNA, 19 nt, Artificial Sequence
  Description of Artificial Sequence: Synthetic oligonucleotide
  Antisense strand to SEQ ID NO: 2399886
uaucccaaaccagauacag

SEQ ID NO: 2399888 - RNA, 19 nt, Artificial Sequence
  Description of Artificial Sequence: Synthetic oligonucleotide
  Sense strand starting at position 400 of SEQ ID NO: 1886299
agaggcuaugccggguaaa

SEQ ID NO: 2399889 - RNA, 19 nt, Artificial Sequence
  Description of Artificial Sequence: Synthetic oligonucleotide
  Antisense strand to SEQ ID NO: 2399888
uuuacccggcauagccucu

SEQ ID NO: 2399890 - RNA, 19 nt, Artificial Sequence
  Description of Artificial Sequence: Synthetic oligonucleotide
  Sense strand starting at position 1061 of SEQ ID NO: 1886299
agaugaugauugucccuca

SEQ ID NO: 2399891 - RNA, 19 nt, Artificial Sequence
  Description of Artificial Sequence: Synthetic oligonucleotide
  Antisense strand to SEQ ID NO: 2399890
ugagggacaaucaucaucu

SEQ ID NO: 2399892 - RNA, 19 nt, Artificial Sequence
  Description of Artificial Sequence: Synthetic oligonucleotide
  Sense strand starting at position 1064 of SEQ ID NO: 1886299
ugaugauugucccucacca

SEQ ID NO: 2399893 - RNA, 19 nt, Artificial Sequence
  Description of Artificial Sequence: Synthetic oligonucleotide
  Antisense strand to SEQ ID NO: 2399892
uggugagggacaaucauca

SEQ ID NO: 2399894 - RNA, 19 nt, Artificial Sequence
  Description of Artificial Sequence: Synthetic oligonucleotide
  Sense strand starting at position 1156 of SEQ ID NO: 1886299
acagaugugcaguacacaa

SEQ ID NO: 2399895 - RNA, 19 nt, Artificial Sequence
  Description of Artificial Sequence: Synthetic oligonucleotide
  Antisense strand to SEQ ID NO: 2399894
uuguguacugcacaucugu

SEQ ID NO: 2399896 - RNA, 19 nt, Artificial Sequence
  Description of Artificial Sequence: Synthetic oligonucleotide
  Sense strand starting at position 1198 of SEQ ID NO: 1886299
caguguaucugguugauac

SEQ ID NO: 2399897 - RNA, 19 nt, Artificial Sequence
  Description of Artificial Sequence: Synthetic oligonucleotide
  Antisense strand to SEQ ID NO: 2399896
guaucaaccagauacacug

SEQ ID NO: 2399898 - RNA, 19 nt, Artificial Sequence
  Description of Artificial Sequence: Synthetic oligonucleotide
  Sense strand starting at position 1297 of SEQ ID NO: 1886299
acuaaagagcacugacauu

SEQ ID NO: 2399899 - RNA, 19 nt, Artificial Sequence
  Description of Artificial Sequence: Synthetic oligonucleotide
  Antisense strand to SEQ ID NO: 2399898
aaugucagugcucuuuagu

SEQ ID NO: 2399900 - RNA, 19 nt, Artificial Sequence
  Description of Artificial Sequence: Synthetic oligonucleotide
  Sense strand starting at position 1303 of SEQ ID NO: 1886299
gagcacugacauugagcau

SEQ ID NO: 2399901 - RNA, 19 nt, Artificial Sequence
  Description of Artificial Sequence: Synthetic oligonucleotide
  Antisense strand to SEQ ID NO: 2399900
augcucaaugucagugcuc

SEQ ID NO: 2399902 - RNA, 19 nt, Artificial Sequence
  Description of Artificial Sequence: Synthetic oligonucleotide
  Sense strand starting at position 1391 of SEQ ID NO: 1886299
ugaggaagccauugacgua

SEQ ID NO: 2399903 - RNA, 19 nt, Artificial Sequence
  Description of Artificial Sequence: Synthetic oligonucleotide
  Antisense strand to SEQ ID NO: 2399902
uacgucaauggcuuccuca

SEQ ID NO: 2399904 - RNA, 19 nt, Artificial Sequence
  Description of Artificial Sequence: Synthetic oligonucleotide
  Sense strand starting at position 1430 of SEQ ID NO: 1886299
agagacuccuugccuauca

SEQ ID NO: 2399905 - RNA, 19 nt, Artificial Sequence
  Description of Artificial Sequence: Synthetic oligonucleotide
  Antisense strand to SEQ ID NO: 2399904
ugauaggcaaggagucucu

SEQ ID NO: 2399906 - RNA, 19 nt, Artificial Sequence
  Description of Artificial Sequence: Synthetic oligonucleotide
  Sense strand starting at position 1470 of SEQ ID NO: 1886299
cuguguguuccugccauau

SEQ ID NO: 2399907 - RNA, 19 nt, Artificial Sequence
  Description of Artificial Sequence: Synthetic oligonucleotide
  Antisense strand to SEQ ID NO: 2399906
auauggcaggaacacacag

SEQ ID NO: 2399908 - RNA, 19 nt, Artificial Sequence
  Description of Artificial Sequence: Synthetic oligonucleotide
  Sense strand starting at position 1521 of SEQ ID NO: 1886299
aaagcuaugccaggugauu

SEQ ID NO: 2399909 - RNA, 19 nt, Artificial Sequence
  Description of Artificial Sequence: Synthetic oligonucleotide
  Antisense strand to SEQ ID NO: 2399908
aaucaccuggcauagcuuu

SEQ ID NO: 2399910 - RNA, 19 nt, Artificial Sequence
  Description of Artificial Sequence: Synthetic oligonucleotide
  Sense strand starting at position 1698 of SEQ ID NO: 1886299
gguuaacucucccugagca

SEQ ID NO: 2399911 - RNA, 19 nt, Artificial Sequence
  Description of Artificial Sequence: Synthetic oligonucleotide
  Antisense strand to SEQ ID NO: 2399910
ugcucagggagaguuaacc

SEQ ID NO: 2399912 - RNA, 19 nt, Artificial Sequence
  Description of Artificial Sequence: Synthetic oligonucleotide
  Sense strand starting at position 1699 of SEQ ID NO: 1886299
guuaacucucccugagcaa

SEQ ID NO: 2399913 - RNA, 19 nt, Artificial Sequence
  Description of Artificial Sequence: Synthetic oligonucleotide
  Antisense strand to SEQ ID NO: 2399912
uugcucagggagaguuaac

SEQ ID NO: 2399914 - RNA, 19 nt, Artificial Sequence
  Description of Artificial Sequence: Synthetic oligonucleotide
  Sense strand starting at position 1772 of SEQ ID NO: 1886299
acagaaguccugugcacau

SEQ ID NO: 2399915 - RNA, 19 nt, Artificial Sequence
  Description of Artificial Sequence: Synthetic oligonucleotide
  Antisense strand to SEQ ID NO: 2399914
augugcacaggacuucugu

SEQ ID NO: 2399916 - RNA, 19 nt, Artificial Sequence
  Description of Artificial Sequence: Synthetic oligonucleotide
  Sense strand starting at position 1833 of SEQ ID NO: 1886299
ccuuccuaagccuggaaga

SEQ ID NO: 2399917 - RNA, 19 nt, Artificial Sequence
  Description of Artificial Sequence: Synthetic oligonucleotide
  Antisense strand to SEQ ID NO: 2399916
ucuuccaggcuuaggaagg

SEQ ID NO: 2399918 - RNA, 19 nt, Artificial Sequence
  Description of Artificial Sequence: Synthetic oligonucleotide
  Sense strand starting at position 1834 of SEQ ID NO: 1886299
cuuccuaagccuggaagaa

SEQ ID NO: 2399919 - RNA, 19 nt, Artificial Sequence
  Description of Artificial Sequence: Synthetic oligonucleotide
  Antisense strand to SEQ ID NO: 2399918
uucuuccaggcuuaggaag

SEQ ID NO: 2399920 - RNA, 19 nt, Artificial Sequence
  Description of Artificial Sequence: Synthetic oligonucleotide
  Sense strand starting at position 2282 of SEQ ID NO: 1886299
ugcuguauucuauaucuac

SEQ ID NO: 2399921 - RNA, 19 nt, Artificial Sequence
  Description of Artificial Sequence: Synthetic oligonucleotide
  Antisense strand to SEQ ID NO: 2399920
guagauauagaauacagca

SEQ ID NO: 2399922 - RNA, 19 nt, Artificial Sequence
  Description of Artificial Sequence: Synthetic oligonucleotide
  Sense strand starting at position 2336 of SEQ ID NO: 1886299
cagauauacccaggcauga

SEQ ID NO: 2399923 - RNA, 19 nt, Artificial Sequence
  Description of Artificial Sequence: Synthetic oligonucleotide
  Antisense strand to SEQ ID NO: 2399922
ucaugccuggguauaucug

SEQ ID NO: 2399924 - RNA, 19 nt, Artificial Sequence
  Description of Artificial Sequence: Synthetic oligonucleotide
  Sense strand starting at position 2400 of SEQ ID NO: 1886299
aacacuaagcgcgaagaau

SEQ ID NO: 2399925 - RNA, 19 nt, Artificial Sequence
  Description of Artificial Sequence: Synthetic oligonucleotide
  Antisense strand to SEQ ID NO: 2399924
auucuucgcgcuuaguguu

SEQ ID NO: 2399926 - RNA, 19 nt, Artificial Sequence
  Description of Artificial Sequence: Synthetic oligonucleotide
  Sense strand starting at position 2409 of SEQ ID NO: 1886299
cgcgaagaauucucucaau

SEQ ID NO: 2399927 - RNA, 19 nt, Artificial Sequence
  Description of Artificial Sequence: Synthetic oligonucleotide
  Antisense strand to SEQ ID NO: 2399926
auugagagaauucuucgcg

SEQ ID NO: 2399928 - RNA, 19 nt, Artificial Sequence
  Description of Artificial Sequence: Synthetic oligonucleotide
  Sense strand starting at position 2462 of SEQ ID NO: 1886299
ucucuuggccaucagagaa

SEQ ID NO: 2399929 - RNA, 19 nt, Artificial Sequence
  Description of Artificial Sequence: Synthetic oligonucleotide
  Antisense strand to SEQ ID NO: 2399928
uucucugauggccaagaga

SEQ ID NO: 2399930 - RNA, 19 nt, Artificial Sequence
  Description of Artificial Sequence: Synthetic oligonucleotide
  Sense strand starting at position 2527 of SEQ ID NO: 1886299
aguguuccagcacaaagaa

SEQ ID NO: 2399931 - RNA, 19 nt, Artificial Sequence
  Description of Artificial Sequence: Synthetic oligonucleotide
  Antisense strand to SEQ ID NO: 2399930
uucuuugugcuggaacacu

SEQ ID NO: 2399932 - RNA, 19 nt, Artificial Sequence
  Description of Artificial Sequence: Synthetic oligonucleotide
  Sense strand starting at position 2698 of SEQ ID NO: 1886299
ggugcugucccugagaaca

SEQ ID NO: 2399933 - RNA, 19 nt, Artificial Sequence
  Description of Artificial Sequence: Synthetic oligonucleotide
  Antisense strand to SEQ ID NO: 2399932
uguucucagggacagcacc

SEQ ID NO: 2399934 - RNA, 19 nt, Artificial Sequence
  Description of Artificial Sequence: Synthetic oligonucleotide
  Sense strand starting at position 2770 of SEQ ID NO: 1886299
ccaucacuggccuguggau

SEQ ID NO: 2399935 - RNA, 19 nt, Artificial Sequence
  Description of Artificial Sequence: Synthetic oligonucleotide
  Antisense strand to SEQ ID NO: 2399934
auccacaggccagugaugg

SEQ ID NO: 2399936 - RNA, 19 nt, Artificial Sequence
  Description of Artificial Sequence: Synthetic oligonucleotide
  Sense strand starting at position 3092 of SEQ ID NO: 1886299
guagaaacccugggccaau

SEQ ID NO: 2399937 - RNA, 19 nt, Artificial Sequence
  Description of Artificial Sequence: Synthetic oligonucleotide
  Antisense strand to SEQ ID NO: 2399936
auuggcccaggguuucuac

SEQ ID NO: 2399938 - RNA, 19 nt, Artificial Sequence
  Description of Artificial Sequence: Synthetic oligonucleotide
  Sense strand starting at position 3103 of SEQ ID NO: 1886299
gggccaauaucugcucaaa

SEQ ID NO: 2399939 - RNA, 19 nt, Artificial Sequence
  Description of Artificial Sequence: Synthetic oligonucleotide
  Antisense strand to SEQ ID NO: 2399938
uuugagcagauauuggccc

SEQ ID NO: 2399940 - RNA, 19 nt, Artificial Sequence
  Description of Artificial Sequence: Synthetic oligonucleotide
  Sense strand starting at position 3105 of SEQ ID NO: 1886299
gccaauaucugcucaaaug

SEQ ID NO: 2399941 - RNA, 19 nt, Artificial Sequence
  Description of Artificial Sequence: Synthetic oligonucleotide
  Antisense strand to SEQ ID NO: 2399940
cauuugagcagauauuggc

SEQ ID NO: 2399942 - RNA, 19 nt, Artificial Sequence
  Description of Artificial Sequence: Synthetic oligonucleotide
  Sense strand starting at position 3411 of SEQ ID NO: 1886299
auacgaguucaauguggau

SEQ ID NO: 2399943 - RNA, 19 nt, Artificial Sequence
  Description of Artificial Sequence: Synthetic oligonucleotide
  Antisense strand to SEQ ID NO: 2399942
auccacauugaacucguau

SEQ ID NO: 2399944 - RNA, 19 nt, Artificial Sequence
  Description of Artificial Sequence: Synthetic oligonucleotide
  Sense strand starting at position 3492 of SEQ ID NO: 1886299
cccugaugcuacccaagua

SEQ ID NO: 2399945 - RNA, 19 nt, Artificial Sequence
  Description of Artificial Sequence: Synthetic oligonucleotide
  Antisense strand to SEQ ID NO: 2399944
uacuuggguagcaucaggg

SEQ ID NO: 2399946 - RNA, 19 nt, Artificial Sequence
  Description of Artificial Sequence: Synthetic oligonucleotide
  Sense strand starting at position 3553 of SEQ ID NO: 1886299
cgaacaaguguccaggaau

SEQ ID NO: 2399947 - RNA, 19 nt, Artificial Sequence
  Description of Artificial Sequence: Synthetic oligonucleotide
  Antisense strand to SEQ ID NO: 2399946
auuccuggacacuuguucg

SEQ ID NO: 2399948 - RNA, 19 nt, Artificial Sequence
  Description of Artificial Sequence: Synthetic oligonucleotide
  Sense strand starting at position 3588 of SEQ ID NO: 1886299
aaaggaaagcaaugguauu

SEQ ID NO: 2399949 - RNA, 19 nt, Artificial Sequence
  Description of Artificial Sequence: Synthetic oligonucleotide
  Antisense strand to SEQ ID NO: 2399948
aauaccauugcuuuccuuu

SEQ ID NO: 2399950 - RNA, 19 nt, Artificial Sequence
  Description of Artificial Sequence: Synthetic oligonucleotide
  Sense strand starting at position 3777 of SEQ ID NO: 1886299
gucucucagcuacagaagu

SEQ ID NO: 2399951 - RNA, 19 nt, Artificial Sequence
  Description of Artificial Sequence: Synthetic oligonucleotide
  Antisense strand to SEQ ID NO: 2399950
acuucuguagcugagagac

SEQ ID NO: 2399952 - RNA, 19 nt, Artificial Sequence
  Description of Artificial Sequence: Synthetic oligonucleotide
  Sense strand starting at position 3811 of SEQ ID NO: 1886299
gcuugcauuugcccaaaga

SEQ ID NO: 2399953 - RNA, 19 nt, Artificial Sequence
  Description of Artificial Sequence: Synthetic oligonucleotide
  Antisense strand to SEQ ID NO: 2399952
ucuuugggcaaaugcaagc

SEQ ID NO: 2399954 - RNA, 19 nt, Artificial Sequence
  Description of Artificial Sequence: Synthetic oligonucleotide
  Sense strand starting at position 148 of SEQ ID NO: 1886300
acacauggauucgcaauua

SEQ ID NO: 2399955 - RNA, 19 nt, Artificial Sequence
  Description of Artificial Sequence: Synthetic oligonucleotide
  Antisense strand to SEQ ID NO: 2399954
uaauugcgaauccaugugu

SEQ ID NO: 2399956 - RNA, 19 nt, Artificial Sequence
  Description of Artificial Sequence: Synthetic oligonucleotide
  Sense strand starting at position 206 of SEQ ID NO: 1886300
ccguaugcacccuauaaca

SEQ ID NO: 2399957 - RNA, 19 nt, Artificial Sequence
  Description of Artificial Sequence: Synthetic oligonucleotide
  Antisense strand to SEQ ID NO: 2399956
uguuauagggugcauacgg

SEQ ID NO: 2399958 - RNA, 19 nt, Artificial Sequence
  Description of Artificial Sequence: Synthetic oligonucleotide
  Sense strand starting at position 261 of SEQ ID NO: 1886300
gacagaagacuguguggua

SEQ ID NO: 2399959 - RNA, 19 nt, Artificial Sequence
  Description of Artificial Sequence: Synthetic oligonucleotide
  Antisense strand to SEQ ID NO: 2399958
uaccacacagucuucuguc

SEQ ID NO: 2399960 - RNA, 19 nt, Artificial Sequence
  Description of Artificial Sequence: Synthetic oligonucleotide
  Sense strand starting at position 262 of SEQ ID NO: 1886300
acagaagacugugugguaa

SEQ ID NO: 2399961 - RNA, 19 nt, Artificial Sequence
  Description of Artificial Sequence: Synthetic oligonucleotide
  Antisense strand to SEQ ID NO: 2399960
uuaccacacagucuucugu

SEQ ID NO: 2399962 - RNA, 19 nt, Artificial Sequence
  Description of Artificial Sequence: Synthetic oligonucleotide
  Sense strand starting at position 415 of SEQ ID NO: 1886300
cgccauccuccugaagacu

SEQ ID NO: 2399963 - RNA, 19 nt, Artificial Sequence
  Description of Artificial Sequence: Synthetic oligonucleotide
  Antisense strand to SEQ ID NO: 2399962
agucuucaggaggauggcg

SEQ ID NO: 2399964 - RNA, 19 nt, Artificial Sequence
  Description of Artificial Sequence: Synthetic oligonucleotide
  Sense strand starting at position 479 of SEQ ID NO: 1886300
gucccuugacaaggaugaa

SEQ ID NO: 2399965 - RNA, 19 nt, Artificial Sequence
  Description of Artificial Sequence: Synthetic oligonucleotide
  Antisense strand to SEQ ID NO: 2399964
uucauccuugucaagggac

SEQ ID NO: 2399966 - RNA, 19 nt, Artificial Sequence
  Description of Artificial Sequence: Synthetic oligonucleotide
  Sense strand starting at position 505 of SEQ ID NO: 1886300
gaaagaggugucugggaau

SEQ ID NO: 2399967 - RNA, 19 nt, Artificial Sequence
  Description of Artificial Sequence: Synthetic oligonucleotide
  Antisense strand to SEQ ID NO: 2399966
auucccagacaccucuuuc

SEQ ID NO: 2399968 - RNA, 19 nt, Artificial Sequence
  Description of Artificial Sequence: Synthetic oligonucleotide
  Sense strand starting at position 551 of SEQ ID NO: 1886300
gcaauagucuuccucugga

SEQ ID NO: 2399969 - RNA, 19 nt, Artificial Sequence
  Description of Artificial Sequence: Synthetic oligonucleotide
  Antisense strand to SEQ ID NO: 2399968
uccagaggaagacuauugc

SEQ ID NO: 2399970 - RNA, 19 nt, Artificial Sequence
  Description of Artificial Sequence: Synthetic oligonucleotide
  Sense strand starting at position 554 of SEQ ID NO: 1886300
auagucuuccucuggagga

SEQ ID NO: 2399971 - RNA, 19 nt, Artificial Sequence
  Description of Artificial Sequence: Synthetic oligonucleotide
  Antisense strand to SEQ ID NO: 2399970
uccuccagaggaagacuau

SEQ ID NO: 2399972 - RNA, 19 nt, Artificial Sequence
  Description of Artificial Sequence: Synthetic oligonucleotide
  Sense strand starting at position 886 of SEQ ID NO: 1886300
aacucagggugcuuugaaa

SEQ ID NO: 2399973 - RNA, 19 nt, Artificial Sequence
  Description of Artificial Sequence: Synthetic oligonucleotide
  Antisense strand to SEQ ID NO: 2399972
uuucaaagcacccugaguu

SEQ ID NO: 2399974 - RNA, 19 nt, Artificial Sequence
  Description of Artificial Sequence: Synthetic oligonucleotide
  Sense strand starting at position 894 of SEQ ID NO: 1886300
gugcuuugaaauggaauca

SEQ ID NO: 2399975 - RNA, 19 nt, Artificial Sequence
  Description of Artificial Sequence: Synthetic oligonucleotide
  Antisense strand to SEQ ID NO: 2399974
ugauuccauuucaaagcac

SEQ ID NO: 2399976 - RNA, 19 nt, Artificial Sequence
  Description of Artificial Sequence: Synthetic oligonucleotide
  Sense strand starting at position 1131 of SEQ ID NO: 1886300
cccugugguuuaucuggaa

SEQ ID NO: 2399977 - RNA, 19 nt, Artificial Sequence
  Description of Artificial Sequence: Synthetic oligonucleotide
  Antisense strand to SEQ ID NO: 2399976
uuccagauaaaccacaggg

SEQ ID NO: 2399978 - RNA, 19 nt, Artificial Sequence
  Description of Artificial Sequence: Synthetic oligonucleotide
  Sense strand starting at position 1135 of SEQ ID NO: 1886300
gugguuuaucuggaauaug

SEQ ID NO: 2399979 - RNA, 19 nt, Artificial Sequence
  Description of Artificial Sequence: Synthetic oligonucleotide
  Antisense strand to SEQ ID NO: 2399978
cauauuccagauaaaccac

SEQ ID NO: 2399980 - RNA, 19 nt, Artificial Sequence
  Description of Artificial Sequence: Synthetic oligonucleotide
  Sense strand starting at position 1183 of SEQ ID NO: 1886300
ccagaaauuuauggacaca

SEQ ID NO: 2399981 - RNA, 19 nt, Artificial Sequence
  Description of Artificial Sequence: Synthetic oligonucleotide
  Antisense strand to SEQ ID NO: 2399980
uguguccauaaauuucugg

SEQ ID NO: 2399982 - RNA, 19 nt, Artificial Sequence
  Description of Artificial Sequence: Synthetic oligonucleotide
  Sense strand starting at position 1237 of SEQ ID NO: 1886300
gcaucaucccgcuaaagag

SEQ ID NO: 2399983 - RNA, 19 nt, Artificial Sequence
  Description of Artificial Sequence: Synthetic oligonucleotide
  Antisense strand to SEQ ID NO: 2399982
cucuuuagcgggaugaugc

SEQ ID NO: 2399984 - RNA, 19 nt, Artificial Sequence
  Description of Artificial Sequence: Synthetic oligonucleotide
  Sense strand starting at position 1355 of SEQ ID NO: 1886300
accuguaucugguuuggga

SEQ ID NO: 2399985 - RNA, 19 nt, Artificial Sequence
  Description of Artificial Sequence: Synthetic oligonucleotide
  Antisense strand to SEQ ID NO: 2399984
ucccaaaccagauacaggu

SEQ ID NO: 2399986 - RNA, 19 nt, Artificial Sequence
  Description of Artificial Sequence: Synthetic oligonucleotide
  Sense strand starting at position 1357 of SEQ ID NO: 1886300
cuguaucugguuugggaua

SEQ ID NO: 2399987 - RNA, 19 nt, Artificial Sequence
  Description of Artificial Sequence: Synthetic oligonucleotide
  Antisense strand to SEQ ID NO: 2399986
uaucccaaaccagauacag

SEQ ID NO: 2399988 - RNA, 19 nt, Artificial Sequence
  Description of Artificial Sequence: Synthetic oligonucleotide
  Sense strand starting at position 2145 of SEQ ID NO: 1886300
agaugaugauugucccuca

SEQ ID NO: 2399989 - RNA, 19 nt, Artificial Sequence
  Description of Artificial Sequence: Synthetic oligonucleotide
  Antisense strand to SEQ ID NO: 2399988
ugagggacaaucaucaucu

SEQ ID NO: 2399990 - RNA, 19 nt, Artificial Sequence
  Description of Artificial Sequence: Synthetic oligonucleotide
  Sense strand starting at position 2148 of SEQ ID NO: 1886300
ugaugauugucccucacca

SEQ ID NO: 2399991 - RNA, 19 nt, Artificial Sequence
  Description of Artificial Sequence: Synthetic oligonucleotide
  Antisense strand to SEQ ID NO: 2399990
uggugagggacaaucauca

SEQ ID NO: 2399992 - RNA, 19 nt, Artificial Sequence
  Description of Artificial Sequence: Synthetic oligonucleotide
  Sense strand starting at position 2240 of SEQ ID NO: 1886300
acagaugugcaguacacaa

SEQ ID NO: 2399993 - RNA, 19 nt, Artificial Sequence
  Description of Artificial Sequence: Synthetic oligonucleotide
  Antisense strand to SEQ ID NO: 2399992
uuguguacugcacaucugu

SEQ ID NO: 2399994 - RNA, 19 nt, Artificial Sequence
  Description of Artificial Sequence: Synthetic oligonucleotide
  Sense strand starting at position 2282 of SEQ ID NO: 1886300
caguguaucugguugauac

SEQ ID NO: 2399995 - RNA, 19 nt, Artificial Sequence
  Description of Artificial Sequence: Synthetic oligonucleotide
  Antisense strand to SEQ ID NO: 2399994
guaucaaccagauacacug

SEQ ID NO: 2399996 - RNA, 19 nt, Artificial Sequence
  Description of Artificial Sequence: Synthetic oligonucleotide
  Sense strand starting at position 2381 of SEQ ID NO: 1886300
acuaaagagcacugacauu

SEQ ID NO: 2399997 - RNA, 19 nt, Artificial Sequence
  Description of Artificial Sequence: Synthetic oligonucleotide
  Antisense strand to SEQ ID NO: 2399996
aaugucagugcucuuuagu

SEQ ID NO: 2399998 - RNA, 19 nt, Artificial Sequence
  Description of Artificial Sequence: Synthetic oligonucleotide
  Sense strand starting at position 2387 of SEQ ID NO: 1886300
gagcacugacauugagcau

SEQ ID NO: 2399999 - RNA, 19 nt, Artificial Sequence
  Description of Artificial Sequence: Synthetic oligonucleotide
  Antisense strand to SEQ ID NO: 2399998
augcucaaugucagugcuc

SEQ ID NO: 2400000 - RNA, 19 nt, Artificial Sequence
  Description of Artificial Sequence: Synthetic oligonucleotide
  Sense strand starting at position 2475 of SEQ ID NO: 1886300
ugaggaagccauugacgua

SEQ ID NO: 2400001 - RNA, 19 nt, Artificial Sequence
  Description of Artificial Sequence: Synthetic oligonucleotide
  Antisense strand to SEQ ID NO: 2400000
uacgucaauggcuuccuca

SEQ ID NO: 2400002 - RNA, 19 nt, Artificial Sequence
  Description of Artificial Sequence: Synthetic oligonucleotide
  Sense strand starting at position 2514 of SEQ ID NO: 1886300
agagacuccuugccuauca

SEQ ID NO: 2400003 - RNA, 19 nt, Artificial Sequence
  Description of Artificial Sequence: Synthetic oligonucleotide
  Antisense strand to SEQ ID NO: 2400002
ugauaggcaaggagucucu

SEQ ID NO: 2400004 - RNA, 19 nt, Artificial Sequence
  Description of Artificial Sequence: Synthetic oligonucleotide
  Sense strand starting at position 2554 of SEQ ID NO: 1886300
cuguguguuccugccauau

SEQ ID NO: 2400005 - RNA, 19 nt, Artificial Sequence
  Description of Artificial Sequence: Synthetic oligonucleotide
  Antisense strand to SEQ ID NO: 2400004
auauggcaggaacacacag

SEQ ID NO: 2400006 - RNA, 19 nt, Artificial Sequence
  Description of Artificial Sequence: Synthetic oligonucleotide
  Sense strand starting at position 2605 of SEQ ID NO: 1886300
aaagcuaugccaggugauu

SEQ ID NO: 2400007 - RNA, 19 nt, Artificial Sequence
  Description of Artificial Sequence: Synthetic oligonucleotide
  Antisense strand to SEQ ID NO: 2400006
aaucaccuggcauagcuuu

SEQ ID NO: 2400008 - RNA, 19 nt, Artificial Sequence
  Description of Artificial Sequence: Synthetic oligonucleotide
  Sense strand starting at position 2782 of SEQ ID NO: 1886300
gguuaacucucccugagca

SEQ ID NO: 2400009 - RNA, 19 nt, Artificial Sequence
  Description of Artificial Sequence: Synthetic oligonucleotide
  Antisense strand to SEQ ID NO: 2400008
ugcucagggagaguuaacc

SEQ ID NO: 2400010 - RNA, 19 nt, Artificial Sequence
  Description of Artificial Sequence: Synthetic oligonucleotide
  Sense strand starting at position 2783 of SEQ ID NO: 1886300
guuaacucucccugagcaa

SEQ ID NO: 2400011 - RNA, 19 nt, Artificial Sequence
  Description of Artificial Sequence: Synthetic oligonucleotide
  Antisense strand to SEQ ID NO: 2400010
uugcucagggagaguuaac

SEQ ID NO: 2400012 - RNA, 19 nt, Artificial Sequence
  Description of Artificial Sequence: Synthetic oligonucleotide
  Sense strand starting at position 2856 of SEQ ID NO: 1886300
acagaaguccugugcacau

SEQ ID NO: 2400013 - RNA, 19 nt, Artificial Sequence
  Description of Artificial Sequence: Synthetic oligonucleotide
  Antisense strand to SEQ ID NO: 2400012
augugcacaggacuucugu

SEQ ID NO: 2400014 - RNA, 19 nt, Artificial Sequence
  Description of Artificial Sequence: Synthetic oligonucleotide
  Sense strand starting at position 2917 of SEQ ID NO: 1886300
ccuuccuaagccuggaaga

SEQ ID NO: 2400015 - RNA, 19 nt, Artificial Sequence
  Description of Artificial Sequence: Synthetic oligonucleotide
  Antisense strand to SEQ ID NO: 2400014
ucuuccaggcuuaggaagg

SEQ ID NO: 2400016 - RNA, 19 nt, Artificial Sequence
  Description of Artificial Sequence: Synthetic oligonucleotide
  Sense strand starting at position 2918 of SEQ ID NO: 1886300
cuuccuaagccuggaagaa

SEQ ID NO: 2400017 - RNA, 19 nt, Artificial Sequence
  Description of Artificial Sequence: Synthetic oligonucleotide
  Antisense strand to SEQ ID NO: 2400016
uucuuccaggcuuaggaag

SEQ ID NO: 2400018 - RNA, 19 nt, Artificial Sequence
  Description of Artificial Sequence: Synthetic oligonucleotide
  Sense strand starting at position 3366 of SEQ ID NO: 1886300
ugcuguauucuauaucuac

SEQ ID NO: 2400019 - RNA, 19 nt, Artificial Sequence
  Description of Artificial Sequence: Synthetic oligonucleotide
  Antisense strand to SEQ ID NO: 2400018
guagauauagaauacagca

SEQ ID NO: 2400020 - RNA, 19 nt, Artificial Sequence
  Description of Artificial Sequence: Synthetic oligonucleotide
  Sense strand starting at position 3420 of SEQ ID NO: 1886300
cagauauacccaggcauga

SEQ ID NO: 2400021 - RNA, 19 nt, Artificial Sequence
  Description of Artificial Sequence: Synthetic oligonucleotide
  Antisense strand to SEQ ID NO: 2400020
ucaugccuggguauaucug

SEQ ID NO: 2400022 - RNA, 19 nt, Artificial Sequence
  Description of Artificial Sequence: Synthetic oligonucleotide
  Sense strand starting at position 3484 of SEQ ID NO: 1886300
aacacuaagcgcgaagaau

SEQ ID NO: 2400023 - RNA, 19 nt, Artificial Sequence
  Description of Artificial Sequence: Synthetic oligonucleotide
  Antisense strand to SEQ ID NO: 2400022
auucuucgcgcuuaguguu

SEQ ID NO: 2400024 - RNA, 19 nt, Artificial Sequence
  Description of Artificial Sequence: Synthetic oligonucleotide
  Sense strand starting at position 3493 of SEQ ID NO: 1886300
cgcgaagaauucucucaau

SEQ ID NO: 2400025 - RNA, 19 nt, Artificial Sequence
  Description of Artificial Sequence: Synthetic oligonucleotide
  Antisense strand to SEQ ID NO: 2400024
auugagagaauucuucgcg

SEQ ID NO: 2400026 - RNA, 19 nt, Artificial Sequence
  Description of Artificial Sequence: Synthetic oligonucleotide
  Sense strand starting at position 3546 of SEQ ID NO: 1886300
ucucuuggccaucagagaa

SEQ ID NO: 2400027 - RNA, 19 nt, Artificial Sequence
  Description of Artificial Sequence: Synthetic oligonucleotide
  Antisense strand to SEQ ID NO: 2400026
uucucugauggccaagaga

SEQ ID NO: 2400028 - RNA, 19 nt, Artificial Sequence
  Description of Artificial Sequence: Synthetic oligonucleotide
  Sense strand starting at position 3611 of SEQ ID NO: 1886300
aguguuccagcacaaagaa

SEQ ID NO: 2400029 - RNA, 19 nt, Artificial Sequence
  Description of Artificial Sequence: Synthetic oligonucleotide
  Antisense strand to SEQ ID NO: 2400028
uucuuugugcuggaacacu

SEQ ID NO: 2400030 - RNA, 19 nt, Artificial Sequence
  Description of Artificial Sequence: Synthetic oligonucleotide
  Sense strand starting at position 3782 of SEQ ID NO: 1886300
ggugcugucccugagaaca

SEQ ID NO: 2400031 - RNA, 19 nt, Artificial Sequence
  Description of Artificial Sequence: Synthetic oligonucleotide
  Antisense strand to SEQ ID NO: 2400030
uguucucagggacagcacc

SEQ ID NO: 2400032 - RNA, 19 nt, Artificial Sequence
  Description of Artificial Sequence: Synthetic oligonucleotide
  Sense strand starting at position 3854 of SEQ ID NO: 1886300
ccaucacuggccuguggau

SEQ ID NO: 2400033 - RNA, 19 nt, Artificial Sequence
  Description of Artificial Sequence: Synthetic oligonucleotide
  Antisense strand to SEQ ID NO: 2400032
auccacaggccagugaugg

SEQ ID NO: 2400034 - RNA, 19 nt, Artificial Sequence
  Description of Artificial Sequence: Synthetic oligonucleotide
  Sense strand starting at position 32 of SEQ ID NO: 1886301
acugcaauguccuugaaca

SEQ ID NO: 2400035 - RNA, 19 nt, Artificial Sequence
  Description of Artificial Sequence: Synthetic oligonucleotide
  Antisense strand to SEQ ID NO: 2400034
uguucaaggacauugcagu

SEQ ID NO: 2400036 - RNA, 19 nt, Artificial Sequence
  Description of Artificial Sequence: Synthetic oligonucleotide
  Sense strand starting at position 33 of SEQ ID NO: 1886301
cugcaauguccuugaacaa

SEQ ID NO: 2400037 - RNA, 19 nt, Artificial Sequence
  Description of Artificial Sequence: Synthetic oligonucleotide
  Antisense strand to SEQ ID NO: 2400036
uuguucaaggacauugcag

SEQ ID NO: 2400038 - RNA, 19 nt, Artificial Sequence
  Description of Artificial Sequence: Synthetic oligonucleotide
  Sense strand starting at position 34 of SEQ ID NO: 1886301
ugcaauguccuugaacaau

SEQ ID NO: 2400039 - RNA, 19 nt, Artificial Sequence
  Description of Artificial Sequence: Synthetic oligonucleotide
  Antisense strand to SEQ ID NO: 2400038
auuguucaaggacauugca

SEQ ID NO: 2400040 - RNA, 19 nt, Artificial Sequence
  Description of Artificial Sequence: Synthetic oligonucleotide
  Sense strand starting at position 40 of SEQ ID NO: 1886301
guccuugaacaaugaugaa

SEQ ID NO: 2400041 - RNA, 19 nt, Artificial Sequence
  Description of Artificial Sequence: Synthetic oligonucleotide
  Antisense strand to SEQ ID NO: 2400040
uucaucauuguucaaggac

SEQ ID NO: 2400042 - RNA, 19 nt, Artificial Sequence
  Description of Artificial Sequence: Synthetic oligonucleotide
  Sense strand starting at position 116 of SEQ ID NO: 1886301
ccugucuuuccucaaggga

SEQ ID NO: 2400043 - RNA, 19 nt, Artificial Sequence
  Description of Artificial Sequence: Synthetic oligonucleotide
  Antisense strand to SEQ ID NO: 2400042
ucccuugaggaaagacagg

SEQ ID NO: 2400044 - RNA, 19 nt, Artificial Sequence
  Description of Artificial Sequence: Synthetic oligonucleotide
  Sense strand starting at position 119 of SEQ ID NO: 1886301
gucuuuccucaagggaaug

SEQ ID NO: 2400045 - RNA, 19 nt, Artificial Sequence
  Description of Artificial Sequence: Synthetic oligonucleotide
  Antisense strand to SEQ ID NO: 2400044
cauucccuugaggaaagac

SEQ ID NO: 2400046 - RNA, 19 nt, Artificial Sequence
  Description of Artificial Sequence: Synthetic oligonucleotide
  Sense strand starting at position 252 of SEQ ID NO: 1886301
uuaccuugcagagagaagu

SEQ ID NO: 2400047 - RNA, 19 nt, Artificial Sequence
  Description of Artificial Sequence: Synthetic oligonucleotide
  Antisense strand to SEQ ID NO: 2400046
acuucucucugcaagguaa

SEQ ID NO: 2400048 - RNA, 19 nt, Artificial Sequence
  Description of Artificial Sequence: Synthetic oligonucleotide
  Sense strand starting at position 282 of SEQ ID NO: 1886301
uuuccuauuuaugagagau

SEQ ID NO: 2400049 - RNA, 19 nt, Artificial Sequence
  Description of Artificial Sequence: Synthetic oligonucleotide
  Antisense strand to SEQ ID NO: 2400048
aucucucauaaauaggaaa

SEQ ID NO: 2400050 - RNA, 19 nt, Artificial Sequence
  Description of Artificial Sequence: Synthetic oligonucleotide
  Sense strand starting at position 284 of SEQ ID NO: 1886301
uccuauuuaugagagaucu

SEQ ID NO: 2400051 - RNA, 19 nt, Artificial Sequence
  Description of Artificial Sequence: Synthetic oligonucleotide
  Antisense strand to SEQ ID NO: 2400050
agaucucucauaaauagga

SEQ ID NO: 2400052 - RNA, 19 nt, Artificial Sequence
  Description of Artificial Sequence: Synthetic oligonucleotide
  Sense strand starting at position 719 of SEQ ID NO: 1886301
acgggugugcuugagaaag

SEQ ID NO: 2400053 - RNA, 19 nt, Artificial Sequence
  Description of Artificial Sequence: Synthetic oligonucleotide
  Antisense strand to SEQ ID NO: 2400052
cuuucucaagcacacccgu

SEQ ID NO: 2400054 - RNA, 19 nt, Artificial Sequence
  Description of Artificial Sequence: Synthetic oligonucleotide
  Sense strand starting at position 797 of SEQ ID NO: 1886301
cgcuacuucccaugggaua

SEQ ID NO: 2400055 - RNA, 19 nt, Artificial Sequence
  Description of Artificial Sequence: Synthetic oligonucleotide
  Antisense strand to SEQ ID NO: 2400054
uaucccaugggaaguagcg

SEQ ID NO: 2400056 - RNA, 19 nt, Artificial Sequence
  Description of Artificial Sequence: Synthetic oligonucleotide
  Sense strand starting at position 959 of SEQ ID NO: 1886301
ucccuuggccaucagagaa

SEQ ID NO: 2400057 - RNA, 19 nt, Artificial Sequence
  Description of Artificial Sequence: Synthetic oligonucleotide
  Antisense strand to SEQ ID NO: 2400056
uucucugauggccaaggga

SEQ ID NO: 2400058 - RNA, 19 nt, Artificial Sequence
  Description of Artificial Sequence: Synthetic oligonucleotide
  Sense strand starting at position 1053 of SEQ ID NO: 1886301
uccuuuagccuugaagcau

SEQ ID NO: 2400059 - RNA, 19 nt, Artificial Sequence
  Description of Artificial Sequence: Synthetic oligonucleotide
  Antisense strand to SEQ ID NO: 2400058
augcuucaaggcuaaagga

SEQ ID NO: 2400060 - RNA, 19 nt, Artificial Sequence
  Description of Artificial Sequence: Synthetic oligonucleotide
  Sense strand starting at position 1293 of SEQ ID NO: 1886301
acacauggauucgcaauua

SEQ ID NO: 2400061 - RNA, 19 nt, Artificial Sequence
  Description of Artificial Sequence: Synthetic oligonucleotide
  Antisense strand to SEQ ID NO: 2400060
uaauugcgaauccaugugu

SEQ ID NO: 2400062 - RNA, 19 nt, Artificial Sequence
  Description of Artificial Sequence: Synthetic oligonucleotide
  Sense strand starting at position 1351 of SEQ ID NO: 1886301
ccguaugcacccuauaaca

SEQ ID NO: 2400063 - RNA, 19 nt, Artificial Sequence
  Description of Artificial Sequence: Synthetic oligonucleotide
  Antisense strand to SEQ ID NO: 2400062
uguuauagggugcauacgg

SEQ ID NO: 2400064 - RNA, 19 nt, Artificial Sequence
  Description of Artificial Sequence: Synthetic oligonucleotide
  Sense strand starting at position 1406 of SEQ ID NO: 1886301
gacagaagacuguguggua

SEQ ID NO: 2400065 - RNA, 19 nt, Artificial Sequence
  Description of Artificial Sequence: Synthetic oligonucleotide
  Antisense strand to SEQ ID NO: 2400064
uaccacacagucuucuguc

SEQ ID NO: 2400066 - RNA, 19 nt, Artificial Sequence
  Description of Artificial Sequence: Synthetic oligonucleotide
  Sense strand starting at position 1407 of SEQ ID NO: 1886301
acagaagacugugugguaa

SEQ ID NO: 2400067 - RNA, 19 nt, Artificial Sequence
  Description of Artificial Sequence: Synthetic oligonucleotide
  Antisense strand to SEQ ID NO: 2400066
uuaccacacagucuucugu

SEQ ID NO: 2400068 - RNA, 19 nt, Artificial Sequence
  Description of Artificial Sequence: Synthetic oligonucleotide
  Sense strand starting at position 1560 of SEQ ID NO: 1886301
cgccauccuccugaagacu

SEQ ID NO: 2400069 - RNA, 19 nt, Artificial Sequence
  Description of Artificial Sequence: Synthetic oligonucleotide
  Antisense strand to SEQ ID NO: 2400068
agucuucaggaggauggcg

SEQ ID NO: 2400070 - RNA, 19 nt, Artificial Sequence
  Description of Artificial Sequence: Synthetic oligonucleotide
  Sense strand starting at position 1624 of SEQ ID NO: 1886301
gucccuugacaaggaugaa

SEQ ID NO: 2400071 - RNA, 19 nt, Artificial Sequence
  Description of Artificial Sequence: Synthetic oligonucleotide
  Antisense strand to SEQ ID NO: 2400070
uucauccuugucaagggac

SEQ ID NO: 2400072 - RNA, 19 nt, Artificial Sequence
  Description of Artificial Sequence: Synthetic oligonucleotide
  Sense strand starting at position 1650 of SEQ ID NO: 1886301
gaaagaggugucugggaau

SEQ ID NO: 2400073 - RNA, 19 nt, Artificial Sequence
  Description of Artificial Sequence: Synthetic oligonucleotide
  Antisense strand to SEQ ID NO: 2400072
auucccagacaccucuuuc

SEQ ID NO: 2400074 - RNA, 19 nt, Artificial Sequence
  Description of Artificial Sequence: Synthetic oligonucleotide
  Sense strand starting at position 1696 of SEQ ID NO: 1886301
gcaauagucuuccucugga

SEQ ID NO: 2400075 - RNA, 19 nt, Artificial Sequence
  Description of Artificial Sequence: Synthetic oligonucleotide
  Antisense strand to SEQ ID NO: 2400074
uccagaggaagacuauugc

SEQ ID NO: 2400076 - RNA, 19 nt, Artificial Sequence
  Description of Artificial Sequence: Synthetic oligonucleotide
  Sense strand starting at position 1699 of SEQ ID NO: 1886301
auagucuuccucuggagga

SEQ ID NO: 2400077 - RNA, 19 nt, Artificial Sequence
  Description of Artificial Sequence: Synthetic oligonucleotide
  Antisense strand to SEQ ID NO: 2400076
uccuccagaggaagacuau

SEQ ID NO: 2400078 - RNA, 19 nt, Artificial Sequence
  Description of Artificial Sequence: Synthetic oligonucleotide
  Sense strand starting at position 2031 of SEQ ID NO: 1886301
aacucagggugcuuugaaa

SEQ ID NO: 2400079 - RNA, 19 nt, Artificial Sequence
  Description of Artificial Sequence: Synthetic oligonucleotide
  Antisense strand to SEQ ID NO: 2400078
uuucaaagcacccugaguu

SEQ ID NO: 2400080 - RNA, 19 nt, Artificial Sequence
  Description of Artificial Sequence: Synthetic oligonucleotide
  Sense strand starting at position 2039 of SEQ ID NO: 1886301
gugcuuugaaauggaauca

SEQ ID NO: 2400081 - RNA, 19 nt, Artificial Sequence
  Description of Artificial Sequence: Synthetic oligonucleotide
  Antisense strand to SEQ ID NO: 2400080
ugauuccauuucaaagcac

SEQ ID NO: 2400082 - RNA, 19 nt, Artificial Sequence
  Description of Artificial Sequence: Synthetic oligonucleotide
  Sense strand starting at position 2276 of SEQ ID NO: 1886301
cccugugguuuaucuggaa

SEQ ID NO: 2400083 - RNA, 19 nt, Artificial Sequence
  Description of Artificial Sequence: Synthetic oligonucleotide
  Antisense strand to SEQ ID NO: 2400082
uuccagauaaaccacaggg

SEQ ID NO: 2400084 - RNA, 19 nt, Artificial Sequence
  Description of Artificial Sequence: Synthetic oligonucleotide
  Sense strand starting at position 2280 of SEQ ID NO: 1886301
gugguuuaucuggaauaug

SEQ ID NO: 2400085 - RNA, 19 nt, Artificial Sequence
  Description of Artificial Sequence: Synthetic oligonucleotide
  Antisense strand to SEQ ID NO: 2400084
cauauuccagauaaaccac

SEQ ID NO: 2400086 - RNA, 19 nt, Artificial Sequence
  Description of Artificial Sequence: Synthetic oligonucleotide
  Sense strand starting at position 2328 of SEQ ID NO: 1886301
ccagaaauuuauggacaca

SEQ ID NO: 2400087 - RNA, 19 nt, Artificial Sequence
  Description of Artificial Sequence: Synthetic oligonucleotide
  Antisense strand to SEQ ID NO: 2400086
uguguccauaaauuucugg

SEQ ID NO: 2400088 - RNA, 19 nt, Artificial Sequence
  Description of Artificial Sequence: Synthetic oligonucleotide
  Sense strand starting at position 2382 of SEQ ID NO: 1886301
gcaucaucccgcuaaagag

SEQ ID NO: 2400089 - RNA, 19 nt, Artificial Sequence
  Description of Artificial Sequence: Synthetic oligonucleotide
  Antisense strand to SEQ ID NO: 2400088
cucuuuagcgggaugaugc

SEQ ID NO: 2400090 - RNA, 19 nt, Artificial Sequence
  Description of Artificial Sequence: Synthetic oligonucleotide
  Sense strand starting at position 2500 of SEQ ID NO: 1886301
accuguaucugguuuggga

SEQ ID NO: 2400091 - RNA, 19 nt, Artificial Sequence
  Description of Artificial Sequence: Synthetic oligonucleotide
  Antisense strand to SEQ ID NO: 2400090
ucccaaaccagauacaggu

SEQ ID NO: 2400092 - RNA, 19 nt, Artificial Sequence
  Description of Artificial Sequence: Synthetic oligonucleotide
  Sense strand starting at position 2502 of SEQ ID NO: 1886301
cuguaucugguuugggaua

SEQ ID NO: 2400093 - RNA, 19 nt, Artificial Sequence
  Description of Artificial Sequence: Synthetic oligonucleotide
  Antisense strand to SEQ ID NO: 2400092
uaucccaaaccagauacag

SEQ ID NO: 2400094 - RNA, 19 nt, Artificial Sequence
  Description of Artificial Sequence: Synthetic oligonucleotide
  Sense strand starting at position 3290 of SEQ ID NO: 1886301
agaugaugauugucccuca

SEQ ID NO: 2400095 - RNA, 19 nt, Artificial Sequence
  Description of Artificial Sequence: Synthetic oligonucleotide
  Antisense strand to SEQ ID NO: 2400094
ugagggacaaucaucaucu

SEQ ID NO: 2400096 - RNA, 19 nt, Artificial Sequence
  Description of Artificial Sequence: Synthetic oligonucleotide
  Sense strand starting at position 3293 of SEQ ID NO: 1886301
ugaugauugucccucacca

SEQ ID NO: 2400097 - RNA, 19 nt, Artificial Sequence
  Description of Artificial Sequence: Synthetic oligonucleotide
  Antisense strand to SEQ ID NO: 2400096
uggugagggacaaucauca

SEQ ID NO: 2400098 - RNA, 19 nt, Artificial Sequence
  Description of Artificial Sequence: Synthetic oligonucleotide
  Sense strand starting at position 3385 of SEQ ID NO: 1886301
acagaugugcaguacacaa

SEQ ID NO: 2400099 - RNA, 19 nt, Artificial Sequence
  Description of Artificial Sequence: Synthetic oligonucleotide
  Antisense strand to SEQ ID NO: 2400098
uuguguacugcacaucugu

SEQ ID NO: 2400100 - RNA, 19 nt, Artificial Sequence
  Description of Artificial Sequence: Synthetic oligonucleotide
  Sense strand starting at position 3526 of SEQ ID NO: 1886301
acuaaagagcacugacauu

SEQ ID NO: 2400101 - RNA, 19 nt, Artificial Sequence
  Description of Artificial Sequence: Synthetic oligonucleotide
  Antisense strand to SEQ ID NO: 2400100
aaugucagugcucuuuagu

SEQ ID NO: 2400102 - RNA, 19 nt, Artificial Sequence
  Description of Artificial Sequence: Synthetic oligonucleotide
  Sense strand starting at position 3532 of SEQ ID NO: 1886301
gagcacugacauugagcau

SEQ ID NO: 2400103 - RNA, 19 nt, Artificial Sequence
  Description of Artificial Sequence: Synthetic oligonucleotide
  Antisense strand to SEQ ID NO: 2400102
augcucaaugucagugcuc

SEQ ID NO: 2400104 - RNA, 19 nt, Artificial Sequence
  Description of Artificial Sequence: Synthetic oligonucleotide
  Sense strand starting at position 3620 of SEQ ID NO: 1886301
ugaggaagccauugacgua

SEQ ID NO: 2400105 - RNA, 19 nt, Artificial Sequence
  Description of Artificial Sequence: Synthetic oligonucleotide
  Antisense strand to SEQ ID NO: 2400104
uacgucaauggcuuccuca

SEQ ID NO: 2400106 - RNA, 19 nt, Artificial Sequence
  Description of Artificial Sequence: Synthetic oligonucleotide
  Sense strand starting at position 3659 of SEQ ID NO: 1886301
agagacuccuugccuauca

SEQ ID NO: 2400107 - RNA, 19 nt, Artificial Sequence
  Description of Artificial Sequence: Synthetic oligonucleotide
  Antisense strand to SEQ ID NO: 2400106
ugauaggcaaggagucucu

SEQ ID NO: 2400108 - RNA, 19 nt, Artificial Sequence
  Description of Artificial Sequence: Synthetic oligonucleotide
  Sense strand starting at position 3699 of SEQ ID NO: 1886301
cuguguguuccugccauau

SEQ ID NO: 2400109 - RNA, 19 nt, Artificial Sequence
  Description of Artificial Sequence: Synthetic oligonucleotide
  Antisense strand to SEQ ID NO: 2400108
auauggcaggaacacacag

SEQ ID NO: 2400110 - RNA, 19 nt, Artificial Sequence
  Description of Artificial Sequence: Synthetic oligonucleotide
  Sense strand starting at position 3927 of SEQ ID NO: 1886301
gguuaacucucccugagca

SEQ ID NO: 2400111 - RNA, 19 nt, Artificial Sequence
  Description of Artificial Sequence: Synthetic oligonucleotide
  Antisense strand to SEQ ID NO: 2400110
ugcucagggagaguuaacc

SEQ ID NO: 2400112 - RNA, 19 nt, Artificial Sequence
  Description of Artificial Sequence: Synthetic oligonucleotide
  Sense strand starting at position 3928 of SEQ ID NO: 1886301
guuaacucucccugagcaa

SEQ ID NO: 2400113 - RNA, 19 nt, Artificial Sequence
  Description of Artificial Sequence: Synthetic oligonucleotide
  Antisense strand to SEQ ID NO: 2400112
uugcucagggagaguuaac

SEQ ID NO: 2400114 - RNA, 19 nt, Artificial Sequence
  Description of Artificial Sequence: Synthetic oligonucleotide
  Sense strand starting at position 185 of SEQ ID NO: 1886302
agacacuagcccugucaua

SEQ ID NO: 2400115 - RNA, 19 nt, Artificial Sequence
  Description of Artificial Sequence: Synthetic oligonucleotide
  Antisense strand to SEQ ID NO: 2400114
uaugacagggcuagugucu

SEQ ID NO: 2400116 - RNA, 19 nt, Artificial Sequence
  Description of Artificial Sequence: Synthetic oligonucleotide
  Sense strand starting at position 223 of SEQ ID NO: 1886302
caaagacuugugugaauug

SEQ ID NO: 2400117 - RNA, 19 nt, Artificial Sequence
  Description of Artificial Sequence: Synthetic oligonucleotide
  Antisense strand to SEQ ID NO: 2400116
caauucacacaagucuuug

SEQ ID NO: 2400118 - RNA, 19 nt, Artificial Sequence
  Description of Artificial Sequence: Synthetic oligonucleotide
  Sense strand starting at position 438 of SEQ ID NO: 1886302
ccaagucagucugcagaga

SEQ ID NO: 2400119 - RNA, 19 nt, Artificial Sequence
  Description of Artificial Sequence: Synthetic oligonucleotide
  Antisense strand to SEQ ID NO: 2400118
ucucugcagacugacuugg

SEQ ID NO: 2400120 - RNA, 19 nt, Artificial Sequence
  Description of Artificial Sequence: Synthetic oligonucleotide
  Sense strand starting at position 439 of SEQ ID NO: 1886302
caagucagucugcagagau

SEQ ID NO: 2400121 - RNA, 19 nt, Artificial Sequence
  Description of Artificial Sequence: Synthetic oligonucleotide
  Antisense strand to SEQ ID NO: 2400120
aucucugcagacugacuug

SEQ ID NO: 2400122 - RNA, 19 nt, Artificial Sequence
  Description of Artificial Sequence: Synthetic oligonucleotide
  Sense strand starting at position 554 of SEQ ID NO: 1886302
cacagucgucgcucuguga

SEQ ID NO: 2400123 - RNA, 19 nt, Artificial Sequence
  Description of Artificial Sequence: Synthetic oligonucleotide
  Antisense strand to SEQ ID NO: 2400122
ucacagagcgacgacugug

SEQ ID NO: 2400124 - RNA, 19 nt, Artificial Sequence
  Description of Artificial Sequence: Synthetic oligonucleotide
  Sense strand starting at position 702 of SEQ ID NO: 1886302
ugggcuucucugcagaaag

SEQ ID NO: 2400125 - RNA, 19 nt, Artificial Sequence
  Description of Artificial Sequence: Synthetic oligonucleotide
  Antisense strand to SEQ ID NO: 2400124
cuuucugcagagaagccca

SEQ ID NO: 2400126 - RNA, 19 nt, Artificial Sequence
  Description of Artificial Sequence: Synthetic oligonucleotide
  Sense strand starting at position 704 of SEQ ID NO: 1886302
ggcuucucugcagaaagca

SEQ ID NO: 2400127 - RNA, 19 nt, Artificial Sequence
  Description of Artificial Sequence: Synthetic oligonucleotide
  Antisense strand to SEQ ID NO: 2400126
ugcuuucugcagagaagcc

SEQ ID NO: 2400128 - RNA, 19 nt, Artificial Sequence
  Description of Artificial Sequence: Synthetic oligonucleotide
  Sense strand starting at position 749 of SEQ ID NO: 1886302
cugccugcccuugaugaua

SEQ ID NO: 2400129 - RNA, 19 nt, Artificial Sequence
  Description of Artificial Sequence: Synthetic oligonucleotide
  Antisense strand to SEQ ID NO: 2400128
uaucaucaagggcaggcag

SEQ ID NO: 2400130 - RNA, 19 nt, Artificial Sequence
  Description of Artificial Sequence: Synthetic oligonucleotide
  Sense strand starting at position 819 of SEQ ID NO: 1886302
gaagaagugccugggaaca

SEQ ID NO: 2400131 - RNA, 19 nt, Artificial Sequence
  Description of Artificial Sequence: Synthetic oligonucleotide
  Antisense strand to SEQ ID NO: 2400130
uguucccaggcacuucuuc

SEQ ID NO: 2400132 - RNA, 19 nt, Artificial Sequence
  Description of Artificial Sequence: Synthetic oligonucleotide
  Sense strand starting at position 1174 of SEQ ID NO: 1886302
ucgauccaugcacauuauu

SEQ ID NO: 2400133 - RNA, 19 nt, Artificial Sequence
  Description of Artificial Sequence: Synthetic oligonucleotide
  Antisense strand to SEQ ID NO: 2400132
aauaaugugcauggaucga

SEQ ID NO: 2400134 - RNA, 19 nt, Artificial Sequence
  Description of Artificial Sequence: Synthetic oligonucleotide
  Sense strand starting at position 1324 of SEQ ID NO: 1886302
gaagaagauugucccucga

SEQ ID NO: 2400135 - RNA, 19 nt, Artificial Sequence
  Description of Artificial Sequence: Synthetic oligonucleotide
  Antisense strand to SEQ ID NO: 2400134
ucgagggacaaucuucuuc

SEQ ID NO: 2400136 - RNA, 19 nt, Artificial Sequence
  Description of Artificial Sequence: Synthetic oligonucleotide
  Sense strand starting at position 1326 of SEQ ID NO: 1886302
agaagauugucccucgaag

SEQ ID NO: 2400137 - RNA, 19 nt, Artificial Sequence
  Description of Artificial Sequence: Synthetic oligonucleotide
  Antisense strand to SEQ ID NO: 2400136
cuucgagggacaaucuucu

SEQ ID NO: 2400138 - RNA, 19 nt, Artificial Sequence
  Description of Artificial Sequence: Synthetic oligonucleotide
  Sense strand starting at position 1328 of SEQ ID NO: 1886302
aagauugucccucgaagau

SEQ ID NO: 2400139 - RNA, 19 nt, Artificial Sequence
  Description of Artificial Sequence: Synthetic oligonucleotide
  Antisense strand to SEQ ID NO: 2400138
aucuucgagggacaaucuu

SEQ ID NO: 2400140 - RNA, 19 nt, Artificial Sequence
  Description of Artificial Sequence: Synthetic oligonucleotide
  Sense strand starting at position 1513 of SEQ ID NO: 1886302
acugcaauguccuugaaca

SEQ ID NO: 2400141 - RNA, 19 nt, Artificial Sequence
  Description of Artificial Sequence: Synthetic oligonucleotide
  Antisense strand to SEQ ID NO: 2400140
uguucaaggacauugcagu

SEQ ID NO: 2400142 - RNA, 19 nt, Artificial Sequence
  Description of Artificial Sequence: Synthetic oligonucleotide
  Sense strand starting at position 1514 of SEQ ID NO: 1886302
cugcaauguccuugaacaa

SEQ ID NO: 2400143 - RNA, 19 nt, Artificial Sequence
  Description of Artificial Sequence: Synthetic oligonucleotide
  Antisense strand to SEQ ID NO: 2400142
uuguucaaggacauugcag

SEQ ID NO: 2400144 - RNA, 19 nt, Artificial Sequence
  Description of Artificial Sequence: Synthetic oligonucleotide
  Sense strand starting at position 1515 of SEQ ID NO: 1886302
ugcaauguccuugaacaau

SEQ ID NO: 2400145 - RNA, 19 nt, Artificial Sequence
  Description of Artificial Sequence: Synthetic oligonucleotide
  Antisense strand to SEQ ID NO: 2400144
auuguucaaggacauugca

SEQ ID NO: 2400146 - RNA, 19 nt, Artificial Sequence
  Description of Artificial Sequence: Synthetic oligonucleotide
  Sense strand starting at position 1521 of SEQ ID NO: 1886302
guccuugaacaaugaugaa

SEQ ID NO: 2400147 - RNA, 19 nt, Artificial Sequence
  Description of Artificial Sequence: Synthetic oligonucleotide
  Antisense strand to SEQ ID NO: 2400146
uucaucauuguucaaggac

SEQ ID NO: 2400148 - RNA, 19 nt, Artificial Sequence
  Description of Artificial Sequence: Synthetic oligonucleotide
  Sense strand starting at position 1597 of SEQ ID NO: 1886302
ccugucuuuccucaaggga

SEQ ID NO: 2400149 - RNA, 19 nt, Artificial Sequence
  Description of Artificial Sequence: Synthetic oligonucleotide
  Antisense strand to SEQ ID NO: 2400148
ucccuugaggaaagacagg

SEQ ID NO: 2400150 - RNA, 19 nt, Artificial Sequence
  Description of Artificial Sequence: Synthetic oligonucleotide
  Sense strand starting at position 1600 of SEQ ID NO: 1886302
gucuuuccucaagggaaug

SEQ ID NO: 2400151 - RNA, 19 nt, Artificial Sequence
  Description of Artificial Sequence: Synthetic oligonucleotide
  Antisense strand to SEQ ID NO: 2400150
cauucccuugaggaaagac

SEQ ID NO: 2400152 - RNA, 19 nt, Artificial Sequence
  Description of Artificial Sequence: Synthetic oligonucleotide
  Sense strand starting at position 1733 of SEQ ID NO: 1886302
uuaccuugcagagagaagu

SEQ ID NO: 2400153 - RNA, 19 nt, Artificial Sequence
  Description of Artificial Sequence: Synthetic oligonucleotide
  Antisense strand to SEQ ID NO: 2400152
acuucucucugcaagguaa

SEQ ID NO: 2400154 - RNA, 19 nt, Artificial Sequence
  Description of Artificial Sequence: Synthetic oligonucleotide
  Sense strand starting at position 1763 of SEQ ID NO: 1886302
uuuccuauuuaugagagau

SEQ ID NO: 2400155 - RNA, 19 nt, Artificial Sequence
  Description of Artificial Sequence: Synthetic oligonucleotide
  Antisense strand to SEQ ID NO: 2400154
aucucucauaaauaggaaa

SEQ ID NO: 2400156 - RNA, 19 nt, Artificial Sequence
  Description of Artificial Sequence: Synthetic oligonucleotide
  Sense strand starting at position 1765 of SEQ ID NO: 1886302
uccuauuuaugagagaucu

SEQ ID NO: 2400157 - RNA, 19 nt, Artificial Sequence
  Description of Artificial Sequence: Synthetic oligonucleotide
  Antisense strand to SEQ ID NO: 2400156
agaucucucauaaauagga

SEQ ID NO: 2400158 - RNA, 19 nt, Artificial Sequence
  Description of Artificial Sequence: Synthetic oligonucleotide
  Sense strand starting at position 2200 of SEQ ID NO: 1886302
acgggugugcuugagaaag

SEQ ID NO: 2400159 - RNA, 19 nt, Artificial Sequence
  Description of Artificial Sequence: Synthetic oligonucleotide
  Antisense strand to SEQ ID NO: 2400158
cuuucucaagcacacccgu

SEQ ID NO: 2400160 - RNA, 19 nt, Artificial Sequence
  Description of Artificial Sequence: Synthetic oligonucleotide
  Sense strand starting at position 2440 of SEQ ID NO: 1886302
ucccuuggccaucagagaa

SEQ ID NO: 2400161 - RNA, 19 nt, Artificial Sequence
  Description of Artificial Sequence: Synthetic oligonucleotide
  Antisense strand to SEQ ID NO: 2400160
uucucugauggccaaggga

SEQ ID NO: 2400162 - RNA, 19 nt, Artificial Sequence
  Description of Artificial Sequence: Synthetic oligonucleotide
  Sense strand starting at position 2534 of SEQ ID NO: 1886302
uccuuuagccuugaagcau

SEQ ID NO: 2400163 - RNA, 19 nt, Artificial Sequence
  Description of Artificial Sequence: Synthetic oligonucleotide
  Antisense strand to SEQ ID NO: 2400162
augcuucaaggcuaaagga

SEQ ID NO: 2400164 - RNA, 19 nt, Artificial Sequence
  Description of Artificial Sequence: Synthetic oligonucleotide
  Sense strand starting at position 2774 of SEQ ID NO: 1886302
acacauggauucgcaauua

SEQ ID NO: 2400165 - RNA, 19 nt, Artificial Sequence
  Description of Artificial Sequence: Synthetic oligonucleotide
  Antisense strand to SEQ ID NO: 2400164
uaauugcgaauccaugugu

SEQ ID NO: 2400166 - RNA, 19 nt, Artificial Sequence
  Description of Artificial Sequence: Synthetic oligonucleotide
  Sense strand starting at position 2832 of SEQ ID NO: 1886302
ccguaugcacccuauaaca

SEQ ID NO: 2400167 - RNA, 19 nt, Artificial Sequence
  Description of Artificial Sequence: Synthetic oligonucleotide
  Antisense strand to SEQ ID NO: 2400166
uguuauagggugcauacgg

SEQ ID NO: 2400168 - RNA, 19 nt, Artificial Sequence
  Description of Artificial Sequence: Synthetic oligonucleotide
  Sense strand starting at position 2887 of SEQ ID NO: 1886302
gacagaagacuguguggua

SEQ ID NO: 2400169 - RNA, 19 nt, Artificial Sequence
  Description of Artificial Sequence: Synthetic oligonucleotide
  Antisense strand to SEQ ID NO: 2400168
uaccacacagucuucuguc

SEQ ID NO: 2400170 - RNA, 19 nt, Artificial Sequence
  Description of Artificial Sequence: Synthetic oligonucleotide
  Sense strand starting at position 2888 of SEQ ID NO: 1886302
acagaagacugugugguaa

SEQ ID NO: 2400171 - RNA, 19 nt, Artificial Sequence
  Description of Artificial Sequence: Synthetic oligonucleotide
  Antisense strand to SEQ ID NO: 2400170
uuaccacacagucuucugu

SEQ ID NO: 2400172 - RNA, 19 nt, Artificial Sequence
  Description of Artificial Sequence: Synthetic oligonucleotide
  Sense strand starting at position 3041 of SEQ ID NO: 1886302
cgccauccuccugaagacu

SEQ ID NO: 2400173 - RNA, 19 nt, Artificial Sequence
  Description of Artificial Sequence: Synthetic oligonucleotide
  Antisense strand to SEQ ID NO: 2400172
agucuucaggaggauggcg

SEQ ID NO: 2400174 - RNA, 19 nt, Artificial Sequence
  Description of Artificial Sequence: Synthetic oligonucleotide
  Sense strand starting at position 3105 of SEQ ID NO: 1886302
gucccuugacaaggaugaa

SEQ ID NO: 2400175 - RNA, 19 nt, Artificial Sequence
  Description of Artificial Sequence: Synthetic oligonucleotide
  Antisense strand to SEQ ID NO: 2400174
uucauccuugucaagggac

SEQ ID NO: 2400176 - RNA, 19 nt, Artificial Sequence
  Description of Artificial Sequence: Synthetic oligonucleotide
  Sense strand starting at position 3131 of SEQ ID NO: 1886302
gaaagaggugucugggaau

SEQ ID NO: 2400177 - RNA, 19 nt, Artificial Sequence
  Description of Artificial Sequence: Synthetic oligonucleotide
  Antisense strand to SEQ ID NO: 2400176
auucccagacaccucuuuc

SEQ ID NO: 2400178 - RNA, 19 nt, Artificial Sequence
  Description of Artificial Sequence: Synthetic oligonucleotide
  Sense strand starting at position 3180 of SEQ ID NO: 1886302
auagucuuccucuggagga

SEQ ID NO: 2400179 - RNA, 19 nt, Artificial Sequence
  Description of Artificial Sequence: Synthetic oligonucleotide
  Antisense strand to SEQ ID NO: 2400178
uccuccagaggaagacuau

SEQ ID NO: 2400180 - RNA, 19 nt, Artificial Sequence
  Description of Artificial Sequence: Synthetic oligonucleotide
  Sense strand starting at position 3512 of SEQ ID NO: 1886302
aacucagggugcuuugaaa

SEQ ID NO: 2400181 - RNA, 19 nt, Artificial Sequence
  Description of Artificial Sequence: Synthetic oligonucleotide
  Antisense strand to SEQ ID NO: 2400180
uuucaaagcacccugaguu

SEQ ID NO: 2400182 - RNA, 19 nt, Artificial Sequence
  Description of Artificial Sequence: Synthetic oligonucleotide
  Sense strand starting at position 3520 of SEQ ID NO: 1886302
gugcuuugaaauggaauca

SEQ ID NO: 2400183 - RNA, 19 nt, Artificial Sequence
  Description of Artificial Sequence: Synthetic oligonucleotide
  Antisense strand to SEQ ID NO: 2400182
ugauuccauuucaaagcac

SEQ ID NO: 2400184 - RNA, 19 nt, Artificial Sequence
  Description of Artificial Sequence: Synthetic oligonucleotide
  Sense strand starting at position 3761 of SEQ ID NO: 1886302
gugguuuaucuggaauaug

SEQ ID NO: 2400185 - RNA, 19 nt, Artificial Sequence
  Description of Artificial Sequence: Synthetic oligonucleotide
  Antisense strand to SEQ ID NO: 2400184
cauauuccagauaaaccac

SEQ ID NO: 2400186 - RNA, 19 nt, Artificial Sequence
  Description of Artificial Sequence: Synthetic oligonucleotide
  Sense strand starting at position 3809 of SEQ ID NO: 1886302
ccagaaauuuauggacaca

SEQ ID NO: 2400187 - RNA, 19 nt, Artificial Sequence
  Description of Artificial Sequence: Synthetic oligonucleotide
  Antisense strand to SEQ ID NO: 2400186
uguguccauaaauuucugg

SEQ ID NO: 2400188 - RNA, 19 nt, Artificial Sequence
  Description of Artificial Sequence: Synthetic oligonucleotide
  Sense strand starting at position 3863 of SEQ ID NO: 1886302
gcaucaucccgcuaaagag

SEQ ID NO: 2400189 - RNA, 19 nt, Artificial Sequence
  Description of Artificial Sequence: Synthetic oligonucleotide
  Antisense strand to SEQ ID NO: 2400188
cucuuuagcgggaugaugc

SEQ ID NO: 2400190 - RNA, 19 nt, Artificial Sequence
  Description of Artificial Sequence: Synthetic oligonucleotide
  Sense strand starting at position 3981 of SEQ ID NO: 1886302
accuguaucugguuuggga

SEQ ID NO: 2400191 - RNA, 19 nt, Artificial Sequence
  Description of Artificial Sequence: Synthetic oligonucleotide
  Antisense strand to SEQ ID NO: 2400190
ucccaaaccagauacaggu

SEQ ID NO: 2400192 - RNA, 19 nt, Artificial Sequence
  Description of Artificial Sequence: Synthetic oligonucleotide
  Sense strand starting at position 3983 of SEQ ID NO: 1886302
cuguaucugguuugggaua

SEQ ID NO: 2400193 - RNA, 19 nt, Artificial Sequence
  Description of Artificial Sequence: Synthetic oligonucleotide
  Antisense strand to SEQ ID NO: 2400192
uaucccaaaccagauacag

SEQ ID NO: 2400194 - RNA, 19 nt, Artificial Sequence
  Description of Artificial Sequence: Synthetic oligonucleotide
  Sense strand starting at position 48 of SEQ ID NO: 1886303
ugcaaugggcaucaucaaa

SEQ ID NO: 2400195 - RNA, 19 nt, Artificial Sequence
  Description of Artificial Sequence: Synthetic oligonucleotide
  Antisense strand to SEQ ID NO: 2400194
uuugaugaugcccauugca

SEQ ID NO: 2400196 - RNA, 19 nt, Artificial Sequence
  Description of Artificial Sequence: Synthetic oligonucleotide
  Sense strand starting at position 455 of SEQ ID NO: 1886303
uugcaagggccauacaauu

SEQ ID NO: 2400197 - RNA, 19 nt, Artificial Sequence
  Description of Artificial Sequence: Synthetic oligonucleotide
  Antisense strand to SEQ ID NO: 2400196
aauuguauggcccuugcaa

SEQ ID NO: 2400198 - RNA, 19 nt, Artificial Sequence
  Description of Artificial Sequence: Synthetic oligonucleotide
  Sense strand starting at position 483 of SEQ ID NO: 1886303
gugguguaucguguaugua

SEQ ID NO: 2400199 - RNA, 19 nt, Artificial Sequence
  Description of Artificial Sequence: Synthetic oligonucleotide
  Antisense strand to SEQ ID NO: 2400198
uacauacacgauacaccac

SEQ ID NO: 2400200 - RNA, 19 nt, Artificial Sequence
  Description of Artificial Sequence: Synthetic oligonucleotide
  Sense strand starting at position 485 of SEQ ID NO: 1886303
gguguaucguguauguauc

SEQ ID NO: 2400201 - RNA, 19 nt, Artificial Sequence
  Description of Artificial Sequence: Synthetic oligonucleotide
  Antisense strand to SEQ ID NO: 2400200
gauacauacacgauacacc

SEQ ID NO: 2400202 - RNA, 19 nt, Artificial Sequence
  Description of Artificial Sequence: Synthetic oligonucleotide
  Sense strand starting at position 723 of SEQ ID NO: 1886303
aggaaagccucuucuugag

SEQ ID NO: 2400203 - RNA, 19 nt, Artificial Sequence
  Description of Artificial Sequence: Synthetic oligonucleotide
  Antisense strand to SEQ ID NO: 2400202
cucaagaagaggcuuuccu

SEQ ID NO: 2400204 - RNA, 19 nt, Artificial Sequence
  Description of Artificial Sequence: Synthetic oligonucleotide
  Sense strand starting at position 727 of SEQ ID NO: 1886303
aagccucuucuugagugaa

SEQ ID NO: 2400205 - RNA, 19 nt, Artificial Sequence
  Description of Artificial Sequence: Synthetic oligonucleotide
  Antisense strand to SEQ ID NO: 2400204
uucacucaagaagaggcuu

SEQ ID NO: 2400206 - RNA, 19 nt, Artificial Sequence
  Description of Artificial Sequence: Synthetic oligonucleotide
  Sense strand starting at position 735 of SEQ ID NO: 1886303
ucuugagugaagggcaauu

SEQ ID NO: 2400207 - RNA, 19 nt, Artificial Sequence
  Description of Artificial Sequence: Synthetic oligonucleotide
  Antisense strand to SEQ ID NO: 2400206
aauugcccuucacucaaga

SEQ ID NO: 2400208 - RNA, 19 nt, Artificial Sequence
  Description of Artificial Sequence: Synthetic oligonucleotide
  Sense strand starting at position 807 of SEQ ID NO: 1886303
ugagaaacaugcucaauca

SEQ ID NO: 2400209 - RNA, 19 nt, Artificial Sequence
  Description of Artificial Sequence: Synthetic oligonucleotide
  Antisense strand to SEQ ID NO: 2400208
ugauugagcauguuucuca

SEQ ID NO: 2400210 - RNA, 19 nt, Artificial Sequence
  Description of Artificial Sequence: Synthetic oligonucleotide
  Sense strand starting at position 1005 of SEQ ID NO: 1886303
agacacuagcccugucaua

SEQ ID NO: 2400211 - RNA, 19 nt, Artificial Sequence
  Description of Artificial Sequence: Synthetic oligonucleotide
  Antisense strand to SEQ ID NO: 2400210
uaugacagggcuagugucu

SEQ ID NO: 2400212 - RNA, 19 nt, Artificial Sequence
  Description of Artificial Sequence: Synthetic oligonucleotide
  Sense strand starting at position 1043 of SEQ ID NO: 1886303
caaagacuugugugaauug

SEQ ID NO: 2400213 - RNA, 19 nt, Artificial Sequence
  Description of Artificial Sequence: Synthetic oligonucleotide
  Antisense strand to SEQ ID NO: 2400212
caauucacacaagucuuug

SEQ ID NO: 2400214 - RNA, 19 nt, Artificial Sequence
  Description of Artificial Sequence: Synthetic oligonucleotide
  Sense strand starting at position 1258 of SEQ ID NO: 1886303
ccaagucagucugcagaga

SEQ ID NO: 2400215 - RNA, 19 nt, Artificial Sequence
  Description of Artificial Sequence: Synthetic oligonucleotide
  Antisense strand to SEQ ID NO: 2400214
ucucugcagacugacuugg

SEQ ID NO: 2400216 - RNA, 19 nt, Artificial Sequence
  Description of Artificial Sequence: Synthetic oligonucleotide
  Sense strand starting at position 1259 of SEQ ID NO: 1886303
caagucagucugcagagau

SEQ ID NO: 2400217 - RNA, 19 nt, Artificial Sequence
  Description of Artificial Sequence: Synthetic oligonucleotide
  Antisense strand to SEQ ID NO: 2400216
aucucugcagacugacuug

SEQ ID NO: 2400218 - RNA, 19 nt, Artificial Sequence
  Description of Artificial Sequence: Synthetic oligonucleotide
  Sense strand starting at position 1374 of SEQ ID NO: 1886303
cacagucgucgcucuguga

SEQ ID NO: 2400219 - RNA, 19 nt, Artificial Sequence
  Description of Artificial Sequence: Synthetic oligonucleotide
  Antisense strand to SEQ ID NO: 2400218
ucacagagcgacgacugug

SEQ ID NO: 2400220 - RNA, 19 nt, Artificial Sequence
  Description of Artificial Sequence: Synthetic oligonucleotide
  Sense strand starting at position 1522 of SEQ ID NO: 1886303
ugggcuucucugcagaaag

SEQ ID NO: 2400221 - RNA, 19 nt, Artificial Sequence
  Description of Artificial Sequence: Synthetic oligonucleotide
  Antisense strand to SEQ ID NO: 2400220
cuuucugcagagaagccca

SEQ ID NO: 2400222 - RNA, 19 nt, Artificial Sequence
  Description of Artificial Sequence: Synthetic oligonucleotide
  Sense strand starting at position 1524 of SEQ ID NO: 1886303
ggcuucucugcagaaagca

SEQ ID NO: 2400223 - RNA, 19 nt, Artificial Sequence
  Description of Artificial Sequence: Synthetic oligonucleotide
  Antisense strand to SEQ ID NO: 2400222
ugcuuucugcagagaagcc

SEQ ID NO: 2400224 - RNA, 19 nt, Artificial Sequence
  Description of Artificial Sequence: Synthetic oligonucleotide
  Sense strand starting at position 1569 of SEQ ID NO: 1886303
cugccugcccuugaugaua

SEQ ID NO: 2400225 - RNA, 19 nt, Artificial Sequence
  Description of Artificial Sequence: Synthetic oligonucleotide
  Antisense strand to SEQ ID NO: 2400224
uaucaucaagggcaggcag

SEQ ID NO: 2400226 - RNA, 19 nt, Artificial Sequence
  Description of Artificial Sequence: Synthetic oligonucleotide
  Sense strand starting at position 1639 of SEQ ID NO: 1886303
gaagaagugccugggaaca

SEQ ID NO: 2400227 - RNA, 19 nt, Artificial Sequence
  Description of Artificial Sequence: Synthetic oligonucleotide
  Antisense strand to SEQ ID NO: 2400226
uguucccaggcacuucuuc

SEQ ID NO: 2400228 - RNA, 19 nt, Artificial Sequence
  Description of Artificial Sequence: Synthetic oligonucleotide
  Sense strand starting at position 1994 of SEQ ID NO: 1886303
ucgauccaugcacauuauu

SEQ ID NO: 2400229 - RNA, 19 nt, Artificial Sequence
  Description of Artificial Sequence: Synthetic oligonucleotide
  Antisense strand to SEQ ID NO: 2400228
aauaaugugcauggaucga

SEQ ID NO: 2400230 - RNA, 19 nt, Artificial Sequence
  Description of Artificial Sequence: Synthetic oligonucleotide
  Sense strand starting at position 2144 of SEQ ID NO: 1886303
gaagaagauugucccucga

SEQ ID NO: 2400231 - RNA, 19 nt, Artificial Sequence
  Description of Artificial Sequence: Synthetic oligonucleotide
  Antisense strand to SEQ ID NO: 2400230
ucgagggacaaucuucuuc

SEQ ID NO: 2400232 - RNA, 19 nt, Artificial Sequence
  Description of Artificial Sequence: Synthetic oligonucleotide
  Sense strand starting at position 2146 of SEQ ID NO: 1886303
agaagauugucccucgaag

SEQ ID NO: 2400233 - RNA, 19 nt, Artificial Sequence
  Description of Artificial Sequence: Synthetic oligonucleotide
  Antisense strand to SEQ ID NO: 2400232
cuucgagggacaaucuucu

SEQ ID NO: 2400234 - RNA, 19 nt, Artificial Sequence
  Description of Artificial Sequence: Synthetic oligonucleotide
  Sense strand starting at position 2148 of SEQ ID NO: 1886303
aagauugucccucgaagau

SEQ ID NO: 2400235 - RNA, 19 nt, Artificial Sequence
  Description of Artificial Sequence: Synthetic oligonucleotide
  Antisense strand to SEQ ID NO: 2400234
aucuucgagggacaaucuu

SEQ ID NO: 2400236 - RNA, 19 nt, Artificial Sequence
  Description of Artificial Sequence: Synthetic oligonucleotide
  Sense strand starting at position 2333 of SEQ ID NO: 1886303
acugcaauguccuugaaca

SEQ ID NO: 2400237 - RNA, 19 nt, Artificial Sequence
  Description of Artificial Sequence: Synthetic oligonucleotide
  Antisense strand to SEQ ID NO: 2400236
uguucaaggacauugcagu

SEQ ID NO: 2400238 - RNA, 19 nt, Artificial Sequence
  Description of Artificial Sequence: Synthetic oligonucleotide
  Sense strand starting at position 2334 of SEQ ID NO: 1886303
cugcaauguccuugaacaa

SEQ ID NO: 2400239 - RNA, 19 nt, Artificial Sequence
  Description of Artificial Sequence: Synthetic oligonucleotide
  Antisense strand to SEQ ID NO: 2400238
uuguucaaggacauugcag

SEQ ID NO: 2400240 - RNA, 19 nt, Artificial Sequence
  Description of Artificial Sequence: Synthetic oligonucleotide
  Sense strand starting at position 2335 of SEQ ID NO: 1886303
ugcaauguccuugaacaau

SEQ ID NO: 2400241 - RNA, 19 nt, Artificial Sequence
  Description of Artificial Sequence: Synthetic oligonucleotide
  Antisense strand to SEQ ID NO: 2400240
auuguucaaggacauugca

SEQ ID NO: 2400242 - RNA, 19 nt, Artificial Sequence
  Description of Artificial Sequence: Synthetic oligonucleotide
  Sense strand starting at position 2341 of SEQ ID NO: 1886303
guccuugaacaaugaugaa

SEQ ID NO: 2400243 - RNA, 19 nt, Artificial Sequence
  Description of Artificial Sequence: Synthetic oligonucleotide
  Antisense strand to SEQ ID NO: 2400242
uucaucauuguucaaggac

SEQ ID NO: 2400244 - RNA, 19 nt, Artificial Sequence
  Description of Artificial Sequence: Synthetic oligonucleotide
  Sense strand starting at position 2417 of SEQ ID NO: 1886303
ccugucuuuccucaaggga

SEQ ID NO: 2400245 - RNA, 19 nt, Artificial Sequence
  Description of Artificial Sequence: Synthetic oligonucleotide
  Antisense strand to SEQ ID NO: 2400244
ucccuugaggaaagacagg

SEQ ID NO: 2400246 - RNA, 19 nt, Artificial Sequence
  Description of Artificial Sequence: Synthetic oligonucleotide
  Sense strand starting at position 2420 of SEQ ID NO: 1886303
gucuuuccucaagggaaug

SEQ ID NO: 2400247 - RNA, 19 nt, Artificial Sequence
  Description of Artificial Sequence: Synthetic oligonucleotide
  Antisense strand to SEQ ID NO: 2400246
cauucccuugaggaaagac

SEQ ID NO: 2400248 - RNA, 19 nt, Artificial Sequence
  Description of Artificial Sequence: Synthetic oligonucleotide
  Sense strand starting at position 2553 of SEQ ID NO: 1886303
uuaccuugcagagagaagu

SEQ ID NO: 2400249 - RNA, 19 nt, Artificial Sequence
  Description of Artificial Sequence: Synthetic oligonucleotide
  Antisense strand to SEQ ID NO: 2400248
acuucucucugcaagguaa

SEQ ID NO: 2400250 - RNA, 19 nt, Artificial Sequence
  Description of Artificial Sequence: Synthetic oligonucleotide
  Sense strand starting at position 2583 of SEQ ID NO: 1886303
uuuccuauuuaugagagau

SEQ ID NO: 2400251 - RNA, 19 nt, Artificial Sequence
  Description of Artificial Sequence: Synthetic oligonucleotide
  Antisense strand to SEQ ID NO: 2400250
aucucucauaaauaggaaa

SEQ ID NO: 2400252 - RNA, 19 nt, Artificial Sequence
  Description of Artificial Sequence: Synthetic oligonucleotide
  Sense strand starting at position 2585 of SEQ ID NO: 1886303
uccuauuuaugagagaucu

SEQ ID NO: 2400253 - RNA, 19 nt, Artificial Sequence
  Description of Artificial Sequence: Synthetic oligonucleotide
  Antisense strand to SEQ ID NO: 2400252
agaucucucauaaauagga

SEQ ID NO: 2400254 - RNA, 19 nt, Artificial Sequence
  Description of Artificial Sequence: Synthetic oligonucleotide
  Sense strand starting at position 3020 of SEQ ID NO: 1886303
acgggugugcuugagaaag

SEQ ID NO: 2400255 - RNA, 19 nt, Artificial Sequence
  Description of Artificial Sequence: Synthetic oligonucleotide
  Antisense strand to SEQ ID NO: 2400254
cuuucucaagcacacccgu

SEQ ID NO: 2400256 - RNA, 19 nt, Artificial Sequence
  Description of Artificial Sequence: Synthetic oligonucleotide
  Sense strand starting at position 3260 of SEQ ID NO: 1886303
ucccuuggccaucagagaa

SEQ ID NO: 2400257 - RNA, 19 nt, Artificial Sequence
  Description of Artificial Sequence: Synthetic oligonucleotide
  Antisense strand to SEQ ID NO: 2400256
uucucugauggccaaggga

SEQ ID NO: 2400258 - RNA, 19 nt, Artificial Sequence
  Description of Artificial Sequence: Synthetic oligonucleotide
  Sense strand starting at position 3354 of SEQ ID NO: 1886303
uccuuuagccuugaagcau

SEQ ID NO: 2400259 - RNA, 19 nt, Artificial Sequence
  Description of Artificial Sequence: Synthetic oligonucleotide
  Antisense strand to SEQ ID NO: 2400258
augcuucaaggcuaaagga

SEQ ID NO: 2400260 - RNA, 19 nt, Artificial Sequence
  Description of Artificial Sequence: Synthetic oligonucleotide
  Sense strand starting at position 3594 of SEQ ID NO: 1886303
acacauggauucgcaauua

SEQ ID NO: 2400261 - RNA, 19 nt, Artificial Sequence
  Description of Artificial Sequence: Synthetic oligonucleotide
  Antisense strand to SEQ ID NO: 2400260
uaauugcgaauccaugugu

SEQ ID NO: 2400262 - RNA, 19 nt, Artificial Sequence
  Description of Artificial Sequence: Synthetic oligonucleotide
  Sense strand starting at position 3652 of SEQ ID NO: 1886303
ccguaugcacccuauaaca

SEQ ID NO: 2400263 - RNA, 19 nt, Artificial Sequence
  Description of Artificial Sequence: Synthetic oligonucleotide
  Antisense strand to SEQ ID NO: 2400262
uguuauagggugcauacgg

SEQ ID NO: 2400264 - RNA, 19 nt, Artificial Sequence
  Description of Artificial Sequence: Synthetic oligonucleotide
  Sense strand starting at position 3707 of SEQ ID NO: 1886303
gacagaagacuguguggua

SEQ ID NO: 2400265 - RNA, 19 nt, Artificial Sequence
  Description of Artificial Sequence: Synthetic oligonucleotide
  Antisense strand to SEQ ID NO: 2400264
uaccacacagucuucuguc

SEQ ID NO: 2400266 - RNA, 19 nt, Artificial Sequence
  Description of Artificial Sequence: Synthetic oligonucleotide
  Sense strand starting at position 3708 of SEQ ID NO: 1886303
acagaagacugugugguaa

SEQ ID NO: 2400267 - RNA, 19 nt, Artificial Sequence
  Description of Artificial Sequence: Synthetic oligonucleotide
  Antisense strand to SEQ ID NO: 2400266
uuaccacacagucuucugu

SEQ ID NO: 2400268 - RNA, 19 nt, Artificial Sequence
  Description of Artificial Sequence: Synthetic oligonucleotide
  Sense strand starting at position 3861 of SEQ ID NO: 1886303
cgccauccuccugaagacu

SEQ ID NO: 2400269 - RNA, 19 nt, Artificial Sequence
  Description of Artificial Sequence: Synthetic oligonucleotide
  Antisense strand to SEQ ID NO: 2400268
agucuucaggaggauggcg

SEQ ID NO: 2400270 - RNA, 19 nt, Artificial Sequence
  Description of Artificial Sequence: Synthetic oligonucleotide
  Sense strand starting at position 3925 of SEQ ID NO: 1886303
gucccuugacaaggaugaa

SEQ ID NO: 2400271 - RNA, 19 nt, Artificial Sequence
  Description of Artificial Sequence: Synthetic oligonucleotide
  Antisense strand to SEQ ID NO: 2400270
uucauccuugucaagggac

SEQ ID NO: 2400272 - RNA, 19 nt, Artificial Sequence
  Description of Artificial Sequence: Synthetic oligonucleotide
  Sense strand starting at position 3951 of SEQ ID NO: 1886303
gaaagaggugucugggaau

SEQ ID NO: 2400273 - RNA, 19 nt, Artificial Sequence
  Description of Artificial Sequence: Synthetic oligonucleotide
  Antisense strand to SEQ ID NO: 2400272
auucccagacaccucuuuc

SEQ ID NO: 2400274 - RNA, 19 nt, Artificial Sequence
  Description of Artificial Sequence: Synthetic oligonucleotide
  Sense strand starting at position 52 of SEQ ID NO: 1886304
gcagaaaugcauggaugca

SEQ ID NO: 2400275 - RNA, 19 nt, Artificial Sequence
  Description of Artificial Sequence: Synthetic oligonucleotide
  Antisense strand to SEQ ID NO: 2400274
ugcauccaugcauuucugc

SEQ ID NO: 2400276 - RNA, 19 nt, Artificial Sequence
  Description of Artificial Sequence: Synthetic oligonucleotide
  Sense strand starting at position 116 of SEQ ID NO: 1886304
gcuaaagagcacugacauu

SEQ ID NO: 2400277 - RNA, 19 nt, Artificial Sequence
  Description of Artificial Sequence: Synthetic oligonucleotide
  Antisense strand to SEQ ID NO: 2400276
aaugucagugcucuuuagc

SEQ ID NO: 2400278 - RNA, 19 nt, Artificial Sequence
  Description of Artificial Sequence: Synthetic oligonucleotide
  Sense strand starting at position 248 of SEQ ID NO: 1886304
cagggacuccuuugguauc

SEQ ID NO: 2400279 - RNA, 19 nt, Artificial Sequence
  Description of Artificial Sequence: Synthetic oligonucleotide
  Antisense strand to SEQ ID NO: 2400278
gauaccaaaggagucccug

SEQ ID NO: 2400280 - RNA, 19 nt, Artificial Sequence
  Description of Artificial Sequence: Synthetic oligonucleotide
  Sense strand starting at position 903 of SEQ ID NO: 1886304
ggugcuuuggaaugaaauc

SEQ ID NO: 2400281 - RNA, 19 nt, Artificial Sequence
  Description of Artificial Sequence: Synthetic oligonucleotide
  Antisense strand to SEQ ID NO: 2400280
gauuucauuccaaagcacc

SEQ ID NO: 2400282 - RNA, 19 nt, Artificial Sequence
  Description of Artificial Sequence: Synthetic oligonucleotide
  Sense strand starting at position 904 of SEQ ID NO: 1886304
gugcuuuggaaugaaauca

SEQ ID NO: 2400283 - RNA, 19 nt, Artificial Sequence
  Description of Artificial Sequence: Synthetic oligonucleotide
  Antisense strand to SEQ ID NO: 2400282
ugauuucauuccaaagcac

SEQ ID NO: 2400284 - RNA, 19 nt, Artificial Sequence
  Description of Artificial Sequence: Synthetic oligonucleotide
  Sense strand starting at position 957 of SEQ ID NO: 1886304
gaguccacaccauguguuu

SEQ ID NO: 2400285 - RNA, 19 nt, Artificial Sequence
  Description of Artificial Sequence: Synthetic oligonucleotide
  Antisense strand to SEQ ID NO: 2400284
aaacacaugguguggacuc

SEQ ID NO: 2400286 - RNA, 19 nt, Artificial Sequence
  Description of Artificial Sequence: Synthetic oligonucleotide
  Sense strand starting at position 994 of SEQ ID NO: 1886304
cuccaagaaucagacaaga

SEQ ID NO: 2400287 - RNA, 19 nt, Artificial Sequence
  Description of Artificial Sequence: Synthetic oligonucleotide
  Antisense strand to SEQ ID NO: 2400286
ucuugucugauucuuggag

SEQ ID NO: 2400288 - RNA, 19 nt, Artificial Sequence
  Description of Artificial Sequence: Synthetic oligonucleotide
  Sense strand starting at position 1061 of SEQ ID NO: 1886304
cugugaagugcagaggaaa

SEQ ID NO: 2400289 - RNA, 19 nt, Artificial Sequence
  Description of Artificial Sequence: Synthetic oligonucleotide
  Antisense strand to SEQ ID NO: 2400288
uuuccucugcacuucacag

SEQ ID NO: 2400290 - RNA, 19 nt, Artificial Sequence
  Description of Artificial Sequence: Synthetic oligonucleotide
  Sense strand starting at position 1145 of SEQ ID NO: 1886304
ugugacacaucugcuauuu

SEQ ID NO: 2400291 - RNA, 19 nt, Artificial Sequence
  Description of Artificial Sequence: Synthetic oligonucleotide
  Antisense strand to SEQ ID NO: 2400290
aaauagcagaugugucaca

SEQ ID NO: 2400292 - RNA, 19 nt, Artificial Sequence
  Description of Artificial Sequence: Synthetic oligonucleotide
  Sense strand starting at position 1155 of SEQ ID NO: 1886304
cugcuauuugccugucuau

SEQ ID NO: 2400293 - RNA, 19 nt, Artificial Sequence
  Description of Artificial Sequence: Synthetic oligonucleotide
  Antisense strand to SEQ ID NO: 2400292
auagacaggcaaauagcag

SEQ ID NO: 2400294 - RNA, 19 nt, Artificial Sequence
  Description of Artificial Sequence: Synthetic oligonucleotide
  Sense strand starting at position 1309 of SEQ ID NO: 1886304
cugcaauggugcucacaaa

SEQ ID NO: 2400295 - RNA, 19 nt, Artificial Sequence
  Description of Artificial Sequence: Synthetic oligonucleotide
  Antisense strand to SEQ ID NO: 2400294
uuugugagcaccauugcag

SEQ ID NO: 2400296 - RNA, 19 nt, Artificial Sequence
  Description of Artificial Sequence: Synthetic oligonucleotide
  Sense strand starting at position 1368 of SEQ ID NO: 1886304
cuaaaucagguuuggaaua

SEQ ID NO: 2400297 - RNA, 19 nt, Artificial Sequence
  Description of Artificial Sequence: Synthetic oligonucleotide
  Antisense strand to SEQ ID NO: 2400296
uauuccaaaccugauuuag

SEQ ID NO: 2400298 - RNA, 19 nt, Artificial Sequence
  Description of Artificial Sequence: Synthetic oligonucleotide
  Sense strand starting at position 1391 of SEQ ID NO: 1886304
agagacuccuugccugaca

SEQ ID NO: 2400299 - RNA, 19 nt, Artificial Sequence
  Description of Artificial Sequence: Synthetic oligonucleotide
  Antisense strand to SEQ ID NO: 2400298
ugucaggcaaggagucucu

SEQ ID NO: 2400300 - RNA, 19 nt, Artificial Sequence
  Description of Artificial Sequence: Synthetic oligonucleotide
  Sense strand starting at position 1556 of SEQ ID NO: 1886304
gugagaauaguguaggcuu

SEQ ID NO: 2400301 - RNA, 19 nt, Artificial Sequence
  Description of Artificial Sequence: Synthetic oligonucleotide
  Antisense strand to SEQ ID NO: 2400300
aagccuacacuauucucac

SEQ ID NO: 2400302 - RNA, 19 nt, Artificial Sequence
  Description of Artificial Sequence: Synthetic oligonucleotide
  Sense strand starting at position 1598 of SEQ ID NO: 1886304
ucugucuuccucugggaau

SEQ ID NO: 2400303 - RNA, 19 nt, Artificial Sequence
  Description of Artificial Sequence: Synthetic oligonucleotide
  Antisense strand to SEQ ID NO: 2400302
auucccagaggaagacaga

SEQ ID NO: 2400304 - RNA, 19 nt, Artificial Sequence
  Description of Artificial Sequence: Synthetic oligonucleotide
  Sense strand starting at position 1705 of SEQ ID NO: 1886304
ucagacaguaggugaguua

SEQ ID NO: 2400305 - RNA, 19 nt, Artificial Sequence
  Description of Artificial Sequence: Synthetic oligonucleotide
  Antisense strand to SEQ ID NO: 2400304
uaacucaccuacugucuga

SEQ ID NO: 2400306 - RNA, 19 nt, Artificial Sequence
  Description of Artificial Sequence: Synthetic oligonucleotide
  Sense strand starting at position 1706 of SEQ ID NO: 1886304
cagacaguaggugaguuau

SEQ ID NO: 2400307 - RNA, 19 nt, Artificial Sequence
  Description of Artificial Sequence: Synthetic oligonucleotide
  Antisense strand to SEQ ID NO: 2400306
auaacucaccuacugucug

SEQ ID NO: 2400308 - RNA, 19 nt, Artificial Sequence
  Description of Artificial Sequence: Synthetic oligonucleotide
  Sense strand starting at position 2033 of SEQ ID NO: 1886304
aucagagcgcucugggaaa

SEQ ID NO: 2400309 - RNA, 19 nt, Artificial Sequence
  Description of Artificial Sequence: Synthetic oligonucleotide
  Antisense strand to SEQ ID NO: 2400308
uuucccagagcgcucugau

SEQ ID NO: 2400310 - RNA, 19 nt, Artificial Sequence
  Description of Artificial Sequence: Synthetic oligonucleotide
  Sense strand starting at position 2035 of SEQ ID NO: 1886304
cagagcgcucugggaaaga

SEQ ID NO: 2400311 - RNA, 19 nt, Artificial Sequence
  Description of Artificial Sequence: Synthetic oligonucleotide
  Antisense strand to SEQ ID NO: 2400310
ucuuucccagagcgcucug

SEQ ID NO: 2400312 - RNA, 19 nt, Artificial Sequence
  Description of Artificial Sequence: Synthetic oligonucleotide
  Sense strand starting at position 2279 of SEQ ID NO: 1886304
cugcgauacaucuggaauc

SEQ ID NO: 2400313 - RNA, 19 nt, Artificial Sequence
  Description of Artificial Sequence: Synthetic oligonucleotide
  Antisense strand to SEQ ID NO: 2400312
gauuccagauguaucgcag

SEQ ID NO: 2400314 - RNA, 19 nt, Artificial Sequence
  Description of Artificial Sequence: Synthetic oligonucleotide
  Sense strand starting at position 2281 of SEQ ID NO: 1886304
gcgauacaucuggaaucug

SEQ ID NO: 2400315 - RNA, 19 nt, Artificial Sequence
  Description of Artificial Sequence: Synthetic oligonucleotide
  Antisense strand to SEQ ID NO: 2400314
cagauuccagauguaucgc

SEQ ID NO: 2400316 - RNA, 19 nt, Artificial Sequence
  Description of Artificial Sequence: Synthetic oligonucleotide
  Sense strand starting at position 2326 of SEQ ID NO: 1886304
cacagaaaugcacguacau

SEQ ID NO: 2400317 - RNA, 19 nt, Artificial Sequence
  Description of Artificial Sequence: Synthetic oligonucleotide
  Antisense strand to SEQ ID NO: 2400316
auguacgugcauuucugug

SEQ ID NO: 2400318 - RNA, 19 nt, Artificial Sequence
  Description of Artificial Sequence: Synthetic oligonucleotide
  Sense strand starting at position 2381 of SEQ ID NO: 1886304
gcaucaucucgcuaaagag

SEQ ID NO: 2400319 - RNA, 19 nt, Artificial Sequence
  Description of Artificial Sequence: Synthetic oligonucleotide
  Antisense strand to SEQ ID NO: 2400318
cucuuuagcgagaugaugc

SEQ ID NO: 2400320 - RNA, 19 nt, Artificial Sequence
  Description of Artificial Sequence: Synthetic oligonucleotide
  Sense strand starting at position 2391 of SEQ ID NO: 1886304
gcuaaagagcacuaauguu

SEQ ID NO: 2400321 - RNA, 19 nt, Artificial Sequence
  Description of Artificial Sequence: Synthetic oligonucleotide
  Antisense strand to SEQ ID NO: 2400320
aacauuagugcucuuuagc

SEQ ID NO: 2400322 - RNA, 19 nt, Artificial Sequence
  Description of Artificial Sequence: Synthetic oligonucleotide
  Sense strand starting at position 2443 of SEQ ID NO: 1886304
ugcaaugcagcucacaaua

SEQ ID NO: 2400323 - RNA, 19 nt, Artificial Sequence
  Description of Artificial Sequence: Synthetic oligonucleotide
  Antisense strand to SEQ ID NO: 2400322
uauugugagcugcauugca

SEQ ID NO: 2400324 - RNA, 19 nt, Artificial Sequence
  Description of Artificial Sequence: Synthetic oligonucleotide
  Sense strand starting at position 2525 of SEQ ID NO: 1886304
agucucauugccuaucaga

SEQ ID NO: 2400325 - RNA, 19 nt, Artificial Sequence
  Description of Artificial Sequence: Synthetic oligonucleotide
  Antisense strand to SEQ ID NO: 2400324
ucugauaggcaaugagacu

SEQ ID NO: 2400326 - RNA, 19 nt, Artificial Sequence
  Description of Artificial Sequence: Synthetic oligonucleotide
  Sense strand starting at position 2579 of SEQ ID NO: 1886304
caugcaugugcucacaaug

SEQ ID NO: 2400327 - RNA, 19 nt, Artificial Sequence
  Description of Artificial Sequence: Synthetic oligonucleotide
  Antisense strand to SEQ ID NO: 2400326
cauugugagcacaugcaug

SEQ ID NO: 2400328 - RNA, 19 nt, Artificial Sequence
  Description of Artificial Sequence: Synthetic oligonucleotide
  Sense strand starting at position 2863 of SEQ ID NO: 1886304
guacccuggccucacaaau

SEQ ID NO: 2400329 - RNA, 19 nt, Artificial Sequence
  Description of Artificial Sequence: Synthetic oligonucleotide
  Antisense strand to SEQ ID NO: 2400328
auuugugaggccaggguac

SEQ ID NO: 2400330 - RNA, 19 nt, Artificial Sequence
  Description of Artificial Sequence: Synthetic oligonucleotide
  Sense strand starting at position 2897 of SEQ ID NO: 1886304
aggaaucuccuguguacau

SEQ ID NO: 2400331 - RNA, 19 nt, Artificial Sequence
  Description of Artificial Sequence: Synthetic oligonucleotide
  Antisense strand to SEQ ID NO: 2400330
auguacacaggagauuccu

SEQ ID NO: 2400332 - RNA, 19 nt, Artificial Sequence
  Description of Artificial Sequence: Synthetic oligonucleotide
  Sense strand starting at position 2898 of SEQ ID NO: 1886304
ggaaucuccuguguacaua

SEQ ID NO: 2400333 - RNA, 19 nt, Artificial Sequence
  Description of Artificial Sequence: Synthetic oligonucleotide
  Antisense strand to SEQ ID NO: 2400332
uauguacacaggagauucc

SEQ ID NO: 2400334 - RNA, 19 nt, Artificial Sequence
  Description of Artificial Sequence: Synthetic oligonucleotide
  Sense strand starting at position 2987 of SEQ ID NO: 1886304
ugcaaugggcaucaucaaa

SEQ ID NO: 2400335 - RNA, 19 nt, Artificial Sequence
  Description of Artificial Sequence: Synthetic oligonucleotide
  Antisense strand to SEQ ID NO: 2400334
uuugaugaugcccauugca

SEQ ID NO: 2400336 - RNA, 19 nt, Artificial Sequence
  Description of Artificial Sequence: Synthetic oligonucleotide
  Sense strand starting at position 3394 of SEQ ID NO: 1886304
uugcaagggccauacaauu

SEQ ID NO: 2400337 - RNA, 19 nt, Artificial Sequence
  Description of Artificial Sequence: Synthetic oligonucleotide
  Antisense strand to SEQ ID NO: 2400336
aauuguauggcccuugcaa

SEQ ID NO: 2400338 - RNA, 19 nt, Artificial Sequence
  Description of Artificial Sequence: Synthetic oligonucleotide
  Sense strand starting at position 3422 of SEQ ID NO: 1886304
gugguguaucguguaugua

SEQ ID NO: 2400339 - RNA, 19 nt, Artificial Sequence
  Description of Artificial Sequence: Synthetic oligonucleotide
  Antisense strand to SEQ ID NO: 2400338
uacauacacgauacaccac

SEQ ID NO: 2400340 - RNA, 19 nt, Artificial Sequence
  Description of Artificial Sequence: Synthetic oligonucleotide
  Sense strand starting at position 3424 of SEQ ID NO: 1886304
gguguaucguguauguauc

SEQ ID NO: 2400341 - RNA, 19 nt, Artificial Sequence
  Description of Artificial Sequence: Synthetic oligonucleotide
  Antisense strand to SEQ ID NO: 2400340
gauacauacacgauacacc

SEQ ID NO: 2400342 - RNA, 19 nt, Artificial Sequence
  Description of Artificial Sequence: Synthetic oligonucleotide
  Sense strand starting at position 3662 of SEQ ID NO: 1886304
aggaaagccucuucuugag

SEQ ID NO: 2400343 - RNA, 19 nt, Artificial Sequence
  Description of Artificial Sequence: Synthetic oligonucleotide
  Antisense strand to SEQ ID NO: 2400342
cucaagaagaggcuuuccu

SEQ ID NO: 2400344 - RNA, 19 nt, Artificial Sequence
  Description of Artificial Sequence: Synthetic oligonucleotide
  Sense strand starting at position 3666 of SEQ ID NO: 1886304
aagccucuucuugagugaa

SEQ ID NO: 2400345 - RNA, 19 nt, Artificial Sequence
  Description of Artificial Sequence: Synthetic oligonucleotide
  Antisense strand to SEQ ID NO: 2400344
uucacucaagaagaggcuu

SEQ ID NO: 2400346 - RNA, 19 nt, Artificial Sequence
  Description of Artificial Sequence: Synthetic oligonucleotide
  Sense strand starting at position 3674 of SEQ ID NO: 1886304
ucuugagugaagggcaauu

SEQ ID NO: 2400347 - RNA, 19 nt, Artificial Sequence
  Description of Artificial Sequence: Synthetic oligonucleotide
  Antisense strand to SEQ ID NO: 2400346
aauugcccuucacucaaga

SEQ ID NO: 2400348 - RNA, 19 nt, Artificial Sequence
  Description of Artificial Sequence: Synthetic oligonucleotide
  Sense strand starting at position 3746 of SEQ ID NO: 1886304
ugagaaacaugcucaauca

SEQ ID NO: 2400349 - RNA, 19 nt, Artificial Sequence
  Description of Artificial Sequence: Synthetic oligonucleotide
  Antisense strand to SEQ ID NO: 2400348
ugauugagcauguuucuca

SEQ ID NO: 2400350 - RNA, 19 nt, Artificial Sequence
  Description of Artificial Sequence: Synthetic oligonucleotide
  Sense strand starting at position 3944 of SEQ ID NO: 1886304
agacacuagcccugucaua

SEQ ID NO: 2400351 - RNA, 19 nt, Artificial Sequence
  Description of Artificial Sequence: Synthetic oligonucleotide
  Antisense strand to SEQ ID NO: 2400350
uaugacagggcuagugucu

SEQ ID NO: 2400352 - RNA, 19 nt, Artificial Sequence
  Description of Artificial Sequence: Synthetic oligonucleotide
  Sense strand starting at position 3982 of SEQ ID NO: 1886304
caaagacuugugugaauug

SEQ ID NO: 2400353 - RNA, 19 nt, Artificial Sequence
  Description of Artificial Sequence: Synthetic oligonucleotide
  Antisense strand to SEQ ID NO: 2400352
caauucacacaagucuuug

SEQ ID NO: 2400354 - RNA, 19 nt, Artificial Sequence
  Description of Artificial Sequence: Synthetic oligonucleotide
  Sense strand starting at position 3 of SEQ ID NO: 1886305
ugugacacaucugcuauuu

SEQ ID NO: 2400355 - RNA, 19 nt, Artificial Sequence
  Description of Artificial Sequence: Synthetic oligonucleotide
  Antisense strand to SEQ ID NO: 2400354
aaauagcagaugugucaca

SEQ ID NO: 2400356 - RNA, 19 nt, Artificial Sequence
  Description of Artificial Sequence: Synthetic oligonucleotide
  Sense strand starting at position 13 of SEQ ID NO: 1886305
cugcuauuugccugucuau

SEQ ID NO: 2400357 - RNA, 19 nt, Artificial Sequence
  Description of Artificial Sequence: Synthetic oligonucleotide
  Antisense strand to SEQ ID NO: 2400356
auagacaggcaaauagcag

SEQ ID NO: 2400358 - RNA, 19 nt, Artificial Sequence
  Description of Artificial Sequence: Synthetic oligonucleotide
  Sense strand starting at position 226 of SEQ ID NO: 1886305
cuaaaucagguuuggaaua

SEQ ID NO: 2400359 - RNA, 19 nt, Artificial Sequence
  Description of Artificial Sequence: Synthetic oligonucleotide
  Antisense strand to SEQ ID NO: 2400358
uauuccaaaccugauuuag

SEQ ID NO: 2400360 - RNA, 19 nt, Artificial Sequence
  Description of Artificial Sequence: Synthetic oligonucleotide
  Sense strand starting at position 249 of SEQ ID NO: 1886305
agagacuccuugccugaca

SEQ ID NO: 2400361 - RNA, 19 nt, Artificial Sequence
  Description of Artificial Sequence: Synthetic oligonucleotide
  Antisense strand to SEQ ID NO: 2400360
ugucaggcaaggagucucu

SEQ ID NO: 2400362 - RNA, 19 nt, Artificial Sequence
  Description of Artificial Sequence: Synthetic oligonucleotide
  Sense strand starting at position 414 of SEQ ID NO: 1886305
gugagaauaguguaggcuu

SEQ ID NO: 2400363 - RNA, 19 nt, Artificial Sequence
  Description of Artificial Sequence: Synthetic oligonucleotide
  Antisense strand to SEQ ID NO: 2400362
aagccuacacuauucucac

SEQ ID NO: 2400364 - RNA, 19 nt, Artificial Sequence
  Description of Artificial Sequence: Synthetic oligonucleotide
  Sense strand starting at position 563 of SEQ ID NO: 1886305
ucagacaguaggugaguua

SEQ ID NO: 2400365 - RNA, 19 nt, Artificial Sequence
  Description of Artificial Sequence: Synthetic oligonucleotide
  Antisense strand to SEQ ID NO: 2400364
uaacucaccuacugucuga

SEQ ID NO: 2400366 - RNA, 19 nt, Artificial Sequence
  Description of Artificial Sequence: Synthetic oligonucleotide
  Sense strand starting at position 564 of SEQ ID NO: 1886305
cagacaguaggugaguuau

SEQ ID NO: 2400367 - RNA, 19 nt, Artificial Sequence
  Description of Artificial Sequence: Synthetic oligonucleotide
  Antisense strand to SEQ ID NO: 2400366
auaacucaccuacugucug

SEQ ID NO: 2400368 - RNA, 19 nt, Artificial Sequence
  Description of Artificial Sequence: Synthetic oligonucleotide
  Sense strand starting at position 893 of SEQ ID NO: 1886305
cagagcgcucugggaaaga

SEQ ID NO: 2400369 - RNA, 19 nt, Artificial Sequence
  Description of Artificial Sequence: Synthetic oligonucleotide
  Antisense strand to SEQ ID NO: 2400368
ucuuucccagagcgcucug

SEQ ID NO: 2400370 - RNA, 19 nt, Artificial Sequence
  Description of Artificial Sequence: Synthetic oligonucleotide
  Sense strand starting at position 1137 of SEQ ID NO: 1886305
cugcgauacaucuggaauc

SEQ ID NO: 2400371 - RNA, 19 nt, Artificial Sequence
  Description of Artificial Sequence: Synthetic oligonucleotide
  Antisense strand to SEQ ID NO: 2400370
gauuccagauguaucgcag

SEQ ID NO: 2400372 - RNA, 19 nt, Artificial Sequence
  Description of Artificial Sequence: Synthetic oligonucleotide
  Sense strand starting at position 1139 of SEQ ID NO: 1886305
gcgauacaucuggaaucug

SEQ ID NO: 2400373 - RNA, 19 nt, Artificial Sequence
  Description of Artificial Sequence: Synthetic oligonucleotide
  Antisense strand to SEQ ID NO: 2400372
cagauuccagauguaucgc

SEQ ID NO: 2400374 - RNA, 19 nt, Artificial Sequence
  Description of Artificial Sequence: Synthetic oligonucleotide
  Sense strand starting at position 1184 of SEQ ID NO: 1886305
cacagaaaugcacguacau

SEQ ID NO: 2400375 - RNA, 19 nt, Artificial Sequence
  Description of Artificial Sequence: Synthetic oligonucleotide
  Antisense strand to SEQ ID NO: 2400374
auguacgugcauuucugug

SEQ ID NO: 2400376 - RNA, 19 nt, Artificial Sequence
  Description of Artificial Sequence: Synthetic oligonucleotide
  Sense strand starting at position 1239 of SEQ ID NO: 1886305
gcaucaucucgcuaaagag

SEQ ID NO: 2400377 - RNA, 19 nt, Artificial Sequence
  Description of Artificial Sequence: Synthetic oligonucleotide
  Antisense strand to SEQ ID NO: 2400376
cucuuuagcgagaugaugc

SEQ ID NO: 2400378 - RNA, 19 nt, Artificial Sequence
  Description of Artificial Sequence: Synthetic oligonucleotide
  Sense strand starting at position 1249 of SEQ ID NO: 1886305
gcuaaagagcacuaauguu

SEQ ID NO: 2400379 - RNA, 19 nt, Artificial Sequence
  Description of Artificial Sequence: Synthetic oligonucleotide
  Antisense strand to SEQ ID NO: 2400378
aacauuagugcucuuuagc

SEQ ID NO: 2400380 - RNA, 19 nt, Artificial Sequence
  Description of Artificial Sequence: Synthetic oligonucleotide
  Sense strand starting at position 1301 of SEQ ID NO: 1886305
ugcaaugcagcucacaaua

SEQ ID NO: 2400381 - RNA, 19 nt, Artificial Sequence
  Description of Artificial Sequence: Synthetic oligonucleotide
  Antisense strand to SEQ ID NO: 2400380
uauugugagcugcauugca

SEQ ID NO: 2400382 - RNA, 19 nt, Artificial Sequence
  Description of Artificial Sequence: Synthetic oligonucleotide
  Sense strand starting at position 1383 of SEQ ID NO: 1886305
agucucauugccuaucaga

SEQ ID NO: 2400383 - RNA, 19 nt, Artificial Sequence
  Description of Artificial Sequence: Synthetic oligonucleotide
  Antisense strand to SEQ ID NO: 2400382
ucugauaggcaaugagacu

SEQ ID NO: 2400384 - RNA, 19 nt, Artificial Sequence
  Description of Artificial Sequence: Synthetic oligonucleotide
  Sense strand starting at position 1437 of SEQ ID NO: 1886305
caugcaugugcucacaaug

SEQ ID NO: 2400385 - RNA, 19 nt, Artificial Sequence
  Description of Artificial Sequence: Synthetic oligonucleotide
  Antisense strand to SEQ ID NO: 2400384
cauugugagcacaugcaug

SEQ ID NO: 2400386 - RNA, 19 nt, Artificial Sequence
  Description of Artificial Sequence: Synthetic oligonucleotide
  Sense strand starting at position 1721 of SEQ ID NO: 1886305
guacccuggccucacaaau

SEQ ID NO: 2400387 - RNA, 19 nt, Artificial Sequence
  Description of Artificial Sequence: Synthetic oligonucleotide
  Antisense strand to SEQ ID NO: 2400386
auuugugaggccaggguac

SEQ ID NO: 2400388 - RNA, 19 nt, Artificial Sequence
  Description of Artificial Sequence: Synthetic oligonucleotide
  Sense strand starting at position 1755 of SEQ ID NO: 1886305
aggaaucuccuguguacau

SEQ ID NO: 2400389 - RNA, 19 nt, Artificial Sequence
  Description of Artificial Sequence: Synthetic oligonucleotide
  Antisense strand to SEQ ID NO: 2400388
auguacacaggagauuccu

SEQ ID NO: 2400390 - RNA, 19 nt, Artificial Sequence
  Description of Artificial Sequence: Synthetic oligonucleotide
  Sense strand starting at position 1756 of SEQ ID NO: 1886305
ggaaucuccuguguacaua

SEQ ID NO: 2400391 - RNA, 19 nt, Artificial Sequence
  Description of Artificial Sequence: Synthetic oligonucleotide
  Antisense strand to SEQ ID NO: 2400390
uauguacacaggagauucc

SEQ ID NO: 2400392 - RNA, 19 nt, Artificial Sequence
  Description of Artificial Sequence: Synthetic oligonucleotide
  Sense strand starting at position 1845 of SEQ ID NO: 1886305
ugcaaugggcaucaucaaa

SEQ ID NO: 2400393 - RNA, 19 nt, Artificial Sequence
  Description of Artificial Sequence: Synthetic oligonucleotide
  Antisense strand to SEQ ID NO: 2400392
uuugaugaugcccauugca

SEQ ID NO: 2400394 - RNA, 19 nt, Artificial Sequence
  Description of Artificial Sequence: Synthetic oligonucleotide
  Sense strand starting at position 2252 of SEQ ID NO: 1886305
uugcaagggccauacaauu

SEQ ID NO: 2400395 - RNA, 19 nt, Artificial Sequence
  Description of Artificial Sequence: Synthetic oligonucleotide
  Antisense strand to SEQ ID NO: 2400394
aauuguauggcccuugcaa

SEQ ID NO: 2400396 - RNA, 19 nt, Artificial Sequence
  Description of Artificial Sequence: Synthetic oligonucleotide
  Sense strand starting at position 2280 of SEQ ID NO: 1886305
gugguguaucguguaugua

SEQ ID NO: 2400397 - RNA, 19 nt, Artificial Sequence
  Description of Artificial Sequence: Synthetic oligonucleotide
  Antisense strand to SEQ ID NO: 2400396
uacauacacgauacaccac

SEQ ID NO: 2400398 - RNA, 19 nt, Artificial Sequence
  Description of Artificial Sequence: Synthetic oligonucleotide
  Sense strand starting at position 2282 of SEQ ID NO: 1886305
gguguaucguguauguauc

SEQ ID NO: 2400399 - RNA, 19 nt, Artificial Sequence
  Description of Artificial Sequence: Synthetic oligonucleotide
  Antisense strand to SEQ ID NO: 2400398
gauacauacacgauacacc

SEQ ID NO: 2400400 - RNA, 19 nt, Artificial Sequence
  Description of Artificial Sequence: Synthetic oligonucleotide
  Sense strand starting at position 2520 of SEQ ID NO: 1886305
aggaaagccucuucuugag

SEQ ID NO: 2400401 - RNA, 19 nt, Artificial Sequence
  Description of Artificial Sequence: Synthetic oligonucleotide
  Antisense strand to SEQ ID NO: 2400400
cucaagaagaggcuuuccu

SEQ ID NO: 2400402 - RNA, 19 nt, Artificial Sequence
  Description of Artificial Sequence: Synthetic oligonucleotide
  Sense strand starting at position 2524 of SEQ ID NO: 1886305
aagccucuucuugagugaa

SEQ ID NO: 2400403 - RNA, 19 nt, Artificial Sequence
  Description of Artificial Sequence: Synthetic oligonucleotide
  Antisense strand to SEQ ID NO: 2400402
uucacucaagaagaggcuu

SEQ ID NO: 2400404 - RNA, 19 nt, Artificial Sequence
  Description of Artificial Sequence: Synthetic oligonucleotide
  Sense strand starting at position 2532 of SEQ ID NO: 1886305
ucuugagugaagggcaauu

SEQ ID NO: 2400405 - RNA, 19 nt, Artificial Sequence
  Description of Artificial Sequence: Synthetic oligonucleotide
  Antisense strand to SEQ ID NO: 2400404
aauugcccuucacucaaga

SEQ ID NO: 2400406 - RNA, 19 nt, Artificial Sequence
  Description of Artificial Sequence: Synthetic oligonucleotide
  Sense strand starting at position 2604 of SEQ ID NO: 1886305
ugagaaacaugcucaauca

SEQ ID NO: 2400407 - RNA, 19 nt, Artificial Sequence
  Description of Artificial Sequence: Synthetic oligonucleotide
  Antisense strand to SEQ ID NO: 2400406
ugauugagcauguuucuca

SEQ ID NO: 2400408 - RNA, 19 nt, Artificial Sequence
  Description of Artificial Sequence: Synthetic oligonucleotide
  Sense strand starting at position 2802 of SEQ ID NO: 1886305
agacacuagcccugucaua

SEQ ID NO: 2400409 - RNA, 19 nt, Artificial Sequence
  Description of Artificial Sequence: Synthetic oligonucleotide
  Antisense strand to SEQ ID NO: 2400408
uaugacagggcuagugucu

SEQ ID NO: 2400410 - RNA, 19 nt, Artificial Sequence
  Description of Artificial Sequence: Synthetic oligonucleotide
  Sense strand starting at position 2840 of SEQ ID NO: 1886305
caaagacuugugugaauug

SEQ ID NO: 2400411 - RNA, 19 nt, Artificial Sequence
  Description of Artificial Sequence: Synthetic oligonucleotide
  Antisense strand to SEQ ID NO: 2400410
caauucacacaagucuuug

SEQ ID NO: 2400412 - RNA, 19 nt, Artificial Sequence
  Description of Artificial Sequence: Synthetic oligonucleotide
  Sense strand starting at position 3055 of SEQ ID NO: 1886305
ccaagucagucugcagaga

SEQ ID NO: 2400413 - RNA, 19 nt, Artificial Sequence
  Description of Artificial Sequence: Synthetic oligonucleotide
  Antisense strand to SEQ ID NO: 2400412
ucucugcagacugacuugg

SEQ ID NO: 2400414 - RNA, 19 nt, Artificial Sequence
  Description of Artificial Sequence: Synthetic oligonucleotide
  Sense strand starting at position 3056 of SEQ ID NO: 1886305
caagucagucugcagagau

SEQ ID NO: 2400415 - RNA, 19 nt, Artificial Sequence
  Description of Artificial Sequence: Synthetic oligonucleotide
  Antisense strand to SEQ ID NO: 2400414
aucucugcagacugacuug

SEQ ID NO: 2400416 - RNA, 19 nt, Artificial Sequence
  Description of Artificial Sequence: Synthetic oligonucleotide
  Sense strand starting at position 3171 of SEQ ID NO: 1886305
cacagucgucgcucuguga

SEQ ID NO: 2400417 - RNA, 19 nt, Artificial Sequence
  Description of Artificial Sequence: Synthetic oligonucleotide
  Antisense strand to SEQ ID NO: 2400416
ucacagagcgacgacugug

SEQ ID NO: 2400418 - RNA, 19 nt, Artificial Sequence
  Description of Artificial Sequence: Synthetic oligonucleotide
  Sense strand starting at position 3319 of SEQ ID NO: 1886305
ugggcuucucugcagaaag

SEQ ID NO: 2400419 - RNA, 19 nt, Artificial Sequence
  Description of Artificial Sequence: Synthetic oligonucleotide
  Antisense strand to SEQ ID NO: 2400418
cuuucugcagagaagccca

SEQ ID NO: 2400420 - RNA, 19 nt, Artificial Sequence
  Description of Artificial Sequence: Synthetic oligonucleotide
  Sense strand starting at position 3321 of SEQ ID NO: 1886305
ggcuucucugcagaaagca

SEQ ID NO: 2400421 - RNA, 19 nt, Artificial Sequence
  Description of Artificial Sequence: Synthetic oligonucleotide
  Antisense strand to SEQ ID NO: 2400420
ugcuuucugcagagaagcc

SEQ ID NO: 2400422 - RNA, 19 nt, Artificial Sequence
  Description of Artificial Sequence: Synthetic oligonucleotide
  Sense strand starting at position 3366 of SEQ ID NO: 1886305
cugccugcccuugaugaua

SEQ ID NO: 2400423 - RNA, 19 nt, Artificial Sequence
  Description of Artificial Sequence: Synthetic oligonucleotide
  Antisense strand to SEQ ID NO: 2400422
uaucaucaagggcaggcag

SEQ ID NO: 2400424 - RNA, 19 nt, Artificial Sequence
  Description of Artificial Sequence: Synthetic oligonucleotide
  Sense strand starting at position 3436 of SEQ ID NO: 1886305
gaagaagugccugggaaca

SEQ ID NO: 2400425 - RNA, 19 nt, Artificial Sequence
  Description of Artificial Sequence: Synthetic oligonucleotide
  Antisense strand to SEQ ID NO: 2400424
uguucccaggcacuucuuc

SEQ ID NO: 2400426 - RNA, 19 nt, Artificial Sequence
  Description of Artificial Sequence: Synthetic oligonucleotide
  Sense strand starting at position 3791 of SEQ ID NO: 1886305
ucgauccaugcacauuauu

SEQ ID NO: 2400427 - RNA, 19 nt, Artificial Sequence
  Description of Artificial Sequence: Synthetic oligonucleotide
  Antisense strand to SEQ ID NO: 2400426
aauaaugugcauggaucga

SEQ ID NO: 2400428 - RNA, 19 nt, Artificial Sequence
  Description of Artificial Sequence: Synthetic oligonucleotide
  Sense strand starting at position 3941 of SEQ ID NO: 1886305
gaagaagauugucccucga

SEQ ID NO: 2400429 - RNA, 19 nt, Artificial Sequence
  Description of Artificial Sequence: Synthetic oligonucleotide
  Antisense strand to SEQ ID NO: 2400428
ucgagggacaaucuucuuc

SEQ ID NO: 2400430 - RNA, 19 nt, Artificial Sequence
  Description of Artificial Sequence: Synthetic oligonucleotide
  Sense strand starting at position 3943 of SEQ ID NO: 1886305
agaagauugucccucgaag

SEQ ID NO: 2400431 - RNA, 19 nt, Artificial Sequence
  Description of Artificial Sequence: Synthetic oligonucleotide
  Antisense strand to SEQ ID NO: 2400430
cuucgagggacaaucuucu

SEQ ID NO: 2400432 - RNA, 19 nt, Artificial Sequence
  Description of Artificial Sequence: Synthetic oligonucleotide
  Sense strand starting at position 3945 of SEQ ID NO: 1886305
aagauugucccucgaagau

SEQ ID NO: 2400433 - RNA, 19 nt, Artificial Sequence
  Description of Artificial Sequence: Synthetic oligonucleotide
  Antisense strand to SEQ ID NO: 2400432
aucuucgagggacaaucuu

SEQ ID NO: 2400434 - RNA, 19 nt, Artificial Sequence
  Description of Artificial Sequence: Synthetic oligonucleotide
  Sense strand starting at position 48 of SEQ ID NO: 1886306
ugcaaugggcaucaucaaa

SEQ ID NO: 2400435 - RNA, 19 nt, Artificial Sequence
  Description of Artificial Sequence: Synthetic oligonucleotide
  Antisense strand to SEQ ID NO: 2400434
uuugaugaugcccauugca

SEQ ID NO: 2400436 - RNA, 19 nt, Artificial Sequence
  Description of Artificial Sequence: Synthetic oligonucleotide
  Sense strand starting at position 455 of SEQ ID NO: 1886306
uugcaagggccauacaauu

SEQ ID NO: 2400437 - RNA, 19 nt, Artificial Sequence
  Description of Artificial Sequence: Synthetic oligonucleotide
  Antisense strand to SEQ ID NO: 2400436
aauuguauggcccuugcaa

SEQ ID NO: 2400438 - RNA, 19 nt, Artificial Sequence
  Description of Artificial Sequence: Synthetic oligonucleotide
  Sense strand starting at position 483 of SEQ ID NO: 1886306
gugguguaucguguaugua

SEQ ID NO: 2400439 - RNA, 19 nt, Artificial Sequence
  Description of Artificial Sequence: Synthetic oligonucleotide
  Antisense strand to SEQ ID NO: 2400438
uacauacacgauacaccac

SEQ ID NO: 2400440 - RNA, 19 nt, Artificial Sequence
  Description of Artificial Sequence: Synthetic oligonucleotide
  Sense strand starting at position 485 of SEQ ID NO: 1886306
gguguaucguguauguauc

SEQ ID NO: 2400441 - RNA, 19 nt, Artificial Sequence
  Description of Artificial Sequence: Synthetic oligonucleotide
  Antisense strand to SEQ ID NO: 2400440
gauacauacacgauacacc

SEQ ID NO: 2400442 - RNA, 19 nt, Artificial Sequence
  Description of Artificial Sequence: Synthetic oligonucleotide
  Sense strand starting at position 723 of SEQ ID NO: 1886306
aggaaagccucuucuugag

SEQ ID NO: 2400443 - RNA, 19 nt, Artificial Sequence
  Description of Artificial Sequence: Synthetic oligonucleotide
  Antisense strand to SEQ ID NO: 2400442
cucaagaagaggcuuuccu

SEQ ID NO: 2400444 - RNA, 19 nt, Artificial Sequence
  Description of Artificial Sequence: Synthetic oligonucleotide
  Sense strand starting at position 727 of SEQ ID NO: 1886306
aagccucuucuugagugaa

SEQ ID NO: 2400445 - RNA, 19 nt, Artificial Sequence
  Description of Artificial Sequence: Synthetic oligonucleotide
  Antisense strand to SEQ ID NO: 2400444
uucacucaagaagaggcuu

SEQ ID NO: 2400446 - RNA, 19 nt, Artificial Sequence
  Description of Artificial Sequence: Synthetic oligonucleotide
  Sense strand starting at position 735 of SEQ ID NO: 1886306
ucuugagugaagggcaauu

SEQ ID NO: 2400447 - RNA, 19 nt, Artificial Sequence
  Description of Artificial Sequence: Synthetic oligonucleotide
  Antisense strand to SEQ ID NO: 2400446
aauugcccuucacucaaga

SEQ ID NO: 2400448 - RNA, 19 nt, Artificial Sequence
  Description of Artificial Sequence: Synthetic oligonucleotide
  Sense strand starting at position 807 of SEQ ID NO: 1886306
ugagaaacaugcucaauca

SEQ ID NO: 2400449 - RNA, 19 nt, Artificial Sequence
  Description of Artificial Sequence: Synthetic oligonucleotide
  Antisense strand to SEQ ID NO: 2400448
ugauugagcauguuucuca

SEQ ID NO: 2400450 - RNA, 19 nt, Artificial Sequence
  Description of Artificial Sequence: Synthetic oligonucleotide
  Sense strand starting at position 1005 of SEQ ID NO: 1886306
agacacuagcccugucaua

SEQ ID NO: 2400451 - RNA, 19 nt, Artificial Sequence
  Description of Artificial Sequence: Synthetic oligonucleotide
  Antisense strand to SEQ ID NO: 2400450
uaugacagggcuagugucu

SEQ ID NO: 2400452 - RNA, 19 nt, Artificial Sequence
  Description of Artificial Sequence: Synthetic oligonucleotide
  Sense strand starting at position 1043 of SEQ ID NO: 1886306
caaagacuugugugaauug

SEQ ID NO: 2400453 - RNA, 19 nt, Artificial Sequence
  Description of Artificial Sequence: Synthetic oligonucleotide
  Antisense strand to SEQ ID NO: 2400452
caauucacacaagucuuug

SEQ ID NO: 2400454 - RNA, 19 nt, Artificial Sequence
  Description of Artificial Sequence: Synthetic oligonucleotide
  Sense strand starting at position 1258 of SEQ ID NO: 1886306
ccaagucagucugcagaga

SEQ ID NO: 2400455 - RNA, 19 nt, Artificial Sequence
  Description of Artificial Sequence: Synthetic oligonucleotide
  Antisense strand to SEQ ID NO: 2400454
ucucugcagacugacuugg

SEQ ID NO: 2400456 - RNA, 19 nt, Artificial Sequence
  Description of Artificial Sequence: Synthetic oligonucleotide
  Sense strand starting at position 1259 of SEQ ID NO: 1886306
caagucagucugcagagau

SEQ ID NO: 2400457 - RNA, 19 nt, Artificial Sequence
  Description of Artificial Sequence: Synthetic oligonucleotide
  Antisense strand to SEQ ID NO: 2400456
aucucugcagacugacuug

SEQ ID NO: 2400458 - RNA, 19 nt, Artificial Sequence
  Description of Artificial Sequence: Synthetic oligonucleotide
  Sense strand starting at position 1374 of SEQ ID NO: 1886306
cacagucgucgcucuguga

SEQ ID NO: 2400459 - RNA, 19 nt, Artificial Sequence
  Description of Artificial Sequence: Synthetic oligonucleotide
  Antisense strand to SEQ ID NO: 2400458
ucacagagcgacgacugug

SEQ ID NO: 2400460 - RNA, 19 nt, Artificial Sequence
  Description of Artificial Sequence: Synthetic oligonucleotide
  Sense strand starting at position 1522 of SEQ ID NO: 1886306
ugggcuucucugcagaaag

SEQ ID NO: 2400461 - RNA, 19 nt, Artificial Sequence
  Description of Artificial Sequence: Synthetic oligonucleotide
  Antisense strand to SEQ ID NO: 2400460
cuuucugcagagaagccca

SEQ ID NO: 2400462 - RNA, 19 nt, Artificial Sequence
  Description of Artificial Sequence: Synthetic oligonucleotide
  Sense strand starting at position 1524 of SEQ ID NO: 1886306
ggcuucucugcagaaagca

SEQ ID NO: 2400463 - RNA, 19 nt, Artificial Sequence
  Description of Artificial Sequence: Synthetic oligonucleotide
  Antisense strand to SEQ ID NO: 2400462
ugcuuucugcagagaagcc

SEQ ID NO: 2400464 - RNA, 19 nt, Artificial Sequence
  Description of Artificial Sequence: Synthetic oligonucleotide
  Sense strand starting at position 1569 of SEQ ID NO: 1886306
cugccugcccuugaugaua

SEQ ID NO: 2400465 - RNA, 19 nt, Artificial Sequence
  Description of Artificial Sequence: Synthetic oligonucleotide
  Antisense strand to SEQ ID NO: 2400464
uaucaucaagggcaggcag

SEQ ID NO: 2400466 - RNA, 19 nt, Artificial Sequence
  Description of Artificial Sequence: Synthetic oligonucleotide
  Sense strand starting at position 1639 of SEQ ID NO: 1886306
gaagaagugccugggaaca

SEQ ID NO: 2400467 - RNA, 19 nt, Artificial Sequence
  Description of Artificial Sequence: Synthetic oligonucleotide
  Antisense strand to SEQ ID NO: 2400466
uguucccaggcacuucuuc

SEQ ID NO: 2400468 - RNA, 19 nt, Artificial Sequence
  Description of Artificial Sequence: Synthetic oligonucleotide
  Sense strand starting at position 1994 of SEQ ID NO: 1886306
ucgauccaugcacauuauu

SEQ ID NO: 2400469 - RNA, 19 nt, Artificial Sequence
  Description of Artificial Sequence: Synthetic oligonucleotide
  Antisense strand to SEQ ID NO: 2400468
aauaaugugcauggaucga

SEQ ID NO: 2400470 - RNA, 19 nt, Artificial Sequence
  Description of Artificial Sequence: Synthetic oligonucleotide
  Sense strand starting at position 2144 of SEQ ID NO: 1886306
gaagaagauugucccucga

SEQ ID NO: 2400471 - RNA, 19 nt, Artificial Sequence
  Description of Artificial Sequence: Synthetic oligonucleotide
  Antisense strand to SEQ ID NO: 2400470
ucgagggacaaucuucuuc

SEQ ID NO: 2400472 - RNA, 19 nt, Artificial Sequence
  Description of Artificial Sequence: Synthetic oligonucleotide
  Sense strand starting at position 2146 of SEQ ID NO: 1886306
agaagauugucccucgaag

SEQ ID NO: 2400473 - RNA, 19 nt, Artificial Sequence
  Description of Artificial Sequence: Synthetic oligonucleotide
  Antisense strand to SEQ ID NO: 2400472
cuucgagggacaaucuucu

SEQ ID NO: 2400474 - RNA, 19 nt, Artificial Sequence
  Description of Artificial Sequence: Synthetic oligonucleotide
  Sense strand starting at position 2148 of SEQ ID NO: 1886306
aagauugucccucgaagau

SEQ ID NO: 2400475 - RNA, 19 nt, Artificial Sequence
  Description of Artificial Sequence: Synthetic oligonucleotide
  Antisense strand to SEQ ID NO: 2400474
aucuucgagggacaaucuu

SEQ ID NO: 2400476 - RNA, 19 nt, Artificial Sequence
  Description of Artificial Sequence: Synthetic oligonucleotide
  Sense strand starting at position 2333 of SEQ ID NO: 1886306
acugcaauguccuugaaca

SEQ ID NO: 2400477 - RNA, 19 nt, Artificial Sequence
  Description of Artificial Sequence: Synthetic oligonucleotide
  Antisense strand to SEQ ID NO: 2400476
uguucaaggacauugcagu

SEQ ID NO: 2400478 - RNA, 19 nt, Artificial Sequence
  Description of Artificial Sequence: Synthetic oligonucleotide
  Sense strand starting at position 2334 of SEQ ID NO: 1886306
cugcaauguccuugaacaa

SEQ ID NO: 2400479 - RNA, 19 nt, Artificial Sequence
  Description of Artificial Sequence: Synthetic oligonucleotide
  Antisense strand to SEQ ID NO: 2400478
uuguucaaggacauugcag

SEQ ID NO: 2400480 - RNA, 19 nt, Artificial Sequence
  Description of Artificial Sequence: Synthetic oligonucleotide
  Sense strand starting at position 2335 of SEQ ID NO: 1886306
ugcaauguccuugaacaau

SEQ ID NO: 2400481 - RNA, 19 nt, Artificial Sequence
  Description of Artificial Sequence: Synthetic oligonucleotide
  Antisense strand to SEQ ID NO: 2400480
auuguucaaggacauugca

SEQ ID NO: 2400482 - RNA, 19 nt, Artificial Sequence
  Description of Artificial Sequence: Synthetic oligonucleotide
  Sense strand starting at position 2341 of SEQ ID NO: 1886306
guccuugaacaaugaugaa

SEQ ID NO: 2400483 - RNA, 19 nt, Artificial Sequence
  Description of Artificial Sequence: Synthetic oligonucleotide
  Antisense strand to SEQ ID NO: 2400482
uucaucauuguucaaggac

SEQ ID NO: 2400484 - RNA, 19 nt, Artificial Sequence
  Description of Artificial Sequence: Synthetic oligonucleotide
  Sense strand starting at position 2417 of SEQ ID NO: 1886306
ccugucuuuccucaaggga

SEQ ID NO: 2400485 - RNA, 19 nt, Artificial Sequence
  Description of Artificial Sequence: Synthetic oligonucleotide
  Antisense strand to SEQ ID NO: 2400484
ucccuugaggaaagacagg

SEQ ID NO: 2400486 - RNA, 19 nt, Artificial Sequence
  Description of Artificial Sequence: Synthetic oligonucleotide
  Sense strand starting at position 2420 of SEQ ID NO: 1886306
gucuuuccucaagggaaug

SEQ ID NO: 2400487 - RNA, 19 nt, Artificial Sequence
  Description of Artificial Sequence: Synthetic oligonucleotide
  Antisense strand to SEQ ID NO: 2400486
cauucccuugaggaaagac

SEQ ID NO: 2400488 - RNA, 19 nt, Artificial Sequence
  Description of Artificial Sequence: Synthetic oligonucleotide
  Sense strand starting at position 2553 of SEQ ID NO: 1886306
uuaccuugcagagagaagu

SEQ ID NO: 2400489 - RNA, 19 nt, Artificial Sequence
  Description of Artificial Sequence: Synthetic oligonucleotide
  Antisense strand to SEQ ID NO: 2400488
acuucucucugcaagguaa

SEQ ID NO: 2400490 - RNA, 19 nt, Artificial Sequence
  Description of Artificial Sequence: Synthetic oligonucleotide
  Sense strand starting at position 2583 of SEQ ID NO: 1886306
uuuccuauuuaugagagau

SEQ ID NO: 2400491 - RNA, 19 nt, Artificial Sequence
  Description of Artificial Sequence: Synthetic oligonucleotide
  Antisense strand to SEQ ID NO: 2400490
aucucucauaaauaggaaa

SEQ ID NO: 2400492 - RNA, 19 nt, Artificial Sequence
  Description of Artificial Sequence: Synthetic oligonucleotide
  Sense strand starting at position 2585 of SEQ ID NO: 1886306
uccuauuuaugagagaucu

SEQ ID NO: 2400493 - RNA, 19 nt, Artificial Sequence
  Description of Artificial Sequence: Synthetic oligonucleotide
  Antisense strand to SEQ ID NO: 2400492
agaucucucauaaauagga

SEQ ID NO: 2400494 - RNA, 19 nt, Artificial Sequence
  Description of Artificial Sequence: Synthetic oligonucleotide
  Sense strand starting at position 3020 of SEQ ID NO: 1886306
acgggugugcuugagaaag

SEQ ID NO: 2400495 - RNA, 19 nt, Artificial Sequence
  Description of Artificial Sequence: Synthetic oligonucleotide
  Antisense strand to SEQ ID NO: 2400494
cuuucucaagcacacccgu

SEQ ID NO: 2400496 - RNA, 19 nt, Artificial Sequence
  Description of Artificial Sequence: Synthetic oligonucleotide
  Sense strand starting at position 3260 of SEQ ID NO: 1886306
ucccuuggccaucagagaa

SEQ ID NO: 2400497 - RNA, 19 nt, Artificial Sequence
  Description of Artificial Sequence: Synthetic oligonucleotide
  Antisense strand to SEQ ID NO: 2400496
uucucugauggccaaggga

SEQ ID NO: 2400498 - RNA, 19 nt, Artificial Sequence
  Description of Artificial Sequence: Synthetic oligonucleotide
  Sense strand starting at position 3354 of SEQ ID NO: 1886306
uccuuuagccuugaagcau

SEQ ID NO: 2400499 - RNA, 19 nt, Artificial Sequence
  Description of Artificial Sequence: Synthetic oligonucleotide
  Antisense strand to SEQ ID NO: 2400498
augcuucaaggcuaaagga

SEQ ID NO: 2400500 - RNA, 19 nt, Artificial Sequence
  Description of Artificial Sequence: Synthetic oligonucleotide
  Sense strand starting at position 3594 of SEQ ID NO: 1886306
acacauggauucgcaauua

SEQ ID NO: 2400501 - RNA, 19 nt, Artificial Sequence
  Description of Artificial Sequence: Synthetic oligonucleotide
  Antisense strand to SEQ ID NO: 2400500
uaauugcgaauccaugugu

SEQ ID NO: 2400502 - RNA, 19 nt, Artificial Sequence
  Description of Artificial Sequence: Synthetic oligonucleotide
  Sense strand starting at position 3652 of SEQ ID NO: 1886306
ccguaugcacccuauaaca

SEQ ID NO: 2400503 - RNA, 19 nt, Artificial Sequence
  Description of Artificial Sequence: Synthetic oligonucleotide
  Antisense strand to SEQ ID NO: 2400502
uguuauagggugcauacgg

SEQ ID NO: 2400504 - RNA, 19 nt, Artificial Sequence
  Description of Artificial Sequence: Synthetic oligonucleotide
  Sense strand starting at position 3707 of SEQ ID NO: 1886306
gacagaagacuguguggua

SEQ ID NO: 2400505 - RNA, 19 nt, Artificial Sequence
  Description of Artificial Sequence: Synthetic oligonucleotide
  Antisense strand to SEQ ID NO: 2400504
uaccacacagucuucuguc

SEQ ID NO: 2400506 - RNA, 19 nt, Artificial Sequence
  Description of Artificial Sequence: Synthetic oligonucleotide
  Sense strand starting at position 3708 of SEQ ID NO: 1886306
acagaagacugugugguaa

SEQ ID NO: 2400507 - RNA, 19 nt, Artificial Sequence
  Description of Artificial Sequence: Synthetic oligonucleotide
  Antisense strand to SEQ ID NO: 2400506
uuaccacacagucuucugu

SEQ ID NO: 2400508 - RNA, 19 nt, Artificial Sequence
  Description of Artificial Sequence: Synthetic oligonucleotide
  Sense strand starting at position 3861 of SEQ ID NO: 1886306
cgccauccuccugaagacu

SEQ ID NO: 2400509 - RNA, 19 nt, Artificial Sequence
  Description of Artificial Sequence: Synthetic oligonucleotide
  Antisense strand to SEQ ID NO: 2400508
agucuucaggaggauggcg

SEQ ID NO: 2400510 - RNA, 19 nt, Artificial Sequence
  Description of Artificial Sequence: Synthetic oligonucleotide
  Sense strand starting at position 3925 of SEQ ID NO: 1886306
gucccuugacaaggaugaa

SEQ ID NO: 2400511 - RNA, 19 nt, Artificial Sequence
  Description of Artificial Sequence: Synthetic oligonucleotide
  Antisense strand to SEQ ID NO: 2400510
uucauccuugucaagggac

SEQ ID NO: 2400512 - RNA, 19 nt, Artificial Sequence
  Description of Artificial Sequence: Synthetic oligonucleotide
  Sense strand starting at position 3951 of SEQ ID NO: 1886306
gaaagaggugucugggaau

SEQ ID NO: 2400513 - RNA, 19 nt, Artificial Sequence
  Description of Artificial Sequence: Synthetic oligonucleotide
  Antisense strand to SEQ ID NO: 2400512
auucccagacaccucuuuc

SEQ ID NO: 2400514 - RNA, 19 nt, Artificial Sequence
  Description of Artificial Sequence: Synthetic oligonucleotide
  Sense strand starting at position 52 of SEQ ID NO: 1886307
gcagaaaugcauggaugca

SEQ ID NO: 2400515 - RNA, 19 nt, Artificial Sequence
  Description of Artificial Sequence: Synthetic oligonucleotide
  Antisense strand to SEQ ID NO: 2400514
ugcauccaugcauuucugc

SEQ ID NO: 2400516 - RNA, 19 nt, Artificial Sequence
  Description of Artificial Sequence: Synthetic oligonucleotide
  Sense strand starting at position 116 of SEQ ID NO: 1886307
gcuaaagagcacugacauu

SEQ ID NO: 2400517 - RNA, 19 nt, Artificial Sequence
  Description of Artificial Sequence: Synthetic oligonucleotide
  Antisense strand to SEQ ID NO: 2400516
aaugucagugcucuuuagc

SEQ ID NO: 2400518 - RNA, 19 nt, Artificial Sequence
  Description of Artificial Sequence: Synthetic oligonucleotide
  Sense strand starting at position 248 of SEQ ID NO: 1886307
cagggacuccuuugguauc

SEQ ID NO: 2400519 - RNA, 19 nt, Artificial Sequence
  Description of Artificial Sequence: Synthetic oligonucleotide
  Antisense strand to SEQ ID NO: 2400518
gauaccaaaggagucccug

SEQ ID NO: 2400520 - RNA, 19 nt, Artificial Sequence
  Description of Artificial Sequence: Synthetic oligonucleotide
  Sense strand starting at position 903 of SEQ ID NO: 1886307
ggugcuuuggaaugaaauc

SEQ ID NO: 2400521 - RNA, 19 nt, Artificial Sequence
  Description of Artificial Sequence: Synthetic oligonucleotide
  Antisense strand to SEQ ID NO: 2400520
gauuucauuccaaagcacc

SEQ ID NO: 2400522 - RNA, 19 nt, Artificial Sequence
  Description of Artificial Sequence: Synthetic oligonucleotide
  Sense strand starting at position 904 of SEQ ID NO: 1886307
gugcuuuggaaugaaauca

SEQ ID NO: 2400523 - RNA, 19 nt, Artificial Sequence
  Description of Artificial Sequence: Synthetic oligonucleotide
  Antisense strand to SEQ ID NO: 2400522
ugauuucauuccaaagcac

SEQ ID NO: 2400524 - RNA, 19 nt, Artificial Sequence
  Description of Artificial Sequence: Synthetic oligonucleotide
  Sense strand starting at position 957 of SEQ ID NO: 1886307
gaguccacaccauguguuu

SEQ ID NO: 2400525 - RNA, 19 nt, Artificial Sequence
  Description of Artificial Sequence: Synthetic oligonucleotide
  Antisense strand to SEQ ID NO: 2400524
aaacacaugguguggacuc

SEQ ID NO: 2400526 - RNA, 19 nt, Artificial Sequence
  Description of Artificial Sequence: Synthetic oligonucleotide
  Sense strand starting at position 994 of SEQ ID NO: 1886307
cuccaagaaucagacaaga

SEQ ID NO: 2400527 - RNA, 19 nt, Artificial Sequence
  Description of Artificial Sequence: Synthetic oligonucleotide
  Antisense strand to SEQ ID NO: 2400526
ucuugucugauucuuggag

SEQ ID NO: 2400528 - RNA, 19 nt, Artificial Sequence
  Description of Artificial Sequence: Synthetic oligonucleotide
  Sense strand starting at position 1061 of SEQ ID NO: 1886307
cugugaagugcagaggaaa

SEQ ID NO: 2400529 - RNA, 19 nt, Artificial Sequence
  Description of Artificial Sequence: Synthetic oligonucleotide
  Antisense strand to SEQ ID NO: 2400528
uuuccucugcacuucacag

SEQ ID NO: 2400530 - RNA, 19 nt, Artificial Sequence
  Description of Artificial Sequence: Synthetic oligonucleotide
  Sense strand starting at position 1145 of SEQ ID NO: 1886307
ugugacacaucugcuauuu

SEQ ID NO: 2400531 - RNA, 19 nt, Artificial Sequence
  Description of Artificial Sequence: Synthetic oligonucleotide
  Antisense strand to SEQ ID NO: 2400530
aaauagcagaugugucaca

SEQ ID NO: 2400532 - RNA, 19 nt, Artificial Sequence
  Description of Artificial Sequence: Synthetic oligonucleotide
  Sense strand starting at position 1155 of SEQ ID NO: 1886307
cugcuauuugccugucuau

SEQ ID NO: 2400533 - RNA, 19 nt, Artificial Sequence
  Description of Artificial Sequence: Synthetic oligonucleotide
  Antisense strand to SEQ ID NO: 2400532
auagacaggcaaauagcag

SEQ ID NO: 2400534 - RNA, 19 nt, Artificial Sequence
  Description of Artificial Sequence: Synthetic oligonucleotide
  Sense strand starting at position 1309 of SEQ ID NO: 1886307
cugcaauggugcucacaaa

SEQ ID NO: 2400535 - RNA, 19 nt, Artificial Sequence
  Description of Artificial Sequence: Synthetic oligonucleotide
  Antisense strand to SEQ ID NO: 2400534
uuugugagcaccauugcag

SEQ ID NO: 2400536 - RNA, 19 nt, Artificial Sequence
  Description of Artificial Sequence: Synthetic oligonucleotide
  Sense strand starting at position 1368 of SEQ ID NO: 1886307
cuaaaucagguuuggaaua

SEQ ID NO: 2400537 - RNA, 19 nt, Artificial Sequence
  Description of Artificial Sequence: Synthetic oligonucleotide
  Antisense strand to SEQ ID NO: 2400536
uauuccaaaccugauuuag

SEQ ID NO: 2400538 - RNA, 19 nt, Artificial Sequence
  Description of Artificial Sequence: Synthetic oligonucleotide
  Sense strand starting at position 1391 of SEQ ID NO: 1886307
agagacuccuugccugaca

SEQ ID NO: 2400539 - RNA, 19 nt, Artificial Sequence
  Description of Artificial Sequence: Synthetic oligonucleotide
  Antisense strand to SEQ ID NO: 2400538
ugucaggcaaggagucucu

SEQ ID NO: 2400540 - RNA, 19 nt, Artificial Sequence
  Description of Artificial Sequence: Synthetic oligonucleotide
  Sense strand starting at position 1556 of SEQ ID NO: 1886307
gugagaauaguguaggcuu

SEQ ID NO: 2400541 - RNA, 19 nt, Artificial Sequence
  Description of Artificial Sequence: Synthetic oligonucleotide
  Antisense strand to SEQ ID NO: 2400540
aagccuacacuauucucac

SEQ ID NO: 2400542 - RNA, 19 nt, Artificial Sequence
  Description of Artificial Sequence: Synthetic oligonucleotide
  Sense strand starting at position 1598 of SEQ ID NO: 1886307
ucugucuuccucugggaau

SEQ ID NO: 2400543 - RNA, 19 nt, Artificial Sequence
  Description of Artificial Sequence: Synthetic oligonucleotide
  Antisense strand to SEQ ID NO: 2400542
auucccagaggaagacaga

SEQ ID NO: 2400544 - RNA, 19 nt, Artificial Sequence
  Description of Artificial Sequence: Synthetic oligonucleotide
  Sense strand starting at position 1705 of SEQ ID NO: 1886307
ucagacaguaggugaguua

SEQ ID NO: 2400545 - RNA, 19 nt, Artificial Sequence
  Description of Artificial Sequence: Synthetic oligonucleotide
  Antisense strand to SEQ ID NO: 2400544
uaacucaccuacugucuga

SEQ ID NO: 2400546 - RNA, 19 nt, Artificial Sequence
  Description of Artificial Sequence: Synthetic oligonucleotide
  Sense strand starting at position 1706 of SEQ ID NO: 1886307
cagacaguaggugaguuau

SEQ ID NO: 2400547 - RNA, 19 nt, Artificial Sequence
  Description of Artificial Sequence: Synthetic oligonucleotide
  Antisense strand to SEQ ID NO: 2400546
auaacucaccuacugucug

SEQ ID NO: 2400548 - RNA, 19 nt, Artificial Sequence
  Description of Artificial Sequence: Synthetic oligonucleotide
  Sense strand starting at position 2033 of SEQ ID NO: 1886307
aucagagcgcucugggaaa

SEQ ID NO: 2400549 - RNA, 19 nt, Artificial Sequence
  Description of Artificial Sequence: Synthetic oligonucleotide
  Antisense strand to SEQ ID NO: 2400548
uuucccagagcgcucugau

SEQ ID NO: 2400550 - RNA, 19 nt, Artificial Sequence
  Description of Artificial Sequence: Synthetic oligonucleotide
  Sense strand starting at position 2035 of SEQ ID NO: 1886307
cagagcgcucugggaaaga

SEQ ID NO: 2400551 - RNA, 19 nt, Artificial Sequence
  Description of Artificial Sequence: Synthetic oligonucleotide
  Antisense strand to SEQ ID NO: 2400550
ucuuucccagagcgcucug

SEQ ID NO: 2400552 - RNA, 19 nt, Artificial Sequence
  Description of Artificial Sequence: Synthetic oligonucleotide
  Sense strand starting at position 2279 of SEQ ID NO: 1886307
cugcgauacaucuggaauc

SEQ ID NO: 2400553 - RNA, 19 nt, Artificial Sequence
  Description of Artificial Sequence: Synthetic oligonucleotide
  Antisense strand to SEQ ID NO: 2400552
gauuccagauguaucgcag

SEQ ID NO: 2400554 - RNA, 19 nt, Artificial Sequence
  Description of Artificial Sequence: Synthetic oligonucleotide
  Sense strand starting at position 2281 of SEQ ID NO: 1886307
gcgauacaucuggaaucug

SEQ ID NO: 2400555 - RNA, 19 nt, Artificial Sequence
  Description of Artificial Sequence: Synthetic oligonucleotide
  Antisense strand to SEQ ID NO: 2400554
cagauuccagauguaucgc

SEQ ID NO: 2400556 - RNA, 19 nt, Artificial Sequence
  Description of Artificial Sequence: Synthetic oligonucleotide
  Sense strand starting at position 2326 of SEQ ID NO: 1886307
cacagaaaugcacguacau

SEQ ID NO: 2400557 - RNA, 19 nt, Artificial Sequence
  Description of Artificial Sequence: Synthetic oligonucleotide
  Antisense strand to SEQ ID NO: 2400556
auguacgugcauuucugug

SEQ ID NO: 2400558 - RNA, 19 nt, Artificial Sequence
  Description of Artificial Sequence: Synthetic oligonucleotide
  Sense strand starting at position 2381 of SEQ ID NO: 1886307
gcaucaucucgcuaaagag

SEQ ID NO: 2400559 - RNA, 19 nt, Artificial Sequence
  Description of Artificial Sequence: Synthetic oligonucleotide
  Antisense strand to SEQ ID NO: 2400558
cucuuuagcgagaugaugc

SEQ ID NO: 2400560 - RNA, 19 nt, Artificial Sequence
  Description of Artificial Sequence: Synthetic oligonucleotide
  Sense strand starting at position 2391 of SEQ ID NO: 1886307
gcuaaagagcacuaauguu

SEQ ID NO: 2400561 - RNA, 19 nt, Artificial Sequence
  Description of Artificial Sequence: Synthetic oligonucleotide
  Antisense strand to SEQ ID NO: 2400560
aacauuagugcucuuuagc

SEQ ID NO: 2400562 - RNA, 19 nt, Artificial Sequence
  Description of Artificial Sequence: Synthetic oligonucleotide
  Sense strand starting at position 2443 of SEQ ID NO: 1886307
ugcaaugcagcucacaaua

SEQ ID NO: 2400563 - RNA, 19 nt, Artificial Sequence
  Description of Artificial Sequence: Synthetic oligonucleotide
  Antisense strand to SEQ ID NO: 2400562
uauugugagcugcauugca

SEQ ID NO: 2400564 - RNA, 19 nt, Artificial Sequence
  Description of Artificial Sequence: Synthetic oligonucleotide
  Sense strand starting at position 2525 of SEQ ID NO: 1886307
agucucauugccuaucaga

SEQ ID NO: 2400565 - RNA, 19 nt, Artificial Sequence
  Description of Artificial Sequence: Synthetic oligonucleotide
  Antisense strand to SEQ ID NO: 2400564
ucugauaggcaaugagacu

SEQ ID NO: 2400566 - RNA, 19 nt, Artificial Sequence
  Description of Artificial Sequence: Synthetic oligonucleotide
  Sense strand starting at position 2579 of SEQ ID NO: 1886307
caugcaugugcucacaaug

SEQ ID NO: 2400567 - RNA, 19 nt, Artificial Sequence
  Description of Artificial Sequence: Synthetic oligonucleotide
  Antisense strand to SEQ ID NO: 2400566
cauugugagcacaugcaug

SEQ ID NO: 2400568 - RNA, 19 nt, Artificial Sequence
  Description of Artificial Sequence: Synthetic oligonucleotide
  Sense strand starting at position 2863 of SEQ ID NO: 1886307
guacccuggccucacaaau

SEQ ID NO: 2400569 - RNA, 19 nt, Artificial Sequence
  Description of Artificial Sequence: Synthetic oligonucleotide
  Antisense strand to SEQ ID NO: 2400568
auuugugaggccaggguac

SEQ ID NO: 2400570 - RNA, 19 nt, Artificial Sequence
  Description of Artificial Sequence: Synthetic oligonucleotide
  Sense strand starting at position 2897 of SEQ ID NO: 1886307
aggaaucuccuguguacau

SEQ ID NO: 2400571 - RNA, 19 nt, Artificial Sequence
  Description of Artificial Sequence: Synthetic oligonucleotide
  Antisense strand to SEQ ID NO: 2400570
auguacacaggagauuccu

SEQ ID NO: 2400572 - RNA, 19 nt, Artificial Sequence
  Description of Artificial Sequence: Synthetic oligonucleotide
  Sense strand starting at position 2898 of SEQ ID NO: 1886307
ggaaucuccuguguacaua

SEQ ID NO: 2400573 - RNA, 19 nt, Artificial Sequence
  Description of Artificial Sequence: Synthetic oligonucleotide
  Antisense strand to SEQ ID NO: 2400572
uauguacacaggagauucc

SEQ ID NO: 2400574 - RNA, 19 nt, Artificial Sequence
  Description of Artificial Sequence: Synthetic oligonucleotide
  Sense strand starting at position 2987 of SEQ ID NO: 1886307
ugcaaugggcaucaucaaa

SEQ ID NO: 2400575 - RNA, 19 nt, Artificial Sequence
  Description of Artificial Sequence: Synthetic oligonucleotide
  Antisense strand to SEQ ID NO: 2400574
uuugaugaugcccauugca

SEQ ID NO: 2400576 - RNA, 19 nt, Artificial Sequence
  Description of Artificial Sequence: Synthetic oligonucleotide
  Sense strand starting at position 3394 of SEQ ID NO: 1886307
uugcaagggccauacaauu

SEQ ID NO: 2400577 - RNA, 19 nt, Artificial Sequence
  Description of Artificial Sequence: Synthetic oligonucleotide
  Antisense strand to SEQ ID NO: 2400576
aauuguauggcccuugcaa

SEQ ID NO: 2400578 - RNA, 19 nt, Artificial Sequence
  Description of Artificial Sequence: Synthetic oligonucleotide
  Sense strand starting at position 3422 of SEQ ID NO: 1886307
gugguguaucguguaugua

SEQ ID NO: 2400579 - RNA, 19 nt, Artificial Sequence
  Description of Artificial Sequence: Synthetic oligonucleotide
  Antisense strand to SEQ ID NO: 2400578
uacauacacgauacaccac

SEQ ID NO: 2400580 - RNA, 19 nt, Artificial Sequence
  Description of Artificial Sequence: Synthetic oligonucleotide
  Sense strand starting at position 3424 of SEQ ID NO: 1886307
gguguaucguguauguauc

SEQ ID NO: 2400581 - RNA, 19 nt, Artificial Sequence
  Description of Artificial Sequence: Synthetic oligonucleotide
  Antisense strand to SEQ ID NO: 2400580
gauacauacacgauacacc

SEQ ID NO: 2400582 - RNA, 19 nt, Artificial Sequence
  Description of Artificial Sequence: Synthetic oligonucleotide
  Sense strand starting at position 3662 of SEQ ID NO: 1886307
aggaaagccucuucuugag

SEQ ID NO: 2400583 - RNA, 19 nt, Artificial Sequence
  Description of Artificial Sequence: Synthetic oligonucleotide
  Antisense strand to SEQ ID NO: 2400582
cucaagaagaggcuuuccu

SEQ ID NO: 2400584 - RNA, 19 nt, Artificial Sequence
  Description of Artificial Sequence: Synthetic oligonucleotide
  Sense strand starting at position 3666 of SEQ ID NO: 1886307
aagccucuucuugagugaa

SEQ ID NO: 2400585 - RNA, 19 nt, Artificial Sequence
  Description of Artificial Sequence: Synthetic oligonucleotide
  Antisense strand to SEQ ID NO: 2400584
uucacucaagaagaggcuu

SEQ ID NO: 2400586 - RNA, 19 nt, Artificial Sequence
  Description of Artificial Sequence: Synthetic oligonucleotide
  Sense strand starting at position 3674 of SEQ ID NO: 1886307
ucuugagugaagggcaauu

SEQ ID NO: 2400587 - RNA, 19 nt, Artificial Sequence
  Description of Artificial Sequence: Synthetic oligonucleotide
  Antisense strand to SEQ ID NO: 2400586
aauugcccuucacucaaga

SEQ ID NO: 2400588 - RNA, 19 nt, Artificial Sequence
  Description of Artificial Sequence: Synthetic oligonucleotide
  Sense strand starting at position 3746 of SEQ ID NO: 1886307
ugagaaacaugcucaauca

SEQ ID NO: 2400589 - RNA, 19 nt, Artificial Sequence
  Description of Artificial Sequence: Synthetic oligonucleotide
  Antisense strand to SEQ ID NO: 2400588
ugauugagcauguuucuca

SEQ ID NO: 2400590 - RNA, 19 nt, Artificial Sequence
  Description of Artificial Sequence: Synthetic oligonucleotide
  Sense strand starting at position 3944 of SEQ ID NO: 1886307
agacacuagcccugucaua

SEQ ID NO: 2400591 - RNA, 19 nt, Artificial Sequence
  Description of Artificial Sequence: Synthetic oligonucleotide
  Antisense strand to SEQ ID NO: 2400590
uaugacagggcuagugucu

SEQ ID NO: 2400592 - RNA, 19 nt, Artificial Sequence
  Description of Artificial Sequence: Synthetic oligonucleotide
  Sense strand starting at position 3982 of SEQ ID NO: 1886307
caaagacuugugugaauug

SEQ ID NO: 2400593 - RNA, 19 nt, Artificial Sequence
  Description of Artificial Sequence: Synthetic oligonucleotide
  Antisense strand to SEQ ID NO: 2400592
caauucacacaagucuuug

SEQ ID NO: 2400594 - RNA, 19 nt, Artificial Sequence
  Description of Artificial Sequence: Synthetic oligonucleotide
  Sense strand starting at position 526 of SEQ ID NO: 1886308
cagggcuucucugcacaga

SEQ ID NO: 2400595 - RNA, 19 nt, Artificial Sequence
  Description of Artificial Sequence: Synthetic oligonucleotide
  Antisense strand to SEQ ID NO: 2400594
ucugugcagagaagcccug

SEQ ID NO: 2400596 - RNA, 19 nt, Artificial Sequence
  Description of Artificial Sequence: Synthetic oligonucleotide
  Sense strand starting at position 527 of SEQ ID NO: 1886308
agggcuucucugcacagaa

SEQ ID NO: 2400597 - RNA, 19 nt, Artificial Sequence
  Description of Artificial Sequence: Synthetic oligonucleotide
  Antisense strand to SEQ ID NO: 2400596
uucugugcagagaagcccu

SEQ ID NO: 2400598 - RNA, 19 nt, Artificial Sequence
  Description of Artificial Sequence: Synthetic oligonucleotide
  Sense strand starting at position 529 of SEQ ID NO: 1886308
ggcuucucugcacagaacu

SEQ ID NO: 2400599 - RNA, 19 nt, Artificial Sequence
  Description of Artificial Sequence: Synthetic oligonucleotide
  Antisense strand to SEQ ID NO: 2400598
aguucugugcagagaagcc

SEQ ID NO: 2400600 - RNA, 19 nt, Artificial Sequence
  Description of Artificial Sequence: Synthetic oligonucleotide
  Sense strand starting at position 570 of SEQ ID NO: 1886308
agccaacuugacugcauua

SEQ ID NO: 2400601 - RNA, 19 nt, Artificial Sequence
  Description of Artificial Sequence: Synthetic oligonucleotide
  Antisense strand to SEQ ID NO: 2400600
uaaugcagucaaguuggcu

SEQ ID NO: 2400602 - RNA, 19 nt, Artificial Sequence
  Description of Artificial Sequence: Synthetic oligonucleotide
  Sense strand starting at position 632 of SEQ ID NO: 1886308
ucaccaggucuacaaguaa

SEQ ID NO: 2400603 - RNA, 19 nt, Artificial Sequence
  Description of Artificial Sequence: Synthetic oligonucleotide
  Antisense strand to SEQ ID NO: 2400602
uuacuuguagaccugguga

SEQ ID NO: 2400604 - RNA, 19 nt, Artificial Sequence
  Description of Artificial Sequence: Synthetic oligonucleotide
  Sense strand starting at position 766 of SEQ ID NO: 1886308
guuuaagggagcugaaaug

SEQ ID NO: 2400605 - RNA, 19 nt, Artificial Sequence
  Description of Artificial Sequence: Synthetic oligonucleotide
  Antisense strand to SEQ ID NO: 2400604
cauuucagcucccuuaaac

SEQ ID NO: 2400606 - RNA, 19 nt, Artificial Sequence
  Description of Artificial Sequence: Synthetic oligonucleotide
  Sense strand starting at position 884 of SEQ ID NO: 1886308
ccuagaauguugccuggaa

SEQ ID NO: 2400607 - RNA, 19 nt, Artificial Sequence
  Description of Artificial Sequence: Synthetic oligonucleotide
  Antisense strand to SEQ ID NO: 2400606
uuccaggcaacauucuagg

SEQ ID NO: 2400608 - RNA, 19 nt, Artificial Sequence
  Description of Artificial Sequence: Synthetic oligonucleotide
  Sense strand starting at position 886 of SEQ ID NO: 1886308
uagaauguugccuggaaug

SEQ ID NO: 2400609 - RNA, 19 nt, Artificial Sequence
  Description of Artificial Sequence: Synthetic oligonucleotide
  Antisense strand to SEQ ID NO: 2400608
cauuccaggcaacauucua

SEQ ID NO: 2400610 - RNA, 19 nt, Artificial Sequence
  Description of Artificial Sequence: Synthetic oligonucleotide
  Sense strand starting at position 888 of SEQ ID NO: 1886308
gaauguugccuggaaugca

SEQ ID NO: 2400611 - RNA, 19 nt, Artificial Sequence
  Description of Artificial Sequence: Synthetic oligonucleotide
  Antisense strand to SEQ ID NO: 2400610
ugcauuccaggcaacauuc

SEQ ID NO: 2400612 - RNA, 19 nt, Artificial Sequence
  Description of Artificial Sequence: Synthetic oligonucleotide
  Sense strand starting at position 907 of SEQ ID NO: 1886308
cccggaucuccauggauag

SEQ ID NO: 2400613 - RNA, 19 nt, Artificial Sequence
  Description of Artificial Sequence: Synthetic oligonucleotide
  Antisense strand to SEQ ID NO: 2400612
cuauccauggagauccggg

SEQ ID NO: 2400614 - RNA, 19 nt, Artificial Sequence
  Description of Artificial Sequence: Synthetic oligonucleotide
  Sense strand starting at position 1105 of SEQ ID NO: 1886308
ggaagaugugcccaacagu

SEQ ID NO: 2400615 - RNA, 19 nt, Artificial Sequence
  Description of Artificial Sequence: Synthetic oligonucleotide
  Antisense strand to SEQ ID NO: 2400614
acuguugggcacaucuucc

SEQ ID NO: 2400616 - RNA, 19 nt, Artificial Sequence
  Description of Artificial Sequence: Synthetic oligonucleotide
  Sense strand starting at position 1183 of SEQ ID NO: 1886308
acccuuguauucccuggaa

SEQ ID NO: 2400617 - RNA, 19 nt, Artificial Sequence
  Description of Artificial Sequence: Synthetic oligonucleotide
  Antisense strand to SEQ ID NO: 2400616
uuccagggaauacaagggu

SEQ ID NO: 2400618 - RNA, 19 nt, Artificial Sequence
  Description of Artificial Sequence: Synthetic oligonucleotide
  Sense strand starting at position 1186 of SEQ ID NO: 1886308
cuuguauucccuggaaccu

SEQ ID NO: 2400619 - RNA, 19 nt, Artificial Sequence
  Description of Artificial Sequence: Synthetic oligonucleotide
  Antisense strand to SEQ ID NO: 2400618
agguuccagggaauacaag

SEQ ID NO: 2400620 - RNA, 19 nt, Artificial Sequence
  Description of Artificial Sequence: Synthetic oligonucleotide
  Sense strand starting at position 1324 of SEQ ID NO: 1886308
ccaccucuucuguggagua

SEQ ID NO: 2400621 - RNA, 19 nt, Artificial Sequence
  Description of Artificial Sequence: Synthetic oligonucleotide
  Antisense strand to SEQ ID NO: 2400620
uacuccacagaagaggugg

SEQ ID NO: 2400622 - RNA, 19 nt, Artificial Sequence
  Description of Artificial Sequence: Synthetic oligonucleotide
  Sense strand starting at position 1600 of SEQ ID NO: 1886308
ucaguccucugcucagaga

SEQ ID NO: 2400623 - RNA, 19 nt, Artificial Sequence
  Description of Artificial Sequence: Synthetic oligonucleotide
  Antisense strand to SEQ ID NO: 2400622
ucucugagcagaggacuga

SEQ ID NO: 2400624 - RNA, 19 nt, Artificial Sequence
  Description of Artificial Sequence: Synthetic oligonucleotide
  Sense strand starting at position 1693 of SEQ ID NO: 1886308
ugcgauauuucugucugcu

SEQ ID NO: 2400625 - RNA, 19 nt, Artificial Sequence
  Description of Artificial Sequence: Synthetic oligonucleotide
  Antisense strand to SEQ ID NO: 2400624
agcagacagaaauaucgca

SEQ ID NO: 2400626 - RNA, 19 nt, Artificial Sequence
  Description of Artificial Sequence: Synthetic oligonucleotide
  Sense strand starting at position 1695 of SEQ ID NO: 1886308
cgauauuucugucugcuuc

SEQ ID NO: 2400627 - RNA, 19 nt, Artificial Sequence
  Description of Artificial Sequence: Synthetic oligonucleotide
  Antisense strand to SEQ ID NO: 2400626
gaagcagacagaaauaucg

SEQ ID NO: 2400628 - RNA, 19 nt, Artificial Sequence
  Description of Artificial Sequence: Synthetic oligonucleotide
  Sense strand starting at position 1796 of SEQ ID NO: 1886308
augagcauuugaugggaga

SEQ ID NO: 2400629 - RNA, 19 nt, Artificial Sequence
  Description of Artificial Sequence: Synthetic oligonucleotide
  Antisense strand to SEQ ID NO: 2400628
ucucccaucaaaugcucau

SEQ ID NO: 2400630 - RNA, 19 nt, Artificial Sequence
  Description of Artificial Sequence: Synthetic oligonucleotide
  Sense strand starting at position 1799 of SEQ ID NO: 1886308
agcauuugaugggagacuu

SEQ ID NO: 2400631 - RNA, 19 nt, Artificial Sequence
  Description of Artificial Sequence: Synthetic oligonucleotide
  Antisense strand to SEQ ID NO: 2400630
aagucucccaucaaaugcu

SEQ ID NO: 2400632 - RNA, 19 nt, Artificial Sequence
  Description of Artificial Sequence: Synthetic oligonucleotide
  Sense strand starting at position 1810 of SEQ ID NO: 1886308
ggagacuuuggcuguggau

SEQ ID NO: 2400633 - RNA, 19 nt, Artificial Sequence
  Description of Artificial Sequence: Synthetic oligonucleotide
  Antisense strand to SEQ ID NO: 2400632
auccacagccaaagucucc

SEQ ID NO: 2400634 - RNA, 19 nt, Artificial Sequence
  Description of Artificial Sequence: Synthetic oligonucleotide
  Sense strand starting at position 2094 of SEQ ID NO: 1886308
agcgaugccacugagcaau

SEQ ID NO: 2400635 - RNA, 19 nt, Artificial Sequence
  Description of Artificial Sequence: Synthetic oligonucleotide
  Antisense strand to SEQ ID NO: 2400634
auugcucaguggcaucgcu

SEQ ID NO: 2400636 - RNA, 19 nt, Artificial Sequence
  Description of Artificial Sequence: Synthetic oligonucleotide
  Sense strand starting at position 2151 of SEQ ID NO: 1886308
gccauuagugguuagcuga

SEQ ID NO: 2400637 - RNA, 19 nt, Artificial Sequence
  Description of Artificial Sequence: Synthetic oligonucleotide
  Antisense strand to SEQ ID NO: 2400636
ucagcuaaccacuaauggc

SEQ ID NO: 2400638 - RNA, 19 nt, Artificial Sequence
  Description of Artificial Sequence: Synthetic oligonucleotide
  Sense strand starting at position 2154 of SEQ ID NO: 1886308
auuagugguuagcugagaa

SEQ ID NO: 2400639 - RNA, 19 nt, Artificial Sequence
  Description of Artificial Sequence: Synthetic oligonucleotide
  Antisense strand to SEQ ID NO: 2400638
uucucagcuaaccacuaau

SEQ ID NO: 2400640 - RNA, 19 nt, Artificial Sequence
  Description of Artificial Sequence: Synthetic oligonucleotide
  Sense strand starting at position 2314 of SEQ ID NO: 1886308
gccuucguugcucagaaga

SEQ ID NO: 2400641 - RNA, 19 nt, Artificial Sequence
  Description of Artificial Sequence: Synthetic oligonucleotide
  Antisense strand to SEQ ID NO: 2400640
ucuucugagcaacgaaggc

SEQ ID NO: 2400642 - RNA, 19 nt, Artificial Sequence
  Description of Artificial Sequence: Synthetic oligonucleotide
  Sense strand starting at position 2319 of SEQ ID NO: 1886308
cguugcucagaagaauuga

SEQ ID NO: 2400643 - RNA, 19 nt, Artificial Sequence
  Description of Artificial Sequence: Synthetic oligonucleotide
  Antisense strand to SEQ ID NO: 2400642
ucaauucuucugagcaacg

SEQ ID NO: 2400644 - RNA, 19 nt, Artificial Sequence
  Description of Artificial Sequence: Synthetic oligonucleotide
  Sense strand starting at position 2379 of SEQ ID NO: 1886308
gccucugagaaguguaaag

SEQ ID NO: 2400645 - RNA, 19 nt, Artificial Sequence
  Description of Artificial Sequence: Synthetic oligonucleotide
  Antisense strand to SEQ ID NO: 2400644
cuuuacacuucucagaggc

SEQ ID NO: 2400646 - RNA, 19 nt, Artificial Sequence
  Description of Artificial Sequence: Synthetic oligonucleotide
  Sense strand starting at position 2536 of SEQ ID NO: 1886308
auguguuacucuguggaua

SEQ ID NO: 2400647 - RNA, 19 nt, Artificial Sequence
  Description of Artificial Sequence: Synthetic oligonucleotide
  Antisense strand to SEQ ID NO: 2400646
uauccacagaguaacacau

SEQ ID NO: 2400648 - RNA, 19 nt, Artificial Sequence
  Description of Artificial Sequence: Synthetic oligonucleotide
  Sense strand starting at position 2581 of SEQ ID NO: 1886308
cccauugcugcauguauuu

SEQ ID NO: 2400649 - RNA, 19 nt, Artificial Sequence
  Description of Artificial Sequence: Synthetic oligonucleotide
  Antisense strand to SEQ ID NO: 2400648
aaauacaugcagcaauggg

SEQ ID NO: 2400650 - RNA, 19 nt, Artificial Sequence
  Description of Artificial Sequence: Synthetic oligonucleotide
  Sense strand starting at position 2591 of SEQ ID NO: 1886308
cauguauuugccuguggcu

SEQ ID NO: 2400651 - RNA, 19 nt, Artificial Sequence
  Description of Artificial Sequence: Synthetic oligonucleotide
  Antisense strand to SEQ ID NO: 2400650
agccacaggcaaauacaug

SEQ ID NO: 2400652 - RNA, 19 nt, Artificial Sequence
  Description of Artificial Sequence: Synthetic oligonucleotide
  Sense strand starting at position 2687 of SEQ ID NO: 1886308
acauguguguuucccaaca

SEQ ID NO: 2400653 - RNA, 19 nt, Artificial Sequence
  Description of Artificial Sequence: Synthetic oligonucleotide
  Antisense strand to SEQ ID NO: 2400652
uguugggaaacacacaugu

SEQ ID NO: 2400654 - RNA, 19 nt, Artificial Sequence
  Description of Artificial Sequence: Synthetic oligonucleotide
  Sense strand starting at position 2781 of SEQ ID NO: 1886308
caaucaguaggaugugaau

SEQ ID NO: 2400655 - RNA, 19 nt, Artificial Sequence
  Description of Artificial Sequence: Synthetic oligonucleotide
  Antisense strand to SEQ ID NO: 2400654
auucacauccuacugauug

SEQ ID NO: 2400656 - RNA, 19 nt, Artificial Sequence
  Description of Artificial Sequence: Synthetic oligonucleotide
  Sense strand starting at position 2891 of SEQ ID NO: 1886308
aucugauguccugagcaga

SEQ ID NO: 2400657 - RNA, 19 nt, Artificial Sequence
  Description of Artificial Sequence: Synthetic oligonucleotide
  Antisense strand to SEQ ID NO: 2400656
ucugcucaggacaucagau

SEQ ID NO: 2400658 - RNA, 19 nt, Artificial Sequence
  Description of Artificial Sequence: Synthetic oligonucleotide
  Sense strand starting at position 2996 of SEQ ID NO: 1886308
agcacaucagccugaaacu

SEQ ID NO: 2400659 - RNA, 19 nt, Artificial Sequence
  Description of Artificial Sequence: Synthetic oligonucleotide
  Antisense strand to SEQ ID NO: 2400658
aguuucaggcugaugugcu

SEQ ID NO: 2400660 - RNA, 19 nt, Artificial Sequence
  Description of Artificial Sequence: Synthetic oligonucleotide
  Sense strand starting at position 2997 of SEQ ID NO: 1886308
gcacaucagccugaaacuu

SEQ ID NO: 2400661 - RNA, 19 nt, Artificial Sequence
  Description of Artificial Sequence: Synthetic oligonucleotide
  Antisense strand to SEQ ID NO: 2400660
aaguuucaggcugaugugc

SEQ ID NO: 2400662 - RNA, 19 nt, Artificial Sequence
  Description of Artificial Sequence: Synthetic oligonucleotide
  Sense strand starting at position 3629 of SEQ ID NO: 1886308
cauggauagcuccaagugu

SEQ ID NO: 2400663 - RNA, 19 nt, Artificial Sequence
  Description of Artificial Sequence: Synthetic oligonucleotide
  Antisense strand to SEQ ID NO: 2400662
acacuuggagcuauccaug

SEQ ID NO: 2400664 - RNA, 19 nt, Artificial Sequence
  Description of Artificial Sequence: Synthetic oligonucleotide
  Sense strand starting at position 3750 of SEQ ID NO: 1886308
agagcaguauuugcucaua

SEQ ID NO: 2400665 - RNA, 19 nt, Artificial Sequence
  Description of Artificial Sequence: Synthetic oligonucleotide
  Antisense strand to SEQ ID NO: 2400664
uaugagcaaauacugcucu

SEQ ID NO: 2400666 - RNA, 19 nt, Artificial Sequence
  Description of Artificial Sequence: Synthetic oligonucleotide
  Sense strand starting at position 3752 of SEQ ID NO: 1886308
agcaguauuugcucauaca

SEQ ID NO: 2400667 - RNA, 19 nt, Artificial Sequence
  Description of Artificial Sequence: Synthetic oligonucleotide
  Antisense strand to SEQ ID NO: 2400666
uguaugagcaaauacugcu

SEQ ID NO: 2400668 - RNA, 19 nt, Artificial Sequence
  Description of Artificial Sequence: Synthetic oligonucleotide
  Sense strand starting at position 3781 of SEQ ID NO: 1886308
gguggagccgcccaauaau

SEQ ID NO: 2400669 - RNA, 19 nt, Artificial Sequence
  Description of Artificial Sequence: Synthetic oligonucleotide
  Antisense strand to SEQ ID NO: 2400668
auuauugggcggcuccacc

SEQ ID NO: 2400670 - RNA, 19 nt, Artificial Sequence
  Description of Artificial Sequence: Synthetic oligonucleotide
  Sense strand starting at position 3821 of SEQ ID NO: 1886308
uaggaagauuugcacaaug

SEQ ID NO: 2400671 - RNA, 19 nt, Artificial Sequence
  Description of Artificial Sequence: Synthetic oligonucleotide
  Antisense strand to SEQ ID NO: 2400670
cauugugcaaaucuuccua

SEQ ID NO: 2400672 - RNA, 19 nt, Artificial Sequence
  Description of Artificial Sequence: Synthetic oligonucleotide
  Sense strand starting at position 3845 of SEQ ID NO: 1886308
gcccauuacucuccuggga

SEQ ID NO: 2400673 - RNA, 19 nt, Artificial Sequence
  Description of Artificial Sequence: Synthetic oligonucleotide
  Antisense strand to SEQ ID NO: 2400672
ucccaggagaguaaugggc

SEQ ID NO: 2400674 - RNA, 19 nt, Artificial Sequence
  Description of Artificial Sequence: Synthetic oligonucleotide
  Sense strand starting at position 27 of SEQ ID NO: 1886309
caaucaguaggaugcgaau

SEQ ID NO: 2400675 - RNA, 19 nt, Artificial Sequence
  Description of Artificial Sequence: Synthetic oligonucleotide
  Antisense strand to SEQ ID NO: 2400674
auucgcauccuacugauug

SEQ ID NO: 2400676 - RNA, 19 nt, Artificial Sequence
  Description of Artificial Sequence: Synthetic oligonucleotide
  Sense strand starting at position 64 of SEQ ID NO: 1886309
cagacauuggccugauguc

SEQ ID NO: 2400677 - RNA, 19 nt, Artificial Sequence
  Description of Artificial Sequence: Synthetic oligonucleotide
  Antisense strand to SEQ ID NO: 2400676
gacaucaggccaaugucug

SEQ ID NO: 2400678 - RNA, 19 nt, Artificial Sequence
  Description of Artificial Sequence: Synthetic oligonucleotide
  Sense strand starting at position 74 of SEQ ID NO: 1886309
ccugaugucccucgacuaa

SEQ ID NO: 2400679 - RNA, 19 nt, Artificial Sequence
  Description of Artificial Sequence: Synthetic oligonucleotide
  Antisense strand to SEQ ID NO: 2400678
uuagucgagggacaucagg

SEQ ID NO: 2400680 - RNA, 19 nt, Artificial Sequence
  Description of Artificial Sequence: Synthetic oligonucleotide
  Sense strand starting at position 140 of SEQ ID NO: 1886309
auauaaugucgugaccaga

SEQ ID NO: 2400681 - RNA, 19 nt, Artificial Sequence
  Description of Artificial Sequence: Synthetic oligonucleotide
  Antisense strand to SEQ ID NO: 2400680
ucuggucacgacauuauau

SEQ ID NO: 2400682 - RNA, 19 nt, Artificial Sequence
  Description of Artificial Sequence: Synthetic oligonucleotide
  Sense strand starting at position 243 of SEQ ID NO: 1886309
ccaccacguuggucuuaaa

SEQ ID NO: 2400683 - RNA, 19 nt, Artificial Sequence
  Description of Artificial Sequence: Synthetic oligonucleotide
  Antisense strand to SEQ ID NO: 2400682
uuuaagaccaacguggugg

SEQ ID NO: 2400684 - RNA, 19 nt, Artificial Sequence
  Description of Artificial Sequence: Synthetic oligonucleotide
  Sense strand starting at position 283 of SEQ ID NO: 1886309
cagagacagucuucugaac

SEQ ID NO: 2400685 - RNA, 19 nt, Artificial Sequence
  Description of Artificial Sequence: Synthetic oligonucleotide
  Antisense strand to SEQ ID NO: 2400684
guucagaagacugucucug

SEQ ID NO: 2400686 - RNA, 19 nt, Artificial Sequence
  Description of Artificial Sequence: Synthetic oligonucleotide
  Sense strand starting at position 620 of SEQ ID NO: 1886309
ugagcugcgagacauagaa

SEQ ID NO: 2400687 - RNA, 19 nt, Artificial Sequence
  Description of Artificial Sequence: Synthetic oligonucleotide
  Antisense strand to SEQ ID NO: 2400686
uucuaugucucgcagcuca

SEQ ID NO: 2400688 - RNA, 19 nt, Artificial Sequence
  Description of Artificial Sequence: Synthetic oligonucleotide
  Sense strand starting at position 723 of SEQ ID NO: 1886309
ccggcuaagugagcugaaa

SEQ ID NO: 2400689 - RNA, 19 nt, Artificial Sequence
  Description of Artificial Sequence: Synthetic oligonucleotide
  Antisense strand to SEQ ID NO: 2400688
uuucagcucacuuagccgg

SEQ ID NO: 2400690 - RNA, 19 nt, Artificial Sequence
  Description of Artificial Sequence: Synthetic oligonucleotide
  Sense strand starting at position 856 of SEQ ID NO: 1886309
acauguguugccuggaaug

SEQ ID NO: 2400691 - RNA, 19 nt, Artificial Sequence
  Description of Artificial Sequence: Synthetic oligonucleotide
  Antisense strand to SEQ ID NO: 2400690
cauuccaggcaacacaugu

SEQ ID NO: 2400692 - RNA, 19 nt, Artificial Sequence
  Description of Artificial Sequence: Synthetic oligonucleotide
  Sense strand starting at position 886 of SEQ ID NO: 1886309
ccaugaauacgccaagugu

SEQ ID NO: 2400693 - RNA, 19 nt, Artificial Sequence
  Description of Artificial Sequence: Synthetic oligonucleotide
  Antisense strand to SEQ ID NO: 2400692
acacuuggcguauucaugg

SEQ ID NO: 2400694 - RNA, 19 nt, Artificial Sequence
  Description of Artificial Sequence: Synthetic oligonucleotide
  Sense strand starting at position 1001 of SEQ ID NO: 1886309
ugggauccagagcaguauu

SEQ ID NO: 2400695 - RNA, 19 nt, Artificial Sequence
  Description of Artificial Sequence: Synthetic oligonucleotide
  Antisense strand to SEQ ID NO: 2400694
aauacugcucuggauccca

SEQ ID NO: 2400696 - RNA, 19 nt, Artificial Sequence
  Description of Artificial Sequence: Synthetic oligonucleotide
  Sense strand starting at position 1012 of SEQ ID NO: 1886309
gcaguauuugcucacacga

SEQ ID NO: 2400697 - RNA, 19 nt, Artificial Sequence
  Description of Artificial Sequence: Synthetic oligonucleotide
  Antisense strand to SEQ ID NO: 2400696
ucgugugagcaaauacugc

SEQ ID NO: 2400698 - RNA, 19 nt, Artificial Sequence
  Description of Artificial Sequence: Synthetic oligonucleotide
  Sense strand starting at position 1349 of SEQ ID NO: 1886309
cacagcucgagaggugaaa

SEQ ID NO: 2400699 - RNA, 19 nt, Artificial Sequence
  Description of Artificial Sequence: Synthetic oligonucleotide
  Antisense strand to SEQ ID NO: 2400698
uuucaccucucgagcugug

SEQ ID NO: 2400700 - RNA, 19 nt, Artificial Sequence
  Description of Artificial Sequence: Synthetic oligonucleotide
  Sense strand starting at position 1533 of SEQ ID NO: 1886309
gccucaugcucuccuugaa

SEQ ID NO: 2400701 - RNA, 19 nt, Artificial Sequence
  Description of Artificial Sequence: Synthetic oligonucleotide
  Antisense strand to SEQ ID NO: 2400700
uucaaggagagcaugaggc

SEQ ID NO: 2400702 - RNA, 19 nt, Artificial Sequence
  Description of Artificial Sequence: Synthetic oligonucleotide
  Sense strand starting at position 1573 of SEQ ID NO: 1886309
ugguccucuaugcaaggau

SEQ ID NO: 2400703 - RNA, 19 nt, Artificial Sequence
  Description of Artificial Sequence: Synthetic oligonucleotide
  Antisense strand to SEQ ID NO: 2400702
auccuugcauagaggacca

SEQ ID NO: 2400704 - RNA, 19 nt, Artificial Sequence
  Description of Artificial Sequence: Synthetic oligonucleotide
  Sense strand starting at position 1794 of SEQ ID NO: 1886309
uuuguaauaugacaggaga

SEQ ID NO: 2400705 - RNA, 19 nt, Artificial Sequence
  Description of Artificial Sequence: Synthetic oligonucleotide
  Antisense strand to SEQ ID NO: 2400704
ucuccugucauauuacaaa

SEQ ID NO: 2400706 - RNA, 19 nt, Artificial Sequence
  Description of Artificial Sequence: Synthetic oligonucleotide
  Sense strand starting at position 1860 of SEQ ID NO: 1886309
gaaguugucccucacuagu

SEQ ID NO: 2400707 - RNA, 19 nt, Artificial Sequence
  Description of Artificial Sequence: Synthetic oligonucleotide
  Antisense strand to SEQ ID NO: 2400706
acuagugagggacaacuuc

SEQ ID NO: 2400708 - RNA, 19 nt, Artificial Sequence
  Description of Artificial Sequence: Synthetic oligonucleotide
  Sense strand starting at position 1862 of SEQ ID NO: 1886309
aguugucccucacuaguaa

SEQ ID NO: 2400709 - RNA, 19 nt, Artificial Sequence
  Description of Artificial Sequence: Synthetic oligonucleotide
  Antisense strand to SEQ ID NO: 2400708
uuacuagugagggacaacu

SEQ ID NO: 2400710 - RNA, 19 nt, Artificial Sequence
  Description of Artificial Sequence: Synthetic oligonucleotide
  Sense strand starting at position 1863 of SEQ ID NO: 1886309
guugucccucacuaguaaa

SEQ ID NO: 2400711 - RNA, 19 nt, Artificial Sequence
  Description of Artificial Sequence: Synthetic oligonucleotide
  Antisense strand to SEQ ID NO: 2400710
uuuacuagugagggacaac

SEQ ID NO: 2400712 - RNA, 19 nt, Artificial Sequence
  Description of Artificial Sequence: Synthetic oligonucleotide
  Sense strand starting at position 2062 of SEQ ID NO: 1886309
ccuuaaaggccucgacaau

SEQ ID NO: 2400713 - RNA, 19 nt, Artificial Sequence
  Description of Artificial Sequence: Synthetic oligonucleotide
  Antisense strand to SEQ ID NO: 2400712
auugucgaggccuuuaagg

SEQ ID NO: 2400714 - RNA, 19 nt, Artificial Sequence
  Description of Artificial Sequence: Synthetic oligonucleotide
  Sense strand starting at position 2165 of SEQ ID NO: 1886309
gcuuacuguccugagccau

SEQ ID NO: 2400715 - RNA, 19 nt, Artificial Sequence
  Description of Artificial Sequence: Synthetic oligonucleotide
  Antisense strand to SEQ ID NO: 2400714
auggcucaggacaguaagc

SEQ ID NO: 2400716 - RNA, 19 nt, Artificial Sequence
  Description of Artificial Sequence: Synthetic oligonucleotide
  Sense strand starting at position 2227 of SEQ ID NO: 1886309
ccacgacuccauggagauu

SEQ ID NO: 2400717 - RNA, 19 nt, Artificial Sequence
  Description of Artificial Sequence: Synthetic oligonucleotide
  Antisense strand to SEQ ID NO: 2400716
aaucuccauggagucgugg

SEQ ID NO: 2400718 - RNA, 19 nt, Artificial Sequence
  Description of Artificial Sequence: Synthetic oligonucleotide
  Sense strand starting at position 2242 of SEQ ID NO: 1886309
gauuccacugcucggaaga

SEQ ID NO: 2400719 - RNA, 19 nt, Artificial Sequence
  Description of Artificial Sequence: Synthetic oligonucleotide
  Antisense strand to SEQ ID NO: 2400718
ucuuccgagcaguggaauc

SEQ ID NO: 2400720 - RNA, 19 nt, Artificial Sequence
  Description of Artificial Sequence: Synthetic oligonucleotide
  Sense strand starting at position 2243 of SEQ ID NO: 1886309
auuccacugcucggaagaa

SEQ ID NO: 2400721 - RNA, 19 nt, Artificial Sequence
  Description of Artificial Sequence: Synthetic oligonucleotide
  Antisense strand to SEQ ID NO: 2400720
uucuuccgagcaguggaau

SEQ ID NO: 2400722 - RNA, 19 nt, Artificial Sequence
  Description of Artificial Sequence: Synthetic oligonucleotide
  Sense strand starting at position 2332 of SEQ ID NO: 1886309
aaaugcacgcuugagaaau

SEQ ID NO: 2400723 - RNA, 19 nt, Artificial Sequence
  Description of Artificial Sequence: Synthetic oligonucleotide
  Antisense strand to SEQ ID NO: 2400722
auuucucaagcgugcauuu

SEQ ID NO: 2400724 - RNA, 19 nt, Artificial Sequence
  Description of Artificial Sequence: Synthetic oligonucleotide
  Sense strand starting at position 2368 of SEQ ID NO: 1886309
ucaccacgucaaugucauu

SEQ ID NO: 2400725 - RNA, 19 nt, Artificial Sequence
  Description of Artificial Sequence: Synthetic oligonucleotide
  Antisense strand to SEQ ID NO: 2400724
aaugacauugacgugguga

SEQ ID NO: 2400726 - RNA, 19 nt, Artificial Sequence
  Description of Artificial Sequence: Synthetic oligonucleotide
  Sense strand starting at position 2516 of SEQ ID NO: 1886309
cucacucgcccagaaacau

SEQ ID NO: 2400727 - RNA, 19 nt, Artificial Sequence
  Description of Artificial Sequence: Synthetic oligonucleotide
  Antisense strand to SEQ ID NO: 2400726
auguuucugggcgagugag

SEQ ID NO: 2400728 - RNA, 19 nt, Artificial Sequence
  Description of Artificial Sequence: Synthetic oligonucleotide
  Sense strand starting at position 2553 of SEQ ID NO: 1886309
auaccuuaccugugucacu

SEQ ID NO: 2400729 - RNA, 19 nt, Artificial Sequence
  Description of Artificial Sequence: Synthetic oligonucleotide
  Antisense strand to SEQ ID NO: 2400728
agugacacagguaagguau

SEQ ID NO: 2400730 - RNA, 19 nt, Artificial Sequence
  Description of Artificial Sequence: Synthetic oligonucleotide
  Sense strand starting at position 2647 of SEQ ID NO: 1886309
cacacaugugugcaugagu

SEQ ID NO: 2400731 - RNA, 19 nt, Artificial Sequence
  Description of Artificial Sequence: Synthetic oligonucleotide
  Antisense strand to SEQ ID NO: 2400730
acucaugcacacaugugug

SEQ ID NO: 2400732 - RNA, 19 nt, Artificial Sequence
  Description of Artificial Sequence: Synthetic oligonucleotide
  Sense strand starting at position 3192 of SEQ ID NO: 1886309
cagacaggacauugucauu

SEQ ID NO: 2400733 - RNA, 19 nt, Artificial Sequence
  Description of Artificial Sequence: Synthetic oligonucleotide
  Antisense strand to SEQ ID NO: 2400732
aaugacaauguccugucug

SEQ ID NO: 2400734 - RNA, 19 nt, Artificial Sequence
  Description of Artificial Sequence: Synthetic oligonucleotide
  Sense strand starting at position 3197 of SEQ ID NO: 1886309
aggacauugucauuauccu

SEQ ID NO: 2400735 - RNA, 19 nt, Artificial Sequence
  Description of Artificial Sequence: Synthetic oligonucleotide
  Antisense strand to SEQ ID NO: 2400734
aggauaaugacaauguccu

SEQ ID NO: 2400736 - RNA, 19 nt, Artificial Sequence
  Description of Artificial Sequence: Synthetic oligonucleotide
  Sense strand starting at position 3198 of SEQ ID NO: 1886309
ggacauugucauuauccuu

SEQ ID NO: 2400737 - RNA, 19 nt, Artificial Sequence
  Description of Artificial Sequence: Synthetic oligonucleotide
  Antisense strand to SEQ ID NO: 2400736
aaggauaaugacaaugucc

SEQ ID NO: 2400738 - RNA, 19 nt, Artificial Sequence
  Description of Artificial Sequence: Synthetic oligonucleotide
  Sense strand starting at position 3203 of SEQ ID NO: 1886309
uugucauuauccuugcauu

SEQ ID NO: 2400739 - RNA, 19 nt, Artificial Sequence
  Description of Artificial Sequence: Synthetic oligonucleotide
  Antisense strand to SEQ ID NO: 2400738
aaugcaaggauaaugacaa

SEQ ID NO: 2400740 - RNA, 19 nt, Artificial Sequence
  Description of Artificial Sequence: Synthetic oligonucleotide
  Sense strand starting at position 3204 of SEQ ID NO: 1886309
ugucauuauccuugcauua

SEQ ID NO: 2400741 - RNA, 19 nt, Artificial Sequence
  Description of Artificial Sequence: Synthetic oligonucleotide
  Antisense strand to SEQ ID NO: 2400740
uaaugcaaggauaaugaca

SEQ ID NO: 2400742 - RNA, 19 nt, Artificial Sequence
  Description of Artificial Sequence: Synthetic oligonucleotide
  Sense strand starting at position 3416 of SEQ ID NO: 1886309
acuguaugcccuugaaagu

SEQ ID NO: 2400743 - RNA, 19 nt, Artificial Sequence
  Description of Artificial Sequence: Synthetic oligonucleotide
  Antisense strand to SEQ ID NO: 2400742
acuuucaagggcauacagu

SEQ ID NO: 2400744 - RNA, 19 nt, Artificial Sequence
  Description of Artificial Sequence: Synthetic oligonucleotide
  Sense strand starting at position 3481 of SEQ ID NO: 1886309
gcugaaaugcuuuaucacg

SEQ ID NO: 2400745 - RNA, 19 nt, Artificial Sequence
  Description of Artificial Sequence: Synthetic oligonucleotide
  Antisense strand to SEQ ID NO: 2400744
cgugauaaagcauuucagc

SEQ ID NO: 2400746 - RNA, 19 nt, Artificial Sequence
  Description of Artificial Sequence: Synthetic oligonucleotide
  Sense strand starting at position 3566 of SEQ ID NO: 1886309
ucaagacucucuguggcaa

SEQ ID NO: 2400747 - RNA, 19 nt, Artificial Sequence
  Description of Artificial Sequence: Synthetic oligonucleotide
  Antisense strand to SEQ ID NO: 2400746
uugccacagagagucuuga

SEQ ID NO: 2400748 - RNA, 19 nt, Artificial Sequence
  Description of Artificial Sequence: Synthetic oligonucleotide
  Sense strand starting at position 3567 of SEQ ID NO: 1886309
caagacucucuguggcaau

SEQ ID NO: 2400749 - RNA, 19 nt, Artificial Sequence
  Description of Artificial Sequence: Synthetic oligonucleotide
  Antisense strand to SEQ ID NO: 2400748
auugccacagagagucuug

SEQ ID NO: 2400750 - RNA, 19 nt, Artificial Sequence
  Description of Artificial Sequence: Synthetic oligonucleotide
  Sense strand starting at position 3621 of SEQ ID NO: 1886309
cauagaucuccacggguag

SEQ ID NO: 2400751 - RNA, 19 nt, Artificial Sequence
  Description of Artificial Sequence: Synthetic oligonucleotide
  Antisense strand to SEQ ID NO: 2400750
cuacccguggagaucuaug

SEQ ID NO: 2400752 - RNA, 19 nt, Artificial Sequence
  Description of Artificial Sequence: Synthetic oligonucleotide
  Sense strand starting at position 3832 of SEQ ID NO: 1886309
ccuacucugcugggaacaa

SEQ ID NO: 2400753 - RNA, 19 nt, Artificial Sequence
  Description of Artificial Sequence: Synthetic oligonucleotide
  Antisense strand to SEQ ID NO: 2400752
uuguucccagcagaguagg

SEQ ID NO: 2400754 - RNA, 19 nt, Artificial Sequence
  Description of Artificial Sequence: Synthetic oligonucleotide
  Sense strand starting at position 115 of SEQ ID NO: 1886310
acgucaucccacuaaagag

SEQ ID NO: 2400755 - RNA, 19 nt, Artificial Sequence
  Description of Artificial Sequence: Synthetic oligonucleotide
  Antisense strand to SEQ ID NO: 2400754
cucuuuagugggaugacgu

SEQ ID NO: 2400756 - RNA, 19 nt, Artificial Sequence
  Description of Artificial Sequence: Synthetic oligonucleotide
  Sense strand starting at position 463 of SEQ ID NO: 1886310
guuuccuuccaggaacuca

SEQ ID NO: 2400757 - RNA, 19 nt, Artificial Sequence
  Description of Artificial Sequence: Synthetic oligonucleotide
  Antisense strand to SEQ ID NO: 2400756
ugaguuccuggaaggaaac

SEQ ID NO: 2400758 - RNA, 19 nt, Artificial Sequence
  Description of Artificial Sequence: Synthetic oligonucleotide
  Sense strand starting at position 689 of SEQ ID NO: 1886310
aacggaugccuugguauaa

SEQ ID NO: 2400759 - RNA, 19 nt, Artificial Sequence
  Description of Artificial Sequence: Synthetic oligonucleotide
  Antisense strand to SEQ ID NO: 2400758
uuauaccaaggcauccguu

SEQ ID NO: 2400760 - RNA, 19 nt, Artificial Sequence
  Description of Artificial Sequence: Synthetic oligonucleotide
  Sense strand starting at position 700 of SEQ ID NO: 1886310
ugguauaacccaugucaaa

SEQ ID NO: 2400761 - RNA, 19 nt, Artificial Sequence
  Description of Artificial Sequence: Synthetic oligonucleotide
  Antisense strand to SEQ ID NO: 2400760
uuugacauggguuauacca

SEQ ID NO: 2400762 - RNA, 19 nt, Artificial Sequence
  Description of Artificial Sequence: Synthetic oligonucleotide
  Sense strand starting at position 865 of SEQ ID NO: 1886310
aguauuugucccugcaaau

SEQ ID NO: 2400763 - RNA, 19 nt, Artificial Sequence
  Description of Artificial Sequence: Synthetic oligonucleotide
  Antisense strand to SEQ ID NO: 2400762
auuugcagggacaaauacu

SEQ ID NO: 2400764 - RNA, 19 nt, Artificial Sequence
  Description of Artificial Sequence: Synthetic oligonucleotide
  Sense strand starting at position 893 of SEQ ID NO: 1886310
cagagugcucugggaaaga

SEQ ID NO: 2400765 - RNA, 19 nt, Artificial Sequence
  Description of Artificial Sequence: Synthetic oligonucleotide
  Antisense strand to SEQ ID NO: 2400764
ucuuucccagagcacucug

SEQ ID NO: 2400766 - RNA, 19 nt, Artificial Sequence
  Description of Artificial Sequence: Synthetic oligonucleotide
  Sense strand starting at position 906 of SEQ ID NO: 1886310
gaaagaagugcuuacauuc

SEQ ID NO: 2400767 - RNA, 19 nt, Artificial Sequence
  Description of Artificial Sequence: Synthetic oligonucleotide
  Antisense strand to SEQ ID NO: 2400766
gaauguaagcacuucuuuc

SEQ ID NO: 2400768 - RNA, 19 nt, Artificial Sequence
  Description of Artificial Sequence: Synthetic oligonucleotide
  Sense strand starting at position 1055 of SEQ ID NO: 1886310
cugggaggugcagaguuaa

SEQ ID NO: 2400769 - RNA, 19 nt, Artificial Sequence
  Description of Artificial Sequence: Synthetic oligonucleotide
  Antisense strand to SEQ ID NO: 2400768
uuaacucugcaccucccag

SEQ ID NO: 2400770 - RNA, 19 nt, Artificial Sequence
  Description of Artificial Sequence: Synthetic oligonucleotide
  Sense strand starting at position 1187 of SEQ ID NO: 1886310
gcagaaaugcauggaugca

SEQ ID NO: 2400771 - RNA, 19 nt, Artificial Sequence
  Description of Artificial Sequence: Synthetic oligonucleotide
  Antisense strand to SEQ ID NO: 2400770
ugcauccaugcauuucugc

SEQ ID NO: 2400772 - RNA, 19 nt, Artificial Sequence
  Description of Artificial Sequence: Synthetic oligonucleotide
  Sense strand starting at position 1251 of SEQ ID NO: 1886310
gcuaaagagcacugacauu

SEQ ID NO: 2400773 - RNA, 19 nt, Artificial Sequence
  Description of Artificial Sequence: Synthetic oligonucleotide
  Antisense strand to SEQ ID NO: 2400772
aaugucagugcucuuuagc

SEQ ID NO: 2400774 - RNA, 19 nt, Artificial Sequence
  Description of Artificial Sequence: Synthetic oligonucleotide
  Sense strand starting at position 1383 of SEQ ID NO: 1886310
cagggacuccuuugguauc

SEQ ID NO: 2400775 - RNA, 19 nt, Artificial Sequence
  Description of Artificial Sequence: Synthetic oligonucleotide
  Antisense strand to SEQ ID NO: 2400774
gauaccaaaggagucccug

SEQ ID NO: 2400776 - RNA, 19 nt, Artificial Sequence
  Description of Artificial Sequence: Synthetic oligonucleotide
  Sense strand starting at position 1531 of SEQ ID NO: 1886310
ggacaaaguuagccaacaa

SEQ ID NO: 2400777 - RNA, 19 nt, Artificial Sequence
  Description of Artificial Sequence: Synthetic oligonucleotide
  Antisense strand to SEQ ID NO: 2400776
uuguuggcuaacuuugucc

SEQ ID NO: 2400778 - RNA, 19 nt, Artificial Sequence
  Description of Artificial Sequence: Synthetic oligonucleotide
  Sense strand starting at position 2038 of SEQ ID NO: 1886310
ggugcuuuggaaugaaauc

SEQ ID NO: 2400779 - RNA, 19 nt, Artificial Sequence
  Description of Artificial Sequence: Synthetic oligonucleotide
  Antisense strand to SEQ ID NO: 2400778
gauuucauuccaaagcacc

SEQ ID NO: 2400780 - RNA, 19 nt, Artificial Sequence
  Description of Artificial Sequence: Synthetic oligonucleotide
  Sense strand starting at position 2039 of SEQ ID NO: 1886310
gugcuuuggaaugaaauca

SEQ ID NO: 2400781 - RNA, 19 nt, Artificial Sequence
  Description of Artificial Sequence: Synthetic oligonucleotide
  Antisense strand to SEQ ID NO: 2400780
ugauuucauuccaaagcac

SEQ ID NO: 2400782 - RNA, 19 nt, Artificial Sequence
  Description of Artificial Sequence: Synthetic oligonucleotide
  Sense strand starting at position 2092 of SEQ ID NO: 1886310
gaguccacaccauguguuu

SEQ ID NO: 2400783 - RNA, 19 nt, Artificial Sequence
  Description of Artificial Sequence: Synthetic oligonucleotide
  Antisense strand to SEQ ID NO: 2400782
aaacacaugguguggacuc

SEQ ID NO: 2400784 - RNA, 19 nt, Artificial Sequence
  Description of Artificial Sequence: Synthetic oligonucleotide
  Sense strand starting at position 2129 of SEQ ID NO: 1886310
cuccaagaaucagacaaga

SEQ ID NO: 2400785 - RNA, 19 nt, Artificial Sequence
  Description of Artificial Sequence: Synthetic oligonucleotide
  Antisense strand to SEQ ID NO: 2400784
ucuugucugauucuuggag

SEQ ID NO: 2400786 - RNA, 19 nt, Artificial Sequence
  Description of Artificial Sequence: Synthetic oligonucleotide
  Sense strand starting at position 2196 of SEQ ID NO: 1886310
cugugaagugcagaggaaa

SEQ ID NO: 2400787 - RNA, 19 nt, Artificial Sequence
  Description of Artificial Sequence: Synthetic oligonucleotide
  Antisense strand to SEQ ID NO: 2400786
uuuccucugcacuucacag

SEQ ID NO: 2400788 - RNA, 19 nt, Artificial Sequence
  Description of Artificial Sequence: Synthetic oligonucleotide
  Sense strand starting at position 2253 of SEQ ID NO: 1886310
ucacgagggccauguuauc

SEQ ID NO: 2400789 - RNA, 19 nt, Artificial Sequence
  Description of Artificial Sequence: Synthetic oligonucleotide
  Antisense strand to SEQ ID NO: 2400788
gauaacauggcccucguga

SEQ ID NO: 2400790 - RNA, 19 nt, Artificial Sequence
  Description of Artificial Sequence: Synthetic oligonucleotide
  Sense strand starting at position 2280 of SEQ ID NO: 1886310
ugugacacaucugcuauuu

SEQ ID NO: 2400791 - RNA, 19 nt, Artificial Sequence
  Description of Artificial Sequence: Synthetic oligonucleotide
  Antisense strand to SEQ ID NO: 2400790
aaauagcagaugugucaca

SEQ ID NO: 2400792 - RNA, 19 nt, Artificial Sequence
  Description of Artificial Sequence: Synthetic oligonucleotide
  Sense strand starting at position 2290 of SEQ ID NO: 1886310
cugcuauuugccugucuau

SEQ ID NO: 2400793 - RNA, 19 nt, Artificial Sequence
  Description of Artificial Sequence: Synthetic oligonucleotide
  Antisense strand to SEQ ID NO: 2400792
auagacaggcaaauagcag

SEQ ID NO: 2400794 - RNA, 19 nt, Artificial Sequence
  Description of Artificial Sequence: Synthetic oligonucleotide
  Sense strand starting at position 2444 of SEQ ID NO: 1886310
cugcaauggugcucacaaa

SEQ ID NO: 2400795 - RNA, 19 nt, Artificial Sequence
  Description of Artificial Sequence: Synthetic oligonucleotide
  Antisense strand to SEQ ID NO: 2400794
uuugugagcaccauugcag

SEQ ID NO: 2400796 - RNA, 19 nt, Artificial Sequence
  Description of Artificial Sequence: Synthetic oligonucleotide
  Sense strand starting at position 2503 of SEQ ID NO: 1886310
cuaaaucagguuuggaaua

SEQ ID NO: 2400797 - RNA, 19 nt, Artificial Sequence
  Description of Artificial Sequence: Synthetic oligonucleotide
  Antisense strand to SEQ ID NO: 2400796
uauuccaaaccugauuuag

SEQ ID NO: 2400798 - RNA, 19 nt, Artificial Sequence
  Description of Artificial Sequence: Synthetic oligonucleotide
  Sense strand starting at position 2526 of SEQ ID NO: 1886310
agagacuccuugccugaca

SEQ ID NO: 2400799 - RNA, 19 nt, Artificial Sequence
  Description of Artificial Sequence: Synthetic oligonucleotide
  Antisense strand to SEQ ID NO: 2400798
ugucaggcaaggagucucu

SEQ ID NO: 2400800 - RNA, 19 nt, Artificial Sequence
  Description of Artificial Sequence: Synthetic oligonucleotide
  Sense strand starting at position 2691 of SEQ ID NO: 1886310
gugagaauaguguaggcuu

SEQ ID NO: 2400801 - RNA, 19 nt, Artificial Sequence
  Description of Artificial Sequence: Synthetic oligonucleotide
  Antisense strand to SEQ ID NO: 2400800
aagccuacacuauucucac

SEQ ID NO: 2400802 - RNA, 19 nt, Artificial Sequence
  Description of Artificial Sequence: Synthetic oligonucleotide
  Sense strand starting at position 2733 of SEQ ID NO: 1886310
ucugucuuccucugggaau

SEQ ID NO: 2400803 - RNA, 19 nt, Artificial Sequence
  Description of Artificial Sequence: Synthetic oligonucleotide
  Antisense strand to SEQ ID NO: 2400802
auucccagaggaagacaga

SEQ ID NO: 2400804 - RNA, 19 nt, Artificial Sequence
  Description of Artificial Sequence: Synthetic oligonucleotide
  Sense strand starting at position 2840 of SEQ ID NO: 1886310
ucagacaguaggugaguua

SEQ ID NO: 2400805 - RNA, 19 nt, Artificial Sequence
  Description of Artificial Sequence: Synthetic oligonucleotide
  Antisense strand to SEQ ID NO: 2400804
uaacucaccuacugucuga

SEQ ID NO: 2400806 - RNA, 19 nt, Artificial Sequence
  Description of Artificial Sequence: Synthetic oligonucleotide
  Sense strand starting at position 2841 of SEQ ID NO: 1886310
cagacaguaggugaguuau

SEQ ID NO: 2400807 - RNA, 19 nt, Artificial Sequence
  Description of Artificial Sequence: Synthetic oligonucleotide
  Antisense strand to SEQ ID NO: 2400806
auaacucaccuacugucug

SEQ ID NO: 2400808 - RNA, 19 nt, Artificial Sequence
  Description of Artificial Sequence: Synthetic oligonucleotide
  Sense strand starting at position 3168 of SEQ ID NO: 1886310
aucagagcgcucugggaaa

SEQ ID NO: 2400809 - RNA, 19 nt, Artificial Sequence
  Description of Artificial Sequence: Synthetic oligonucleotide
  Antisense strand to SEQ ID NO: 2400808
uuucccagagcgcucugau

SEQ ID NO: 2400810 - RNA, 19 nt, Artificial Sequence
  Description of Artificial Sequence: Synthetic oligonucleotide
  Sense strand starting at position 3170 of SEQ ID NO: 1886310
cagagcgcucugggaaaga

SEQ ID NO: 2400811 - RNA, 19 nt, Artificial Sequence
  Description of Artificial Sequence: Synthetic oligonucleotide
  Antisense strand to SEQ ID NO: 2400810
ucuuucccagagcgcucug

SEQ ID NO: 2400812 - RNA, 19 nt, Artificial Sequence
  Description of Artificial Sequence: Synthetic oligonucleotide
  Sense strand starting at position 3414 of SEQ ID NO: 1886310
cugcgauacaucuggaauc

SEQ ID NO: 2400813 - RNA, 19 nt, Artificial Sequence
  Description of Artificial Sequence: Synthetic oligonucleotide
  Antisense strand to SEQ ID NO: 2400812
gauuccagauguaucgcag

SEQ ID NO: 2400814 - RNA, 19 nt, Artificial Sequence
  Description of Artificial Sequence: Synthetic oligonucleotide
  Sense strand starting at position 3416 of SEQ ID NO: 1886310
gcgauacaucuggaaucug

SEQ ID NO: 2400815 - RNA, 19 nt, Artificial Sequence
  Description of Artificial Sequence: Synthetic oligonucleotide
  Antisense strand to SEQ ID NO: 2400814
cagauuccagauguaucgc

SEQ ID NO: 2400816 - RNA, 19 nt, Artificial Sequence
  Description of Artificial Sequence: Synthetic oligonucleotide
  Sense strand starting at position 3461 of SEQ ID NO: 1886310
cacagaaaugcacguacau

SEQ ID NO: 2400817 - RNA, 19 nt, Artificial Sequence
  Description of Artificial Sequence: Synthetic oligonucleotide
  Antisense strand to SEQ ID NO: 2400816
auguacgugcauuucugug

SEQ ID NO: 2400818 - RNA, 19 nt, Artificial Sequence
  Description of Artificial Sequence: Synthetic oligonucleotide
  Sense strand starting at position 3495 of SEQ ID NO: 1886310
gguucagggugcccuuaua

SEQ ID NO: 2400819 - RNA, 19 nt, Artificial Sequence
  Description of Artificial Sequence: Synthetic oligonucleotide
  Antisense strand to SEQ ID NO: 2400818
uauaagggcacccugaacc

SEQ ID NO: 2400820 - RNA, 19 nt, Artificial Sequence
  Description of Artificial Sequence: Synthetic oligonucleotide
  Sense strand starting at position 3515 of SEQ ID NO: 1886310
ugcaucaucucgcuaaaga

SEQ ID NO: 2400821 - RNA, 19 nt, Artificial Sequence
  Description of Artificial Sequence: Synthetic oligonucleotide
  Antisense strand to SEQ ID NO: 2400820
ucuuuagcgagaugaugca

SEQ ID NO: 2400822 - RNA, 19 nt, Artificial Sequence
  Description of Artificial Sequence: Synthetic oligonucleotide
  Sense strand starting at position 3516 of SEQ ID NO: 1886310
gcaucaucucgcuaaagag

SEQ ID NO: 2400823 - RNA, 19 nt, Artificial Sequence
  Description of Artificial Sequence: Synthetic oligonucleotide
  Antisense strand to SEQ ID NO: 2400822
cucuuuagcgagaugaugc

SEQ ID NO: 2400824 - RNA, 19 nt, Artificial Sequence
  Description of Artificial Sequence: Synthetic oligonucleotide
  Sense strand starting at position 3526 of SEQ ID NO: 1886310
gcuaaagagcacuaauguu

SEQ ID NO: 2400825 - RNA, 19 nt, Artificial Sequence
  Description of Artificial Sequence: Synthetic oligonucleotide
  Antisense strand to SEQ ID NO: 2400824
aacauuagugcucuuuagc

SEQ ID NO: 2400826 - RNA, 19 nt, Artificial Sequence
  Description of Artificial Sequence: Synthetic oligonucleotide
  Sense strand starting at position 3578 of SEQ ID NO: 1886310
ugcaaugcagcucacaaua

SEQ ID NO: 2400827 - RNA, 19 nt, Artificial Sequence
  Description of Artificial Sequence: Synthetic oligonucleotide
  Antisense strand to SEQ ID NO: 2400826
uauugugagcugcauugca

SEQ ID NO: 2400828 - RNA, 19 nt, Artificial Sequence
  Description of Artificial Sequence: Synthetic oligonucleotide
  Sense strand starting at position 3660 of SEQ ID NO: 1886310
agucucauugccuaucaga

SEQ ID NO: 2400829 - RNA, 19 nt, Artificial Sequence
  Description of Artificial Sequence: Synthetic oligonucleotide
  Antisense strand to SEQ ID NO: 2400828
ucugauaggcaaugagacu

SEQ ID NO: 2400830 - RNA, 19 nt, Artificial Sequence
  Description of Artificial Sequence: Synthetic oligonucleotide
  Sense strand starting at position 3713 of SEQ ID NO: 1886310
acaugcaugugcucacaau

SEQ ID NO: 2400831 - RNA, 19 nt, Artificial Sequence
  Description of Artificial Sequence: Synthetic oligonucleotide
  Antisense strand to SEQ ID NO: 2400830
auugugagcacaugcaugu

SEQ ID NO: 2400832 - RNA, 19 nt, Artificial Sequence
  Description of Artificial Sequence: Synthetic oligonucleotide
  Sense strand starting at position 3714 of SEQ ID NO: 1886310
caugcaugugcucacaaug

SEQ ID NO: 2400833 - RNA, 19 nt, Artificial Sequence
  Description of Artificial Sequence: Synthetic oligonucleotide
  Antisense strand to SEQ ID NO: 2400832
cauugugagcacaugcaug

SEQ ID NO: 2400834 - RNA, 19 nt, Artificial Sequence
  Description of Artificial Sequence: Synthetic oligonucleotide
  Sense strand starting at position 80 of SEQ ID NO: 1886311
agcucaaaugccuaaugga

SEQ ID NO: 2400835 - RNA, 19 nt, Artificial Sequence
  Description of Artificial Sequence: Synthetic oligonucleotide
  Antisense strand to SEQ ID NO: 2400834
uccauuaggcauuugagcu

SEQ ID NO: 2400836 - RNA, 19 nt, Artificial Sequence
  Description of Artificial Sequence: Synthetic oligonucleotide
  Sense strand starting at position 283 of SEQ ID NO: 1886311
ggaauaugcuguccaguac

SEQ ID NO: 2400837 - RNA, 19 nt, Artificial Sequence
  Description of Artificial Sequence: Synthetic oligonucleotide
  Antisense strand to SEQ ID NO: 2400836
guacuggacagcauauucc

SEQ ID NO: 2400838 - RNA, 19 nt, Artificial Sequence
  Description of Artificial Sequence: Synthetic oligonucleotide
  Sense strand starting at position 284 of SEQ ID NO: 1886311
gaauaugcuguccaguaca

SEQ ID NO: 2400839 - RNA, 19 nt, Artificial Sequence
  Description of Artificial Sequence: Synthetic oligonucleotide
  Antisense strand to SEQ ID NO: 2400838
uguacuggacagcauauuc

SEQ ID NO: 2400840 - RNA, 19 nt, Artificial Sequence
  Description of Artificial Sequence: Synthetic oligonucleotide
  Sense strand starting at position 354 of SEQ ID NO: 1886311
gggacugguuuccuccuau

SEQ ID NO: 2400841 - RNA, 19 nt, Artificial Sequence
  Description of Artificial Sequence: Synthetic oligonucleotide
  Antisense strand to SEQ ID NO: 2400840
auaggaggaaaccaguccc

SEQ ID NO: 2400842 - RNA, 19 nt, Artificial Sequence
  Description of Artificial Sequence: Synthetic oligonucleotide
  Sense strand starting at position 360 of SEQ ID NO: 1886311
gguuuccuccuauggauau

SEQ ID NO: 2400843 - RNA, 19 nt, Artificial Sequence
  Description of Artificial Sequence: Synthetic oligonucleotide
  Antisense strand to SEQ ID NO: 2400842
auauccauaggaggaaacc

SEQ ID NO: 2400844 - RNA, 19 nt, Artificial Sequence
  Description of Artificial Sequence: Synthetic oligonucleotide
  Sense strand starting at position 402 of SEQ ID NO: 1886311
ucuggcuccucugcagaaa

SEQ ID NO: 2400845 - RNA, 19 nt, Artificial Sequence
  Description of Artificial Sequence: Synthetic oligonucleotide
  Antisense strand to SEQ ID NO: 2400844
uuucugcagaggagccaga

SEQ ID NO: 2400846 - RNA, 19 nt, Artificial Sequence
  Description of Artificial Sequence: Synthetic oligonucleotide
  Sense strand starting at position 496 of SEQ ID NO: 1886311
cccaaaugagggugaaagu

SEQ ID NO: 2400847 - RNA, 19 nt, Artificial Sequence
  Description of Artificial Sequence: Synthetic oligonucleotide
  Antisense strand to SEQ ID NO: 2400846
acuuucacccucauuuggg

SEQ ID NO: 2400848 - RNA, 19 nt, Artificial Sequence
  Description of Artificial Sequence: Synthetic oligonucleotide
  Sense strand starting at position 593 of SEQ ID NO: 1886311
agccaaggaguuugaauca

SEQ ID NO: 2400849 - RNA, 19 nt, Artificial Sequence
  Description of Artificial Sequence: Synthetic oligonucleotide
  Antisense strand to SEQ ID NO: 2400848
ugauucaaacuccuuggcu

SEQ ID NO: 2400850 - RNA, 19 nt, Artificial Sequence
  Description of Artificial Sequence: Synthetic oligonucleotide
  Sense strand starting at position 914 of SEQ ID NO: 1886311
augcuuuaagaaggaauca

SEQ ID NO: 2400851 - RNA, 19 nt, Artificial Sequence
  Description of Artificial Sequence: Synthetic oligonucleotide
  Antisense strand to SEQ ID NO: 2400850
ugauuccuucuuaaagcau

SEQ ID NO: 2400852 - RNA, 19 nt, Artificial Sequence
  Description of Artificial Sequence: Synthetic oligonucleotide
  Sense strand starting at position 1010 of SEQ ID NO: 1886311
gaucgcaugagacgacaau

SEQ ID NO: 2400853 - RNA, 19 nt, Artificial Sequence
  Description of Artificial Sequence: Synthetic oligonucleotide
  Antisense strand to SEQ ID NO: 2400852
auugucgucucaugcgauc

SEQ ID NO: 2400854 - RNA, 19 nt, Artificial Sequence
  Description of Artificial Sequence: Synthetic oligonucleotide
  Sense strand starting at position 1257 of SEQ ID NO: 1886311
acgucaucccacuaaagag

SEQ ID NO: 2400855 - RNA, 19 nt, Artificial Sequence
  Description of Artificial Sequence: Synthetic oligonucleotide
  Antisense strand to SEQ ID NO: 2400854
cucuuuagugggaugacgu

SEQ ID NO: 2400856 - RNA, 19 nt, Artificial Sequence
  Description of Artificial Sequence: Synthetic oligonucleotide
  Sense strand starting at position 1540 of SEQ ID NO: 1886311
ggacaaaguuagccaacaa

SEQ ID NO: 2400857 - RNA, 19 nt, Artificial Sequence
  Description of Artificial Sequence: Synthetic oligonucleotide
  Antisense strand to SEQ ID NO: 2400856
uuguuggcuaacuuugucc

SEQ ID NO: 2400858 - RNA, 19 nt, Artificial Sequence
  Description of Artificial Sequence: Synthetic oligonucleotide
  Sense strand starting at position 1605 of SEQ ID NO: 1886311
guuuccuuccaggaacuca

SEQ ID NO: 2400859 - RNA, 19 nt, Artificial Sequence
  Description of Artificial Sequence: Synthetic oligonucleotide
  Antisense strand to SEQ ID NO: 2400858
ugaguuccuggaaggaaac

SEQ ID NO: 2400860 - RNA, 19 nt, Artificial Sequence
  Description of Artificial Sequence: Synthetic oligonucleotide
  Sense strand starting at position 1709 of SEQ ID NO: 1886311
gcagacaaugcauguguua

SEQ ID NO: 2400861 - RNA, 19 nt, Artificial Sequence
  Description of Artificial Sequence: Synthetic oligonucleotide
  Antisense strand to SEQ ID NO: 2400860
uaacacaugcauugucugc

SEQ ID NO: 2400862 - RNA, 19 nt, Artificial Sequence
  Description of Artificial Sequence: Synthetic oligonucleotide
  Sense strand starting at position 1831 of SEQ ID NO: 1886311
aacggaugccuugguauaa

SEQ ID NO: 2400863 - RNA, 19 nt, Artificial Sequence
  Description of Artificial Sequence: Synthetic oligonucleotide
  Antisense strand to SEQ ID NO: 2400862
uuauaccaaggcauccguu

SEQ ID NO: 2400864 - RNA, 19 nt, Artificial Sequence
  Description of Artificial Sequence: Synthetic oligonucleotide
  Sense strand starting at position 1842 of SEQ ID NO: 1886311
ugguauaacccaugucaaa

SEQ ID NO: 2400865 - RNA, 19 nt, Artificial Sequence
  Description of Artificial Sequence: Synthetic oligonucleotide
  Antisense strand to SEQ ID NO: 2400864
uuugacauggguuauacca

SEQ ID NO: 2400866 - RNA, 19 nt, Artificial Sequence
  Description of Artificial Sequence: Synthetic oligonucleotide
  Sense strand starting at position 2007 of SEQ ID NO: 1886311
aguauuugucccugcaaau

SEQ ID NO: 2400867 - RNA, 19 nt, Artificial Sequence
  Description of Artificial Sequence: Synthetic oligonucleotide
  Antisense strand to SEQ ID NO: 2400866
auuugcagggacaaauacu

SEQ ID NO: 2400868 - RNA, 19 nt, Artificial Sequence
  Description of Artificial Sequence: Synthetic oligonucleotide
  Sense strand starting at position 2035 of SEQ ID NO: 1886311
cagagugcucugggaaaga

SEQ ID NO: 2400869 - RNA, 19 nt, Artificial Sequence
  Description of Artificial Sequence: Synthetic oligonucleotide
  Antisense strand to SEQ ID NO: 2400868
ucuuucccagagcacucug

SEQ ID NO: 2400870 - RNA, 19 nt, Artificial Sequence
  Description of Artificial Sequence: Synthetic oligonucleotide
  Sense strand starting at position 2048 of SEQ ID NO: 1886311
gaaagaagugcuuacauuc

SEQ ID NO: 2400871 - RNA, 19 nt, Artificial Sequence
  Description of Artificial Sequence: Synthetic oligonucleotide
  Antisense strand to SEQ ID NO: 2400870
gaauguaagcacuucuuuc

SEQ ID NO: 2400872 - RNA, 19 nt, Artificial Sequence
  Description of Artificial Sequence: Synthetic oligonucleotide
  Sense strand starting at position 2197 of SEQ ID NO: 1886311
cugggaggugcagaguuaa

SEQ ID NO: 2400873 - RNA, 19 nt, Artificial Sequence
  Description of Artificial Sequence: Synthetic oligonucleotide
  Antisense strand to SEQ ID NO: 2400872
uuaacucugcaccucccag

SEQ ID NO: 2400874 - RNA, 19 nt, Artificial Sequence
  Description of Artificial Sequence: Synthetic oligonucleotide
  Sense strand starting at position 2329 of SEQ ID NO: 1886311
gcagaaaugcauggaugca

SEQ ID NO: 2400875 - RNA, 19 nt, Artificial Sequence
  Description of Artificial Sequence: Synthetic oligonucleotide
  Antisense strand to SEQ ID NO: 2400874
ugcauccaugcauuucugc

SEQ ID NO: 2400876 - RNA, 19 nt, Artificial Sequence
  Description of Artificial Sequence: Synthetic oligonucleotide
  Sense strand starting at position 2393 of SEQ ID NO: 1886311
gcuaaagagcacugacauu

SEQ ID NO: 2400877 - RNA, 19 nt, Artificial Sequence
  Description of Artificial Sequence: Synthetic oligonucleotide
  Antisense strand to SEQ ID NO: 2400876
aaugucagugcucuuuagc

SEQ ID NO: 2400878 - RNA, 19 nt, Artificial Sequence
  Description of Artificial Sequence: Synthetic oligonucleotide
  Sense strand starting at position 2525 of SEQ ID NO: 1886311
cagggacuccuuugguauc

SEQ ID NO: 2400879 - RNA, 19 nt, Artificial Sequence
  Description of Artificial Sequence: Synthetic oligonucleotide
  Antisense strand to SEQ ID NO: 2400878
gauaccaaaggagucccug

SEQ ID NO: 2400880 - RNA, 19 nt, Artificial Sequence
  Description of Artificial Sequence: Synthetic oligonucleotide
  Sense strand starting at position 2528 of SEQ ID NO: 1886311
ggacuccuuugguaucaga

SEQ ID NO: 2400881 - RNA, 19 nt, Artificial Sequence
  Description of Artificial Sequence: Synthetic oligonucleotide
  Antisense strand to SEQ ID NO: 2400880
ucugauaccaaaggagucc

SEQ ID NO: 2400882 - RNA, 19 nt, Artificial Sequence
  Description of Artificial Sequence: Synthetic oligonucleotide
  Sense strand starting at position 3180 of SEQ ID NO: 1886311
ggugcuuuggaaugaaauc

SEQ ID NO: 2400883 - RNA, 19 nt, Artificial Sequence
  Description of Artificial Sequence: Synthetic oligonucleotide
  Antisense strand to SEQ ID NO: 2400882
gauuucauuccaaagcacc

SEQ ID NO: 2400884 - RNA, 19 nt, Artificial Sequence
  Description of Artificial Sequence: Synthetic oligonucleotide
  Sense strand starting at position 3181 of SEQ ID NO: 1886311
gugcuuuggaaugaaauca

SEQ ID NO: 2400885 - RNA, 19 nt, Artificial Sequence
  Description of Artificial Sequence: Synthetic oligonucleotide
  Antisense strand to SEQ ID NO: 2400884
ugauuucauuccaaagcac

SEQ ID NO: 2400886 - RNA, 19 nt, Artificial Sequence
  Description of Artificial Sequence: Synthetic oligonucleotide
  Sense strand starting at position 3234 of SEQ ID NO: 1886311
gaguccacaccauguguuu

SEQ ID NO: 2400887 - RNA, 19 nt, Artificial Sequence
  Description of Artificial Sequence: Synthetic oligonucleotide
  Antisense strand to SEQ ID NO: 2400886
aaacacaugguguggacuc

SEQ ID NO: 2400888 - RNA, 19 nt, Artificial Sequence
  Description of Artificial Sequence: Synthetic oligonucleotide
  Sense strand starting at position 3271 of SEQ ID NO: 1886311
cuccaagaaucagacaaga

SEQ ID NO: 2400889 - RNA, 19 nt, Artificial Sequence
  Description of Artificial Sequence: Synthetic oligonucleotide
  Antisense strand to SEQ ID NO: 2400888
ucuugucugauucuuggag

SEQ ID NO: 2400890 - RNA, 19 nt, Artificial Sequence
  Description of Artificial Sequence: Synthetic oligonucleotide
  Sense strand starting at position 3338 of SEQ ID NO: 1886311
cugugaagugcagaggaaa

SEQ ID NO: 2400891 - RNA, 19 nt, Artificial Sequence
  Description of Artificial Sequence: Synthetic oligonucleotide
  Antisense strand to SEQ ID NO: 2400890
uuuccucugcacuucacag

SEQ ID NO: 2400892 - RNA, 19 nt, Artificial Sequence
  Description of Artificial Sequence: Synthetic oligonucleotide
  Sense strand starting at position 3395 of SEQ ID NO: 1886311
ucacgagggccauguuauc

SEQ ID NO: 2400893 - RNA, 19 nt, Artificial Sequence
  Description of Artificial Sequence: Synthetic oligonucleotide
  Antisense strand to SEQ ID NO: 2400892
gauaacauggcccucguga

SEQ ID NO: 2400894 - RNA, 19 nt, Artificial Sequence
  Description of Artificial Sequence: Synthetic oligonucleotide
  Sense strand starting at position 3422 of SEQ ID NO: 1886311
ugugacacaucugcuauuu

SEQ ID NO: 2400895 - RNA, 19 nt, Artificial Sequence
  Description of Artificial Sequence: Synthetic oligonucleotide
  Antisense strand to SEQ ID NO: 2400894
aaauagcagaugugucaca

SEQ ID NO: 2400896 - RNA, 19 nt, Artificial Sequence
  Description of Artificial Sequence: Synthetic oligonucleotide
  Sense strand starting at position 3432 of SEQ ID NO: 1886311
cugcuauuugccugucuau

SEQ ID NO: 2400897 - RNA, 19 nt, Artificial Sequence
  Description of Artificial Sequence: Synthetic oligonucleotide
  Antisense strand to SEQ ID NO: 2400896
auagacaggcaaauagcag

SEQ ID NO: 2400898 - RNA, 19 nt, Artificial Sequence
  Description of Artificial Sequence: Synthetic oligonucleotide
  Sense strand starting at position 3586 of SEQ ID NO: 1886311
cugcaauggugcucacaaa

SEQ ID NO: 2400899 - RNA, 19 nt, Artificial Sequence
  Description of Artificial Sequence: Synthetic oligonucleotide
  Antisense strand to SEQ ID NO: 2400898
uuugugagcaccauugcag

SEQ ID NO: 2400900 - RNA, 19 nt, Artificial Sequence
  Description of Artificial Sequence: Synthetic oligonucleotide
  Sense strand starting at position 3645 of SEQ ID NO: 1886311
cuaaaucagguuuggaaua

SEQ ID NO: 2400901 - RNA, 19 nt, Artificial Sequence
  Description of Artificial Sequence: Synthetic oligonucleotide
  Antisense strand to SEQ ID NO: 2400900
uauuccaaaccugauuuag

SEQ ID NO: 2400902 - RNA, 19 nt, Artificial Sequence
  Description of Artificial Sequence: Synthetic oligonucleotide
  Sense strand starting at position 3668 of SEQ ID NO: 1886311
agagacuccuugccugaca

SEQ ID NO: 2400903 - RNA, 19 nt, Artificial Sequence
  Description of Artificial Sequence: Synthetic oligonucleotide
  Antisense strand to SEQ ID NO: 2400902
ugucaggcaaggagucucu

SEQ ID NO: 2400904 - RNA, 19 nt, Artificial Sequence
  Description of Artificial Sequence: Synthetic oligonucleotide
  Sense strand starting at position 3734 of SEQ ID NO: 1886311
cucauaacauaugggauau

SEQ ID NO: 2400905 - RNA, 19 nt, Artificial Sequence
  Description of Artificial Sequence: Synthetic oligonucleotide
  Antisense strand to SEQ ID NO: 2400904
auaucccauauguuaugag

SEQ ID NO: 2400906 - RNA, 19 nt, Artificial Sequence
  Description of Artificial Sequence: Synthetic oligonucleotide
  Sense strand starting at position 3833 of SEQ ID NO: 1886311
gugagaauaguguaggcuu

SEQ ID NO: 2400907 - RNA, 19 nt, Artificial Sequence
  Description of Artificial Sequence: Synthetic oligonucleotide
  Antisense strand to SEQ ID NO: 2400906
aagccuacacuauucucac

SEQ ID NO: 2400908 - RNA, 19 nt, Artificial Sequence
  Description of Artificial Sequence: Synthetic oligonucleotide
  Sense strand starting at position 3875 of SEQ ID NO: 1886311
ucugucuuccucugggaau

SEQ ID NO: 2400909 - RNA, 19 nt, Artificial Sequence
  Description of Artificial Sequence: Synthetic oligonucleotide
  Antisense strand to SEQ ID NO: 2400908
auucccagaggaagacaga

SEQ ID NO: 2400910 - RNA, 19 nt, Artificial Sequence
  Description of Artificial Sequence: Synthetic oligonucleotide
  Sense strand starting at position 3982 of SEQ ID NO: 1886311
ucagacaguaggugaguua

SEQ ID NO: 2400911 - RNA, 19 nt, Artificial Sequence
  Description of Artificial Sequence: Synthetic oligonucleotide
  Antisense strand to SEQ ID NO: 2400910
uaacucaccuacugucuga

SEQ ID NO: 2400912 - RNA, 19 nt, Artificial Sequence
  Description of Artificial Sequence: Synthetic oligonucleotide
  Sense strand starting at position 3983 of SEQ ID NO: 1886311
cagacaguaggugaguuau

SEQ ID NO: 2400913 - RNA, 19 nt, Artificial Sequence
  Description of Artificial Sequence: Synthetic oligonucleotide
  Antisense strand to SEQ ID NO: 2400912
auaacucaccuacugucug

SEQ ID NO: 2400914 - RNA, 19 nt, Artificial Sequence
  Description of Artificial Sequence: Synthetic oligonucleotide
  Sense strand starting at position 144 of SEQ ID NO: 1886312
agucuuuaucccugcaaag

SEQ ID NO: 2400915 - RNA, 19 nt, Artificial Sequence
  Description of Artificial Sequence: Synthetic oligonucleotide
  Antisense strand to SEQ ID NO: 2400914
cuuugcagggauaaagacu

SEQ ID NO: 2400916 - RNA, 19 nt, Artificial Sequence
  Description of Artificial Sequence: Synthetic oligonucleotide
  Sense strand starting at position 407 of SEQ ID NO: 1886312
cucgacucacugugguaua

SEQ ID NO: 2400917 - RNA, 19 nt, Artificial Sequence
  Description of Artificial Sequence: Synthetic oligonucleotide
  Antisense strand to SEQ ID NO: 2400916
uauaccacagugagucgag

SEQ ID NO: 2400918 - RNA, 19 nt, Artificial Sequence
  Description of Artificial Sequence: Synthetic oligonucleotide
  Sense strand starting at position 473 of SEQ ID NO: 1886312
ugggucuacccaggaauga

SEQ ID NO: 2400919 - RNA, 19 nt, Artificial Sequence
  Description of Artificial Sequence: Synthetic oligonucleotide
  Antisense strand to SEQ ID NO: 2400918
ucauuccuggguagaccca

SEQ ID NO: 2400920 - RNA, 19 nt, Artificial Sequence
  Description of Artificial Sequence: Synthetic oligonucleotide
  Sense strand starting at position 494 of SEQ ID NO: 1886312
auagcaggcacguguuaau

SEQ ID NO: 2400921 - RNA, 19 nt, Artificial Sequence
  Description of Artificial Sequence: Synthetic oligonucleotide
  Antisense strand to SEQ ID NO: 2400920
auuaacacgugccugcuau

SEQ ID NO: 2400922 - RNA, 19 nt, Artificial Sequence
  Description of Artificial Sequence: Synthetic oligonucleotide
  Sense strand starting at position 530 of SEQ ID NO: 1886312
gcuacagagcccuaagugu

SEQ ID NO: 2400923 - RNA, 19 nt, Artificial Sequence
  Description of Artificial Sequence: Synthetic oligonucleotide
  Antisense strand to SEQ ID NO: 2400922
acacuuagggcucuguagc

SEQ ID NO: 2400924 - RNA, 19 nt, Artificial Sequence
  Description of Artificial Sequence: Synthetic oligonucleotide
  Sense strand starting at position 595 of SEQ ID NO: 1886312
ccuccucuuggucaucaga

SEQ ID NO: 2400925 - RNA, 19 nt, Artificial Sequence
  Description of Artificial Sequence: Synthetic oligonucleotide
  Antisense strand to SEQ ID NO: 2400924
ucugaugaccaagaggagg

SEQ ID NO: 2400926 - RNA, 19 nt, Artificial Sequence
  Description of Artificial Sequence: Synthetic oligonucleotide
  Sense strand starting at position 633 of SEQ ID NO: 1886312
cuauuuaaaugaggagagu

SEQ ID NO: 2400927 - RNA, 19 nt, Artificial Sequence
  Description of Artificial Sequence: Synthetic oligonucleotide
  Antisense strand to SEQ ID NO: 2400926
acucuccucauuuaaauag

SEQ ID NO: 2400928 - RNA, 19 nt, Artificial Sequence
  Description of Artificial Sequence: Synthetic oligonucleotide
  Sense strand starting at position 842 of SEQ ID NO: 1886312
ggcacuguggcugagaaca

SEQ ID NO: 2400929 - RNA, 19 nt, Artificial Sequence
  Description of Artificial Sequence: Synthetic oligonucleotide
  Antisense strand to SEQ ID NO: 2400928
uguucucagccacagugcc

SEQ ID NO: 2400930 - RNA, 19 nt, Artificial Sequence
  Description of Artificial Sequence: Synthetic oligonucleotide
  Sense strand starting at position 874 of SEQ ID NO: 1886312
ggcacuugccuuugaacau

SEQ ID NO: 2400931 - RNA, 19 nt, Artificial Sequence
  Description of Artificial Sequence: Synthetic oligonucleotide
  Antisense strand to SEQ ID NO: 2400930
auguucaaaggcaagugcc

SEQ ID NO: 2400932 - RNA, 19 nt, Artificial Sequence
  Description of Artificial Sequence: Synthetic oligonucleotide
  Sense strand starting at position 968 of SEQ ID NO: 1886312
aaagaagacuccugggaag

SEQ ID NO: 2400933 - RNA, 19 nt, Artificial Sequence
  Description of Artificial Sequence: Synthetic oligonucleotide
  Antisense strand to SEQ ID NO: 2400932
cuucccaggagucuucuuu

SEQ ID NO: 2400934 - RNA, 19 nt, Artificial Sequence
  Description of Artificial Sequence: Synthetic oligonucleotide
  Sense strand starting at position 971 of SEQ ID NO: 1886312
gaagacuccugggaagaau

SEQ ID NO: 2400935 - RNA, 19 nt, Artificial Sequence
  Description of Artificial Sequence: Synthetic oligonucleotide
  Antisense strand to SEQ ID NO: 2400934
auucuucccaggagucuuc

SEQ ID NO: 2400936 - RNA, 19 nt, Artificial Sequence
  Description of Artificial Sequence: Synthetic oligonucleotide
  Sense strand starting at position 1019 of SEQ ID NO: 1886312
acgagcuacuaagguauuu

SEQ ID NO: 2400937 - RNA, 19 nt, Artificial Sequence
  Description of Artificial Sequence: Synthetic oligonucleotide
  Antisense strand to SEQ ID NO: 2400936
aaauaccuuaguagcucgu

SEQ ID NO: 2400938 - RNA, 19 nt, Artificial Sequence
  Description of Artificial Sequence: Synthetic oligonucleotide
  Sense strand starting at position 1055 of SEQ ID NO: 1886312
uggaccauguuuccgagua

SEQ ID NO: 2400939 - RNA, 19 nt, Artificial Sequence
  Description of Artificial Sequence: Synthetic oligonucleotide
  Antisense strand to SEQ ID NO: 2400938
uacucggaaacauggucca

SEQ ID NO: 2400940 - RNA, 19 nt, Artificial Sequence
  Description of Artificial Sequence: Synthetic oligonucleotide
  Sense strand starting at position 1060 of SEQ ID NO: 1886312
cauguuuccgaguagagau

SEQ ID NO: 2400941 - RNA, 19 nt, Artificial Sequence
  Description of Artificial Sequence: Synthetic oligonucleotide
  Antisense strand to SEQ ID NO: 2400940
aucucuacucggaaacaug

SEQ ID NO: 2400942 - RNA, 19 nt, Artificial Sequence
  Description of Artificial Sequence: Synthetic oligonucleotide
  Sense strand starting at position 1137 of SEQ ID NO: 1886312
cugagugguucagaggcaa

SEQ ID NO: 2400943 - RNA, 19 nt, Artificial Sequence
  Description of Artificial Sequence: Synthetic oligonucleotide
  Antisense strand to SEQ ID NO: 2400942
uugccucugaaccacucag

SEQ ID NO: 2400944 - RNA, 19 nt, Artificial Sequence
  Description of Artificial Sequence: Synthetic oligonucleotide
  Sense strand starting at position 1199 of SEQ ID NO: 1886312
agcucaaaugccuaaugga

SEQ ID NO: 2400945 - RNA, 19 nt, Artificial Sequence
  Description of Artificial Sequence: Synthetic oligonucleotide
  Antisense strand to SEQ ID NO: 2400944
uccauuaggcauuugagcu

SEQ ID NO: 2400946 - RNA, 19 nt, Artificial Sequence
  Description of Artificial Sequence: Synthetic oligonucleotide
  Sense strand starting at position 1260 of SEQ ID NO: 1886312
ccaagucagucugaggagu

SEQ ID NO: 2400947 - RNA, 19 nt, Artificial Sequence
  Description of Artificial Sequence: Synthetic oligonucleotide
  Antisense strand to SEQ ID NO: 2400946
acuccucagacugacuugg

SEQ ID NO: 2400948 - RNA, 19 nt, Artificial Sequence
  Description of Artificial Sequence: Synthetic oligonucleotide
  Sense strand starting at position 1402 of SEQ ID NO: 1886312
ggaauaugcuguccaguac

SEQ ID NO: 2400949 - RNA, 19 nt, Artificial Sequence
  Description of Artificial Sequence: Synthetic oligonucleotide
  Antisense strand to SEQ ID NO: 2400948
guacuggacagcauauucc

SEQ ID NO: 2400950 - RNA, 19 nt, Artificial Sequence
  Description of Artificial Sequence: Synthetic oligonucleotide
  Sense strand starting at position 1403 of SEQ ID NO: 1886312
gaauaugcuguccaguaca

SEQ ID NO: 2400951 - RNA, 19 nt, Artificial Sequence
  Description of Artificial Sequence: Synthetic oligonucleotide
  Antisense strand to SEQ ID NO: 2400950
uguacuggacagcauauuc

SEQ ID NO: 2400952 - RNA, 19 nt, Artificial Sequence
  Description of Artificial Sequence: Synthetic oligonucleotide
  Sense strand starting at position 1473 of SEQ ID NO: 1886312
gggacugguuuccuccuau

SEQ ID NO: 2400953 - RNA, 19 nt, Artificial Sequence
  Description of Artificial Sequence: Synthetic oligonucleotide
  Antisense strand to SEQ ID NO: 2400952
auaggaggaaaccaguccc

SEQ ID NO: 2400954 - RNA, 19 nt, Artificial Sequence
  Description of Artificial Sequence: Synthetic oligonucleotide
  Sense strand starting at position 1479 of SEQ ID NO: 1886312
gguuuccuccuauggauau

SEQ ID NO: 2400955 - RNA, 19 nt, Artificial Sequence
  Description of Artificial Sequence: Synthetic oligonucleotide
  Antisense strand to SEQ ID NO: 2400954
auauccauaggaggaaacc

SEQ ID NO: 2400956 - RNA, 19 nt, Artificial Sequence
  Description of Artificial Sequence: Synthetic oligonucleotide
  Sense strand starting at position 1521 of SEQ ID NO: 1886312
ucuggcuccucugcagaaa

SEQ ID NO: 2400957 - RNA, 19 nt, Artificial Sequence
  Description of Artificial Sequence: Synthetic oligonucleotide
  Antisense strand to SEQ ID NO: 2400956
uuucugcagaggagccaga

SEQ ID NO: 2400958 - RNA, 19 nt, Artificial Sequence
  Description of Artificial Sequence: Synthetic oligonucleotide
  Sense strand starting at position 1615 of SEQ ID NO: 1886312
cccaaaugagggugaaagu

SEQ ID NO: 2400959 - RNA, 19 nt, Artificial Sequence
  Description of Artificial Sequence: Synthetic oligonucleotide
  Antisense strand to SEQ ID NO: 2400958
acuuucacccucauuuggg

SEQ ID NO: 2400960 - RNA, 19 nt, Artificial Sequence
  Description of Artificial Sequence: Synthetic oligonucleotide
  Sense strand starting at position 1712 of SEQ ID NO: 1886312
agccaaggaguuugaauca

SEQ ID NO: 2400961 - RNA, 19 nt, Artificial Sequence
  Description of Artificial Sequence: Synthetic oligonucleotide
  Antisense strand to SEQ ID NO: 2400960
ugauucaaacuccuuggcu

SEQ ID NO: 2400962 - RNA, 19 nt, Artificial Sequence
  Description of Artificial Sequence: Synthetic oligonucleotide
  Sense strand starting at position 2033 of SEQ ID NO: 1886312
augcuuuaagaaggaauca

SEQ ID NO: 2400963 - RNA, 19 nt, Artificial Sequence
  Description of Artificial Sequence: Synthetic oligonucleotide
  Antisense strand to SEQ ID NO: 2400962
ugauuccuucuuaaagcau

SEQ ID NO: 2400964 - RNA, 19 nt, Artificial Sequence
  Description of Artificial Sequence: Synthetic oligonucleotide
  Sense strand starting at position 2129 of SEQ ID NO: 1886312
gaucgcaugagacgacaau

SEQ ID NO: 2400965 - RNA, 19 nt, Artificial Sequence
  Description of Artificial Sequence: Synthetic oligonucleotide
  Antisense strand to SEQ ID NO: 2400964
auugucgucucaugcgauc

SEQ ID NO: 2400966 - RNA, 19 nt, Artificial Sequence
  Description of Artificial Sequence: Synthetic oligonucleotide
  Sense strand starting at position 2376 of SEQ ID NO: 1886312
acgucaucccacuaaagag

SEQ ID NO: 2400967 - RNA, 19 nt, Artificial Sequence
  Description of Artificial Sequence: Synthetic oligonucleotide
  Antisense strand to SEQ ID NO: 2400966
cucuuuagugggaugacgu

SEQ ID NO: 2400968 - RNA, 19 nt, Artificial Sequence
  Description of Artificial Sequence: Synthetic oligonucleotide
  Sense strand starting at position 2659 of SEQ ID NO: 1886312
ggacaaaguuagccaacaa

SEQ ID NO: 2400969 - RNA, 19 nt, Artificial Sequence
  Description of Artificial Sequence: Synthetic oligonucleotide
  Antisense strand to SEQ ID NO: 2400968
uuguuggcuaacuuugucc

SEQ ID NO: 2400970 - RNA, 19 nt, Artificial Sequence
  Description of Artificial Sequence: Synthetic oligonucleotide
  Sense strand starting at position 2724 of SEQ ID NO: 1886312
guuuccuuccaggaacuca

SEQ ID NO: 2400971 - RNA, 19 nt, Artificial Sequence
  Description of Artificial Sequence: Synthetic oligonucleotide
  Antisense strand to SEQ ID NO: 2400970
ugaguuccuggaaggaaac

SEQ ID NO: 2400972 - RNA, 19 nt, Artificial Sequence
  Description of Artificial Sequence: Synthetic oligonucleotide
  Sense strand starting at position 2828 of SEQ ID NO: 1886312
gcagacaaugcauguguua

SEQ ID NO: 2400973 - RNA, 19 nt, Artificial Sequence
  Description of Artificial Sequence: Synthetic oligonucleotide
  Antisense strand to SEQ ID NO: 2400972
uaacacaugcauugucugc

SEQ ID NO: 2400974 - RNA, 19 nt, Artificial Sequence
  Description of Artificial Sequence: Synthetic oligonucleotide
  Sense strand starting at position 2950 of SEQ ID NO: 1886312
aacggaugccuugguauaa

SEQ ID NO: 2400975 - RNA, 19 nt, Artificial Sequence
  Description of Artificial Sequence: Synthetic oligonucleotide
  Antisense strand to SEQ ID NO: 2400974
uuauaccaaggcauccguu

SEQ ID NO: 2400976 - RNA, 19 nt, Artificial Sequence
  Description of Artificial Sequence: Synthetic oligonucleotide
  Sense strand starting at position 2961 of SEQ ID NO: 1886312
ugguauaacccaugucaaa

SEQ ID NO: 2400977 - RNA, 19 nt, Artificial Sequence
  Description of Artificial Sequence: Synthetic oligonucleotide
  Antisense strand to SEQ ID NO: 2400976
uuugacauggguuauacca

SEQ ID NO: 2400978 - RNA, 19 nt, Artificial Sequence
  Description of Artificial Sequence: Synthetic oligonucleotide
  Sense strand starting at position 3126 of SEQ ID NO: 1886312
aguauuugucccugcaaau

SEQ ID NO: 2400979 - RNA, 19 nt, Artificial Sequence
  Description of Artificial Sequence: Synthetic oligonucleotide
  Antisense strand to SEQ ID NO: 2400978
auuugcagggacaaauacu

SEQ ID NO: 2400980 - RNA, 19 nt, Artificial Sequence
  Description of Artificial Sequence: Synthetic oligonucleotide
  Sense strand starting at position 3154 of SEQ ID NO: 1886312
cagagugcucugggaaaga

SEQ ID NO: 2400981 - RNA, 19 nt, Artificial Sequence
  Description of Artificial Sequence: Synthetic oligonucleotide
  Antisense strand to SEQ ID NO: 2400980
ucuuucccagagcacucug

SEQ ID NO: 2400982 - RNA, 19 nt, Artificial Sequence
  Description of Artificial Sequence: Synthetic oligonucleotide
  Sense strand starting at position 3167 of SEQ ID NO: 1886312
gaaagaagugcuuacauuc

SEQ ID NO: 2400983 - RNA, 19 nt, Artificial Sequence
  Description of Artificial Sequence: Synthetic oligonucleotide
  Antisense strand to SEQ ID NO: 2400982
gaauguaagcacuucuuuc

SEQ ID NO: 2400984 - RNA, 19 nt, Artificial Sequence
  Description of Artificial Sequence: Synthetic oligonucleotide
  Sense strand starting at position 3316 of SEQ ID NO: 1886312
cugggaggugcagaguuaa

SEQ ID NO: 2400985 - RNA, 19 nt, Artificial Sequence
  Description of Artificial Sequence: Synthetic oligonucleotide
  Antisense strand to SEQ ID NO: 2400984
uuaacucugcaccucccag

SEQ ID NO: 2400986 - RNA, 19 nt, Artificial Sequence
  Description of Artificial Sequence: Synthetic oligonucleotide
  Sense strand starting at position 3448 of SEQ ID NO: 1886312
gcagaaaugcauggaugca

SEQ ID NO: 2400987 - RNA, 19 nt, Artificial Sequence
  Description of Artificial Sequence: Synthetic oligonucleotide
  Antisense strand to SEQ ID NO: 2400986
ugcauccaugcauuucugc

SEQ ID NO: 2400988 - RNA, 19 nt, Artificial Sequence
  Description of Artificial Sequence: Synthetic oligonucleotide
  Sense strand starting at position 3512 of SEQ ID NO: 1886312
gcuaaagagcacugacauu

SEQ ID NO: 2400989 - RNA, 19 nt, Artificial Sequence
  Description of Artificial Sequence: Synthetic oligonucleotide
  Antisense strand to SEQ ID NO: 2400988
aaugucagugcucuuuagc

SEQ ID NO: 2400990 - RNA, 19 nt, Artificial Sequence
  Description of Artificial Sequence: Synthetic oligonucleotide
  Sense strand starting at position 3644 of SEQ ID NO: 1886312
cagggacuccuuugguauc

SEQ ID NO: 2400991 - RNA, 19 nt, Artificial Sequence
  Description of Artificial Sequence: Synthetic oligonucleotide
  Antisense strand to SEQ ID NO: 2400990
gauaccaaaggagucccug

SEQ ID NO: 2400992 - RNA, 19 nt, Artificial Sequence
  Description of Artificial Sequence: Synthetic oligonucleotide
  Sense strand starting at position 3647 of SEQ ID NO: 1886312
ggacuccuuugguaucaga

SEQ ID NO: 2400993 - RNA, 19 nt, Artificial Sequence
  Description of Artificial Sequence: Synthetic oligonucleotide
  Antisense strand to SEQ ID NO: 2400992
ucugauaccaaaggagucc

SEQ ID NO: 2400994 - RNA, 19 nt, Artificial Sequence
  Description of Artificial Sequence: Synthetic oligonucleotide
  Sense strand starting at position 228 of SEQ ID NO: 1886313
aaguucugguauuccaaga

SEQ ID NO: 2400995 - RNA, 19 nt, Artificial Sequence
  Description of Artificial Sequence: Synthetic oligonucleotide
  Antisense strand to SEQ ID NO: 2400994
ucuuggaauaccagaacuu

SEQ ID NO: 2400996 - RNA, 19 nt, Artificial Sequence
  Description of Artificial Sequence: Synthetic oligonucleotide
  Sense strand starting at position 249 of SEQ ID NO: 1886313
cauugccagugaucaagga

SEQ ID NO: 2400997 - RNA, 19 nt, Artificial Sequence
  Description of Artificial Sequence: Synthetic oligonucleotide
  Antisense strand to SEQ ID NO: 2400996
uccuugaucacuggcaaug

SEQ ID NO: 2400998 - RNA, 19 nt, Artificial Sequence
  Description of Artificial Sequence: Synthetic oligonucleotide
  Sense strand starting at position 253 of SEQ ID NO: 1886313
gccagugaucaaggaacau

SEQ ID NO: 2400999 - RNA, 19 nt, Artificial Sequence
  Description of Artificial Sequence: Synthetic oligonucleotide
  Antisense strand to SEQ ID NO: 2400998
auguuccuugaucacuggc

SEQ ID NO: 2401000 - RNA, 19 nt, Artificial Sequence
  Description of Artificial Sequence: Synthetic oligonucleotide
  Sense strand starting at position 311 of SEQ ID NO: 1886313
agaauaugaccuggcaauu

SEQ ID NO: 2401001 - RNA, 19 nt, Artificial Sequence
  Description of Artificial Sequence: Synthetic oligonucleotide
  Antisense strand to SEQ ID NO: 2401000
aauugccaggucauauucu

SEQ ID NO: 2401002 - RNA, 19 nt, Artificial Sequence
  Description of Artificial Sequence: Synthetic oligonucleotide
  Sense strand starting at position 377 of SEQ ID NO: 1886313
cggugucuuaaagaaacaa

SEQ ID NO: 2401003 - RNA, 19 nt, Artificial Sequence
  Description of Artificial Sequence: Synthetic oligonucleotide
  Antisense strand to SEQ ID NO: 2401002
uuguuucuuuaagacaccg

SEQ ID NO: 2401004 - RNA, 19 nt, Artificial Sequence
  Description of Artificial Sequence: Synthetic oligonucleotide
  Sense strand starting at position 397 of SEQ ID NO: 1886313
uuaaacucuugagagaaau

SEQ ID NO: 2401005 - RNA, 19 nt, Artificial Sequence
  Description of Artificial Sequence: Synthetic oligonucleotide
  Antisense strand to SEQ ID NO: 2401004
auuucucucaagaguuuaa

SEQ ID NO: 2401006 - RNA, 19 nt, Artificial Sequence
  Description of Artificial Sequence: Synthetic oligonucleotide
  Sense strand starting at position 490 of SEQ ID NO: 1886313
aaaguuggccugugaaugu

SEQ ID NO: 2401007 - RNA, 19 nt, Artificial Sequence
  Description of Artificial Sequence: Synthetic oligonucleotide
  Antisense strand to SEQ ID NO: 2401006
acauucacaggccaacuuu

SEQ ID NO: 2401008 - RNA, 19 nt, Artificial Sequence
  Description of Artificial Sequence: Synthetic oligonucleotide
  Sense strand starting at position 499 of SEQ ID NO: 1886313
cugugaaugucugcuggac

SEQ ID NO: 2401009 - RNA, 19 nt, Artificial Sequence
  Description of Artificial Sequence: Synthetic oligonucleotide
  Antisense strand to SEQ ID NO: 2401008
guccagcagacauucacag

SEQ ID NO: 2401010 - RNA, 19 nt, Artificial Sequence
  Description of Artificial Sequence: Synthetic oligonucleotide
  Sense strand starting at position 503 of SEQ ID NO: 1886313
gaaugucugcuggacauaa

SEQ ID NO: 2401011 - RNA, 19 nt, Artificial Sequence
  Description of Artificial Sequence: Synthetic oligonucleotide
  Antisense strand to SEQ ID NO: 2401010
uuauguccagcagacauuc

SEQ ID NO: 2401012 - RNA, 19 nt, Artificial Sequence
  Description of Artificial Sequence: Synthetic oligonucleotide
  Sense strand starting at position 887 of SEQ ID NO: 1886313
uccugaaaguuuccagauc

SEQ ID NO: 2401013 - RNA, 19 nt, Artificial Sequence
  Description of Artificial Sequence: Synthetic oligonucleotide
  Antisense strand to SEQ ID NO: 2401012
gaucuggaaacuuucagga

SEQ ID NO: 2401014 - RNA, 19 nt, Artificial Sequence
  Description of Artificial Sequence: Synthetic oligonucleotide
  Sense strand starting at position 895 of SEQ ID NO: 1886313
guuuccagaucacugagau

SEQ ID NO: 2401015 - RNA, 19 nt, Artificial Sequence
  Description of Artificial Sequence: Synthetic oligonucleotide
  Antisense strand to SEQ ID NO: 2401014
aucucagugaucuggaaac

SEQ ID NO: 2401016 - RNA, 19 nt, Artificial Sequence
  Description of Artificial Sequence: Synthetic oligonucleotide
  Sense strand starting at position 896 of SEQ ID NO: 1886313
uuuccagaucacugagauu

SEQ ID NO: 2401017 - RNA, 19 nt, Artificial Sequence
  Description of Artificial Sequence: Synthetic oligonucleotide
  Antisense strand to SEQ ID NO: 2401016
aaucucagugaucuggaaa

SEQ ID NO: 2401018 - RNA, 19 nt, Artificial Sequence
  Description of Artificial Sequence: Synthetic oligonucleotide
  Sense strand starting at position 961 of SEQ ID NO: 1886313
gggucacuuacguaaacca

SEQ ID NO: 2401019 - RNA, 19 nt, Artificial Sequence
  Description of Artificial Sequence: Synthetic oligonucleotide
  Antisense strand to SEQ ID NO: 2401018
ugguuuacguaagugaccc

SEQ ID NO: 2401020 - RNA, 19 nt, Artificial Sequence
  Description of Artificial Sequence: Synthetic oligonucleotide
  Sense strand starting at position 1040 of SEQ ID NO: 1886313
acacuuaauguugggauaa

SEQ ID NO: 2401021 - RNA, 19 nt, Artificial Sequence
  Description of Artificial Sequence: Synthetic oligonucleotide
  Antisense strand to SEQ ID NO: 2401020
uuaucccaacauuaagugu

SEQ ID NO: 2401022 - RNA, 19 nt, Artificial Sequence
  Description of Artificial Sequence: Synthetic oligonucleotide
  Sense strand starting at position 1238 of SEQ ID NO: 1886313
gcauuugugaugugcagua

SEQ ID NO: 2401023 - RNA, 19 nt, Artificial Sequence
  Description of Artificial Sequence: Synthetic oligonucleotide
  Antisense strand to SEQ ID NO: 2401022
uacugcacaucacaaaugc

SEQ ID NO: 2401024 - RNA, 19 nt, Artificial Sequence
  Description of Artificial Sequence: Synthetic oligonucleotide
  Sense strand starting at position 1322 of SEQ ID NO: 1886313
cauguauggcgcuuucuca

SEQ ID NO: 2401025 - RNA, 19 nt, Artificial Sequence
  Description of Artificial Sequence: Synthetic oligonucleotide
  Antisense strand to SEQ ID NO: 2401024
ugagaaagcgccauacaug

SEQ ID NO: 2401026 - RNA, 19 nt, Artificial Sequence
  Description of Artificial Sequence: Synthetic oligonucleotide
  Sense strand starting at position 1377 of SEQ ID NO: 1886313
ucaguuucucccuggagac

SEQ ID NO: 2401027 - RNA, 19 nt, Artificial Sequence
  Description of Artificial Sequence: Synthetic oligonucleotide
  Antisense strand to SEQ ID NO: 2401026
gucuccagggagaaacuga

SEQ ID NO: 2401028 - RNA, 19 nt, Artificial Sequence
  Description of Artificial Sequence: Synthetic oligonucleotide
  Sense strand starting at position 1378 of SEQ ID NO: 1886313
caguuucucccuggagaca

SEQ ID NO: 2401029 - RNA, 19 nt, Artificial Sequence
  Description of Artificial Sequence: Synthetic oligonucleotide
  Antisense strand to SEQ ID NO: 2401028
ugucuccagggagaaacug

SEQ ID NO: 2401030 - RNA, 19 nt, Artificial Sequence
  Description of Artificial Sequence: Synthetic oligonucleotide
  Sense strand starting at position 1786 of SEQ ID NO: 1886313
cccugugacucccuuugau

SEQ ID NO: 2401031 - RNA, 19 nt, Artificial Sequence
  Description of Artificial Sequence: Synthetic oligonucleotide
  Antisense strand to SEQ ID NO: 2401030
aucaaagggagucacaggg

SEQ ID NO: 2401032 - RNA, 19 nt, Artificial Sequence
  Description of Artificial Sequence: Synthetic oligonucleotide
  Sense strand starting at position 2007 of SEQ ID NO: 1886313
agucuuuaucccugcaaag

SEQ ID NO: 2401033 - RNA, 19 nt, Artificial Sequence
  Description of Artificial Sequence: Synthetic oligonucleotide
  Antisense strand to SEQ ID NO: 2401032
cuuugcagggauaaagacu

SEQ ID NO: 2401034 - RNA, 19 nt, Artificial Sequence
  Description of Artificial Sequence: Synthetic oligonucleotide
  Sense strand starting at position 2270 of SEQ ID NO: 1886313
cucgacucacugugguaua

SEQ ID NO: 2401035 - RNA, 19 nt, Artificial Sequence
  Description of Artificial Sequence: Synthetic oligonucleotide
  Antisense strand to SEQ ID NO: 2401034
uauaccacagugagucgag

SEQ ID NO: 2401036 - RNA, 19 nt, Artificial Sequence
  Description of Artificial Sequence: Synthetic oligonucleotide
  Sense strand starting at position 2336 of SEQ ID NO: 1886313
ugggucuacccaggaauga

SEQ ID NO: 2401037 - RNA, 19 nt, Artificial Sequence
  Description of Artificial Sequence: Synthetic oligonucleotide
  Antisense strand to SEQ ID NO: 2401036
ucauuccuggguagaccca

SEQ ID NO: 2401038 - RNA, 19 nt, Artificial Sequence
  Description of Artificial Sequence: Synthetic oligonucleotide
  Sense strand starting at position 2393 of SEQ ID NO: 1886313
gcuacagagcccuaagugu

SEQ ID NO: 2401039 - RNA, 19 nt, Artificial Sequence
  Description of Artificial Sequence: Synthetic oligonucleotide
  Antisense strand to SEQ ID NO: 2401038
acacuuagggcucuguagc

SEQ ID NO: 2401040 - RNA, 19 nt, Artificial Sequence
  Description of Artificial Sequence: Synthetic oligonucleotide
  Sense strand starting at position 2458 of SEQ ID NO: 1886313
ccuccucuuggucaucaga

SEQ ID NO: 2401041 - RNA, 19 nt, Artificial Sequence
  Description of Artificial Sequence: Synthetic oligonucleotide
  Antisense strand to SEQ ID NO: 2401040
ucugaugaccaagaggagg

SEQ ID NO: 2401042 - RNA, 19 nt, Artificial Sequence
  Description of Artificial Sequence: Synthetic oligonucleotide
  Sense strand starting at position 2496 of SEQ ID NO: 1886313
cuauuuaaaugaggagagu

SEQ ID NO: 2401043 - RNA, 19 nt, Artificial Sequence
  Description of Artificial Sequence: Synthetic oligonucleotide
  Antisense strand to SEQ ID NO: 2401042
acucuccucauuuaaauag

SEQ ID NO: 2401044 - RNA, 19 nt, Artificial Sequence
  Description of Artificial Sequence: Synthetic oligonucleotide
  Sense strand starting at position 2705 of SEQ ID NO: 1886313
ggcacuguggcugagaaca

SEQ ID NO: 2401045 - RNA, 19 nt, Artificial Sequence
  Description of Artificial Sequence: Synthetic oligonucleotide
  Antisense strand to SEQ ID NO: 2401044
uguucucagccacagugcc

SEQ ID NO: 2401046 - RNA, 19 nt, Artificial Sequence
  Description of Artificial Sequence: Synthetic oligonucleotide
  Sense strand starting at position 2737 of SEQ ID NO: 1886313
ggcacuugccuuugaacau

SEQ ID NO: 2401047 - RNA, 19 nt, Artificial Sequence
  Description of Artificial Sequence: Synthetic oligonucleotide
  Antisense strand to SEQ ID NO: 2401046
auguucaaaggcaagugcc

SEQ ID NO: 2401048 - RNA, 19 nt, Artificial Sequence
  Description of Artificial Sequence: Synthetic oligonucleotide
  Sense strand starting at position 2831 of SEQ ID NO: 1886313
aaagaagacuccugggaag

SEQ ID NO: 2401049 - RNA, 19 nt, Artificial Sequence
  Description of Artificial Sequence: Synthetic oligonucleotide
  Antisense strand to SEQ ID NO: 2401048
cuucccaggagucuucuuu

SEQ ID NO: 2401050 - RNA, 19 nt, Artificial Sequence
  Description of Artificial Sequence: Synthetic oligonucleotide
  Sense strand starting at position 2834 of SEQ ID NO: 1886313
gaagacuccugggaagaau

SEQ ID NO: 2401051 - RNA, 19 nt, Artificial Sequence
  Description of Artificial Sequence: Synthetic oligonucleotide
  Antisense strand to SEQ ID NO: 2401050
auucuucccaggagucuuc

SEQ ID NO: 2401052 - RNA, 19 nt, Artificial Sequence
  Description of Artificial Sequence: Synthetic oligonucleotide
  Sense strand starting at position 2918 of SEQ ID NO: 1886313
uggaccauguuuccgagua

SEQ ID NO: 2401053 - RNA, 19 nt, Artificial Sequence
  Description of Artificial Sequence: Synthetic oligonucleotide
  Antisense strand to SEQ ID NO: 2401052
uacucggaaacauggucca

SEQ ID NO: 2401054 - RNA, 19 nt, Artificial Sequence
  Description of Artificial Sequence: Synthetic oligonucleotide
  Sense strand starting at position 2923 of SEQ ID NO: 1886313
cauguuuccgaguagagau

SEQ ID NO: 2401055 - RNA, 19 nt, Artificial Sequence
  Description of Artificial Sequence: Synthetic oligonucleotide
  Antisense strand to SEQ ID NO: 2401054
aucucuacucggaaacaug

SEQ ID NO: 2401056 - RNA, 19 nt, Artificial Sequence
  Description of Artificial Sequence: Synthetic oligonucleotide
  Sense strand starting at position 3062 of SEQ ID NO: 1886313
agcucaaaugccuaaugga

SEQ ID NO: 2401057 - RNA, 19 nt, Artificial Sequence
  Description of Artificial Sequence: Synthetic oligonucleotide
  Antisense strand to SEQ ID NO: 2401056
uccauuaggcauuugagcu

SEQ ID NO: 2401058 - RNA, 19 nt, Artificial Sequence
  Description of Artificial Sequence: Synthetic oligonucleotide
  Sense strand starting at position 3265 of SEQ ID NO: 1886313
ggaauaugcuguccaguac

SEQ ID NO: 2401059 - RNA, 19 nt, Artificial Sequence
  Description of Artificial Sequence: Synthetic oligonucleotide
  Antisense strand to SEQ ID NO: 2401058
guacuggacagcauauucc

SEQ ID NO: 2401060 - RNA, 19 nt, Artificial Sequence
  Description of Artificial Sequence: Synthetic oligonucleotide
  Sense strand starting at position 3266 of SEQ ID NO: 1886313
gaauaugcuguccaguaca

SEQ ID NO: 2401061 - RNA, 19 nt, Artificial Sequence
  Description of Artificial Sequence: Synthetic oligonucleotide
  Antisense strand to SEQ ID NO: 2401060
uguacuggacagcauauuc

SEQ ID NO: 2401062 - RNA, 19 nt, Artificial Sequence
  Description of Artificial Sequence: Synthetic oligonucleotide
  Sense strand starting at position 3336 of SEQ ID NO: 1886313
gggacugguuuccuccuau

SEQ ID NO: 2401063 - RNA, 19 nt, Artificial Sequence
  Description of Artificial Sequence: Synthetic oligonucleotide
  Antisense strand to SEQ ID NO: 2401062
auaggaggaaaccaguccc

SEQ ID NO: 2401064 - RNA, 19 nt, Artificial Sequence
  Description of Artificial Sequence: Synthetic oligonucleotide
  Sense strand starting at position 3342 of SEQ ID NO: 1886313
gguuuccuccuauggauau

SEQ ID NO: 2401065 - RNA, 19 nt, Artificial Sequence
  Description of Artificial Sequence: Synthetic oligonucleotide
  Antisense strand to SEQ ID NO: 2401064
auauccauaggaggaaacc

SEQ ID NO: 2401066 - RNA, 19 nt, Artificial Sequence
  Description of Artificial Sequence: Synthetic oligonucleotide
  Sense strand starting at position 3384 of SEQ ID NO: 1886313
ucuggcuccucugcagaaa

SEQ ID NO: 2401067 - RNA, 19 nt, Artificial Sequence
  Description of Artificial Sequence: Synthetic oligonucleotide
  Antisense strand to SEQ ID NO: 2401066
uuucugcagaggagccaga

SEQ ID NO: 2401068 - RNA, 19 nt, Artificial Sequence
  Description of Artificial Sequence: Synthetic oligonucleotide
  Sense strand starting at position 3478 of SEQ ID NO: 1886313
cccaaaugagggugaaagu

SEQ ID NO: 2401069 - RNA, 19 nt, Artificial Sequence
  Description of Artificial Sequence: Synthetic oligonucleotide
  Antisense strand to SEQ ID NO: 2401068
acuuucacccucauuuggg

SEQ ID NO: 2401070 - RNA, 19 nt, Artificial Sequence
  Description of Artificial Sequence: Synthetic oligonucleotide
  Sense strand starting at position 3575 of SEQ ID NO: 1886313
agccaaggaguuugaauca

SEQ ID NO: 2401071 - RNA, 19 nt, Artificial Sequence
  Description of Artificial Sequence: Synthetic oligonucleotide
  Antisense strand to SEQ ID NO: 2401070
ugauucaaacuccuuggcu

SEQ ID NO: 2401072 - RNA, 19 nt, Artificial Sequence
  Description of Artificial Sequence: Synthetic oligonucleotide
  Sense strand starting at position 3896 of SEQ ID NO: 1886313
augcuuuaagaaggaauca

SEQ ID NO: 2401073 - RNA, 19 nt, Artificial Sequence
  Description of Artificial Sequence: Synthetic oligonucleotide
  Antisense strand to SEQ ID NO: 2401072
ugauuccuucuuaaagcau

SEQ ID NO: 2401074 - RNA, 19 nt, Artificial Sequence
  Description of Artificial Sequence: Synthetic oligonucleotide
  Sense strand starting at position 107 of SEQ ID NO: 1886314
cucacugaaacgugcugaa

SEQ ID NO: 2401075 - RNA, 19 nt, Artificial Sequence
  Description of Artificial Sequence: Synthetic oligonucleotide
  Antisense strand to SEQ ID NO: 2401074
uucagcacguuucagugag

SEQ ID NO: 2401076 - RNA, 19 nt, Artificial Sequence
  Description of Artificial Sequence: Synthetic oligonucleotide
  Sense strand starting at position 119 of SEQ ID NO: 1886314
ugcugaacacaauggauaa

SEQ ID NO: 2401077 - RNA, 19 nt, Artificial Sequence
  Description of Artificial Sequence: Synthetic oligonucleotide
  Antisense strand to SEQ ID NO: 2401076
uuauccauuguguucagca

SEQ ID NO: 2401078 - RNA, 19 nt, Artificial Sequence
  Description of Artificial Sequence: Synthetic oligonucleotide
  Sense strand starting at position 153 of SEQ ID NO: 1886314
gaguaugugcaagacaucu

SEQ ID NO: 2401079 - RNA, 19 nt, Artificial Sequence
  Description of Artificial Sequence: Synthetic oligonucleotide
  Antisense strand to SEQ ID NO: 2401078
agaugucuugcacauacuc

SEQ ID NO: 2401080 - RNA, 19 nt, Artificial Sequence
  Description of Artificial Sequence: Synthetic oligonucleotide
  Sense strand starting at position 161 of SEQ ID NO: 1886314
gcaagacaucuauacagcu

SEQ ID NO: 2401081 - RNA, 19 nt, Artificial Sequence
  Description of Artificial Sequence: Synthetic oligonucleotide
  Antisense strand to SEQ ID NO: 2401080
agcuguauagaugucuugc

SEQ ID NO: 2401082 - RNA, 19 nt, Artificial Sequence
  Description of Artificial Sequence: Synthetic oligonucleotide
  Sense strand starting at position 266 of SEQ ID NO: 1886314
cccggaauuaucuguggga

SEQ ID NO: 2401083 - RNA, 19 nt, Artificial Sequence
  Description of Artificial Sequence: Synthetic oligonucleotide
  Antisense strand to SEQ ID NO: 2401082
ucccacagauaauuccggg

SEQ ID NO: 2401084 - RNA, 19 nt, Artificial Sequence
  Description of Artificial Sequence: Synthetic oligonucleotide
  Sense strand starting at position 267 of SEQ ID NO: 1886314
ccggaauuaucugugggag

SEQ ID NO: 2401085 - RNA, 19 nt, Artificial Sequence
  Description of Artificial Sequence: Synthetic oligonucleotide
  Antisense strand to SEQ ID NO: 2401084
cucccacagauaauuccgg

SEQ ID NO: 2401086 - RNA, 19 nt, Artificial Sequence
  Description of Artificial Sequence: Synthetic oligonucleotide
  Sense strand starting at position 268 of SEQ ID NO: 1886314
cggaauuaucugugggagg

SEQ ID NO: 2401087 - RNA, 19 nt, Artificial Sequence
  Description of Artificial Sequence: Synthetic oligonucleotide
  Antisense strand to SEQ ID NO: 2401086
ccucccacagauaauuccg

SEQ ID NO: 2401088 - RNA, 19 nt, Artificial Sequence
  Description of Artificial Sequence: Synthetic oligonucleotide
  Sense strand starting at position 270 of SEQ ID NO: 1886314
gaauuaucugugggaggca

SEQ ID NO: 2401089 - RNA, 19 nt, Artificial Sequence
  Description of Artificial Sequence: Synthetic oligonucleotide
  Antisense strand to SEQ ID NO: 2401088
ugccucccacagauaauuc

SEQ ID NO: 2401090 - RNA, 19 nt, Artificial Sequence
  Description of Artificial Sequence: Synthetic oligonucleotide
  Sense strand starting at position 477 of SEQ ID NO: 1886314
auuggaaauuguucuggcu

SEQ ID NO: 2401091 - RNA, 19 nt, Artificial Sequence
  Description of Artificial Sequence: Synthetic oligonucleotide
  Antisense strand to SEQ ID NO: 2401090
agccagaacaauuuccaau

SEQ ID NO: 2401092 - RNA, 19 nt, Artificial Sequence
  Description of Artificial Sequence: Synthetic oligonucleotide
  Sense strand starting at position 511 of SEQ ID NO: 1886314
uuuggauuauuccuccaga

SEQ ID NO: 2401093 - RNA, 19 nt, Artificial Sequence
  Description of Artificial Sequence: Synthetic oligonucleotide
  Antisense strand to SEQ ID NO: 2401092
ucuggaggaauaauccaaa

SEQ ID NO: 2401094 - RNA, 19 nt, Artificial Sequence
  Description of Artificial Sequence: Synthetic oligonucleotide
  Sense strand starting at position 512 of SEQ ID NO: 1886314
uuggauuauuccuccagag

SEQ ID NO: 2401095 - RNA, 19 nt, Artificial Sequence
  Description of Artificial Sequence: Synthetic oligonucleotide
  Antisense strand to SEQ ID NO: 2401094
cucuggaggaauaauccaa

SEQ ID NO: 2401096 - RNA, 19 nt, Artificial Sequence
  Description of Artificial Sequence: Synthetic oligonucleotide
  Sense strand starting at position 556 of SEQ ID NO: 1886314
uugugacuugagugugaca

SEQ ID NO: 2401097 - RNA, 19 nt, Artificial Sequence
  Description of Artificial Sequence: Synthetic oligonucleotide
  Antisense strand to SEQ ID NO: 2401096
ugucacacucaagucacaa

SEQ ID NO: 2401098 - RNA, 19 nt, Artificial Sequence
  Description of Artificial Sequence: Synthetic oligonucleotide
  Sense strand starting at position 558 of SEQ ID NO: 1886314
gugacuugagugugacaga

SEQ ID NO: 2401099 - RNA, 19 nt, Artificial Sequence
  Description of Artificial Sequence: Synthetic oligonucleotide
  Antisense strand to SEQ ID NO: 2401098
ucugucacacucaagucac

SEQ ID NO: 2401100 - RNA, 19 nt, Artificial Sequence
  Description of Artificial Sequence: Synthetic oligonucleotide
  Sense strand starting at position 670 of SEQ ID NO: 1886314
agaagaggcuauguugcaa

SEQ ID NO: 2401101 - RNA, 19 nt, Artificial Sequence
  Description of Artificial Sequence: Synthetic oligonucleotide
  Antisense strand to SEQ ID NO: 2401100
uugcaacauagccucuucu

SEQ ID NO: 2401102 - RNA, 19 nt, Artificial Sequence
  Description of Artificial Sequence: Synthetic oligonucleotide
  Sense strand starting at position 935 of SEQ ID NO: 1886314
cucuuauucugaccaguag

SEQ ID NO: 2401103 - RNA, 19 nt, Artificial Sequence
  Description of Artificial Sequence: Synthetic oligonucleotide
  Antisense strand to SEQ ID NO: 2401102
cuacuggucagaauaagag

SEQ ID NO: 2401104 - RNA, 19 nt, Artificial Sequence
  Description of Artificial Sequence: Synthetic oligonucleotide
  Sense strand starting at position 1030 of SEQ ID NO: 1886314
uauugacaugguggguaaa

SEQ ID NO: 2401105 - RNA, 19 nt, Artificial Sequence
  Description of Artificial Sequence: Synthetic oligonucleotide
  Antisense strand to SEQ ID NO: 2401104
uuuacccaccaugucaaua

SEQ ID NO: 2401106 - RNA, 19 nt, Artificial Sequence
  Description of Artificial Sequence: Synthetic oligonucleotide
  Sense strand starting at position 1060 of SEQ ID NO: 1886314
agaggcucugcagagagau

SEQ ID NO: 2401107 - RNA, 19 nt, Artificial Sequence
  Description of Artificial Sequence: Synthetic oligonucleotide
  Antisense strand to SEQ ID NO: 2401106
aucucucugcagagccucu

SEQ ID NO: 2401108 - RNA, 19 nt, Artificial Sequence
  Description of Artificial Sequence: Synthetic oligonucleotide
  Sense strand starting at position 1437 of SEQ ID NO: 1886314
ucagguucucccuaaugga

SEQ ID NO: 2401109 - RNA, 19 nt, Artificial Sequence
  Description of Artificial Sequence: Synthetic oligonucleotide
  Antisense strand to SEQ ID NO: 2401108
uccauuagggagaaccuga

SEQ ID NO: 2401110 - RNA, 19 nt, Artificial Sequence
  Description of Artificial Sequence: Synthetic oligonucleotide
  Sense strand starting at position 1452 of SEQ ID NO: 1886314
uggauauaugcacacccua

SEQ ID NO: 2401111 - RNA, 19 nt, Artificial Sequence
  Description of Artificial Sequence: Synthetic oligonucleotide
  Antisense strand to SEQ ID NO: 2401110
uagggugugcauauaucca

SEQ ID NO: 2401112 - RNA, 19 nt, Artificial Sequence
  Description of Artificial Sequence: Synthetic oligonucleotide
  Sense strand starting at position 1500 of SEQ ID NO: 1886314
uggccaucuugggugauau

SEQ ID NO: 2401113 - RNA, 19 nt, Artificial Sequence
  Description of Artificial Sequence: Synthetic oligonucleotide
  Antisense strand to SEQ ID NO: 2401112
auaucacccaagauggcca

SEQ ID NO: 2401114 - RNA, 19 nt, Artificial Sequence
  Description of Artificial Sequence: Synthetic oligonucleotide
  Sense strand starting at position 1501 of SEQ ID NO: 1886314
ggccaucuugggugauaug

SEQ ID NO: 2401115 - RNA, 19 nt, Artificial Sequence
  Description of Artificial Sequence: Synthetic oligonucleotide
  Antisense strand to SEQ ID NO: 2401114
cauaucacccaagauggcc

SEQ ID NO: 2401116 - RNA, 19 nt, Artificial Sequence
  Description of Artificial Sequence: Synthetic oligonucleotide
  Sense strand starting at position 1510 of SEQ ID NO: 1886314
gggugauaugccuagcauu

SEQ ID NO: 2401117 - RNA, 19 nt, Artificial Sequence
  Description of Artificial Sequence: Synthetic oligonucleotide
  Antisense strand to SEQ ID NO: 2401116
aaugcuaggcauaucaccc

SEQ ID NO: 2401118 - RNA, 19 nt, Artificial Sequence
  Description of Artificial Sequence: Synthetic oligonucleotide
  Sense strand starting at position 1572 of SEQ ID NO: 1886314
auuuaagucuucugaagaa

SEQ ID NO: 2401119 - RNA, 19 nt, Artificial Sequence
  Description of Artificial Sequence: Synthetic oligonucleotide
  Antisense strand to SEQ ID NO: 2401118
uucuucagaagacuuaaau

SEQ ID NO: 2401120 - RNA, 19 nt, Artificial Sequence
  Description of Artificial Sequence: Synthetic oligonucleotide
  Sense strand starting at position 2025 of SEQ ID NO: 1886314
gauggaauaucagaagauu

SEQ ID NO: 2401121 - RNA, 19 nt, Artificial Sequence
  Description of Artificial Sequence: Synthetic oligonucleotide
  Antisense strand to SEQ ID NO: 2401120
aaucuucugauauuccauc

SEQ ID NO: 2401122 - RNA, 19 nt, Artificial Sequence
  Description of Artificial Sequence: Synthetic oligonucleotide
  Sense strand starting at position 2056 of SEQ ID NO: 1886314
cauuuaccauccugaggga

SEQ ID NO: 2401123 - RNA, 19 nt, Artificial Sequence
  Description of Artificial Sequence: Synthetic oligonucleotide
  Antisense strand to SEQ ID NO: 2401122
ucccucaggaugguaaaug

SEQ ID NO: 2401124 - RNA, 19 nt, Artificial Sequence
  Description of Artificial Sequence: Synthetic oligonucleotide
  Sense strand starting at position 2479 of SEQ ID NO: 1886314
aaguucugguauuccaaga

SEQ ID NO: 2401125 - RNA, 19 nt, Artificial Sequence
  Description of Artificial Sequence: Synthetic oligonucleotide
  Antisense strand to SEQ ID NO: 2401124
ucuuggaauaccagaacuu

SEQ ID NO: 2401126 - RNA, 19 nt, Artificial Sequence
  Description of Artificial Sequence: Synthetic oligonucleotide
  Sense strand starting at position 2500 of SEQ ID NO: 1886314
cauugccagugaucaagga

SEQ ID NO: 2401127 - RNA, 19 nt, Artificial Sequence
  Description of Artificial Sequence: Synthetic oligonucleotide
  Antisense strand to SEQ ID NO: 2401126
uccuugaucacuggcaaug

SEQ ID NO: 2401128 - RNA, 19 nt, Artificial Sequence
  Description of Artificial Sequence: Synthetic oligonucleotide
  Sense strand starting at position 2504 of SEQ ID NO: 1886314
gccagugaucaaggaacau

SEQ ID NO: 2401129 - RNA, 19 nt, Artificial Sequence
  Description of Artificial Sequence: Synthetic oligonucleotide
  Antisense strand to SEQ ID NO: 2401128
auguuccuugaucacuggc

SEQ ID NO: 2401130 - RNA, 19 nt, Artificial Sequence
  Description of Artificial Sequence: Synthetic oligonucleotide
  Sense strand starting at position 2562 of SEQ ID NO: 1886314
agaauaugaccuggcaauu

SEQ ID NO: 2401131 - RNA, 19 nt, Artificial Sequence
  Description of Artificial Sequence: Synthetic oligonucleotide
  Antisense strand to SEQ ID NO: 2401130
aauugccaggucauauucu

SEQ ID NO: 2401132 - RNA, 19 nt, Artificial Sequence
  Description of Artificial Sequence: Synthetic oligonucleotide
  Sense strand starting at position 2628 of SEQ ID NO: 1886314
cggugucuuaaagaaacaa

SEQ ID NO: 2401133 - RNA, 19 nt, Artificial Sequence
  Description of Artificial Sequence: Synthetic oligonucleotide
  Antisense strand to SEQ ID NO: 2401132
uuguuucuuuaagacaccg

SEQ ID NO: 2401134 - RNA, 19 nt, Artificial Sequence
  Description of Artificial Sequence: Synthetic oligonucleotide
  Sense strand starting at position 2754 of SEQ ID NO: 1886314
gaaugucugcuggacauaa

SEQ ID NO: 2401135 - RNA, 19 nt, Artificial Sequence
  Description of Artificial Sequence: Synthetic oligonucleotide
  Antisense strand to SEQ ID NO: 2401134
uuauguccagcagacauuc

SEQ ID NO: 2401136 - RNA, 19 nt, Artificial Sequence
  Description of Artificial Sequence: Synthetic oligonucleotide
  Sense strand starting at position 3138 of SEQ ID NO: 1886314
uccugaaaguuuccagauc

SEQ ID NO: 2401137 - RNA, 19 nt, Artificial Sequence
  Description of Artificial Sequence: Synthetic oligonucleotide
  Antisense strand to SEQ ID NO: 2401136
gaucuggaaacuuucagga

SEQ ID NO: 2401138 - RNA, 19 nt, Artificial Sequence
  Description of Artificial Sequence: Synthetic oligonucleotide
  Sense strand starting at position 3146 of SEQ ID NO: 1886314
guuuccagaucacugagau

SEQ ID NO: 2401139 - RNA, 19 nt, Artificial Sequence
  Description of Artificial Sequence: Synthetic oligonucleotide
  Antisense strand to SEQ ID NO: 2401138
aucucagugaucuggaaac

SEQ ID NO: 2401140 - RNA, 19 nt, Artificial Sequence
  Description of Artificial Sequence: Synthetic oligonucleotide
  Sense strand starting at position 3147 of SEQ ID NO: 1886314
uuuccagaucacugagauu

SEQ ID NO: 2401141 - RNA, 19 nt, Artificial Sequence
  Description of Artificial Sequence: Synthetic oligonucleotide
  Antisense strand to SEQ ID NO: 2401140
aaucucagugaucuggaaa

SEQ ID NO: 2401142 - RNA, 19 nt, Artificial Sequence
  Description of Artificial Sequence: Synthetic oligonucleotide
  Sense strand starting at position 3212 of SEQ ID NO: 1886314
gggucacuuacguaaacca

SEQ ID NO: 2401143 - RNA, 19 nt, Artificial Sequence
  Description of Artificial Sequence: Synthetic oligonucleotide
  Antisense strand to SEQ ID NO: 2401142
ugguuuacguaagugaccc

SEQ ID NO: 2401144 - RNA, 19 nt, Artificial Sequence
  Description of Artificial Sequence: Synthetic oligonucleotide
  Sense strand starting at position 3291 of SEQ ID NO: 1886314
acacuuaauguugggauaa

SEQ ID NO: 2401145 - RNA, 19 nt, Artificial Sequence
  Description of Artificial Sequence: Synthetic oligonucleotide
  Antisense strand to SEQ ID NO: 2401144
uuaucccaacauuaagugu

SEQ ID NO: 2401146 - RNA, 19 nt, Artificial Sequence
  Description of Artificial Sequence: Synthetic oligonucleotide
  Sense strand starting at position 3489 of SEQ ID NO: 1886314
gcauuugugaugugcagua

SEQ ID NO: 2401147 - RNA, 19 nt, Artificial Sequence
  Description of Artificial Sequence: Synthetic oligonucleotide
  Antisense strand to SEQ ID NO: 2401146
uacugcacaucacaaaugc

SEQ ID NO: 2401148 - RNA, 19 nt, Artificial Sequence
  Description of Artificial Sequence: Synthetic oligonucleotide
  Sense strand starting at position 3573 of SEQ ID NO: 1886314
cauguauggcgcuuucuca

SEQ ID NO: 2401149 - RNA, 19 nt, Artificial Sequence
  Description of Artificial Sequence: Synthetic oligonucleotide
  Antisense strand to SEQ ID NO: 2401148
ugagaaagcgccauacaug

SEQ ID NO: 2401150 - RNA, 19 nt, Artificial Sequence
  Description of Artificial Sequence: Synthetic oligonucleotide
  Sense strand starting at position 3628 of SEQ ID NO: 1886314
ucaguuucucccuggagac

SEQ ID NO: 2401151 - RNA, 19 nt, Artificial Sequence
  Description of Artificial Sequence: Synthetic oligonucleotide
  Antisense strand to SEQ ID NO: 2401150
gucuccagggagaaacuga

SEQ ID NO: 2401152 - RNA, 19 nt, Artificial Sequence
  Description of Artificial Sequence: Synthetic oligonucleotide
  Sense strand starting at position 3629 of SEQ ID NO: 1886314
caguuucucccuggagaca

SEQ ID NO: 2401153 - RNA, 19 nt, Artificial Sequence
  Description of Artificial Sequence: Synthetic oligonucleotide
  Antisense strand to SEQ ID NO: 2401152
ugucuccagggagaaacug

SEQ ID NO: 2401154 - RNA, 19 nt, Artificial Sequence
  Description of Artificial Sequence: Synthetic oligonucleotide
  Sense strand starting at position 13 of SEQ ID NO: 1886315
auacccuagucccuguaaa

SEQ ID NO: 2401155 - RNA, 19 nt, Artificial Sequence
  Description of Artificial Sequence: Synthetic oligonucleotide
  Antisense strand to SEQ ID NO: 2401154
uuuacagggacuaggguau

SEQ ID NO: 2401156 - RNA, 19 nt, Artificial Sequence
  Description of Artificial Sequence: Synthetic oligonucleotide
  Sense strand starting at position 182 of SEQ ID NO: 1886315
ggaccuugagucugagaua

SEQ ID NO: 2401157 - RNA, 19 nt, Artificial Sequence
  Description of Artificial Sequence: Synthetic oligonucleotide
  Antisense strand to SEQ ID NO: 2401156
uaucucagacucaaggucc

SEQ ID NO: 2401158 - RNA, 19 nt, Artificial Sequence
  Description of Artificial Sequence: Synthetic oligonucleotide
  Sense strand starting at position 332 of SEQ ID NO: 1886315
guguuaugauucccuaaga

SEQ ID NO: 2401159 - RNA, 19 nt, Artificial Sequence
  Description of Artificial Sequence: Synthetic oligonucleotide
  Antisense strand to SEQ ID NO: 2401158
ucuuagggaaucauaacac

SEQ ID NO: 2401160 - RNA, 19 nt, Artificial Sequence
  Description of Artificial Sequence: Synthetic oligonucleotide
  Sense strand starting at position 333 of SEQ ID NO: 1886315
uguuaugauucccuaagag

SEQ ID NO: 2401161 - RNA, 19 nt, Artificial Sequence
  Description of Artificial Sequence: Synthetic oligonucleotide
  Antisense strand to SEQ ID NO: 2401160
cucuuagggaaucauaaca

SEQ ID NO: 2401162 - RNA, 19 nt, Artificial Sequence
  Description of Artificial Sequence: Synthetic oligonucleotide
  Sense strand starting at position 415 of SEQ ID NO: 1886315
augggagggcagcauuauu

SEQ ID NO: 2401163 - RNA, 19 nt, Artificial Sequence
  Description of Artificial Sequence: Synthetic oligonucleotide
  Antisense strand to SEQ ID NO: 2401162
aauaaugcugcccucccau

SEQ ID NO: 2401164 - RNA, 19 nt, Artificial Sequence
  Description of Artificial Sequence: Synthetic oligonucleotide
  Sense strand starting at position 549 of SEQ ID NO: 1886315
agaaguauacacggacaau

SEQ ID NO: 2401165 - RNA, 19 nt, Artificial Sequence
  Description of Artificial Sequence: Synthetic oligonucleotide
  Antisense strand to SEQ ID NO: 2401164
auuguccguguauacuucu

SEQ ID NO: 2401166 - RNA, 19 nt, Artificial Sequence
  Description of Artificial Sequence: Synthetic oligonucleotide
  Sense strand starting at position 569 of SEQ ID NO: 1886315
uuuagccuugcauaagaca

SEQ ID NO: 2401167 - RNA, 19 nt, Artificial Sequence
  Description of Artificial Sequence: Synthetic oligonucleotide
  Antisense strand to SEQ ID NO: 2401166
ugucuuaugcaaggcuaaa

SEQ ID NO: 2401168 - RNA, 19 nt, Artificial Sequence
  Description of Artificial Sequence: Synthetic oligonucleotide
  Sense strand starting at position 577 of SEQ ID NO: 1886315
ugcauaagacaggauguuu

SEQ ID NO: 2401169 - RNA, 19 nt, Artificial Sequence
  Description of Artificial Sequence: Synthetic oligonucleotide
  Antisense strand to SEQ ID NO: 2401168
aaacauccugucuuaugca

SEQ ID NO: 2401170 - RNA, 19 nt, Artificial Sequence
  Description of Artificial Sequence: Synthetic oligonucleotide
  Sense strand starting at position 629 of SEQ ID NO: 1886315
agaacugcuguuggacauu

SEQ ID NO: 2401171 - RNA, 19 nt, Artificial Sequence
  Description of Artificial Sequence: Synthetic oligonucleotide
  Antisense strand to SEQ ID NO: 2401170
aauguccaacagcaguucu

SEQ ID NO: 2401172 - RNA, 19 nt, Artificial Sequence
  Description of Artificial Sequence: Synthetic oligonucleotide
  Sense strand starting at position 730 of SEQ ID NO: 1886315
cugaaacuguuaguauuaa

SEQ ID NO: 2401173 - RNA, 19 nt, Artificial Sequence
  Description of Artificial Sequence: Synthetic oligonucleotide
  Antisense strand to SEQ ID NO: 2401172
uuaauacuaacaguuucag

SEQ ID NO: 2401174 - RNA, 19 nt, Artificial Sequence
  Description of Artificial Sequence: Synthetic oligonucleotide
  Sense strand starting at position 823 of SEQ ID NO: 1886315
auugaauguuaccuuagaa

SEQ ID NO: 2401175 - RNA, 19 nt, Artificial Sequence
  Description of Artificial Sequence: Synthetic oligonucleotide
  Antisense strand to SEQ ID NO: 2401174
uucuaagguaacauucaau

SEQ ID NO: 2401176 - RNA, 19 nt, Artificial Sequence
  Description of Artificial Sequence: Synthetic oligonucleotide
  Sense strand starting at position 904 of SEQ ID NO: 1886315
cugguuuggcaaugaaauu

SEQ ID NO: 2401177 - RNA, 19 nt, Artificial Sequence
  Description of Artificial Sequence: Synthetic oligonucleotide
  Antisense strand to SEQ ID NO: 2401176
aauuucauugccaaaccag

SEQ ID NO: 2401178 - RNA, 19 nt, Artificial Sequence
  Description of Artificial Sequence: Synthetic oligonucleotide
  Sense strand starting at position 905 of SEQ ID NO: 1886315
ugguuuggcaaugaaauuc

SEQ ID NO: 2401179 - RNA, 19 nt, Artificial Sequence
  Description of Artificial Sequence: Synthetic oligonucleotide
  Antisense strand to SEQ ID NO: 2401178
gaauuucauugccaaacca

SEQ ID NO: 2401180 - RNA, 19 nt, Artificial Sequence
  Description of Artificial Sequence: Synthetic oligonucleotide
  Sense strand starting at position 996 of SEQ ID NO: 1886315
auggacuacuuuguuauaa

SEQ ID NO: 2401181 - RNA, 19 nt, Artificial Sequence
  Description of Artificial Sequence: Synthetic oligonucleotide
  Antisense strand to SEQ ID NO: 2401180
uuauaacaaaguaguccau

SEQ ID NO: 2401182 - RNA, 19 nt, Artificial Sequence
  Description of Artificial Sequence: Synthetic oligonucleotide
  Sense strand starting at position 997 of SEQ ID NO: 1886315
uggacuacuuuguuauaaa

SEQ ID NO: 2401183 - RNA, 19 nt, Artificial Sequence
  Description of Artificial Sequence: Synthetic oligonucleotide
  Antisense strand to SEQ ID NO: 2401182
uuuauaacaaaguagucca

SEQ ID NO: 2401184 - RNA, 19 nt, Artificial Sequence
  Description of Artificial Sequence: Synthetic oligonucleotide
  Sense strand starting at position 1180 of SEQ ID NO: 1886315
uuaauacaguggucacaca

SEQ ID NO: 2401185 - RNA, 19 nt, Artificial Sequence
  Description of Artificial Sequence: Synthetic oligonucleotide
  Antisense strand to SEQ ID NO: 2401184
ugugugaccacuguauuaa

SEQ ID NO: 2401186 - RNA, 19 nt, Artificial Sequence
  Description of Artificial Sequence: Synthetic oligonucleotide
  Sense strand starting at position 1703 of SEQ ID NO: 1886315
gucacuguaguguacagau

SEQ ID NO: 2401187 - RNA, 19 nt, Artificial Sequence
  Description of Artificial Sequence: Synthetic oligonucleotide
  Antisense strand to SEQ ID NO: 2401186
aucuguacacuacagugac

SEQ ID NO: 2401188 - RNA, 19 nt, Artificial Sequence
  Description of Artificial Sequence: Synthetic oligonucleotide
  Sense strand starting at position 1765 of SEQ ID NO: 1886315
cauauauugguagguuaac

SEQ ID NO: 2401189 - RNA, 19 nt, Artificial Sequence
  Description of Artificial Sequence: Synthetic oligonucleotide
  Antisense strand to SEQ ID NO: 2401188
guuaaccuaccaauauaug

SEQ ID NO: 2401190 - RNA, 19 nt, Artificial Sequence
  Description of Artificial Sequence: Synthetic oligonucleotide
  Sense strand starting at position 1766 of SEQ ID NO: 1886315
auauauugguagguuaacu

SEQ ID NO: 2401191 - RNA, 19 nt, Artificial Sequence
  Description of Artificial Sequence: Synthetic oligonucleotide
  Antisense strand to SEQ ID NO: 2401190
aguuaaccuaccaauauau

SEQ ID NO: 2401192 - RNA, 19 nt, Artificial Sequence
  Description of Artificial Sequence: Synthetic oligonucleotide
  Sense strand starting at position 1776 of SEQ ID NO: 1886315
agguuaacuguccaguaau

SEQ ID NO: 2401193 - RNA, 19 nt, Artificial Sequence
  Description of Artificial Sequence: Synthetic oligonucleotide
  Antisense strand to SEQ ID NO: 2401192
auuacuggacaguuaaccu

SEQ ID NO: 2401194 - RNA, 19 nt, Artificial Sequence
  Description of Artificial Sequence: Synthetic oligonucleotide
  Sense strand starting at position 1851 of SEQ ID NO: 1886315
accagugcugaccaaacaa

SEQ ID NO: 2401195 - RNA, 19 nt, Artificial Sequence
  Description of Artificial Sequence: Synthetic oligonucleotide
  Antisense strand to SEQ ID NO: 2401194
uuguuuggucagcacuggu

SEQ ID NO: 2401196 - RNA, 19 nt, Artificial Sequence
  Description of Artificial Sequence: Synthetic oligonucleotide
  Sense strand starting at position 2018 of SEQ ID NO: 1886315
ggaccuugagccugagaua

SEQ ID NO: 2401197 - RNA, 19 nt, Artificial Sequence
  Description of Artificial Sequence: Synthetic oligonucleotide
  Antisense strand to SEQ ID NO: 2401196
uaucucaggcucaaggucc

SEQ ID NO: 2401198 - RNA, 19 nt, Artificial Sequence
  Description of Artificial Sequence: Synthetic oligonucleotide
  Sense strand starting at position 2187 of SEQ ID NO: 1886315
agaggaaaugcugguauuc

SEQ ID NO: 2401199 - RNA, 19 nt, Artificial Sequence
  Description of Artificial Sequence: Synthetic oligonucleotide
  Antisense strand to SEQ ID NO: 2401198
gaauaccagcauuuccucu

SEQ ID NO: 2401200 - RNA, 19 nt, Artificial Sequence
  Description of Artificial Sequence: Synthetic oligonucleotide
  Sense strand starting at position 2327 of SEQ ID NO: 1886315
cugguuccacaaugaacua

SEQ ID NO: 2401201 - RNA, 19 nt, Artificial Sequence
  Description of Artificial Sequence: Synthetic oligonucleotide
  Antisense strand to SEQ ID NO: 2401200
uaguucauuguggaaccag

SEQ ID NO: 2401202 - RNA, 19 nt, Artificial Sequence
  Description of Artificial Sequence: Synthetic oligonucleotide
  Sense strand starting at position 2363 of SEQ ID NO: 1886315
ugagcaaagauguguaaca

SEQ ID NO: 2401203 - RNA, 19 nt, Artificial Sequence
  Description of Artificial Sequence: Synthetic oligonucleotide
  Antisense strand to SEQ ID NO: 2401202
uguuacacaucuuugcuca

SEQ ID NO: 2401204 - RNA, 19 nt, Artificial Sequence
  Description of Artificial Sequence: Synthetic oligonucleotide
  Sense strand starting at position 2365 of SEQ ID NO: 1886315
agcaaagauguguaacaca

SEQ ID NO: 2401205 - RNA, 19 nt, Artificial Sequence
  Description of Artificial Sequence: Synthetic oligonucleotide
  Antisense strand to SEQ ID NO: 2401204
uguguuacacaucuuugcu

SEQ ID NO: 2401206 - RNA, 19 nt, Artificial Sequence
  Description of Artificial Sequence: Synthetic oligonucleotide
  Sense strand starting at position 2418 of SEQ ID NO: 1886315
cgcuguaggccuucucaca

SEQ ID NO: 2401207 - RNA, 19 nt, Artificial Sequence
  Description of Artificial Sequence: Synthetic oligonucleotide
  Antisense strand to SEQ ID NO: 2401206
ugugagaaggccuacagcg

SEQ ID NO: 2401208 - RNA, 19 nt, Artificial Sequence
  Description of Artificial Sequence: Synthetic oligonucleotide
  Sense strand starting at position 2480 of SEQ ID NO: 1886315
cuuuaauuuccaugcgauu

SEQ ID NO: 2401209 - RNA, 19 nt, Artificial Sequence
  Description of Artificial Sequence: Synthetic oligonucleotide
  Antisense strand to SEQ ID NO: 2401208
aaucgcauggaaauuaaag

SEQ ID NO: 2401210 - RNA, 19 nt, Artificial Sequence
  Description of Artificial Sequence: Synthetic oligonucleotide
  Sense strand starting at position 2602 of SEQ ID NO: 1886315
cagguuaucgcauaugauu

SEQ ID NO: 2401211 - RNA, 19 nt, Artificial Sequence
  Description of Artificial Sequence: Synthetic oligonucleotide
  Antisense strand to SEQ ID NO: 2401210
aaucauaugcgauaaccug

SEQ ID NO: 2401212 - RNA, 19 nt, Artificial Sequence
  Description of Artificial Sequence: Synthetic oligonucleotide
  Sense strand starting at position 3062 of SEQ ID NO: 1886315
aaauguugugguuaucuga

SEQ ID NO: 2401213 - RNA, 19 nt, Artificial Sequence
  Description of Artificial Sequence: Synthetic oligonucleotide
  Antisense strand to SEQ ID NO: 2401212
ucagauaaccacaacauuu

SEQ ID NO: 2401214 - RNA, 19 nt, Artificial Sequence
  Description of Artificial Sequence: Synthetic oligonucleotide
  Sense strand starting at position 3158 of SEQ ID NO: 1886315
gucucagaaagguaguaga

SEQ ID NO: 2401215 - RNA, 19 nt, Artificial Sequence
  Description of Artificial Sequence: Synthetic oligonucleotide
  Antisense strand to SEQ ID NO: 2401214
ucuacuaccuuucugagac

SEQ ID NO: 2401216 - RNA, 19 nt, Artificial Sequence
  Description of Artificial Sequence: Synthetic oligonucleotide
  Sense strand starting at position 3234 of SEQ ID NO: 1886315
uagaguagugauuaaguga

SEQ ID NO: 2401217 - RNA, 19 nt, Artificial Sequence
  Description of Artificial Sequence: Synthetic oligonucleotide
  Antisense strand to SEQ ID NO: 2401216
ucacuuaaucacuacucua

SEQ ID NO: 2401218 - RNA, 19 nt, Artificial Sequence
  Description of Artificial Sequence: Synthetic oligonucleotide
  Sense strand starting at position 3353 of SEQ ID NO: 1886315
gugugugacacggagacau

SEQ ID NO: 2401219 - RNA, 19 nt, Artificial Sequence
  Description of Artificial Sequence: Synthetic oligonucleotide
  Antisense strand to SEQ ID NO: 2401218
augucuccgugucacacac

SEQ ID NO: 2401220 - RNA, 19 nt, Artificial Sequence
  Description of Artificial Sequence: Synthetic oligonucleotide
  Sense strand starting at position 3745 of SEQ ID NO: 1886315
ugcugaacacaauggauaa

SEQ ID NO: 2401221 - RNA, 19 nt, Artificial Sequence
  Description of Artificial Sequence: Synthetic oligonucleotide
  Antisense strand to SEQ ID NO: 2401220
uuauccauuguguucagca

SEQ ID NO: 2401222 - RNA, 19 nt, Artificial Sequence
  Description of Artificial Sequence: Synthetic oligonucleotide
  Sense strand starting at position 3779 of SEQ ID NO: 1886315
gaguaugugcaagacaucu

SEQ ID NO: 2401223 - RNA, 19 nt, Artificial Sequence
  Description of Artificial Sequence: Synthetic oligonucleotide
  Antisense strand to SEQ ID NO: 2401222
agaugucuugcacauacuc

SEQ ID NO: 2401224 - RNA, 19 nt, Artificial Sequence
  Description of Artificial Sequence: Synthetic oligonucleotide
  Sense strand starting at position 3787 of SEQ ID NO: 1886315
gcaagacaucuauacagcu

SEQ ID NO: 2401225 - RNA, 19 nt, Artificial Sequence
  Description of Artificial Sequence: Synthetic oligonucleotide
  Antisense strand to SEQ ID NO: 2401224
agcuguauagaugucuugc

SEQ ID NO: 2401226 - RNA, 19 nt, Artificial Sequence
  Description of Artificial Sequence: Synthetic oligonucleotide
  Sense strand starting at position 3892 of SEQ ID NO: 1886315
cccggaauuaucuguggga

SEQ ID NO: 2401227 - RNA, 19 nt, Artificial Sequence
  Description of Artificial Sequence: Synthetic oligonucleotide
  Antisense strand to SEQ ID NO: 2401226
ucccacagauaauuccggg

SEQ ID NO: 2401228 - RNA, 19 nt, Artificial Sequence
  Description of Artificial Sequence: Synthetic oligonucleotide
  Sense strand starting at position 3893 of SEQ ID NO: 1886315
ccggaauuaucugugggag

SEQ ID NO: 2401229 - RNA, 19 nt, Artificial Sequence
  Description of Artificial Sequence: Synthetic oligonucleotide
  Antisense strand to SEQ ID NO: 2401228
cucccacagauaauuccgg

SEQ ID NO: 2401230 - RNA, 19 nt, Artificial Sequence
  Description of Artificial Sequence: Synthetic oligonucleotide
  Sense strand starting at position 3894 of SEQ ID NO: 1886315
cggaauuaucugugggagg

SEQ ID NO: 2401231 - RNA, 19 nt, Artificial Sequence
  Description of Artificial Sequence: Synthetic oligonucleotide
  Antisense strand to SEQ ID NO: 2401230
ccucccacagauaauuccg

SEQ ID NO: 2401232 - RNA, 19 nt, Artificial Sequence
  Description of Artificial Sequence: Synthetic oligonucleotide
  Sense strand starting at position 3896 of SEQ ID NO: 1886315
gaauuaucugugggaggca

SEQ ID NO: 2401233 - RNA, 19 nt, Artificial Sequence
  Description of Artificial Sequence: Synthetic oligonucleotide
  Antisense strand to SEQ ID NO: 2401232
ugccucccacagauaauuc

SEQ ID NO: 2401234 - RNA, 19 nt, Artificial Sequence
  Description of Artificial Sequence: Synthetic oligonucleotide
  Sense strand starting at position 15 of SEQ ID NO: 1886316
acuauuuaaucauggagac

SEQ ID NO: 2401235 - RNA, 19 nt, Artificial Sequence
  Description of Artificial Sequence: Synthetic oligonucleotide
  Antisense strand to SEQ ID NO: 2401234
gucuccaugauuaaauagu

SEQ ID NO: 2401236 - RNA, 19 nt, Artificial Sequence
  Description of Artificial Sequence: Synthetic oligonucleotide
  Sense strand starting at position 407 of SEQ ID NO: 1886316
uuuauaacucuuggaaaug

SEQ ID NO: 2401237 - RNA, 19 nt, Artificial Sequence
  Description of Artificial Sequence: Synthetic oligonucleotide
  Antisense strand to SEQ ID NO: 2401236
cauuuccaagaguuauaaa

SEQ ID NO: 2401238 - RNA, 19 nt, Artificial Sequence
  Description of Artificial Sequence: Synthetic oligonucleotide
  Sense strand starting at position 489 of SEQ ID NO: 1886316
cagauagcgcaucagauua

SEQ ID NO: 2401239 - RNA, 19 nt, Artificial Sequence
  Description of Artificial Sequence: Synthetic oligonucleotide
  Antisense strand to SEQ ID NO: 2401238
uaaucugaugcgcuaucug

SEQ ID NO: 2401240 - RNA, 19 nt, Artificial Sequence
  Description of Artificial Sequence: Synthetic oligonucleotide
  Sense strand starting at position 494 of SEQ ID NO: 1886316
agcgcaucagauuaauaau

SEQ ID NO: 2401241 - RNA, 19 nt, Artificial Sequence
  Description of Artificial Sequence: Synthetic oligonucleotide
  Antisense strand to SEQ ID NO: 2401240
auuauuaaucugaugcgcu

SEQ ID NO: 2401242 - RNA, 19 nt, Artificial Sequence
  Description of Artificial Sequence: Synthetic oligonucleotide
  Sense strand starting at position 515 of SEQ ID NO: 1886316
cuaacauugucuguauuaa

SEQ ID NO: 2401243 - RNA, 19 nt, Artificial Sequence
  Description of Artificial Sequence: Synthetic oligonucleotide
  Antisense strand to SEQ ID NO: 2401242
uuaauacagacaauguuag

SEQ ID NO: 2401244 - RNA, 19 nt, Artificial Sequence
  Description of Artificial Sequence: Synthetic oligonucleotide
  Sense strand starting at position 770 of SEQ ID NO: 1886316
auggaauguuuaguuacaa

SEQ ID NO: 2401245 - RNA, 19 nt, Artificial Sequence
  Description of Artificial Sequence: Synthetic oligonucleotide
  Antisense strand to SEQ ID NO: 2401244
uuguaacuaaacauuccau

SEQ ID NO: 2401246 - RNA, 19 nt, Artificial Sequence
  Description of Artificial Sequence: Synthetic oligonucleotide
  Sense strand starting at position 771 of SEQ ID NO: 1886316
uggaauguuuaguuacaag

SEQ ID NO: 2401247 - RNA, 19 nt, Artificial Sequence
  Description of Artificial Sequence: Synthetic oligonucleotide
  Antisense strand to SEQ ID NO: 2401246
cuuguaacuaaacauucca

SEQ ID NO: 2401248 - RNA, 19 nt, Artificial Sequence
  Description of Artificial Sequence: Synthetic oligonucleotide
  Sense strand starting at position 899 of SEQ ID NO: 1886316
cugagacauuagucucaaa

SEQ ID NO: 2401249 - RNA, 19 nt, Artificial Sequence
  Description of Artificial Sequence: Synthetic oligonucleotide
  Antisense strand to SEQ ID NO: 2401248
uuugagacuaaugucucag

SEQ ID NO: 2401250 - RNA, 19 nt, Artificial Sequence
  Description of Artificial Sequence: Synthetic oligonucleotide
  Sense strand starting at position 1183 of SEQ ID NO: 1886316
acacuagaguagucuacuu

SEQ ID NO: 2401251 - RNA, 19 nt, Artificial Sequence
  Description of Artificial Sequence: Synthetic oligonucleotide
  Antisense strand to SEQ ID NO: 2401250
aaguagacuacucuagugu

SEQ ID NO: 2401252 - RNA, 19 nt, Artificial Sequence
  Description of Artificial Sequence: Synthetic oligonucleotide
  Sense strand starting at position 1185 of SEQ ID NO: 1886316
acuagaguagucuacuuag

SEQ ID NO: 2401253 - RNA, 19 nt, Artificial Sequence
  Description of Artificial Sequence: Synthetic oligonucleotide
  Antisense strand to SEQ ID NO: 2401252
cuaaguagacuacucuagu

SEQ ID NO: 2401254 - RNA, 19 nt, Artificial Sequence
  Description of Artificial Sequence: Synthetic oligonucleotide
  Sense strand starting at position 1188 of SEQ ID NO: 1886316
agaguagucuacuuagagu

SEQ ID NO: 2401255 - RNA, 19 nt, Artificial Sequence
  Description of Artificial Sequence: Synthetic oligonucleotide
  Antisense strand to SEQ ID NO: 2401254
acucuaaguagacuacucu

SEQ ID NO: 2401256 - RNA, 19 nt, Artificial Sequence
  Description of Artificial Sequence: Synthetic oligonucleotide
  Sense strand starting at position 1564 of SEQ ID NO: 1886316
ucucauuaguaucuuugga

SEQ ID NO: 2401257 - RNA, 19 nt, Artificial Sequence
  Description of Artificial Sequence: Synthetic oligonucleotide
  Antisense strand to SEQ ID NO: 2401256
uccaaagauacuaaugaga

SEQ ID NO: 2401258 - RNA, 19 nt, Artificial Sequence
  Description of Artificial Sequence: Synthetic oligonucleotide
  Sense strand starting at position 1566 of SEQ ID NO: 1886316
ucauuaguaucuuuggauu

SEQ ID NO: 2401259 - RNA, 19 nt, Artificial Sequence
  Description of Artificial Sequence: Synthetic oligonucleotide
  Antisense strand to SEQ ID NO: 2401258
aauccaaagauacuaauga

SEQ ID NO: 2401260 - RNA, 19 nt, Artificial Sequence
  Description of Artificial Sequence: Synthetic oligonucleotide
  Sense strand starting at position 1609 of SEQ ID NO: 1886316
ucaagagacugcucauuga

SEQ ID NO: 2401261 - RNA, 19 nt, Artificial Sequence
  Description of Artificial Sequence: Synthetic oligonucleotide
  Antisense strand to SEQ ID NO: 2401260
ucaaugagcagucucuuga

SEQ ID NO: 2401262 - RNA, 19 nt, Artificial Sequence
  Description of Artificial Sequence: Synthetic oligonucleotide
  Sense strand starting at position 1612 of SEQ ID NO: 1886316
agagacugcucauugacca

SEQ ID NO: 2401263 - RNA, 19 nt, Artificial Sequence
  Description of Artificial Sequence: Synthetic oligonucleotide
  Antisense strand to SEQ ID NO: 2401262
uggucaaugagcagucucu

SEQ ID NO: 2401264 - RNA, 19 nt, Artificial Sequence
  Description of Artificial Sequence: Synthetic oligonucleotide
  Sense strand starting at position 1616 of SEQ ID NO: 1886316
acugcucauugaccagaua

SEQ ID NO: 2401265 - RNA, 19 nt, Artificial Sequence
  Description of Artificial Sequence: Synthetic oligonucleotide
  Antisense strand to SEQ ID NO: 2401264
uaucuggucaaugagcagu

SEQ ID NO: 2401266 - RNA, 19 nt, Artificial Sequence
  Description of Artificial Sequence: Synthetic oligonucleotide
  Sense strand starting at position 1617 of SEQ ID NO: 1886316
cugcucauugaccagauaa

SEQ ID NO: 2401267 - RNA, 19 nt, Artificial Sequence
  Description of Artificial Sequence: Synthetic oligonucleotide
  Antisense strand to SEQ ID NO: 2401266
uuaucuggucaaugagcag

SEQ ID NO: 2401268 - RNA, 19 nt, Artificial Sequence
  Description of Artificial Sequence: Synthetic oligonucleotide
  Sense strand starting at position 1619 of SEQ ID NO: 1886316
gcucauugaccagauaauu

SEQ ID NO: 2401269 - RNA, 19 nt, Artificial Sequence
  Description of Artificial Sequence: Synthetic oligonucleotide
  Antisense strand to SEQ ID NO: 2401268
aauuaucuggucaaugagc

SEQ ID NO: 2401270 - RNA, 19 nt, Artificial Sequence
  Description of Artificial Sequence: Synthetic oligonucleotide
  Sense strand starting at position 1652 of SEQ ID NO: 1886316
gugugaauggcucaagagu

SEQ ID NO: 2401271 - RNA, 19 nt, Artificial Sequence
  Description of Artificial Sequence: Synthetic oligonucleotide
  Antisense strand to SEQ ID NO: 2401270
acucuugagccauucacac

SEQ ID NO: 2401272 - RNA, 19 nt, Artificial Sequence
  Description of Artificial Sequence: Synthetic oligonucleotide
  Sense strand starting at position 1660 of SEQ ID NO: 1886316
ggcucaagaguaggugaaa

SEQ ID NO: 2401273 - RNA, 19 nt, Artificial Sequence
  Description of Artificial Sequence: Synthetic oligonucleotide
  Antisense strand to SEQ ID NO: 2401272
uuucaccuacucuugagcc

SEQ ID NO: 2401274 - RNA, 19 nt, Artificial Sequence
  Description of Artificial Sequence: Synthetic oligonucleotide
  Sense strand starting at position 1661 of SEQ ID NO: 1886316
gcucaagaguaggugaaau

SEQ ID NO: 2401275 - RNA, 19 nt, Artificial Sequence
  Description of Artificial Sequence: Synthetic oligonucleotide
  Antisense strand to SEQ ID NO: 2401274
auuucaccuacucuugagc

SEQ ID NO: 2401276 - RNA, 19 nt, Artificial Sequence
  Description of Artificial Sequence: Synthetic oligonucleotide
  Sense strand starting at position 1849 of SEQ ID NO: 1886316
auacccuagucccuguaaa

SEQ ID NO: 2401277 - RNA, 19 nt, Artificial Sequence
  Description of Artificial Sequence: Synthetic oligonucleotide
  Antisense strand to SEQ ID NO: 2401276
uuuacagggacuaggguau

SEQ ID NO: 2401278 - RNA, 19 nt, Artificial Sequence
  Description of Artificial Sequence: Synthetic oligonucleotide
  Sense strand starting at position 2018 of SEQ ID NO: 1886316
ggaccuugagucugagaua

SEQ ID NO: 2401279 - RNA, 19 nt, Artificial Sequence
  Description of Artificial Sequence: Synthetic oligonucleotide
  Antisense strand to SEQ ID NO: 2401278
uaucucagacucaaggucc

SEQ ID NO: 2401280 - RNA, 19 nt, Artificial Sequence
  Description of Artificial Sequence: Synthetic oligonucleotide
  Sense strand starting at position 2168 of SEQ ID NO: 1886316
guguuaugauucccuaaga

SEQ ID NO: 2401281 - RNA, 19 nt, Artificial Sequence
  Description of Artificial Sequence: Synthetic oligonucleotide
  Antisense strand to SEQ ID NO: 2401280
ucuuagggaaucauaacac

SEQ ID NO: 2401282 - RNA, 19 nt, Artificial Sequence
  Description of Artificial Sequence: Synthetic oligonucleotide
  Sense strand starting at position 2169 of SEQ ID NO: 1886316
uguuaugauucccuaagag

SEQ ID NO: 2401283 - RNA, 19 nt, Artificial Sequence
  Description of Artificial Sequence: Synthetic oligonucleotide
  Antisense strand to SEQ ID NO: 2401282
cucuuagggaaucauaaca

SEQ ID NO: 2401284 - RNA, 19 nt, Artificial Sequence
  Description of Artificial Sequence: Synthetic oligonucleotide
  Sense strand starting at position 2251 of SEQ ID NO: 1886316
augggagggcagcauuauu

SEQ ID NO: 2401285 - RNA, 19 nt, Artificial Sequence
  Description of Artificial Sequence: Synthetic oligonucleotide
  Antisense strand to SEQ ID NO: 2401284
aauaaugcugcccucccau

SEQ ID NO: 2401286 - RNA, 19 nt, Artificial Sequence
  Description of Artificial Sequence: Synthetic oligonucleotide
  Sense strand starting at position 2385 of SEQ ID NO: 1886316
agaaguauacacggacaau

SEQ ID NO: 2401287 - RNA, 19 nt, Artificial Sequence
  Description of Artificial Sequence: Synthetic oligonucleotide
  Antisense strand to SEQ ID NO: 2401286
auuguccguguauacuucu

SEQ ID NO: 2401288 - RNA, 19 nt, Artificial Sequence
  Description of Artificial Sequence: Synthetic oligonucleotide
  Sense strand starting at position 2405 of SEQ ID NO: 1886316
uuuagccuugcauaagaca

SEQ ID NO: 2401289 - RNA, 19 nt, Artificial Sequence
  Description of Artificial Sequence: Synthetic oligonucleotide
  Antisense strand to SEQ ID NO: 2401288
ugucuuaugcaaggcuaaa

SEQ ID NO: 2401290 - RNA, 19 nt, Artificial Sequence
  Description of Artificial Sequence: Synthetic oligonucleotide
  Sense strand starting at position 2413 of SEQ ID NO: 1886316
ugcauaagacaggauguuu

SEQ ID NO: 2401291 - RNA, 19 nt, Artificial Sequence
  Description of Artificial Sequence: Synthetic oligonucleotide
  Antisense strand to SEQ ID NO: 2401290
aaacauccugucuuaugca

SEQ ID NO: 2401292 - RNA, 19 nt, Artificial Sequence
  Description of Artificial Sequence: Synthetic oligonucleotide
  Sense strand starting at position 2566 of SEQ ID NO: 1886316
cugaaacuguuaguauuaa

SEQ ID NO: 2401293 - RNA, 19 nt, Artificial Sequence
  Description of Artificial Sequence: Synthetic oligonucleotide
  Antisense strand to SEQ ID NO: 2401292
uuaauacuaacaguuucag

SEQ ID NO: 2401294 - RNA, 19 nt, Artificial Sequence
  Description of Artificial Sequence: Synthetic oligonucleotide
  Sense strand starting at position 2659 of SEQ ID NO: 1886316
auugaauguuaccuuagaa

SEQ ID NO: 2401295 - RNA, 19 nt, Artificial Sequence
  Description of Artificial Sequence: Synthetic oligonucleotide
  Antisense strand to SEQ ID NO: 2401294
uucuaagguaacauucaau

SEQ ID NO: 2401296 - RNA, 19 nt, Artificial Sequence
  Description of Artificial Sequence: Synthetic oligonucleotide
  Sense strand starting at position 2741 of SEQ ID NO: 1886316
ugguuuggcaaugaaauuc

SEQ ID NO: 2401297 - RNA, 19 nt, Artificial Sequence
  Description of Artificial Sequence: Synthetic oligonucleotide
  Antisense strand to SEQ ID NO: 2401296
gaauuucauugccaaacca

SEQ ID NO: 2401298 - RNA, 19 nt, Artificial Sequence
  Description of Artificial Sequence: Synthetic oligonucleotide
  Sense strand starting at position 2832 of SEQ ID NO: 1886316
auggacuacuuuguuauaa

SEQ ID NO: 2401299 - RNA, 19 nt, Artificial Sequence
  Description of Artificial Sequence: Synthetic oligonucleotide
  Antisense strand to SEQ ID NO: 2401298
uuauaacaaaguaguccau

SEQ ID NO: 2401300 - RNA, 19 nt, Artificial Sequence
  Description of Artificial Sequence: Synthetic oligonucleotide
  Sense strand starting at position 2833 of SEQ ID NO: 1886316
uggacuacuuuguuauaaa

SEQ ID NO: 2401301 - RNA, 19 nt, Artificial Sequence
  Description of Artificial Sequence: Synthetic oligonucleotide
  Antisense strand to SEQ ID NO: 2401300
uuuauaacaaaguagucca

SEQ ID NO: 2401302 - RNA, 19 nt, Artificial Sequence
  Description of Artificial Sequence: Synthetic oligonucleotide
  Sense strand starting at position 3016 of SEQ ID NO: 1886316
uuaauacaguggucacaca

SEQ ID NO: 2401303 - RNA, 19 nt, Artificial Sequence
  Description of Artificial Sequence: Synthetic oligonucleotide
  Antisense strand to SEQ ID NO: 2401302
ugugugaccacuguauuaa

SEQ ID NO: 2401304 - RNA, 19 nt, Artificial Sequence
  Description of Artificial Sequence: Synthetic oligonucleotide
  Sense strand starting at position 3601 of SEQ ID NO: 1886316
cauauauugguagguuaac

SEQ ID NO: 2401305 - RNA, 19 nt, Artificial Sequence
  Description of Artificial Sequence: Synthetic oligonucleotide
  Antisense strand to SEQ ID NO: 2401304
guuaaccuaccaauauaug

SEQ ID NO: 2401306 - RNA, 19 nt, Artificial Sequence
  Description of Artificial Sequence: Synthetic oligonucleotide
  Sense strand starting at position 3602 of SEQ ID NO: 1886316
auauauugguagguuaacu

SEQ ID NO: 2401307 - RNA, 19 nt, Artificial Sequence
  Description of Artificial Sequence: Synthetic oligonucleotide
  Antisense strand to SEQ ID NO: 2401306
aguuaaccuaccaauauau

SEQ ID NO: 2401308 - RNA, 19 nt, Artificial Sequence
  Description of Artificial Sequence: Synthetic oligonucleotide
  Sense strand starting at position 3612 of SEQ ID NO: 1886316
agguuaacuguccaguaau

SEQ ID NO: 2401309 - RNA, 19 nt, Artificial Sequence
  Description of Artificial Sequence: Synthetic oligonucleotide
  Antisense strand to SEQ ID NO: 2401308
auuacuggacaguuaaccu

SEQ ID NO: 2401310 - RNA, 19 nt, Artificial Sequence
  Description of Artificial Sequence: Synthetic oligonucleotide
  Sense strand starting at position 3687 of SEQ ID NO: 1886316
accagugcugaccaaacaa

SEQ ID NO: 2401311 - RNA, 19 nt, Artificial Sequence
  Description of Artificial Sequence: Synthetic oligonucleotide
  Antisense strand to SEQ ID NO: 2401310
uuguuuggucagcacuggu

SEQ ID NO: 2401312 - RNA, 19 nt, Artificial Sequence
  Description of Artificial Sequence: Synthetic oligonucleotide
  Sense strand starting at position 3854 of SEQ ID NO: 1886316
ggaccuugagccugagaua

SEQ ID NO: 2401313 - RNA, 19 nt, Artificial Sequence
  Description of Artificial Sequence: Synthetic oligonucleotide
  Antisense strand to SEQ ID NO: 2401312
uaucucaggcucaaggucc

SEQ ID NO: 2401314 - RNA, 19 nt, Artificial Sequence
  Description of Artificial Sequence: Synthetic oligonucleotide
  Sense strand starting at position 40 of SEQ ID NO: 1886317
cuccuauaugcaggaaauc

SEQ ID NO: 2401315 - RNA, 19 nt, Artificial Sequence
  Description of Artificial Sequence: Synthetic oligonucleotide
  Antisense strand to SEQ ID NO: 2401314
gauuuccugcauauaggag

SEQ ID NO: 2401316 - RNA, 19 nt, Artificial Sequence
  Description of Artificial Sequence: Synthetic oligonucleotide
  Sense strand starting at position 52 of SEQ ID NO: 1886317
ggaaaucauuucuagauua

SEQ ID NO: 2401317 - RNA, 19 nt, Artificial Sequence
  Description of Artificial Sequence: Synthetic oligonucleotide
  Antisense strand to SEQ ID NO: 2401316
uaaucuagaaaugauuucc

SEQ ID NO: 2401318 - RNA, 19 nt, Artificial Sequence
  Description of Artificial Sequence: Synthetic oligonucleotide
  Sense strand starting at position 669 of SEQ ID NO: 1886317
uggguuggcaacugauuaa

SEQ ID NO: 2401319 - RNA, 19 nt, Artificial Sequence
  Description of Artificial Sequence: Synthetic oligonucleotide
  Antisense strand to SEQ ID NO: 2401318
uuaaucaguugccaaccca

SEQ ID NO: 2401320 - RNA, 19 nt, Artificial Sequence
  Description of Artificial Sequence: Synthetic oligonucleotide
  Sense strand starting at position 1644 of SEQ ID NO: 1886317
caaguauaggcaggaacau

SEQ ID NO: 2401321 - RNA, 19 nt, Artificial Sequence
  Description of Artificial Sequence: Synthetic oligonucleotide
  Antisense strand to SEQ ID NO: 2401320
auguuccugccuauacuug

SEQ ID NO: 2401322 - RNA, 19 nt, Artificial Sequence
  Description of Artificial Sequence: Synthetic oligonucleotide
  Sense strand starting at position 1699 of SEQ ID NO: 1886317
guuucuaugguauauagau

SEQ ID NO: 2401323 - RNA, 19 nt, Artificial Sequence
  Description of Artificial Sequence: Synthetic oligonucleotide
  Antisense strand to SEQ ID NO: 2401322
aucuauauaccauagaaac

SEQ ID NO: 2401324 - RNA, 19 nt, Artificial Sequence
  Description of Artificial Sequence: Synthetic oligonucleotide
  Sense strand starting at position 1878 of SEQ ID NO: 1886317
acacauguuugacuggagu

SEQ ID NO: 2401325 - RNA, 19 nt, Artificial Sequence
  Description of Artificial Sequence: Synthetic oligonucleotide
  Antisense strand to SEQ ID NO: 2401324
acuccagucaaacaugugu

SEQ ID NO: 2401326 - RNA, 19 nt, Artificial Sequence
  Description of Artificial Sequence: Synthetic oligonucleotide
  Sense strand starting at position 2018 of SEQ ID NO: 1886317
gaacccugagucugagaua

SEQ ID NO: 2401327 - RNA, 19 nt, Artificial Sequence
  Description of Artificial Sequence: Synthetic oligonucleotide
  Antisense strand to SEQ ID NO: 2401326
uaucucagacucaggguuc

SEQ ID NO: 2401328 - RNA, 19 nt, Artificial Sequence
  Description of Artificial Sequence: Synthetic oligonucleotide
  Sense strand starting at position 2023 of SEQ ID NO: 1886317
cugagucugagauauguga

SEQ ID NO: 2401329 - RNA, 19 nt, Artificial Sequence
  Description of Artificial Sequence: Synthetic oligonucleotide
  Antisense strand to SEQ ID NO: 2401328
ucacauaucucagacucag

SEQ ID NO: 2401330 - RNA, 19 nt, Artificial Sequence
  Description of Artificial Sequence: Synthetic oligonucleotide
  Sense strand starting at position 2025 of SEQ ID NO: 1886317
gagucugagauaugugaca

SEQ ID NO: 2401331 - RNA, 19 nt, Artificial Sequence
  Description of Artificial Sequence: Synthetic oligonucleotide
  Antisense strand to SEQ ID NO: 2401330
ugucacauaucucagacuc

SEQ ID NO: 2401332 - RNA, 19 nt, Artificial Sequence
  Description of Artificial Sequence: Synthetic oligonucleotide
  Sense strand starting at position 2027 of SEQ ID NO: 1886317
gucugagauaugugacaga

SEQ ID NO: 2401333 - RNA, 19 nt, Artificial Sequence
  Description of Artificial Sequence: Synthetic oligonucleotide
  Antisense strand to SEQ ID NO: 2401332
ucugucacauaucucagac

SEQ ID NO: 2401334 - RNA, 19 nt, Artificial Sequence
  Description of Artificial Sequence: Synthetic oligonucleotide
  Sense strand starting at position 2062 of SEQ ID NO: 1886317
uucugucacccugggacau

SEQ ID NO: 2401335 - RNA, 19 nt, Artificial Sequence
  Description of Artificial Sequence: Synthetic oligonucleotide
  Antisense strand to SEQ ID NO: 2401334
augucccagggugacagaa

SEQ ID NO: 2401336 - RNA, 19 nt, Artificial Sequence
  Description of Artificial Sequence: Synthetic oligonucleotide
  Sense strand starting at position 2091 of SEQ ID NO: 1886317
acuauuuaaucauggagac

SEQ ID NO: 2401337 - RNA, 19 nt, Artificial Sequence
  Description of Artificial Sequence: Synthetic oligonucleotide
  Antisense strand to SEQ ID NO: 2401336
gucuccaugauuaaauagu

SEQ ID NO: 2401338 - RNA, 19 nt, Artificial Sequence
  Description of Artificial Sequence: Synthetic oligonucleotide
  Sense strand starting at position 2175 of SEQ ID NO: 1886317
gugucaugaucucuuaaca

SEQ ID NO: 2401339 - RNA, 19 nt, Artificial Sequence
  Description of Artificial Sequence: Synthetic oligonucleotide
  Antisense strand to SEQ ID NO: 2401338
uguuaagagaucaugacac

SEQ ID NO: 2401340 - RNA, 19 nt, Artificial Sequence
  Description of Artificial Sequence: Synthetic oligonucleotide
  Sense strand starting at position 2483 of SEQ ID NO: 1886317
uuuauaacucuuggaaaug

SEQ ID NO: 2401341 - RNA, 19 nt, Artificial Sequence
  Description of Artificial Sequence: Synthetic oligonucleotide
  Antisense strand to SEQ ID NO: 2401340
cauuuccaagaguuauaaa

SEQ ID NO: 2401342 - RNA, 19 nt, Artificial Sequence
  Description of Artificial Sequence: Synthetic oligonucleotide
  Sense strand starting at position 2565 of SEQ ID NO: 1886317
cagauagcgcaucagauua

SEQ ID NO: 2401343 - RNA, 19 nt, Artificial Sequence
  Description of Artificial Sequence: Synthetic oligonucleotide
  Antisense strand to SEQ ID NO: 2401342
uaaucugaugcgcuaucug

SEQ ID NO: 2401344 - RNA, 19 nt, Artificial Sequence
  Description of Artificial Sequence: Synthetic oligonucleotide
  Sense strand starting at position 2570 of SEQ ID NO: 1886317
agcgcaucagauuaauaau

SEQ ID NO: 2401345 - RNA, 19 nt, Artificial Sequence
  Description of Artificial Sequence: Synthetic oligonucleotide
  Antisense strand to SEQ ID NO: 2401344
auuauuaaucugaugcgcu

SEQ ID NO: 2401346 - RNA, 19 nt, Artificial Sequence
  Description of Artificial Sequence: Synthetic oligonucleotide
  Sense strand starting at position 2590 of SEQ ID NO: 1886317
ccuaacauugucuguauua

SEQ ID NO: 2401347 - RNA, 19 nt, Artificial Sequence
  Description of Artificial Sequence: Synthetic oligonucleotide
  Antisense strand to SEQ ID NO: 2401346
uaauacagacaauguuagg

SEQ ID NO: 2401348 - RNA, 19 nt, Artificial Sequence
  Description of Artificial Sequence: Synthetic oligonucleotide
  Sense strand starting at position 2591 of SEQ ID NO: 1886317
cuaacauugucuguauuaa

SEQ ID NO: 2401349 - RNA, 19 nt, Artificial Sequence
  Description of Artificial Sequence: Synthetic oligonucleotide
  Antisense strand to SEQ ID NO: 2401348
uuaauacagacaauguuag

SEQ ID NO: 2401350 - RNA, 19 nt, Artificial Sequence
  Description of Artificial Sequence: Synthetic oligonucleotide
  Sense strand starting at position 2846 of SEQ ID NO: 1886317
auggaauguuuaguuacaa

SEQ ID NO: 2401351 - RNA, 19 nt, Artificial Sequence
  Description of Artificial Sequence: Synthetic oligonucleotide
  Antisense strand to SEQ ID NO: 2401350
uuguaacuaaacauuccau

SEQ ID NO: 2401352 - RNA, 19 nt, Artificial Sequence
  Description of Artificial Sequence: Synthetic oligonucleotide
  Sense strand starting at position 2847 of SEQ ID NO: 1886317
uggaauguuuaguuacaag

SEQ ID NO: 2401353 - RNA, 19 nt, Artificial Sequence
  Description of Artificial Sequence: Synthetic oligonucleotide
  Antisense strand to SEQ ID NO: 2401352
cuuguaacuaaacauucca

SEQ ID NO: 2401354 - RNA, 19 nt, Artificial Sequence
  Description of Artificial Sequence: Synthetic oligonucleotide
  Sense strand starting at position 2903 of SEQ ID NO: 1886317
uccaaugaaugacaagaaa

SEQ ID NO: 2401355 - RNA, 19 nt, Artificial Sequence
  Description of Artificial Sequence: Synthetic oligonucleotide
  Antisense strand to SEQ ID NO: 2401354
uuucuugucauucauugga

SEQ ID NO: 2401356 - RNA, 19 nt, Artificial Sequence
  Description of Artificial Sequence: Synthetic oligonucleotide
  Sense strand starting at position 2975 of SEQ ID NO: 1886317
cugagacauuagucucaaa

SEQ ID NO: 2401357 - RNA, 19 nt, Artificial Sequence
  Description of Artificial Sequence: Synthetic oligonucleotide
  Antisense strand to SEQ ID NO: 2401356
uuugagacuaaugucucag

SEQ ID NO: 2401358 - RNA, 19 nt, Artificial Sequence
  Description of Artificial Sequence: Synthetic oligonucleotide
  Sense strand starting at position 3223 of SEQ ID NO: 1886317
caauccuaguggcugaauu

SEQ ID NO: 2401359 - RNA, 19 nt, Artificial Sequence
  Description of Artificial Sequence: Synthetic oligonucleotide
  Antisense strand to SEQ ID NO: 2401358
aauucagccacuaggauug

SEQ ID NO: 2401360 - RNA, 19 nt, Artificial Sequence
  Description of Artificial Sequence: Synthetic oligonucleotide
  Sense strand starting at position 3231 of SEQ ID NO: 1886317
guggcugaauuggcaagaa

SEQ ID NO: 2401361 - RNA, 19 nt, Artificial Sequence
  Description of Artificial Sequence: Synthetic oligonucleotide
  Antisense strand to SEQ ID NO: 2401360
uucuugccaauucagccac

SEQ ID NO: 2401362 - RNA, 19 nt, Artificial Sequence
  Description of Artificial Sequence: Synthetic oligonucleotide
  Sense strand starting at position 3259 of SEQ ID NO: 1886317
acacuagaguagucuacuu

SEQ ID NO: 2401363 - RNA, 19 nt, Artificial Sequence
  Description of Artificial Sequence: Synthetic oligonucleotide
  Antisense strand to SEQ ID NO: 2401362
aaguagacuacucuagugu

SEQ ID NO: 2401364 - RNA, 19 nt, Artificial Sequence
  Description of Artificial Sequence: Synthetic oligonucleotide
  Sense strand starting at position 3261 of SEQ ID NO: 1886317
acuagaguagucuacuuag

SEQ ID NO: 2401365 - RNA, 19 nt, Artificial Sequence
  Description of Artificial Sequence: Synthetic oligonucleotide
  Antisense strand to SEQ ID NO: 2401364
cuaaguagacuacucuagu

SEQ ID NO: 2401366 - RNA, 19 nt, Artificial Sequence
  Description of Artificial Sequence: Synthetic oligonucleotide
  Sense strand starting at position 3264 of SEQ ID NO: 1886317
agaguagucuacuuagagu

SEQ ID NO: 2401367 - RNA, 19 nt, Artificial Sequence
  Description of Artificial Sequence: Synthetic oligonucleotide
  Antisense strand to SEQ ID NO: 2401366
acucuaaguagacuacucu

SEQ ID NO: 2401368 - RNA, 19 nt, Artificial Sequence
  Description of Artificial Sequence: Synthetic oligonucleotide
  Sense strand starting at position 3640 of SEQ ID NO: 1886317
ucucauuaguaucuuugga

SEQ ID NO: 2401369 - RNA, 19 nt, Artificial Sequence
  Description of Artificial Sequence: Synthetic oligonucleotide
  Antisense strand to SEQ ID NO: 2401368
uccaaagauacuaaugaga

SEQ ID NO: 2401370 - RNA, 19 nt, Artificial Sequence
  Description of Artificial Sequence: Synthetic oligonucleotide
  Sense strand starting at position 3642 of SEQ ID NO: 1886317
ucauuaguaucuuuggauu

SEQ ID NO: 2401371 - RNA, 19 nt, Artificial Sequence
  Description of Artificial Sequence: Synthetic oligonucleotide
  Antisense strand to SEQ ID NO: 2401370
aauccaaagauacuaauga

SEQ ID NO: 2401372 - RNA, 19 nt, Artificial Sequence
  Description of Artificial Sequence: Synthetic oligonucleotide
  Sense strand starting at position 3685 of SEQ ID NO: 1886317
ucaagagacugcucauuga

SEQ ID NO: 2401373 - RNA, 19 nt, Artificial Sequence
  Description of Artificial Sequence: Synthetic oligonucleotide
  Antisense strand to SEQ ID NO: 2401372
ucaaugagcagucucuuga

SEQ ID NO: 2401374 - RNA, 19 nt, Artificial Sequence
  Description of Artificial Sequence: Synthetic oligonucleotide
  Sense strand starting at position 3688 of SEQ ID NO: 1886317
agagacugcucauugacca

SEQ ID NO: 2401375 - RNA, 19 nt, Artificial Sequence
  Description of Artificial Sequence: Synthetic oligonucleotide
  Antisense strand to SEQ ID NO: 2401374
uggucaaugagcagucucu

SEQ ID NO: 2401376 - RNA, 19 nt, Artificial Sequence
  Description of Artificial Sequence: Synthetic oligonucleotide
  Sense strand starting at position 3692 of SEQ ID NO: 1886317
acugcucauugaccagaua

SEQ ID NO: 2401377 - RNA, 19 nt, Artificial Sequence
  Description of Artificial Sequence: Synthetic oligonucleotide
  Antisense strand to SEQ ID NO: 2401376
uaucuggucaaugagcagu

SEQ ID NO: 2401378 - RNA, 19 nt, Artificial Sequence
  Description of Artificial Sequence: Synthetic oligonucleotide
  Sense strand starting at position 3693 of SEQ ID NO: 1886317
cugcucauugaccagauaa

SEQ ID NO: 2401379 - RNA, 19 nt, Artificial Sequence
  Description of Artificial Sequence: Synthetic oligonucleotide
  Antisense strand to SEQ ID NO: 2401378
uuaucuggucaaugagcag

SEQ ID NO: 2401380 - RNA, 19 nt, Artificial Sequence
  Description of Artificial Sequence: Synthetic oligonucleotide
  Sense strand starting at position 3695 of SEQ ID NO: 1886317
gcucauugaccagauaauu

SEQ ID NO: 2401381 - RNA, 19 nt, Artificial Sequence
  Description of Artificial Sequence: Synthetic oligonucleotide
  Antisense strand to SEQ ID NO: 2401380
aauuaucuggucaaugagc

SEQ ID NO: 2401382 - RNA, 19 nt, Artificial Sequence
  Description of Artificial Sequence: Synthetic oligonucleotide
  Sense strand starting at position 3726 of SEQ ID NO: 1886317
augugugaauggcucaaga

SEQ ID NO: 2401383 - RNA, 19 nt, Artificial Sequence
  Description of Artificial Sequence: Synthetic oligonucleotide
  Antisense strand to SEQ ID NO: 2401382
ucuugagccauucacacau

SEQ ID NO: 2401384 - RNA, 19 nt, Artificial Sequence
  Description of Artificial Sequence: Synthetic oligonucleotide
  Sense strand starting at position 3728 of SEQ ID NO: 1886317
gugugaauggcucaagagu

SEQ ID NO: 2401385 - RNA, 19 nt, Artificial Sequence
  Description of Artificial Sequence: Synthetic oligonucleotide
  Antisense strand to SEQ ID NO: 2401384
acucuugagccauucacac

SEQ ID NO: 2401386 - RNA, 19 nt, Artificial Sequence
  Description of Artificial Sequence: Synthetic oligonucleotide
  Sense strand starting at position 3736 of SEQ ID NO: 1886317
ggcucaagaguaggugaaa

SEQ ID NO: 2401387 - RNA, 19 nt, Artificial Sequence
  Description of Artificial Sequence: Synthetic oligonucleotide
  Antisense strand to SEQ ID NO: 2401386
uuucaccuacucuugagcc

SEQ ID NO: 2401388 - RNA, 19 nt, Artificial Sequence
  Description of Artificial Sequence: Synthetic oligonucleotide
  Sense strand starting at position 3737 of SEQ ID NO: 1886317
gcucaagaguaggugaaau

SEQ ID NO: 2401389 - RNA, 19 nt, Artificial Sequence
  Description of Artificial Sequence: Synthetic oligonucleotide
  Antisense strand to SEQ ID NO: 2401388
auuucaccuacucuugagc

SEQ ID NO: 2401390 - RNA, 19 nt, Artificial Sequence
  Description of Artificial Sequence: Synthetic oligonucleotide
  Sense strand starting at position 3836 of SEQ ID NO: 1886317
gagaguugcuaugucaaac

SEQ ID NO: 2401391 - RNA, 19 nt, Artificial Sequence
  Description of Artificial Sequence: Synthetic oligonucleotide
  Antisense strand to SEQ ID NO: 2401390
guuugacauagcaacucuc

SEQ ID NO: 2401392 - RNA, 19 nt, Artificial Sequence
  Description of Artificial Sequence: Synthetic oligonucleotide
  Sense strand starting at position 3925 of SEQ ID NO: 1886317
auacccuagucccuguaaa

SEQ ID NO: 2401393 - RNA, 19 nt, Artificial Sequence
  Description of Artificial Sequence: Synthetic oligonucleotide
  Antisense strand to SEQ ID NO: 2401392
uuuacagggacuaggguau

SEQ ID NO: 2401394 - RNA, 19 nt, Artificial Sequence
  Description of Artificial Sequence: Synthetic oligonucleotide
  Sense strand starting at position 139 of SEQ ID NO: 1886318
ggaccuuaagccugagaua

SEQ ID NO: 2401395 - RNA, 19 nt, Artificial Sequence
  Description of Artificial Sequence: Synthetic oligonucleotide
  Antisense strand to SEQ ID NO: 2401394
uaucucaggcuuaaggucc

SEQ ID NO: 2401396 - RNA, 19 nt, Artificial Sequence
  Description of Artificial Sequence: Synthetic oligonucleotide
  Sense strand starting at position 249 of SEQ ID NO: 1886318
ccagucucaugacugacaa

SEQ ID NO: 2401397 - RNA, 19 nt, Artificial Sequence
  Description of Artificial Sequence: Synthetic oligonucleotide
  Antisense strand to SEQ ID NO: 2401396
uugucagucaugagacugg

SEQ ID NO: 2401398 - RNA, 19 nt, Artificial Sequence
  Description of Artificial Sequence: Synthetic oligonucleotide
  Sense strand starting at position 285 of SEQ ID NO: 1886318
uugucauuggagugucaug

SEQ ID NO: 2401399 - RNA, 19 nt, Artificial Sequence
  Description of Artificial Sequence: Synthetic oligonucleotide
  Antisense strand to SEQ ID NO: 2401398
caugacacuccaaugacaa

SEQ ID NO: 2401400 - RNA, 19 nt, Artificial Sequence
  Description of Artificial Sequence: Synthetic oligonucleotide
  Sense strand starting at position 515 of SEQ ID NO: 1886318
gugcaaauguaauuugcca

SEQ ID NO: 2401401 - RNA, 19 nt, Artificial Sequence
  Description of Artificial Sequence: Synthetic oligonucleotide
  Antisense strand to SEQ ID NO: 2401400
uggcaaauuacauuugcac

SEQ ID NO: 2401402 - RNA, 19 nt, Artificial Sequence
  Description of Artificial Sequence: Synthetic oligonucleotide
  Sense strand starting at position 537 of SEQ ID NO: 1886318
augcaaauaguguacauau

SEQ ID NO: 2401403 - RNA, 19 nt, Artificial Sequence
  Description of Artificial Sequence: Synthetic oligonucleotide
  Antisense strand to SEQ ID NO: 2401402
auauguacacuauuugcau

SEQ ID NO: 2401404 - RNA, 19 nt, Artificial Sequence
  Description of Artificial Sequence: Synthetic oligonucleotide
  Sense strand starting at position 563 of SEQ ID NO: 1886318
gcuuacuaugcacaaguau

SEQ ID NO: 2401405 - RNA, 19 nt, Artificial Sequence
  Description of Artificial Sequence: Synthetic oligonucleotide
  Antisense strand to SEQ ID NO: 2401404
auacuugugcauaguaagc

SEQ ID NO: 2401406 - RNA, 19 nt, Artificial Sequence
  Description of Artificial Sequence: Synthetic oligonucleotide
  Sense strand starting at position 613 of SEQ ID NO: 1886318
guauccuaauguuauuuga

SEQ ID NO: 2401407 - RNA, 19 nt, Artificial Sequence
  Description of Artificial Sequence: Synthetic oligonucleotide
  Antisense strand to SEQ ID NO: 2401406
ucaaauaacauuaggauac

SEQ ID NO: 2401408 - RNA, 19 nt, Artificial Sequence
  Description of Artificial Sequence: Synthetic oligonucleotide
  Sense strand starting at position 715 of SEQ ID NO: 1886318
ggauuaacagacugcuuga

SEQ ID NO: 2401409 - RNA, 19 nt, Artificial Sequence
  Description of Artificial Sequence: Synthetic oligonucleotide
  Antisense strand to SEQ ID NO: 2401408
ucaagcagucuguuaaucc

SEQ ID NO: 2401410 - RNA, 19 nt, Artificial Sequence
  Description of Artificial Sequence: Synthetic oligonucleotide
  Sense strand starting at position 821 of SEQ ID NO: 1886318
ugaaguguauuguucucau

SEQ ID NO: 2401411 - RNA, 19 nt, Artificial Sequence
  Description of Artificial Sequence: Synthetic oligonucleotide
  Antisense strand to SEQ ID NO: 2401410
augagaacaauacacuuca

SEQ ID NO: 2401412 - RNA, 19 nt, Artificial Sequence
  Description of Artificial Sequence: Synthetic oligonucleotide
  Sense strand starting at position 830 of SEQ ID NO: 1886318
uuguucucauugccagaca

SEQ ID NO: 2401413 - RNA, 19 nt, Artificial Sequence
  Description of Artificial Sequence: Synthetic oligonucleotide
  Antisense strand to SEQ ID NO: 2401412
ugucuggcaaugagaacaa

SEQ ID NO: 2401414 - RNA, 19 nt, Artificial Sequence
  Description of Artificial Sequence: Synthetic oligonucleotide
  Sense strand starting at position 895 of SEQ ID NO: 1886318
guaggaauuccaugcaauu

SEQ ID NO: 2401415 - RNA, 19 nt, Artificial Sequence
  Description of Artificial Sequence: Synthetic oligonucleotide
  Antisense strand to SEQ ID NO: 2401414
aauugcauggaauuccuac

SEQ ID NO: 2401416 - RNA, 19 nt, Artificial Sequence
  Description of Artificial Sequence: Synthetic oligonucleotide
  Sense strand starting at position 948 of SEQ ID NO: 1886318
gaaguaggaagucgacaaa

SEQ ID NO: 2401417 - RNA, 19 nt, Artificial Sequence
  Description of Artificial Sequence: Synthetic oligonucleotide
  Antisense strand to SEQ ID NO: 2401416
uuugucgacuuccuacuuc

SEQ ID NO: 2401418 - RNA, 19 nt, Artificial Sequence
  Description of Artificial Sequence: Synthetic oligonucleotide
  Sense strand starting at position 1019 of SEQ ID NO: 1886318
auuacuaaugacgaguuau

SEQ ID NO: 2401419 - RNA, 19 nt, Artificial Sequence
  Description of Artificial Sequence: Synthetic oligonucleotide
  Antisense strand to SEQ ID NO: 2401418
auaacucgucauuaguaau

SEQ ID NO: 2401420 - RNA, 19 nt, Artificial Sequence
  Description of Artificial Sequence: Synthetic oligonucleotide
  Sense strand starting at position 1064 of SEQ ID NO: 1886318
gcccaugugguaugagaau

SEQ ID NO: 2401421 - RNA, 19 nt, Artificial Sequence
  Description of Artificial Sequence: Synthetic oligonucleotide
  Antisense strand to SEQ ID NO: 2401420
auucucauaccacaugggc

SEQ ID NO: 2401422 - RNA, 19 nt, Artificial Sequence
  Description of Artificial Sequence: Synthetic oligonucleotide
  Sense strand starting at position 1090 of SEQ ID NO: 1886318
augcucacucccuggaaau

SEQ ID NO: 2401423 - RNA, 19 nt, Artificial Sequence
  Description of Artificial Sequence: Synthetic oligonucleotide
  Antisense strand to SEQ ID NO: 2401422
auuuccagggagugagcau

SEQ ID NO: 2401424 - RNA, 19 nt, Artificial Sequence
  Description of Artificial Sequence: Synthetic oligonucleotide
  Sense strand starting at position 1091 of SEQ ID NO: 1886318
ugcucacucccuggaaaug

SEQ ID NO: 2401425 - RNA, 19 nt, Artificial Sequence
  Description of Artificial Sequence: Synthetic oligonucleotide
  Antisense strand to SEQ ID NO: 2401424
cauuuccagggagugagca

SEQ ID NO: 2401426 - RNA, 19 nt, Artificial Sequence
  Description of Artificial Sequence: Synthetic oligonucleotide
  Sense strand starting at position 1100 of SEQ ID NO: 1886318
ccuggaaauggguaguacu

SEQ ID NO: 2401427 - RNA, 19 nt, Artificial Sequence
  Description of Artificial Sequence: Synthetic oligonucleotide
  Antisense strand to SEQ ID NO: 2401426
aguacuacccauuuccagg

SEQ ID NO: 2401428 - RNA, 19 nt, Artificial Sequence
  Description of Artificial Sequence: Synthetic oligonucleotide
  Sense strand starting at position 1330 of SEQ ID NO: 1886318
aaagcuucucuuugaguga

SEQ ID NO: 2401429 - RNA, 19 nt, Artificial Sequence
  Description of Artificial Sequence: Synthetic oligonucleotide
  Antisense strand to SEQ ID NO: 2401428
ucacucaaagagaagcuuu

SEQ ID NO: 2401430 - RNA, 19 nt, Artificial Sequence
  Description of Artificial Sequence: Synthetic oligonucleotide
  Sense strand starting at position 1652 of SEQ ID NO: 1886318
ucuacucuuguguaauucu

SEQ ID NO: 2401431 - RNA, 19 nt, Artificial Sequence
  Description of Artificial Sequence: Synthetic oligonucleotide
  Antisense strand to SEQ ID NO: 2401430
agaauuacacaagaguaga

SEQ ID NO: 2401432 - RNA, 19 nt, Artificial Sequence
  Description of Artificial Sequence: Synthetic oligonucleotide
  Sense strand starting at position 1662 of SEQ ID NO: 1886318
uguaauucuguuuacuaug

SEQ ID NO: 2401433 - RNA, 19 nt, Artificial Sequence
  Description of Artificial Sequence: Synthetic oligonucleotide
  Antisense strand to SEQ ID NO: 2401432
cauaguaaacagaauuaca

SEQ ID NO: 2401434 - RNA, 19 nt, Artificial Sequence
  Description of Artificial Sequence: Synthetic oligonucleotide
  Sense strand starting at position 1667 of SEQ ID NO: 1886318
uucuguuuacuaugagagu

SEQ ID NO: 2401435 - RNA, 19 nt, Artificial Sequence
  Description of Artificial Sequence: Synthetic oligonucleotide
  Antisense strand to SEQ ID NO: 2401434
acucucauaguaaacagaa

SEQ ID NO: 2401436 - RNA, 19 nt, Artificial Sequence
  Description of Artificial Sequence: Synthetic oligonucleotide
  Sense strand starting at position 1849 of SEQ ID NO: 1886318
guaccaguugcugaccaaa

SEQ ID NO: 2401437 - RNA, 19 nt, Artificial Sequence
  Description of Artificial Sequence: Synthetic oligonucleotide
  Antisense strand to SEQ ID NO: 2401436
uuuggucagcaacugguac

SEQ ID NO: 2401438 - RNA, 19 nt, Artificial Sequence
  Description of Artificial Sequence: Synthetic oligonucleotide
  Sense strand starting at position 2027 of SEQ ID NO: 1886318
accugagauauguggcaga

SEQ ID NO: 2401439 - RNA, 19 nt, Artificial Sequence
  Description of Artificial Sequence: Synthetic oligonucleotide
  Antisense strand to SEQ ID NO: 2401438
ucugccacauaucucaggu

SEQ ID NO: 2401440 - RNA, 19 nt, Artificial Sequence
  Description of Artificial Sequence: Synthetic oligonucleotide
  Sense strand starting at position 2058 of SEQ ID NO: 1886318
agcuaucugucaccaauga

SEQ ID NO: 2401441 - RNA, 19 nt, Artificial Sequence
  Description of Artificial Sequence: Synthetic oligonucleotide
  Antisense strand to SEQ ID NO: 2401440
ucauuggugacagauagcu

SEQ ID NO: 2401442 - RNA, 19 nt, Artificial Sequence
  Description of Artificial Sequence: Synthetic oligonucleotide
  Sense strand starting at position 2161 of SEQ ID NO: 1886318
guguccugauucccuaaga

SEQ ID NO: 2401443 - RNA, 19 nt, Artificial Sequence
  Description of Artificial Sequence: Synthetic oligonucleotide
  Antisense strand to SEQ ID NO: 2401442
ucuuagggaaucaggacac

SEQ ID NO: 2401444 - RNA, 19 nt, Artificial Sequence
  Description of Artificial Sequence: Synthetic oligonucleotide
  Sense strand starting at position 2337 of SEQ ID NO: 1886318
ccaccucauucugugggaa

SEQ ID NO: 2401445 - RNA, 19 nt, Artificial Sequence
  Description of Artificial Sequence: Synthetic oligonucleotide
  Antisense strand to SEQ ID NO: 2401444
uucccacagaaugaggugg

SEQ ID NO: 2401446 - RNA, 19 nt, Artificial Sequence
  Description of Artificial Sequence: Synthetic oligonucleotide
  Sense strand starting at position 2464 of SEQ ID NO: 1886318
cuuauaggauguuucugau

SEQ ID NO: 2401447 - RNA, 19 nt, Artificial Sequence
  Description of Artificial Sequence: Synthetic oligonucleotide
  Antisense strand to SEQ ID NO: 2401446
aucagaaacauccuauaag

SEQ ID NO: 2401448 - RNA, 19 nt, Artificial Sequence
  Description of Artificial Sequence: Synthetic oligonucleotide
  Sense strand starting at position 2479 of SEQ ID NO: 1886318
ugauguuaaaguugagaaa

SEQ ID NO: 2401449 - RNA, 19 nt, Artificial Sequence
  Description of Artificial Sequence: Synthetic oligonucleotide
  Antisense strand to SEQ ID NO: 2401448
uuucucaacuuuaacauca

SEQ ID NO: 2401450 - RNA, 19 nt, Artificial Sequence
  Description of Artificial Sequence: Synthetic oligonucleotide
  Sense strand starting at position 2545 of SEQ ID NO: 1886318
gagaguauugaaugccuaa

SEQ ID NO: 2401451 - RNA, 19 nt, Artificial Sequence
  Description of Artificial Sequence: Synthetic oligonucleotide
  Antisense strand to SEQ ID NO: 2401450
uuaggcauucaauacucuc

SEQ ID NO: 2401452 - RNA, 19 nt, Artificial Sequence
  Description of Artificial Sequence: Synthetic oligonucleotide
  Sense strand starting at position 2575 of SEQ ID NO: 1886318
uuaagugacuccuugcaca

SEQ ID NO: 2401453 - RNA, 19 nt, Artificial Sequence
  Description of Artificial Sequence: Synthetic oligonucleotide
  Antisense strand to SEQ ID NO: 2401452
ugugcaaggagucacuuaa

SEQ ID NO: 2401454 - RNA, 19 nt, Artificial Sequence
  Description of Artificial Sequence: Synthetic oligonucleotide
  Sense strand starting at position 2660 of SEQ ID NO: 1886318
auucgauguuaccucagga

SEQ ID NO: 2401455 - RNA, 19 nt, Artificial Sequence
  Description of Artificial Sequence: Synthetic oligonucleotide
  Antisense strand to SEQ ID NO: 2401454
uccugagguaacaucgaau

SEQ ID NO: 2401456 - RNA, 19 nt, Artificial Sequence
  Description of Artificial Sequence: Synthetic oligonucleotide
  Sense strand starting at position 2749 of SEQ ID NO: 1886318
gcaguuaaaguccauggaa

SEQ ID NO: 2401457 - RNA, 19 nt, Artificial Sequence
  Description of Artificial Sequence: Synthetic oligonucleotide
  Antisense strand to SEQ ID NO: 2401456
uuccauggacuuuaacugc

SEQ ID NO: 2401458 - RNA, 19 nt, Artificial Sequence
  Description of Artificial Sequence: Synthetic oligonucleotide
  Sense strand starting at position 2751 of SEQ ID NO: 1886318
aguuaaaguccauggaauu

SEQ ID NO: 2401459 - RNA, 19 nt, Artificial Sequence
  Description of Artificial Sequence: Synthetic oligonucleotide
  Antisense strand to SEQ ID NO: 2401458
aauuccauggacuuuaacu

SEQ ID NO: 2401460 - RNA, 19 nt, Artificial Sequence
  Description of Artificial Sequence: Synthetic oligonucleotide
  Sense strand starting at position 2752 of SEQ ID NO: 1886318
guuaaaguccauggaauuc

SEQ ID NO: 2401461 - RNA, 19 nt, Artificial Sequence
  Description of Artificial Sequence: Synthetic oligonucleotide
  Antisense strand to SEQ ID NO: 2401460
gaauuccauggacuuuaac

SEQ ID NO: 2401462 - RNA, 19 nt, Artificial Sequence
  Description of Artificial Sequence: Synthetic oligonucleotide
  Sense strand starting at position 2920 of SEQ ID NO: 1886318
cuuugaucagacugauaca

SEQ ID NO: 2401463 - RNA, 19 nt, Artificial Sequence
  Description of Artificial Sequence: Synthetic oligonucleotide
  Antisense strand to SEQ ID NO: 2401462
uguaucagucugaucaaag

SEQ ID NO: 2401464 - RNA, 19 nt, Artificial Sequence
  Description of Artificial Sequence: Synthetic oligonucleotide
  Sense strand starting at position 2923 of SEQ ID NO: 1886318
ugaucagacugauacagau

SEQ ID NO: 2401465 - RNA, 19 nt, Artificial Sequence
  Description of Artificial Sequence: Synthetic oligonucleotide
  Antisense strand to SEQ ID NO: 2401464
aucuguaucagucugauca

SEQ ID NO: 2401466 - RNA, 19 nt, Artificial Sequence
  Description of Artificial Sequence: Synthetic oligonucleotide
  Sense strand starting at position 3107 of SEQ ID NO: 1886318
cuccuauaugcaggaaauc

SEQ ID NO: 2401467 - RNA, 19 nt, Artificial Sequence
  Description of Artificial Sequence: Synthetic oligonucleotide
  Antisense strand to SEQ ID NO: 2401466
gauuuccugcauauaggag

SEQ ID NO: 2401468 - RNA, 19 nt, Artificial Sequence
  Description of Artificial Sequence: Synthetic oligonucleotide
  Sense strand starting at position 3119 of SEQ ID NO: 1886318
ggaaaucauuucuagauua

SEQ ID NO: 2401469 - RNA, 19 nt, Artificial Sequence
  Description of Artificial Sequence: Synthetic oligonucleotide
  Antisense strand to SEQ ID NO: 2401468
uaaucuagaaaugauuucc

SEQ ID NO: 2401470 - RNA, 19 nt, Artificial Sequence
  Description of Artificial Sequence: Synthetic oligonucleotide
  Sense strand starting at position 3644 of SEQ ID NO: 1886318
ggagaaggauagcaaacua

SEQ ID NO: 2401471 - RNA, 19 nt, Artificial Sequence
  Description of Artificial Sequence: Synthetic oligonucleotide
  Antisense strand to SEQ ID NO: 2401470
uaguuugcuauccuucucc

SEQ ID NO: 2401472 - RNA, 19 nt, Artificial Sequence
  Description of Artificial Sequence: Synthetic oligonucleotide
  Sense strand starting at position 3736 of SEQ ID NO: 1886318
uggguuggcaacugauuaa

SEQ ID NO: 2401473 - RNA, 19 nt, Artificial Sequence
  Description of Artificial Sequence: Synthetic oligonucleotide
  Antisense strand to SEQ ID NO: 2401472
uuaaucaguugccaaccca

SEQ ID NO: 2401474 - RNA, 19 nt, Artificial Sequence
  Description of Artificial Sequence: Synthetic oligonucleotide
  Sense strand starting at position 48 of SEQ ID NO: 1886319
uuuauagaugacuguccaa

SEQ ID NO: 2401475 - RNA, 19 nt, Artificial Sequence
  Description of Artificial Sequence: Synthetic oligonucleotide
  Antisense strand to SEQ ID NO: 2401474
uuggacagucaucuauaaa

SEQ ID NO: 2401476 - RNA, 19 nt, Artificial Sequence
  Description of Artificial Sequence: Synthetic oligonucleotide
  Sense strand starting at position 273 of SEQ ID NO: 1886319
accuuaagccugggauaug

SEQ ID NO: 2401477 - RNA, 19 nt, Artificial Sequence
  Description of Artificial Sequence: Synthetic oligonucleotide
  Antisense strand to SEQ ID NO: 2401476
cauaucccaggcuuaaggu

SEQ ID NO: 2401478 - RNA, 19 nt, Artificial Sequence
  Description of Artificial Sequence: Synthetic oligonucleotide
  Sense strand starting at position 473 of SEQ ID NO: 1886319
aaaugcuuaccaugggaga

SEQ ID NO: 2401479 - RNA, 19 nt, Artificial Sequence
  Description of Artificial Sequence: Synthetic oligonucleotide
  Antisense strand to SEQ ID NO: 2401478
ucucccaugguaagcauuu

SEQ ID NO: 2401480 - RNA, 19 nt, Artificial Sequence
  Description of Artificial Sequence: Synthetic oligonucleotide
  Sense strand starting at position 474 of SEQ ID NO: 1886319
aaugcuuaccaugggagaa

SEQ ID NO: 2401481 - RNA, 19 nt, Artificial Sequence
  Description of Artificial Sequence: Synthetic oligonucleotide
  Antisense strand to SEQ ID NO: 2401480
uucucccaugguaagcauu

SEQ ID NO: 2401482 - RNA, 19 nt, Artificial Sequence
  Description of Artificial Sequence: Synthetic oligonucleotide
  Sense strand starting at position 475 of SEQ ID NO: 1886319
augcuuaccaugggagaau

SEQ ID NO: 2401483 - RNA, 19 nt, Artificial Sequence
  Description of Artificial Sequence: Synthetic oligonucleotide
  Antisense strand to SEQ ID NO: 2401482
auucucccaugguaagcau

SEQ ID NO: 2401484 - RNA, 19 nt, Artificial Sequence
  Description of Artificial Sequence: Synthetic oligonucleotide
  Sense strand starting at position 487 of SEQ ID NO: 1886319
ggagaauuccuacggauuc

SEQ ID NO: 2401485 - RNA, 19 nt, Artificial Sequence
  Description of Artificial Sequence: Synthetic oligonucleotide
  Antisense strand to SEQ ID NO: 2401484
gaauccguaggaauucucc

SEQ ID NO: 2401486 - RNA, 19 nt, Artificial Sequence
  Description of Artificial Sequence: Synthetic oligonucleotide
  Sense strand starting at position 494 of SEQ ID NO: 1886319
uccuacggauucuugaaga

SEQ ID NO: 2401487 - RNA, 19 nt, Artificial Sequence
  Description of Artificial Sequence: Synthetic oligonucleotide
  Antisense strand to SEQ ID NO: 2401486
ucuucaagaauccguagga

SEQ ID NO: 2401488 - RNA, 19 nt, Artificial Sequence
  Description of Artificial Sequence: Synthetic oligonucleotide
  Sense strand starting at position 787 of SEQ ID NO: 1886319
uaaugaaagccuuggauga

SEQ ID NO: 2401489 - RNA, 19 nt, Artificial Sequence
  Description of Artificial Sequence: Synthetic oligonucleotide
  Antisense strand to SEQ ID NO: 2401488
ucauccaaggcuuucauua

SEQ ID NO: 2401490 - RNA, 19 nt, Artificial Sequence
  Description of Artificial Sequence: Synthetic oligonucleotide
  Sense strand starting at position 788 of SEQ ID NO: 1886319
aaugaaagccuuggaugau

SEQ ID NO: 2401491 - RNA, 19 nt, Artificial Sequence
  Description of Artificial Sequence: Synthetic oligonucleotide
  Antisense strand to SEQ ID NO: 2401490
aucauccaaggcuuucauu

SEQ ID NO: 2401492 - RNA, 19 nt, Artificial Sequence
  Description of Artificial Sequence: Synthetic oligonucleotide
  Sense strand starting at position 924 of SEQ ID NO: 1886319
ggauguuaccuuuggagug

SEQ ID NO: 2401493 - RNA, 19 nt, Artificial Sequence
  Description of Artificial Sequence: Synthetic oligonucleotide
  Antisense strand to SEQ ID NO: 2401492
cacuccaaagguaacaucc

SEQ ID NO: 2401494 - RNA, 19 nt, Artificial Sequence
  Description of Artificial Sequence: Synthetic oligonucleotide
  Sense strand starting at position 1003 of SEQ ID NO: 1886319
uugggauggcagugagaau

SEQ ID NO: 2401495 - RNA, 19 nt, Artificial Sequence
  Description of Artificial Sequence: Synthetic oligonucleotide
  Antisense strand to SEQ ID NO: 2401494
auucucacugccaucccaa

SEQ ID NO: 2401496 - RNA, 19 nt, Artificial Sequence
  Description of Artificial Sequence: Synthetic oligonucleotide
  Sense strand starting at position 1014 of SEQ ID NO: 1886319
gugagaauuccaugcaauu

SEQ ID NO: 2401497 - RNA, 19 nt, Artificial Sequence
  Description of Artificial Sequence: Synthetic oligonucleotide
  Antisense strand to SEQ ID NO: 2401496
aauugcauggaauucucac

SEQ ID NO: 2401498 - RNA, 19 nt, Artificial Sequence
  Description of Artificial Sequence: Synthetic oligonucleotide
  Sense strand starting at position 1111 of SEQ ID NO: 1886319
cugacaacaguuuguaauu

SEQ ID NO: 2401499 - RNA, 19 nt, Artificial Sequence
  Description of Artificial Sequence: Synthetic oligonucleotide
  Antisense strand to SEQ ID NO: 2401498
aauuacaaacuguugucag

SEQ ID NO: 2401500 - RNA, 19 nt, Artificial Sequence
  Description of Artificial Sequence: Synthetic oligonucleotide
  Sense strand starting at position 1112 of SEQ ID NO: 1886319
ugacaacaguuuguaauua

SEQ ID NO: 2401501 - RNA, 19 nt, Artificial Sequence
  Description of Artificial Sequence: Synthetic oligonucleotide
  Antisense strand to SEQ ID NO: 2401500
uaauuacaaacuguuguca

SEQ ID NO: 2401502 - RNA, 19 nt, Artificial Sequence
  Description of Artificial Sequence: Synthetic oligonucleotide
  Sense strand starting at position 1454 of SEQ ID NO: 1886319
cuguucuaauccuugagac

SEQ ID NO: 2401503 - RNA, 19 nt, Artificial Sequence
  Description of Artificial Sequence: Synthetic oligonucleotide
  Antisense strand to SEQ ID NO: 2401502
gucucaaggauuagaacag

SEQ ID NO: 2401504 - RNA, 19 nt, Artificial Sequence
  Description of Artificial Sequence: Synthetic oligonucleotide
  Sense strand starting at position 1456 of SEQ ID NO: 1886319
guucuaauccuugagacug

SEQ ID NO: 2401505 - RNA, 19 nt, Artificial Sequence
  Description of Artificial Sequence: Synthetic oligonucleotide
  Antisense strand to SEQ ID NO: 2401504
cagucucaaggauuagaac

SEQ ID NO: 2401506 - RNA, 19 nt, Artificial Sequence
  Description of Artificial Sequence: Synthetic oligonucleotide
  Sense strand starting at position 1461 of SEQ ID NO: 1886319
aauccuugagacugaguua

SEQ ID NO: 2401507 - RNA, 19 nt, Artificial Sequence
  Description of Artificial Sequence: Synthetic oligonucleotide
  Antisense strand to SEQ ID NO: 2401506
uaacucagucucaaggauu

SEQ ID NO: 2401508 - RNA, 19 nt, Artificial Sequence
  Description of Artificial Sequence: Synthetic oligonucleotide
  Sense strand starting at position 1464 of SEQ ID NO: 1886319
ccuugagacugaguuagga

SEQ ID NO: 2401509 - RNA, 19 nt, Artificial Sequence
  Description of Artificial Sequence: Synthetic oligonucleotide
  Antisense strand to SEQ ID NO: 2401508
uccuaacucagucucaagg

SEQ ID NO: 2401510 - RNA, 19 nt, Artificial Sequence
  Description of Artificial Sequence: Synthetic oligonucleotide
  Sense strand starting at position 1483 of SEQ ID NO: 1886319
agcaaauuccagcauguaa

SEQ ID NO: 2401511 - RNA, 19 nt, Artificial Sequence
  Description of Artificial Sequence: Synthetic oligonucleotide
  Antisense strand to SEQ ID NO: 2401510
uuacaugcuggaauuugcu

SEQ ID NO: 2401512 - RNA, 19 nt, Artificial Sequence
  Description of Artificial Sequence: Synthetic oligonucleotide
  Sense strand starting at position 1570 of SEQ ID NO: 1886319
gcaagcaaagacugauaau

SEQ ID NO: 2401513 - RNA, 19 nt, Artificial Sequence
  Description of Artificial Sequence: Synthetic oligonucleotide
  Antisense strand to SEQ ID NO: 2401512
auuaucagucuuugcuugc

SEQ ID NO: 2401514 - RNA, 19 nt, Artificial Sequence
  Description of Artificial Sequence: Synthetic oligonucleotide
  Sense strand starting at position 1573 of SEQ ID NO: 1886319
agcaaagacugauaauuuc

SEQ ID NO: 2401515 - RNA, 19 nt, Artificial Sequence
  Description of Artificial Sequence: Synthetic oligonucleotide
  Antisense strand to SEQ ID NO: 2401514
gaaauuaucagucuuugcu

SEQ ID NO: 2401516 - RNA, 19 nt, Artificial Sequence
  Description of Artificial Sequence: Synthetic oligonucleotide
  Sense strand starting at position 1623 of SEQ ID NO: 1886319
ugcugauacucacuaagaa

SEQ ID NO: 2401517 - RNA, 19 nt, Artificial Sequence
  Description of Artificial Sequence: Synthetic oligonucleotide
  Antisense strand to SEQ ID NO: 2401516
uucuuagugaguaucagca

SEQ ID NO: 2401518 - RNA, 19 nt, Artificial Sequence
  Description of Artificial Sequence: Synthetic oligonucleotide
  Sense strand starting at position 1640 of SEQ ID NO: 1886319
aauguuguggcgucuacga

SEQ ID NO: 2401519 - RNA, 19 nt, Artificial Sequence
  Description of Artificial Sequence: Synthetic oligonucleotide
  Antisense strand to SEQ ID NO: 2401518
ucguagacgccacaacauu

SEQ ID NO: 2401520 - RNA, 19 nt, Artificial Sequence
  Description of Artificial Sequence: Synthetic oligonucleotide
  Sense strand starting at position 1784 of SEQ ID NO: 1886319
cauguaauucccgaagaua

SEQ ID NO: 2401521 - RNA, 19 nt, Artificial Sequence
  Description of Artificial Sequence: Synthetic oligonucleotide
  Antisense strand to SEQ ID NO: 2401520
uaucuucgggaauuacaug

SEQ ID NO: 2401522 - RNA, 19 nt, Artificial Sequence
  Description of Artificial Sequence: Synthetic oligonucleotide
  Sense strand starting at position 1787 of SEQ ID NO: 1886319
guaauucccgaagauauau

SEQ ID NO: 2401523 - RNA, 19 nt, Artificial Sequence
  Description of Artificial Sequence: Synthetic oligonucleotide
  Antisense strand to SEQ ID NO: 2401522
auauaucuucgggaauuac

SEQ ID NO: 2401524 - RNA, 19 nt, Artificial Sequence
  Description of Artificial Sequence: Synthetic oligonucleotide
  Sense strand starting at position 1857 of SEQ ID NO: 1886319
guaccaguuccugaccaaa

SEQ ID NO: 2401525 - RNA, 19 nt, Artificial Sequence
  Description of Artificial Sequence: Synthetic oligonucleotide
  Antisense strand to SEQ ID NO: 2401524
uuuggucaggaacugguac

SEQ ID NO: 2401526 - RNA, 19 nt, Artificial Sequence
  Description of Artificial Sequence: Synthetic oligonucleotide
  Sense strand starting at position 2018 of SEQ ID NO: 1886319
ggaccuuaagccugagaua

SEQ ID NO: 2401527 - RNA, 19 nt, Artificial Sequence
  Description of Artificial Sequence: Synthetic oligonucleotide
  Antisense strand to SEQ ID NO: 2401526
uaucucaggcuuaaggucc

SEQ ID NO: 2401528 - RNA, 19 nt, Artificial Sequence
  Description of Artificial Sequence: Synthetic oligonucleotide
  Sense strand starting at position 2128 of SEQ ID NO: 1886319
ccagucucaugacugacaa

SEQ ID NO: 2401529 - RNA, 19 nt, Artificial Sequence
  Description of Artificial Sequence: Synthetic oligonucleotide
  Antisense strand to SEQ ID NO: 2401528
uugucagucaugagacugg

SEQ ID NO: 2401530 - RNA, 19 nt, Artificial Sequence
  Description of Artificial Sequence: Synthetic oligonucleotide
  Sense strand starting at position 2394 of SEQ ID NO: 1886319
gugcaaauguaauuugcca

SEQ ID NO: 2401531 - RNA, 19 nt, Artificial Sequence
  Description of Artificial Sequence: Synthetic oligonucleotide
  Antisense strand to SEQ ID NO: 2401530
uggcaaauuacauuugcac

SEQ ID NO: 2401532 - RNA, 19 nt, Artificial Sequence
  Description of Artificial Sequence: Synthetic oligonucleotide
  Sense strand starting at position 2416 of SEQ ID NO: 1886319
augcaaauaguguacauau

SEQ ID NO: 2401533 - RNA, 19 nt, Artificial Sequence
  Description of Artificial Sequence: Synthetic oligonucleotide
  Antisense strand to SEQ ID NO: 2401532
auauguacacuauuugcau

SEQ ID NO: 2401534 - RNA, 19 nt, Artificial Sequence
  Description of Artificial Sequence: Synthetic oligonucleotide
  Sense strand starting at position 2594 of SEQ ID NO: 1886319
ggauuaacagacugcuuga

SEQ ID NO: 2401535 - RNA, 19 nt, Artificial Sequence
  Description of Artificial Sequence: Synthetic oligonucleotide
  Antisense strand to SEQ ID NO: 2401534
ucaagcagucuguuaaucc

SEQ ID NO: 2401536 - RNA, 19 nt, Artificial Sequence
  Description of Artificial Sequence: Synthetic oligonucleotide
  Sense strand starting at position 2774 of SEQ ID NO: 1886319
guaggaauuccaugcaauu

SEQ ID NO: 2401537 - RNA, 19 nt, Artificial Sequence
  Description of Artificial Sequence: Synthetic oligonucleotide
  Antisense strand to SEQ ID NO: 2401536
aauugcauggaauuccuac

SEQ ID NO: 2401538 - RNA, 19 nt, Artificial Sequence
  Description of Artificial Sequence: Synthetic oligonucleotide
  Sense strand starting at position 2827 of SEQ ID NO: 1886319
gaaguaggaagucgacaaa

SEQ ID NO: 2401539 - RNA, 19 nt, Artificial Sequence
  Description of Artificial Sequence: Synthetic oligonucleotide
  Antisense strand to SEQ ID NO: 2401538
uuugucgacuuccuacuuc

SEQ ID NO: 2401540 - RNA, 19 nt, Artificial Sequence
  Description of Artificial Sequence: Synthetic oligonucleotide
  Sense strand starting at position 2898 of SEQ ID NO: 1886319
auuacuaaugacgaguuau

SEQ ID NO: 2401541 - RNA, 19 nt, Artificial Sequence
  Description of Artificial Sequence: Synthetic oligonucleotide
  Antisense strand to SEQ ID NO: 2401540
auaacucgucauuaguaau

SEQ ID NO: 2401542 - RNA, 19 nt, Artificial Sequence
  Description of Artificial Sequence: Synthetic oligonucleotide
  Sense strand starting at position 2969 of SEQ ID NO: 1886319
augcucacucccuggaaau

SEQ ID NO: 2401543 - RNA, 19 nt, Artificial Sequence
  Description of Artificial Sequence: Synthetic oligonucleotide
  Antisense strand to SEQ ID NO: 2401542
auuuccagggagugagcau

SEQ ID NO: 2401544 - RNA, 19 nt, Artificial Sequence
  Description of Artificial Sequence: Synthetic oligonucleotide
  Sense strand starting at position 2970 of SEQ ID NO: 1886319
ugcucacucccuggaaaug

SEQ ID NO: 2401545 - RNA, 19 nt, Artificial Sequence
  Description of Artificial Sequence: Synthetic oligonucleotide
  Antisense strand to SEQ ID NO: 2401544
cauuuccagggagugagca

SEQ ID NO: 2401546 - RNA, 19 nt, Artificial Sequence
  Description of Artificial Sequence: Synthetic oligonucleotide
  Sense strand starting at position 2979 of SEQ ID NO: 1886319
ccuggaaauggguaguacu

SEQ ID NO: 2401547 - RNA, 19 nt, Artificial Sequence
  Description of Artificial Sequence: Synthetic oligonucleotide
  Antisense strand to SEQ ID NO: 2401546
aguacuacccauuuccagg

SEQ ID NO: 2401548 - RNA, 19 nt, Artificial Sequence
  Description of Artificial Sequence: Synthetic oligonucleotide
  Sense strand starting at position 3541 of SEQ ID NO: 1886319
uguaauucuguuuacuaug

SEQ ID NO: 2401549 - RNA, 19 nt, Artificial Sequence
  Description of Artificial Sequence: Synthetic oligonucleotide
  Antisense strand to SEQ ID NO: 2401548
cauaguaaacagaauuaca

SEQ ID NO: 2401550 - RNA, 19 nt, Artificial Sequence
  Description of Artificial Sequence: Synthetic oligonucleotide
  Sense strand starting at position 3728 of SEQ ID NO: 1886319
guaccaguugcugaccaaa

SEQ ID NO: 2401551 - RNA, 19 nt, Artificial Sequence
  Description of Artificial Sequence: Synthetic oligonucleotide
  Antisense strand to SEQ ID NO: 2401550
uuuggucagcaacugguac

SEQ ID NO: 2401552 - RNA, 19 nt, Artificial Sequence
  Description of Artificial Sequence: Synthetic oligonucleotide
  Sense strand starting at position 3906 of SEQ ID NO: 1886319
accugagauauguggcaga

SEQ ID NO: 2401553 - RNA, 19 nt, Artificial Sequence
  Description of Artificial Sequence: Synthetic oligonucleotide
  Antisense strand to SEQ ID NO: 2401552
ucugccacauaucucaggu

SEQ ID NO: 2401554 - RNA, 19 nt, Artificial Sequence
  Description of Artificial Sequence: Synthetic oligonucleotide
  Sense strand starting at position 192 of SEQ ID NO: 1886320
aucugaugucgugaccaga

SEQ ID NO: 2401555 - RNA, 19 nt, Artificial Sequence
  Description of Artificial Sequence: Synthetic oligonucleotide
  Antisense strand to SEQ ID NO: 2401554
ucuggucacgacaucagau

SEQ ID NO: 2401556 - RNA, 19 nt, Artificial Sequence
  Description of Artificial Sequence: Synthetic oligonucleotide
  Sense strand starting at position 403 of SEQ ID NO: 1886320
gcaccauguccucaggaca

SEQ ID NO: 2401557 - RNA, 19 nt, Artificial Sequence
  Description of Artificial Sequence: Synthetic oligonucleotide
  Antisense strand to SEQ ID NO: 2401556
uguccugaggacauggugc

SEQ ID NO: 2401558 - RNA, 19 nt, Artificial Sequence
  Description of Artificial Sequence: Synthetic oligonucleotide
  Sense strand starting at position 447 of SEQ ID NO: 1886320
augggacaucccugccuaa

SEQ ID NO: 2401559 - RNA, 19 nt, Artificial Sequence
  Description of Artificial Sequence: Synthetic oligonucleotide
  Antisense strand to SEQ ID NO: 2401558
uuaggcagggaugucccau

SEQ ID NO: 2401560 - RNA, 19 nt, Artificial Sequence
  Description of Artificial Sequence: Synthetic oligonucleotide
  Sense strand starting at position 868 of SEQ ID NO: 1886320
gaaggcaccuaggauuaaa

SEQ ID NO: 2401561 - RNA, 19 nt, Artificial Sequence
  Description of Artificial Sequence: Synthetic oligonucleotide
  Antisense strand to SEQ ID NO: 2401560
uuuaauccuaggugccuuc

SEQ ID NO: 2401562 - RNA, 19 nt, Artificial Sequence
  Description of Artificial Sequence: Synthetic oligonucleotide
  Sense strand starting at position 980 of SEQ ID NO: 1886320
gcacauucccucugaaagu

SEQ ID NO: 2401563 - RNA, 19 nt, Artificial Sequence
  Description of Artificial Sequence: Synthetic oligonucleotide
  Antisense strand to SEQ ID NO: 2401562
acuuucagagggaaugugc

SEQ ID NO: 2401564 - RNA, 19 nt, Artificial Sequence
  Description of Artificial Sequence: Synthetic oligonucleotide
  Sense strand starting at position 1042 of SEQ ID NO: 1886320
agcaguuauuugcucacaa

SEQ ID NO: 2401565 - RNA, 19 nt, Artificial Sequence
  Description of Artificial Sequence: Synthetic oligonucleotide
  Antisense strand to SEQ ID NO: 2401564
uugugagcaaauaacugcu

SEQ ID NO: 2401566 - RNA, 19 nt, Artificial Sequence
  Description of Artificial Sequence: Synthetic oligonucleotide
  Sense strand starting at position 1043 of SEQ ID NO: 1886320
gcaguuauuugcucacaag

SEQ ID NO: 2401567 - RNA, 19 nt, Artificial Sequence
  Description of Artificial Sequence: Synthetic oligonucleotide
  Antisense strand to SEQ ID NO: 2401566
cuugugagcaaauaacugc

SEQ ID NO: 2401568 - RNA, 19 nt, Artificial Sequence
  Description of Artificial Sequence: Synthetic oligonucleotide
  Sense strand starting at position 1114 of SEQ ID NO: 1886320
ggaagaugugcacaacggu

SEQ ID NO: 2401569 - RNA, 19 nt, Artificial Sequence
  Description of Artificial Sequence: Synthetic oligonucleotide
  Antisense strand to SEQ ID NO: 2401568
accguugugcacaucuucc

SEQ ID NO: 2401570 - RNA, 19 nt, Artificial Sequence
  Description of Artificial Sequence: Synthetic oligonucleotide
  Sense strand starting at position 1139 of SEQ ID NO: 1886320
cacuauucugccgggaaga

SEQ ID NO: 2401571 - RNA, 19 nt, Artificial Sequence
  Description of Artificial Sequence: Synthetic oligonucleotide
  Antisense strand to SEQ ID NO: 2401570
ucuucccggcagaauagug

SEQ ID NO: 2401572 - RNA, 19 nt, Artificial Sequence
  Description of Artificial Sequence: Synthetic oligonucleotide
  Sense strand starting at position 1140 of SEQ ID NO: 1886320
acuauucugccgggaagac

SEQ ID NO: 2401573 - RNA, 19 nt, Artificial Sequence
  Description of Artificial Sequence: Synthetic oligonucleotide
  Antisense strand to SEQ ID NO: 2401572
gucuucccggcagaauagu

SEQ ID NO: 2401574 - RNA, 19 nt, Artificial Sequence
  Description of Artificial Sequence: Synthetic oligonucleotide
  Sense strand starting at position 1575 of SEQ ID NO: 1886320
gugcucuccuuggcauaaa

SEQ ID NO: 2401575 - RNA, 19 nt, Artificial Sequence
  Description of Artificial Sequence: Synthetic oligonucleotide
  Antisense strand to SEQ ID NO: 2401574
uuuaugccaaggagagcac

SEQ ID NO: 2401576 - RNA, 19 nt, Artificial Sequence
  Description of Artificial Sequence: Synthetic oligonucleotide
  Sense strand starting at position 1752 of SEQ ID NO: 1886320
ugacucuccuacuuguaua

SEQ ID NO: 2401577 - RNA, 19 nt, Artificial Sequence
  Description of Artificial Sequence: Synthetic oligonucleotide
  Antisense strand to SEQ ID NO: 2401576
uauacaaguaggagaguca

SEQ ID NO: 2401578 - RNA, 19 nt, Artificial Sequence
  Description of Artificial Sequence: Synthetic oligonucleotide
  Sense strand starting at position 1781 of SEQ ID NO: 1886320
agggaauauuucuauugug

SEQ ID NO: 2401579 - RNA, 19 nt, Artificial Sequence
  Description of Artificial Sequence: Synthetic oligonucleotide
  Antisense strand to SEQ ID NO: 2401578
cacaauagaaauauucccu

SEQ ID NO: 2401580 - RNA, 19 nt, Artificial Sequence
  Description of Artificial Sequence: Synthetic oligonucleotide
  Sense strand starting at position 2127 of SEQ ID NO: 1886320
ucacuuuaggaguggaacu

SEQ ID NO: 2401581 - RNA, 19 nt, Artificial Sequence
  Description of Artificial Sequence: Synthetic oligonucleotide
  Antisense strand to SEQ ID NO: 2401580
aguuccacuccuaaaguga

SEQ ID NO: 2401582 - RNA, 19 nt, Artificial Sequence
  Description of Artificial Sequence: Synthetic oligonucleotide
  Sense strand starting at position 2181 of SEQ ID NO: 1886320
cuugcaggucuuggaaauc

SEQ ID NO: 2401583 - RNA, 19 nt, Artificial Sequence
  Description of Artificial Sequence: Synthetic oligonucleotide
  Antisense strand to SEQ ID NO: 2401582
gauuuccaagaccugcaag

SEQ ID NO: 2401584 - RNA, 19 nt, Artificial Sequence
  Description of Artificial Sequence: Synthetic oligonucleotide
  Sense strand starting at position 2306 of SEQ ID NO: 1886320
gggccuuuguggcucagaa

SEQ ID NO: 2401585 - RNA, 19 nt, Artificial Sequence
  Description of Artificial Sequence: Synthetic oligonucleotide
  Antisense strand to SEQ ID NO: 2401584
uucugagccacaaaggccc

SEQ ID NO: 2401586 - RNA, 19 nt, Artificial Sequence
  Description of Artificial Sequence: Synthetic oligonucleotide
  Sense strand starting at position 2354 of SEQ ID NO: 1886320
gcgggugucccaugauaac

SEQ ID NO: 2401587 - RNA, 19 nt, Artificial Sequence
  Description of Artificial Sequence: Synthetic oligonucleotide
  Antisense strand to SEQ ID NO: 2401586
guuaucaugggacacccgc

SEQ ID NO: 2401588 - RNA, 19 nt, Artificial Sequence
  Description of Artificial Sequence: Synthetic oligonucleotide
  Sense strand starting at position 2516 of SEQ ID NO: 1886320
aauguaucugacuguguca

SEQ ID NO: 2401589 - RNA, 19 nt, Artificial Sequence
  Description of Artificial Sequence: Synthetic oligonucleotide
  Antisense strand to SEQ ID NO: 2401588
ugacacagucagauacauu

SEQ ID NO: 2401590 - RNA, 19 nt, Artificial Sequence
  Description of Artificial Sequence: Synthetic oligonucleotide
  Sense strand starting at position 2523 of SEQ ID NO: 1886320
cugacugugucacuuucua

SEQ ID NO: 2401591 - RNA, 19 nt, Artificial Sequence
  Description of Artificial Sequence: Synthetic oligonucleotide
  Antisense strand to SEQ ID NO: 2401590
uagaaagugacacagucag

SEQ ID NO: 2401592 - RNA, 19 nt, Artificial Sequence
  Description of Artificial Sequence: Synthetic oligonucleotide
  Sense strand starting at position 2527 of SEQ ID NO: 1886320
cugugucacuuucuagaca

SEQ ID NO: 2401593 - RNA, 19 nt, Artificial Sequence
  Description of Artificial Sequence: Synthetic oligonucleotide
  Antisense strand to SEQ ID NO: 2401592
ugucuagaaagugacacag

SEQ ID NO: 2401594 - RNA, 19 nt, Artificial Sequence
  Description of Artificial Sequence: Synthetic oligonucleotide
  Sense strand starting at position 2582 of SEQ ID NO: 1886320
cguggugcuacguauauuu

SEQ ID NO: 2401595 - RNA, 19 nt, Artificial Sequence
  Description of Artificial Sequence: Synthetic oligonucleotide
  Antisense strand to SEQ ID NO: 2401594
aaauauacguagcaccacg

SEQ ID NO: 2401596 - RNA, 19 nt, Artificial Sequence
  Description of Artificial Sequence: Synthetic oligonucleotide
  Sense strand starting at position 2592 of SEQ ID NO: 1886320
cguauauuugccuguggcu

SEQ ID NO: 2401597 - RNA, 19 nt, Artificial Sequence
  Description of Artificial Sequence: Synthetic oligonucleotide
  Antisense strand to SEQ ID NO: 2401596
agccacaggcaaauauacg

SEQ ID NO: 2401598 - RNA, 19 nt, Artificial Sequence
  Description of Artificial Sequence: Synthetic oligonucleotide
  Sense strand starting at position 3010 of SEQ ID NO: 1886320
gccaaaggaucucaagaca

SEQ ID NO: 2401599 - RNA, 19 nt, Artificial Sequence
  Description of Artificial Sequence: Synthetic oligonucleotide
  Antisense strand to SEQ ID NO: 2401598
ugucuugagauccuuuggc

SEQ ID NO: 2401600 - RNA, 19 nt, Artificial Sequence
  Description of Artificial Sequence: Synthetic oligonucleotide
  Sense strand starting at position 3153 of SEQ ID NO: 1886320
gguccuugcacugguuaca

SEQ ID NO: 2401601 - RNA, 19 nt, Artificial Sequence
  Description of Artificial Sequence: Synthetic oligonucleotide
  Antisense strand to SEQ ID NO: 2401600
uguaaccagugcaaggacc

SEQ ID NO: 2401602 - RNA, 19 nt, Artificial Sequence
  Description of Artificial Sequence: Synthetic oligonucleotide
  Sense strand starting at position 3176 of SEQ ID NO: 1886320
cagggcuucucugcacaga

SEQ ID NO: 2401603 - RNA, 19 nt, Artificial Sequence
  Description of Artificial Sequence: Synthetic oligonucleotide
  Antisense strand to SEQ ID NO: 2401602
ucugugcagagaagcccug

SEQ ID NO: 2401604 - RNA, 19 nt, Artificial Sequence
  Description of Artificial Sequence: Synthetic oligonucleotide
  Sense strand starting at position 3177 of SEQ ID NO: 1886320
agggcuucucugcacagaa

SEQ ID NO: 2401605 - RNA, 19 nt, Artificial Sequence
  Description of Artificial Sequence: Synthetic oligonucleotide
  Antisense strand to SEQ ID NO: 2401604
uucugugcagagaagcccu

SEQ ID NO: 2401606 - RNA, 19 nt, Artificial Sequence
  Description of Artificial Sequence: Synthetic oligonucleotide
  Sense strand starting at position 3179 of SEQ ID NO: 1886320
ggcuucucugcacagaacu

SEQ ID NO: 2401607 - RNA, 19 nt, Artificial Sequence
  Description of Artificial Sequence: Synthetic oligonucleotide
  Antisense strand to SEQ ID NO: 2401606
aguucugugcagagaagcc

SEQ ID NO: 2401608 - RNA, 19 nt, Artificial Sequence
  Description of Artificial Sequence: Synthetic oligonucleotide
  Sense strand starting at position 3220 of SEQ ID NO: 1886320
agccaacuugacugcauua

SEQ ID NO: 2401609 - RNA, 19 nt, Artificial Sequence
  Description of Artificial Sequence: Synthetic oligonucleotide
  Antisense strand to SEQ ID NO: 2401608
uaaugcagucaaguuggcu

SEQ ID NO: 2401610 - RNA, 19 nt, Artificial Sequence
  Description of Artificial Sequence: Synthetic oligonucleotide
  Sense strand starting at position 3282 of SEQ ID NO: 1886320
ucaccaggucuacaaguaa

SEQ ID NO: 2401611 - RNA, 19 nt, Artificial Sequence
  Description of Artificial Sequence: Synthetic oligonucleotide
  Antisense strand to SEQ ID NO: 2401610
uuacuuguagaccugguga

SEQ ID NO: 2401612 - RNA, 19 nt, Artificial Sequence
  Description of Artificial Sequence: Synthetic oligonucleotide
  Sense strand starting at position 3305 of SEQ ID NO: 1886320
cuacuaaugagcugcgauc

SEQ ID NO: 2401613 - RNA, 19 nt, Artificial Sequence
  Description of Artificial Sequence: Synthetic oligonucleotide
  Antisense strand to SEQ ID NO: 2401612
gaucgcagcucauuaguag

SEQ ID NO: 2401614 - RNA, 19 nt, Artificial Sequence
  Description of Artificial Sequence: Synthetic oligonucleotide
  Sense strand starting at position 3416 of SEQ ID NO: 1886320
guuuaagggagcugaaaug

SEQ ID NO: 2401615 - RNA, 19 nt, Artificial Sequence
  Description of Artificial Sequence: Synthetic oligonucleotide
  Antisense strand to SEQ ID NO: 2401614
cauuucagcucccuuaaac

SEQ ID NO: 2401616 - RNA, 19 nt, Artificial Sequence
  Description of Artificial Sequence: Synthetic oligonucleotide
  Sense strand starting at position 3534 of SEQ ID NO: 1886320
ccuagaauguugccuggaa

SEQ ID NO: 2401617 - RNA, 19 nt, Artificial Sequence
  Description of Artificial Sequence: Synthetic oligonucleotide
  Antisense strand to SEQ ID NO: 2401616
uuccaggcaacauucuagg

SEQ ID NO: 2401618 - RNA, 19 nt, Artificial Sequence
  Description of Artificial Sequence: Synthetic oligonucleotide
  Sense strand starting at position 3536 of SEQ ID NO: 1886320
uagaauguugccuggaaug

SEQ ID NO: 2401619 - RNA, 19 nt, Artificial Sequence
  Description of Artificial Sequence: Synthetic oligonucleotide
  Antisense strand to SEQ ID NO: 2401618
cauuccaggcaacauucua

SEQ ID NO: 2401620 - RNA, 19 nt, Artificial Sequence
  Description of Artificial Sequence: Synthetic oligonucleotide
  Sense strand starting at position 3538 of SEQ ID NO: 1886320
gaauguugccuggaaugca

SEQ ID NO: 2401621 - RNA, 19 nt, Artificial Sequence
  Description of Artificial Sequence: Synthetic oligonucleotide
  Antisense strand to SEQ ID NO: 2401620
ugcauuccaggcaacauuc

SEQ ID NO: 2401622 - RNA, 19 nt, Artificial Sequence
  Description of Artificial Sequence: Synthetic oligonucleotide
  Sense strand starting at position 3557 of SEQ ID NO: 1886320
cccggaucuccauggauag

SEQ ID NO: 2401623 - RNA, 19 nt, Artificial Sequence
  Description of Artificial Sequence: Synthetic oligonucleotide
  Antisense strand to SEQ ID NO: 2401622
cuauccauggagauccggg

SEQ ID NO: 2401624 - RNA, 19 nt, Artificial Sequence
  Description of Artificial Sequence: Synthetic oligonucleotide
  Sense strand starting at position 3567 of SEQ ID NO: 1886320
cauggauagccacguguga

SEQ ID NO: 2401625 - RNA, 19 nt, Artificial Sequence
  Description of Artificial Sequence: Synthetic oligonucleotide
  Antisense strand to SEQ ID NO: 2401624
ucacacguggcuauccaug

SEQ ID NO: 2401626 - RNA, 19 nt, Artificial Sequence
  Description of Artificial Sequence: Synthetic oligonucleotide
  Sense strand starting at position 3755 of SEQ ID NO: 1886320
ggaagaugugcccaacagu

SEQ ID NO: 2401627 - RNA, 19 nt, Artificial Sequence
  Description of Artificial Sequence: Synthetic oligonucleotide
  Antisense strand to SEQ ID NO: 2401626
acuguugggcacaucuucc

SEQ ID NO: 2401628 - RNA, 19 nt, Artificial Sequence
  Description of Artificial Sequence: Synthetic oligonucleotide
  Sense strand starting at position 3833 of SEQ ID NO: 1886320
acccuuguauucccuggaa

SEQ ID NO: 2401629 - RNA, 19 nt, Artificial Sequence
  Description of Artificial Sequence: Synthetic oligonucleotide
  Antisense strand to SEQ ID NO: 2401628
uuccagggaauacaagggu

SEQ ID NO: 2401630 - RNA, 19 nt, Artificial Sequence
  Description of Artificial Sequence: Synthetic oligonucleotide
  Sense strand starting at position 3836 of SEQ ID NO: 1886320
cuuguauucccuggaaccu

SEQ ID NO: 2401631 - RNA, 19 nt, Artificial Sequence
  Description of Artificial Sequence: Synthetic oligonucleotide
  Antisense strand to SEQ ID NO: 2401630
agguuccagggaauacaag

SEQ ID NO: 2401632 - RNA, 19 nt, Artificial Sequence
  Description of Artificial Sequence: Synthetic oligonucleotide
  Sense strand starting at position 3974 of SEQ ID NO: 1886320
ccaccucuucuguggagua

SEQ ID NO: 2401633 - RNA, 19 nt, Artificial Sequence
  Description of Artificial Sequence: Synthetic oligonucleotide
  Antisense strand to SEQ ID NO: 2401632
uacuccacagaagaggugg

SEQ ID NO: 2401634 - RNA, 19 nt, Artificial Sequence
  Description of Artificial Sequence: Synthetic oligonucleotide
  Sense strand starting at position 3 of SEQ ID NO: 1886321
agaagacugcugugaagaa

SEQ ID NO: 2401635 - RNA, 19 nt, Artificial Sequence
  Description of Artificial Sequence: Synthetic oligonucleotide
  Antisense strand to SEQ ID NO: 2401634
uucuucacagcagucuucu

SEQ ID NO: 2401636 - RNA, 19 nt, Artificial Sequence
  Description of Artificial Sequence: Synthetic oligonucleotide
  Sense strand starting at position 50 of SEQ ID NO: 1886321
ucaggagacgcugagguau

SEQ ID NO: 2401637 - RNA, 19 nt, Artificial Sequence
  Description of Artificial Sequence: Synthetic oligonucleotide
  Antisense strand to SEQ ID NO: 2401636
auaccucagcgucuccuga

SEQ ID NO: 2401638 - RNA, 19 nt, Artificial Sequence
  Description of Artificial Sequence: Synthetic oligonucleotide
  Sense strand starting at position 58 of SEQ ID NO: 1886321
cgcugagguauauaagcaa

SEQ ID NO: 2401639 - RNA, 19 nt, Artificial Sequence
  Description of Artificial Sequence: Synthetic oligonucleotide
  Antisense strand to SEQ ID NO: 2401638
uugcuuauauaccucagcg

SEQ ID NO: 2401640 - RNA, 19 nt, Artificial Sequence
  Description of Artificial Sequence: Synthetic oligonucleotide
  Sense strand starting at position 348 of SEQ ID NO: 1886321
cccuucuugggccaugaaa

SEQ ID NO: 2401641 - RNA, 19 nt, Artificial Sequence
  Description of Artificial Sequence: Synthetic oligonucleotide
  Antisense strand to SEQ ID NO: 2401640
uuucauggcccaagaaggg

SEQ ID NO: 2401642 - RNA, 19 nt, Artificial Sequence
  Description of Artificial Sequence: Synthetic oligonucleotide
  Sense strand starting at position 350 of SEQ ID NO: 1886321
cuucuugggccaugaaauu

SEQ ID NO: 2401643 - RNA, 19 nt, Artificial Sequence
  Description of Artificial Sequence: Synthetic oligonucleotide
  Antisense strand to SEQ ID NO: 2401642
aauuucauggcccaagaag

SEQ ID NO: 2401644 - RNA, 19 nt, Artificial Sequence
  Description of Artificial Sequence: Synthetic oligonucleotide
  Sense strand starting at position 359 of SEQ ID NO: 1886321
ccaugaaauuuggaauucu

SEQ ID NO: 2401645 - RNA, 19 nt, Artificial Sequence
  Description of Artificial Sequence: Synthetic oligonucleotide
  Antisense strand to SEQ ID NO: 2401644
agaauuccaaauuucaugg

SEQ ID NO: 2401646 - RNA, 19 nt, Artificial Sequence
  Description of Artificial Sequence: Synthetic oligonucleotide
  Sense strand starting at position 417 of SEQ ID NO: 1886321
ggcuccuuuccagagagca

SEQ ID NO: 2401647 - RNA, 19 nt, Artificial Sequence
  Description of Artificial Sequence: Synthetic oligonucleotide
  Antisense strand to SEQ ID NO: 2401646
ugcucucuggaaaggagcc

SEQ ID NO: 2401648 - RNA, 19 nt, Artificial Sequence
  Description of Artificial Sequence: Synthetic oligonucleotide
  Sense strand starting at position 573 of SEQ ID NO: 1886321
ggaauaaauugucuucuuc

SEQ ID NO: 2401649 - RNA, 19 nt, Artificial Sequence
  Description of Artificial Sequence: Synthetic oligonucleotide
  Antisense strand to SEQ ID NO: 2401648
gaagaagacaauuuauucc

SEQ ID NO: 2401650 - RNA, 19 nt, Artificial Sequence
  Description of Artificial Sequence: Synthetic oligonucleotide
  Sense strand starting at position 863 of SEQ ID NO: 1886321
aaaucuaggcccugaugga

SEQ ID NO: 2401651 - RNA, 19 nt, Artificial Sequence
  Description of Artificial Sequence: Synthetic oligonucleotide
  Antisense strand to SEQ ID NO: 2401650
uccaucagggccuagauuu

SEQ ID NO: 2401652 - RNA, 19 nt, Artificial Sequence
  Description of Artificial Sequence: Synthetic oligonucleotide
  Sense strand starting at position 885 of SEQ ID NO: 1886321
gcgugcuggaccucaguua

SEQ ID NO: 2401653 - RNA, 19 nt, Artificial Sequence
  Description of Artificial Sequence: Synthetic oligonucleotide
  Antisense strand to SEQ ID NO: 2401652
uaacugagguccagcacgc

SEQ ID NO: 2401654 - RNA, 19 nt, Artificial Sequence
  Description of Artificial Sequence: Synthetic oligonucleotide
  Sense strand starting at position 1143 of SEQ ID NO: 1886321
agaccauccuucuuggaca

SEQ ID NO: 2401655 - RNA, 19 nt, Artificial Sequence
  Description of Artificial Sequence: Synthetic oligonucleotide
  Antisense strand to SEQ ID NO: 2401654
uguccaagaaggauggucu

SEQ ID NO: 2401656 - RNA, 19 nt, Artificial Sequence
  Description of Artificial Sequence: Synthetic oligonucleotide
  Sense strand starting at position 1200 of SEQ ID NO: 1886321
agaggaaaugagugugcuu

SEQ ID NO: 2401657 - RNA, 19 nt, Artificial Sequence
  Description of Artificial Sequence: Synthetic oligonucleotide
  Antisense strand to SEQ ID NO: 2401656
aagcacacucauuuccucu

SEQ ID NO: 2401658 - RNA, 19 nt, Artificial Sequence
  Description of Artificial Sequence: Synthetic oligonucleotide
  Sense strand starting at position 1202 of SEQ ID NO: 1886321
aggaaaugagugugcuuca

SEQ ID NO: 2401659 - RNA, 19 nt, Artificial Sequence
  Description of Artificial Sequence: Synthetic oligonucleotide
  Antisense strand to SEQ ID NO: 2401658
ugaagcacacucauuuccu

SEQ ID NO: 2401660 - RNA, 19 nt, Artificial Sequence
  Description of Artificial Sequence: Synthetic oligonucleotide
  Sense strand starting at position 1207 of SEQ ID NO: 1886321
augagugugcuucagaaag

SEQ ID NO: 2401661 - RNA, 19 nt, Artificial Sequence
  Description of Artificial Sequence: Synthetic oligonucleotide
  Antisense strand to SEQ ID NO: 2401660
cuuucugaagcacacucau

SEQ ID NO: 2401662 - RNA, 19 nt, Artificial Sequence
  Description of Artificial Sequence: Synthetic oligonucleotide
  Sense strand starting at position 1243 of SEQ ID NO: 1886321
ucaggaaggcuaugucaua

SEQ ID NO: 2401663 - RNA, 19 nt, Artificial Sequence
  Description of Artificial Sequence: Synthetic oligonucleotide
  Antisense strand to SEQ ID NO: 2401662
uaugacauagccuuccuga

SEQ ID NO: 2401664 - RNA, 19 nt, Artificial Sequence
  Description of Artificial Sequence: Synthetic oligonucleotide
  Sense strand starting at position 1244 of SEQ ID NO: 1886321
caggaaggcuaugucauau

SEQ ID NO: 2401665 - RNA, 19 nt, Artificial Sequence
  Description of Artificial Sequence: Synthetic oligonucleotide
  Antisense strand to SEQ ID NO: 2401664
auaugacauagccuuccug

SEQ ID NO: 2401666 - RNA, 19 nt, Artificial Sequence
  Description of Artificial Sequence: Synthetic oligonucleotide
  Sense strand starting at position 1260 of SEQ ID NO: 1886321
uauagacuccugugguaca

SEQ ID NO: 2401667 - RNA, 19 nt, Artificial Sequence
  Description of Artificial Sequence: Synthetic oligonucleotide
  Antisense strand to SEQ ID NO: 2401666
uguaccacaggagucuaua

SEQ ID NO: 2401668 - RNA, 19 nt, Artificial Sequence
  Description of Artificial Sequence: Synthetic oligonucleotide
  Sense strand starting at position 1565 of SEQ ID NO: 1886321
ggaaauauguacuuccuca

SEQ ID NO: 2401669 - RNA, 19 nt, Artificial Sequence
  Description of Artificial Sequence: Synthetic oligonucleotide
  Antisense strand to SEQ ID NO: 2401668
ugaggaaguacauauuucc

SEQ ID NO: 2401670 - RNA, 19 nt, Artificial Sequence
  Description of Artificial Sequence: Synthetic oligonucleotide
  Sense strand starting at position 1612 of SEQ ID NO: 1886321
ccaugaauguuggugaaag

SEQ ID NO: 2401671 - RNA, 19 nt, Artificial Sequence
  Description of Artificial Sequence: Synthetic oligonucleotide
  Antisense strand to SEQ ID NO: 2401670
cuuucaccaacauucaugg

SEQ ID NO: 2401672 - RNA, 19 nt, Artificial Sequence
  Description of Artificial Sequence: Synthetic oligonucleotide
  Sense strand starting at position 1633 of SEQ ID NO: 1886321
ugugauuggugaccagaac

SEQ ID NO: 2401673 - RNA, 19 nt, Artificial Sequence
  Description of Artificial Sequence: Synthetic oligonucleotide
  Antisense strand to SEQ ID NO: 2401672
guucuggucaccaaucaca

SEQ ID NO: 2401674 - RNA, 19 nt, Artificial Sequence
  Description of Artificial Sequence: Synthetic oligonucleotide
  Sense strand starting at position 1747 of SEQ ID NO: 1886321
gggcuacccaaguaugauu

SEQ ID NO: 2401675 - RNA, 19 nt, Artificial Sequence
  Description of Artificial Sequence: Synthetic oligonucleotide
  Antisense strand to SEQ ID NO: 2401674
aaucauacuuggguagccc

SEQ ID NO: 2401676 - RNA, 19 nt, Artificial Sequence
  Description of Artificial Sequence: Synthetic oligonucleotide
  Sense strand starting at position 1839 of SEQ ID NO: 1886321
agugaaguaccauguaaua

SEQ ID NO: 2401677 - RNA, 19 nt, Artificial Sequence
  Description of Artificial Sequence: Synthetic oligonucleotide
  Antisense strand to SEQ ID NO: 2401676
uauuacaugguacuucacu

SEQ ID NO: 2401678 - RNA, 19 nt, Artificial Sequence
  Description of Artificial Sequence: Synthetic oligonucleotide
  Sense strand starting at position 2053 of SEQ ID NO: 1886321
agccgaugaccuuaaacau

SEQ ID NO: 2401679 - RNA, 19 nt, Artificial Sequence
  Description of Artificial Sequence: Synthetic oligonucleotide
  Antisense strand to SEQ ID NO: 2401678
auguuuaaggucaucggcu

SEQ ID NO: 2401680 - RNA, 19 nt, Artificial Sequence
  Description of Artificial Sequence: Synthetic oligonucleotide
  Sense strand starting at position 2153 of SEQ ID NO: 1886321
ccauuaguggccuacugaa

SEQ ID NO: 2401681 - RNA, 19 nt, Artificial Sequence
  Description of Artificial Sequence: Synthetic oligonucleotide
  Antisense strand to SEQ ID NO: 2401680
uucaguaggccacuaaugg

SEQ ID NO: 2401682 - RNA, 19 nt, Artificial Sequence
  Description of Artificial Sequence: Synthetic oligonucleotide
  Sense strand starting at position 2486 of SEQ ID NO: 1886321
cuccuuggccuccaugauu

SEQ ID NO: 2401683 - RNA, 19 nt, Artificial Sequence
  Description of Artificial Sequence: Synthetic oligonucleotide
  Antisense strand to SEQ ID NO: 2401682
aaucauggaggccaaggag

SEQ ID NO: 2401684 - RNA, 19 nt, Artificial Sequence
  Description of Artificial Sequence: Synthetic oligonucleotide
  Sense strand starting at position 2489 of SEQ ID NO: 1886321
cuuggccuccaugauugau

SEQ ID NO: 2401685 - RNA, 19 nt, Artificial Sequence
  Description of Artificial Sequence: Synthetic oligonucleotide
  Antisense strand to SEQ ID NO: 2401684
aucaaucauggaggccaag

SEQ ID NO: 2401686 - RNA, 19 nt, Artificial Sequence
  Description of Artificial Sequence: Synthetic oligonucleotide
  Sense strand starting at position 2585 of SEQ ID NO: 1886321
gugcccauugcugcgagua

SEQ ID NO: 2401687 - RNA, 19 nt, Artificial Sequence
  Description of Artificial Sequence: Synthetic oligonucleotide
  Antisense strand to SEQ ID NO: 2401686
uacucgcagcaaugggcac

SEQ ID NO: 2401688 - RNA, 19 nt, Artificial Sequence
  Description of Artificial Sequence: Synthetic oligonucleotide
  Sense strand starting at position 2656 of SEQ ID NO: 1886321
ugagauucccacugcaaug

SEQ ID NO: 2401689 - RNA, 19 nt, Artificial Sequence
  Description of Artificial Sequence: Synthetic oligonucleotide
  Antisense strand to SEQ ID NO: 2401688
cauugcagugggaaucuca

SEQ ID NO: 2401690 - RNA, 19 nt, Artificial Sequence
  Description of Artificial Sequence: Synthetic oligonucleotide
  Sense strand starting at position 2774 of SEQ ID NO: 1886321
uggaaauaggccugauguc

SEQ ID NO: 2401691 - RNA, 19 nt, Artificial Sequence
  Description of Artificial Sequence: Synthetic oligonucleotide
  Antisense strand to SEQ ID NO: 2401690
gacaucaggccuauuucca

SEQ ID NO: 2401692 - RNA, 19 nt, Artificial Sequence
  Description of Artificial Sequence: Synthetic oligonucleotide
  Sense strand starting at position 2783 of SEQ ID NO: 1886321
gccugaugucccucgugua

SEQ ID NO: 2401693 - RNA, 19 nt, Artificial Sequence
  Description of Artificial Sequence: Synthetic oligonucleotide
  Antisense strand to SEQ ID NO: 2401692
uacacgagggacaucaggc

SEQ ID NO: 2401694 - RNA, 19 nt, Artificial Sequence
  Description of Artificial Sequence: Synthetic oligonucleotide
  Sense strand starting at position 2849 of SEQ ID NO: 1886321
cucugaugucgggaccaga

SEQ ID NO: 2401695 - RNA, 19 nt, Artificial Sequence
  Description of Artificial Sequence: Synthetic oligonucleotide
  Antisense strand to SEQ ID NO: 2401694
ucuggucccgacaucagag

SEQ ID NO: 2401696 - RNA, 19 nt, Artificial Sequence
  Description of Artificial Sequence: Synthetic oligonucleotide
  Sense strand starting at position 3209 of SEQ ID NO: 1886321
ggcaaugucccaucgugca

SEQ ID NO: 2401697 - RNA, 19 nt, Artificial Sequence
  Description of Artificial Sequence: Synthetic oligonucleotide
  Antisense strand to SEQ ID NO: 2401696
ugcacgaugggacauugcc

SEQ ID NO: 2401698 - RNA, 19 nt, Artificial Sequence
  Description of Artificial Sequence: Synthetic oligonucleotide
  Sense strand starting at position 3300 of SEQ ID NO: 1886321
agauacauguggcuacuaa

SEQ ID NO: 2401699 - RNA, 19 nt, Artificial Sequence
  Description of Artificial Sequence: Synthetic oligonucleotide
  Antisense strand to SEQ ID NO: 2401698
uuaguagccacauguaucu

SEQ ID NO: 2401700 - RNA, 19 nt, Artificial Sequence
  Description of Artificial Sequence: Synthetic oligonucleotide
  Sense strand starting at position 3301 of SEQ ID NO: 1886321
gauacauguggcuacuaag

SEQ ID NO: 2401701 - RNA, 19 nt, Artificial Sequence
  Description of Artificial Sequence: Synthetic oligonucleotide
  Antisense strand to SEQ ID NO: 2401700
cuuaguagccacauguauc

SEQ ID NO: 2401702 - RNA, 19 nt, Artificial Sequence
  Description of Artificial Sequence: Synthetic oligonucleotide
  Sense strand starting at position 3462 of SEQ ID NO: 1886321
agcagaauccagcacuuga

SEQ ID NO: 2401703 - RNA, 19 nt, Artificial Sequence
  Description of Artificial Sequence: Synthetic oligonucleotide
  Antisense strand to SEQ ID NO: 2401702
ucaagugcuggauucugcu

SEQ ID NO: 2401704 - RNA, 19 nt, Artificial Sequence
  Description of Artificial Sequence: Synthetic oligonucleotide
  Sense strand starting at position 3476 of SEQ ID NO: 1886321
cuugaauaucgccaucaua

SEQ ID NO: 2401705 - RNA, 19 nt, Artificial Sequence
  Description of Artificial Sequence: Synthetic oligonucleotide
  Antisense strand to SEQ ID NO: 2401704
uaugauggcgauauucaag

SEQ ID NO: 2401706 - RNA, 19 nt, Artificial Sequence
  Description of Artificial Sequence: Synthetic oligonucleotide
  Sense strand starting at position 3521 of SEQ ID NO: 1886321
aaagauucucuguggcaau

SEQ ID NO: 2401707 - RNA, 19 nt, Artificial Sequence
  Description of Artificial Sequence: Synthetic oligonucleotide
  Antisense strand to SEQ ID NO: 2401706
auugccacagagaaucuuu

SEQ ID NO: 2401708 - RNA, 19 nt, Artificial Sequence
  Description of Artificial Sequence: Synthetic oligonucleotide
  Sense strand starting at position 3668 of SEQ ID NO: 1886321
ggaugccuucgggauggaa

SEQ ID NO: 2401709 - RNA, 19 nt, Artificial Sequence
  Description of Artificial Sequence: Synthetic oligonucleotide
  Antisense strand to SEQ ID NO: 2401708
uuccaucccgaaggcaucc

SEQ ID NO: 2401710 - RNA, 19 nt, Artificial Sequence
  Description of Artificial Sequence: Synthetic oligonucleotide
  Sense strand starting at position 3688 of SEQ ID NO: 1886321
cugcuuuccaagugggaaa

SEQ ID NO: 2401711 - RNA, 19 nt, Artificial Sequence
  Description of Artificial Sequence: Synthetic oligonucleotide
  Antisense strand to SEQ ID NO: 2401710
uuucccacuuggaaagcag

SEQ ID NO: 2401712 - RNA, 19 nt, Artificial Sequence
  Description of Artificial Sequence: Synthetic oligonucleotide
  Sense strand starting at position 3707 of SEQ ID NO: 1886321
guggauccagagcacuauu

SEQ ID NO: 2401713 - RNA, 19 nt, Artificial Sequence
  Description of Artificial Sequence: Synthetic oligonucleotide
  Antisense strand to SEQ ID NO: 2401712
aauagugcucuggauccac

SEQ ID NO: 2401714 - RNA, 19 nt, Artificial Sequence
  Description of Artificial Sequence: Synthetic oligonucleotide
  Sense strand starting at position 183 of SEQ ID NO: 1886322
ugcauagcauuuccguaaa

SEQ ID NO: 2401715 - RNA, 19 nt, Artificial Sequence
  Description of Artificial Sequence: Synthetic oligonucleotide
  Antisense strand to SEQ ID NO: 2401714
uuuacggaaaugcuaugca

SEQ ID NO: 2401716 - RNA, 19 nt, Artificial Sequence
  Description of Artificial Sequence: Synthetic oligonucleotide
  Sense strand starting at position 959 of SEQ ID NO: 1886322
uuauuacaguuaucaguga

SEQ ID NO: 2401717 - RNA, 19 nt, Artificial Sequence
  Description of Artificial Sequence: Synthetic oligonucleotide
  Antisense strand to SEQ ID NO: 2401716
ucacugauaacuguaauaa

SEQ ID NO: 2401718 - RNA, 19 nt, Artificial Sequence
  Description of Artificial Sequence: Synthetic oligonucleotide
  Sense strand starting at position 1092 of SEQ ID NO: 1886322
uagagaaguugagaaagaa

SEQ ID NO: 2401719 - RNA, 19 nt, Artificial Sequence
  Description of Artificial Sequence: Synthetic oligonucleotide
  Antisense strand to SEQ ID NO: 2401718
uucuuucucaacuucucua

SEQ ID NO: 2401720 - RNA, 19 nt, Artificial Sequence
  Description of Artificial Sequence: Synthetic oligonucleotide
  Sense strand starting at position 1120 of SEQ ID NO: 1886322
aucgaauguuuccugauaa

SEQ ID NO: 2401721 - RNA, 19 nt, Artificial Sequence
  Description of Artificial Sequence: Synthetic oligonucleotide
  Antisense strand to SEQ ID NO: 2401720
uuaucaggaaacauucgau

SEQ ID NO: 2401722 - RNA, 19 nt, Artificial Sequence
  Description of Artificial Sequence: Synthetic oligonucleotide
  Sense strand starting at position 1173 of SEQ ID NO: 1886322
caagguguauguccagaaa

SEQ ID NO: 2401723 - RNA, 19 nt, Artificial Sequence
  Description of Artificial Sequence: Synthetic oligonucleotide
  Antisense strand to SEQ ID NO: 2401722
uuucuggacauacaccuug

SEQ ID NO: 2401724 - RNA, 19 nt, Artificial Sequence
  Description of Artificial Sequence: Synthetic oligonucleotide
  Sense strand starting at position 1213 of SEQ ID NO: 1886322
acaggagaauguuuaaagu

SEQ ID NO: 2401725 - RNA, 19 nt, Artificial Sequence
  Description of Artificial Sequence: Synthetic oligonucleotide
  Antisense strand to SEQ ID NO: 2401724
acuuuaaacauucuccugu

SEQ ID NO: 2401726 - RNA, 19 nt, Artificial Sequence
  Description of Artificial Sequence: Synthetic oligonucleotide
  Sense strand starting at position 1250 of SEQ ID NO: 1886322
ucagguuaaccguaaaguc

SEQ ID NO: 2401727 - RNA, 19 nt, Artificial Sequence
  Description of Artificial Sequence: Synthetic oligonucleotide
  Antisense strand to SEQ ID NO: 2401726
gacuuuacgguuaaccuga

SEQ ID NO: 2401728 - RNA, 19 nt, Artificial Sequence
  Description of Artificial Sequence: Synthetic oligonucleotide
  Sense strand starting at position 1498 of SEQ ID NO: 1886322
auauucucaugguuagaaa

SEQ ID NO: 2401729 - RNA, 19 nt, Artificial Sequence
  Description of Artificial Sequence: Synthetic oligonucleotide
  Antisense strand to SEQ ID NO: 2401728
uuucuaaccaugagaauau

SEQ ID NO: 2401730 - RNA, 19 nt, Artificial Sequence
  Description of Artificial Sequence: Synthetic oligonucleotide
  Sense strand starting at position 1632 of SEQ ID NO: 1886322
ugucaugucccagauaacu

SEQ ID NO: 2401731 - RNA, 19 nt, Artificial Sequence
  Description of Artificial Sequence: Synthetic oligonucleotide
  Antisense strand to SEQ ID NO: 2401730
aguuaucugggacaugaca

SEQ ID NO: 2401732 - RNA, 19 nt, Artificial Sequence
  Description of Artificial Sequence: Synthetic oligonucleotide
  Sense strand starting at position 1796 of SEQ ID NO: 1886322
uuuauagaugacuguccaa

SEQ ID NO: 2401733 - RNA, 19 nt, Artificial Sequence
  Description of Artificial Sequence: Synthetic oligonucleotide
  Antisense strand to SEQ ID NO: 2401732
uuggacagucaucuauaaa

SEQ ID NO: 2401734 - RNA, 19 nt, Artificial Sequence
  Description of Artificial Sequence: Synthetic oligonucleotide
  Sense strand starting at position 2019 of SEQ ID NO: 1886322
guaccuuaagccugggaua

SEQ ID NO: 2401735 - RNA, 19 nt, Artificial Sequence
  Description of Artificial Sequence: Synthetic oligonucleotide
  Antisense strand to SEQ ID NO: 2401734
uaucccaggcuuaagguac

SEQ ID NO: 2401736 - RNA, 19 nt, Artificial Sequence
  Description of Artificial Sequence: Synthetic oligonucleotide
  Sense strand starting at position 2021 of SEQ ID NO: 1886322
accuuaagccugggauaug

SEQ ID NO: 2401737 - RNA, 19 nt, Artificial Sequence
  Description of Artificial Sequence: Synthetic oligonucleotide
  Antisense strand to SEQ ID NO: 2401736
cauaucccaggcuuaaggu

SEQ ID NO: 2401738 - RNA, 19 nt, Artificial Sequence
  Description of Artificial Sequence: Synthetic oligonucleotide
  Sense strand starting at position 2221 of SEQ ID NO: 1886322
aaaugcuuaccaugggaga

SEQ ID NO: 2401739 - RNA, 19 nt, Artificial Sequence
  Description of Artificial Sequence: Synthetic oligonucleotide
  Antisense strand to SEQ ID NO: 2401738
ucucccaugguaagcauuu

SEQ ID NO: 2401740 - RNA, 19 nt, Artificial Sequence
  Description of Artificial Sequence: Synthetic oligonucleotide
  Sense strand starting at position 2222 of SEQ ID NO: 1886322
aaugcuuaccaugggagaa

SEQ ID NO: 2401741 - RNA, 19 nt, Artificial Sequence
  Description of Artificial Sequence: Synthetic oligonucleotide
  Antisense strand to SEQ ID NO: 2401740
uucucccaugguaagcauu

SEQ ID NO: 2401742 - RNA, 19 nt, Artificial Sequence
  Description of Artificial Sequence: Synthetic oligonucleotide
  Sense strand starting at position 2223 of SEQ ID NO: 1886322
augcuuaccaugggagaau

SEQ ID NO: 2401743 - RNA, 19 nt, Artificial Sequence
  Description of Artificial Sequence: Synthetic oligonucleotide
  Antisense strand to SEQ ID NO: 2401742
auucucccaugguaagcau

SEQ ID NO: 2401744 - RNA, 19 nt, Artificial Sequence
  Description of Artificial Sequence: Synthetic oligonucleotide
  Sense strand starting at position 2235 of SEQ ID NO: 1886322
ggagaauuccuacggauuc

SEQ ID NO: 2401745 - RNA, 19 nt, Artificial Sequence
  Description of Artificial Sequence: Synthetic oligonucleotide
  Antisense strand to SEQ ID NO: 2401744
gaauccguaggaauucucc

SEQ ID NO: 2401746 - RNA, 19 nt, Artificial Sequence
  Description of Artificial Sequence: Synthetic oligonucleotide
  Sense strand starting at position 2242 of SEQ ID NO: 1886322
uccuacggauucuugaaga

SEQ ID NO: 2401747 - RNA, 19 nt, Artificial Sequence
  Description of Artificial Sequence: Synthetic oligonucleotide
  Antisense strand to SEQ ID NO: 2401746
ucuucaagaauccguagga

SEQ ID NO: 2401748 - RNA, 19 nt, Artificial Sequence
  Description of Artificial Sequence: Synthetic oligonucleotide
  Sense strand starting at position 2535 of SEQ ID NO: 1886322
uaaugaaagccuuggauga

SEQ ID NO: 2401749 - RNA, 19 nt, Artificial Sequence
  Description of Artificial Sequence: Synthetic oligonucleotide
  Antisense strand to SEQ ID NO: 2401748
ucauccaaggcuuucauua

SEQ ID NO: 2401750 - RNA, 19 nt, Artificial Sequence
  Description of Artificial Sequence: Synthetic oligonucleotide
  Sense strand starting at position 2536 of SEQ ID NO: 1886322
aaugaaagccuuggaugau

SEQ ID NO: 2401751 - RNA, 19 nt, Artificial Sequence
  Description of Artificial Sequence: Synthetic oligonucleotide
  Antisense strand to SEQ ID NO: 2401750
aucauccaaggcuuucauu

SEQ ID NO: 2401752 - RNA, 19 nt, Artificial Sequence
  Description of Artificial Sequence: Synthetic oligonucleotide
  Sense strand starting at position 2672 of SEQ ID NO: 1886322
ggauguuaccuuuggagug

SEQ ID NO: 2401753 - RNA, 19 nt, Artificial Sequence
  Description of Artificial Sequence: Synthetic oligonucleotide
  Antisense strand to SEQ ID NO: 2401752
cacuccaaagguaacaucc

SEQ ID NO: 2401754 - RNA, 19 nt, Artificial Sequence
  Description of Artificial Sequence: Synthetic oligonucleotide
  Sense strand starting at position 2751 of SEQ ID NO: 1886322
uugggauggcagugagaau

SEQ ID NO: 2401755 - RNA, 19 nt, Artificial Sequence
  Description of Artificial Sequence: Synthetic oligonucleotide
  Antisense strand to SEQ ID NO: 2401754
auucucacugccaucccaa

SEQ ID NO: 2401756 - RNA, 19 nt, Artificial Sequence
  Description of Artificial Sequence: Synthetic oligonucleotide
  Sense strand starting at position 2762 of SEQ ID NO: 1886322
gugagaauuccaugcaauu

SEQ ID NO: 2401757 - RNA, 19 nt, Artificial Sequence
  Description of Artificial Sequence: Synthetic oligonucleotide
  Antisense strand to SEQ ID NO: 2401756
aauugcauggaauucucac

SEQ ID NO: 2401758 - RNA, 19 nt, Artificial Sequence
  Description of Artificial Sequence: Synthetic oligonucleotide
  Sense strand starting at position 2859 of SEQ ID NO: 1886322
cugacaacaguuuguaauu

SEQ ID NO: 2401759 - RNA, 19 nt, Artificial Sequence
  Description of Artificial Sequence: Synthetic oligonucleotide
  Antisense strand to SEQ ID NO: 2401758
aauuacaaacuguugucag

SEQ ID NO: 2401760 - RNA, 19 nt, Artificial Sequence
  Description of Artificial Sequence: Synthetic oligonucleotide
  Sense strand starting at position 2860 of SEQ ID NO: 1886322
ugacaacaguuuguaauua

SEQ ID NO: 2401761 - RNA, 19 nt, Artificial Sequence
  Description of Artificial Sequence: Synthetic oligonucleotide
  Antisense strand to SEQ ID NO: 2401760
uaauuacaaacuguuguca

SEQ ID NO: 2401762 - RNA, 19 nt, Artificial Sequence
  Description of Artificial Sequence: Synthetic oligonucleotide
  Sense strand starting at position 3202 of SEQ ID NO: 1886322
cuguucuaauccuugagac

SEQ ID NO: 2401763 - RNA, 19 nt, Artificial Sequence
  Description of Artificial Sequence: Synthetic oligonucleotide
  Antisense strand to SEQ ID NO: 2401762
gucucaaggauuagaacag

SEQ ID NO: 2401764 - RNA, 19 nt, Artificial Sequence
  Description of Artificial Sequence: Synthetic oligonucleotide
  Sense strand starting at position 3204 of SEQ ID NO: 1886322
guucuaauccuugagacug

SEQ ID NO: 2401765 - RNA, 19 nt, Artificial Sequence
  Description of Artificial Sequence: Synthetic oligonucleotide
  Antisense strand to SEQ ID NO: 2401764
cagucucaaggauuagaac

SEQ ID NO: 2401766 - RNA, 19 nt, Artificial Sequence
  Description of Artificial Sequence: Synthetic oligonucleotide
  Sense strand starting at position 3209 of SEQ ID NO: 1886322
aauccuugagacugaguua

SEQ ID NO: 2401767 - RNA, 19 nt, Artificial Sequence
  Description of Artificial Sequence: Synthetic oligonucleotide
  Antisense strand to SEQ ID NO: 2401766
uaacucagucucaaggauu

SEQ ID NO: 2401768 - RNA, 19 nt, Artificial Sequence
  Description of Artificial Sequence: Synthetic oligonucleotide
  Sense strand starting at position 3212 of SEQ ID NO: 1886322
ccuugagacugaguuagga

SEQ ID NO: 2401769 - RNA, 19 nt, Artificial Sequence
  Description of Artificial Sequence: Synthetic oligonucleotide
  Antisense strand to SEQ ID NO: 2401768
uccuaacucagucucaagg

SEQ ID NO: 2401770 - RNA, 19 nt, Artificial Sequence
  Description of Artificial Sequence: Synthetic oligonucleotide
  Sense strand starting at position 3231 of SEQ ID NO: 1886322
agcaaauuccagcauguaa

SEQ ID NO: 2401771 - RNA, 19 nt, Artificial Sequence
  Description of Artificial Sequence: Synthetic oligonucleotide
  Antisense strand to SEQ ID NO: 2401770
uuacaugcuggaauuugcu

SEQ ID NO: 2401772 - RNA, 19 nt, Artificial Sequence
  Description of Artificial Sequence: Synthetic oligonucleotide
  Sense strand starting at position 3318 of SEQ ID NO: 1886322
gcaagcaaagacugauaau

SEQ ID NO: 2401773 - RNA, 19 nt, Artificial Sequence
  Description of Artificial Sequence: Synthetic oligonucleotide
  Antisense strand to SEQ ID NO: 2401772
auuaucagucuuugcuugc

SEQ ID NO: 2401774 - RNA, 19 nt, Artificial Sequence
  Description of Artificial Sequence: Synthetic oligonucleotide
  Sense strand starting at position 3321 of SEQ ID NO: 1886322
agcaaagacugauaauuuc

SEQ ID NO: 2401775 - RNA, 19 nt, Artificial Sequence
  Description of Artificial Sequence: Synthetic oligonucleotide
  Antisense strand to SEQ ID NO: 2401774
gaaauuaucagucuuugcu

SEQ ID NO: 2401776 - RNA, 19 nt, Artificial Sequence
  Description of Artificial Sequence: Synthetic oligonucleotide
  Sense strand starting at position 3371 of SEQ ID NO: 1886322
ugcugauacucacuaagaa

SEQ ID NO: 2401777 - RNA, 19 nt, Artificial Sequence
  Description of Artificial Sequence: Synthetic oligonucleotide
  Antisense strand to SEQ ID NO: 2401776
uucuuagugaguaucagca

SEQ ID NO: 2401778 - RNA, 19 nt, Artificial Sequence
  Description of Artificial Sequence: Synthetic oligonucleotide
  Sense strand starting at position 3388 of SEQ ID NO: 1886322
aauguuguggcgucuacga

SEQ ID NO: 2401779 - RNA, 19 nt, Artificial Sequence
  Description of Artificial Sequence: Synthetic oligonucleotide
  Antisense strand to SEQ ID NO: 2401778
ucguagacgccacaacauu

SEQ ID NO: 2401780 - RNA, 19 nt, Artificial Sequence
  Description of Artificial Sequence: Synthetic oligonucleotide
  Sense strand starting at position 3483 of SEQ ID NO: 1886322
cugauuacuagguguuuga

SEQ ID NO: 2401781 - RNA, 19 nt, Artificial Sequence
  Description of Artificial Sequence: Synthetic oligonucleotide
  Antisense strand to SEQ ID NO: 2401780
ucaaacaccuaguaaucag

SEQ ID NO: 2401782 - RNA, 19 nt, Artificial Sequence
  Description of Artificial Sequence: Synthetic oligonucleotide
  Sense strand starting at position 3519 of SEQ ID NO: 1886322
cuuaaaucauugucaugua

SEQ ID NO: 2401783 - RNA, 19 nt, Artificial Sequence
  Description of Artificial Sequence: Synthetic oligonucleotide
  Antisense strand to SEQ ID NO: 2401782
uacaugacaaugauuuaag

SEQ ID NO: 2401784 - RNA, 19 nt, Artificial Sequence
  Description of Artificial Sequence: Synthetic oligonucleotide
  Sense strand starting at position 3532 of SEQ ID NO: 1886322
cauguaauucccgaagaua

SEQ ID NO: 2401785 - RNA, 19 nt, Artificial Sequence
  Description of Artificial Sequence: Synthetic oligonucleotide
  Antisense strand to SEQ ID NO: 2401784
uaucuucgggaauuacaug

SEQ ID NO: 2401786 - RNA, 19 nt, Artificial Sequence
  Description of Artificial Sequence: Synthetic oligonucleotide
  Sense strand starting at position 3535 of SEQ ID NO: 1886322
guaauucccgaagauauau

SEQ ID NO: 2401787 - RNA, 19 nt, Artificial Sequence
  Description of Artificial Sequence: Synthetic oligonucleotide
  Antisense strand to SEQ ID NO: 2401786
auauaucuucgggaauuac

SEQ ID NO: 2401788 - RNA, 19 nt, Artificial Sequence
  Description of Artificial Sequence: Synthetic oligonucleotide
  Sense strand starting at position 3605 of SEQ ID NO: 1886322
guaccaguuccugaccaaa

SEQ ID NO: 2401789 - RNA, 19 nt, Artificial Sequence
  Description of Artificial Sequence: Synthetic oligonucleotide
  Antisense strand to SEQ ID NO: 2401788
uuuggucaggaacugguac

SEQ ID NO: 2401790 - RNA, 19 nt, Artificial Sequence
  Description of Artificial Sequence: Synthetic oligonucleotide
  Sense strand starting at position 3766 of SEQ ID NO: 1886322
ggaccuuaagccugagaua

SEQ ID NO: 2401791 - RNA, 19 nt, Artificial Sequence
  Description of Artificial Sequence: Synthetic oligonucleotide
  Antisense strand to SEQ ID NO: 2401790
uaucucaggcuuaaggucc

SEQ ID NO: 2401792 - RNA, 19 nt, Artificial Sequence
  Description of Artificial Sequence: Synthetic oligonucleotide
  Sense strand starting at position 3876 of SEQ ID NO: 1886322
ccagucucaugacugacaa

SEQ ID NO: 2401793 - RNA, 19 nt, Artificial Sequence
  Description of Artificial Sequence: Synthetic oligonucleotide
  Antisense strand to SEQ ID NO: 2401792
uugucagucaugagacugg

SEQ ID NO: 2401794 - RNA, 19 nt, Artificial Sequence
  Description of Artificial Sequence: Synthetic oligonucleotide
  Sense strand starting at position 61 of SEQ ID NO: 1886323
cuucgaucacuggauguga

SEQ ID NO: 2401795 - RNA, 19 nt, Artificial Sequence
  Description of Artificial Sequence: Synthetic oligonucleotide
  Antisense strand to SEQ ID NO: 2401794
ucacauccagugaucgaag

SEQ ID NO: 2401796 - RNA, 19 nt, Artificial Sequence
  Description of Artificial Sequence: Synthetic oligonucleotide
  Sense strand starting at position 293 of SEQ ID NO: 1886323
gucugaaacuuggcaucaa

SEQ ID NO: 2401797 - RNA, 19 nt, Artificial Sequence
  Description of Artificial Sequence: Synthetic oligonucleotide
  Antisense strand to SEQ ID NO: 2401796
uugaugccaaguuucagac

SEQ ID NO: 2401798 - RNA, 19 nt, Artificial Sequence
  Description of Artificial Sequence: Synthetic oligonucleotide
  Sense strand starting at position 437 of SEQ ID NO: 1886323
ggacgucccuaccugaauu

SEQ ID NO: 2401799 - RNA, 19 nt, Artificial Sequence
  Description of Artificial Sequence: Synthetic oligonucleotide
  Antisense strand to SEQ ID NO: 2401798
aauucagguagggacgucc

SEQ ID NO: 2401800 - RNA, 19 nt, Artificial Sequence
  Description of Artificial Sequence: Synthetic oligonucleotide
  Sense strand starting at position 730 of SEQ ID NO: 1886323
cuggcugcacugugaauuu

SEQ ID NO: 2401801 - RNA, 19 nt, Artificial Sequence
  Description of Artificial Sequence: Synthetic oligonucleotide
  Antisense strand to SEQ ID NO: 2401800
aaauucacagugcagccag

SEQ ID NO: 2401802 - RNA, 19 nt, Artificial Sequence
  Description of Artificial Sequence: Synthetic oligonucleotide
  Sense strand starting at position 775 of SEQ ID NO: 1886323
ucaucaugcauagggagua

SEQ ID NO: 2401803 - RNA, 19 nt, Artificial Sequence
  Description of Artificial Sequence: Synthetic oligonucleotide
  Antisense strand to SEQ ID NO: 2401802
uacucccuaugcaugauga

SEQ ID NO: 2401804 - RNA, 19 nt, Artificial Sequence
  Description of Artificial Sequence: Synthetic oligonucleotide
  Sense strand starting at position 851 of SEQ ID NO: 1886323
aagagacuuuccguggcaa

SEQ ID NO: 2401805 - RNA, 19 nt, Artificial Sequence
  Description of Artificial Sequence: Synthetic oligonucleotide
  Antisense strand to SEQ ID NO: 2401804
uugccacggaaagucucuu

SEQ ID NO: 2401806 - RNA, 19 nt, Artificial Sequence
  Description of Artificial Sequence: Synthetic oligonucleotide
  Sense strand starting at position 852 of SEQ ID NO: 1886323
agagacuuuccguggcaac

SEQ ID NO: 2401807 - RNA, 19 nt, Artificial Sequence
  Description of Artificial Sequence: Synthetic oligonucleotide
  Antisense strand to SEQ ID NO: 2401806
guugccacggaaagucucu

SEQ ID NO: 2401808 - RNA, 19 nt, Artificial Sequence
  Description of Artificial Sequence: Synthetic oligonucleotide
  Sense strand starting at position 853 of SEQ ID NO: 1886323
gagacuuuccguggcaaca

SEQ ID NO: 2401809 - RNA, 19 nt, Artificial Sequence
  Description of Artificial Sequence: Synthetic oligonucleotide
  Antisense strand to SEQ ID NO: 2401808
uguugccacggaaagucuc

SEQ ID NO: 2401810 - RNA, 19 nt, Artificial Sequence
  Description of Artificial Sequence: Synthetic oligonucleotide
  Sense strand starting at position 887 of SEQ ID NO: 1886323
acgcauugcccggaaugga

SEQ ID NO: 2401811 - RNA, 19 nt, Artificial Sequence
  Description of Artificial Sequence: Synthetic oligonucleotide
  Antisense strand to SEQ ID NO: 2401810
uccauuccgggcaaugcgu

SEQ ID NO: 2401812 - RNA, 19 nt, Artificial Sequence
  Description of Artificial Sequence: Synthetic oligonucleotide
  Sense strand starting at position 1035 of SEQ ID NO: 1886323
agcaguauuugcucacaca

SEQ ID NO: 2401813 - RNA, 19 nt, Artificial Sequence
  Description of Artificial Sequence: Synthetic oligonucleotide
  Antisense strand to SEQ ID NO: 2401812
ugugugagcaaauacugcu

SEQ ID NO: 2401814 - RNA, 19 nt, Artificial Sequence
  Description of Artificial Sequence: Synthetic oligonucleotide
  Sense strand starting at position 1106 of SEQ ID NO: 1886323
ggaagauguacacaacggu

SEQ ID NO: 2401815 - RNA, 19 nt, Artificial Sequence
  Description of Artificial Sequence: Synthetic oligonucleotide
  Antisense strand to SEQ ID NO: 2401814
accguuguguacaucuucc

SEQ ID NO: 2401816 - RNA, 19 nt, Artificial Sequence
  Description of Artificial Sequence: Synthetic oligonucleotide
  Sense strand starting at position 1128 of SEQ ID NO: 1886323
gcccauuacucugccagga

SEQ ID NO: 2401817 - RNA, 19 nt, Artificial Sequence
  Description of Artificial Sequence: Synthetic oligonucleotide
  Antisense strand to SEQ ID NO: 2401816
uccuggcagaguaaugggc

SEQ ID NO: 2401818 - RNA, 19 nt, Artificial Sequence
  Description of Artificial Sequence: Synthetic oligonucleotide
  Sense strand starting at position 1132 of SEQ ID NO: 1886323
auuacucugccaggaagau

SEQ ID NO: 2401819 - RNA, 19 nt, Artificial Sequence
  Description of Artificial Sequence: Synthetic oligonucleotide
  Antisense strand to SEQ ID NO: 2401818
aucuuccuggcagaguaau

SEQ ID NO: 2401820 - RNA, 19 nt, Artificial Sequence
  Description of Artificial Sequence: Synthetic oligonucleotide
  Sense strand starting at position 1345 of SEQ ID NO: 1886323
gagaauauguccuacccag

SEQ ID NO: 2401821 - RNA, 19 nt, Artificial Sequence
  Description of Artificial Sequence: Synthetic oligonucleotide
  Antisense strand to SEQ ID NO: 2401820
cuggguaggacauauucuc

SEQ ID NO: 2401822 - RNA, 19 nt, Artificial Sequence
  Description of Artificial Sequence: Synthetic oligonucleotide
  Sense strand starting at position 1575 of SEQ ID NO: 1886323
ccucauacucucuguagua

SEQ ID NO: 2401823 - RNA, 19 nt, Artificial Sequence
  Description of Artificial Sequence: Synthetic oligonucleotide
  Antisense strand to SEQ ID NO: 2401822
uacuacagagaguaugagg

SEQ ID NO: 2401824 - RNA, 19 nt, Artificial Sequence
  Description of Artificial Sequence: Synthetic oligonucleotide
  Sense strand starting at position 1679 of SEQ ID NO: 1886323
cuccucuaggccugagauu

SEQ ID NO: 2401825 - RNA, 19 nt, Artificial Sequence
  Description of Artificial Sequence: Synthetic oligonucleotide
  Antisense strand to SEQ ID NO: 2401824
aaucucaggccuagaggag

SEQ ID NO: 2401826 - RNA, 19 nt, Artificial Sequence
  Description of Artificial Sequence: Synthetic oligonucleotide
  Sense strand starting at position 1746 of SEQ ID NO: 1886323
cuccgugacucuccuaaca

SEQ ID NO: 2401827 - RNA, 19 nt, Artificial Sequence
  Description of Artificial Sequence: Synthetic oligonucleotide
  Antisense strand to SEQ ID NO: 2401826
uguuaggagagucacggag

SEQ ID NO: 2401828 - RNA, 19 nt, Artificial Sequence
  Description of Artificial Sequence: Synthetic oligonucleotide
  Sense strand starting at position 1779 of SEQ ID NO: 1886323
aagggaauguuccuaaugu

SEQ ID NO: 2401829 - RNA, 19 nt, Artificial Sequence
  Description of Artificial Sequence: Synthetic oligonucleotide
  Antisense strand to SEQ ID NO: 2401828
acauuaggaacauucccuu

SEQ ID NO: 2401830 - RNA, 19 nt, Artificial Sequence
  Description of Artificial Sequence: Synthetic oligonucleotide
  Sense strand starting at position 1798 of SEQ ID NO: 1886323
gcgugugauggcagacauu

SEQ ID NO: 2401831 - RNA, 19 nt, Artificial Sequence
  Description of Artificial Sequence: Synthetic oligonucleotide
  Antisense strand to SEQ ID NO: 2401830
aaugucugccaucacacgc

SEQ ID NO: 2401832 - RNA, 19 nt, Artificial Sequence
  Description of Artificial Sequence: Synthetic oligonucleotide
  Sense strand starting at position 2094 of SEQ ID NO: 1886323
gaaccauggcacugagcaa

SEQ ID NO: 2401833 - RNA, 19 nt, Artificial Sequence
  Description of Artificial Sequence: Synthetic oligonucleotide
  Antisense strand to SEQ ID NO: 2401832
uugcucagugccaugguuc

SEQ ID NO: 2401834 - RNA, 19 nt, Artificial Sequence
  Description of Artificial Sequence: Synthetic oligonucleotide
  Sense strand starting at position 2171 of SEQ ID NO: 1886323
gaaacagcucauuaugggu

SEQ ID NO: 2401835 - RNA, 19 nt, Artificial Sequence
  Description of Artificial Sequence: Synthetic oligonucleotide
  Antisense strand to SEQ ID NO: 2401834
acccauaaugagcuguuuc

SEQ ID NO: 2401836 - RNA, 19 nt, Artificial Sequence
  Description of Artificial Sequence: Synthetic oligonucleotide
  Sense strand starting at position 2238 of SEQ ID NO: 1886323
gcuuaccauccugagcaau

SEQ ID NO: 2401837 - RNA, 19 nt, Artificial Sequence
  Description of Artificial Sequence: Synthetic oligonucleotide
  Antisense strand to SEQ ID NO: 2401836
auugcucaggaugguaagc

SEQ ID NO: 2401838 - RNA, 19 nt, Artificial Sequence
  Description of Artificial Sequence: Synthetic oligonucleotide
  Sense strand starting at position 2313 of SEQ ID NO: 1886323
gggccuuugugguucagaa

SEQ ID NO: 2401839 - RNA, 19 nt, Artificial Sequence
  Description of Artificial Sequence: Synthetic oligonucleotide
  Antisense strand to SEQ ID NO: 2401838
uucugaaccacaaaggccc

SEQ ID NO: 2401840 - RNA, 19 nt, Artificial Sequence
  Description of Artificial Sequence: Synthetic oligonucleotide
  Sense strand starting at position 2404 of SEQ ID NO: 1886323
aaauguacgcuugagaaac

SEQ ID NO: 2401841 - RNA, 19 nt, Artificial Sequence
  Description of Artificial Sequence: Synthetic oligonucleotide
  Antisense strand to SEQ ID NO: 2401840
guuucucaagcguacauuu

SEQ ID NO: 2401842 - RNA, 19 nt, Artificial Sequence
  Description of Artificial Sequence: Synthetic oligonucleotide
  Sense strand starting at position 2490 of SEQ ID NO: 1886323
ucuguuggccuccaugagu

SEQ ID NO: 2401843 - RNA, 19 nt, Artificial Sequence
  Description of Artificial Sequence: Synthetic oligonucleotide
  Antisense strand to SEQ ID NO: 2401842
acucauggaggccaacaga

SEQ ID NO: 2401844 - RNA, 19 nt, Artificial Sequence
  Description of Artificial Sequence: Synthetic oligonucleotide
  Sense strand starting at position 2508 of SEQ ID NO: 1886323
ugaccucuguuuccaugaa

SEQ ID NO: 2401845 - RNA, 19 nt, Artificial Sequence
  Description of Artificial Sequence: Synthetic oligonucleotide
  Antisense strand to SEQ ID NO: 2401844
uucauggaaacagagguca

SEQ ID NO: 2401846 - RNA, 19 nt, Artificial Sequence
  Description of Artificial Sequence: Synthetic oligonucleotide
  Sense strand starting at position 2512 of SEQ ID NO: 1886323
cucuguuuccaugaaugua

SEQ ID NO: 2401847 - RNA, 19 nt, Artificial Sequence
  Description of Artificial Sequence: Synthetic oligonucleotide
  Antisense strand to SEQ ID NO: 2401846
uacauucauggaaacagag

SEQ ID NO: 2401848 - RNA, 19 nt, Artificial Sequence
  Description of Artificial Sequence: Synthetic oligonucleotide
  Sense strand starting at position 2522 of SEQ ID NO: 1886323
augaauguaccuuaccagu

SEQ ID NO: 2401849 - RNA, 19 nt, Artificial Sequence
  Description of Artificial Sequence: Synthetic oligonucleotide
  Antisense strand to SEQ ID NO: 2401848
acugguaagguacauucau

SEQ ID NO: 2401850 - RNA, 19 nt, Artificial Sequence
  Description of Artificial Sequence: Synthetic oligonucleotide
  Sense strand starting at position 2657 of SEQ ID NO: 1886323
uguguuucccaacacgagu

SEQ ID NO: 2401851 - RNA, 19 nt, Artificial Sequence
  Description of Artificial Sequence: Synthetic oligonucleotide
  Antisense strand to SEQ ID NO: 2401850
acucguguugggaaacaca

SEQ ID NO: 2401852 - RNA, 19 nt, Artificial Sequence
  Description of Artificial Sequence: Synthetic oligonucleotide
  Sense strand starting at position 2671 of SEQ ID NO: 1886323
cgaguuucccaacauggca

SEQ ID NO: 2401853 - RNA, 19 nt, Artificial Sequence
  Description of Artificial Sequence: Synthetic oligonucleotide
  Antisense strand to SEQ ID NO: 2401852
ugccauguugggaaacucg

SEQ ID NO: 2401854 - RNA, 19 nt, Artificial Sequence
  Description of Artificial Sequence: Synthetic oligonucleotide
  Sense strand starting at position 2870 of SEQ ID NO: 1886323
aucugaugucgugaccaga

SEQ ID NO: 2401855 - RNA, 19 nt, Artificial Sequence
  Description of Artificial Sequence: Synthetic oligonucleotide
  Antisense strand to SEQ ID NO: 2401854
ucuggucacgacaucagau

SEQ ID NO: 2401856 - RNA, 19 nt, Artificial Sequence
  Description of Artificial Sequence: Synthetic oligonucleotide
  Sense strand starting at position 3081 of SEQ ID NO: 1886323
gcaccauguccucaggaca

SEQ ID NO: 2401857 - RNA, 19 nt, Artificial Sequence
  Description of Artificial Sequence: Synthetic oligonucleotide
  Antisense strand to SEQ ID NO: 2401856
uguccugaggacauggugc

SEQ ID NO: 2401858 - RNA, 19 nt, Artificial Sequence
  Description of Artificial Sequence: Synthetic oligonucleotide
  Sense strand starting at position 3125 of SEQ ID NO: 1886323
augggacaucccugccuaa

SEQ ID NO: 2401859 - RNA, 19 nt, Artificial Sequence
  Description of Artificial Sequence: Synthetic oligonucleotide
  Antisense strand to SEQ ID NO: 2401858
uuaggcagggaugucccau

SEQ ID NO: 2401860 - RNA, 19 nt, Artificial Sequence
  Description of Artificial Sequence: Synthetic oligonucleotide
  Sense strand starting at position 3546 of SEQ ID NO: 1886323
gaaggcaccuaggauuaaa

SEQ ID NO: 2401861 - RNA, 19 nt, Artificial Sequence
  Description of Artificial Sequence: Synthetic oligonucleotide
  Antisense strand to SEQ ID NO: 2401860
uuuaauccuaggugccuuc

SEQ ID NO: 2401862 - RNA, 19 nt, Artificial Sequence
  Description of Artificial Sequence: Synthetic oligonucleotide
  Sense strand starting at position 3658 of SEQ ID NO: 1886323
gcacauucccucugaaagu

SEQ ID NO: 2401863 - RNA, 19 nt, Artificial Sequence
  Description of Artificial Sequence: Synthetic oligonucleotide
  Antisense strand to SEQ ID NO: 2401862
acuuucagagggaaugugc

SEQ ID NO: 2401864 - RNA, 19 nt, Artificial Sequence
  Description of Artificial Sequence: Synthetic oligonucleotide
  Sense strand starting at position 3720 of SEQ ID NO: 1886323
agcaguuauuugcucacaa

SEQ ID NO: 2401865 - RNA, 19 nt, Artificial Sequence
  Description of Artificial Sequence: Synthetic oligonucleotide
  Antisense strand to SEQ ID NO: 2401864
uugugagcaaauaacugcu

SEQ ID NO: 2401866 - RNA, 19 nt, Artificial Sequence
  Description of Artificial Sequence: Synthetic oligonucleotide
  Sense strand starting at position 3721 of SEQ ID NO: 1886323
gcaguuauuugcucacaag

SEQ ID NO: 2401867 - RNA, 19 nt, Artificial Sequence
  Description of Artificial Sequence: Synthetic oligonucleotide
  Antisense strand to SEQ ID NO: 2401866
cuugugagcaaauaacugc

SEQ ID NO: 2401868 - RNA, 19 nt, Artificial Sequence
  Description of Artificial Sequence: Synthetic oligonucleotide
  Sense strand starting at position 3792 of SEQ ID NO: 1886323
ggaagaugugcacaacggu

SEQ ID NO: 2401869 - RNA, 19 nt, Artificial Sequence
  Description of Artificial Sequence: Synthetic oligonucleotide
  Antisense strand to SEQ ID NO: 2401868
accguugugcacaucuucc

SEQ ID NO: 2401870 - RNA, 19 nt, Artificial Sequence
  Description of Artificial Sequence: Synthetic oligonucleotide
  Sense strand starting at position 3817 of SEQ ID NO: 1886323
cacuauucugccgggaaga

SEQ ID NO: 2401871 - RNA, 19 nt, Artificial Sequence
  Description of Artificial Sequence: Synthetic oligonucleotide
  Antisense strand to SEQ ID NO: 2401870
ucuucccggcagaauagug

SEQ ID NO: 2401872 - RNA, 19 nt, Artificial Sequence
  Description of Artificial Sequence: Synthetic oligonucleotide
  Sense strand starting at position 3818 of SEQ ID NO: 1886323
acuauucugccgggaagac

SEQ ID NO: 2401873 - RNA, 19 nt, Artificial Sequence
  Description of Artificial Sequence: Synthetic oligonucleotide
  Antisense strand to SEQ ID NO: 2401872
gucuucccggcagaauagu

SEQ ID NO: 2401874 - RNA, 19 nt, Artificial Sequence
  Description of Artificial Sequence: Synthetic oligonucleotide
  Sense strand starting at position 104 of SEQ ID NO: 1886324
ucaauaggaugugaacuuu

SEQ ID NO: 2401875 - RNA, 19 nt, Artificial Sequence
  Description of Artificial Sequence: Synthetic oligonucleotide
  Antisense strand to SEQ ID NO: 2401874
aaaguucacauccuauuga

SEQ ID NO: 2401876 - RNA, 19 nt, Artificial Sequence
  Description of Artificial Sequence: Synthetic oligonucleotide
  Sense strand starting at position 499 of SEQ ID NO: 1886324
cagacaggacauugucauu

SEQ ID NO: 2401877 - RNA, 19 nt, Artificial Sequence
  Description of Artificial Sequence: Synthetic oligonucleotide
  Antisense strand to SEQ ID NO: 2401876
aaugacaauguccugucug

SEQ ID NO: 2401878 - RNA, 19 nt, Artificial Sequence
  Description of Artificial Sequence: Synthetic oligonucleotide
  Sense strand starting at position 504 of SEQ ID NO: 1886324
aggacauugucauuauccu

SEQ ID NO: 2401879 - RNA, 19 nt, Artificial Sequence
  Description of Artificial Sequence: Synthetic oligonucleotide
  Antisense strand to SEQ ID NO: 2401878
aggauaaugacaauguccu

SEQ ID NO: 2401880 - RNA, 19 nt, Artificial Sequence
  Description of Artificial Sequence: Synthetic oligonucleotide
  Sense strand starting at position 505 of SEQ ID NO: 1886324
ggacauugucauuauccuu

SEQ ID NO: 2401881 - RNA, 19 nt, Artificial Sequence
  Description of Artificial Sequence: Synthetic oligonucleotide
  Antisense strand to SEQ ID NO: 2401880
aaggauaaugacaaugucc

SEQ ID NO: 2401882 - RNA, 19 nt, Artificial Sequence
  Description of Artificial Sequence: Synthetic oligonucleotide
  Sense strand starting at position 510 of SEQ ID NO: 1886324
uugucauuauccuugcauu

SEQ ID NO: 2401883 - RNA, 19 nt, Artificial Sequence
  Description of Artificial Sequence: Synthetic oligonucleotide
  Antisense strand to SEQ ID NO: 2401882
aaugcaaggauaaugacaa

SEQ ID NO: 2401884 - RNA, 19 nt, Artificial Sequence
  Description of Artificial Sequence: Synthetic oligonucleotide
  Sense strand starting at position 511 of SEQ ID NO: 1886324
ugucauuauccuugcauua

SEQ ID NO: 2401885 - RNA, 19 nt, Artificial Sequence
  Description of Artificial Sequence: Synthetic oligonucleotide
  Antisense strand to SEQ ID NO: 2401884
uaaugcaaggauaaugaca

SEQ ID NO: 2401886 - RNA, 19 nt, Artificial Sequence
  Description of Artificial Sequence: Synthetic oligonucleotide
  Sense strand starting at position 723 of SEQ ID NO: 1886324
acuguaugcccuugaaagu

SEQ ID NO: 2401887 - RNA, 19 nt, Artificial Sequence
  Description of Artificial Sequence: Synthetic oligonucleotide
  Antisense strand to SEQ ID NO: 2401886
acuuucaagggcauacagu

SEQ ID NO: 2401888 - RNA, 19 nt, Artificial Sequence
  Description of Artificial Sequence: Synthetic oligonucleotide
  Sense strand starting at position 788 of SEQ ID NO: 1886324
gcugaaaugcuuuaucacg

SEQ ID NO: 2401889 - RNA, 19 nt, Artificial Sequence
  Description of Artificial Sequence: Synthetic oligonucleotide
  Antisense strand to SEQ ID NO: 2401888
cgugauaaagcauuucagc

SEQ ID NO: 2401890 - RNA, 19 nt, Artificial Sequence
  Description of Artificial Sequence: Synthetic oligonucleotide
  Sense strand starting at position 873 of SEQ ID NO: 1886324
ucaagacucucuguggcaa

SEQ ID NO: 2401891 - RNA, 19 nt, Artificial Sequence
  Description of Artificial Sequence: Synthetic oligonucleotide
  Antisense strand to SEQ ID NO: 2401890
uugccacagagagucuuga

SEQ ID NO: 2401892 - RNA, 19 nt, Artificial Sequence
  Description of Artificial Sequence: Synthetic oligonucleotide
  Sense strand starting at position 874 of SEQ ID NO: 1886324
caagacucucuguggcaau

SEQ ID NO: 2401893 - RNA, 19 nt, Artificial Sequence
  Description of Artificial Sequence: Synthetic oligonucleotide
  Antisense strand to SEQ ID NO: 2401892
auugccacagagagucuug

SEQ ID NO: 2401894 - RNA, 19 nt, Artificial Sequence
  Description of Artificial Sequence: Synthetic oligonucleotide
  Sense strand starting at position 928 of SEQ ID NO: 1886324
cauagaucuccacggguag

SEQ ID NO: 2401895 - RNA, 19 nt, Artificial Sequence
  Description of Artificial Sequence: Synthetic oligonucleotide
  Antisense strand to SEQ ID NO: 2401894
cuacccguggagaucuaug

SEQ ID NO: 2401896 - RNA, 19 nt, Artificial Sequence
  Description of Artificial Sequence: Synthetic oligonucleotide
  Sense strand starting at position 1139 of SEQ ID NO: 1886324
ccuacucugcugggaacaa

SEQ ID NO: 2401897 - RNA, 19 nt, Artificial Sequence
  Description of Artificial Sequence: Synthetic oligonucleotide
  Antisense strand to SEQ ID NO: 2401896
uuguucccagcagaguagg

SEQ ID NO: 2401898 - RNA, 19 nt, Artificial Sequence
  Description of Artificial Sequence: Synthetic oligonucleotide
  Sense strand starting at position 1297 of SEQ ID NO: 1886324
cacacucauguccacgaga

SEQ ID NO: 2401899 - RNA, 19 nt, Artificial Sequence
  Description of Artificial Sequence: Synthetic oligonucleotide
  Antisense strand to SEQ ID NO: 2401898
ucucguggacaugagugug

SEQ ID NO: 2401900 - RNA, 19 nt, Artificial Sequence
  Description of Artificial Sequence: Synthetic oligonucleotide
  Sense strand starting at position 1594 of SEQ ID NO: 1886324
gagaccuuguccucugcau

SEQ ID NO: 2401901 - RNA, 19 nt, Artificial Sequence
  Description of Artificial Sequence: Synthetic oligonucleotide
  Antisense strand to SEQ ID NO: 2401900
augcagaggacaaggucuc

SEQ ID NO: 2401902 - RNA, 19 nt, Artificial Sequence
  Description of Artificial Sequence: Synthetic oligonucleotide
  Sense strand starting at position 1600 of SEQ ID NO: 1886324
uuguccucugcauggagau

SEQ ID NO: 2401903 - RNA, 19 nt, Artificial Sequence
  Description of Artificial Sequence: Synthetic oligonucleotide
  Antisense strand to SEQ ID NO: 2401902
aucuccaugcagaggacaa

SEQ ID NO: 2401904 - RNA, 19 nt, Artificial Sequence
  Description of Artificial Sequence: Synthetic oligonucleotide
  Sense strand starting at position 1780 of SEQ ID NO: 1886324
gagggaauguuccuaacga

SEQ ID NO: 2401905 - RNA, 19 nt, Artificial Sequence
  Description of Artificial Sequence: Synthetic oligonucleotide
  Antisense strand to SEQ ID NO: 2401904
ucguuaggaacauucccuc

SEQ ID NO: 2401906 - RNA, 19 nt, Artificial Sequence
  Description of Artificial Sequence: Synthetic oligonucleotide
  Sense strand starting at position 1795 of SEQ ID NO: 1886324
acgaguauuucaugggaga

SEQ ID NO: 2401907 - RNA, 19 nt, Artificial Sequence
  Description of Artificial Sequence: Synthetic oligonucleotide
  Antisense strand to SEQ ID NO: 2401906
ucucccaugaaauacucgu

SEQ ID NO: 2401908 - RNA, 19 nt, Artificial Sequence
  Description of Artificial Sequence: Synthetic oligonucleotide
  Sense strand starting at position 2054 of SEQ ID NO: 1886324
agccgaugacguuaaagaa

SEQ ID NO: 2401909 - RNA, 19 nt, Artificial Sequence
  Description of Artificial Sequence: Synthetic oligonucleotide
  Antisense strand to SEQ ID NO: 2401908
uucuuuaacgucaucggcu

SEQ ID NO: 2401910 - RNA, 19 nt, Artificial Sequence
  Description of Artificial Sequence: Synthetic oligonucleotide
  Sense strand starting at position 2154 of SEQ ID NO: 1886324
ccauuaauggccugccaag

SEQ ID NO: 2401911 - RNA, 19 nt, Artificial Sequence
  Description of Artificial Sequence: Synthetic oligonucleotide
  Antisense strand to SEQ ID NO: 2401910
cuuggcaggccauuaaugg

SEQ ID NO: 2401912 - RNA, 19 nt, Artificial Sequence
  Description of Artificial Sequence: Synthetic oligonucleotide
  Sense strand starting at position 2372 of SEQ ID NO: 1886324
cggcaacugucccugagaa

SEQ ID NO: 2401913 - RNA, 19 nt, Artificial Sequence
  Description of Artificial Sequence: Synthetic oligonucleotide
  Antisense strand to SEQ ID NO: 2401912
uucucagggacaguugccg

SEQ ID NO: 2401914 - RNA, 19 nt, Artificial Sequence
  Description of Artificial Sequence: Synthetic oligonucleotide
  Sense strand starting at position 2373 of SEQ ID NO: 1886324
ggcaacugucccugagaag

SEQ ID NO: 2401915 - RNA, 19 nt, Artificial Sequence
  Description of Artificial Sequence: Synthetic oligonucleotide
  Antisense strand to SEQ ID NO: 2401914
cuucucagggacaguugcc

SEQ ID NO: 2401916 - RNA, 19 nt, Artificial Sequence
  Description of Artificial Sequence: Synthetic oligonucleotide
  Sense strand starting at position 2374 of SEQ ID NO: 1886324
gcaacugucccugagaagu

SEQ ID NO: 2401917 - RNA, 19 nt, Artificial Sequence
  Description of Artificial Sequence: Synthetic oligonucleotide
  Antisense strand to SEQ ID NO: 2401916
acuucucagggacaguugc

SEQ ID NO: 2401918 - RNA, 19 nt, Artificial Sequence
  Description of Artificial Sequence: Synthetic oligonucleotide
  Sense strand starting at position 2380 of SEQ ID NO: 1886324
gucccugagaaguguaaag

SEQ ID NO: 2401919 - RNA, 19 nt, Artificial Sequence
  Description of Artificial Sequence: Synthetic oligonucleotide
  Antisense strand to SEQ ID NO: 2401918
cuuuacacuucucagggac

SEQ ID NO: 2401920 - RNA, 19 nt, Artificial Sequence
  Description of Artificial Sequence: Synthetic oligonucleotide
  Sense strand starting at position 2723 of SEQ ID NO: 1886324
gugagaauguuaguuuaaa

SEQ ID NO: 2401921 - RNA, 19 nt, Artificial Sequence
  Description of Artificial Sequence: Synthetic oligonucleotide
  Antisense strand to SEQ ID NO: 2401920
uuuaaacuaacauucucac

SEQ ID NO: 2401922 - RNA, 19 nt, Artificial Sequence
  Description of Artificial Sequence: Synthetic oligonucleotide
  Sense strand starting at position 2734 of SEQ ID NO: 1886324
aguuuaaaugggcauguuu

SEQ ID NO: 2401923 - RNA, 19 nt, Artificial Sequence
  Description of Artificial Sequence: Synthetic oligonucleotide
  Antisense strand to SEQ ID NO: 2401922
aaacaugcccauuuaaacu

SEQ ID NO: 2401924 - RNA, 19 nt, Artificial Sequence
  Description of Artificial Sequence: Synthetic oligonucleotide
  Sense strand starting at position 2743 of SEQ ID NO: 1886324
gggcauguuugucucccua

SEQ ID NO: 2401925 - RNA, 19 nt, Artificial Sequence
  Description of Artificial Sequence: Synthetic oligonucleotide
  Antisense strand to SEQ ID NO: 2401924
uagggagacaaacaugccc

SEQ ID NO: 2401926 - RNA, 19 nt, Artificial Sequence
  Description of Artificial Sequence: Synthetic oligonucleotide
  Sense strand starting at position 2745 of SEQ ID NO: 1886324
gcauguuugucucccuaau

SEQ ID NO: 2401927 - RNA, 19 nt, Artificial Sequence
  Description of Artificial Sequence: Synthetic oligonucleotide
  Antisense strand to SEQ ID NO: 2401926
auuagggagacaaacaugc

SEQ ID NO: 2401928 - RNA, 19 nt, Artificial Sequence
  Description of Artificial Sequence: Synthetic oligonucleotide
  Sense strand starting at position 2856 of SEQ ID NO: 1886324
cuucgaucacuggauguga

SEQ ID NO: 2401929 - RNA, 19 nt, Artificial Sequence
  Description of Artificial Sequence: Synthetic oligonucleotide
  Antisense strand to SEQ ID NO: 2401928
ucacauccagugaucgaag

SEQ ID NO: 2401930 - RNA, 19 nt, Artificial Sequence
  Description of Artificial Sequence: Synthetic oligonucleotide
  Sense strand starting at position 3088 of SEQ ID NO: 1886324
gucugaaacuuggcaucaa

SEQ ID NO: 2401931 - RNA, 19 nt, Artificial Sequence
  Description of Artificial Sequence: Synthetic oligonucleotide
  Antisense strand to SEQ ID NO: 2401930
uugaugccaaguuucagac

SEQ ID NO: 2401932 - RNA, 19 nt, Artificial Sequence
  Description of Artificial Sequence: Synthetic oligonucleotide
  Sense strand starting at position 3232 of SEQ ID NO: 1886324
ggacgucccuaccugaauu

SEQ ID NO: 2401933 - RNA, 19 nt, Artificial Sequence
  Description of Artificial Sequence: Synthetic oligonucleotide
  Antisense strand to SEQ ID NO: 2401932
aauucagguagggacgucc

SEQ ID NO: 2401934 - RNA, 19 nt, Artificial Sequence
  Description of Artificial Sequence: Synthetic oligonucleotide
  Sense strand starting at position 3525 of SEQ ID NO: 1886324
cuggcugcacugugaauuu

SEQ ID NO: 2401935 - RNA, 19 nt, Artificial Sequence
  Description of Artificial Sequence: Synthetic oligonucleotide
  Antisense strand to SEQ ID NO: 2401934
aaauucacagugcagccag

SEQ ID NO: 2401936 - RNA, 19 nt, Artificial Sequence
  Description of Artificial Sequence: Synthetic oligonucleotide
  Sense strand starting at position 3570 of SEQ ID NO: 1886324
ucaucaugcauagggagua

SEQ ID NO: 2401937 - RNA, 19 nt, Artificial Sequence
  Description of Artificial Sequence: Synthetic oligonucleotide
  Antisense strand to SEQ ID NO: 2401936
uacucccuaugcaugauga

SEQ ID NO: 2401938 - RNA, 19 nt, Artificial Sequence
  Description of Artificial Sequence: Synthetic oligonucleotide
  Sense strand starting at position 3646 of SEQ ID NO: 1886324
aagagacuuuccguggcaa

SEQ ID NO: 2401939 - RNA, 19 nt, Artificial Sequence
  Description of Artificial Sequence: Synthetic oligonucleotide
  Antisense strand to SEQ ID NO: 2401938
uugccacggaaagucucuu

SEQ ID NO: 2401940 - RNA, 19 nt, Artificial Sequence
  Description of Artificial Sequence: Synthetic oligonucleotide
  Sense strand starting at position 3647 of SEQ ID NO: 1886324
agagacuuuccguggcaac

SEQ ID NO: 2401941 - RNA, 19 nt, Artificial Sequence
  Description of Artificial Sequence: Synthetic oligonucleotide
  Antisense strand to SEQ ID NO: 2401940
guugccacggaaagucucu

SEQ ID NO: 2401942 - RNA, 19 nt, Artificial Sequence
  Description of Artificial Sequence: Synthetic oligonucleotide
  Sense strand starting at position 3648 of SEQ ID NO: 1886324
gagacuuuccguggcaaca

SEQ ID NO: 2401943 - RNA, 19 nt, Artificial Sequence
  Description of Artificial Sequence: Synthetic oligonucleotide
  Antisense strand to SEQ ID NO: 2401942
uguugccacggaaagucuc

SEQ ID NO: 2401944 - RNA, 19 nt, Artificial Sequence
  Description of Artificial Sequence: Synthetic oligonucleotide
  Sense strand starting at position 3682 of SEQ ID NO: 1886324
acgcauugcccggaaugga

SEQ ID NO: 2401945 - RNA, 19 nt, Artificial Sequence
  Description of Artificial Sequence: Synthetic oligonucleotide
  Antisense strand to SEQ ID NO: 2401944
uccauuccgggcaaugcgu

SEQ ID NO: 2401946 - RNA, 19 nt, Artificial Sequence
  Description of Artificial Sequence: Synthetic oligonucleotide
  Sense strand starting at position 3830 of SEQ ID NO: 1886324
agcaguauuugcucacaca

SEQ ID NO: 2401947 - RNA, 19 nt, Artificial Sequence
  Description of Artificial Sequence: Synthetic oligonucleotide
  Antisense strand to SEQ ID NO: 2401946
ugugugagcaaauacugcu

SEQ ID NO: 2401948 - RNA, 19 nt, Artificial Sequence
  Description of Artificial Sequence: Synthetic oligonucleotide
  Sense strand starting at position 3901 of SEQ ID NO: 1886324
ggaagauguacacaacggu

SEQ ID NO: 2401949 - RNA, 19 nt, Artificial Sequence
  Description of Artificial Sequence: Synthetic oligonucleotide
  Antisense strand to SEQ ID NO: 2401948
accguuguguacaucuucc

SEQ ID NO: 2401950 - RNA, 19 nt, Artificial Sequence
  Description of Artificial Sequence: Synthetic oligonucleotide
  Sense strand starting at position 3923 of SEQ ID NO: 1886324
gcccauuacucugccagga

SEQ ID NO: 2401951 - RNA, 19 nt, Artificial Sequence
  Description of Artificial Sequence: Synthetic oligonucleotide
  Antisense strand to SEQ ID NO: 2401950
uccuggcagaguaaugggc

SEQ ID NO: 2401952 - RNA, 19 nt, Artificial Sequence
  Description of Artificial Sequence: Synthetic oligonucleotide
  Sense strand starting at position 3927 of SEQ ID NO: 1886324
auuacucugccaggaagau

SEQ ID NO: 2401953 - RNA, 19 nt, Artificial Sequence
  Description of Artificial Sequence: Synthetic oligonucleotide
  Antisense strand to SEQ ID NO: 2401952
aucuuccuggcagaguaau

SEQ ID NO: 2401954 - RNA, 19 nt, Artificial Sequence
  Description of Artificial Sequence: Synthetic oligonucleotide
  Sense strand starting at position 84 of SEQ ID NO: 1886325
aucaguaggaugugaacuu

SEQ ID NO: 2401955 - RNA, 19 nt, Artificial Sequence
  Description of Artificial Sequence: Synthetic oligonucleotide
  Antisense strand to SEQ ID NO: 2401954
aaguucacauccuacugau

SEQ ID NO: 2401956 - RNA, 19 nt, Artificial Sequence
  Description of Artificial Sequence: Synthetic oligonucleotide
  Sense strand starting at position 91 of SEQ ID NO: 1886325
ggaugugaacuuugaccuu

SEQ ID NO: 2401957 - RNA, 19 nt, Artificial Sequence
  Description of Artificial Sequence: Synthetic oligonucleotide
  Antisense strand to SEQ ID NO: 2401956
aaggucaaaguucacaucc

SEQ ID NO: 2401958 - RNA, 19 nt, Artificial Sequence
  Description of Artificial Sequence: Synthetic oligonucleotide
  Sense strand starting at position 306 of SEQ ID NO: 1886325
guuugaaacucagugucaa

SEQ ID NO: 2401959 - RNA, 19 nt, Artificial Sequence
  Description of Artificial Sequence: Synthetic oligonucleotide
  Antisense strand to SEQ ID NO: 2401958
uugacacugaguuucaaac

SEQ ID NO: 2401960 - RNA, 19 nt, Artificial Sequence
  Description of Artificial Sequence: Synthetic oligonucleotide
  Sense strand starting at position 307 of SEQ ID NO: 1886325
uuugaaacucagugucaag

SEQ ID NO: 2401961 - RNA, 19 nt, Artificial Sequence
  Description of Artificial Sequence: Synthetic oligonucleotide
  Antisense strand to SEQ ID NO: 2401960
cuugacacugaguuucaaa

SEQ ID NO: 2401962 - RNA, 19 nt, Artificial Sequence
  Description of Artificial Sequence: Synthetic oligonucleotide
  Sense strand starting at position 498 of SEQ ID NO: 1886325
cugucaucauucuugcacu

SEQ ID NO: 2401963 - RNA, 19 nt, Artificial Sequence
  Description of Artificial Sequence: Synthetic oligonucleotide
  Antisense strand to SEQ ID NO: 2401962
agugcaagaaugaugacag

SEQ ID NO: 2401964 - RNA, 19 nt, Artificial Sequence
  Description of Artificial Sequence: Synthetic oligonucleotide
  Sense strand starting at position 854 of SEQ ID NO: 1886325
gagagacucucuguggcaa

SEQ ID NO: 2401965 - RNA, 19 nt, Artificial Sequence
  Description of Artificial Sequence: Synthetic oligonucleotide
  Antisense strand to SEQ ID NO: 2401964
uugccacagagagucucuc

SEQ ID NO: 2401966 - RNA, 19 nt, Artificial Sequence
  Description of Artificial Sequence: Synthetic oligonucleotide
  Sense strand starting at position 855 of SEQ ID NO: 1886325
agagacucucuguggcaau

SEQ ID NO: 2401967 - RNA, 19 nt, Artificial Sequence
  Description of Artificial Sequence: Synthetic oligonucleotide
  Antisense strand to SEQ ID NO: 2401966
auugccacagagagucucu

SEQ ID NO: 2401968 - RNA, 19 nt, Artificial Sequence
  Description of Artificial Sequence: Synthetic oligonucleotide
  Sense strand starting at position 1009 of SEQ ID NO: 1886325
uugcuuuccaagcgggaaa

SEQ ID NO: 2401969 - RNA, 19 nt, Artificial Sequence
  Description of Artificial Sequence: Synthetic oligonucleotide
  Antisense strand to SEQ ID NO: 2401968
uuucccgcuuggaaagcaa

SEQ ID NO: 2401970 - RNA, 19 nt, Artificial Sequence
  Description of Artificial Sequence: Synthetic oligonucleotide
  Sense strand starting at position 1038 of SEQ ID NO: 1886325
agcaguuauuugcucacau

SEQ ID NO: 2401971 - RNA, 19 nt, Artificial Sequence
  Description of Artificial Sequence: Synthetic oligonucleotide
  Antisense strand to SEQ ID NO: 2401970
augugagcaaauaacugcu

SEQ ID NO: 2401972 - RNA, 19 nt, Artificial Sequence
  Description of Artificial Sequence: Synthetic oligonucleotide
  Sense strand starting at position 1039 of SEQ ID NO: 1886325
gcaguuauuugcucacaug

SEQ ID NO: 2401973 - RNA, 19 nt, Artificial Sequence
  Description of Artificial Sequence: Synthetic oligonucleotide
  Antisense strand to SEQ ID NO: 2401972
caugugagcaaauaacugc

SEQ ID NO: 2401974 - RNA, 19 nt, Artificial Sequence
  Description of Artificial Sequence: Synthetic oligonucleotide
  Sense strand starting at position 1105 of SEQ ID NO: 1886325
uccagaaaggugugcacaa

SEQ ID NO: 2401975 - RNA, 19 nt, Artificial Sequence
  Description of Artificial Sequence: Synthetic oligonucleotide
  Antisense strand to SEQ ID NO: 2401974
uugugcacaccuuucugga

SEQ ID NO: 2401976 - RNA, 19 nt, Artificial Sequence
  Description of Artificial Sequence: Synthetic oligonucleotide
  Sense strand starting at position 1131 of SEQ ID NO: 1886325
gcccacuacucugcugaga

SEQ ID NO: 2401977 - RNA, 19 nt, Artificial Sequence
  Description of Artificial Sequence: Synthetic oligonucleotide
  Antisense strand to SEQ ID NO: 2401976
ucucagcagaguagugggc

SEQ ID NO: 2401978 - RNA, 19 nt, Artificial Sequence
  Description of Artificial Sequence: Synthetic oligonucleotide
  Sense strand starting at position 1190 of SEQ ID NO: 1886325
cucacuugcccagagacau

SEQ ID NO: 2401979 - RNA, 19 nt, Artificial Sequence
  Description of Artificial Sequence: Synthetic oligonucleotide
  Antisense strand to SEQ ID NO: 2401978
augucucugggcaagugag

SEQ ID NO: 2401980 - RNA, 19 nt, Artificial Sequence
  Description of Artificial Sequence: Synthetic oligonucleotide
  Sense strand starting at position 1381 of SEQ ID NO: 1886325
ucaucucauggcuagggau

SEQ ID NO: 2401981 - RNA, 19 nt, Artificial Sequence
  Description of Artificial Sequence: Synthetic oligonucleotide
  Antisense strand to SEQ ID NO: 2401980
aucccuagccaugagauga

SEQ ID NO: 2401982 - RNA, 19 nt, Artificial Sequence
  Description of Artificial Sequence: Synthetic oligonucleotide
  Sense strand starting at position 1595 of SEQ ID NO: 1886325
gugaccugguccucuacau

SEQ ID NO: 2401983 - RNA, 19 nt, Artificial Sequence
  Description of Artificial Sequence: Synthetic oligonucleotide
  Antisense strand to SEQ ID NO: 2401982
auguagaggaccaggucac

SEQ ID NO: 2401984 - RNA, 19 nt, Artificial Sequence
  Description of Artificial Sequence: Synthetic oligonucleotide
  Sense strand starting at position 1757 of SEQ ID NO: 1886325
gucccauccgucuauguca

SEQ ID NO: 2401985 - RNA, 19 nt, Artificial Sequence
  Description of Artificial Sequence: Synthetic oligonucleotide
  Antisense strand to SEQ ID NO: 2401984
ugacauagacggaugggac

SEQ ID NO: 2401986 - RNA, 19 nt, Artificial Sequence
  Description of Artificial Sequence: Synthetic oligonucleotide
  Sense strand starting at position 1759 of SEQ ID NO: 1886325
cccauccgucuaugucaua

SEQ ID NO: 2401987 - RNA, 19 nt, Artificial Sequence
  Description of Artificial Sequence: Synthetic oligonucleotide
  Antisense strand to SEQ ID NO: 2401986
uaugacauagacggauggg

SEQ ID NO: 2401988 - RNA, 19 nt, Artificial Sequence
  Description of Artificial Sequence: Synthetic oligonucleotide
  Sense strand starting at position 1780 of SEQ ID NO: 1886325
gaggaaauguuccucacau

SEQ ID NO: 2401989 - RNA, 19 nt, Artificial Sequence
  Description of Artificial Sequence: Synthetic oligonucleotide
  Antisense strand to SEQ ID NO: 2401988
augugaggaacauuuccuc

SEQ ID NO: 2401990 - RNA, 19 nt, Artificial Sequence
  Description of Artificial Sequence: Synthetic oligonucleotide
  Sense strand starting at position 1781 of SEQ ID NO: 1886325
aggaaauguuccucacaug

SEQ ID NO: 2401991 - RNA, 19 nt, Artificial Sequence
  Description of Artificial Sequence: Synthetic oligonucleotide
  Antisense strand to SEQ ID NO: 2401990
caugugaggaacauuuccu

SEQ ID NO: 2401992 - RNA, 19 nt, Artificial Sequence
  Description of Artificial Sequence: Synthetic oligonucleotide
  Sense strand starting at position 1790 of SEQ ID NO: 1886325
uccucacaugcaugugaua

SEQ ID NO: 2401993 - RNA, 19 nt, Artificial Sequence
  Description of Artificial Sequence: Synthetic oligonucleotide
  Antisense strand to SEQ ID NO: 2401992
uaucacaugcaugugagga

SEQ ID NO: 2401994 - RNA, 19 nt, Artificial Sequence
  Description of Artificial Sequence: Synthetic oligonucleotide
  Sense strand starting at position 1797 of SEQ ID NO: 1886325
augcaugugauaggagauu

SEQ ID NO: 2401995 - RNA, 19 nt, Artificial Sequence
  Description of Artificial Sequence: Synthetic oligonucleotide
  Antisense strand to SEQ ID NO: 2401994
aaucuccuaucacaugcau

SEQ ID NO: 2401996 - RNA, 19 nt, Artificial Sequence
  Description of Artificial Sequence: Synthetic oligonucleotide
  Sense strand starting at position 2050 of SEQ ID NO: 1886325
gagagcugaugaccuuaaa

SEQ ID NO: 2401997 - RNA, 19 nt, Artificial Sequence
  Description of Artificial Sequence: Synthetic oligonucleotide
  Antisense strand to SEQ ID NO: 2401996
uuuaaggucaucagcucuc

SEQ ID NO: 2401998 - RNA, 19 nt, Artificial Sequence
  Description of Artificial Sequence: Synthetic oligonucleotide
  Sense strand starting at position 2123 of SEQ ID NO: 1886325
gacaaucagcucugggagu

SEQ ID NO: 2401999 - RNA, 19 nt, Artificial Sequence
  Description of Artificial Sequence: Synthetic oligonucleotide
  Antisense strand to SEQ ID NO: 2401998
acucccagagcugauuguc

SEQ ID NO: 2402000 - RNA, 19 nt, Artificial Sequence
  Description of Artificial Sequence: Synthetic oligonucleotide
  Sense strand starting at position 2308 of SEQ ID NO: 1886325
cagccucuguuggucagaa

SEQ ID NO: 2402001 - RNA, 19 nt, Artificial Sequence
  Description of Artificial Sequence: Synthetic oligonucleotide
  Antisense strand to SEQ ID NO: 2402000
uucugaccaacagaggcug

SEQ ID NO: 2402002 - RNA, 19 nt, Artificial Sequence
  Description of Artificial Sequence: Synthetic oligonucleotide
  Sense strand starting at position 2310 of SEQ ID NO: 1886325
gccucuguuggucagaaga

SEQ ID NO: 2402003 - RNA, 19 nt, Artificial Sequence
  Description of Artificial Sequence: Synthetic oligonucleotide
  Antisense strand to SEQ ID NO: 2402002
ucuucugaccaacagaggc

SEQ ID NO: 2402004 - RNA, 19 nt, Artificial Sequence
  Description of Artificial Sequence: Synthetic oligonucleotide
  Sense strand starting at position 2376 of SEQ ID NO: 1886325
gcugcugagaaguguaaag

SEQ ID NO: 2402005 - RNA, 19 nt, Artificial Sequence
  Description of Artificial Sequence: Synthetic oligonucleotide
  Antisense strand to SEQ ID NO: 2402004
cuuuacacuucucagcagc

SEQ ID NO: 2402006 - RNA, 19 nt, Artificial Sequence
  Description of Artificial Sequence: Synthetic oligonucleotide
  Sense strand starting at position 2640 of SEQ ID NO: 1886325
uguguaugucagagugagu

SEQ ID NO: 2402007 - RNA, 19 nt, Artificial Sequence
  Description of Artificial Sequence: Synthetic oligonucleotide
  Antisense strand to SEQ ID NO: 2402006
acucacucugacauacaca

SEQ ID NO: 2402008 - RNA, 19 nt, Artificial Sequence
  Description of Artificial Sequence: Synthetic oligonucleotide
  Sense strand starting at position 2702 of SEQ ID NO: 1886325
agcacaacggguugucaua

SEQ ID NO: 2402009 - RNA, 19 nt, Artificial Sequence
  Description of Artificial Sequence: Synthetic oligonucleotide
  Antisense strand to SEQ ID NO: 2402008
uaugacaacccguugugcu

SEQ ID NO: 2402010 - RNA, 19 nt, Artificial Sequence
  Description of Artificial Sequence: Synthetic oligonucleotide
  Sense strand starting at position 2789 of SEQ ID NO: 1886325
caaucaguaggaugcgaau

SEQ ID NO: 2402011 - RNA, 19 nt, Artificial Sequence
  Description of Artificial Sequence: Synthetic oligonucleotide
  Antisense strand to SEQ ID NO: 2402010
auucgcauccuacugauug

SEQ ID NO: 2402012 - RNA, 19 nt, Artificial Sequence
  Description of Artificial Sequence: Synthetic oligonucleotide
  Sense strand starting at position 2826 of SEQ ID NO: 1886325
cagacauuggccugauguc

SEQ ID NO: 2402013 - RNA, 19 nt, Artificial Sequence
  Description of Artificial Sequence: Synthetic oligonucleotide
  Antisense strand to SEQ ID NO: 2402012
gacaucaggccaaugucug

SEQ ID NO: 2402014 - RNA, 19 nt, Artificial Sequence
  Description of Artificial Sequence: Synthetic oligonucleotide
  Sense strand starting at position 2836 of SEQ ID NO: 1886325
ccugaugucccucgacuaa

SEQ ID NO: 2402015 - RNA, 19 nt, Artificial Sequence
  Description of Artificial Sequence: Synthetic oligonucleotide
  Antisense strand to SEQ ID NO: 2402014
uuagucgagggacaucagg

SEQ ID NO: 2402016 - RNA, 19 nt, Artificial Sequence
  Description of Artificial Sequence: Synthetic oligonucleotide
  Sense strand starting at position 2902 of SEQ ID NO: 1886325
auauaaugucgugaccaga

SEQ ID NO: 2402017 - RNA, 19 nt, Artificial Sequence
  Description of Artificial Sequence: Synthetic oligonucleotide
  Antisense strand to SEQ ID NO: 2402016
ucuggucacgacauuauau

SEQ ID NO: 2402018 - RNA, 19 nt, Artificial Sequence
  Description of Artificial Sequence: Synthetic oligonucleotide
  Sense strand starting at position 3005 of SEQ ID NO: 1886325
ccaccacguuggucuuaaa

SEQ ID NO: 2402019 - RNA, 19 nt, Artificial Sequence
  Description of Artificial Sequence: Synthetic oligonucleotide
  Antisense strand to SEQ ID NO: 2402018
uuuaagaccaacguggugg

SEQ ID NO: 2402020 - RNA, 19 nt, Artificial Sequence
  Description of Artificial Sequence: Synthetic oligonucleotide
  Sense strand starting at position 3045 of SEQ ID NO: 1886325
cagagacagucuucugaac

SEQ ID NO: 2402021 - RNA, 19 nt, Artificial Sequence
  Description of Artificial Sequence: Synthetic oligonucleotide
  Antisense strand to SEQ ID NO: 2402020
guucagaagacugucucug

SEQ ID NO: 2402022 - RNA, 19 nt, Artificial Sequence
  Description of Artificial Sequence: Synthetic oligonucleotide
  Sense strand starting at position 3382 of SEQ ID NO: 1886325
ugagcugcgagacauagaa

SEQ ID NO: 2402023 - RNA, 19 nt, Artificial Sequence
  Description of Artificial Sequence: Synthetic oligonucleotide
  Antisense strand to SEQ ID NO: 2402022
uucuaugucucgcagcuca

SEQ ID NO: 2402024 - RNA, 19 nt, Artificial Sequence
  Description of Artificial Sequence: Synthetic oligonucleotide
  Sense strand starting at position 3485 of SEQ ID NO: 1886325
ccggcuaagugagcugaaa

SEQ ID NO: 2402025 - RNA, 19 nt, Artificial Sequence
  Description of Artificial Sequence: Synthetic oligonucleotide
  Antisense strand to SEQ ID NO: 2402024
uuucagcucacuuagccgg

SEQ ID NO: 2402026 - RNA, 19 nt, Artificial Sequence
  Description of Artificial Sequence: Synthetic oligonucleotide
  Sense strand starting at position 3618 of SEQ ID NO: 1886325
acauguguugccuggaaug

SEQ ID NO: 2402027 - RNA, 19 nt, Artificial Sequence
  Description of Artificial Sequence: Synthetic oligonucleotide
  Antisense strand to SEQ ID NO: 2402026
cauuccaggcaacacaugu

SEQ ID NO: 2402028 - RNA, 19 nt, Artificial Sequence
  Description of Artificial Sequence: Synthetic oligonucleotide
  Sense strand starting at position 3648 of SEQ ID NO: 1886325
ccaugaauacgccaagugu

SEQ ID NO: 2402029 - RNA, 19 nt, Artificial Sequence
  Description of Artificial Sequence: Synthetic oligonucleotide
  Antisense strand to SEQ ID NO: 2402028
acacuuggcguauucaugg

SEQ ID NO: 2402030 - RNA, 19 nt, Artificial Sequence
  Description of Artificial Sequence: Synthetic oligonucleotide
  Sense strand starting at position 3763 of SEQ ID NO: 1886325
ugggauccagagcaguauu

SEQ ID NO: 2402031 - RNA, 19 nt, Artificial Sequence
  Description of Artificial Sequence: Synthetic oligonucleotide
  Antisense strand to SEQ ID NO: 2402030
aauacugcucuggauccca

SEQ ID NO: 2402032 - RNA, 19 nt, Artificial Sequence
  Description of Artificial Sequence: Synthetic oligonucleotide
  Sense strand starting at position 3774 of SEQ ID NO: 1886325
gcaguauuugcucacacga

SEQ ID NO: 2402033 - RNA, 19 nt, Artificial Sequence
  Description of Artificial Sequence: Synthetic oligonucleotide
  Antisense strand to SEQ ID NO: 2402032
ucgugugagcaaauacugc

SEQ ID NO: 2402034 - RNA, 19 nt, Artificial Sequence
  Description of Artificial Sequence: Synthetic oligonucleotide
  Sense strand starting at position 27 of SEQ ID NO: 1886326
caaucaguaggaugcgaau

SEQ ID NO: 2402035 - RNA, 19 nt, Artificial Sequence
  Description of Artificial Sequence: Synthetic oligonucleotide
  Antisense strand to SEQ ID NO: 2402034
auucgcauccuacugauug

SEQ ID NO: 2402036 - RNA, 19 nt, Artificial Sequence
  Description of Artificial Sequence: Synthetic oligonucleotide
  Sense strand starting at position 64 of SEQ ID NO: 1886326
cagacauuggccugauguc

SEQ ID NO: 2402037 - RNA, 19 nt, Artificial Sequence
  Description of Artificial Sequence: Synthetic oligonucleotide
  Antisense strand to SEQ ID NO: 2402036
gacaucaggccaaugucug

SEQ ID NO: 2402038 - RNA, 19 nt, Artificial Sequence
  Description of Artificial Sequence: Synthetic oligonucleotide
  Sense strand starting at position 74 of SEQ ID NO: 1886326
ccugaugucccucgacuaa

SEQ ID NO: 2402039 - RNA, 19 nt, Artificial Sequence
  Description of Artificial Sequence: Synthetic oligonucleotide
  Antisense strand to SEQ ID NO: 2402038
uuagucgagggacaucagg

SEQ ID NO: 2402040 - RNA, 19 nt, Artificial Sequence
  Description of Artificial Sequence: Synthetic oligonucleotide
  Sense strand starting at position 140 of SEQ ID NO: 1886326
auauaaugucgugaccaga

SEQ ID NO: 2402041 - RNA, 19 nt, Artificial Sequence
  Description of Artificial Sequence: Synthetic oligonucleotide
  Antisense strand to SEQ ID NO: 2402040
ucuggucacgacauuauau

SEQ ID NO: 2402042 - RNA, 19 nt, Artificial Sequence
  Description of Artificial Sequence: Synthetic oligonucleotide
  Sense strand starting at position 243 of SEQ ID NO: 1886326
ccaccacguuggucuuaaa

SEQ ID NO: 2402043 - RNA, 19 nt, Artificial Sequence
  Description of Artificial Sequence: Synthetic oligonucleotide
  Antisense strand to SEQ ID NO: 2402042
uuuaagaccaacguggugg

SEQ ID NO: 2402044 - RNA, 19 nt, Artificial Sequence
  Description of Artificial Sequence: Synthetic oligonucleotide
  Sense strand starting at position 283 of SEQ ID NO: 1886326
cagagacagucuucugaac

SEQ ID NO: 2402045 - RNA, 19 nt, Artificial Sequence
  Description of Artificial Sequence: Synthetic oligonucleotide
  Antisense strand to SEQ ID NO: 2402044
guucagaagacugucucug

SEQ ID NO: 2402046 - RNA, 19 nt, Artificial Sequence
  Description of Artificial Sequence: Synthetic oligonucleotide
  Sense strand starting at position 620 of SEQ ID NO: 1886326
ugagcugcgagacauagaa

SEQ ID NO: 2402047 - RNA, 19 nt, Artificial Sequence
  Description of Artificial Sequence: Synthetic oligonucleotide
  Antisense strand to SEQ ID NO: 2402046
uucuaugucucgcagcuca

SEQ ID NO: 2402048 - RNA, 19 nt, Artificial Sequence
  Description of Artificial Sequence: Synthetic oligonucleotide
  Sense strand starting at position 723 of SEQ ID NO: 1886326
ccggcuaagugagcugaaa

SEQ ID NO: 2402049 - RNA, 19 nt, Artificial Sequence
  Description of Artificial Sequence: Synthetic oligonucleotide
  Antisense strand to SEQ ID NO: 2402048
uuucagcucacuuagccgg

SEQ ID NO: 2402050 - RNA, 19 nt, Artificial Sequence
  Description of Artificial Sequence: Synthetic oligonucleotide
  Sense strand starting at position 856 of SEQ ID NO: 1886326
acauguguugccuggaaug

SEQ ID NO: 2402051 - RNA, 19 nt, Artificial Sequence
  Description of Artificial Sequence: Synthetic oligonucleotide
  Antisense strand to SEQ ID NO: 2402050
cauuccaggcaacacaugu

SEQ ID NO: 2402052 - RNA, 19 nt, Artificial Sequence
  Description of Artificial Sequence: Synthetic oligonucleotide
  Sense strand starting at position 886 of SEQ ID NO: 1886326
ccaugaauacgccaagugu

SEQ ID NO: 2402053 - RNA, 19 nt, Artificial Sequence
  Description of Artificial Sequence: Synthetic oligonucleotide
  Antisense strand to SEQ ID NO: 2402052
acacuuggcguauucaugg

SEQ ID NO: 2402054 - RNA, 19 nt, Artificial Sequence
  Description of Artificial Sequence: Synthetic oligonucleotide
  Sense strand starting at position 1001 of SEQ ID NO: 1886326
ugggauccagagcaguauu

SEQ ID NO: 2402055 - RNA, 19 nt, Artificial Sequence
  Description of Artificial Sequence: Synthetic oligonucleotide
  Antisense strand to SEQ ID NO: 2402054
aauacugcucuggauccca

SEQ ID NO: 2402056 - RNA, 19 nt, Artificial Sequence
  Description of Artificial Sequence: Synthetic oligonucleotide
  Sense strand starting at position 1012 of SEQ ID NO: 1886326
gcaguauuugcucacacga

SEQ ID NO: 2402057 - RNA, 19 nt, Artificial Sequence
  Description of Artificial Sequence: Synthetic oligonucleotide
  Antisense strand to SEQ ID NO: 2402056
ucgugugagcaaauacugc

SEQ ID NO: 2402058 - RNA, 19 nt, Artificial Sequence
  Description of Artificial Sequence: Synthetic oligonucleotide
  Sense strand starting at position 1349 of SEQ ID NO: 1886326
cacagcucgagaggugaaa

SEQ ID NO: 2402059 - RNA, 19 nt, Artificial Sequence
  Description of Artificial Sequence: Synthetic oligonucleotide
  Antisense strand to SEQ ID NO: 2402058
uuucaccucucgagcugug

SEQ ID NO: 2402060 - RNA, 19 nt, Artificial Sequence
  Description of Artificial Sequence: Synthetic oligonucleotide
  Sense strand starting at position 1533 of SEQ ID NO: 1886326
gccucaugcucuccuugaa

SEQ ID NO: 2402061 - RNA, 19 nt, Artificial Sequence
  Description of Artificial Sequence: Synthetic oligonucleotide
  Antisense strand to SEQ ID NO: 2402060
uucaaggagagcaugaggc

SEQ ID NO: 2402062 - RNA, 19 nt, Artificial Sequence
  Description of Artificial Sequence: Synthetic oligonucleotide
  Sense strand starting at position 1573 of SEQ ID NO: 1886326
ugguccucuaugcaaggau

SEQ ID NO: 2402063 - RNA, 19 nt, Artificial Sequence
  Description of Artificial Sequence: Synthetic oligonucleotide
  Antisense strand to SEQ ID NO: 2402062
auccuugcauagaggacca

SEQ ID NO: 2402064 - RNA, 19 nt, Artificial Sequence
  Description of Artificial Sequence: Synthetic oligonucleotide
  Sense strand starting at position 1794 of SEQ ID NO: 1886326
uuuguaauaugacaggaga

SEQ ID NO: 2402065 - RNA, 19 nt, Artificial Sequence
  Description of Artificial Sequence: Synthetic oligonucleotide
  Antisense strand to SEQ ID NO: 2402064
ucuccugucauauuacaaa

SEQ ID NO: 2402066 - RNA, 19 nt, Artificial Sequence
  Description of Artificial Sequence: Synthetic oligonucleotide
  Sense strand starting at position 1860 of SEQ ID NO: 1886326
gaaguugucccucacuagu

SEQ ID NO: 2402067 - RNA, 19 nt, Artificial Sequence
  Description of Artificial Sequence: Synthetic oligonucleotide
  Antisense strand to SEQ ID NO: 2402066
acuagugagggacaacuuc

SEQ ID NO: 2402068 - RNA, 19 nt, Artificial Sequence
  Description of Artificial Sequence: Synthetic oligonucleotide
  Sense strand starting at position 1862 of SEQ ID NO: 1886326
aguugucccucacuaguaa

SEQ ID NO: 2402069 - RNA, 19 nt, Artificial Sequence
  Description of Artificial Sequence: Synthetic oligonucleotide
  Antisense strand to SEQ ID NO: 2402068
uuacuagugagggacaacu

SEQ ID NO: 2402070 - RNA, 19 nt, Artificial Sequence
  Description of Artificial Sequence: Synthetic oligonucleotide
  Sense strand starting at position 1863 of SEQ ID NO: 1886326
guugucccucacuaguaaa

SEQ ID NO: 2402071 - RNA, 19 nt, Artificial Sequence
  Description of Artificial Sequence: Synthetic oligonucleotide
  Antisense strand to SEQ ID NO: 2402070
uuuacuagugagggacaac

SEQ ID NO: 2402072 - RNA, 19 nt, Artificial Sequence
  Description of Artificial Sequence: Synthetic oligonucleotide
  Sense strand starting at position 2062 of SEQ ID NO: 1886326
ccuuaaaggccucgacaau

SEQ ID NO: 2402073 - RNA, 19 nt, Artificial Sequence
  Description of Artificial Sequence: Synthetic oligonucleotide
  Antisense strand to SEQ ID NO: 2402072
auugucgaggccuuuaagg

SEQ ID NO: 2402074 - RNA, 19 nt, Artificial Sequence
  Description of Artificial Sequence: Synthetic oligonucleotide
  Sense strand starting at position 2165 of SEQ ID NO: 1886326
gcuuacuguccugagccau

SEQ ID NO: 2402075 - RNA, 19 nt, Artificial Sequence
  Description of Artificial Sequence: Synthetic oligonucleotide
  Antisense strand to SEQ ID NO: 2402074
auggcucaggacaguaagc

SEQ ID NO: 2402076 - RNA, 19 nt, Artificial Sequence
  Description of Artificial Sequence: Synthetic oligonucleotide
  Sense strand starting at position 2227 of SEQ ID NO: 1886326
ccacgacuccauggagauu

SEQ ID NO: 2402077 - RNA, 19 nt, Artificial Sequence
  Description of Artificial Sequence: Synthetic oligonucleotide
  Antisense strand to SEQ ID NO: 2402076
aaucuccauggagucgugg

SEQ ID NO: 2402078 - RNA, 19 nt, Artificial Sequence
  Description of Artificial Sequence: Synthetic oligonucleotide
  Sense strand starting at position 2242 of SEQ ID NO: 1886326
gauuccacugcucggaaga

SEQ ID NO: 2402079 - RNA, 19 nt, Artificial Sequence
  Description of Artificial Sequence: Synthetic oligonucleotide
  Antisense strand to SEQ ID NO: 2402078
ucuuccgagcaguggaauc

SEQ ID NO: 2402080 - RNA, 19 nt, Artificial Sequence
  Description of Artificial Sequence: Synthetic oligonucleotide
  Sense strand starting at position 2243 of SEQ ID NO: 1886326
auuccacugcucggaagaa

SEQ ID NO: 2402081 - RNA, 19 nt, Artificial Sequence
  Description of Artificial Sequence: Synthetic oligonucleotide
  Antisense strand to SEQ ID NO: 2402080
uucuuccgagcaguggaau

SEQ ID NO: 2402082 - RNA, 19 nt, Artificial Sequence
  Description of Artificial Sequence: Synthetic oligonucleotide
  Sense strand starting at position 2332 of SEQ ID NO: 1886326
aaaugcacgcuugagaaau

SEQ ID NO: 2402083 - RNA, 19 nt, Artificial Sequence
  Description of Artificial Sequence: Synthetic oligonucleotide
  Antisense strand to SEQ ID NO: 2402082
auuucucaagcgugcauuu

SEQ ID NO: 2402084 - RNA, 19 nt, Artificial Sequence
  Description of Artificial Sequence: Synthetic oligonucleotide
  Sense strand starting at position 2368 of SEQ ID NO: 1886326
ucaccacgucaaugucauu

SEQ ID NO: 2402085 - RNA, 19 nt, Artificial Sequence
  Description of Artificial Sequence: Synthetic oligonucleotide
  Antisense strand to SEQ ID NO: 2402084
aaugacauugacgugguga

SEQ ID NO: 2402086 - RNA, 19 nt, Artificial Sequence
  Description of Artificial Sequence: Synthetic oligonucleotide
  Sense strand starting at position 2516 of SEQ ID NO: 1886326
cucacucgcccagaaacau

SEQ ID NO: 2402087 - RNA, 19 nt, Artificial Sequence
  Description of Artificial Sequence: Synthetic oligonucleotide
  Antisense strand to SEQ ID NO: 2402086
auguuucugggcgagugag

SEQ ID NO: 2402088 - RNA, 19 nt, Artificial Sequence
  Description of Artificial Sequence: Synthetic oligonucleotide
  Sense strand starting at position 2553 of SEQ ID NO: 1886326
auaccuuaccugugucacu

SEQ ID NO: 2402089 - RNA, 19 nt, Artificial Sequence
  Description of Artificial Sequence: Synthetic oligonucleotide
  Antisense strand to SEQ ID NO: 2402088
agugacacagguaagguau

SEQ ID NO: 2402090 - RNA, 19 nt, Artificial Sequence
  Description of Artificial Sequence: Synthetic oligonucleotide
  Sense strand starting at position 2647 of SEQ ID NO: 1886326
cacacaugugugcaugagu

SEQ ID NO: 2402091 - RNA, 19 nt, Artificial Sequence
  Description of Artificial Sequence: Synthetic oligonucleotide
  Antisense strand to SEQ ID NO: 2402090
acucaugcacacaugugug

SEQ ID NO: 2402092 - RNA, 19 nt, Artificial Sequence
  Description of Artificial Sequence: Synthetic oligonucleotide
  Sense strand starting at position 3192 of SEQ ID NO: 1886326
cagacaggacauugucauu

SEQ ID NO: 2402093 - RNA, 19 nt, Artificial Sequence
  Description of Artificial Sequence: Synthetic oligonucleotide
  Antisense strand to SEQ ID NO: 2402092
aaugacaauguccugucug

SEQ ID NO: 2402094 - RNA, 19 nt, Artificial Sequence
  Description of Artificial Sequence: Synthetic oligonucleotide
  Sense strand starting at position 3197 of SEQ ID NO: 1886326
aggacauugucauuauccu

SEQ ID NO: 2402095 - RNA, 19 nt, Artificial Sequence
  Description of Artificial Sequence: Synthetic oligonucleotide
  Antisense strand to SEQ ID NO: 2402094
aggauaaugacaauguccu

SEQ ID NO: 2402096 - RNA, 19 nt, Artificial Sequence
  Description of Artificial Sequence: Synthetic oligonucleotide
  Sense strand starting at position 3198 of SEQ ID NO: 1886326
ggacauugucauuauccuu

SEQ ID NO: 2402097 - RNA, 19 nt, Artificial Sequence
  Description of Artificial Sequence: Synthetic oligonucleotide
  Antisense strand to SEQ ID NO: 2402096
aaggauaaugacaaugucc

SEQ ID NO: 2402098 - RNA, 19 nt, Artificial Sequence
  Description of Artificial Sequence: Synthetic oligonucleotide
  Sense strand starting at position 3203 of SEQ ID NO: 1886326
uugucauuauccuugcauu

SEQ ID NO: 2402099 - RNA, 19 nt, Artificial Sequence
  Description of Artificial Sequence: Synthetic oligonucleotide
  Antisense strand to SEQ ID NO: 2402098
aaugcaaggauaaugacaa

SEQ ID NO: 2402100 - RNA, 19 nt, Artificial Sequence
  Description of Artificial Sequence: Synthetic oligonucleotide
  Sense strand starting at position 3204 of SEQ ID NO: 1886326
ugucauuauccuugcauua

SEQ ID NO: 2402101 - RNA, 19 nt, Artificial Sequence
  Description of Artificial Sequence: Synthetic oligonucleotide
  Antisense strand to SEQ ID NO: 2402100
uaaugcaaggauaaugaca

SEQ ID NO: 2402102 - RNA, 19 nt, Artificial Sequence
  Description of Artificial Sequence: Synthetic oligonucleotide
  Sense strand starting at position 3416 of SEQ ID NO: 1886326
acuguaugcccuugaaagu

SEQ ID NO: 2402103 - RNA, 19 nt, Artificial Sequence
  Description of Artificial Sequence: Synthetic oligonucleotide
  Antisense strand to SEQ ID NO: 2402102
acuuucaagggcauacagu

SEQ ID NO: 2402104 - RNA, 19 nt, Artificial Sequence
  Description of Artificial Sequence: Synthetic oligonucleotide
  Sense strand starting at position 3481 of SEQ ID NO: 1886326
gcugaaaugcuuuaucacg

SEQ ID NO: 2402105 - RNA, 19 nt, Artificial Sequence
  Description of Artificial Sequence: Synthetic oligonucleotide
  Antisense strand to SEQ ID NO: 2402104
cgugauaaagcauuucagc

SEQ ID NO: 2402106 - RNA, 19 nt, Artificial Sequence
  Description of Artificial Sequence: Synthetic oligonucleotide
  Sense strand starting at position 3566 of SEQ ID NO: 1886326
ucaagacucucuguggcaa

SEQ ID NO: 2402107 - RNA, 19 nt, Artificial Sequence
  Description of Artificial Sequence: Synthetic oligonucleotide
  Antisense strand to SEQ ID NO: 2402106
uugccacagagagucuuga

SEQ ID NO: 2402108 - RNA, 19 nt, Artificial Sequence
  Description of Artificial Sequence: Synthetic oligonucleotide
  Sense strand starting at position 3567 of SEQ ID NO: 1886326
caagacucucuguggcaau

SEQ ID NO: 2402109 - RNA, 19 nt, Artificial Sequence
  Description of Artificial Sequence: Synthetic oligonucleotide
  Antisense strand to SEQ ID NO: 2402108
auugccacagagagucuug

SEQ ID NO: 2402110 - RNA, 19 nt, Artificial Sequence
  Description of Artificial Sequence: Synthetic oligonucleotide
  Sense strand starting at position 3621 of SEQ ID NO: 1886326
cauagaucuccacggguag

SEQ ID NO: 2402111 - RNA, 19 nt, Artificial Sequence
  Description of Artificial Sequence: Synthetic oligonucleotide
  Antisense strand to SEQ ID NO: 2402110
cuacccguggagaucuaug

SEQ ID NO: 2402112 - RNA, 19 nt, Artificial Sequence
  Description of Artificial Sequence: Synthetic oligonucleotide
  Sense strand starting at position 3832 of SEQ ID NO: 1886326
ccuacucugcugggaacaa

SEQ ID NO: 2402113 - RNA, 19 nt, Artificial Sequence
  Description of Artificial Sequence: Synthetic oligonucleotide
  Antisense strand to SEQ ID NO: 2402112
uuguucccagcagaguagg

SEQ ID NO: 2402114 - RNA, 19 nt, Artificial Sequence
  Description of Artificial Sequence: Synthetic oligonucleotide
  Sense strand starting at position 104 of SEQ ID NO: 1886327
ucaauaggaugugaacuuu

SEQ ID NO: 2402115 - RNA, 19 nt, Artificial Sequence
  Description of Artificial Sequence: Synthetic oligonucleotide
  Antisense strand to SEQ ID NO: 2402114
aaaguucacauccuauuga

SEQ ID NO: 2402116 - RNA, 19 nt, Artificial Sequence
  Description of Artificial Sequence: Synthetic oligonucleotide
  Sense strand starting at position 499 of SEQ ID NO: 1886327
cagacaggacauugucauu

SEQ ID NO: 2402117 - RNA, 19 nt, Artificial Sequence
  Description of Artificial Sequence: Synthetic oligonucleotide
  Antisense strand to SEQ ID NO: 2402116
aaugacaauguccugucug

SEQ ID NO: 2402118 - RNA, 19 nt, Artificial Sequence
  Description of Artificial Sequence: Synthetic oligonucleotide
  Sense strand starting at position 504 of SEQ ID NO: 1886327
aggacauugucauuauccu

SEQ ID NO: 2402119 - RNA, 19 nt, Artificial Sequence
  Description of Artificial Sequence: Synthetic oligonucleotide
  Antisense strand to SEQ ID NO: 2402118
aggauaaugacaauguccu

SEQ ID NO: 2402120 - RNA, 19 nt, Artificial Sequence
  Description of Artificial Sequence: Synthetic oligonucleotide
  Sense strand starting at position 505 of SEQ ID NO: 1886327
ggacauugucauuauccuu

SEQ ID NO: 2402121 - RNA, 19 nt, Artificial Sequence
  Description of Artificial Sequence: Synthetic oligonucleotide
  Antisense strand to SEQ ID NO: 2402120
aaggauaaugacaaugucc

SEQ ID NO: 2402122 - RNA, 19 nt, Artificial Sequence
  Description of Artificial Sequence: Synthetic oligonucleotide
  Sense strand starting at position 510 of SEQ ID NO: 1886327
uugucauuauccuugcauu

SEQ ID NO: 2402123 - RNA, 19 nt, Artificial Sequence
  Description of Artificial Sequence: Synthetic oligonucleotide
  Antisense strand to SEQ ID NO: 2402122
aaugcaaggauaaugacaa

SEQ ID NO: 2402124 - RNA, 19 nt, Artificial Sequence
  Description of Artificial Sequence: Synthetic oligonucleotide
  Sense strand starting at position 511 of SEQ ID NO: 1886327
ugucauuauccuugcauua

SEQ ID NO: 2402125 - RNA, 19 nt, Artificial Sequence
  Description of Artificial Sequence: Synthetic oligonucleotide
  Antisense strand to SEQ ID NO: 2402124
uaaugcaaggauaaugaca

SEQ ID NO: 2402126 - RNA, 19 nt, Artificial Sequence
  Description of Artificial Sequence: Synthetic oligonucleotide
  Sense strand starting at position 723 of SEQ ID NO: 1886327
acuguaugcccuugaaagu

SEQ ID NO: 2402127 - RNA, 19 nt, Artificial Sequence
  Description of Artificial Sequence: Synthetic oligonucleotide
  Antisense strand to SEQ ID NO: 2402126
acuuucaagggcauacagu

SEQ ID NO: 2402128 - RNA, 19 nt, Artificial Sequence
  Description of Artificial Sequence: Synthetic oligonucleotide
  Sense strand starting at position 788 of SEQ ID NO: 1886327
gcugaaaugcuuuaucacg

SEQ ID NO: 2402129 - RNA, 19 nt, Artificial Sequence
  Description of Artificial Sequence: Synthetic oligonucleotide
  Antisense strand to SEQ ID NO: 2402128
cgugauaaagcauuucagc

SEQ ID NO: 2402130 - RNA, 19 nt, Artificial Sequence
  Description of Artificial Sequence: Synthetic oligonucleotide
  Sense strand starting at position 873 of SEQ ID NO: 1886327
ucaagacucucuguggcaa

SEQ ID NO: 2402131 - RNA, 19 nt, Artificial Sequence
  Description of Artificial Sequence: Synthetic oligonucleotide
  Antisense strand to SEQ ID NO: 2402130
uugccacagagagucuuga

SEQ ID NO: 2402132 - RNA, 19 nt, Artificial Sequence
  Description of Artificial Sequence: Synthetic oligonucleotide
  Sense strand starting at position 874 of SEQ ID NO: 1886327
caagacucucuguggcaau

SEQ ID NO: 2402133 - RNA, 19 nt, Artificial Sequence
  Description of Artificial Sequence: Synthetic oligonucleotide
  Antisense strand to SEQ ID NO: 2402132
auugccacagagagucuug

SEQ ID NO: 2402134 - RNA, 19 nt, Artificial Sequence
  Description of Artificial Sequence: Synthetic oligonucleotide
  Sense strand starting at position 928 of SEQ ID NO: 1886327
cauagaucuccacggguag

SEQ ID NO: 2402135 - RNA, 19 nt, Artificial Sequence
  Description of Artificial Sequence: Synthetic oligonucleotide
  Antisense strand to SEQ ID NO: 2402134
cuacccguggagaucuaug

SEQ ID NO: 2402136 - RNA, 19 nt, Artificial Sequence
  Description of Artificial Sequence: Synthetic oligonucleotide
  Sense strand starting at position 1139 of SEQ ID NO: 1886327
ccuacucugcugggaacaa

SEQ ID NO: 2402137 - RNA, 19 nt, Artificial Sequence
  Description of Artificial Sequence: Synthetic oligonucleotide
  Antisense strand to SEQ ID NO: 2402136
uuguucccagcagaguagg

SEQ ID NO: 2402138 - RNA, 19 nt, Artificial Sequence
  Description of Artificial Sequence: Synthetic oligonucleotide
  Sense strand starting at position 1297 of SEQ ID NO: 1886327
cacacucauguccacgaga

SEQ ID NO: 2402139 - RNA, 19 nt, Artificial Sequence
  Description of Artificial Sequence: Synthetic oligonucleotide
  Antisense strand to SEQ ID NO: 2402138
ucucguggacaugagugug

SEQ ID NO: 2402140 - RNA, 19 nt, Artificial Sequence
  Description of Artificial Sequence: Synthetic oligonucleotide
  Sense strand starting at position 1594 of SEQ ID NO: 1886327
gagaccuuguccucugcau

SEQ ID NO: 2402141 - RNA, 19 nt, Artificial Sequence
  Description of Artificial Sequence: Synthetic oligonucleotide
  Antisense strand to SEQ ID NO: 2402140
augcagaggacaaggucuc

SEQ ID NO: 2402142 - RNA, 19 nt, Artificial Sequence
  Description of Artificial Sequence: Synthetic oligonucleotide
  Sense strand starting at position 1600 of SEQ ID NO: 1886327
uuguccucugcauggagau

SEQ ID NO: 2402143 - RNA, 19 nt, Artificial Sequence
  Description of Artificial Sequence: Synthetic oligonucleotide
  Antisense strand to SEQ ID NO: 2402142
aucuccaugcagaggacaa

SEQ ID NO: 2402144 - RNA, 19 nt, Artificial Sequence
  Description of Artificial Sequence: Synthetic oligonucleotide
  Sense strand starting at position 1780 of SEQ ID NO: 1886327
gagggaauguuccuaacga

SEQ ID NO: 2402145 - RNA, 19 nt, Artificial Sequence
  Description of Artificial Sequence: Synthetic oligonucleotide
  Antisense strand to SEQ ID NO: 2402144
ucguuaggaacauucccuc

SEQ ID NO: 2402146 - RNA, 19 nt, Artificial Sequence
  Description of Artificial Sequence: Synthetic oligonucleotide
  Sense strand starting at position 1795 of SEQ ID NO: 1886327
acgaguauuucaugggaga

SEQ ID NO: 2402147 - RNA, 19 nt, Artificial Sequence
  Description of Artificial Sequence: Synthetic oligonucleotide
  Antisense strand to SEQ ID NO: 2402146
ucucccaugaaauacucgu

SEQ ID NO: 2402148 - RNA, 19 nt, Artificial Sequence
  Description of Artificial Sequence: Synthetic oligonucleotide
  Sense strand starting at position 2054 of SEQ ID NO: 1886327
agccgaugacguuaaagaa

SEQ ID NO: 2402149 - RNA, 19 nt, Artificial Sequence
  Description of Artificial Sequence: Synthetic oligonucleotide
  Antisense strand to SEQ ID NO: 2402148
uucuuuaacgucaucggcu

SEQ ID NO: 2402150 - RNA, 19 nt, Artificial Sequence
  Description of Artificial Sequence: Synthetic oligonucleotide
  Sense strand starting at position 2154 of SEQ ID NO: 1886327
ccauuaauggccugccaag

SEQ ID NO: 2402151 - RNA, 19 nt, Artificial Sequence
  Description of Artificial Sequence: Synthetic oligonucleotide
  Antisense strand to SEQ ID NO: 2402150
cuuggcaggccauuaaugg

SEQ ID NO: 2402152 - RNA, 19 nt, Artificial Sequence
  Description of Artificial Sequence: Synthetic oligonucleotide
  Sense strand starting at position 2372 of SEQ ID NO: 1886327
cggcaacugucccugagaa

SEQ ID NO: 2402153 - RNA, 19 nt, Artificial Sequence
  Description of Artificial Sequence: Synthetic oligonucleotide
  Antisense strand to SEQ ID NO: 2402152
uucucagggacaguugccg

SEQ ID NO: 2402154 - RNA, 19 nt, Artificial Sequence
  Description of Artificial Sequence: Synthetic oligonucleotide
  Sense strand starting at position 2373 of SEQ ID NO: 1886327
ggcaacugucccugagaag

SEQ ID NO: 2402155 - RNA, 19 nt, Artificial Sequence
  Description of Artificial Sequence: Synthetic oligonucleotide
  Antisense strand to SEQ ID NO: 2402154
cuucucagggacaguugcc

SEQ ID NO: 2402156 - RNA, 19 nt, Artificial Sequence
  Description of Artificial Sequence: Synthetic oligonucleotide
  Sense strand starting at position 2374 of SEQ ID NO: 1886327
gcaacugucccugagaagu

SEQ ID NO: 2402157 - RNA, 19 nt, Artificial Sequence
  Description of Artificial Sequence: Synthetic oligonucleotide
  Antisense strand to SEQ ID NO: 2402156
acuucucagggacaguugc

SEQ ID NO: 2402158 - RNA, 19 nt, Artificial Sequence
  Description of Artificial Sequence: Synthetic oligonucleotide
  Sense strand starting at position 2380 of SEQ ID NO: 1886327
gucccugagaaguguaaag

SEQ ID NO: 2402159 - RNA, 19 nt, Artificial Sequence
  Description of Artificial Sequence: Synthetic oligonucleotide
  Antisense strand to SEQ ID NO: 2402158
cuuuacacuucucagggac

SEQ ID NO: 2402160 - RNA, 19 nt, Artificial Sequence
  Description of Artificial Sequence: Synthetic oligonucleotide
  Sense strand starting at position 2723 of SEQ ID NO: 1886327
gugagaauguuaguuuaaa

SEQ ID NO: 2402161 - RNA, 19 nt, Artificial Sequence
  Description of Artificial Sequence: Synthetic oligonucleotide
  Antisense strand to SEQ ID NO: 2402160
uuuaaacuaacauucucac

SEQ ID NO: 2402162 - RNA, 19 nt, Artificial Sequence
  Description of Artificial Sequence: Synthetic oligonucleotide
  Sense strand starting at position 2734 of SEQ ID NO: 1886327
aguuuaaaugggcauguuu

SEQ ID NO: 2402163 - RNA, 19 nt, Artificial Sequence
  Description of Artificial Sequence: Synthetic oligonucleotide
  Antisense strand to SEQ ID NO: 2402162
aaacaugcccauuuaaacu

SEQ ID NO: 2402164 - RNA, 19 nt, Artificial Sequence
  Description of Artificial Sequence: Synthetic oligonucleotide
  Sense strand starting at position 2743 of SEQ ID NO: 1886327
gggcauguuugucucccua

SEQ ID NO: 2402165 - RNA, 19 nt, Artificial Sequence
  Description of Artificial Sequence: Synthetic oligonucleotide
  Antisense strand to SEQ ID NO: 2402164
uagggagacaaacaugccc

SEQ ID NO: 2402166 - RNA, 19 nt, Artificial Sequence
  Description of Artificial Sequence: Synthetic oligonucleotide
  Sense strand starting at position 2745 of SEQ ID NO: 1886327
gcauguuugucucccuaau

SEQ ID NO: 2402167 - RNA, 19 nt, Artificial Sequence
  Description of Artificial Sequence: Synthetic oligonucleotide
  Antisense strand to SEQ ID NO: 2402166
auuagggagacaaacaugc

SEQ ID NO: 2402168 - RNA, 19 nt, Artificial Sequence
  Description of Artificial Sequence: Synthetic oligonucleotide
  Sense strand starting at position 2856 of SEQ ID NO: 1886327
cuucgaucacuggauguga

SEQ ID NO: 2402169 - RNA, 19 nt, Artificial Sequence
  Description of Artificial Sequence: Synthetic oligonucleotide
  Antisense strand to SEQ ID NO: 2402168
ucacauccagugaucgaag

SEQ ID NO: 2402170 - RNA, 19 nt, Artificial Sequence
  Description of Artificial Sequence: Synthetic oligonucleotide
  Sense strand starting at position 3088 of SEQ ID NO: 1886327
gucugaaacuuggcaucaa

SEQ ID NO: 2402171 - RNA, 19 nt, Artificial Sequence
  Description of Artificial Sequence: Synthetic oligonucleotide
  Antisense strand to SEQ ID NO: 2402170
uugaugccaaguuucagac

SEQ ID NO: 2402172 - RNA, 19 nt, Artificial Sequence
  Description of Artificial Sequence: Synthetic oligonucleotide
  Sense strand starting at position 3232 of SEQ ID NO: 1886327
ggacgucccuaccugaauu

SEQ ID NO: 2402173 - RNA, 19 nt, Artificial Sequence
  Description of Artificial Sequence: Synthetic oligonucleotide
  Antisense strand to SEQ ID NO: 2402172
aauucagguagggacgucc

SEQ ID NO: 2402174 - RNA, 19 nt, Artificial Sequence
  Description of Artificial Sequence: Synthetic oligonucleotide
  Sense strand starting at position 3525 of SEQ ID NO: 1886327
cuggcugcacugugaauuu

SEQ ID NO: 2402175 - RNA, 19 nt, Artificial Sequence
  Description of Artificial Sequence: Synthetic oligonucleotide
  Antisense strand to SEQ ID NO: 2402174
aaauucacagugcagccag

SEQ ID NO: 2402176 - RNA, 19 nt, Artificial Sequence
  Description of Artificial Sequence: Synthetic oligonucleotide
  Sense strand starting at position 3570 of SEQ ID NO: 1886327
ucaucaugcauagggagua

SEQ ID NO: 2402177 - RNA, 19 nt, Artificial Sequence
  Description of Artificial Sequence: Synthetic oligonucleotide
  Antisense strand to SEQ ID NO: 2402176
uacucccuaugcaugauga

SEQ ID NO: 2402178 - RNA, 19 nt, Artificial Sequence
  Description of Artificial Sequence: Synthetic oligonucleotide
  Sense strand starting at position 3646 of SEQ ID NO: 1886327
aagagacuuuccguggcaa

SEQ ID NO: 2402179 - RNA, 19 nt, Artificial Sequence
  Description of Artificial Sequence: Synthetic oligonucleotide
  Antisense strand to SEQ ID NO: 2402178
uugccacggaaagucucuu

SEQ ID NO: 2402180 - RNA, 19 nt, Artificial Sequence
  Description of Artificial Sequence: Synthetic oligonucleotide
  Sense strand starting at position 3647 of SEQ ID NO: 1886327
agagacuuuccguggcaac

SEQ ID NO: 2402181 - RNA, 19 nt, Artificial Sequence
  Description of Artificial Sequence: Synthetic oligonucleotide
  Antisense strand to SEQ ID NO: 2402180
guugccacggaaagucucu

SEQ ID NO: 2402182 - RNA, 19 nt, Artificial Sequence
  Description of Artificial Sequence: Synthetic oligonucleotide
  Sense strand starting at position 3648 of SEQ ID NO: 1886327
gagacuuuccguggcaaca

SEQ ID NO: 2402183 - RNA, 19 nt, Artificial Sequence
  Description of Artificial Sequence: Synthetic oligonucleotide
  Antisense strand to SEQ ID NO: 2402182
uguugccacggaaagucuc

SEQ ID NO: 2402184 - RNA, 19 nt, Artificial Sequence
  Description of Artificial Sequence: Synthetic oligonucleotide
  Sense strand starting at position 3682 of SEQ ID NO: 1886327
acgcauugcccggaaugga

SEQ ID NO: 2402185 - RNA, 19 nt, Artificial Sequence
  Description of Artificial Sequence: Synthetic oligonucleotide
  Antisense strand to SEQ ID NO: 2402184
uccauuccgggcaaugcgu

SEQ ID NO: 2402186 - RNA, 19 nt, Artificial Sequence
  Description of Artificial Sequence: Synthetic oligonucleotide
  Sense strand starting at position 3830 of SEQ ID NO: 1886327
agcaguauuugcucacaca

SEQ ID NO: 2402187 - RNA, 19 nt, Artificial Sequence
  Description of Artificial Sequence: Synthetic oligonucleotide
  Antisense strand to SEQ ID NO: 2402186
ugugugagcaaauacugcu

SEQ ID NO: 2402188 - RNA, 19 nt, Artificial Sequence
  Description of Artificial Sequence: Synthetic oligonucleotide
  Sense strand starting at position 3901 of SEQ ID NO: 1886327
ggaagauguacacaacggu

SEQ ID NO: 2402189 - RNA, 19 nt, Artificial Sequence
  Description of Artificial Sequence: Synthetic oligonucleotide
  Antisense strand to SEQ ID NO: 2402188
accguuguguacaucuucc

SEQ ID NO: 2402190 - RNA, 19 nt, Artificial Sequence
  Description of Artificial Sequence: Synthetic oligonucleotide
  Sense strand starting at position 3923 of SEQ ID NO: 1886327
gcccauuacucugccagga

SEQ ID NO: 2402191 - RNA, 19 nt, Artificial Sequence
  Description of Artificial Sequence: Synthetic oligonucleotide
  Antisense strand to SEQ ID NO: 2402190
uccuggcagaguaaugggc

SEQ ID NO: 2402192 - RNA, 19 nt, Artificial Sequence
  Description of Artificial Sequence: Synthetic oligonucleotide
  Sense strand starting at position 3927 of SEQ ID NO: 1886327
auuacucugccaggaagau

SEQ ID NO: 2402193 - RNA, 19 nt, Artificial Sequence
  Description of Artificial Sequence: Synthetic oligonucleotide
  Antisense strand to SEQ ID NO: 2402192
aucuuccuggcagaguaau

SEQ ID NO: 2402194 - RNA, 19 nt, Artificial Sequence
  Description of Artificial Sequence: Synthetic oligonucleotide
  Sense strand starting at position 84 of SEQ ID NO: 1886328
aucaguaggaugugaacuu

SEQ ID NO: 2402195 - RNA, 19 nt, Artificial Sequence
  Description of Artificial Sequence: Synthetic oligonucleotide
  Antisense strand to SEQ ID NO: 2402194
aaguucacauccuacugau

SEQ ID NO: 2402196 - RNA, 19 nt, Artificial Sequence
  Description of Artificial Sequence: Synthetic oligonucleotide
  Sense strand starting at position 91 of SEQ ID NO: 1886328
ggaugugaacuuugaccuu

SEQ ID NO: 2402197 - RNA, 19 nt, Artificial Sequence
  Description of Artificial Sequence: Synthetic oligonucleotide
  Antisense strand to SEQ ID NO: 2402196
aaggucaaaguucacaucc

SEQ ID NO: 2402198 - RNA, 19 nt, Artificial Sequence
  Description of Artificial Sequence: Synthetic oligonucleotide
  Sense strand starting at position 306 of SEQ ID NO: 1886328
guuugaaacucagugucaa

SEQ ID NO: 2402199 - RNA, 19 nt, Artificial Sequence
  Description of Artificial Sequence: Synthetic oligonucleotide
  Antisense strand to SEQ ID NO: 2402198
uugacacugaguuucaaac

SEQ ID NO: 2402200 - RNA, 19 nt, Artificial Sequence
  Description of Artificial Sequence: Synthetic oligonucleotide
  Sense strand starting at position 307 of SEQ ID NO: 1886328
uuugaaacucagugucaag

SEQ ID NO: 2402201 - RNA, 19 nt, Artificial Sequence
  Description of Artificial Sequence: Synthetic oligonucleotide
  Antisense strand to SEQ ID NO: 2402200
cuugacacugaguuucaaa

SEQ ID NO: 2402202 - RNA, 19 nt, Artificial Sequence
  Description of Artificial Sequence: Synthetic oligonucleotide
  Sense strand starting at position 498 of SEQ ID NO: 1886328
cugucaucauucuugcacu

SEQ ID NO: 2402203 - RNA, 19 nt, Artificial Sequence
  Description of Artificial Sequence: Synthetic oligonucleotide
  Antisense strand to SEQ ID NO: 2402202
agugcaagaaugaugacag

SEQ ID NO: 2402204 - RNA, 19 nt, Artificial Sequence
  Description of Artificial Sequence: Synthetic oligonucleotide
  Sense strand starting at position 854 of SEQ ID NO: 1886328
gagagacucucuguggcaa

SEQ ID NO: 2402205 - RNA, 19 nt, Artificial Sequence
  Description of Artificial Sequence: Synthetic oligonucleotide
  Antisense strand to SEQ ID NO: 2402204
uugccacagagagucucuc

SEQ ID NO: 2402206 - RNA, 19 nt, Artificial Sequence
  Description of Artificial Sequence: Synthetic oligonucleotide
  Sense strand starting at position 855 of SEQ ID NO: 1886328
agagacucucuguggcaau

SEQ ID NO: 2402207 - RNA, 19 nt, Artificial Sequence
  Description of Artificial Sequence: Synthetic oligonucleotide
  Antisense strand to SEQ ID NO: 2402206
auugccacagagagucucu

SEQ ID NO: 2402208 - RNA, 19 nt, Artificial Sequence
  Description of Artificial Sequence: Synthetic oligonucleotide
  Sense strand starting at position 1009 of SEQ ID NO: 1886328
uugcuuuccaagcgggaaa

SEQ ID NO: 2402209 - RNA, 19 nt, Artificial Sequence
  Description of Artificial Sequence: Synthetic oligonucleotide
  Antisense strand to SEQ ID NO: 2402208
uuucccgcuuggaaagcaa

SEQ ID NO: 2402210 - RNA, 19 nt, Artificial Sequence
  Description of Artificial Sequence: Synthetic oligonucleotide
  Sense strand starting at position 1038 of SEQ ID NO: 1886328
agcaguuauuugcucacau

SEQ ID NO: 2402211 - RNA, 19 nt, Artificial Sequence
  Description of Artificial Sequence: Synthetic oligonucleotide
  Antisense strand to SEQ ID NO: 2402210
augugagcaaauaacugcu

SEQ ID NO: 2402212 - RNA, 19 nt, Artificial Sequence
  Description of Artificial Sequence: Synthetic oligonucleotide
  Sense strand starting at position 1039 of SEQ ID NO: 1886328
gcaguuauuugcucacaug

SEQ ID NO: 2402213 - RNA, 19 nt, Artificial Sequence
  Description of Artificial Sequence: Synthetic oligonucleotide
  Antisense strand to SEQ ID NO: 2402212
caugugagcaaauaacugc

SEQ ID NO: 2402214 - RNA, 19 nt, Artificial Sequence
  Description of Artificial Sequence: Synthetic oligonucleotide
  Sense strand starting at position 1105 of SEQ ID NO: 1886328
uccagaaaggugugcacaa

SEQ ID NO: 2402215 - RNA, 19 nt, Artificial Sequence
  Description of Artificial Sequence: Synthetic oligonucleotide
  Antisense strand to SEQ ID NO: 2402214
uugugcacaccuuucugga

SEQ ID NO: 2402216 - RNA, 19 nt, Artificial Sequence
  Description of Artificial Sequence: Synthetic oligonucleotide
  Sense strand starting at position 1131 of SEQ ID NO: 1886328
gcccacuacucugcugaga

SEQ ID NO: 2402217 - RNA, 19 nt, Artificial Sequence
  Description of Artificial Sequence: Synthetic oligonucleotide
  Antisense strand to SEQ ID NO: 2402216
ucucagcagaguagugggc

SEQ ID NO: 2402218 - RNA, 19 nt, Artificial Sequence
  Description of Artificial Sequence: Synthetic oligonucleotide
  Sense strand starting at position 1190 of SEQ ID NO: 1886328
cucacuugcccagagacau

SEQ ID NO: 2402219 - RNA, 19 nt, Artificial Sequence
  Description of Artificial Sequence: Synthetic oligonucleotide
  Antisense strand to SEQ ID NO: 2402218
augucucugggcaagugag

SEQ ID NO: 2402220 - RNA, 19 nt, Artificial Sequence
  Description of Artificial Sequence: Synthetic oligonucleotide
  Sense strand starting at position 1381 of SEQ ID NO: 1886328
ucaucucauggcuagggau

SEQ ID NO: 2402221 - RNA, 19 nt, Artificial Sequence
  Description of Artificial Sequence: Synthetic oligonucleotide
  Antisense strand to SEQ ID NO: 2402220
aucccuagccaugagauga

SEQ ID NO: 2402222 - RNA, 19 nt, Artificial Sequence
  Description of Artificial Sequence: Synthetic oligonucleotide
  Sense strand starting at position 1595 of SEQ ID NO: 1886328
gugaccugguccucuacau

SEQ ID NO: 2402223 - RNA, 19 nt, Artificial Sequence
  Description of Artificial Sequence: Synthetic oligonucleotide
  Antisense strand to SEQ ID NO: 2402222
auguagaggaccaggucac

SEQ ID NO: 2402224 - RNA, 19 nt, Artificial Sequence
  Description of Artificial Sequence: Synthetic oligonucleotide
  Sense strand starting at position 1757 of SEQ ID NO: 1886328
gucccauccgucuauguca

SEQ ID NO: 2402225 - RNA, 19 nt, Artificial Sequence
  Description of Artificial Sequence: Synthetic oligonucleotide
  Antisense strand to SEQ ID NO: 2402224
ugacauagacggaugggac

SEQ ID NO: 2402226 - RNA, 19 nt, Artificial Sequence
  Description of Artificial Sequence: Synthetic oligonucleotide
  Sense strand starting at position 1759 of SEQ ID NO: 1886328
cccauccgucuaugucaua

SEQ ID NO: 2402227 - RNA, 19 nt, Artificial Sequence
  Description of Artificial Sequence: Synthetic oligonucleotide
  Antisense strand to SEQ ID NO: 2402226
uaugacauagacggauggg

SEQ ID NO: 2402228 - RNA, 19 nt, Artificial Sequence
  Description of Artificial Sequence: Synthetic oligonucleotide
  Sense strand starting at position 1780 of SEQ ID NO: 1886328
gaggaaauguuccucacau

SEQ ID NO: 2402229 - RNA, 19 nt, Artificial Sequence
  Description of Artificial Sequence: Synthetic oligonucleotide
  Antisense strand to SEQ ID NO: 2402228
augugaggaacauuuccuc

SEQ ID NO: 2402230 - RNA, 19 nt, Artificial Sequence
  Description of Artificial Sequence: Synthetic oligonucleotide
  Sense strand starting at position 1781 of SEQ ID NO: 1886328
aggaaauguuccucacaug

SEQ ID NO: 2402231 - RNA, 19 nt, Artificial Sequence
  Description of Artificial Sequence: Synthetic oligonucleotide
  Antisense strand to SEQ ID NO: 2402230
caugugaggaacauuuccu

SEQ ID NO: 2402232 - RNA, 19 nt, Artificial Sequence
  Description of Artificial Sequence: Synthetic oligonucleotide
  Sense strand starting at position 1790 of SEQ ID NO: 1886328
uccucacaugcaugugaua

SEQ ID NO: 2402233 - RNA, 19 nt, Artificial Sequence
  Description of Artificial Sequence: Synthetic oligonucleotide
  Antisense strand to SEQ ID NO: 2402232
uaucacaugcaugugagga

SEQ ID NO: 2402234 - RNA, 19 nt, Artificial Sequence
  Description of Artificial Sequence: Synthetic oligonucleotide
  Sense strand starting at position 1797 of SEQ ID NO: 1886328
augcaugugauaggagauu

SEQ ID NO: 2402235 - RNA, 19 nt, Artificial Sequence
  Description of Artificial Sequence: Synthetic oligonucleotide
  Antisense strand to SEQ ID NO: 2402234
aaucuccuaucacaugcau

SEQ ID NO: 2402236 - RNA, 19 nt, Artificial Sequence
  Description of Artificial Sequence: Synthetic oligonucleotide
  Sense strand starting at position 2050 of SEQ ID NO: 1886328
gagagcugaugaccuuaaa

SEQ ID NO: 2402237 - RNA, 19 nt, Artificial Sequence
  Description of Artificial Sequence: Synthetic oligonucleotide
  Antisense strand to SEQ ID NO: 2402236
uuuaaggucaucagcucuc

SEQ ID NO: 2402238 - RNA, 19 nt, Artificial Sequence
  Description of Artificial Sequence: Synthetic oligonucleotide
  Sense strand starting at position 2123 of SEQ ID NO: 1886328
gacaaucagcucugggagu

SEQ ID NO: 2402239 - RNA, 19 nt, Artificial Sequence
  Description of Artificial Sequence: Synthetic oligonucleotide
  Antisense strand to SEQ ID NO: 2402238
acucccagagcugauuguc

SEQ ID NO: 2402240 - RNA, 19 nt, Artificial Sequence
  Description of Artificial Sequence: Synthetic oligonucleotide
  Sense strand starting at position 2308 of SEQ ID NO: 1886328
cagccucuguuggucagaa

SEQ ID NO: 2402241 - RNA, 19 nt, Artificial Sequence
  Description of Artificial Sequence: Synthetic oligonucleotide
  Antisense strand to SEQ ID NO: 2402240
uucugaccaacagaggcug

SEQ ID NO: 2402242 - RNA, 19 nt, Artificial Sequence
  Description of Artificial Sequence: Synthetic oligonucleotide
  Sense strand starting at position 2310 of SEQ ID NO: 1886328
gccucuguuggucagaaga

SEQ ID NO: 2402243 - RNA, 19 nt, Artificial Sequence
  Description of Artificial Sequence: Synthetic oligonucleotide
  Antisense strand to SEQ ID NO: 2402242
ucuucugaccaacagaggc

SEQ ID NO: 2402244 - RNA, 19 nt, Artificial Sequence
  Description of Artificial Sequence: Synthetic oligonucleotide
  Sense strand starting at position 2376 of SEQ ID NO: 1886328
gcugcugagaaguguaaag

SEQ ID NO: 2402245 - RNA, 19 nt, Artificial Sequence
  Description of Artificial Sequence: Synthetic oligonucleotide
  Antisense strand to SEQ ID NO: 2402244
cuuuacacuucucagcagc

SEQ ID NO: 2402246 - RNA, 19 nt, Artificial Sequence
  Description of Artificial Sequence: Synthetic oligonucleotide
  Sense strand starting at position 2640 of SEQ ID NO: 1886328
uguguaugucagagugagu

SEQ ID NO: 2402247 - RNA, 19 nt, Artificial Sequence
  Description of Artificial Sequence: Synthetic oligonucleotide
  Antisense strand to SEQ ID NO: 2402246
acucacucugacauacaca

SEQ ID NO: 2402248 - RNA, 19 nt, Artificial Sequence
  Description of Artificial Sequence: Synthetic oligonucleotide
  Sense strand starting at position 2702 of SEQ ID NO: 1886328
agcacaacggguugucaua

SEQ ID NO: 2402249 - RNA, 19 nt, Artificial Sequence
  Description of Artificial Sequence: Synthetic oligonucleotide
  Antisense strand to SEQ ID NO: 2402248
uaugacaacccguugugcu

SEQ ID NO: 2402250 - RNA, 19 nt, Artificial Sequence
  Description of Artificial Sequence: Synthetic oligonucleotide
  Sense strand starting at position 2789 of SEQ ID NO: 1886328
caaucaguaggaugcgaau

SEQ ID NO: 2402251 - RNA, 19 nt, Artificial Sequence
  Description of Artificial Sequence: Synthetic oligonucleotide
  Antisense strand to SEQ ID NO: 2402250
auucgcauccuacugauug

SEQ ID NO: 2402252 - RNA, 19 nt, Artificial Sequence
  Description of Artificial Sequence: Synthetic oligonucleotide
  Sense strand starting at position 2826 of SEQ ID NO: 1886328
cagacauuggccugauguc

SEQ ID NO: 2402253 - RNA, 19 nt, Artificial Sequence
  Description of Artificial Sequence: Synthetic oligonucleotide
  Antisense strand to SEQ ID NO: 2402252
gacaucaggccaaugucug

SEQ ID NO: 2402254 - RNA, 19 nt, Artificial Sequence
  Description of Artificial Sequence: Synthetic oligonucleotide
  Sense strand starting at position 2836 of SEQ ID NO: 1886328
ccugaugucccucgacuaa

SEQ ID NO: 2402255 - RNA, 19 nt, Artificial Sequence
  Description of Artificial Sequence: Synthetic oligonucleotide
  Antisense strand to SEQ ID NO: 2402254
uuagucgagggacaucagg

SEQ ID NO: 2402256 - RNA, 19 nt, Artificial Sequence
  Description of Artificial Sequence: Synthetic oligonucleotide
  Sense strand starting at position 2902 of SEQ ID NO: 1886328
auauaaugucgugaccaga

SEQ ID NO: 2402257 - RNA, 19 nt, Artificial Sequence
  Description of Artificial Sequence: Synthetic oligonucleotide
  Antisense strand to SEQ ID NO: 2402256
ucuggucacgacauuauau

SEQ ID NO: 2402258 - RNA, 19 nt, Artificial Sequence
  Description of Artificial Sequence: Synthetic oligonucleotide
  Sense strand starting at position 3005 of SEQ ID NO: 1886328
ccaccacguuggucuuaaa

SEQ ID NO: 2402259 - RNA, 19 nt, Artificial Sequence
  Description of Artificial Sequence: Synthetic oligonucleotide
  Antisense strand to SEQ ID NO: 2402258
uuuaagaccaacguggugg

SEQ ID NO: 2402260 - RNA, 19 nt, Artificial Sequence
  Description of Artificial Sequence: Synthetic oligonucleotide
  Sense strand starting at position 3045 of SEQ ID NO: 1886328
cagagacagucuucugaac

SEQ ID NO: 2402261 - RNA, 19 nt, Artificial Sequence
  Description of Artificial Sequence: Synthetic oligonucleotide
  Antisense strand to SEQ ID NO: 2402260
guucagaagacugucucug

SEQ ID NO: 2402262 - RNA, 19 nt, Artificial Sequence
  Description of Artificial Sequence: Synthetic oligonucleotide
  Sense strand starting at position 3382 of SEQ ID NO: 1886328
ugagcugcgagacauagaa

SEQ ID NO: 2402263 - RNA, 19 nt, Artificial Sequence
  Description of Artificial Sequence: Synthetic oligonucleotide
  Antisense strand to SEQ ID NO: 2402262
uucuaugucucgcagcuca

SEQ ID NO: 2402264 - RNA, 19 nt, Artificial Sequence
  Description of Artificial Sequence: Synthetic oligonucleotide
  Sense strand starting at position 3485 of SEQ ID NO: 1886328
ccggcuaagugagcugaaa

SEQ ID NO: 2402265 - RNA, 19 nt, Artificial Sequence
  Description of Artificial Sequence: Synthetic oligonucleotide
  Antisense strand to SEQ ID NO: 2402264
uuucagcucacuuagccgg

SEQ ID NO: 2402266 - RNA, 19 nt, Artificial Sequence
  Description of Artificial Sequence: Synthetic oligonucleotide
  Sense strand starting at position 3618 of SEQ ID NO: 1886328
acauguguugccuggaaug

SEQ ID NO: 2402267 - RNA, 19 nt, Artificial Sequence
  Description of Artificial Sequence: Synthetic oligonucleotide
  Antisense strand to SEQ ID NO: 2402266
cauuccaggcaacacaugu

SEQ ID NO: 2402268 - RNA, 19 nt, Artificial Sequence
  Description of Artificial Sequence: Synthetic oligonucleotide
  Sense strand starting at position 3648 of SEQ ID NO: 1886328
ccaugaauacgccaagugu

SEQ ID NO: 2402269 - RNA, 19 nt, Artificial Sequence
  Description of Artificial Sequence: Synthetic oligonucleotide
  Antisense strand to SEQ ID NO: 2402268
acacuuggcguauucaugg

SEQ ID NO: 2402270 - RNA, 19 nt, Artificial Sequence
  Description of Artificial Sequence: Synthetic oligonucleotide
  Sense strand starting at position 3763 of SEQ ID NO: 1886328
ugggauccagagcaguauu

SEQ ID NO: 2402271 - RNA, 19 nt, Artificial Sequence
  Description of Artificial Sequence: Synthetic oligonucleotide
  Antisense strand to SEQ ID NO: 2402270
aauacugcucuggauccca

SEQ ID NO: 2402272 - RNA, 19 nt, Artificial Sequence
  Description of Artificial Sequence: Synthetic oligonucleotide
  Sense strand starting at position 3774 of SEQ ID NO: 1886328
gcaguauuugcucacacga

SEQ ID NO: 2402273 - RNA, 19 nt, Artificial Sequence
  Description of Artificial Sequence: Synthetic oligonucleotide
  Antisense strand to SEQ ID NO: 2402272
ucgugugagcaaauacugc

SEQ ID NO: 2402274 - RNA, 19 nt, Artificial Sequence
  Description of Artificial Sequence: Synthetic oligonucleotide
  Sense strand starting at position 99 of SEQ ID NO: 1886329
uggaaauaggccugauguc

SEQ ID NO: 2402275 - RNA, 19 nt, Artificial Sequence
  Description of Artificial Sequence: Synthetic oligonucleotide
  Antisense strand to SEQ ID NO: 2402274
gacaucaggccuauuucca

SEQ ID NO: 2402276 - RNA, 19 nt, Artificial Sequence
  Description of Artificial Sequence: Synthetic oligonucleotide
  Sense strand starting at position 108 of SEQ ID NO: 1886329
gccugaugucccucgugua

SEQ ID NO: 2402277 - RNA, 19 nt, Artificial Sequence
  Description of Artificial Sequence: Synthetic oligonucleotide
  Antisense strand to SEQ ID NO: 2402276
uacacgagggacaucaggc

SEQ ID NO: 2402278 - RNA, 19 nt, Artificial Sequence
  Description of Artificial Sequence: Synthetic oligonucleotide
  Sense strand starting at position 174 of SEQ ID NO: 1886329
cucugaugucgggaccaga

SEQ ID NO: 2402279 - RNA, 19 nt, Artificial Sequence
  Description of Artificial Sequence: Synthetic oligonucleotide
  Antisense strand to SEQ ID NO: 2402278
ucuggucccgacaucagag

SEQ ID NO: 2402280 - RNA, 19 nt, Artificial Sequence
  Description of Artificial Sequence: Synthetic oligonucleotide
  Sense strand starting at position 534 of SEQ ID NO: 1886329
ggcaaugucccaucgugca

SEQ ID NO: 2402281 - RNA, 19 nt, Artificial Sequence
  Description of Artificial Sequence: Synthetic oligonucleotide
  Antisense strand to SEQ ID NO: 2402280
ugcacgaugggacauugcc

SEQ ID NO: 2402282 - RNA, 19 nt, Artificial Sequence
  Description of Artificial Sequence: Synthetic oligonucleotide
  Sense strand starting at position 625 of SEQ ID NO: 1886329
agauacauguggcuacuaa

SEQ ID NO: 2402283 - RNA, 19 nt, Artificial Sequence
  Description of Artificial Sequence: Synthetic oligonucleotide
  Antisense strand to SEQ ID NO: 2402282
uuaguagccacauguaucu

SEQ ID NO: 2402284 - RNA, 19 nt, Artificial Sequence
  Description of Artificial Sequence: Synthetic oligonucleotide
  Sense strand starting at position 626 of SEQ ID NO: 1886329
gauacauguggcuacuaag

SEQ ID NO: 2402285 - RNA, 19 nt, Artificial Sequence
  Description of Artificial Sequence: Synthetic oligonucleotide
  Antisense strand to SEQ ID NO: 2402284
cuuaguagccacauguauc

SEQ ID NO: 2402286 - RNA, 19 nt, Artificial Sequence
  Description of Artificial Sequence: Synthetic oligonucleotide
  Sense strand starting at position 787 of SEQ ID NO: 1886329
agcagaauccagcacuuga

SEQ ID NO: 2402287 - RNA, 19 nt, Artificial Sequence
  Description of Artificial Sequence: Synthetic oligonucleotide
  Antisense strand to SEQ ID NO: 2402286
ucaagugcuggauucugcu

SEQ ID NO: 2402288 - RNA, 19 nt, Artificial Sequence
  Description of Artificial Sequence: Synthetic oligonucleotide
  Sense strand starting at position 800 of SEQ ID NO: 1886329
acuugaauaucgccaucau

SEQ ID NO: 2402289 - RNA, 19 nt, Artificial Sequence
  Description of Artificial Sequence: Synthetic oligonucleotide
  Antisense strand to SEQ ID NO: 2402288
augauggcgauauucaagu

SEQ ID NO: 2402290 - RNA, 19 nt, Artificial Sequence
  Description of Artificial Sequence: Synthetic oligonucleotide
  Sense strand starting at position 801 of SEQ ID NO: 1886329
cuugaauaucgccaucaua

SEQ ID NO: 2402291 - RNA, 19 nt, Artificial Sequence
  Description of Artificial Sequence: Synthetic oligonucleotide
  Antisense strand to SEQ ID NO: 2402290
uaugauggcgauauucaag

SEQ ID NO: 2402292 - RNA, 19 nt, Artificial Sequence
  Description of Artificial Sequence: Synthetic oligonucleotide
  Sense strand starting at position 846 of SEQ ID NO: 1886329
aaagauucucuguggcaau

SEQ ID NO: 2402293 - RNA, 19 nt, Artificial Sequence
  Description of Artificial Sequence: Synthetic oligonucleotide
  Antisense strand to SEQ ID NO: 2402292
auugccacagagaaucuuu

SEQ ID NO: 2402294 - RNA, 19 nt, Artificial Sequence
  Description of Artificial Sequence: Synthetic oligonucleotide
  Sense strand starting at position 858 of SEQ ID NO: 1886329
uggcaaugccauugggauu

SEQ ID NO: 2402295 - RNA, 19 nt, Artificial Sequence
  Description of Artificial Sequence: Synthetic oligonucleotide
  Antisense strand to SEQ ID NO: 2402294
aaucccaauggcauugcca

SEQ ID NO: 2402296 - RNA, 19 nt, Artificial Sequence
  Description of Artificial Sequence: Synthetic oligonucleotide
  Sense strand starting at position 877 of SEQ ID NO: 1886329
gcacauauguugccuggaa

SEQ ID NO: 2402297 - RNA, 19 nt, Artificial Sequence
  Description of Artificial Sequence: Synthetic oligonucleotide
  Antisense strand to SEQ ID NO: 2402296
uuccaggcaacauaugugc

SEQ ID NO: 2402298 - RNA, 19 nt, Artificial Sequence
  Description of Artificial Sequence: Synthetic oligonucleotide
  Sense strand starting at position 878 of SEQ ID NO: 1886329
cacauauguugccuggaau

SEQ ID NO: 2402299 - RNA, 19 nt, Artificial Sequence
  Description of Artificial Sequence: Synthetic oligonucleotide
  Antisense strand to SEQ ID NO: 2402298
auuccaggcaacauaugug

SEQ ID NO: 2402300 - RNA, 19 nt, Artificial Sequence
  Description of Artificial Sequence: Synthetic oligonucleotide
  Sense strand starting at position 879 of SEQ ID NO: 1886329
acauauguugccuggaauc

SEQ ID NO: 2402301 - RNA, 19 nt, Artificial Sequence
  Description of Artificial Sequence: Synthetic oligonucleotide
  Antisense strand to SEQ ID NO: 2402300
gauuccaggcaacauaugu

SEQ ID NO: 2402302 - RNA, 19 nt, Artificial Sequence
  Description of Artificial Sequence: Synthetic oligonucleotide
  Sense strand starting at position 993 of SEQ ID NO: 1886329
ggaugccuucgggauggaa

SEQ ID NO: 2402303 - RNA, 19 nt, Artificial Sequence
  Description of Artificial Sequence: Synthetic oligonucleotide
  Antisense strand to SEQ ID NO: 2402302
uuccaucccgaaggcaucc

SEQ ID NO: 2402304 - RNA, 19 nt, Artificial Sequence
  Description of Artificial Sequence: Synthetic oligonucleotide
  Sense strand starting at position 1005 of SEQ ID NO: 1886329
gauggaagcugcuuuccaa

SEQ ID NO: 2402305 - RNA, 19 nt, Artificial Sequence
  Description of Artificial Sequence: Synthetic oligonucleotide
  Antisense strand to SEQ ID NO: 2402304
uuggaaagcagcuuccauc

SEQ ID NO: 2402306 - RNA, 19 nt, Artificial Sequence
  Description of Artificial Sequence: Synthetic oligonucleotide
  Sense strand starting at position 1013 of SEQ ID NO: 1886329
cugcuuuccaagugggaaa

SEQ ID NO: 2402307 - RNA, 19 nt, Artificial Sequence
  Description of Artificial Sequence: Synthetic oligonucleotide
  Antisense strand to SEQ ID NO: 2402306
uuucccacuuggaaagcag

SEQ ID NO: 2402308 - RNA, 19 nt, Artificial Sequence
  Description of Artificial Sequence: Synthetic oligonucleotide
  Sense strand starting at position 1032 of SEQ ID NO: 1886329
guggauccagagcacuauu

SEQ ID NO: 2402309 - RNA, 19 nt, Artificial Sequence
  Description of Artificial Sequence: Synthetic oligonucleotide
  Antisense strand to SEQ ID NO: 2402308
aauagugcucuggauccac

SEQ ID NO: 2402310 - RNA, 19 nt, Artificial Sequence
  Description of Artificial Sequence: Synthetic oligonucleotide
  Sense strand starting at position 1512 of SEQ ID NO: 1886329
cucccuuguccucagguaa

SEQ ID NO: 2402311 - RNA, 19 nt, Artificial Sequence
  Description of Artificial Sequence: Synthetic oligonucleotide
  Antisense strand to SEQ ID NO: 2402310
uuaccugaggacaagggag

SEQ ID NO: 2402312 - RNA, 19 nt, Artificial Sequence
  Description of Artificial Sequence: Synthetic oligonucleotide
  Sense strand starting at position 1779 of SEQ ID NO: 1886329
gaggaaauguuccuaaccu

SEQ ID NO: 2402313 - RNA, 19 nt, Artificial Sequence
  Description of Artificial Sequence: Synthetic oligonucleotide
  Antisense strand to SEQ ID NO: 2402312
agguuaggaacauuuccuc

SEQ ID NO: 2402314 - RNA, 19 nt, Artificial Sequence
  Description of Artificial Sequence: Synthetic oligonucleotide
  Sense strand starting at position 1847 of SEQ ID NO: 1886329
augggaacuaguggaaguu

SEQ ID NO: 2402315 - RNA, 19 nt, Artificial Sequence
  Description of Artificial Sequence: Synthetic oligonucleotide
  Antisense strand to SEQ ID NO: 2402314
aacuuccacuaguucccau

SEQ ID NO: 2402316 - RNA, 19 nt, Artificial Sequence
  Description of Artificial Sequence: Synthetic oligonucleotide
  Sense strand starting at position 1856 of SEQ ID NO: 1886329
aguggaaguugucccucaa

SEQ ID NO: 2402317 - RNA, 19 nt, Artificial Sequence
  Description of Artificial Sequence: Synthetic oligonucleotide
  Antisense strand to SEQ ID NO: 2402316
uugagggacaacuuccacu

SEQ ID NO: 2402318 - RNA, 19 nt, Artificial Sequence
  Description of Artificial Sequence: Synthetic oligonucleotide
  Sense strand starting at position 2048 of SEQ ID NO: 1886329
gggugagccaaugacuuua

SEQ ID NO: 2402319 - RNA, 19 nt, Artificial Sequence
  Description of Artificial Sequence: Synthetic oligonucleotide
  Antisense strand to SEQ ID NO: 2402318
uaaagucauuggcucaccc

SEQ ID NO: 2402320 - RNA, 19 nt, Artificial Sequence
  Description of Artificial Sequence: Synthetic oligonucleotide
  Sense strand starting at position 2050 of SEQ ID NO: 1886329
gugagccaaugacuuuaaa

SEQ ID NO: 2402321 - RNA, 19 nt, Artificial Sequence
  Description of Artificial Sequence: Synthetic oligonucleotide
  Antisense strand to SEQ ID NO: 2402320
uuuaaagucauuggcucac

SEQ ID NO: 2402322 - RNA, 19 nt, Artificial Sequence
  Description of Artificial Sequence: Synthetic oligonucleotide
  Sense strand starting at position 2082 of SEQ ID NO: 1886329
cccuuaauggccugcugaa

SEQ ID NO: 2402323 - RNA, 19 nt, Artificial Sequence
  Description of Artificial Sequence: Synthetic oligonucleotide
  Antisense strand to SEQ ID NO: 2402322
uucagcaggccauuaaggg

SEQ ID NO: 2402324 - RNA, 19 nt, Artificial Sequence
  Description of Artificial Sequence: Synthetic oligonucleotide
  Sense strand starting at position 2331 of SEQ ID NO: 1886329
ucacaugcaugcuuaagaa

SEQ ID NO: 2402325 - RNA, 19 nt, Artificial Sequence
  Description of Artificial Sequence: Synthetic oligonucleotide
  Antisense strand to SEQ ID NO: 2402324
uucuuaagcaugcauguga

SEQ ID NO: 2402326 - RNA, 19 nt, Artificial Sequence
  Description of Artificial Sequence: Synthetic oligonucleotide
  Sense strand starting at position 2419 of SEQ ID NO: 1886329
uuccuuggccuccaugauu

SEQ ID NO: 2402327 - RNA, 19 nt, Artificial Sequence
  Description of Artificial Sequence: Synthetic oligonucleotide
  Antisense strand to SEQ ID NO: 2402326
aaucauggaggccaaggaa

SEQ ID NO: 2402328 - RNA, 19 nt, Artificial Sequence
  Description of Artificial Sequence: Synthetic oligonucleotide
  Sense strand starting at position 2518 of SEQ ID NO: 1886329
gugcccauugcugaaucua

SEQ ID NO: 2402329 - RNA, 19 nt, Artificial Sequence
  Description of Artificial Sequence: Synthetic oligonucleotide
  Antisense strand to SEQ ID NO: 2402328
uagauucagcaaugggcac

SEQ ID NO: 2402330 - RNA, 19 nt, Artificial Sequence
  Description of Artificial Sequence: Synthetic oligonucleotide
  Sense strand starting at position 2533 of SEQ ID NO: 1886329
ucuauuugccuguggcuau

SEQ ID NO: 2402331 - RNA, 19 nt, Artificial Sequence
  Description of Artificial Sequence: Synthetic oligonucleotide
  Antisense strand to SEQ ID NO: 2402330
auagccacaggcaaauaga

SEQ ID NO: 2402332 - RNA, 19 nt, Artificial Sequence
  Description of Artificial Sequence: Synthetic oligonucleotide
  Sense strand starting at position 2728 of SEQ ID NO: 1886329
aucaguaggaugugaacuu

SEQ ID NO: 2402333 - RNA, 19 nt, Artificial Sequence
  Description of Artificial Sequence: Synthetic oligonucleotide
  Antisense strand to SEQ ID NO: 2402332
aaguucacauccuacugau

SEQ ID NO: 2402334 - RNA, 19 nt, Artificial Sequence
  Description of Artificial Sequence: Synthetic oligonucleotide
  Sense strand starting at position 2735 of SEQ ID NO: 1886329
ggaugugaacuuugaccuu

SEQ ID NO: 2402335 - RNA, 19 nt, Artificial Sequence
  Description of Artificial Sequence: Synthetic oligonucleotide
  Antisense strand to SEQ ID NO: 2402334
aaggucaaaguucacaucc

SEQ ID NO: 2402336 - RNA, 19 nt, Artificial Sequence
  Description of Artificial Sequence: Synthetic oligonucleotide
  Sense strand starting at position 2950 of SEQ ID NO: 1886329
guuugaaacucagugucaa

SEQ ID NO: 2402337 - RNA, 19 nt, Artificial Sequence
  Description of Artificial Sequence: Synthetic oligonucleotide
  Antisense strand to SEQ ID NO: 2402336
uugacacugaguuucaaac

SEQ ID NO: 2402338 - RNA, 19 nt, Artificial Sequence
  Description of Artificial Sequence: Synthetic oligonucleotide
  Sense strand starting at position 2951 of SEQ ID NO: 1886329
uuugaaacucagugucaag

SEQ ID NO: 2402339 - RNA, 19 nt, Artificial Sequence
  Description of Artificial Sequence: Synthetic oligonucleotide
  Antisense strand to SEQ ID NO: 2402338
cuugacacugaguuucaaa

SEQ ID NO: 2402340 - RNA, 19 nt, Artificial Sequence
  Description of Artificial Sequence: Synthetic oligonucleotide
  Sense strand starting at position 3498 of SEQ ID NO: 1886329
gagagacucucuguggcaa

SEQ ID NO: 2402341 - RNA, 19 nt, Artificial Sequence
  Description of Artificial Sequence: Synthetic oligonucleotide
  Antisense strand to SEQ ID NO: 2402340
uugccacagagagucucuc

SEQ ID NO: 2402342 - RNA, 19 nt, Artificial Sequence
  Description of Artificial Sequence: Synthetic oligonucleotide
  Sense strand starting at position 3499 of SEQ ID NO: 1886329
agagacucucuguggcaau

SEQ ID NO: 2402343 - RNA, 19 nt, Artificial Sequence
  Description of Artificial Sequence: Synthetic oligonucleotide
  Antisense strand to SEQ ID NO: 2402342
auugccacagagagucucu

SEQ ID NO: 2402344 - RNA, 19 nt, Artificial Sequence
  Description of Artificial Sequence: Synthetic oligonucleotide
  Sense strand starting at position 3682 of SEQ ID NO: 1886329
agcaguuauuugcucacau

SEQ ID NO: 2402345 - RNA, 19 nt, Artificial Sequence
  Description of Artificial Sequence: Synthetic oligonucleotide
  Antisense strand to SEQ ID NO: 2402344
augugagcaaauaacugcu

SEQ ID NO: 2402346 - RNA, 19 nt, Artificial Sequence
  Description of Artificial Sequence: Synthetic oligonucleotide
  Sense strand starting at position 3683 of SEQ ID NO: 1886329
gcaguuauuugcucacaug

SEQ ID NO: 2402347 - RNA, 19 nt, Artificial Sequence
  Description of Artificial Sequence: Synthetic oligonucleotide
  Antisense strand to SEQ ID NO: 2402346
caugugagcaaauaacugc

SEQ ID NO: 2402348 - RNA, 19 nt, Artificial Sequence
  Description of Artificial Sequence: Synthetic oligonucleotide
  Sense strand starting at position 3749 of SEQ ID NO: 1886329
uccagaaaggugugcacaa

SEQ ID NO: 2402349 - RNA, 19 nt, Artificial Sequence
  Description of Artificial Sequence: Synthetic oligonucleotide
  Antisense strand to SEQ ID NO: 2402348
uugugcacaccuuucugga

SEQ ID NO: 2402350 - RNA, 19 nt, Artificial Sequence
  Description of Artificial Sequence: Synthetic oligonucleotide
  Sense strand starting at position 3775 of SEQ ID NO: 1886329
gcccacuacucugcugaga

SEQ ID NO: 2402351 - RNA, 19 nt, Artificial Sequence
  Description of Artificial Sequence: Synthetic oligonucleotide
  Antisense strand to SEQ ID NO: 2402350
ucucagcagaguagugggc

SEQ ID NO: 2402352 - RNA, 19 nt, Artificial Sequence
  Description of Artificial Sequence: Synthetic oligonucleotide
  Sense strand starting at position 3834 of SEQ ID NO: 1886329
cucacuugcccagagacau

SEQ ID NO: 2402353 - RNA, 19 nt, Artificial Sequence
  Description of Artificial Sequence: Synthetic oligonucleotide
  Antisense strand to SEQ ID NO: 2402352
augucucugggcaagugag

SEQ ID NO: 2402354 - RNA, 19 nt, Artificial Sequence
  Description of Artificial Sequence: Synthetic oligonucleotide
  Sense strand starting at position 192 of SEQ ID NO: 1886330
aucugaugucgugaccaga

SEQ ID NO: 2402355 - RNA, 19 nt, Artificial Sequence
  Description of Artificial Sequence: Synthetic oligonucleotide
  Antisense strand to SEQ ID NO: 2402354
ucuggucacgacaucagau

SEQ ID NO: 2402356 - RNA, 19 nt, Artificial Sequence
  Description of Artificial Sequence: Synthetic oligonucleotide
  Sense strand starting at position 403 of SEQ ID NO: 1886330
gcaccauguccucaggaca

SEQ ID NO: 2402357 - RNA, 19 nt, Artificial Sequence
  Description of Artificial Sequence: Synthetic oligonucleotide
  Antisense strand to SEQ ID NO: 2402356
uguccugaggacauggugc

SEQ ID NO: 2402358 - RNA, 19 nt, Artificial Sequence
  Description of Artificial Sequence: Synthetic oligonucleotide
  Sense strand starting at position 447 of SEQ ID NO: 1886330
augggacaucccugccuaa

SEQ ID NO: 2402359 - RNA, 19 nt, Artificial Sequence
  Description of Artificial Sequence: Synthetic oligonucleotide
  Antisense strand to SEQ ID NO: 2402358
uuaggcagggaugucccau

SEQ ID NO: 2402360 - RNA, 19 nt, Artificial Sequence
  Description of Artificial Sequence: Synthetic oligonucleotide
  Sense strand starting at position 868 of SEQ ID NO: 1886330
gaaggcaccuaggauuaaa

SEQ ID NO: 2402361 - RNA, 19 nt, Artificial Sequence
  Description of Artificial Sequence: Synthetic oligonucleotide
  Antisense strand to SEQ ID NO: 2402360
uuuaauccuaggugccuuc

SEQ ID NO: 2402362 - RNA, 19 nt, Artificial Sequence
  Description of Artificial Sequence: Synthetic oligonucleotide
  Sense strand starting at position 980 of SEQ ID NO: 1886330
gcacauucccucugaaagu

SEQ ID NO: 2402363 - RNA, 19 nt, Artificial Sequence
  Description of Artificial Sequence: Synthetic oligonucleotide
  Antisense strand to SEQ ID NO: 2402362
acuuucagagggaaugugc

SEQ ID NO: 2402364 - RNA, 19 nt, Artificial Sequence
  Description of Artificial Sequence: Synthetic oligonucleotide
  Sense strand starting at position 1042 of SEQ ID NO: 1886330
agcaguuauuugcucacaa

SEQ ID NO: 2402365 - RNA, 19 nt, Artificial Sequence
  Description of Artificial Sequence: Synthetic oligonucleotide
  Antisense strand to SEQ ID NO: 2402364
uugugagcaaauaacugcu

SEQ ID NO: 2402366 - RNA, 19 nt, Artificial Sequence
  Description of Artificial Sequence: Synthetic oligonucleotide
  Sense strand starting at position 1043 of SEQ ID NO: 1886330
gcaguuauuugcucacaag

SEQ ID NO: 2402367 - RNA, 19 nt, Artificial Sequence
  Description of Artificial Sequence: Synthetic oligonucleotide
  Antisense strand to SEQ ID NO: 2402366
cuugugagcaaauaacugc

SEQ ID NO: 2402368 - RNA, 19 nt, Artificial Sequence
  Description of Artificial Sequence: Synthetic oligonucleotide
  Sense strand starting at position 1114 of SEQ ID NO: 1886330
ggaagaugugcacaacggu

SEQ ID NO: 2402369 - RNA, 19 nt, Artificial Sequence
  Description of Artificial Sequence: Synthetic oligonucleotide
  Antisense strand to SEQ ID NO: 2402368
accguugugcacaucuucc

SEQ ID NO: 2402370 - RNA, 19 nt, Artificial Sequence
  Description of Artificial Sequence: Synthetic oligonucleotide
  Sense strand starting at position 1139 of SEQ ID NO: 1886330
cacuauucugccgggaaga

SEQ ID NO: 2402371 - RNA, 19 nt, Artificial Sequence
  Description of Artificial Sequence: Synthetic oligonucleotide
  Antisense strand to SEQ ID NO: 2402370
ucuucccggcagaauagug

SEQ ID NO: 2402372 - RNA, 19 nt, Artificial Sequence
  Description of Artificial Sequence: Synthetic oligonucleotide
  Sense strand starting at position 1140 of SEQ ID NO: 1886330
acuauucugccgggaagac

SEQ ID NO: 2402373 - RNA, 19 nt, Artificial Sequence
  Description of Artificial Sequence: Synthetic oligonucleotide
  Antisense strand to SEQ ID NO: 2402372
gucuucccggcagaauagu

SEQ ID NO: 2402374 - RNA, 19 nt, Artificial Sequence
  Description of Artificial Sequence: Synthetic oligonucleotide
  Sense strand starting at position 1575 of SEQ ID NO: 1886330
gugcucuccuuggcauaaa

SEQ ID NO: 2402375 - RNA, 19 nt, Artificial Sequence
  Description of Artificial Sequence: Synthetic oligonucleotide
  Antisense strand to SEQ ID NO: 2402374
uuuaugccaaggagagcac

SEQ ID NO: 2402376 - RNA, 19 nt, Artificial Sequence
  Description of Artificial Sequence: Synthetic oligonucleotide
  Sense strand starting at position 1752 of SEQ ID NO: 1886330
ugacucuccuacuuguaua

SEQ ID NO: 2402377 - RNA, 19 nt, Artificial Sequence
  Description of Artificial Sequence: Synthetic oligonucleotide
  Antisense strand to SEQ ID NO: 2402376
uauacaaguaggagaguca

SEQ ID NO: 2402378 - RNA, 19 nt, Artificial Sequence
  Description of Artificial Sequence: Synthetic oligonucleotide
  Sense strand starting at position 1781 of SEQ ID NO: 1886330
agggaauauuucuauugug

SEQ ID NO: 2402379 - RNA, 19 nt, Artificial Sequence
  Description of Artificial Sequence: Synthetic oligonucleotide
  Antisense strand to SEQ ID NO: 2402378
cacaauagaaauauucccu

SEQ ID NO: 2402380 - RNA, 19 nt, Artificial Sequence
  Description of Artificial Sequence: Synthetic oligonucleotide
  Sense strand starting at position 2127 of SEQ ID NO: 1886330
ucacuuuaggaguggaacu

SEQ ID NO: 2402381 - RNA, 19 nt, Artificial Sequence
  Description of Artificial Sequence: Synthetic oligonucleotide
  Antisense strand to SEQ ID NO: 2402380
aguuccacuccuaaaguga

SEQ ID NO: 2402382 - RNA, 19 nt, Artificial Sequence
  Description of Artificial Sequence: Synthetic oligonucleotide
  Sense strand starting at position 2181 of SEQ ID NO: 1886330
cuugcaggucuuggaaauc

SEQ ID NO: 2402383 - RNA, 19 nt, Artificial Sequence
  Description of Artificial Sequence: Synthetic oligonucleotide
  Antisense strand to SEQ ID NO: 2402382
gauuuccaagaccugcaag

SEQ ID NO: 2402384 - RNA, 19 nt, Artificial Sequence
  Description of Artificial Sequence: Synthetic oligonucleotide
  Sense strand starting at position 2306 of SEQ ID NO: 1886330
gggccuuuguggcucagaa

SEQ ID NO: 2402385 - RNA, 19 nt, Artificial Sequence
  Description of Artificial Sequence: Synthetic oligonucleotide
  Antisense strand to SEQ ID NO: 2402384
uucugagccacaaaggccc

SEQ ID NO: 2402386 - RNA, 19 nt, Artificial Sequence
  Description of Artificial Sequence: Synthetic oligonucleotide
  Sense strand starting at position 2354 of SEQ ID NO: 1886330
gcgggugucccaugauaac

SEQ ID NO: 2402387 - RNA, 19 nt, Artificial Sequence
  Description of Artificial Sequence: Synthetic oligonucleotide
  Antisense strand to SEQ ID NO: 2402386
guuaucaugggacacccgc

SEQ ID NO: 2402388 - RNA, 19 nt, Artificial Sequence
  Description of Artificial Sequence: Synthetic oligonucleotide
  Sense strand starting at position 2516 of SEQ ID NO: 1886330
aauguaucugacuguguca

SEQ ID NO: 2402389 - RNA, 19 nt, Artificial Sequence
  Description of Artificial Sequence: Synthetic oligonucleotide
  Antisense strand to SEQ ID NO: 2402388
ugacacagucagauacauu

SEQ ID NO: 2402390 - RNA, 19 nt, Artificial Sequence
  Description of Artificial Sequence: Synthetic oligonucleotide
  Sense strand starting at position 2523 of SEQ ID NO: 1886330
cugacugugucacuuucua

SEQ ID NO: 2402391 - RNA, 19 nt, Artificial Sequence
  Description of Artificial Sequence: Synthetic oligonucleotide
  Antisense strand to SEQ ID NO: 2402390
uagaaagugacacagucag

SEQ ID NO: 2402392 - RNA, 19 nt, Artificial Sequence
  Description of Artificial Sequence: Synthetic oligonucleotide
  Sense strand starting at position 2527 of SEQ ID NO: 1886330
cugugucacuuucuagaca

SEQ ID NO: 2402393 - RNA, 19 nt, Artificial Sequence
  Description of Artificial Sequence: Synthetic oligonucleotide
  Antisense strand to SEQ ID NO: 2402392
ugucuagaaagugacacag

SEQ ID NO: 2402394 - RNA, 19 nt, Artificial Sequence
  Description of Artificial Sequence: Synthetic oligonucleotide
  Sense strand starting at position 2582 of SEQ ID NO: 1886330
cguggugcuacguauauuu

SEQ ID NO: 2402395 - RNA, 19 nt, Artificial Sequence
  Description of Artificial Sequence: Synthetic oligonucleotide
  Antisense strand to SEQ ID NO: 2402394
aaauauacguagcaccacg

SEQ ID NO: 2402396 - RNA, 19 nt, Artificial Sequence
  Description of Artificial Sequence: Synthetic oligonucleotide
  Sense strand starting at position 2592 of SEQ ID NO: 1886330
cguauauuugccuguggcu

SEQ ID NO: 2402397 - RNA, 19 nt, Artificial Sequence
  Description of Artificial Sequence: Synthetic oligonucleotide
  Antisense strand to SEQ ID NO: 2402396
agccacaggcaaauauacg

SEQ ID NO: 2402398 - RNA, 19 nt, Artificial Sequence
  Description of Artificial Sequence: Synthetic oligonucleotide
  Sense strand starting at position 3010 of SEQ ID NO: 1886330
gccaaaggaucucaagaca

SEQ ID NO: 2402399 - RNA, 19 nt, Artificial Sequence
  Description of Artificial Sequence: Synthetic oligonucleotide
  Antisense strand to SEQ ID NO: 2402398
ugucuugagauccuuuggc

SEQ ID NO: 2402400 - RNA, 19 nt, Artificial Sequence
  Description of Artificial Sequence: Synthetic oligonucleotide
  Sense strand starting at position 3153 of SEQ ID NO: 1886330
gguccuugcacugguuaca

SEQ ID NO: 2402401 - RNA, 19 nt, Artificial Sequence
  Description of Artificial Sequence: Synthetic oligonucleotide
  Antisense strand to SEQ ID NO: 2402400
uguaaccagugcaaggacc

SEQ ID NO: 2402402 - RNA, 19 nt, Artificial Sequence
  Description of Artificial Sequence: Synthetic oligonucleotide
  Sense strand starting at position 3176 of SEQ ID NO: 1886330
cagggcuucucugcacaga

SEQ ID NO: 2402403 - RNA, 19 nt, Artificial Sequence
  Description of Artificial Sequence: Synthetic oligonucleotide
  Antisense strand to SEQ ID NO: 2402402
ucugugcagagaagcccug

SEQ ID NO: 2402404 - RNA, 19 nt, Artificial Sequence
  Description of Artificial Sequence: Synthetic oligonucleotide
  Sense strand starting at position 3177 of SEQ ID NO: 1886330
agggcuucucugcacagaa

SEQ ID NO: 2402405 - RNA, 19 nt, Artificial Sequence
  Description of Artificial Sequence: Synthetic oligonucleotide
  Antisense strand to SEQ ID NO: 2402404
uucugugcagagaagcccu

SEQ ID NO: 2402406 - RNA, 19 nt, Artificial Sequence
  Description of Artificial Sequence: Synthetic oligonucleotide
  Sense strand starting at position 3179 of SEQ ID NO: 1886330
ggcuucucugcacagaacu

SEQ ID NO: 2402407 - RNA, 19 nt, Artificial Sequence
  Description of Artificial Sequence: Synthetic oligonucleotide
  Antisense strand to SEQ ID NO: 2402406
aguucugugcagagaagcc

SEQ ID NO: 2402408 - RNA, 19 nt, Artificial Sequence
  Description of Artificial Sequence: Synthetic oligonucleotide
  Sense strand starting at position 3220 of SEQ ID NO: 1886330
agccaacuugacugcauua

SEQ ID NO: 2402409 - RNA, 19 nt, Artificial Sequence
  Description of Artificial Sequence: Synthetic oligonucleotide
  Antisense strand to SEQ ID NO: 2402408
uaaugcagucaaguuggcu

SEQ ID NO: 2402410 - RNA, 19 nt, Artificial Sequence
  Description of Artificial Sequence: Synthetic oligonucleotide
  Sense strand starting at position 3282 of SEQ ID NO: 1886330
ucaccaggucuacaaguaa

SEQ ID NO: 2402411 - RNA, 19 nt, Artificial Sequence
  Description of Artificial Sequence: Synthetic oligonucleotide
  Antisense strand to SEQ ID NO: 2402410
uuacuuguagaccugguga

SEQ ID NO: 2402412 - RNA, 19 nt, Artificial Sequence
  Description of Artificial Sequence: Synthetic oligonucleotide
  Sense strand starting at position 3305 of SEQ ID NO: 1886330
cuacuaaugagcugcgauc

SEQ ID NO: 2402413 - RNA, 19 nt, Artificial Sequence
  Description of Artificial Sequence: Synthetic oligonucleotide
  Antisense strand to SEQ ID NO: 2402412
gaucgcagcucauuaguag

SEQ ID NO: 2402414 - RNA, 19 nt, Artificial Sequence
  Description of Artificial Sequence: Synthetic oligonucleotide
  Sense strand starting at position 3416 of SEQ ID NO: 1886330
guuuaagggagcugaaaug

SEQ ID NO: 2402415 - RNA, 19 nt, Artificial Sequence
  Description of Artificial Sequence: Synthetic oligonucleotide
  Antisense strand to SEQ ID NO: 2402414
cauuucagcucccuuaaac

SEQ ID NO: 2402416 - RNA, 19 nt, Artificial Sequence
  Description of Artificial Sequence: Synthetic oligonucleotide
  Sense strand starting at position 3534 of SEQ ID NO: 1886330
ccuagaauguugccuggaa

SEQ ID NO: 2402417 - RNA, 19 nt, Artificial Sequence
  Description of Artificial Sequence: Synthetic oligonucleotide
  Antisense strand to SEQ ID NO: 2402416
uuccaggcaacauucuagg

SEQ ID NO: 2402418 - RNA, 19 nt, Artificial Sequence
  Description of Artificial Sequence: Synthetic oligonucleotide
  Sense strand starting at position 3536 of SEQ ID NO: 1886330
uagaauguugccuggaaug

SEQ ID NO: 2402419 - RNA, 19 nt, Artificial Sequence
  Description of Artificial Sequence: Synthetic oligonucleotide
  Antisense strand to SEQ ID NO: 2402418
cauuccaggcaacauucua

SEQ ID NO: 2402420 - RNA, 19 nt, Artificial Sequence
  Description of Artificial Sequence: Synthetic oligonucleotide
  Sense strand starting at position 3538 of SEQ ID NO: 1886330
gaauguugccuggaaugca

SEQ ID NO: 2402421 - RNA, 19 nt, Artificial Sequence
  Description of Artificial Sequence: Synthetic oligonucleotide
  Antisense strand to SEQ ID NO: 2402420
ugcauuccaggcaacauuc

SEQ ID NO: 2402422 - RNA, 19 nt, Artificial Sequence
  Description of Artificial Sequence: Synthetic oligonucleotide
  Sense strand starting at position 3557 of SEQ ID NO: 1886330
cccggaucuccauggauag

SEQ ID NO: 2402423 - RNA, 19 nt, Artificial Sequence
  Description of Artificial Sequence: Synthetic oligonucleotide
  Antisense strand to SEQ ID NO: 2402422
cuauccauggagauccggg

SEQ ID NO: 2402424 - RNA, 19 nt, Artificial Sequence
  Description of Artificial Sequence: Synthetic oligonucleotide
  Sense strand starting at position 3567 of SEQ ID NO: 1886330
cauggauagccacguguga

SEQ ID NO: 2402425 - RNA, 19 nt, Artificial Sequence
  Description of Artificial Sequence: Synthetic oligonucleotide
  Antisense strand to SEQ ID NO: 2402424
ucacacguggcuauccaug

SEQ ID NO: 2402426 - RNA, 19 nt, Artificial Sequence
  Description of Artificial Sequence: Synthetic oligonucleotide
  Sense strand starting at position 3755 of SEQ ID NO: 1886330
ggaagaugugcccaacagu

SEQ ID NO: 2402427 - RNA, 19 nt, Artificial Sequence
  Description of Artificial Sequence: Synthetic oligonucleotide
  Antisense strand to SEQ ID NO: 2402426
acuguugggcacaucuucc

SEQ ID NO: 2402428 - RNA, 19 nt, Artificial Sequence
  Description of Artificial Sequence: Synthetic oligonucleotide
  Sense strand starting at position 3833 of SEQ ID NO: 1886330
acccuuguauucccuggaa

SEQ ID NO: 2402429 - RNA, 19 nt, Artificial Sequence
  Description of Artificial Sequence: Synthetic oligonucleotide
  Antisense strand to SEQ ID NO: 2402428
uuccagggaauacaagggu

SEQ ID NO: 2402430 - RNA, 19 nt, Artificial Sequence
  Description of Artificial Sequence: Synthetic oligonucleotide
  Sense strand starting at position 3836 of SEQ ID NO: 1886330
cuuguauucccuggaaccu

SEQ ID NO: 2402431 - RNA, 19 nt, Artificial Sequence
  Description of Artificial Sequence: Synthetic oligonucleotide
  Antisense strand to SEQ ID NO: 2402430
agguuccagggaauacaag

SEQ ID NO: 2402432 - RNA, 19 nt, Artificial Sequence
  Description of Artificial Sequence: Synthetic oligonucleotide
  Sense strand starting at position 3974 of SEQ ID NO: 1886330
ccaccucuucuguggagua

SEQ ID NO: 2402433 - RNA, 19 nt, Artificial Sequence
  Description of Artificial Sequence: Synthetic oligonucleotide
  Antisense strand to SEQ ID NO: 2402432
uacuccacagaagaggugg

SEQ ID NO: 2402434 - RNA, 19 nt, Artificial Sequence
  Description of Artificial Sequence: Synthetic oligonucleotide
  Sense strand starting at position 3 of SEQ ID NO: 1886331
agaagacugcugugaagaa

SEQ ID NO: 2402435 - RNA, 19 nt, Artificial Sequence
  Description of Artificial Sequence: Synthetic oligonucleotide
  Antisense strand to SEQ ID NO: 2402434
uucuucacagcagucuucu

SEQ ID NO: 2402436 - RNA, 19 nt, Artificial Sequence
  Description of Artificial Sequence: Synthetic oligonucleotide
  Sense strand starting at position 50 of SEQ ID NO: 1886331
ucaggagacgcugagguau

SEQ ID NO: 2402437 - RNA, 19 nt, Artificial Sequence
  Description of Artificial Sequence: Synthetic oligonucleotide
  Antisense strand to SEQ ID NO: 2402436
auaccucagcgucuccuga

SEQ ID NO: 2402438 - RNA, 19 nt, Artificial Sequence
  Description of Artificial Sequence: Synthetic oligonucleotide
  Sense strand starting at position 58 of SEQ ID NO: 1886331
cgcugagguauauaagcaa

SEQ ID NO: 2402439 - RNA, 19 nt, Artificial Sequence
  Description of Artificial Sequence: Synthetic oligonucleotide
  Antisense strand to SEQ ID NO: 2402438
uugcuuauauaccucagcg

SEQ ID NO: 2402440 - RNA, 19 nt, Artificial Sequence
  Description of Artificial Sequence: Synthetic oligonucleotide
  Sense strand starting at position 348 of SEQ ID NO: 1886331
cccuucuugggccaugaaa

SEQ ID NO: 2402441 - RNA, 19 nt, Artificial Sequence
  Description of Artificial Sequence: Synthetic oligonucleotide
  Antisense strand to SEQ ID NO: 2402440
uuucauggcccaagaaggg

SEQ ID NO: 2402442 - RNA, 19 nt, Artificial Sequence
  Description of Artificial Sequence: Synthetic oligonucleotide
  Sense strand starting at position 350 of SEQ ID NO: 1886331
cuucuugggccaugaaauu

SEQ ID NO: 2402443 - RNA, 19 nt, Artificial Sequence
  Description of Artificial Sequence: Synthetic oligonucleotide
  Antisense strand to SEQ ID NO: 2402442
aauuucauggcccaagaag

SEQ ID NO: 2402444 - RNA, 19 nt, Artificial Sequence
  Description of Artificial Sequence: Synthetic oligonucleotide
  Sense strand starting at position 359 of SEQ ID NO: 1886331
ccaugaaauuuggaauucu

SEQ ID NO: 2402445 - RNA, 19 nt, Artificial Sequence
  Description of Artificial Sequence: Synthetic oligonucleotide
  Antisense strand to SEQ ID NO: 2402444
agaauuccaaauuucaugg

SEQ ID NO: 2402446 - RNA, 19 nt, Artificial Sequence
  Description of Artificial Sequence: Synthetic oligonucleotide
  Sense strand starting at position 417 of SEQ ID NO: 1886331
ggcuccuuuccagagagca

SEQ ID NO: 2402447 - RNA, 19 nt, Artificial Sequence
  Description of Artificial Sequence: Synthetic oligonucleotide
  Antisense strand to SEQ ID NO: 2402446
ugcucucuggaaaggagcc

SEQ ID NO: 2402448 - RNA, 19 nt, Artificial Sequence
  Description of Artificial Sequence: Synthetic oligonucleotide
  Sense strand starting at position 573 of SEQ ID NO: 1886331
ggaauaaauugucuucuuc

SEQ ID NO: 2402449 - RNA, 19 nt, Artificial Sequence
  Description of Artificial Sequence: Synthetic oligonucleotide
  Antisense strand to SEQ ID NO: 2402448
gaagaagacaauuuauucc

SEQ ID NO: 2402450 - RNA, 19 nt, Artificial Sequence
  Description of Artificial Sequence: Synthetic oligonucleotide
  Sense strand starting at position 863 of SEQ ID NO: 1886331
aaaucuaggcccugaugga

SEQ ID NO: 2402451 - RNA, 19 nt, Artificial Sequence
  Description of Artificial Sequence: Synthetic oligonucleotide
  Antisense strand to SEQ ID NO: 2402450
uccaucagggccuagauuu

SEQ ID NO: 2402452 - RNA, 19 nt, Artificial Sequence
  Description of Artificial Sequence: Synthetic oligonucleotide
  Sense strand starting at position 885 of SEQ ID NO: 1886331
gcgugcuggaccucaguua

SEQ ID NO: 2402453 - RNA, 19 nt, Artificial Sequence
  Description of Artificial Sequence: Synthetic oligonucleotide
  Antisense strand to SEQ ID NO: 2402452
uaacugagguccagcacgc

SEQ ID NO: 2402454 - RNA, 19 nt, Artificial Sequence
  Description of Artificial Sequence: Synthetic oligonucleotide
  Sense strand starting at position 1143 of SEQ ID NO: 1886331
agaccauccuucuuggaca

SEQ ID NO: 2402455 - RNA, 19 nt, Artificial Sequence
  Description of Artificial Sequence: Synthetic oligonucleotide
  Antisense strand to SEQ ID NO: 2402454
uguccaagaaggauggucu

SEQ ID NO: 2402456 - RNA, 19 nt, Artificial Sequence
  Description of Artificial Sequence: Synthetic oligonucleotide
  Sense strand starting at position 1200 of SEQ ID NO: 1886331
agaggaaaugagugugcuu

SEQ ID NO: 2402457 - RNA, 19 nt, Artificial Sequence
  Description of Artificial Sequence: Synthetic oligonucleotide
  Antisense strand to SEQ ID NO: 2402456
aagcacacucauuuccucu

SEQ ID NO: 2402458 - RNA, 19 nt, Artificial Sequence
  Description of Artificial Sequence: Synthetic oligonucleotide
  Sense strand starting at position 1202 of SEQ ID NO: 1886331
aggaaaugagugugcuuca

SEQ ID NO: 2402459 - RNA, 19 nt, Artificial Sequence
  Description of Artificial Sequence: Synthetic oligonucleotide
  Antisense strand to SEQ ID NO: 2402458
ugaagcacacucauuuccu

SEQ ID NO: 2402460 - RNA, 19 nt, Artificial Sequence
  Description of Artificial Sequence: Synthetic oligonucleotide
  Sense strand starting at position 1207 of SEQ ID NO: 1886331
augagugugcuucagaaag

SEQ ID NO: 2402461 - RNA, 19 nt, Artificial Sequence
  Description of Artificial Sequence: Synthetic oligonucleotide
  Antisense strand to SEQ ID NO: 2402460
cuuucugaagcacacucau

SEQ ID NO: 2402462 - RNA, 19 nt, Artificial Sequence
  Description of Artificial Sequence: Synthetic oligonucleotide
  Sense strand starting at position 1243 of SEQ ID NO: 1886331
ucaggaaggcuaugucaua

SEQ ID NO: 2402463 - RNA, 19 nt, Artificial Sequence
  Description of Artificial Sequence: Synthetic oligonucleotide
  Antisense strand to SEQ ID NO: 2402462
uaugacauagccuuccuga

SEQ ID NO: 2402464 - RNA, 19 nt, Artificial Sequence
  Description of Artificial Sequence: Synthetic oligonucleotide
  Sense strand starting at position 1244 of SEQ ID NO: 1886331
caggaaggcuaugucauau

SEQ ID NO: 2402465 - RNA, 19 nt, Artificial Sequence
  Description of Artificial Sequence: Synthetic oligonucleotide
  Antisense strand to SEQ ID NO: 2402464
auaugacauagccuuccug

SEQ ID NO: 2402466 - RNA, 19 nt, Artificial Sequence
  Description of Artificial Sequence: Synthetic oligonucleotide
  Sense strand starting at position 1260 of SEQ ID NO: 1886331
uauagacuccugugguaca

SEQ ID NO: 2402467 - RNA, 19 nt, Artificial Sequence
  Description of Artificial Sequence: Synthetic oligonucleotide
  Antisense strand to SEQ ID NO: 2402466
uguaccacaggagucuaua

SEQ ID NO: 2402468 - RNA, 19 nt, Artificial Sequence
  Description of Artificial Sequence: Synthetic oligonucleotide
  Sense strand starting at position 1565 of SEQ ID NO: 1886331
ggaaauauguacuuccuca

SEQ ID NO: 2402469 - RNA, 19 nt, Artificial Sequence
  Description of Artificial Sequence: Synthetic oligonucleotide
  Antisense strand to SEQ ID NO: 2402468
ugaggaaguacauauuucc

SEQ ID NO: 2402470 - RNA, 19 nt, Artificial Sequence
  Description of Artificial Sequence: Synthetic oligonucleotide
  Sense strand starting at position 1612 of SEQ ID NO: 1886331
ccaugaauguuggugaaag

SEQ ID NO: 2402471 - RNA, 19 nt, Artificial Sequence
  Description of Artificial Sequence: Synthetic oligonucleotide
  Antisense strand to SEQ ID NO: 2402470
cuuucaccaacauucaugg

SEQ ID NO: 2402472 - RNA, 19 nt, Artificial Sequence
  Description of Artificial Sequence: Synthetic oligonucleotide
  Sense strand starting at position 1633 of SEQ ID NO: 1886331
ugugauuggugaccagaac

SEQ ID NO: 2402473 - RNA, 19 nt, Artificial Sequence
  Description of Artificial Sequence: Synthetic oligonucleotide
  Antisense strand to SEQ ID NO: 2402472
guucuggucaccaaucaca

SEQ ID NO: 2402474 - RNA, 19 nt, Artificial Sequence
  Description of Artificial Sequence: Synthetic oligonucleotide
  Sense strand starting at position 1747 of SEQ ID NO: 1886331
gggcuacccaaguaugauu

SEQ ID NO: 2402475 - RNA, 19 nt, Artificial Sequence
  Description of Artificial Sequence: Synthetic oligonucleotide
  Antisense strand to SEQ ID NO: 2402474
aaucauacuuggguagccc

SEQ ID NO: 2402476 - RNA, 19 nt, Artificial Sequence
  Description of Artificial Sequence: Synthetic oligonucleotide
  Sense strand starting at position 1839 of SEQ ID NO: 1886331
agugaaguaccauguaaua

SEQ ID NO: 2402477 - RNA, 19 nt, Artificial Sequence
  Description of Artificial Sequence: Synthetic oligonucleotide
  Antisense strand to SEQ ID NO: 2402476
uauuacaugguacuucacu

SEQ ID NO: 2402478 - RNA, 19 nt, Artificial Sequence
  Description of Artificial Sequence: Synthetic oligonucleotide
  Sense strand starting at position 2053 of SEQ ID NO: 1886331
agccgaugaccuuaaacau

SEQ ID NO: 2402479 - RNA, 19 nt, Artificial Sequence
  Description of Artificial Sequence: Synthetic oligonucleotide
  Antisense strand to SEQ ID NO: 2402478
auguuuaaggucaucggcu

SEQ ID NO: 2402480 - RNA, 19 nt, Artificial Sequence
  Description of Artificial Sequence: Synthetic oligonucleotide
  Sense strand starting at position 2153 of SEQ ID NO: 1886331
ccauuaguggccuacugaa

SEQ ID NO: 2402481 - RNA, 19 nt, Artificial Sequence
  Description of Artificial Sequence: Synthetic oligonucleotide
  Antisense strand to SEQ ID NO: 2402480
uucaguaggccacuaaugg

SEQ ID NO: 2402482 - RNA, 19 nt, Artificial Sequence
  Description of Artificial Sequence: Synthetic oligonucleotide
  Sense strand starting at position 2486 of SEQ ID NO: 1886331
cuccuuggccuccaugauu

SEQ ID NO: 2402483 - RNA, 19 nt, Artificial Sequence
  Description of Artificial Sequence: Synthetic oligonucleotide
  Antisense strand to SEQ ID NO: 2402482
aaucauggaggccaaggag

SEQ ID NO: 2402484 - RNA, 19 nt, Artificial Sequence
  Description of Artificial Sequence: Synthetic oligonucleotide
  Sense strand starting at position 2489 of SEQ ID NO: 1886331
cuuggccuccaugauugau

SEQ ID NO: 2402485 - RNA, 19 nt, Artificial Sequence
  Description of Artificial Sequence: Synthetic oligonucleotide
  Antisense strand to SEQ ID NO: 2402484
aucaaucauggaggccaag

SEQ ID NO: 2402486 - RNA, 19 nt, Artificial Sequence
  Description of Artificial Sequence: Synthetic oligonucleotide
  Sense strand starting at position 2585 of SEQ ID NO: 1886331
gugcccauugcugcgagua

SEQ ID NO: 2402487 - RNA, 19 nt, Artificial Sequence
  Description of Artificial Sequence: Synthetic oligonucleotide
  Antisense strand to SEQ ID NO: 2402486
uacucgcagcaaugggcac

SEQ ID NO: 2402488 - RNA, 19 nt, Artificial Sequence
  Description of Artificial Sequence: Synthetic oligonucleotide
  Sense strand starting at position 2656 of SEQ ID NO: 1886331
ugagauucccacugcaaug

SEQ ID NO: 2402489 - RNA, 19 nt, Artificial Sequence
  Description of Artificial Sequence: Synthetic oligonucleotide
  Antisense strand to SEQ ID NO: 2402488
cauugcagugggaaucuca

SEQ ID NO: 2402490 - RNA, 19 nt, Artificial Sequence
  Description of Artificial Sequence: Synthetic oligonucleotide
  Sense strand starting at position 2774 of SEQ ID NO: 1886331
uggaaauaggccugauguc

SEQ ID NO: 2402491 - RNA, 19 nt, Artificial Sequence
  Description of Artificial Sequence: Synthetic oligonucleotide
  Antisense strand to SEQ ID NO: 2402490
gacaucaggccuauuucca

SEQ ID NO: 2402492 - RNA, 19 nt, Artificial Sequence
  Description of Artificial Sequence: Synthetic oligonucleotide
  Sense strand starting at position 2783 of SEQ ID NO: 1886331
gccugaugucccucgugua

SEQ ID NO: 2402493 - RNA, 19 nt, Artificial Sequence
  Description of Artificial Sequence: Synthetic oligonucleotide
  Antisense strand to SEQ ID NO: 2402492
uacacgagggacaucaggc

SEQ ID NO: 2402494 - RNA, 19 nt, Artificial Sequence
  Description of Artificial Sequence: Synthetic oligonucleotide
  Sense strand starting at position 2849 of SEQ ID NO: 1886331
cucugaugucgggaccaga

SEQ ID NO: 2402495 - RNA, 19 nt, Artificial Sequence
  Description of Artificial Sequence: Synthetic oligonucleotide
  Antisense strand to SEQ ID NO: 2402494
ucuggucccgacaucagag

SEQ ID NO: 2402496 - RNA, 19 nt, Artificial Sequence
  Description of Artificial Sequence: Synthetic oligonucleotide
  Sense strand starting at position 3209 of SEQ ID NO: 1886331
ggcaaugucccaucgugca

SEQ ID NO: 2402497 - RNA, 19 nt, Artificial Sequence
  Description of Artificial Sequence: Synthetic oligonucleotide
  Antisense strand to SEQ ID NO: 2402496
ugcacgaugggacauugcc

SEQ ID NO: 2402498 - RNA, 19 nt, Artificial Sequence
  Description of Artificial Sequence: Synthetic oligonucleotide
  Sense strand starting at position 3300 of SEQ ID NO: 1886331
agauacauguggcuacuaa

SEQ ID NO: 2402499 - RNA, 19 nt, Artificial Sequence
  Description of Artificial Sequence: Synthetic oligonucleotide
  Antisense strand to SEQ ID NO: 2402498
uuaguagccacauguaucu

SEQ ID NO: 2402500 - RNA, 19 nt, Artificial Sequence
  Description of Artificial Sequence: Synthetic oligonucleotide
  Sense strand starting at position 3301 of SEQ ID NO: 1886331
gauacauguggcuacuaag

SEQ ID NO: 2402501 - RNA, 19 nt, Artificial Sequence
  Description of Artificial Sequence: Synthetic oligonucleotide
  Antisense strand to SEQ ID NO: 2402500
cuuaguagccacauguauc

SEQ ID NO: 2402502 - RNA, 19 nt, Artificial Sequence
  Description of Artificial Sequence: Synthetic oligonucleotide
  Sense strand starting at position 3462 of SEQ ID NO: 1886331
agcagaauccagcacuuga

SEQ ID NO: 2402503 - RNA, 19 nt, Artificial Sequence
  Description of Artificial Sequence: Synthetic oligonucleotide
  Antisense strand to SEQ ID NO: 2402502
ucaagugcuggauucugcu

SEQ ID NO: 2402504 - RNA, 19 nt, Artificial Sequence
  Description of Artificial Sequence: Synthetic oligonucleotide
  Sense strand starting at position 3476 of SEQ ID NO: 1886331
cuugaauaucgccaucaua

SEQ ID NO: 2402505 - RNA, 19 nt, Artificial Sequence
  Description of Artificial Sequence: Synthetic oligonucleotide
  Antisense strand to SEQ ID NO: 2402504
uaugauggcgauauucaag

SEQ ID NO: 2402506 - RNA, 19 nt, Artificial Sequence
  Description of Artificial Sequence: Synthetic oligonucleotide
  Sense strand starting at position 3521 of SEQ ID NO: 1886331
aaagauucucuguggcaau

SEQ ID NO: 2402507 - RNA, 19 nt, Artificial Sequence
  Description of Artificial Sequence: Synthetic oligonucleotide
  Antisense strand to SEQ ID NO: 2402506
auugccacagagaaucuuu

SEQ ID NO: 2402508 - RNA, 19 nt, Artificial Sequence
  Description of Artificial Sequence: Synthetic oligonucleotide
  Sense strand starting at position 3668 of SEQ ID NO: 1886331
ggaugccuucgggauggaa

SEQ ID NO: 2402509 - RNA, 19 nt, Artificial Sequence
  Description of Artificial Sequence: Synthetic oligonucleotide
  Antisense strand to SEQ ID NO: 2402508
uuccaucccgaaggcaucc

SEQ ID NO: 2402510 - RNA, 19 nt, Artificial Sequence
  Description of Artificial Sequence: Synthetic oligonucleotide
  Sense strand starting at position 3688 of SEQ ID NO: 1886331
cugcuuuccaagugggaaa

SEQ ID NO: 2402511 - RNA, 19 nt, Artificial Sequence
  Description of Artificial Sequence: Synthetic oligonucleotide
  Antisense strand to SEQ ID NO: 2402510
uuucccacuuggaaagcag

SEQ ID NO: 2402512 - RNA, 19 nt, Artificial Sequence
  Description of Artificial Sequence: Synthetic oligonucleotide
  Sense strand starting at position 3707 of SEQ ID NO: 1886331
guggauccagagcacuauu

SEQ ID NO: 2402513 - RNA, 19 nt, Artificial Sequence
  Description of Artificial Sequence: Synthetic oligonucleotide
  Antisense strand to SEQ ID NO: 2402512
aauagugcucuggauccac

SEQ ID NO: 2402514 - RNA, 19 nt, Artificial Sequence
  Description of Artificial Sequence: Synthetic oligonucleotide
  Sense strand starting at position 11 of SEQ ID NO: 1886332
cugugcuuaguauaugaaa

SEQ ID NO: 2402515 - RNA, 19 nt, Artificial Sequence
  Description of Artificial Sequence: Synthetic oligonucleotide
  Antisense strand to SEQ ID NO: 2402514
uuucauauacuaagcacag

SEQ ID NO: 2402516 - RNA, 19 nt, Artificial Sequence
  Description of Artificial Sequence: Synthetic oligonucleotide
  Sense strand starting at position 13 of SEQ ID NO: 1886332
gugcuuaguauaugaaaga

SEQ ID NO: 2402517 - RNA, 19 nt, Artificial Sequence
  Description of Artificial Sequence: Synthetic oligonucleotide
  Antisense strand to SEQ ID NO: 2402516
ucuuucauauacuaagcac

SEQ ID NO: 2402518 - RNA, 19 nt, Artificial Sequence
  Description of Artificial Sequence: Synthetic oligonucleotide
  Sense strand starting at position 26 of SEQ ID NO: 1886332
gaaagauacuuacuuguag

SEQ ID NO: 2402519 - RNA, 19 nt, Artificial Sequence
  Description of Artificial Sequence: Synthetic oligonucleotide
  Antisense strand to SEQ ID NO: 2402518
cuacaaguaaguaucuuuc

SEQ ID NO: 2402520 - RNA, 19 nt, Artificial Sequence
  Description of Artificial Sequence: Synthetic oligonucleotide
  Sense strand starting at position 251 of SEQ ID NO: 1886332
ucaucuuuauggcuuaaga

SEQ ID NO: 2402521 - RNA, 19 nt, Artificial Sequence
  Description of Artificial Sequence: Synthetic oligonucleotide
  Antisense strand to SEQ ID NO: 2402520
ucuuaagccauaaagauga

SEQ ID NO: 2402522 - RNA, 19 nt, Artificial Sequence
  Description of Artificial Sequence: Synthetic oligonucleotide
  Sense strand starting at position 388 of SEQ ID NO: 1886332
aguggaaucucaucauaac

SEQ ID NO: 2402523 - RNA, 19 nt, Artificial Sequence
  Description of Artificial Sequence: Synthetic oligonucleotide
  Antisense strand to SEQ ID NO: 2402522
guuaugaugagauuccacu

SEQ ID NO: 2402524 - RNA, 19 nt, Artificial Sequence
  Description of Artificial Sequence: Synthetic oligonucleotide
  Sense strand starting at position 415 of SEQ ID NO: 1886332
aguagacuugcagaguaua

SEQ ID NO: 2402525 - RNA, 19 nt, Artificial Sequence
  Description of Artificial Sequence: Synthetic oligonucleotide
  Antisense strand to SEQ ID NO: 2402524
uauacucugcaagucuacu

SEQ ID NO: 2402526 - RNA, 19 nt, Artificial Sequence
  Description of Artificial Sequence: Synthetic oligonucleotide
  Sense strand starting at position 431 of SEQ ID NO: 1886332
auaccuagucaauauaugu

SEQ ID NO: 2402527 - RNA, 19 nt, Artificial Sequence
  Description of Artificial Sequence: Synthetic oligonucleotide
  Antisense strand to SEQ ID NO: 2402526
acauauauugacuagguau

SEQ ID NO: 2402528 - RNA, 19 nt, Artificial Sequence
  Description of Artificial Sequence: Synthetic oligonucleotide
  Sense strand starting at position 452 of SEQ ID NO: 1886332
gcaguuuaauuaccaggga

SEQ ID NO: 2402529 - RNA, 19 nt, Artificial Sequence
  Description of Artificial Sequence: Synthetic oligonucleotide
  Antisense strand to SEQ ID NO: 2402528
ucccugguaauuaaacugc

SEQ ID NO: 2402530 - RNA, 19 nt, Artificial Sequence
  Description of Artificial Sequence: Synthetic oligonucleotide
  Sense strand starting at position 455 of SEQ ID NO: 1886332
guuuaauuaccagggaugu

SEQ ID NO: 2402531 - RNA, 19 nt, Artificial Sequence
  Description of Artificial Sequence: Synthetic oligonucleotide
  Antisense strand to SEQ ID NO: 2402530
acaucccugguaauuaaac

SEQ ID NO: 2402532 - RNA, 19 nt, Artificial Sequence
  Description of Artificial Sequence: Synthetic oligonucleotide
  Sense strand starting at position 456 of SEQ ID NO: 1886332
uuuaauuaccagggauguu

SEQ ID NO: 2402533 - RNA, 19 nt, Artificial Sequence
  Description of Artificial Sequence: Synthetic oligonucleotide
  Antisense strand to SEQ ID NO: 2402532
aacaucccugguaauuaaa

SEQ ID NO: 2402534 - RNA, 19 nt, Artificial Sequence
  Description of Artificial Sequence: Synthetic oligonucleotide
  Sense strand starting at position 676 of SEQ ID NO: 1886332
augauuaaacugggcacaa

SEQ ID NO: 2402535 - RNA, 19 nt, Artificial Sequence
  Description of Artificial Sequence: Synthetic oligonucleotide
  Antisense strand to SEQ ID NO: 2402534
uugugcccaguuuaaucau

SEQ ID NO: 2402536 - RNA, 19 nt, Artificial Sequence
  Description of Artificial Sequence: Synthetic oligonucleotide
  Sense strand starting at position 677 of SEQ ID NO: 1886332
ugauuaaacugggcacaau

SEQ ID NO: 2402537 - RNA, 19 nt, Artificial Sequence
  Description of Artificial Sequence: Synthetic oligonucleotide
  Antisense strand to SEQ ID NO: 2402536
auugugcccaguuuaauca

SEQ ID NO: 2402538 - RNA, 19 nt, Artificial Sequence
  Description of Artificial Sequence: Synthetic oligonucleotide
  Sense strand starting at position 823 of SEQ ID NO: 1886332
agugacaaacugugaacaa

SEQ ID NO: 2402539 - RNA, 19 nt, Artificial Sequence
  Description of Artificial Sequence: Synthetic oligonucleotide
  Antisense strand to SEQ ID NO: 2402538
uuguucacaguuugucacu

SEQ ID NO: 2402540 - RNA, 19 nt, Artificial Sequence
  Description of Artificial Sequence: Synthetic oligonucleotide
  Sense strand starting at position 854 of SEQ ID NO: 1886332
uguaaaugugcucauugaa

SEQ ID NO: 2402541 - RNA, 19 nt, Artificial Sequence
  Description of Artificial Sequence: Synthetic oligonucleotide
  Antisense strand to SEQ ID NO: 2402540
uucaaugagcacauuuaca

SEQ ID NO: 2402542 - RNA, 19 nt, Artificial Sequence
  Description of Artificial Sequence: Synthetic oligonucleotide
  Sense strand starting at position 987 of SEQ ID NO: 1886332
uccucaauacgaugaccua

SEQ ID NO: 2402543 - RNA, 19 nt, Artificial Sequence
  Description of Artificial Sequence: Synthetic oligonucleotide
  Antisense strand to SEQ ID NO: 2402542
uaggucaucguauugagga

SEQ ID NO: 2402544 - RNA, 19 nt, Artificial Sequence
  Description of Artificial Sequence: Synthetic oligonucleotide
  Sense strand starting at position 1022 of SEQ ID NO: 1886332
cuuacuugguuauccugaa

SEQ ID NO: 2402545 - RNA, 19 nt, Artificial Sequence
  Description of Artificial Sequence: Synthetic oligonucleotide
  Antisense strand to SEQ ID NO: 2402544
uucaggauaaccaaguaag

SEQ ID NO: 2402546 - RNA, 19 nt, Artificial Sequence
  Description of Artificial Sequence: Synthetic oligonucleotide
  Sense strand starting at position 1023 of SEQ ID NO: 1886332
uuacuugguuauccugaaa

SEQ ID NO: 2402547 - RNA, 19 nt, Artificial Sequence
  Description of Artificial Sequence: Synthetic oligonucleotide
  Antisense strand to SEQ ID NO: 2402546
uuucaggauaaccaaguaa

SEQ ID NO: 2402548 - RNA, 19 nt, Artificial Sequence
  Description of Artificial Sequence: Synthetic oligonucleotide
  Sense strand starting at position 1026 of SEQ ID NO: 1886332
cuugguuauccugaaacuu

SEQ ID NO: 2402549 - RNA, 19 nt, Artificial Sequence
  Description of Artificial Sequence: Synthetic oligonucleotide
  Antisense strand to SEQ ID NO: 2402548
aaguuucaggauaaccaag

SEQ ID NO: 2402550 - RNA, 19 nt, Artificial Sequence
  Description of Artificial Sequence: Synthetic oligonucleotide
  Sense strand starting at position 1281 of SEQ ID NO: 1886332
cuaguauucccugauugau

SEQ ID NO: 2402551 - RNA, 19 nt, Artificial Sequence
  Description of Artificial Sequence: Synthetic oligonucleotide
  Antisense strand to SEQ ID NO: 2402550
aucaaucagggaauacuag

SEQ ID NO: 2402552 - RNA, 19 nt, Artificial Sequence
  Description of Artificial Sequence: Synthetic oligonucleotide
  Sense strand starting at position 1312 of SEQ ID NO: 1886332
aguagucagaccuaguauu

SEQ ID NO: 2402553 - RNA, 19 nt, Artificial Sequence
  Description of Artificial Sequence: Synthetic oligonucleotide
  Antisense strand to SEQ ID NO: 2402552
aauacuaggucugacuacu

SEQ ID NO: 2402554 - RNA, 19 nt, Artificial Sequence
  Description of Artificial Sequence: Synthetic oligonucleotide
  Sense strand starting at position 1467 of SEQ ID NO: 1886332
cgguauguaacauguauuu

SEQ ID NO: 2402555 - RNA, 19 nt, Artificial Sequence
  Description of Artificial Sequence: Synthetic oligonucleotide
  Antisense strand to SEQ ID NO: 2402554
aaauacauguuacauaccg

SEQ ID NO: 2402556 - RNA, 19 nt, Artificial Sequence
  Description of Artificial Sequence: Synthetic oligonucleotide
  Sense strand starting at position 1487 of SEQ ID NO: 1886332
uggaguacauuugauaacu

SEQ ID NO: 2402557 - RNA, 19 nt, Artificial Sequence
  Description of Artificial Sequence: Synthetic oligonucleotide
  Antisense strand to SEQ ID NO: 2402556
aguuaucaaauguacucca

SEQ ID NO: 2402558 - RNA, 19 nt, Artificial Sequence
  Description of Artificial Sequence: Synthetic oligonucleotide
  Sense strand starting at position 1489 of SEQ ID NO: 1886332
gaguacauuugauaacuga

SEQ ID NO: 2402559 - RNA, 19 nt, Artificial Sequence
  Description of Artificial Sequence: Synthetic oligonucleotide
  Antisense strand to SEQ ID NO: 2402558
ucaguuaucaaauguacuc

SEQ ID NO: 2402560 - RNA, 19 nt, Artificial Sequence
  Description of Artificial Sequence: Synthetic oligonucleotide
  Sense strand starting at position 1535 of SEQ ID NO: 1886332
guguaacuggaauauccau

SEQ ID NO: 2402561 - RNA, 19 nt, Artificial Sequence
  Description of Artificial Sequence: Synthetic oligonucleotide
  Antisense strand to SEQ ID NO: 2402560
auggauauuccaguuacac

SEQ ID NO: 2402562 - RNA, 19 nt, Artificial Sequence
  Description of Artificial Sequence: Synthetic oligonucleotide
  Sense strand starting at position 1607 of SEQ ID NO: 1886332
ugaaauggguuacugugaa

SEQ ID NO: 2402563 - RNA, 19 nt, Artificial Sequence
  Description of Artificial Sequence: Synthetic oligonucleotide
  Antisense strand to SEQ ID NO: 2402562
uucacaguaacccauuuca

SEQ ID NO: 2402564 - RNA, 19 nt, Artificial Sequence
  Description of Artificial Sequence: Synthetic oligonucleotide
  Sense strand starting at position 1651 of SEQ ID NO: 1886332
guaggugucuuauuucuuc

SEQ ID NO: 2402565 - RNA, 19 nt, Artificial Sequence
  Description of Artificial Sequence: Synthetic oligonucleotide
  Antisense strand to SEQ ID NO: 2402564
gaagaaauaagacaccuac

SEQ ID NO: 2402566 - RNA, 19 nt, Artificial Sequence
  Description of Artificial Sequence: Synthetic oligonucleotide
  Sense strand starting at position 1654 of SEQ ID NO: 1886332
ggugucuuauuucuucuau

SEQ ID NO: 2402567 - RNA, 19 nt, Artificial Sequence
  Description of Artificial Sequence: Synthetic oligonucleotide
  Antisense strand to SEQ ID NO: 2402566
auagaagaaauaagacacc

SEQ ID NO: 2402568 - RNA, 19 nt, Artificial Sequence
  Description of Artificial Sequence: Synthetic oligonucleotide
  Sense strand starting at position 1892 of SEQ ID NO: 1886332
gguuauuucuugcucagua

SEQ ID NO: 2402569 - RNA, 19 nt, Artificial Sequence
  Description of Artificial Sequence: Synthetic oligonucleotide
  Antisense strand to SEQ ID NO: 2402568
uacugagcaagaaauaacc

SEQ ID NO: 2402570 - RNA, 19 nt, Artificial Sequence
  Description of Artificial Sequence: Synthetic oligonucleotide
  Sense strand starting at position 1893 of SEQ ID NO: 1886332
guuauuucuugcucaguaa

SEQ ID NO: 2402571 - RNA, 19 nt, Artificial Sequence
  Description of Artificial Sequence: Synthetic oligonucleotide
  Antisense strand to SEQ ID NO: 2402570
uuacugagcaagaaauaac

SEQ ID NO: 2402572 - RNA, 19 nt, Artificial Sequence
  Description of Artificial Sequence: Synthetic oligonucleotide
  Sense strand starting at position 1897 of SEQ ID NO: 1886332
uuucuugcucaguaagaau

SEQ ID NO: 2402573 - RNA, 19 nt, Artificial Sequence
  Description of Artificial Sequence: Synthetic oligonucleotide
  Antisense strand to SEQ ID NO: 2402572
auucuuacugagcaagaaa

SEQ ID NO: 2402574 - RNA, 19 nt, Artificial Sequence
  Description of Artificial Sequence: Synthetic oligonucleotide
  Sense strand starting at position 1979 of SEQ ID NO: 1886332
cgcaaauuacgacaucauu

SEQ ID NO: 2402575 - RNA, 19 nt, Artificial Sequence
  Description of Artificial Sequence: Synthetic oligonucleotide
  Antisense strand to SEQ ID NO: 2402574
aaugaugucguaauuugcg

SEQ ID NO: 2402576 - RNA, 19 nt, Artificial Sequence
  Description of Artificial Sequence: Synthetic oligonucleotide
  Sense strand starting at position 2118 of SEQ ID NO: 1886332
accagucuuagguagugaa

SEQ ID NO: 2402577 - RNA, 19 nt, Artificial Sequence
  Description of Artificial Sequence: Synthetic oligonucleotide
  Antisense strand to SEQ ID NO: 2402576
uucacuaccuaagacuggu

SEQ ID NO: 2402578 - RNA, 19 nt, Artificial Sequence
  Description of Artificial Sequence: Synthetic oligonucleotide
  Sense strand starting at position 2122 of SEQ ID NO: 1886332
gucuuagguagugaaacaa

SEQ ID NO: 2402579 - RNA, 19 nt, Artificial Sequence
  Description of Artificial Sequence: Synthetic oligonucleotide
  Antisense strand to SEQ ID NO: 2402578
uuguuucacuaccuaagac

SEQ ID NO: 2402580 - RNA, 19 nt, Artificial Sequence
  Description of Artificial Sequence: Synthetic oligonucleotide
  Sense strand starting at position 2587 of SEQ ID NO: 1886332
ggaguacaccgauaucagu

SEQ ID NO: 2402581 - RNA, 19 nt, Artificial Sequence
  Description of Artificial Sequence: Synthetic oligonucleotide
  Antisense strand to SEQ ID NO: 2402580
acugauaucgguguacucc

SEQ ID NO: 2402582 - RNA, 19 nt, Artificial Sequence
  Description of Artificial Sequence: Synthetic oligonucleotide
  Sense strand starting at position 2651 of SEQ ID NO: 1886332
acaaguaauguuugaagca

SEQ ID NO: 2402583 - RNA, 19 nt, Artificial Sequence
  Description of Artificial Sequence: Synthetic oligonucleotide
  Antisense strand to SEQ ID NO: 2402582
ugcuucaaacauuacuugu

SEQ ID NO: 2402584 - RNA, 19 nt, Artificial Sequence
  Description of Artificial Sequence: Synthetic oligonucleotide
  Sense strand starting at position 2882 of SEQ ID NO: 1886332
uauuguaagguuuggagau

SEQ ID NO: 2402585 - RNA, 19 nt, Artificial Sequence
  Description of Artificial Sequence: Synthetic oligonucleotide
  Antisense strand to SEQ ID NO: 2402584
aucuccaaaccuuacaaua

SEQ ID NO: 2402586 - RNA, 19 nt, Artificial Sequence
  Description of Artificial Sequence: Synthetic oligonucleotide
  Sense strand starting at position 3018 of SEQ ID NO: 1886332
aguggaaagacuggugaua

SEQ ID NO: 2402587 - RNA, 19 nt, Artificial Sequence
  Description of Artificial Sequence: Synthetic oligonucleotide
  Antisense strand to SEQ ID NO: 2402586
uaucaccagucuuuccacu

SEQ ID NO: 2402588 - RNA, 19 nt, Artificial Sequence
  Description of Artificial Sequence: Synthetic oligonucleotide
  Sense strand starting at position 3045 of SEQ ID NO: 1886332
uguuuaaaccuccaagucu

SEQ ID NO: 2402589 - RNA, 19 nt, Artificial Sequence
  Description of Artificial Sequence: Synthetic oligonucleotide
  Antisense strand to SEQ ID NO: 2402588
agacuuggagguuuaaaca

SEQ ID NO: 2402590 - RNA, 19 nt, Artificial Sequence
  Description of Artificial Sequence: Synthetic oligonucleotide
  Sense strand starting at position 3333 of SEQ ID NO: 1886332
acguauuuaguccaacgca

SEQ ID NO: 2402591 - RNA, 19 nt, Artificial Sequence
  Description of Artificial Sequence: Synthetic oligonucleotide
  Antisense strand to SEQ ID NO: 2402590
ugcguuggacuaaauacgu

SEQ ID NO: 2402592 - RNA, 19 nt, Artificial Sequence
  Description of Artificial Sequence: Synthetic oligonucleotide
  Sense strand starting at position 3472 of SEQ ID NO: 1886332
uuacgaguuggcuaaggau

SEQ ID NO: 2402593 - RNA, 19 nt, Artificial Sequence
  Description of Artificial Sequence: Synthetic oligonucleotide
  Antisense strand to SEQ ID NO: 2402592
auccuuagccaacucguaa

SEQ ID NO: 2402594 - RNA, 19 nt, Artificial Sequence
  Description of Artificial Sequence: Synthetic oligonucleotide
  Sense strand starting at position 11 of SEQ ID NO: 1886333
aguagacuugcagaguaua

SEQ ID NO: 2402595 - RNA, 19 nt, Artificial Sequence
  Description of Artificial Sequence: Synthetic oligonucleotide
  Antisense strand to SEQ ID NO: 2402594
uauacucugcaagucuacu

SEQ ID NO: 2402596 - RNA, 19 nt, Artificial Sequence
  Description of Artificial Sequence: Synthetic oligonucleotide
  Sense strand starting at position 27 of SEQ ID NO: 1886333
auaccuagucaauauaugu

SEQ ID NO: 2402597 - RNA, 19 nt, Artificial Sequence
  Description of Artificial Sequence: Synthetic oligonucleotide
  Antisense strand to SEQ ID NO: 2402596
acauauauugacuagguau

SEQ ID NO: 2402598 - RNA, 19 nt, Artificial Sequence
  Description of Artificial Sequence: Synthetic oligonucleotide
  Sense strand starting at position 48 of SEQ ID NO: 1886333
gcaguuuaauuaccaggga

SEQ ID NO: 2402599 - RNA, 19 nt, Artificial Sequence
  Description of Artificial Sequence: Synthetic oligonucleotide
  Antisense strand to SEQ ID NO: 2402598
ucccugguaauuaaacugc

SEQ ID NO: 2402600 - RNA, 19 nt, Artificial Sequence
  Description of Artificial Sequence: Synthetic oligonucleotide
  Sense strand starting at position 51 of SEQ ID NO: 1886333
guuuaauuaccagggaugu

SEQ ID NO: 2402601 - RNA, 19 nt, Artificial Sequence
  Description of Artificial Sequence: Synthetic oligonucleotide
  Antisense strand to SEQ ID NO: 2402600
acaucccugguaauuaaac

SEQ ID NO: 2402602 - RNA, 19 nt, Artificial Sequence
  Description of Artificial Sequence: Synthetic oligonucleotide
  Sense strand starting at position 52 of SEQ ID NO: 1886333
uuuaauuaccagggauguu

SEQ ID NO: 2402603 - RNA, 19 nt, Artificial Sequence
  Description of Artificial Sequence: Synthetic oligonucleotide
  Antisense strand to SEQ ID NO: 2402602
aacaucccugguaauuaaa

SEQ ID NO: 2402604 - RNA, 19 nt, Artificial Sequence
  Description of Artificial Sequence: Synthetic oligonucleotide
  Sense strand starting at position 272 of SEQ ID NO: 1886333
augauuaaacugggcacaa

SEQ ID NO: 2402605 - RNA, 19 nt, Artificial Sequence
  Description of Artificial Sequence: Synthetic oligonucleotide
  Antisense strand to SEQ ID NO: 2402604
uugugcccaguuuaaucau

SEQ ID NO: 2402606 - RNA, 19 nt, Artificial Sequence
  Description of Artificial Sequence: Synthetic oligonucleotide
  Sense strand starting at position 273 of SEQ ID NO: 1886333
ugauuaaacugggcacaau

SEQ ID NO: 2402607 - RNA, 19 nt, Artificial Sequence
  Description of Artificial Sequence: Synthetic oligonucleotide
  Antisense strand to SEQ ID NO: 2402606
auugugcccaguuuaauca

SEQ ID NO: 2402608 - RNA, 19 nt, Artificial Sequence
  Description of Artificial Sequence: Synthetic oligonucleotide
  Sense strand starting at position 419 of SEQ ID NO: 1886333
agugacaaacugugaacaa

SEQ ID NO: 2402609 - RNA, 19 nt, Artificial Sequence
  Description of Artificial Sequence: Synthetic oligonucleotide
  Antisense strand to SEQ ID NO: 2402608
uuguucacaguuugucacu

SEQ ID NO: 2402610 - RNA, 19 nt, Artificial Sequence
  Description of Artificial Sequence: Synthetic oligonucleotide
  Sense strand starting at position 450 of SEQ ID NO: 1886333
uguaaaugugcucauugaa

SEQ ID NO: 2402611 - RNA, 19 nt, Artificial Sequence
  Description of Artificial Sequence: Synthetic oligonucleotide
  Antisense strand to SEQ ID NO: 2402610
uucaaugagcacauuuaca

SEQ ID NO: 2402612 - RNA, 19 nt, Artificial Sequence
  Description of Artificial Sequence: Synthetic oligonucleotide
  Sense strand starting at position 583 of SEQ ID NO: 1886333
uccucaauacgaugaccua

SEQ ID NO: 2402613 - RNA, 19 nt, Artificial Sequence
  Description of Artificial Sequence: Synthetic oligonucleotide
  Antisense strand to SEQ ID NO: 2402612
uaggucaucguauugagga

SEQ ID NO: 2402614 - RNA, 19 nt, Artificial Sequence
  Description of Artificial Sequence: Synthetic oligonucleotide
  Sense strand starting at position 618 of SEQ ID NO: 1886333
cuuacuugguuauccugaa

SEQ ID NO: 2402615 - RNA, 19 nt, Artificial Sequence
  Description of Artificial Sequence: Synthetic oligonucleotide
  Antisense strand to SEQ ID NO: 2402614
uucaggauaaccaaguaag

SEQ ID NO: 2402616 - RNA, 19 nt, Artificial Sequence
  Description of Artificial Sequence: Synthetic oligonucleotide
  Sense strand starting at position 619 of SEQ ID NO: 1886333
uuacuugguuauccugaaa

SEQ ID NO: 2402617 - RNA, 19 nt, Artificial Sequence
  Description of Artificial Sequence: Synthetic oligonucleotide
  Antisense strand to SEQ ID NO: 2402616
uuucaggauaaccaaguaa

SEQ ID NO: 2402618 - RNA, 19 nt, Artificial Sequence
  Description of Artificial Sequence: Synthetic oligonucleotide
  Sense strand starting at position 622 of SEQ ID NO: 1886333
cuugguuauccugaaacuu

SEQ ID NO: 2402619 - RNA, 19 nt, Artificial Sequence
  Description of Artificial Sequence: Synthetic oligonucleotide
  Antisense strand to SEQ ID NO: 2402618
aaguuucaggauaaccaag

SEQ ID NO: 2402620 - RNA, 19 nt, Artificial Sequence
  Description of Artificial Sequence: Synthetic oligonucleotide
  Sense strand starting at position 812 of SEQ ID NO: 1886333
caaguuuaaguuggaaguu

SEQ ID NO: 2402621 - RNA, 19 nt, Artificial Sequence
  Description of Artificial Sequence: Synthetic oligonucleotide
  Antisense strand to SEQ ID NO: 2402620
aacuuccaacuuaaacuug

SEQ ID NO: 2402622 - RNA, 19 nt, Artificial Sequence
  Description of Artificial Sequence: Synthetic oligonucleotide
  Sense strand starting at position 877 of SEQ ID NO: 1886333
cuaguauucccugauugau

SEQ ID NO: 2402623 - RNA, 19 nt, Artificial Sequence
  Description of Artificial Sequence: Synthetic oligonucleotide
  Antisense strand to SEQ ID NO: 2402622
aucaaucagggaauacuag

SEQ ID NO: 2402624 - RNA, 19 nt, Artificial Sequence
  Description of Artificial Sequence: Synthetic oligonucleotide
  Sense strand starting at position 908 of SEQ ID NO: 1886333
aguagucagaccuaguauu

SEQ ID NO: 2402625 - RNA, 19 nt, Artificial Sequence
  Description of Artificial Sequence: Synthetic oligonucleotide
  Antisense strand to SEQ ID NO: 2402624
aauacuaggucugacuacu

SEQ ID NO: 2402626 - RNA, 19 nt, Artificial Sequence
  Description of Artificial Sequence: Synthetic oligonucleotide
  Sense strand starting at position 918 of SEQ ID NO: 1886333
ccuaguauuuaguaaagga

SEQ ID NO: 2402627 - RNA, 19 nt, Artificial Sequence
  Description of Artificial Sequence: Synthetic oligonucleotide
  Antisense strand to SEQ ID NO: 2402626
uccuuuacuaaauacuagg

SEQ ID NO: 2402628 - RNA, 19 nt, Artificial Sequence
  Description of Artificial Sequence: Synthetic oligonucleotide
  Sense strand starting at position 1063 of SEQ ID NO: 1886333
cgguauguaacauguauuu

SEQ ID NO: 2402629 - RNA, 19 nt, Artificial Sequence
  Description of Artificial Sequence: Synthetic oligonucleotide
  Antisense strand to SEQ ID NO: 2402628
aaauacauguuacauaccg

SEQ ID NO: 2402630 - RNA, 19 nt, Artificial Sequence
  Description of Artificial Sequence: Synthetic oligonucleotide
  Sense strand starting at position 1083 of SEQ ID NO: 1886333
uggaguacauuugauaacu

SEQ ID NO: 2402631 - RNA, 19 nt, Artificial Sequence
  Description of Artificial Sequence: Synthetic oligonucleotide
  Antisense strand to SEQ ID NO: 2402630
aguuaucaaauguacucca

SEQ ID NO: 2402632 - RNA, 19 nt, Artificial Sequence
  Description of Artificial Sequence: Synthetic oligonucleotide
  Sense strand starting at position 1085 of SEQ ID NO: 1886333
gaguacauuugauaacuga

SEQ ID NO: 2402633 - RNA, 19 nt, Artificial Sequence
  Description of Artificial Sequence: Synthetic oligonucleotide
  Antisense strand to SEQ ID NO: 2402632
ucaguuaucaaauguacuc

SEQ ID NO: 2402634 - RNA, 19 nt, Artificial Sequence
  Description of Artificial Sequence: Synthetic oligonucleotide
  Sense strand starting at position 1131 of SEQ ID NO: 1886333
guguaacuggaauauccau

SEQ ID NO: 2402635 - RNA, 19 nt, Artificial Sequence
  Description of Artificial Sequence: Synthetic oligonucleotide
  Antisense strand to SEQ ID NO: 2402634
auggauauuccaguuacac

SEQ ID NO: 2402636 - RNA, 19 nt, Artificial Sequence
  Description of Artificial Sequence: Synthetic oligonucleotide
  Sense strand starting at position 1196 of SEQ ID NO: 1886333
gccaucuugaaauggguua

SEQ ID NO: 2402637 - RNA, 19 nt, Artificial Sequence
  Description of Artificial Sequence: Synthetic oligonucleotide
  Antisense strand to SEQ ID NO: 2402636
uaacccauuucaagauggc

SEQ ID NO: 2402638 - RNA, 19 nt, Artificial Sequence
  Description of Artificial Sequence: Synthetic oligonucleotide
  Sense strand starting at position 1203 of SEQ ID NO: 1886333
ugaaauggguuacugugaa

SEQ ID NO: 2402639 - RNA, 19 nt, Artificial Sequence
  Description of Artificial Sequence: Synthetic oligonucleotide
  Antisense strand to SEQ ID NO: 2402638
uucacaguaacccauuuca

SEQ ID NO: 2402640 - RNA, 19 nt, Artificial Sequence
  Description of Artificial Sequence: Synthetic oligonucleotide
  Sense strand starting at position 1247 of SEQ ID NO: 1886333
guaggugucuuauuucuuc

SEQ ID NO: 2402641 - RNA, 19 nt, Artificial Sequence
  Description of Artificial Sequence: Synthetic oligonucleotide
  Antisense strand to SEQ ID NO: 2402640
gaagaaauaagacaccuac

SEQ ID NO: 2402642 - RNA, 19 nt, Artificial Sequence
  Description of Artificial Sequence: Synthetic oligonucleotide
  Sense strand starting at position 1250 of SEQ ID NO: 1886333
ggugucuuauuucuucuau

SEQ ID NO: 2402643 - RNA, 19 nt, Artificial Sequence
  Description of Artificial Sequence: Synthetic oligonucleotide
  Antisense strand to SEQ ID NO: 2402642
auagaagaaauaagacacc

SEQ ID NO: 2402644 - RNA, 19 nt, Artificial Sequence
  Description of Artificial Sequence: Synthetic oligonucleotide
  Sense strand starting at position 1488 of SEQ ID NO: 1886333
gguuauuucuugcucagua

SEQ ID NO: 2402645 - RNA, 19 nt, Artificial Sequence
  Description of Artificial Sequence: Synthetic oligonucleotide
  Antisense strand to SEQ ID NO: 2402644
uacugagcaagaaauaacc

SEQ ID NO: 2402646 - RNA, 19 nt, Artificial Sequence
  Description of Artificial Sequence: Synthetic oligonucleotide
  Sense strand starting at position 1489 of SEQ ID NO: 1886333
guuauuucuugcucaguaa

SEQ ID NO: 2402647 - RNA, 19 nt, Artificial Sequence
  Description of Artificial Sequence: Synthetic oligonucleotide
  Antisense strand to SEQ ID NO: 2402646
uuacugagcaagaaauaac

SEQ ID NO: 2402648 - RNA, 19 nt, Artificial Sequence
  Description of Artificial Sequence: Synthetic oligonucleotide
  Sense strand starting at position 1493 of SEQ ID NO: 1886333
uuucuugcucaguaagaau

SEQ ID NO: 2402649 - RNA, 19 nt, Artificial Sequence
  Description of Artificial Sequence: Synthetic oligonucleotide
  Antisense strand to SEQ ID NO: 2402648
auucuuacugagcaagaaa

SEQ ID NO: 2402650 - RNA, 19 nt, Artificial Sequence
  Description of Artificial Sequence: Synthetic oligonucleotide
  Sense strand starting at position 1575 of SEQ ID NO: 1886333
cgcaaauuacgacaucauu

SEQ ID NO: 2402651 - RNA, 19 nt, Artificial Sequence
  Description of Artificial Sequence: Synthetic oligonucleotide
  Antisense strand to SEQ ID NO: 2402650
aaugaugucguaauuugcg

SEQ ID NO: 2402652 - RNA, 19 nt, Artificial Sequence
  Description of Artificial Sequence: Synthetic oligonucleotide
  Sense strand starting at position 1714 of SEQ ID NO: 1886333
accagucuuagguagugaa

SEQ ID NO: 2402653 - RNA, 19 nt, Artificial Sequence
  Description of Artificial Sequence: Synthetic oligonucleotide
  Antisense strand to SEQ ID NO: 2402652
uucacuaccuaagacuggu

SEQ ID NO: 2402654 - RNA, 19 nt, Artificial Sequence
  Description of Artificial Sequence: Synthetic oligonucleotide
  Sense strand starting at position 1718 of SEQ ID NO: 1886333
gucuuagguagugaaacaa

SEQ ID NO: 2402655 - RNA, 19 nt, Artificial Sequence
  Description of Artificial Sequence: Synthetic oligonucleotide
  Antisense strand to SEQ ID NO: 2402654
uuguuucacuaccuaagac

SEQ ID NO: 2402656 - RNA, 19 nt, Artificial Sequence
  Description of Artificial Sequence: Synthetic oligonucleotide
  Sense strand starting at position 2183 of SEQ ID NO: 1886333
ggaguacaccgauaucagu

SEQ ID NO: 2402657 - RNA, 19 nt, Artificial Sequence
  Description of Artificial Sequence: Synthetic oligonucleotide
  Antisense strand to SEQ ID NO: 2402656
acugauaucgguguacucc

SEQ ID NO: 2402658 - RNA, 19 nt, Artificial Sequence
  Description of Artificial Sequence: Synthetic oligonucleotide
  Sense strand starting at position 2247 of SEQ ID NO: 1886333
acaaguaauguuugaagca

SEQ ID NO: 2402659 - RNA, 19 nt, Artificial Sequence
  Description of Artificial Sequence: Synthetic oligonucleotide
  Antisense strand to SEQ ID NO: 2402658
ugcuucaaacauuacuugu

SEQ ID NO: 2402660 - RNA, 19 nt, Artificial Sequence
  Description of Artificial Sequence: Synthetic oligonucleotide
  Sense strand starting at position 2478 of SEQ ID NO: 1886333
uauuguaagguuuggagau

SEQ ID NO: 2402661 - RNA, 19 nt, Artificial Sequence
  Description of Artificial Sequence: Synthetic oligonucleotide
  Antisense strand to SEQ ID NO: 2402660
aucuccaaaccuuacaaua

SEQ ID NO: 2402662 - RNA, 19 nt, Artificial Sequence
  Description of Artificial Sequence: Synthetic oligonucleotide
  Sense strand starting at position 2614 of SEQ ID NO: 1886333
aguggaaagacuggugaua

SEQ ID NO: 2402663 - RNA, 19 nt, Artificial Sequence
  Description of Artificial Sequence: Synthetic oligonucleotide
  Antisense strand to SEQ ID NO: 2402662
uaucaccagucuuuccacu

SEQ ID NO: 2402664 - RNA, 19 nt, Artificial Sequence
  Description of Artificial Sequence: Synthetic oligonucleotide
  Sense strand starting at position 2641 of SEQ ID NO: 1886333
uguuuaaaccuccaagucu

SEQ ID NO: 2402665 - RNA, 19 nt, Artificial Sequence
  Description of Artificial Sequence: Synthetic oligonucleotide
  Antisense strand to SEQ ID NO: 2402664
agacuuggagguuuaaaca

SEQ ID NO: 2402666 - RNA, 19 nt, Artificial Sequence
  Description of Artificial Sequence: Synthetic oligonucleotide
  Sense strand starting at position 2929 of SEQ ID NO: 1886333
acguauuuaguccaacgca

SEQ ID NO: 2402667 - RNA, 19 nt, Artificial Sequence
  Description of Artificial Sequence: Synthetic oligonucleotide
  Antisense strand to SEQ ID NO: 2402666
ugcguuggacuaaauacgu

SEQ ID NO: 2402668 - RNA, 19 nt, Artificial Sequence
  Description of Artificial Sequence: Synthetic oligonucleotide
  Sense strand starting at position 3068 of SEQ ID NO: 1886333
uuacgaguuggcuaaggau

SEQ ID NO: 2402669 - RNA, 19 nt, Artificial Sequence
  Description of Artificial Sequence: Synthetic oligonucleotide
  Antisense strand to SEQ ID NO: 2402668
auccuuagccaacucguaa

SEQ ID NO: 2402670 - RNA, 19 nt, Artificial Sequence
  Description of Artificial Sequence: Synthetic oligonucleotide
  Sense strand starting at position 3650 of SEQ ID NO: 1886333
acgagaguguuauuucuuu

SEQ ID NO: 2402671 - RNA, 19 nt, Artificial Sequence
  Description of Artificial Sequence: Synthetic oligonucleotide
  Antisense strand to SEQ ID NO: 2402670
aaagaaauaacacucucgu

SEQ ID NO: 2402672 - RNA, 19 nt, Artificial Sequence
  Description of Artificial Sequence: Synthetic oligonucleotide
  Sense strand starting at position 3665 of SEQ ID NO: 1886333
cuuuauuugugggaaauua

SEQ ID NO: 2402673 - RNA, 19 nt, Artificial Sequence
  Description of Artificial Sequence: Synthetic oligonucleotide
  Antisense strand to SEQ ID NO: 2402672
uaauuucccacaaauaaag

SEQ ID NO: 2402674 - RNA, 19 nt, Artificial Sequence
  Description of Artificial Sequence: Synthetic oligonucleotide
  Sense strand starting at position 74 of SEQ ID NO: 1886334
uggaucuucuugcuauaaa

SEQ ID NO: 2402675 - RNA, 19 nt, Artificial Sequence
  Description of Artificial Sequence: Synthetic oligonucleotide
  Antisense strand to SEQ ID NO: 2402674
uuuauagcaagaagaucca

SEQ ID NO: 2402676 - RNA, 19 nt, Artificial Sequence
  Description of Artificial Sequence: Synthetic oligonucleotide
  Sense strand starting at position 712 of SEQ ID NO: 1886334
aaauauagaccaggugagu

SEQ ID NO: 2402677 - RNA, 19 nt, Artificial Sequence
  Description of Artificial Sequence: Synthetic oligonucleotide
  Antisense strand to SEQ ID NO: 2402676
acucaccuggucuauauuu

SEQ ID NO: 2402678 - RNA, 19 nt, Artificial Sequence
  Description of Artificial Sequence: Synthetic oligonucleotide
  Sense strand starting at position 830 of SEQ ID NO: 1886334
cugugcuuaguauaugaaa

SEQ ID NO: 2402679 - RNA, 19 nt, Artificial Sequence
  Description of Artificial Sequence: Synthetic oligonucleotide
  Antisense strand to SEQ ID NO: 2402678
uuucauauacuaagcacag

SEQ ID NO: 2402680 - RNA, 19 nt, Artificial Sequence
  Description of Artificial Sequence: Synthetic oligonucleotide
  Sense strand starting at position 832 of SEQ ID NO: 1886334
gugcuuaguauaugaaaga

SEQ ID NO: 2402681 - RNA, 19 nt, Artificial Sequence
  Description of Artificial Sequence: Synthetic oligonucleotide
  Antisense strand to SEQ ID NO: 2402680
ucuuucauauacuaagcac

SEQ ID NO: 2402682 - RNA, 19 nt, Artificial Sequence
  Description of Artificial Sequence: Synthetic oligonucleotide
  Sense strand starting at position 845 of SEQ ID NO: 1886334
gaaagauacuuacuuguag

SEQ ID NO: 2402683 - RNA, 19 nt, Artificial Sequence
  Description of Artificial Sequence: Synthetic oligonucleotide
  Antisense strand to SEQ ID NO: 2402682
cuacaaguaaguaucuuuc

SEQ ID NO: 2402684 - RNA, 19 nt, Artificial Sequence
  Description of Artificial Sequence: Synthetic oligonucleotide
  Sense strand starting at position 1070 of SEQ ID NO: 1886334
ucaucuuuauggcuuaaga

SEQ ID NO: 2402685 - RNA, 19 nt, Artificial Sequence
  Description of Artificial Sequence: Synthetic oligonucleotide
  Antisense strand to SEQ ID NO: 2402684
ucuuaagccauaaagauga

SEQ ID NO: 2402686 - RNA, 19 nt, Artificial Sequence
  Description of Artificial Sequence: Synthetic oligonucleotide
  Sense strand starting at position 1207 of SEQ ID NO: 1886334
aguggaaucucaucauaac

SEQ ID NO: 2402687 - RNA, 19 nt, Artificial Sequence
  Description of Artificial Sequence: Synthetic oligonucleotide
  Antisense strand to SEQ ID NO: 2402686
guuaugaugagauuccacu

SEQ ID NO: 2402688 - RNA, 19 nt, Artificial Sequence
  Description of Artificial Sequence: Synthetic oligonucleotide
  Sense strand starting at position 1234 of SEQ ID NO: 1886334
aguagacuugcagaguaua

SEQ ID NO: 2402689 - RNA, 19 nt, Artificial Sequence
  Description of Artificial Sequence: Synthetic oligonucleotide
  Antisense strand to SEQ ID NO: 2402688
uauacucugcaagucuacu

SEQ ID NO: 2402690 - RNA, 19 nt, Artificial Sequence
  Description of Artificial Sequence: Synthetic oligonucleotide
  Sense strand starting at position 1250 of SEQ ID NO: 1886334
auaccuagucaauauaugu

SEQ ID NO: 2402691 - RNA, 19 nt, Artificial Sequence
  Description of Artificial Sequence: Synthetic oligonucleotide
  Antisense strand to SEQ ID NO: 2402690
acauauauugacuagguau

SEQ ID NO: 2402692 - RNA, 19 nt, Artificial Sequence
  Description of Artificial Sequence: Synthetic oligonucleotide
  Sense strand starting at position 1271 of SEQ ID NO: 1886334
gcaguuuaauuaccaggga

SEQ ID NO: 2402693 - RNA, 19 nt, Artificial Sequence
  Description of Artificial Sequence: Synthetic oligonucleotide
  Antisense strand to SEQ ID NO: 2402692
ucccugguaauuaaacugc

SEQ ID NO: 2402694 - RNA, 19 nt, Artificial Sequence
  Description of Artificial Sequence: Synthetic oligonucleotide
  Sense strand starting at position 1274 of SEQ ID NO: 1886334
guuuaauuaccagggaugu

SEQ ID NO: 2402695 - RNA, 19 nt, Artificial Sequence
  Description of Artificial Sequence: Synthetic oligonucleotide
  Antisense strand to SEQ ID NO: 2402694
acaucccugguaauuaaac

SEQ ID NO: 2402696 - RNA, 19 nt, Artificial Sequence
  Description of Artificial Sequence: Synthetic oligonucleotide
  Sense strand starting at position 1275 of SEQ ID NO: 1886334
uuuaauuaccagggauguu

SEQ ID NO: 2402697 - RNA, 19 nt, Artificial Sequence
  Description of Artificial Sequence: Synthetic oligonucleotide
  Antisense strand to SEQ ID NO: 2402696
aacaucccugguaauuaaa

SEQ ID NO: 2402698 - RNA, 19 nt, Artificial Sequence
  Description of Artificial Sequence: Synthetic oligonucleotide
  Sense strand starting at position 1495 of SEQ ID NO: 1886334
augauuaaacugggcacaa

SEQ ID NO: 2402699 - RNA, 19 nt, Artificial Sequence
  Description of Artificial Sequence: Synthetic oligonucleotide
  Antisense strand to SEQ ID NO: 2402698
uugugcccaguuuaaucau

SEQ ID NO: 2402700 - RNA, 19 nt, Artificial Sequence
  Description of Artificial Sequence: Synthetic oligonucleotide
  Sense strand starting at position 1496 of SEQ ID NO: 1886334
ugauuaaacugggcacaau

SEQ ID NO: 2402701 - RNA, 19 nt, Artificial Sequence
  Description of Artificial Sequence: Synthetic oligonucleotide
  Antisense strand to SEQ ID NO: 2402700
auugugcccaguuuaauca

SEQ ID NO: 2402702 - RNA, 19 nt, Artificial Sequence
  Description of Artificial Sequence: Synthetic oligonucleotide
  Sense strand starting at position 1642 of SEQ ID NO: 1886334
agugacaaacugugaacaa

SEQ ID NO: 2402703 - RNA, 19 nt, Artificial Sequence
  Description of Artificial Sequence: Synthetic oligonucleotide
  Antisense strand to SEQ ID NO: 2402702
uuguucacaguuugucacu

SEQ ID NO: 2402704 - RNA, 19 nt, Artificial Sequence
  Description of Artificial Sequence: Synthetic oligonucleotide
  Sense strand starting at position 1673 of SEQ ID NO: 1886334
uguaaaugugcucauugaa

SEQ ID NO: 2402705 - RNA, 19 nt, Artificial Sequence
  Description of Artificial Sequence: Synthetic oligonucleotide
  Antisense strand to SEQ ID NO: 2402704
uucaaugagcacauuuaca

SEQ ID NO: 2402706 - RNA, 19 nt, Artificial Sequence
  Description of Artificial Sequence: Synthetic oligonucleotide
  Sense strand starting at position 1806 of SEQ ID NO: 1886334
uccucaauacgaugaccua

SEQ ID NO: 2402707 - RNA, 19 nt, Artificial Sequence
  Description of Artificial Sequence: Synthetic oligonucleotide
  Antisense strand to SEQ ID NO: 2402706
uaggucaucguauugagga

SEQ ID NO: 2402708 - RNA, 19 nt, Artificial Sequence
  Description of Artificial Sequence: Synthetic oligonucleotide
  Sense strand starting at position 1841 of SEQ ID NO: 1886334
cuuacuugguuauccugaa

SEQ ID NO: 2402709 - RNA, 19 nt, Artificial Sequence
  Description of Artificial Sequence: Synthetic oligonucleotide
  Antisense strand to SEQ ID NO: 2402708
uucaggauaaccaaguaag

SEQ ID NO: 2402710 - RNA, 19 nt, Artificial Sequence
  Description of Artificial Sequence: Synthetic oligonucleotide
  Sense strand starting at position 1842 of SEQ ID NO: 1886334
uuacuugguuauccugaaa

SEQ ID NO: 2402711 - RNA, 19 nt, Artificial Sequence
  Description of Artificial Sequence: Synthetic oligonucleotide
  Antisense strand to SEQ ID NO: 2402710
uuucaggauaaccaaguaa

SEQ ID NO: 2402712 - RNA, 19 nt, Artificial Sequence
  Description of Artificial Sequence: Synthetic oligonucleotide
  Sense strand starting at position 1845 of SEQ ID NO: 1886334
cuugguuauccugaaacuu

SEQ ID NO: 2402713 - RNA, 19 nt, Artificial Sequence
  Description of Artificial Sequence: Synthetic oligonucleotide
  Antisense strand to SEQ ID NO: 2402712
aaguuucaggauaaccaag

SEQ ID NO: 2402714 - RNA, 19 nt, Artificial Sequence
  Description of Artificial Sequence: Synthetic oligonucleotide
  Sense strand starting at position 2100 of SEQ ID NO: 1886334
cuaguauucccugauugau

SEQ ID NO: 2402715 - RNA, 19 nt, Artificial Sequence
  Description of Artificial Sequence: Synthetic oligonucleotide
  Antisense strand to SEQ ID NO: 2402714
aucaaucagggaauacuag

SEQ ID NO: 2402716 - RNA, 19 nt, Artificial Sequence
  Description of Artificial Sequence: Synthetic oligonucleotide
  Sense strand starting at position 2131 of SEQ ID NO: 1886334
aguagucagaccuaguauu

SEQ ID NO: 2402717 - RNA, 19 nt, Artificial Sequence
  Description of Artificial Sequence: Synthetic oligonucleotide
  Antisense strand to SEQ ID NO: 2402716
aauacuaggucugacuacu

SEQ ID NO: 2402718 - RNA, 19 nt, Artificial Sequence
  Description of Artificial Sequence: Synthetic oligonucleotide
  Sense strand starting at position 2286 of SEQ ID NO: 1886334
cgguauguaacauguauuu

SEQ ID NO: 2402719 - RNA, 19 nt, Artificial Sequence
  Description of Artificial Sequence: Synthetic oligonucleotide
  Antisense strand to SEQ ID NO: 2402718
aaauacauguuacauaccg

SEQ ID NO: 2402720 - RNA, 19 nt, Artificial Sequence
  Description of Artificial Sequence: Synthetic oligonucleotide
  Sense strand starting at position 2306 of SEQ ID NO: 1886334
uggaguacauuugauaacu

SEQ ID NO: 2402721 - RNA, 19 nt, Artificial Sequence
  Description of Artificial Sequence: Synthetic oligonucleotide
  Antisense strand to SEQ ID NO: 2402720
aguuaucaaauguacucca

SEQ ID NO: 2402722 - RNA, 19 nt, Artificial Sequence
  Description of Artificial Sequence: Synthetic oligonucleotide
  Sense strand starting at position 2308 of SEQ ID NO: 1886334
gaguacauuugauaacuga

SEQ ID NO: 2402723 - RNA, 19 nt, Artificial Sequence
  Description of Artificial Sequence: Synthetic oligonucleotide
  Antisense strand to SEQ ID NO: 2402722
ucaguuaucaaauguacuc

SEQ ID NO: 2402724 - RNA, 19 nt, Artificial Sequence
  Description of Artificial Sequence: Synthetic oligonucleotide
  Sense strand starting at position 2354 of SEQ ID NO: 1886334
guguaacuggaauauccau

SEQ ID NO: 2402725 - RNA, 19 nt, Artificial Sequence
  Description of Artificial Sequence: Synthetic oligonucleotide
  Antisense strand to SEQ ID NO: 2402724
auggauauuccaguuacac

SEQ ID NO: 2402726 - RNA, 19 nt, Artificial Sequence
  Description of Artificial Sequence: Synthetic oligonucleotide
  Sense strand starting at position 2426 of SEQ ID NO: 1886334
ugaaauggguuacugugaa

SEQ ID NO: 2402727 - RNA, 19 nt, Artificial Sequence
  Description of Artificial Sequence: Synthetic oligonucleotide
  Antisense strand to SEQ ID NO: 2402726
uucacaguaacccauuuca

SEQ ID NO: 2402728 - RNA, 19 nt, Artificial Sequence
  Description of Artificial Sequence: Synthetic oligonucleotide
  Sense strand starting at position 2470 of SEQ ID NO: 1886334
guaggugucuuauuucuuc

SEQ ID NO: 2402729 - RNA, 19 nt, Artificial Sequence
  Description of Artificial Sequence: Synthetic oligonucleotide
  Antisense strand to SEQ ID NO: 2402728
gaagaaauaagacaccuac

SEQ ID NO: 2402730 - RNA, 19 nt, Artificial Sequence
  Description of Artificial Sequence: Synthetic oligonucleotide
  Sense strand starting at position 2473 of SEQ ID NO: 1886334
ggugucuuauuucuucuau

SEQ ID NO: 2402731 - RNA, 19 nt, Artificial Sequence
  Description of Artificial Sequence: Synthetic oligonucleotide
  Antisense strand to SEQ ID NO: 2402730
auagaagaaauaagacacc

SEQ ID NO: 2402732 - RNA, 19 nt, Artificial Sequence
  Description of Artificial Sequence: Synthetic oligonucleotide
  Sense strand starting at position 2711 of SEQ ID NO: 1886334
gguuauuucuugcucagua

SEQ ID NO: 2402733 - RNA, 19 nt, Artificial Sequence
  Description of Artificial Sequence: Synthetic oligonucleotide
  Antisense strand to SEQ ID NO: 2402732
uacugagcaagaaauaacc

SEQ ID NO: 2402734 - RNA, 19 nt, Artificial Sequence
  Description of Artificial Sequence: Synthetic oligonucleotide
  Sense strand starting at position 2712 of SEQ ID NO: 1886334
guuauuucuugcucaguaa

SEQ ID NO: 2402735 - RNA, 19 nt, Artificial Sequence
  Description of Artificial Sequence: Synthetic oligonucleotide
  Antisense strand to SEQ ID NO: 2402734
uuacugagcaagaaauaac

SEQ ID NO: 2402736 - RNA, 19 nt, Artificial Sequence
  Description of Artificial Sequence: Synthetic oligonucleotide
  Sense strand starting at position 2716 of SEQ ID NO: 1886334
uuucuugcucaguaagaau

SEQ ID NO: 2402737 - RNA, 19 nt, Artificial Sequence
  Description of Artificial Sequence: Synthetic oligonucleotide
  Antisense strand to SEQ ID NO: 2402736
auucuuacugagcaagaaa

SEQ ID NO: 2402738 - RNA, 19 nt, Artificial Sequence
  Description of Artificial Sequence: Synthetic oligonucleotide
  Sense strand starting at position 2798 of SEQ ID NO: 1886334
cgcaaauuacgacaucauu

SEQ ID NO: 2402739 - RNA, 19 nt, Artificial Sequence
  Description of Artificial Sequence: Synthetic oligonucleotide
  Antisense strand to SEQ ID NO: 2402738
aaugaugucguaauuugcg

SEQ ID NO: 2402740 - RNA, 19 nt, Artificial Sequence
  Description of Artificial Sequence: Synthetic oligonucleotide
  Sense strand starting at position 2937 of SEQ ID NO: 1886334
accagucuuagguagugaa

SEQ ID NO: 2402741 - RNA, 19 nt, Artificial Sequence
  Description of Artificial Sequence: Synthetic oligonucleotide
  Antisense strand to SEQ ID NO: 2402740
uucacuaccuaagacuggu

SEQ ID NO: 2402742 - RNA, 19 nt, Artificial Sequence
  Description of Artificial Sequence: Synthetic oligonucleotide
  Sense strand starting at position 2941 of SEQ ID NO: 1886334
gucuuagguagugaaacaa

SEQ ID NO: 2402743 - RNA, 19 nt, Artificial Sequence
  Description of Artificial Sequence: Synthetic oligonucleotide
  Antisense strand to SEQ ID NO: 2402742
uuguuucacuaccuaagac

SEQ ID NO: 2402744 - RNA, 19 nt, Artificial Sequence
  Description of Artificial Sequence: Synthetic oligonucleotide
  Sense strand starting at position 3406 of SEQ ID NO: 1886334
ggaguacaccgauaucagu

SEQ ID NO: 2402745 - RNA, 19 nt, Artificial Sequence
  Description of Artificial Sequence: Synthetic oligonucleotide
  Antisense strand to SEQ ID NO: 2402744
acugauaucgguguacucc

SEQ ID NO: 2402746 - RNA, 19 nt, Artificial Sequence
  Description of Artificial Sequence: Synthetic oligonucleotide
  Sense strand starting at position 3470 of SEQ ID NO: 1886334
acaaguaauguuugaagca

SEQ ID NO: 2402747 - RNA, 19 nt, Artificial Sequence
  Description of Artificial Sequence: Synthetic oligonucleotide
  Antisense strand to SEQ ID NO: 2402746
ugcuucaaacauuacuugu

SEQ ID NO: 2402748 - RNA, 19 nt, Artificial Sequence
  Description of Artificial Sequence: Synthetic oligonucleotide
  Sense strand starting at position 3701 of SEQ ID NO: 1886334
uauuguaagguuuggagau

SEQ ID NO: 2402749 - RNA, 19 nt, Artificial Sequence
  Description of Artificial Sequence: Synthetic oligonucleotide
  Antisense strand to SEQ ID NO: 2402748
aucuccaaaccuuacaaua

SEQ ID NO: 2402750 - RNA, 19 nt, Artificial Sequence
  Description of Artificial Sequence: Synthetic oligonucleotide
  Sense strand starting at position 3837 of SEQ ID NO: 1886334
aguggaaagacuggugaua

SEQ ID NO: 2402751 - RNA, 19 nt, Artificial Sequence
  Description of Artificial Sequence: Synthetic oligonucleotide
  Antisense strand to SEQ ID NO: 2402750
uaucaccagucuuuccacu

SEQ ID NO: 2402752 - RNA, 19 nt, Artificial Sequence
  Description of Artificial Sequence: Synthetic oligonucleotide
  Sense strand starting at position 3864 of SEQ ID NO: 1886334
uguuuaaaccuccaagucu

SEQ ID NO: 2402753 - RNA, 19 nt, Artificial Sequence
  Description of Artificial Sequence: Synthetic oligonucleotide
  Antisense strand to SEQ ID NO: 2402752
agacuuggagguuuaaaca

SEQ ID NO: 2402754 - RNA, 19 nt, Artificial Sequence
  Description of Artificial Sequence: Synthetic oligonucleotide
  Sense strand starting at position 273 of SEQ ID NO: 1886335
ucaucugauuuggcuugua

SEQ ID NO: 2402755 - RNA, 19 nt, Artificial Sequence
  Description of Artificial Sequence: Synthetic oligonucleotide
  Antisense strand to SEQ ID NO: 2402754
uacaagccaaaucagauga

SEQ ID NO: 2402756 - RNA, 19 nt, Artificial Sequence
  Description of Artificial Sequence: Synthetic oligonucleotide
  Sense strand starting at position 337 of SEQ ID NO: 1886335
gcaacaaauuaggcagaaa

SEQ ID NO: 2402757 - RNA, 19 nt, Artificial Sequence
  Description of Artificial Sequence: Synthetic oligonucleotide
  Antisense strand to SEQ ID NO: 2402756
uuucugccuaauuuguugc

SEQ ID NO: 2402758 - RNA, 19 nt, Artificial Sequence
  Description of Artificial Sequence: Synthetic oligonucleotide
  Sense strand starting at position 847 of SEQ ID NO: 1886335
uggaucuucuugcuauaaa

SEQ ID NO: 2402759 - RNA, 19 nt, Artificial Sequence
  Description of Artificial Sequence: Synthetic oligonucleotide
  Antisense strand to SEQ ID NO: 2402758
uuuauagcaagaagaucca

SEQ ID NO: 2402760 - RNA, 19 nt, Artificial Sequence
  Description of Artificial Sequence: Synthetic oligonucleotide
  Sense strand starting at position 1485 of SEQ ID NO: 1886335
aaauauagaccaggugagu

SEQ ID NO: 2402761 - RNA, 19 nt, Artificial Sequence
  Description of Artificial Sequence: Synthetic oligonucleotide
  Antisense strand to SEQ ID NO: 2402760
acucaccuggucuauauuu

SEQ ID NO: 2402762 - RNA, 19 nt, Artificial Sequence
  Description of Artificial Sequence: Synthetic oligonucleotide
  Sense strand starting at position 1603 of SEQ ID NO: 1886335
cugugcuuaguauaugaaa

SEQ ID NO: 2402763 - RNA, 19 nt, Artificial Sequence
  Description of Artificial Sequence: Synthetic oligonucleotide
  Antisense strand to SEQ ID NO: 2402762
uuucauauacuaagcacag

SEQ ID NO: 2402764 - RNA, 19 nt, Artificial Sequence
  Description of Artificial Sequence: Synthetic oligonucleotide
  Sense strand starting at position 1605 of SEQ ID NO: 1886335
gugcuuaguauaugaaaga

SEQ ID NO: 2402765 - RNA, 19 nt, Artificial Sequence
  Description of Artificial Sequence: Synthetic oligonucleotide
  Antisense strand to SEQ ID NO: 2402764
ucuuucauauacuaagcac

SEQ ID NO: 2402766 - RNA, 19 nt, Artificial Sequence
  Description of Artificial Sequence: Synthetic oligonucleotide
  Sense strand starting at position 1618 of SEQ ID NO: 1886335
gaaagauacuuacuuguag

SEQ ID NO: 2402767 - RNA, 19 nt, Artificial Sequence
  Description of Artificial Sequence: Synthetic oligonucleotide
  Antisense strand to SEQ ID NO: 2402766
cuacaaguaaguaucuuuc

SEQ ID NO: 2402768 - RNA, 19 nt, Artificial Sequence
  Description of Artificial Sequence: Synthetic oligonucleotide
  Sense strand starting at position 1843 of SEQ ID NO: 1886335
ucaucuuuauggcuuaaga

SEQ ID NO: 2402769 - RNA, 19 nt, Artificial Sequence
  Description of Artificial Sequence: Synthetic oligonucleotide
  Antisense strand to SEQ ID NO: 2402768
ucuuaagccauaaagauga

SEQ ID NO: 2402770 - RNA, 19 nt, Artificial Sequence
  Description of Artificial Sequence: Synthetic oligonucleotide
  Sense strand starting at position 1980 of SEQ ID NO: 1886335
aguggaaucucaucauaac

SEQ ID NO: 2402771 - RNA, 19 nt, Artificial Sequence
  Description of Artificial Sequence: Synthetic oligonucleotide
  Antisense strand to SEQ ID NO: 2402770
guuaugaugagauuccacu

SEQ ID NO: 2402772 - RNA, 19 nt, Artificial Sequence
  Description of Artificial Sequence: Synthetic oligonucleotide
  Sense strand starting at position 2007 of SEQ ID NO: 1886335
aguagacuugcagaguaua

SEQ ID NO: 2402773 - RNA, 19 nt, Artificial Sequence
  Description of Artificial Sequence: Synthetic oligonucleotide
  Antisense strand to SEQ ID NO: 2402772
uauacucugcaagucuacu

SEQ ID NO: 2402774 - RNA, 19 nt, Artificial Sequence
  Description of Artificial Sequence: Synthetic oligonucleotide
  Sense strand starting at position 2023 of SEQ ID NO: 1886335
auaccuagucaauauaugu

SEQ ID NO: 2402775 - RNA, 19 nt, Artificial Sequence
  Description of Artificial Sequence: Synthetic oligonucleotide
  Antisense strand to SEQ ID NO: 2402774
acauauauugacuagguau

SEQ ID NO: 2402776 - RNA, 19 nt, Artificial Sequence
  Description of Artificial Sequence: Synthetic oligonucleotide
  Sense strand starting at position 2044 of SEQ ID NO: 1886335
gcaguuuaauuaccaggga

SEQ ID NO: 2402777 - RNA, 19 nt, Artificial Sequence
  Description of Artificial Sequence: Synthetic oligonucleotide
  Antisense strand to SEQ ID NO: 2402776
ucccugguaauuaaacugc

SEQ ID NO: 2402778 - RNA, 19 nt, Artificial Sequence
  Description of Artificial Sequence: Synthetic oligonucleotide
  Sense strand starting at position 2047 of SEQ ID NO: 1886335
guuuaauuaccagggaugu

SEQ ID NO: 2402779 - RNA, 19 nt, Artificial Sequence
  Description of Artificial Sequence: Synthetic oligonucleotide
  Antisense strand to SEQ ID NO: 2402778
acaucccugguaauuaaac

SEQ ID NO: 2402780 - RNA, 19 nt, Artificial Sequence
  Description of Artificial Sequence: Synthetic oligonucleotide
  Sense strand starting at position 2048 of SEQ ID NO: 1886335
uuuaauuaccagggauguu

SEQ ID NO: 2402781 - RNA, 19 nt, Artificial Sequence
  Description of Artificial Sequence: Synthetic oligonucleotide
  Antisense strand to SEQ ID NO: 2402780
aacaucccugguaauuaaa

SEQ ID NO: 2402782 - RNA, 19 nt, Artificial Sequence
  Description of Artificial Sequence: Synthetic oligonucleotide
  Sense strand starting at position 2268 of SEQ ID NO: 1886335
augauuaaacugggcacaa

SEQ ID NO: 2402783 - RNA, 19 nt, Artificial Sequence
  Description of Artificial Sequence: Synthetic oligonucleotide
  Antisense strand to SEQ ID NO: 2402782
uugugcccaguuuaaucau

SEQ ID NO: 2402784 - RNA, 19 nt, Artificial Sequence
  Description of Artificial Sequence: Synthetic oligonucleotide
  Sense strand starting at position 2269 of SEQ ID NO: 1886335
ugauuaaacugggcacaau

SEQ ID NO: 2402785 - RNA, 19 nt, Artificial Sequence
  Description of Artificial Sequence: Synthetic oligonucleotide
  Antisense strand to SEQ ID NO: 2402784
auugugcccaguuuaauca

SEQ ID NO: 2402786 - RNA, 19 nt, Artificial Sequence
  Description of Artificial Sequence: Synthetic oligonucleotide
  Sense strand starting at position 2415 of SEQ ID NO: 1886335
agugacaaacugugaacaa

SEQ ID NO: 2402787 - RNA, 19 nt, Artificial Sequence
  Description of Artificial Sequence: Synthetic oligonucleotide
  Antisense strand to SEQ ID NO: 2402786
uuguucacaguuugucacu

SEQ ID NO: 2402788 - RNA, 19 nt, Artificial Sequence
  Description of Artificial Sequence: Synthetic oligonucleotide
  Sense strand starting at position 2446 of SEQ ID NO: 1886335
uguaaaugugcucauugaa

SEQ ID NO: 2402789 - RNA, 19 nt, Artificial Sequence
  Description of Artificial Sequence: Synthetic oligonucleotide
  Antisense strand to SEQ ID NO: 2402788
uucaaugagcacauuuaca

SEQ ID NO: 2402790 - RNA, 19 nt, Artificial Sequence
  Description of Artificial Sequence: Synthetic oligonucleotide
  Sense strand starting at position 2579 of SEQ ID NO: 1886335
uccucaauacgaugaccua

SEQ ID NO: 2402791 - RNA, 19 nt, Artificial Sequence
  Description of Artificial Sequence: Synthetic oligonucleotide
  Antisense strand to SEQ ID NO: 2402790
uaggucaucguauugagga

SEQ ID NO: 2402792 - RNA, 19 nt, Artificial Sequence
  Description of Artificial Sequence: Synthetic oligonucleotide
  Sense strand starting at position 2614 of SEQ ID NO: 1886335
cuuacuugguuauccugaa

SEQ ID NO: 2402793 - RNA, 19 nt, Artificial Sequence
  Description of Artificial Sequence: Synthetic oligonucleotide
  Antisense strand to SEQ ID NO: 2402792
uucaggauaaccaaguaag

SEQ ID NO: 2402794 - RNA, 19 nt, Artificial Sequence
  Description of Artificial Sequence: Synthetic oligonucleotide
  Sense strand starting at position 2615 of SEQ ID NO: 1886335
uuacuugguuauccugaaa

SEQ ID NO: 2402795 - RNA, 19 nt, Artificial Sequence
  Description of Artificial Sequence: Synthetic oligonucleotide
  Antisense strand to SEQ ID NO: 2402794
uuucaggauaaccaaguaa

SEQ ID NO: 2402796 - RNA, 19 nt, Artificial Sequence
  Description of Artificial Sequence: Synthetic oligonucleotide
  Sense strand starting at position 2618 of SEQ ID NO: 1886335
cuugguuauccugaaacuu

SEQ ID NO: 2402797 - RNA, 19 nt, Artificial Sequence
  Description of Artificial Sequence: Synthetic oligonucleotide
  Antisense strand to SEQ ID NO: 2402796
aaguuucaggauaaccaag

SEQ ID NO: 2402798 - RNA, 19 nt, Artificial Sequence
  Description of Artificial Sequence: Synthetic oligonucleotide
  Sense strand starting at position 2808 of SEQ ID NO: 1886335
caaguuuaaguuggaaguu

SEQ ID NO: 2402799 - RNA, 19 nt, Artificial Sequence
  Description of Artificial Sequence: Synthetic oligonucleotide
  Antisense strand to SEQ ID NO: 2402798
aacuuccaacuuaaacuug

SEQ ID NO: 2402800 - RNA, 19 nt, Artificial Sequence
  Description of Artificial Sequence: Synthetic oligonucleotide
  Sense strand starting at position 2873 of SEQ ID NO: 1886335
cuaguauucccugauugau

SEQ ID NO: 2402801 - RNA, 19 nt, Artificial Sequence
  Description of Artificial Sequence: Synthetic oligonucleotide
  Antisense strand to SEQ ID NO: 2402800
aucaaucagggaauacuag

SEQ ID NO: 2402802 - RNA, 19 nt, Artificial Sequence
  Description of Artificial Sequence: Synthetic oligonucleotide
  Sense strand starting at position 2904 of SEQ ID NO: 1886335
aguagucagaccuaguauu

SEQ ID NO: 2402803 - RNA, 19 nt, Artificial Sequence
  Description of Artificial Sequence: Synthetic oligonucleotide
  Antisense strand to SEQ ID NO: 2402802
aauacuaggucugacuacu

SEQ ID NO: 2402804 - RNA, 19 nt, Artificial Sequence
  Description of Artificial Sequence: Synthetic oligonucleotide
  Sense strand starting at position 2914 of SEQ ID NO: 1886335
ccuaguauuuaguaaagga

SEQ ID NO: 2402805 - RNA, 19 nt, Artificial Sequence
  Description of Artificial Sequence: Synthetic oligonucleotide
  Antisense strand to SEQ ID NO: 2402804
uccuuuacuaaauacuagg

SEQ ID NO: 2402806 - RNA, 19 nt, Artificial Sequence
  Description of Artificial Sequence: Synthetic oligonucleotide
  Sense strand starting at position 3059 of SEQ ID NO: 1886335
cgguauguaacauguauuu

SEQ ID NO: 2402807 - RNA, 19 nt, Artificial Sequence
  Description of Artificial Sequence: Synthetic oligonucleotide
  Antisense strand to SEQ ID NO: 2402806
aaauacauguuacauaccg

SEQ ID NO: 2402808 - RNA, 19 nt, Artificial Sequence
  Description of Artificial Sequence: Synthetic oligonucleotide
  Sense strand starting at position 3079 of SEQ ID NO: 1886335
uggaguacauuugauaacu

SEQ ID NO: 2402809 - RNA, 19 nt, Artificial Sequence
  Description of Artificial Sequence: Synthetic oligonucleotide
  Antisense strand to SEQ ID NO: 2402808
aguuaucaaauguacucca

SEQ ID NO: 2402810 - RNA, 19 nt, Artificial Sequence
  Description of Artificial Sequence: Synthetic oligonucleotide
  Sense strand starting at position 3081 of SEQ ID NO: 1886335
gaguacauuugauaacuga

SEQ ID NO: 2402811 - RNA, 19 nt, Artificial Sequence
  Description of Artificial Sequence: Synthetic oligonucleotide
  Antisense strand to SEQ ID NO: 2402810
ucaguuaucaaauguacuc

SEQ ID NO: 2402812 - RNA, 19 nt, Artificial Sequence
  Description of Artificial Sequence: Synthetic oligonucleotide
  Sense strand starting at position 3127 of SEQ ID NO: 1886335
guguaacuggaauauccau

SEQ ID NO: 2402813 - RNA, 19 nt, Artificial Sequence
  Description of Artificial Sequence: Synthetic oligonucleotide
  Antisense strand to SEQ ID NO: 2402812
auggauauuccaguuacac

SEQ ID NO: 2402814 - RNA, 19 nt, Artificial Sequence
  Description of Artificial Sequence: Synthetic oligonucleotide
  Sense strand starting at position 3192 of SEQ ID NO: 1886335
gccaucuugaaauggguua

SEQ ID NO: 2402815 - RNA, 19 nt, Artificial Sequence
  Description of Artificial Sequence: Synthetic oligonucleotide
  Antisense strand to SEQ ID NO: 2402814
uaacccauuucaagauggc

SEQ ID NO: 2402816 - RNA, 19 nt, Artificial Sequence
  Description of Artificial Sequence: Synthetic oligonucleotide
  Sense strand starting at position 3199 of SEQ ID NO: 1886335
ugaaauggguuacugugaa

SEQ ID NO: 2402817 - RNA, 19 nt, Artificial Sequence
  Description of Artificial Sequence: Synthetic oligonucleotide
  Antisense strand to SEQ ID NO: 2402816
uucacaguaacccauuuca

SEQ ID NO: 2402818 - RNA, 19 nt, Artificial Sequence
  Description of Artificial Sequence: Synthetic oligonucleotide
  Sense strand starting at position 3243 of SEQ ID NO: 1886335
guaggugucuuauuucuuc

SEQ ID NO: 2402819 - RNA, 19 nt, Artificial Sequence
  Description of Artificial Sequence: Synthetic oligonucleotide
  Antisense strand to SEQ ID NO: 2402818
gaagaaauaagacaccuac

SEQ ID NO: 2402820 - RNA, 19 nt, Artificial Sequence
  Description of Artificial Sequence: Synthetic oligonucleotide
  Sense strand starting at position 3246 of SEQ ID NO: 1886335
ggugucuuauuucuucuau

SEQ ID NO: 2402821 - RNA, 19 nt, Artificial Sequence
  Description of Artificial Sequence: Synthetic oligonucleotide
  Antisense strand to SEQ ID NO: 2402820
auagaagaaauaagacacc

SEQ ID NO: 2402822 - RNA, 19 nt, Artificial Sequence
  Description of Artificial Sequence: Synthetic oligonucleotide
  Sense strand starting at position 3484 of SEQ ID NO: 1886335
gguuauuucuugcucagua

SEQ ID NO: 2402823 - RNA, 19 nt, Artificial Sequence
  Description of Artificial Sequence: Synthetic oligonucleotide
  Antisense strand to SEQ ID NO: 2402822
uacugagcaagaaauaacc

SEQ ID NO: 2402824 - RNA, 19 nt, Artificial Sequence
  Description of Artificial Sequence: Synthetic oligonucleotide
  Sense strand starting at position 3485 of SEQ ID NO: 1886335
guuauuucuugcucaguaa

SEQ ID NO: 2402825 - RNA, 19 nt, Artificial Sequence
  Description of Artificial Sequence: Synthetic oligonucleotide
  Antisense strand to SEQ ID NO: 2402824
uuacugagcaagaaauaac

SEQ ID NO: 2402826 - RNA, 19 nt, Artificial Sequence
  Description of Artificial Sequence: Synthetic oligonucleotide
  Sense strand starting at position 3489 of SEQ ID NO: 1886335
uuucuugcucaguaagaau

SEQ ID NO: 2402827 - RNA, 19 nt, Artificial Sequence
  Description of Artificial Sequence: Synthetic oligonucleotide
  Antisense strand to SEQ ID NO: 2402826
auucuuacugagcaagaaa

SEQ ID NO: 2402828 - RNA, 19 nt, Artificial Sequence
  Description of Artificial Sequence: Synthetic oligonucleotide
  Sense strand starting at position 3571 of SEQ ID NO: 1886335
cgcaaauuacgacaucauu

SEQ ID NO: 2402829 - RNA, 19 nt, Artificial Sequence
  Description of Artificial Sequence: Synthetic oligonucleotide
  Antisense strand to SEQ ID NO: 2402828
aaugaugucguaauuugcg

SEQ ID NO: 2402830 - RNA, 19 nt, Artificial Sequence
  Description of Artificial Sequence: Synthetic oligonucleotide
  Sense strand starting at position 3710 of SEQ ID NO: 1886335
accagucuuagguagugaa

SEQ ID NO: 2402831 - RNA, 19 nt, Artificial Sequence
  Description of Artificial Sequence: Synthetic oligonucleotide
  Antisense strand to SEQ ID NO: 2402830
uucacuaccuaagacuggu

SEQ ID NO: 2402832 - RNA, 19 nt, Artificial Sequence
  Description of Artificial Sequence: Synthetic oligonucleotide
  Sense strand starting at position 3714 of SEQ ID NO: 1886335
gucuuagguagugaaacaa

SEQ ID NO: 2402833 - RNA, 19 nt, Artificial Sequence
  Description of Artificial Sequence: Synthetic oligonucleotide
  Antisense strand to SEQ ID NO: 2402832
uuguuucacuaccuaagac

SEQ ID NO: 2402834 - RNA, 19 nt, Artificial Sequence
  Description of Artificial Sequence: Synthetic oligonucleotide
  Sense strand starting at position 2338 of SEQ ID NO: 1886336
ucgggucucacagagcuaa

SEQ ID NO: 2402835 - RNA, 19 nt, Artificial Sequence
  Description of Artificial Sequence: Synthetic oligonucleotide
  Antisense strand to SEQ ID NO: 2402834
uuagcucugugagacccga

SEQ ID NO: 2402836 - RNA, 19 nt, Artificial Sequence
  Description of Artificial Sequence: Synthetic oligonucleotide
  Sense strand starting at position 2375 of SEQ ID NO: 1886336
cuagcaaacuguccaaaga

SEQ ID NO: 2402837 - RNA, 19 nt, Artificial Sequence
  Description of Artificial Sequence: Synthetic oligonucleotide
  Antisense strand to SEQ ID NO: 2402836
ucuuuggacaguuugcuag

SEQ ID NO: 2402838 - RNA, 19 nt, Artificial Sequence
  Description of Artificial Sequence: Synthetic oligonucleotide
  Sense strand starting at position 2527 of SEQ ID NO: 1886336
guaaacaaaugguauagaa

SEQ ID NO: 2402839 - RNA, 19 nt, Artificial Sequence
  Description of Artificial Sequence: Synthetic oligonucleotide
  Antisense strand to SEQ ID NO: 2402838
uucuauaccauuuguuuac

SEQ ID NO: 2402840 - RNA, 19 nt, Artificial Sequence
  Description of Artificial Sequence: Synthetic oligonucleotide
  Sense strand starting at position 2710 of SEQ ID NO: 1886336
ccugauacauaucuccgaa

SEQ ID NO: 2402841 - RNA, 19 nt, Artificial Sequence
  Description of Artificial Sequence: Synthetic oligonucleotide
  Antisense strand to SEQ ID NO: 2402840
uucggagauauguaucagg

SEQ ID NO: 2402842 - RNA, 19 nt, Artificial Sequence
  Description of Artificial Sequence: Synthetic oligonucleotide
  Sense strand starting at position 2712 of SEQ ID NO: 1886336
ugauacauaucuccgaaac

SEQ ID NO: 2402843 - RNA, 19 nt, Artificial Sequence
  Description of Artificial Sequence: Synthetic oligonucleotide
  Antisense strand to SEQ ID NO: 2402842
guuucggagauauguauca

SEQ ID NO: 2402844 - RNA, 19 nt, Artificial Sequence
  Description of Artificial Sequence: Synthetic oligonucleotide
  Sense strand starting at position 2879 of SEQ ID NO: 1886336
cccucaaggucacuguauu

SEQ ID NO: 2402845 - RNA, 19 nt, Artificial Sequence
  Description of Artificial Sequence: Synthetic oligonucleotide
  Antisense strand to SEQ ID NO: 2402844
aauacagugaccuugaggg

SEQ ID NO: 2402846 - RNA, 19 nt, Artificial Sequence
  Description of Artificial Sequence: Synthetic oligonucleotide
  Sense strand starting at position 2885 of SEQ ID NO: 1886336
aggucacuguauucucauu

SEQ ID NO: 2402847 - RNA, 19 nt, Artificial Sequence
  Description of Artificial Sequence: Synthetic oligonucleotide
  Antisense strand to SEQ ID NO: 2402846
aaugagaauacagugaccu

SEQ ID NO: 2402848 - RNA, 19 nt, Artificial Sequence
  Description of Artificial Sequence: Synthetic oligonucleotide
  Sense strand starting at position 2890 of SEQ ID NO: 1886336
acuguauucucauuaguuc

SEQ ID NO: 2402849 - RNA, 19 nt, Artificial Sequence
  Description of Artificial Sequence: Synthetic oligonucleotide
  Antisense strand to SEQ ID NO: 2402848
gaacuaaugagaauacagu

SEQ ID NO: 2402850 - RNA, 19 nt, Artificial Sequence
  Description of Artificial Sequence: Synthetic oligonucleotide
  Sense strand starting at position 2948 of SEQ ID NO: 1886336
augugagccuccuucuuga

SEQ ID NO: 2402851 - RNA, 19 nt, Artificial Sequence
  Description of Artificial Sequence: Synthetic oligonucleotide
  Antisense strand to SEQ ID NO: 2402850
ucaagaaggaggcucacau

SEQ ID NO: 2402852 - RNA, 19 nt, Artificial Sequence
  Description of Artificial Sequence: Synthetic oligonucleotide
  Sense strand starting at position 2961 of SEQ ID NO: 1886336
ucuugauucuugggcacuu

SEQ ID NO: 2402853 - RNA, 19 nt, Artificial Sequence
  Description of Artificial Sequence: Synthetic oligonucleotide
  Antisense strand to SEQ ID NO: 2402852
aagugcccaagaaucaaga

SEQ ID NO: 2402854 - RNA, 19 nt, Artificial Sequence
  Description of Artificial Sequence: Synthetic oligonucleotide
  Sense strand starting at position 2962 of SEQ ID NO: 1886336
cuugauucuugggcacuua

SEQ ID NO: 2402855 - RNA, 19 nt, Artificial Sequence
  Description of Artificial Sequence: Synthetic oligonucleotide
  Antisense strand to SEQ ID NO: 2402854
uaagugcccaagaaucaag

SEQ ID NO: 2402856 - RNA, 19 nt, Artificial Sequence
  Description of Artificial Sequence: Synthetic oligonucleotide
  Sense strand starting at position 3001 of SEQ ID NO: 1886336
guugaaucggcucagcaaa

SEQ ID NO: 2402857 - RNA, 19 nt, Artificial Sequence
  Description of Artificial Sequence: Synthetic oligonucleotide
  Antisense strand to SEQ ID NO: 2402856
uuugcugagccgauucaac

SEQ ID NO: 2402858 - RNA, 19 nt, Artificial Sequence
  Description of Artificial Sequence: Synthetic oligonucleotide
  Sense strand starting at position 3088 of SEQ ID NO: 1886336
gcaagcaggcauugugaaa

SEQ ID NO: 2402859 - RNA, 19 nt, Artificial Sequence
  Description of Artificial Sequence: Synthetic oligonucleotide
  Antisense strand to SEQ ID NO: 2402858
uuucacaaugccugcuugc

SEQ ID NO: 2402860 - RNA, 19 nt, Artificial Sequence
  Description of Artificial Sequence: Synthetic oligonucleotide
  Sense strand starting at position 3106 of SEQ ID NO: 1886336
aaaggauuccagugaccca

SEQ ID NO: 2402861 - RNA, 19 nt, Artificial Sequence
  Description of Artificial Sequence: Synthetic oligonucleotide
  Antisense strand to SEQ ID NO: 2402860
ugggucacuggaauccuuu

SEQ ID NO: 2402862 - RNA, 19 nt, Artificial Sequence
  Description of Artificial Sequence: Synthetic oligonucleotide
  Sense strand starting at position 3154 of SEQ ID NO: 1886336
gaagaacuguuucuccaug

SEQ ID NO: 2402863 - RNA, 19 nt, Artificial Sequence
  Description of Artificial Sequence: Synthetic oligonucleotide
  Antisense strand to SEQ ID NO: 2402862
cauggagaaacaguucuuc

SEQ ID NO: 2402864 - RNA, 19 nt, Artificial Sequence
  Description of Artificial Sequence: Synthetic oligonucleotide
  Sense strand starting at position 211 of SEQ ID NO: 1886337
guaaccaagucuguccaaa

SEQ ID NO: 2402865 - RNA, 19 nt, Artificial Sequence
  Description of Artificial Sequence: Synthetic oligonucleotide
  Antisense strand to SEQ ID NO: 2402864
uuuggacagacuugguuac

SEQ ID NO: 2402866 - RNA, 19 nt, Artificial Sequence
  Description of Artificial Sequence: Synthetic oligonucleotide
  Sense strand starting at position 276 of SEQ ID NO: 1886337
gcuggauccuggcagaugu

SEQ ID NO: 2402867 - RNA, 19 nt, Artificial Sequence
  Description of Artificial Sequence: Synthetic oligonucleotide
  Antisense strand to SEQ ID NO: 2402866
acaucugccaggauccagc

SEQ ID NO: 2402868 - RNA, 19 nt, Artificial Sequence
  Description of Artificial Sequence: Synthetic oligonucleotide
  Sense strand starting at position 545 of SEQ ID NO: 1886337
cagggcucuuuguuccaaa

SEQ ID NO: 2402869 - RNA, 19 nt, Artificial Sequence
  Description of Artificial Sequence: Synthetic oligonucleotide
  Antisense strand to SEQ ID NO: 2402868
uuuggaacaaagagcccug

SEQ ID NO: 2402870 - RNA, 19 nt, Artificial Sequence
  Description of Artificial Sequence: Synthetic oligonucleotide
  Sense strand starting at position 816 of SEQ ID NO: 1886337
gguguuuggaccuauauua

SEQ ID NO: 2402871 - RNA, 19 nt, Artificial Sequence
  Description of Artificial Sequence: Synthetic oligonucleotide
  Antisense strand to SEQ ID NO: 2402870
uaauauagguccaaacacc

SEQ ID NO: 2402872 - RNA, 19 nt, Artificial Sequence
  Description of Artificial Sequence: Synthetic oligonucleotide
  Sense strand starting at position 967 of SEQ ID NO: 1886337
cucgcauaccuggauguaa

SEQ ID NO: 2402873 - RNA, 19 nt, Artificial Sequence
  Description of Artificial Sequence: Synthetic oligonucleotide
  Antisense strand to SEQ ID NO: 2402872
uuacauccagguaugcgag

SEQ ID NO: 2402874 - RNA, 19 nt, Artificial Sequence
  Description of Artificial Sequence: Synthetic oligonucleotide
  Sense strand starting at position 1065 of SEQ ID NO: 1886337
uguacagcuucuugaucua

SEQ ID NO: 2402875 - RNA, 19 nt, Artificial Sequence
  Description of Artificial Sequence: Synthetic oligonucleotide
  Antisense strand to SEQ ID NO: 2402874
uagaucaagaagcuguaca

SEQ ID NO: 2402876 - RNA, 19 nt, Artificial Sequence
  Description of Artificial Sequence: Synthetic oligonucleotide
  Sense strand starting at position 1074 of SEQ ID NO: 1886337
ucuugaucuacuggagguu

SEQ ID NO: 2402877 - RNA, 19 nt, Artificial Sequence
  Description of Artificial Sequence: Synthetic oligonucleotide
  Antisense strand to SEQ ID NO: 2402876
aaccuccaguagaucaaga

SEQ ID NO: 2402878 - RNA, 19 nt, Artificial Sequence
  Description of Artificial Sequence: Synthetic oligonucleotide
  Sense strand starting at position 1086 of SEQ ID NO: 1886337
ggagguuuaccgcgugcga

SEQ ID NO: 2402879 - RNA, 19 nt, Artificial Sequence
  Description of Artificial Sequence: Synthetic oligonucleotide
  Antisense strand to SEQ ID NO: 2402878
ucgcacgcgguaaaccucc

SEQ ID NO: 2402880 - RNA, 19 nt, Artificial Sequence
  Description of Artificial Sequence: Synthetic oligonucleotide
  Sense strand starting at position 1087 of SEQ ID NO: 1886337
gagguuuaccgcgugcgau

SEQ ID NO: 2402881 - RNA, 19 nt, Artificial Sequence
  Description of Artificial Sequence: Synthetic oligonucleotide
  Antisense strand to SEQ ID NO: 2402880
aucgcacgcgguaaaccuc

SEQ ID NO: 2402882 - RNA, 19 nt, Artificial Sequence
  Description of Artificial Sequence: Synthetic oligonucleotide
  Sense strand starting at position 1676 of SEQ ID NO: 1886337
ccucaagagcucgaaccau

SEQ ID NO: 2402883 - RNA, 19 nt, Artificial Sequence
  Description of Artificial Sequence: Synthetic oligonucleotide
  Antisense strand to SEQ ID NO: 2402882
augguucgagcucuugagg

SEQ ID NO: 2402884 - RNA, 19 nt, Artificial Sequence
  Description of Artificial Sequence: Synthetic oligonucleotide
  Sense strand starting at position 2182 of SEQ ID NO: 1886337
gagucaaccguuugucaaa

SEQ ID NO: 2402885 - RNA, 19 nt, Artificial Sequence
  Description of Artificial Sequence: Synthetic oligonucleotide
  Antisense strand to SEQ ID NO: 2402884
uuugacaaacgguugacuc

SEQ ID NO: 2402886 - RNA, 19 nt, Artificial Sequence
  Description of Artificial Sequence: Synthetic oligonucleotide
  Sense strand starting at position 2184 of SEQ ID NO: 1886337
gucaaccguuugucaaaca

SEQ ID NO: 2402887 - RNA, 19 nt, Artificial Sequence
  Description of Artificial Sequence: Synthetic oligonucleotide
  Antisense strand to SEQ ID NO: 2402886
uguuugacaaacgguugac

SEQ ID NO: 2402888 - RNA, 19 nt, Artificial Sequence
  Description of Artificial Sequence: Synthetic oligonucleotide
  Sense strand starting at position 2185 of SEQ ID NO: 1886337
ucaaccguuugucaaacau

SEQ ID NO: 2402889 - RNA, 19 nt, Artificial Sequence
  Description of Artificial Sequence: Synthetic oligonucleotide
  Antisense strand to SEQ ID NO: 2402888
auguuugacaaacgguuga

SEQ ID NO: 2402890 - RNA, 19 nt, Artificial Sequence
  Description of Artificial Sequence: Synthetic oligonucleotide
  Sense strand starting at position 2394 of SEQ ID NO: 1886337
ucagccuggucccugaaau

SEQ ID NO: 2402891 - RNA, 19 nt, Artificial Sequence
  Description of Artificial Sequence: Synthetic oligonucleotide
  Antisense strand to SEQ ID NO: 2402890
auuucagggaccaggcuga

SEQ ID NO: 2402892 - RNA, 19 nt, Artificial Sequence
  Description of Artificial Sequence: Synthetic oligonucleotide
  Sense strand starting at position 2395 of SEQ ID NO: 1886337
cagccuggucccugaaauu

SEQ ID NO: 2402893 - RNA, 19 nt, Artificial Sequence
  Description of Artificial Sequence: Synthetic oligonucleotide
  Antisense strand to SEQ ID NO: 2402892
aauuucagggaccaggcug

SEQ ID NO: 2402894 - RNA, 19 nt, Artificial Sequence
  Description of Artificial Sequence: Synthetic oligonucleotide
  Sense strand starting at position 2406 of SEQ ID NO: 1886337
cugaaauugugaucuggau

SEQ ID NO: 2402895 - RNA, 19 nt, Artificial Sequence
  Description of Artificial Sequence: Synthetic oligonucleotide
  Antisense strand to SEQ ID NO: 2402894
auccagaucacaauuucag

SEQ ID NO: 2402896 - RNA, 19 nt, Artificial Sequence
  Description of Artificial Sequence: Synthetic oligonucleotide
  Sense strand starting at position 2604 of SEQ ID NO: 1886337
cuccgauuuggacgucaga

SEQ ID NO: 2402897 - RNA, 19 nt, Artificial Sequence
  Description of Artificial Sequence: Synthetic oligonucleotide
  Antisense strand to SEQ ID NO: 2402896
ucugacguccaaaucggag

SEQ ID NO: 2402898 - RNA, 19 nt, Artificial Sequence
  Description of Artificial Sequence: Synthetic oligonucleotide
  Sense strand starting at position 2615 of SEQ ID NO: 1886337
acgucagacugccuggauu

SEQ ID NO: 2402899 - RNA, 19 nt, Artificial Sequence
  Description of Artificial Sequence: Synthetic oligonucleotide
  Antisense strand to SEQ ID NO: 2402898
aauccaggcagucugacgu

SEQ ID NO: 2402900 - RNA, 19 nt, Artificial Sequence
  Description of Artificial Sequence: Synthetic oligonucleotide
  Sense strand starting at position 2642 of SEQ ID NO: 1886337
uccguagaccuuugcucau

SEQ ID NO: 2402901 - RNA, 19 nt, Artificial Sequence
  Description of Artificial Sequence: Synthetic oligonucleotide
  Antisense strand to SEQ ID NO: 2402900
augagcaaaggucuacgga

SEQ ID NO: 2402902 - RNA, 19 nt, Artificial Sequence
  Description of Artificial Sequence: Synthetic oligonucleotide
  Sense strand starting at position 2694 of SEQ ID NO: 1886337
aaguguauaaagugagaug

SEQ ID NO: 2402903 - RNA, 19 nt, Artificial Sequence
  Description of Artificial Sequence: Synthetic oligonucleotide
  Antisense strand to SEQ ID NO: 2402902
caucucacuuuauacacuu

SEQ ID NO: 2402904 - RNA, 19 nt, Artificial Sequence
  Description of Artificial Sequence: Synthetic oligonucleotide
  Sense strand starting at position 2697 of SEQ ID NO: 1886337
uguauaaagugagaugauu

SEQ ID NO: 2402905 - RNA, 19 nt, Artificial Sequence
  Description of Artificial Sequence: Synthetic oligonucleotide
  Antisense strand to SEQ ID NO: 2402904
aaucaucucacuuuauaca

SEQ ID NO: 2402906 - RNA, 19 nt, Artificial Sequence
  Description of Artificial Sequence: Synthetic oligonucleotide
  Sense strand starting at position 3012 of SEQ ID NO: 1886337
ugagaugauucauguuagg

SEQ ID NO: 2402907 - RNA, 19 nt, Artificial Sequence
  Description of Artificial Sequence: Synthetic oligonucleotide
  Antisense strand to SEQ ID NO: 2402906
ccuaacaugaaucaucuca

SEQ ID NO: 2402908 - RNA, 19 nt, Artificial Sequence
  Description of Artificial Sequence: Synthetic oligonucleotide
  Sense strand starting at position 3023 of SEQ ID NO: 1886337
auguuaggcccuuaacaga

SEQ ID NO: 2402909 - RNA, 19 nt, Artificial Sequence
  Description of Artificial Sequence: Synthetic oligonucleotide
  Antisense strand to SEQ ID NO: 2402908
ucuguuaagggccuaacau

SEQ ID NO: 2402910 - RNA, 19 nt, Artificial Sequence
  Description of Artificial Sequence: Synthetic oligonucleotide
  Sense strand starting at position 3064 of SEQ ID NO: 1886337
gugggcuucuccuggauga

SEQ ID NO: 2402911 - RNA, 19 nt, Artificial Sequence
  Description of Artificial Sequence: Synthetic oligonucleotide
  Antisense strand to SEQ ID NO: 2402910
ucauccaggagaagcccac

SEQ ID NO: 2402912 - RNA, 19 nt, Artificial Sequence
  Description of Artificial Sequence: Synthetic oligonucleotide
  Sense strand starting at position 3066 of SEQ ID NO: 1886337
gggcuucuccuggaugacu

SEQ ID NO: 2402913 - RNA, 19 nt, Artificial Sequence
  Description of Artificial Sequence: Synthetic oligonucleotide
  Antisense strand to SEQ ID NO: 2402912
agucauccaggagaagccc

SEQ ID NO: 2402914 - RNA, 19 nt, Artificial Sequence
  Description of Artificial Sequence: Synthetic oligonucleotide
  Sense strand starting at position 3075 of SEQ ID NO: 1886337
cuggaugacuaggauaagu

SEQ ID NO: 2402915 - RNA, 19 nt, Artificial Sequence
  Description of Artificial Sequence: Synthetic oligonucleotide
  Antisense strand to SEQ ID NO: 2402914
acuuauccuagucauccag

SEQ ID NO: 2402916 - RNA, 19 nt, Artificial Sequence
  Description of Artificial Sequence: Synthetic oligonucleotide
  Sense strand starting at position 3165 of SEQ ID NO: 1886337
gcagguucuuccuggauau

SEQ ID NO: 2402917 - RNA, 19 nt, Artificial Sequence
  Description of Artificial Sequence: Synthetic oligonucleotide
  Antisense strand to SEQ ID NO: 2402916
auauccaggaagaaccugc

SEQ ID NO: 2402918 - RNA, 19 nt, Artificial Sequence
  Description of Artificial Sequence: Synthetic oligonucleotide
  Sense strand starting at position 3166 of SEQ ID NO: 1886337
cagguucuuccuggauaug

SEQ ID NO: 2402919 - RNA, 19 nt, Artificial Sequence
  Description of Artificial Sequence: Synthetic oligonucleotide
  Antisense strand to SEQ ID NO: 2402918
cauauccaggaagaaccug

SEQ ID NO: 2402920 - RNA, 19 nt, Artificial Sequence
  Description of Artificial Sequence: Synthetic oligonucleotide
  Sense strand starting at position 3167 of SEQ ID NO: 1886337
agguucuuccuggauaugu

SEQ ID NO: 2402921 - RNA, 19 nt, Artificial Sequence
  Description of Artificial Sequence: Synthetic oligonucleotide
  Antisense strand to SEQ ID NO: 2402920
acauauccaggaagaaccu

SEQ ID NO: 2402922 - RNA, 19 nt, Artificial Sequence
  Description of Artificial Sequence: Synthetic oligonucleotide
  Sense strand starting at position 3176 of SEQ ID NO: 1886337
cuggauauguggcaggauu

SEQ ID NO: 2402923 - RNA, 19 nt, Artificial Sequence
  Description of Artificial Sequence: Synthetic oligonucleotide
  Antisense strand to SEQ ID NO: 2402922
aauccugccacauauccag

SEQ ID NO: 2402924 - RNA, 19 nt, Artificial Sequence
  Description of Artificial Sequence: Synthetic oligonucleotide
  Sense strand starting at position 3556 of SEQ ID NO: 1886337
gcaaacaggucucaccaau

SEQ ID NO: 2402925 - RNA, 19 nt, Artificial Sequence
  Description of Artificial Sequence: Synthetic oligonucleotide
  Antisense strand to SEQ ID NO: 2402924
auuggugagaccuguuugc

SEQ ID NO: 2402926 - RNA, 19 nt, Artificial Sequence
  Description of Artificial Sequence: Synthetic oligonucleotide
  Sense strand starting at position 3633 of SEQ ID NO: 1886337
agcugaaacuucccagauu

SEQ ID NO: 2402927 - RNA, 19 nt, Artificial Sequence
  Description of Artificial Sequence: Synthetic oligonucleotide
  Antisense strand to SEQ ID NO: 2402926
aaucugggaaguuucagcu

SEQ ID NO: 2402928 - RNA, 19 nt, Artificial Sequence
  Description of Artificial Sequence: Synthetic oligonucleotide
  Sense strand starting at position 3634 of SEQ ID NO: 1886337
gcugaaacuucccagauuc

SEQ ID NO: 2402929 - RNA, 19 nt, Artificial Sequence
  Description of Artificial Sequence: Synthetic oligonucleotide
  Antisense strand to SEQ ID NO: 2402928
gaaucugggaaguuucagc

SEQ ID NO: 2402930 - RNA, 19 nt, Artificial Sequence
  Description of Artificial Sequence: Synthetic oligonucleotide
  Sense strand starting at position 3690 of SEQ ID NO: 1886337
ggagaagugcugugcuuuc

SEQ ID NO: 2402931 - RNA, 19 nt, Artificial Sequence
  Description of Artificial Sequence: Synthetic oligonucleotide
  Antisense strand to SEQ ID NO: 2402930
gaaagcacagcacuucucc

SEQ ID NO: 2402932 - RNA, 19 nt, Artificial Sequence
  Description of Artificial Sequence: Synthetic oligonucleotide
  Sense strand starting at position 3798 of SEQ ID NO: 1886337
cugggauccucagacuucu

SEQ ID NO: 2402933 - RNA, 19 nt, Artificial Sequence
  Description of Artificial Sequence: Synthetic oligonucleotide
  Antisense strand to SEQ ID NO: 2402932
agaagucugaggaucccag

SEQ ID NO: 2402934 - RNA, 19 nt, Artificial Sequence
  Description of Artificial Sequence: Synthetic oligonucleotide
  Sense strand starting at position 3911 of SEQ ID NO: 1886337
agcacaaacuguuaucaag

SEQ ID NO: 2402935 - RNA, 19 nt, Artificial Sequence
  Description of Artificial Sequence: Synthetic oligonucleotide
  Antisense strand to SEQ ID NO: 2402934
cuugauaacaguuugugcu

SEQ ID NO: 2402936 - RNA, 19 nt, Artificial Sequence
  Description of Artificial Sequence: Synthetic oligonucleotide
  Sense strand starting at position 3917 of SEQ ID NO: 1886337
aacuguuaucaaggcaugu

SEQ ID NO: 2402937 - RNA, 19 nt, Artificial Sequence
  Description of Artificial Sequence: Synthetic oligonucleotide
  Antisense strand to SEQ ID NO: 2402936
acaugccuugauaacaguu

SEQ ID NO: 2402938 - RNA, 19 nt, Artificial Sequence
  Description of Artificial Sequence: Synthetic oligonucleotide
  Sense strand starting at position 16 of SEQ ID NO: 1886338
ugaugagaucaagguuagu

SEQ ID NO: 2402939 - RNA, 19 nt, Artificial Sequence
  Description of Artificial Sequence: Synthetic oligonucleotide
  Antisense strand to SEQ ID NO: 2402938
acuaaccuugaucucauca

SEQ ID NO: 2402940 - RNA, 19 nt, Artificial Sequence
  Description of Artificial Sequence: Synthetic oligonucleotide
  Sense strand starting at position 54 of SEQ ID NO: 1886338
caaagcuuugucuacggaa

SEQ ID NO: 2402941 - RNA, 19 nt, Artificial Sequence
  Description of Artificial Sequence: Synthetic oligonucleotide
  Antisense strand to SEQ ID NO: 2402940
uuccguagacaaagcuuug

SEQ ID NO: 2402942 - RNA, 19 nt, Artificial Sequence
  Description of Artificial Sequence: Synthetic oligonucleotide
  Sense strand starting at position 99 of SEQ ID NO: 1886338
aguggaagaccaugaguuu

SEQ ID NO: 2402943 - RNA, 19 nt, Artificial Sequence
  Description of Artificial Sequence: Synthetic oligonucleotide
  Antisense strand to SEQ ID NO: 2402942
aaacucauggucuuccacu

SEQ ID NO: 2402944 - RNA, 19 nt, Artificial Sequence
  Description of Artificial Sequence: Synthetic oligonucleotide
  Sense strand starting at position 105 of SEQ ID NO: 1886338
agaccaugaguuugaggua

SEQ ID NO: 2402945 - RNA, 19 nt, Artificial Sequence
  Description of Artificial Sequence: Synthetic oligonucleotide
  Antisense strand to SEQ ID NO: 2402944
uaccucaaacucauggucu

SEQ ID NO: 2402946 - RNA, 19 nt, Artificial Sequence
  Description of Artificial Sequence: Synthetic oligonucleotide
  Sense strand starting at position 130 of SEQ ID NO: 1886338
aggagaacuuaacuguguu

SEQ ID NO: 2402947 - RNA, 19 nt, Artificial Sequence
  Description of Artificial Sequence: Synthetic oligonucleotide
  Antisense strand to SEQ ID NO: 2402946
aacacaguuaaguucuccu

SEQ ID NO: 2402948 - RNA, 19 nt, Artificial Sequence
  Description of Artificial Sequence: Synthetic oligonucleotide
  Sense strand starting at position 131 of SEQ ID NO: 1886338
ggagaacuuaacuguguuu

SEQ ID NO: 2402949 - RNA, 19 nt, Artificial Sequence
  Description of Artificial Sequence: Synthetic oligonucleotide
  Antisense strand to SEQ ID NO: 2402948
aaacacaguuaaguucucc

SEQ ID NO: 2402950 - RNA, 19 nt, Artificial Sequence
  Description of Artificial Sequence: Synthetic oligonucleotide
  Sense strand starting at position 133 of SEQ ID NO: 1886338
agaacuuaacuguguuucu

SEQ ID NO: 2402951 - RNA, 19 nt, Artificial Sequence
  Description of Artificial Sequence: Synthetic oligonucleotide
  Antisense strand to SEQ ID NO: 2402950
agaaacacaguuaaguucu

SEQ ID NO: 2402952 - RNA, 19 nt, Artificial Sequence
  Description of Artificial Sequence: Synthetic oligonucleotide
  Sense strand starting at position 229 of SEQ ID NO: 1886338
cucugaggccuccaucaaa

SEQ ID NO: 2402953 - RNA, 19 nt, Artificial Sequence
  Description of Artificial Sequence: Synthetic oligonucleotide
  Antisense strand to SEQ ID NO: 2402952
uuugauggaggccucagag

SEQ ID NO: 2402954 - RNA, 19 nt, Artificial Sequence
  Description of Artificial Sequence: Synthetic oligonucleotide
  Sense strand starting at position 259 of SEQ ID NO: 1886338
cugucauaauuguugacuu

SEQ ID NO: 2402955 - RNA, 19 nt, Artificial Sequence
  Description of Artificial Sequence: Synthetic oligonucleotide
  Antisense strand to SEQ ID NO: 2402954
aagucaacaauuaugacag

SEQ ID NO: 2402956 - RNA, 19 nt, Artificial Sequence
  Description of Artificial Sequence: Synthetic oligonucleotide
  Sense strand starting at position 261 of SEQ ID NO: 1886338
gucauaauuguugacuuua

SEQ ID NO: 2402957 - RNA, 19 nt, Artificial Sequence
  Description of Artificial Sequence: Synthetic oligonucleotide
  Antisense strand to SEQ ID NO: 2402956
uaaagucaacaauuaugac

SEQ ID NO: 2402958 - RNA, 19 nt, Artificial Sequence
  Description of Artificial Sequence: Synthetic oligonucleotide
  Sense strand starting at position 374 of SEQ ID NO: 1886338
augagugaauguuugugga

SEQ ID NO: 2402959 - RNA, 19 nt, Artificial Sequence
  Description of Artificial Sequence: Synthetic oligonucleotide
  Antisense strand to SEQ ID NO: 2402958
uccacaaacauucacucau

SEQ ID NO: 2402960 - RNA, 19 nt, Artificial Sequence
  Description of Artificial Sequence: Synthetic oligonucleotide
  Sense strand starting at position 376 of SEQ ID NO: 1886338
gagugaauguuuguggaau

SEQ ID NO: 2402961 - RNA, 19 nt, Artificial Sequence
  Description of Artificial Sequence: Synthetic oligonucleotide
  Antisense strand to SEQ ID NO: 2402960
auuccacaaacauucacuc

SEQ ID NO: 2402962 - RNA, 19 nt, Artificial Sequence
  Description of Artificial Sequence: Synthetic oligonucleotide
  Sense strand starting at position 408 of SEQ ID NO: 1886338
ggaaaucacucugcaagcu

SEQ ID NO: 2402963 - RNA, 19 nt, Artificial Sequence
  Description of Artificial Sequence: Synthetic oligonucleotide
  Antisense strand to SEQ ID NO: 2402962
agcuugcagagugauuucc

SEQ ID NO: 2402964 - RNA, 19 nt, Artificial Sequence
  Description of Artificial Sequence: Synthetic oligonucleotide
  Sense strand starting at position 518 of SEQ ID NO: 1886338
gguggaggcuccaaagagu

SEQ ID NO: 2402965 - RNA, 19 nt, Artificial Sequence
  Description of Artificial Sequence: Synthetic oligonucleotide
  Antisense strand to SEQ ID NO: 2402964
acucuuuggagccuccacc

SEQ ID NO: 2402966 - RNA, 19 nt, Artificial Sequence
  Description of Artificial Sequence: Synthetic oligonucleotide
  Sense strand starting at position 575 of SEQ ID NO: 1886338
ccuugucguggcucuguua

SEQ ID NO: 2402967 - RNA, 19 nt, Artificial Sequence
  Description of Artificial Sequence: Synthetic oligonucleotide
  Antisense strand to SEQ ID NO: 2402966
uaacagagccacgacaagg

SEQ ID NO: 2402968 - RNA, 19 nt, Artificial Sequence
  Description of Artificial Sequence: Synthetic oligonucleotide
  Sense strand starting at position 576 of SEQ ID NO: 1886338
cuugucguggcucuguuaa

SEQ ID NO: 2402969 - RNA, 19 nt, Artificial Sequence
  Description of Artificial Sequence: Synthetic oligonucleotide
  Antisense strand to SEQ ID NO: 2402968
uuaacagagccacgacaag

SEQ ID NO: 2402970 - RNA, 19 nt, Artificial Sequence
  Description of Artificial Sequence: Synthetic oligonucleotide
  Sense strand starting at position 583 of SEQ ID NO: 1886338
uggcucuguuaacuaacaa

SEQ ID NO: 2402971 - RNA, 19 nt, Artificial Sequence
  Description of Artificial Sequence: Synthetic oligonucleotide
  Antisense strand to SEQ ID NO: 2402970
uuguuaguuaacagagcca

SEQ ID NO: 2402972 - RNA, 19 nt, Artificial Sequence
  Description of Artificial Sequence: Synthetic oligonucleotide
  Sense strand starting at position 694 of SEQ ID NO: 1886338
aagggaguccuugagcagu

SEQ ID NO: 2402973 - RNA, 19 nt, Artificial Sequence
  Description of Artificial Sequence: Synthetic oligonucleotide
  Antisense strand to SEQ ID NO: 2402972
acugcucaaggacucccuu

SEQ ID NO: 2402974 - RNA, 19 nt, Artificial Sequence
  Description of Artificial Sequence: Synthetic oligonucleotide
  Sense strand starting at position 702 of SEQ ID NO: 1886338
ccuugagcagucugaaauu

SEQ ID NO: 2402975 - RNA, 19 nt, Artificial Sequence
  Description of Artificial Sequence: Synthetic oligonucleotide
  Antisense strand to SEQ ID NO: 2402974
aauuucagacugcucaagg

SEQ ID NO: 2402976 - RNA, 19 nt, Artificial Sequence
  Description of Artificial Sequence: Synthetic oligonucleotide
  Sense strand starting at position 713 of SEQ ID NO: 1886338
cugaaauuguugccaaacu

SEQ ID NO: 2402977 - RNA, 19 nt, Artificial Sequence
  Description of Artificial Sequence: Synthetic oligonucleotide
  Antisense strand to SEQ ID NO: 2402976
aguuuggcaacaauuucag

SEQ ID NO: 2402978 - RNA, 19 nt, Artificial Sequence
  Description of Artificial Sequence: Synthetic oligonucleotide
  Sense strand starting at position 805 of SEQ ID NO: 1886338
ucugaauuacugcaguuua

SEQ ID NO: 2402979 - RNA, 19 nt, Artificial Sequence
  Description of Artificial Sequence: Synthetic oligonucleotide
  Antisense strand to SEQ ID NO: 2402978
uaaacugcaguaauucaga

SEQ ID NO: 2402980 - RNA, 19 nt, Artificial Sequence
  Description of Artificial Sequence: Synthetic oligonucleotide
  Sense strand starting at position 831 of SEQ ID NO: 1886338
acgcauguacuuugaggga

SEQ ID NO: 2402981 - RNA, 19 nt, Artificial Sequence
  Description of Artificial Sequence: Synthetic oligonucleotide
  Antisense strand to SEQ ID NO: 2402980
ucccucaaaguacaugcgu

SEQ ID NO: 2402982 - RNA, 19 nt, Artificial Sequence
  Description of Artificial Sequence: Synthetic oligonucleotide
  Sense strand starting at position 1252 of SEQ ID NO: 1886338
guacuaagugcugaguacu

SEQ ID NO: 2402983 - RNA, 19 nt, Artificial Sequence
  Description of Artificial Sequence: Synthetic oligonucleotide
  Antisense strand to SEQ ID NO: 2402982
aguacucagcacuuaguac

SEQ ID NO: 2402984 - RNA, 19 nt, Artificial Sequence
  Description of Artificial Sequence: Synthetic oligonucleotide
  Sense strand starting at position 1266 of SEQ ID NO: 1886338
guacucuugugaucaucau

SEQ ID NO: 2402985 - RNA, 19 nt, Artificial Sequence
  Description of Artificial Sequence: Synthetic oligonucleotide
  Antisense strand to SEQ ID NO: 2402984
augaugaucacaagaguac

SEQ ID NO: 2402986 - RNA, 19 nt, Artificial Sequence
  Description of Artificial Sequence: Synthetic oligonucleotide
  Sense strand starting at position 1296 of SEQ ID NO: 1886338
ggagguuuaucagucccaa

SEQ ID NO: 2402987 - RNA, 19 nt, Artificial Sequence
  Description of Artificial Sequence: Synthetic oligonucleotide
  Antisense strand to SEQ ID NO: 2402986
uugggacugauaaaccucc

SEQ ID NO: 2402988 - RNA, 19 nt, Artificial Sequence
  Description of Artificial Sequence: Synthetic oligonucleotide
  Sense strand starting at position 2473 of SEQ ID NO: 1886338
aaacguuagcugcagaaga

SEQ ID NO: 2402989 - RNA, 19 nt, Artificial Sequence
  Description of Artificial Sequence: Synthetic oligonucleotide
  Antisense strand to SEQ ID NO: 2402988
ucuucugcagcuaacguuu

SEQ ID NO: 2402990 - RNA, 19 nt, Artificial Sequence
  Description of Artificial Sequence: Synthetic oligonucleotide
  Sense strand starting at position 2475 of SEQ ID NO: 1886338
acguuagcugcagaagaau

SEQ ID NO: 2402991 - RNA, 19 nt, Artificial Sequence
  Description of Artificial Sequence: Synthetic oligonucleotide
  Antisense strand to SEQ ID NO: 2402990
auucuucugcagcuaacgu

SEQ ID NO: 2402992 - RNA, 19 nt, Artificial Sequence
  Description of Artificial Sequence: Synthetic oligonucleotide
  Sense strand starting at position 2590 of SEQ ID NO: 1886338
ggguccauauuccuagcaa

SEQ ID NO: 2402993 - RNA, 19 nt, Artificial Sequence
  Description of Artificial Sequence: Synthetic oligonucleotide
  Antisense strand to SEQ ID NO: 2402992
uugcuaggaauauggaccc

SEQ ID NO: 2402994 - RNA, 19 nt, Artificial Sequence
  Description of Artificial Sequence: Synthetic oligonucleotide
  Sense strand starting at position 2735 of SEQ ID NO: 1886338
aaugaauucgugcaucauu

SEQ ID NO: 2402995 - RNA, 19 nt, Artificial Sequence
  Description of Artificial Sequence: Synthetic oligonucleotide
  Antisense strand to SEQ ID NO: 2402994
aaugaugcacgaauucauu

SEQ ID NO: 2402996 - RNA, 19 nt, Artificial Sequence
  Description of Artificial Sequence: Synthetic oligonucleotide
  Sense strand starting at position 2738 of SEQ ID NO: 1886338
gaauucgugcaucauuaca

SEQ ID NO: 2402997 - RNA, 19 nt, Artificial Sequence
  Description of Artificial Sequence: Synthetic oligonucleotide
  Antisense strand to SEQ ID NO: 2402996
uguaaugaugcacgaauuc

SEQ ID NO: 2402998 - RNA, 19 nt, Artificial Sequence
  Description of Artificial Sequence: Synthetic oligonucleotide
  Sense strand starting at position 2937 of SEQ ID NO: 1886338
guggcaugcgccuuaaucu

SEQ ID NO: 2402999 - RNA, 19 nt, Artificial Sequence
  Description of Artificial Sequence: Synthetic oligonucleotide
  Antisense strand to SEQ ID NO: 2402998
agauuaaggcgcaugccac

SEQ ID NO: 2403000 - RNA, 19 nt, Artificial Sequence
  Description of Artificial Sequence: Synthetic oligonucleotide
  Sense strand starting at position 3148 of SEQ ID NO: 1886338
agaguuucugcccaaacuc

SEQ ID NO: 2403001 - RNA, 19 nt, Artificial Sequence
  Description of Artificial Sequence: Synthetic oligonucleotide
  Antisense strand to SEQ ID NO: 2403000
gaguuugggcagaaacucu

SEQ ID NO: 2403002 - RNA, 19 nt, Artificial Sequence
  Description of Artificial Sequence: Synthetic oligonucleotide
  Sense strand starting at position 3178 of SEQ ID NO: 1886338
cucucagcccucugagaaa

SEQ ID NO: 2403003 - RNA, 19 nt, Artificial Sequence
  Description of Artificial Sequence: Synthetic oligonucleotide
  Antisense strand to SEQ ID NO: 2403002
uuucucagagggcugagag

SEQ ID NO: 2403004 - RNA, 19 nt, Artificial Sequence
  Description of Artificial Sequence: Synthetic oligonucleotide
  Sense strand starting at position 3231 of SEQ ID NO: 1886338
ucuagauaggccuaagucu

SEQ ID NO: 2403005 - RNA, 19 nt, Artificial Sequence
  Description of Artificial Sequence: Synthetic oligonucleotide
  Antisense strand to SEQ ID NO: 2403004
agacuuaggccuaucuaga

SEQ ID NO: 2403006 - RNA, 19 nt, Artificial Sequence
  Description of Artificial Sequence: Synthetic oligonucleotide
  Sense strand starting at position 3269 of SEQ ID NO: 1886338
ugaggauaaugcucaggau

SEQ ID NO: 2403007 - RNA, 19 nt, Artificial Sequence
  Description of Artificial Sequence: Synthetic oligonucleotide
  Antisense strand to SEQ ID NO: 2403006
auccugagcauuauccuca

SEQ ID NO: 2403008 - RNA, 19 nt, Artificial Sequence
  Description of Artificial Sequence: Synthetic oligonucleotide
  Sense strand starting at position 3583 of SEQ ID NO: 1886338
gucuucuuggacugaguca

SEQ ID NO: 2403009 - RNA, 19 nt, Artificial Sequence
  Description of Artificial Sequence: Synthetic oligonucleotide
  Antisense strand to SEQ ID NO: 2403008
ugacucaguccaagaagac

SEQ ID NO: 2403010 - RNA, 19 nt, Artificial Sequence
  Description of Artificial Sequence: Synthetic oligonucleotide
  Sense strand starting at position 3622 of SEQ ID NO: 1886338
aggucagauaagugaguuu

SEQ ID NO: 2403011 - RNA, 19 nt, Artificial Sequence
  Description of Artificial Sequence: Synthetic oligonucleotide
  Antisense strand to SEQ ID NO: 2403010
aaacucacuuaucugaccu

SEQ ID NO: 2403012 - RNA, 19 nt, Artificial Sequence
  Description of Artificial Sequence: Synthetic oligonucleotide
  Sense strand starting at position 3625 of SEQ ID NO: 1886338
ucagauaagugaguuuauc

SEQ ID NO: 2403013 - RNA, 19 nt, Artificial Sequence
  Description of Artificial Sequence: Synthetic oligonucleotide
  Antisense strand to SEQ ID NO: 2403012
gauaaacucacuuaucuga

SEQ ID NO: 2403014 - RNA, 19 nt, Artificial Sequence
  Description of Artificial Sequence: Synthetic oligonucleotide
  Sense strand starting at position 3791 of SEQ ID NO: 1886338
cccgcuugauuaccuagaa

SEQ ID NO: 2403015 - RNA, 19 nt, Artificial Sequence
  Description of Artificial Sequence: Synthetic oligonucleotide
  Antisense strand to SEQ ID NO: 2403014
uucuagguaaucaagcggg

SEQ ID NO: 2403016 - RNA, 19 nt, Artificial Sequence
  Description of Artificial Sequence: Synthetic oligonucleotide
  Sense strand starting at position 3792 of SEQ ID NO: 1886338
ccgcuugauuaccuagaaa

SEQ ID NO: 2403017 - RNA, 19 nt, Artificial Sequence
  Description of Artificial Sequence: Synthetic oligonucleotide
  Antisense strand to SEQ ID NO: 2403016
uuucuagguaaucaagcgg

SEQ ID NO: 2403018 - RNA, 19 nt, Artificial Sequence
  Description of Artificial Sequence: Synthetic oligonucleotide
  Sense strand starting at position 35 of SEQ ID NO: 1886340
ugacucauccugugacgaa

SEQ ID NO: 2403019 - RNA, 19 nt, Artificial Sequence
  Description of Artificial Sequence: Synthetic oligonucleotide
  Antisense strand to SEQ ID NO: 2403018
uucgucacaggaugaguca

SEQ ID NO: 2403020 - RNA, 19 nt, Artificial Sequence
  Description of Artificial Sequence: Synthetic oligonucleotide
  Sense strand starting at position 447 of SEQ ID NO: 1886340
gaucccuguugucuugaga

SEQ ID NO: 2403021 - RNA, 19 nt, Artificial Sequence
  Description of Artificial Sequence: Synthetic oligonucleotide
  Antisense strand to SEQ ID NO: 2403020
ucucaagacaacagggauc

SEQ ID NO: 2403022 - RNA, 19 nt, Artificial Sequence
  Description of Artificial Sequence: Synthetic oligonucleotide
  Sense strand starting at position 474 of SEQ ID NO: 1886340
gagggaaagucgucuucag

SEQ ID NO: 2403023 - RNA, 19 nt, Artificial Sequence
  Description of Artificial Sequence: Synthetic oligonucleotide
  Antisense strand to SEQ ID NO: 2403022
cugaagacgacuuucccuc

SEQ ID NO: 2403024 - RNA, 19 nt, Artificial Sequence
  Description of Artificial Sequence: Synthetic oligonucleotide
  Sense strand starting at position 512 of SEQ ID NO: 1886340
guuuguuacccuugagaua

SEQ ID NO: 2403025 - RNA, 19 nt, Artificial Sequence
  Description of Artificial Sequence: Synthetic oligonucleotide
  Antisense strand to SEQ ID NO: 2403024
uaucucaaggguaacaaac

SEQ ID NO: 2403026 - RNA, 19 nt, Artificial Sequence
  Description of Artificial Sequence: Synthetic oligonucleotide
  Sense strand starting at position 513 of SEQ ID NO: 1886340
uuuguuacccuugagauag

SEQ ID NO: 2403027 - RNA, 19 nt, Artificial Sequence
  Description of Artificial Sequence: Synthetic oligonucleotide
  Antisense strand to SEQ ID NO: 2403026
cuaucucaaggguaacaaa

SEQ ID NO: 2403028 - RNA, 19 nt, Artificial Sequence
  Description of Artificial Sequence: Synthetic oligonucleotide
  Sense strand starting at position 703 of SEQ ID NO: 1886340
auuguugucgucguugaaa

SEQ ID NO: 2403029 - RNA, 19 nt, Artificial Sequence
  Description of Artificial Sequence: Synthetic oligonucleotide
  Antisense strand to SEQ ID NO: 2403028
uuucaacgacgacaacaau

SEQ ID NO: 2403030 - RNA, 19 nt, Artificial Sequence
  Description of Artificial Sequence: Synthetic oligonucleotide
  Sense strand starting at position 770 of SEQ ID NO: 1886340
gaagcccacgcuuagaaau

SEQ ID NO: 2403031 - RNA, 19 nt, Artificial Sequence
  Description of Artificial Sequence: Synthetic oligonucleotide
  Antisense strand to SEQ ID NO: 2403030
auuucuaagcgugggcuuc

SEQ ID NO: 2403032 - RNA, 19 nt, Artificial Sequence
  Description of Artificial Sequence: Synthetic oligonucleotide
  Sense strand starting at position 908 of SEQ ID NO: 1886340
guagacucugucuauaggu

SEQ ID NO: 2403033 - RNA, 19 nt, Artificial Sequence
  Description of Artificial Sequence: Synthetic oligonucleotide
  Antisense strand to SEQ ID NO: 2403032
accuauagacagagucuac

SEQ ID NO: 2403034 - RNA, 19 nt, Artificial Sequence
  Description of Artificial Sequence: Synthetic oligonucleotide
  Sense strand starting at position 914 of SEQ ID NO: 1886340
ucugucuauagguggaaga

SEQ ID NO: 2403035 - RNA, 19 nt, Artificial Sequence
  Description of Artificial Sequence: Synthetic oligonucleotide
  Antisense strand to SEQ ID NO: 2403034
ucuuccaccuauagacaga

SEQ ID NO: 2403036 - RNA, 19 nt, Artificial Sequence
  Description of Artificial Sequence: Synthetic oligonucleotide
  Sense strand starting at position 915 of SEQ ID NO: 1886340
cugucuauagguggaagaa

SEQ ID NO: 2403037 - RNA, 19 nt, Artificial Sequence
  Description of Artificial Sequence: Synthetic oligonucleotide
  Antisense strand to SEQ ID NO: 2403036
uucuuccaccuauagacag

SEQ ID NO: 2403038 - RNA, 19 nt, Artificial Sequence
  Description of Artificial Sequence: Synthetic oligonucleotide
  Sense strand starting at position 1223 of SEQ ID NO: 1886340
gccucaaauuccgcgauuu

SEQ ID NO: 2403039 - RNA, 19 nt, Artificial Sequence
  Description of Artificial Sequence: Synthetic oligonucleotide
  Antisense strand to SEQ ID NO: 2403038
aaaucgcggaauuugaggc

SEQ ID NO: 2403040 - RNA, 19 nt, Artificial Sequence
  Description of Artificial Sequence: Synthetic oligonucleotide
  Sense strand starting at position 1224 of SEQ ID NO: 1886340
ccucaaauuccgcgauuug

SEQ ID NO: 2403041 - RNA, 19 nt, Artificial Sequence
  Description of Artificial Sequence: Synthetic oligonucleotide
  Antisense strand to SEQ ID NO: 2403040
caaaucgcggaauuugagg

SEQ ID NO: 2403042 - RNA, 19 nt, Artificial Sequence
  Description of Artificial Sequence: Synthetic oligonucleotide
  Sense strand starting at position 1236 of SEQ ID NO: 1886340
cgauuuggccggcauccua

SEQ ID NO: 2403043 - RNA, 19 nt, Artificial Sequence
  Description of Artificial Sequence: Synthetic oligonucleotide
  Antisense strand to SEQ ID NO: 2403042
uaggaugccggccaaaucg

SEQ ID NO: 2403044 - RNA, 19 nt, Artificial Sequence
  Description of Artificial Sequence: Synthetic oligonucleotide
  Sense strand starting at position 1261 of SEQ ID NO: 1886340
gagugacucuugccaacca

SEQ ID NO: 2403045 - RNA, 19 nt, Artificial Sequence
  Description of Artificial Sequence: Synthetic oligonucleotide
  Antisense strand to SEQ ID NO: 2403044
ugguuggcaagagucacuc

SEQ ID NO: 2403046 - RNA, 19 nt, Artificial Sequence
  Description of Artificial Sequence: Synthetic oligonucleotide
  Sense strand starting at position 1471 of SEQ ID NO: 1886340
ccgaguuacuaucccuuua

SEQ ID NO: 2403047 - RNA, 19 nt, Artificial Sequence
  Description of Artificial Sequence: Synthetic oligonucleotide
  Antisense strand to SEQ ID NO: 2403046
uaaagggauaguaacucgg

SEQ ID NO: 2403048 - RNA, 19 nt, Artificial Sequence
  Description of Artificial Sequence: Synthetic oligonucleotide
  Sense strand starting at position 1693 of SEQ ID NO: 1886340
gcagcaucugacgaggaga

SEQ ID NO: 2403049 - RNA, 19 nt, Artificial Sequence
  Description of Artificial Sequence: Synthetic oligonucleotide
  Antisense strand to SEQ ID NO: 2403048
ucuccucgucagaugcugc

SEQ ID NO: 2403050 - RNA, 19 nt, Artificial Sequence
  Description of Artificial Sequence: Synthetic oligonucleotide
  Sense strand starting at position 1854 of SEQ ID NO: 1886340
cuuucccuuccuugggaua

SEQ ID NO: 2403051 - RNA, 19 nt, Artificial Sequence
  Description of Artificial Sequence: Synthetic oligonucleotide
  Antisense strand to SEQ ID NO: 2403050
uaucccaaggaagggaaag

SEQ ID NO: 2403052 - RNA, 19 nt, Artificial Sequence
  Description of Artificial Sequence: Synthetic oligonucleotide
  Sense strand starting at position 1855 of SEQ ID NO: 1886340
uuucccuuccuugggauau

SEQ ID NO: 2403053 - RNA, 19 nt, Artificial Sequence
  Description of Artificial Sequence: Synthetic oligonucleotide
  Antisense strand to SEQ ID NO: 2403052
auaucccaaggaagggaaa

SEQ ID NO: 2403054 - RNA, 19 nt, Artificial Sequence
  Description of Artificial Sequence: Synthetic oligonucleotide
  Sense strand starting at position 1857 of SEQ ID NO: 1886340
ucccuuccuugggauauuu

SEQ ID NO: 2403055 - RNA, 19 nt, Artificial Sequence
  Description of Artificial Sequence: Synthetic oligonucleotide
  Antisense strand to SEQ ID NO: 2403054
aaauaucccaaggaaggga

SEQ ID NO: 2403056 - RNA, 19 nt, Artificial Sequence
  Description of Artificial Sequence: Synthetic oligonucleotide
  Sense strand starting at position 1959 of SEQ ID NO: 1886340
cugauaaacuaagcuaugu

SEQ ID NO: 2403057 - RNA, 19 nt, Artificial Sequence
  Description of Artificial Sequence: Synthetic oligonucleotide
  Antisense strand to SEQ ID NO: 2403056
acauagcuuaguuuaucag

SEQ ID NO: 2403058 - RNA, 19 nt, Artificial Sequence
  Description of Artificial Sequence: Synthetic oligonucleotide
  Sense strand starting at position 1976 of SEQ ID NO: 1886340
guaugauucgcugccagua

SEQ ID NO: 2403059 - RNA, 19 nt, Artificial Sequence
  Description of Artificial Sequence: Synthetic oligonucleotide
  Antisense strand to SEQ ID NO: 2403058
uacuggcagcgaaucauac

SEQ ID NO: 2403060 - RNA, 19 nt, Artificial Sequence
  Description of Artificial Sequence: Synthetic oligonucleotide
  Sense strand starting at position 2084 of SEQ ID NO: 1886340
ugcaucauugugcaaacaa

SEQ ID NO: 2403061 - RNA, 19 nt, Artificial Sequence
  Description of Artificial Sequence: Synthetic oligonucleotide
  Antisense strand to SEQ ID NO: 2403060
uuguuugcacaaugaugca

SEQ ID NO: 2403062 - RNA, 19 nt, Artificial Sequence
  Description of Artificial Sequence: Synthetic oligonucleotide
  Sense strand starting at position 2329 of SEQ ID NO: 1886340
gcuuacgggacugaaaguu

SEQ ID NO: 2403063 - RNA, 19 nt, Artificial Sequence
  Description of Artificial Sequence: Synthetic oligonucleotide
  Antisense strand to SEQ ID NO: 2403062
aacuuucagucccguaagc

SEQ ID NO: 2403064 - RNA, 19 nt, Artificial Sequence
  Description of Artificial Sequence: Synthetic oligonucleotide
  Sense strand starting at position 2367 of SEQ ID NO: 1886340
gugaguggugaguaaauac

SEQ ID NO: 2403065 - RNA, 19 nt, Artificial Sequence
  Description of Artificial Sequence: Synthetic oligonucleotide
  Antisense strand to SEQ ID NO: 2403064
guauuuacucaccacucac

SEQ ID NO: 2403066 - RNA, 19 nt, Artificial Sequence
  Description of Artificial Sequence: Synthetic oligonucleotide
  Sense strand starting at position 2819 of SEQ ID NO: 1886340
cauggcucagacugauaua

SEQ ID NO: 2403067 - RNA, 19 nt, Artificial Sequence
  Description of Artificial Sequence: Synthetic oligonucleotide
  Antisense strand to SEQ ID NO: 2403066
uauaucagucugagccaug

SEQ ID NO: 2403068 - RNA, 19 nt, Artificial Sequence
  Description of Artificial Sequence: Synthetic oligonucleotide
  Sense strand starting at position 2880 of SEQ ID NO: 1886340
auauauuuguacgaaccua

SEQ ID NO: 2403069 - RNA, 19 nt, Artificial Sequence
  Description of Artificial Sequence: Synthetic oligonucleotide
  Antisense strand to SEQ ID NO: 2403068
uagguucguacaaauauau

SEQ ID NO: 2403070 - RNA, 19 nt, Artificial Sequence
  Description of Artificial Sequence: Synthetic oligonucleotide
  Sense strand starting at position 2888 of SEQ ID NO: 1886340
guacgaaccuaaguuagau

SEQ ID NO: 2403071 - RNA, 19 nt, Artificial Sequence
  Description of Artificial Sequence: Synthetic oligonucleotide
  Antisense strand to SEQ ID NO: 2403070
aucuaacuuagguucguac

SEQ ID NO: 2403072 - RNA, 19 nt, Artificial Sequence
  Description of Artificial Sequence: Synthetic oligonucleotide
  Sense strand starting at position 2903 of SEQ ID NO: 1886340
agauucuguggugguucaa

SEQ ID NO: 2403073 - RNA, 19 nt, Artificial Sequence
  Description of Artificial Sequence: Synthetic oligonucleotide
  Antisense strand to SEQ ID NO: 2403072
uugaaccaccacagaaucu

SEQ ID NO: 2403074 - RNA, 19 nt, Artificial Sequence
  Description of Artificial Sequence: Synthetic oligonucleotide
  Sense strand starting at position 2979 of SEQ ID NO: 1886340
ccuagaaagugugcuggaa

SEQ ID NO: 2403075 - RNA, 19 nt, Artificial Sequence
  Description of Artificial Sequence: Synthetic oligonucleotide
  Antisense strand to SEQ ID NO: 2403074
uuccagcacacuuucuagg

SEQ ID NO: 2403076 - RNA, 19 nt, Artificial Sequence
  Description of Artificial Sequence: Synthetic oligonucleotide
  Sense strand starting at position 2983 of SEQ ID NO: 1886340
gaaagugugcuggaauuac

SEQ ID NO: 2403077 - RNA, 19 nt, Artificial Sequence
  Description of Artificial Sequence: Synthetic oligonucleotide
  Antisense strand to SEQ ID NO: 2403076
guaauuccagcacacuuuc

SEQ ID NO: 2403078 - RNA, 19 nt, Artificial Sequence
  Description of Artificial Sequence: Synthetic oligonucleotide
  Sense strand starting at position 3025 of SEQ ID NO: 1886340
cguauugagagugaugcuu

SEQ ID NO: 2403079 - RNA, 19 nt, Artificial Sequence
  Description of Artificial Sequence: Synthetic oligonucleotide
  Antisense strand to SEQ ID NO: 2403078
aagcaucacucucaauacg

SEQ ID NO: 2403080 - RNA, 19 nt, Artificial Sequence
  Description of Artificial Sequence: Synthetic oligonucleotide
  Sense strand starting at position 3086 of SEQ ID NO: 1886340
ccugaauguugcucuugga

SEQ ID NO: 2403081 - RNA, 19 nt, Artificial Sequence
  Description of Artificial Sequence: Synthetic oligonucleotide
  Antisense strand to SEQ ID NO: 2403080
uccaagagcaacauucagg

SEQ ID NO: 2403082 - RNA, 19 nt, Artificial Sequence
  Description of Artificial Sequence: Synthetic oligonucleotide
  Sense strand starting at position 3227 of SEQ ID NO: 1886340
ugucaugugagugagucau

SEQ ID NO: 2403083 - RNA, 19 nt, Artificial Sequence
  Description of Artificial Sequence: Synthetic oligonucleotide
  Antisense strand to SEQ ID NO: 2403082
augacucacucacaugaca

SEQ ID NO: 2403084 - RNA, 19 nt, Artificial Sequence
  Description of Artificial Sequence: Synthetic oligonucleotide
  Sense strand starting at position 3361 of SEQ ID NO: 1886340
ggcugaauuccagaccguu

SEQ ID NO: 2403085 - RNA, 19 nt, Artificial Sequence
  Description of Artificial Sequence: Synthetic oligonucleotide
  Antisense strand to SEQ ID NO: 2403084
aacggucuggaauucagcc

SEQ ID NO: 2403086 - RNA, 19 nt, Artificial Sequence
  Description of Artificial Sequence: Synthetic oligonucleotide
  Sense strand starting at position 3364 of SEQ ID NO: 1886340
ugaauuccagaccguuaaa

SEQ ID NO: 2403087 - RNA, 19 nt, Artificial Sequence
  Description of Artificial Sequence: Synthetic oligonucleotide
  Antisense strand to SEQ ID NO: 2403086
uuuaacggucuggaauuca

SEQ ID NO: 2403088 - RNA, 19 nt, Artificial Sequence
  Description of Artificial Sequence: Synthetic oligonucleotide
  Sense strand starting at position 3530 of SEQ ID NO: 1886340
aucuaauggaggugugcaa

SEQ ID NO: 2403089 - RNA, 19 nt, Artificial Sequence
  Description of Artificial Sequence: Synthetic oligonucleotide
  Antisense strand to SEQ ID NO: 2403088
uugcacaccuccauuagau

SEQ ID NO: 2403090 - RNA, 19 nt, Artificial Sequence
  Description of Artificial Sequence: Synthetic oligonucleotide
  Sense strand starting at position 3693 of SEQ ID NO: 1886340
uguuuagcuucccuaggaa

SEQ ID NO: 2403091 - RNA, 19 nt, Artificial Sequence
  Description of Artificial Sequence: Synthetic oligonucleotide
  Antisense strand to SEQ ID NO: 2403090
uuccuagggaagcuaaaca

SEQ ID NO: 2403092 - RNA, 19 nt, Artificial Sequence
  Description of Artificial Sequence: Synthetic oligonucleotide
  Sense strand starting at position 3696 of SEQ ID NO: 1886340
uuagcuucccuaggaaaca

SEQ ID NO: 2403093 - RNA, 19 nt, Artificial Sequence
  Description of Artificial Sequence: Synthetic oligonucleotide
  Antisense strand to SEQ ID NO: 2403092
uguuuccuagggaagcuaa

SEQ ID NO: 2403094 - RNA, 19 nt, Artificial Sequence
  Description of Artificial Sequence: Synthetic oligonucleotide
  Sense strand starting at position 3726 of SEQ ID NO: 1886340
gcuugcauuguguugcuga

SEQ ID NO: 2403095 - RNA, 19 nt, Artificial Sequence
  Description of Artificial Sequence: Synthetic oligonucleotide
  Antisense strand to SEQ ID NO: 2403094
ucagcaacacaaugcaagc

SEQ ID NO: 2403096 - RNA, 19 nt, Artificial Sequence
  Description of Artificial Sequence: Synthetic oligonucleotide
  Sense strand starting at position 3923 of SEQ ID NO: 1886340
guaaacacugugcaaugau

SEQ ID NO: 2403097 - RNA, 19 nt, Artificial Sequence
  Description of Artificial Sequence: Synthetic oligonucleotide
  Antisense strand to SEQ ID NO: 2403096
aucauugcacaguguuuac

SEQ ID NO: 2403098 - RNA, 19 nt, Artificial Sequence
  Description of Artificial Sequence: Synthetic oligonucleotide
  Sense strand starting at position 117 of SEQ ID NO: 1886339
guacgacuauuccuccaaa

SEQ ID NO: 2403099 - RNA, 19 nt, Artificial Sequence
  Description of Artificial Sequence: Synthetic oligonucleotide
  Antisense strand to SEQ ID NO: 2403098
uuuggaggaauagucguac

SEQ ID NO: 2403100 - RNA, 19 nt, Artificial Sequence
  Description of Artificial Sequence: Synthetic oligonucleotide
  Sense strand starting at position 439 of SEQ ID NO: 1886339
gugaccuguaucuggcaaa

SEQ ID NO: 2403101 - RNA, 19 nt, Artificial Sequence
  Description of Artificial Sequence: Synthetic oligonucleotide
  Antisense strand to SEQ ID NO: 2403100
uuugccagauacaggucac

SEQ ID NO: 2403102 - RNA, 19 nt, Artificial Sequence
  Description of Artificial Sequence: Synthetic oligonucleotide
  Sense strand starting at position 520 of SEQ ID NO: 1886339
ugacucauccugugacgaa

SEQ ID NO: 2403103 - RNA, 19 nt, Artificial Sequence
  Description of Artificial Sequence: Synthetic oligonucleotide
  Antisense strand to SEQ ID NO: 2403102
uucgucacaggaugaguca

SEQ ID NO: 2403104 - RNA, 19 nt, Artificial Sequence
  Description of Artificial Sequence: Synthetic oligonucleotide
  Sense strand starting at position 932 of SEQ ID NO: 1886339
gaucccuguugucuugaga

SEQ ID NO: 2403105 - RNA, 19 nt, Artificial Sequence
  Description of Artificial Sequence: Synthetic oligonucleotide
  Antisense strand to SEQ ID NO: 2403104
ucucaagacaacagggauc

SEQ ID NO: 2403106 - RNA, 19 nt, Artificial Sequence
  Description of Artificial Sequence: Synthetic oligonucleotide
  Sense strand starting at position 935 of SEQ ID NO: 1886339
cccuguugucuugagagcu

SEQ ID NO: 2403107 - RNA, 19 nt, Artificial Sequence
  Description of Artificial Sequence: Synthetic oligonucleotide
  Antisense strand to SEQ ID NO: 2403106
agcucucaagacaacaggg

SEQ ID NO: 2403108 - RNA, 19 nt, Artificial Sequence
  Description of Artificial Sequence: Synthetic oligonucleotide
  Sense strand starting at position 959 of SEQ ID NO: 1886339
gagggaaagucgucuucag

SEQ ID NO: 2403109 - RNA, 19 nt, Artificial Sequence
  Description of Artificial Sequence: Synthetic oligonucleotide
  Antisense strand to SEQ ID NO: 2403108
cugaagacgacuuucccuc

SEQ ID NO: 2403110 - RNA, 19 nt, Artificial Sequence
  Description of Artificial Sequence: Synthetic oligonucleotide
  Sense strand starting at position 997 of SEQ ID NO: 1886339
guuuguuacccuugagaua

SEQ ID NO: 2403111 - RNA, 19 nt, Artificial Sequence
  Description of Artificial Sequence: Synthetic oligonucleotide
  Antisense strand to SEQ ID NO: 2403110
uaucucaaggguaacaaac

SEQ ID NO: 2403112 - RNA, 19 nt, Artificial Sequence
  Description of Artificial Sequence: Synthetic oligonucleotide
  Sense strand starting at position 998 of SEQ ID NO: 1886339
uuuguuacccuugagauag

SEQ ID NO: 2403113 - RNA, 19 nt, Artificial Sequence
  Description of Artificial Sequence: Synthetic oligonucleotide
  Antisense strand to SEQ ID NO: 2403112
cuaucucaaggguaacaaa

SEQ ID NO: 2403114 - RNA, 19 nt, Artificial Sequence
  Description of Artificial Sequence: Synthetic oligonucleotide
  Sense strand starting at position 1188 of SEQ ID NO: 1886339
auuguugucgucguugaaa

SEQ ID NO: 2403115 - RNA, 19 nt, Artificial Sequence
  Description of Artificial Sequence: Synthetic oligonucleotide
  Antisense strand to SEQ ID NO: 2403114
uuucaacgacgacaacaau

SEQ ID NO: 2403116 - RNA, 19 nt, Artificial Sequence
  Description of Artificial Sequence: Synthetic oligonucleotide
  Sense strand starting at position 1255 of SEQ ID NO: 1886339
gaagcccacgcuuagaaau

SEQ ID NO: 2403117 - RNA, 19 nt, Artificial Sequence
  Description of Artificial Sequence: Synthetic oligonucleotide
  Antisense strand to SEQ ID NO: 2403116
auuucuaagcgugggcuuc

SEQ ID NO: 2403118 - RNA, 19 nt, Artificial Sequence
  Description of Artificial Sequence: Synthetic oligonucleotide
  Sense strand starting at position 1393 of SEQ ID NO: 1886339
guagacucugucuauaggu

SEQ ID NO: 2403119 - RNA, 19 nt, Artificial Sequence
  Description of Artificial Sequence: Synthetic oligonucleotide
  Antisense strand to SEQ ID NO: 2403118
accuauagacagagucuac

SEQ ID NO: 2403120 - RNA, 19 nt, Artificial Sequence
  Description of Artificial Sequence: Synthetic oligonucleotide
  Sense strand starting at position 1399 of SEQ ID NO: 1886339
ucugucuauagguggaaga

SEQ ID NO: 2403121 - RNA, 19 nt, Artificial Sequence
  Description of Artificial Sequence: Synthetic oligonucleotide
  Antisense strand to SEQ ID NO: 2403120
ucuuccaccuauagacaga

SEQ ID NO: 2403122 - RNA, 19 nt, Artificial Sequence
  Description of Artificial Sequence: Synthetic oligonucleotide
  Sense strand starting at position 1400 of SEQ ID NO: 1886339
cugucuauagguggaagaa

SEQ ID NO: 2403123 - RNA, 19 nt, Artificial Sequence
  Description of Artificial Sequence: Synthetic oligonucleotide
  Antisense strand to SEQ ID NO: 2403122
uucuuccaccuauagacag

SEQ ID NO: 2403124 - RNA, 19 nt, Artificial Sequence
  Description of Artificial Sequence: Synthetic oligonucleotide
  Sense strand starting at position 1708 of SEQ ID NO: 1886339
gccucaaauuccgcgauuu

SEQ ID NO: 2403125 - RNA, 19 nt, Artificial Sequence
  Description of Artificial Sequence: Synthetic oligonucleotide
  Antisense strand to SEQ ID NO: 2403124
aaaucgcggaauuugaggc

SEQ ID NO: 2403126 - RNA, 19 nt, Artificial Sequence
  Description of Artificial Sequence: Synthetic oligonucleotide
  Sense strand starting at position 1709 of SEQ ID NO: 1886339
ccucaaauuccgcgauuug

SEQ ID NO: 2403127 - RNA, 19 nt, Artificial Sequence
  Description of Artificial Sequence: Synthetic oligonucleotide
  Antisense strand to SEQ ID NO: 2403126
caaaucgcggaauuugagg

SEQ ID NO: 2403128 - RNA, 19 nt, Artificial Sequence
  Description of Artificial Sequence: Synthetic oligonucleotide
  Sense strand starting at position 1721 of SEQ ID NO: 1886339
cgauuuggccggcauccua

SEQ ID NO: 2403129 - RNA, 19 nt, Artificial Sequence
  Description of Artificial Sequence: Synthetic oligonucleotide
  Antisense strand to SEQ ID NO: 2403128
uaggaugccggccaaaucg

SEQ ID NO: 2403130 - RNA, 19 nt, Artificial Sequence
  Description of Artificial Sequence: Synthetic oligonucleotide
  Sense strand starting at position 1746 of SEQ ID NO: 1886339
gagugacucuugccaacca

SEQ ID NO: 2403131 - RNA, 19 nt, Artificial Sequence
  Description of Artificial Sequence: Synthetic oligonucleotide
  Antisense strand to SEQ ID NO: 2403130
ugguuggcaagagucacuc

SEQ ID NO: 2403132 - RNA, 19 nt, Artificial Sequence
  Description of Artificial Sequence: Synthetic oligonucleotide
  Sense strand starting at position 1956 of SEQ ID NO: 1886339
ccgaguuacuaucccuuua

SEQ ID NO: 2403133 - RNA, 19 nt, Artificial Sequence
  Description of Artificial Sequence: Synthetic oligonucleotide
  Antisense strand to SEQ ID NO: 2403132
uaaagggauaguaacucgg

SEQ ID NO: 2403134 - RNA, 19 nt, Artificial Sequence
  Description of Artificial Sequence: Synthetic oligonucleotide
  Sense strand starting at position 2178 of SEQ ID NO: 1886339
gcagcaucugacgaggaga

SEQ ID NO: 2403135 - RNA, 19 nt, Artificial Sequence
  Description of Artificial Sequence: Synthetic oligonucleotide
  Antisense strand to SEQ ID NO: 2403134
ucuccucgucagaugcugc

SEQ ID NO: 2403136 - RNA, 19 nt, Artificial Sequence
  Description of Artificial Sequence: Synthetic oligonucleotide
  Sense strand starting at position 2339 of SEQ ID NO: 1886339
cuuucccuuccuugggaua

SEQ ID NO: 2403137 - RNA, 19 nt, Artificial Sequence
  Description of Artificial Sequence: Synthetic oligonucleotide
  Antisense strand to SEQ ID NO: 2403136
uaucccaaggaagggaaag

SEQ ID NO: 2403138 - RNA, 19 nt, Artificial Sequence
  Description of Artificial Sequence: Synthetic oligonucleotide
  Sense strand starting at position 2340 of SEQ ID NO: 1886339
uuucccuuccuugggauau

SEQ ID NO: 2403139 - RNA, 19 nt, Artificial Sequence
  Description of Artificial Sequence: Synthetic oligonucleotide
  Antisense strand to SEQ ID NO: 2403138
auaucccaaggaagggaaa

SEQ ID NO: 2403140 - RNA, 19 nt, Artificial Sequence
  Description of Artificial Sequence: Synthetic oligonucleotide
  Sense strand starting at position 2342 of SEQ ID NO: 1886339
ucccuuccuugggauauuu

SEQ ID NO: 2403141 - RNA, 19 nt, Artificial Sequence
  Description of Artificial Sequence: Synthetic oligonucleotide
  Antisense strand to SEQ ID NO: 2403140
aaauaucccaaggaaggga

SEQ ID NO: 2403142 - RNA, 19 nt, Artificial Sequence
  Description of Artificial Sequence: Synthetic oligonucleotide
  Sense strand starting at position 2444 of SEQ ID NO: 1886339
cugauaaacuaagcuaugu

SEQ ID NO: 2403143 - RNA, 19 nt, Artificial Sequence
  Description of Artificial Sequence: Synthetic oligonucleotide
  Antisense strand to SEQ ID NO: 2403142
acauagcuuaguuuaucag

SEQ ID NO: 2403144 - RNA, 19 nt, Artificial Sequence
  Description of Artificial Sequence: Synthetic oligonucleotide
  Sense strand starting at position 2461 of SEQ ID NO: 1886339
guaugauucgcugccagua

SEQ ID NO: 2403145 - RNA, 19 nt, Artificial Sequence
  Description of Artificial Sequence: Synthetic oligonucleotide
  Antisense strand to SEQ ID NO: 2403144
uacuggcagcgaaucauac

SEQ ID NO: 2403146 - RNA, 19 nt, Artificial Sequence
  Description of Artificial Sequence: Synthetic oligonucleotide
  Sense strand starting at position 2522 of SEQ ID NO: 1886339
uugcguaacagugagcaga

SEQ ID NO: 2403147 - RNA, 19 nt, Artificial Sequence
  Description of Artificial Sequence: Synthetic oligonucleotide
  Antisense strand to SEQ ID NO: 2403146
ucugcucacuguuacgcaa

SEQ ID NO: 2403148 - RNA, 19 nt, Artificial Sequence
  Description of Artificial Sequence: Synthetic oligonucleotide
  Sense strand starting at position 2569 of SEQ ID NO: 1886339
ugcaucauugugcaaacaa

SEQ ID NO: 2403149 - RNA, 19 nt, Artificial Sequence
  Description of Artificial Sequence: Synthetic oligonucleotide
  Antisense strand to SEQ ID NO: 2403148
uuguuugcacaaugaugca

SEQ ID NO: 2403150 - RNA, 19 nt, Artificial Sequence
  Description of Artificial Sequence: Synthetic oligonucleotide
  Sense strand starting at position 2814 of SEQ ID NO: 1886339
gcuuacgggacugaaaguu

SEQ ID NO: 2403151 - RNA, 19 nt, Artificial Sequence
  Description of Artificial Sequence: Synthetic oligonucleotide
  Antisense strand to SEQ ID NO: 2403150
aacuuucagucccguaagc

SEQ ID NO: 2403152 - RNA, 19 nt, Artificial Sequence
  Description of Artificial Sequence: Synthetic oligonucleotide
  Sense strand starting at position 2852 of SEQ ID NO: 1886339
gugaguggugaguaaauac

SEQ ID NO: 2403153 - RNA, 19 nt, Artificial Sequence
  Description of Artificial Sequence: Synthetic oligonucleotide
  Antisense strand to SEQ ID NO: 2403152
guauuuacucaccacucac

SEQ ID NO: 2403154 - RNA, 19 nt, Artificial Sequence
  Description of Artificial Sequence: Synthetic oligonucleotide
  Sense strand starting at position 3304 of SEQ ID NO: 1886339
cauggcucagacugauaua

SEQ ID NO: 2403155 - RNA, 19 nt, Artificial Sequence
  Description of Artificial Sequence: Synthetic oligonucleotide
  Antisense strand to SEQ ID NO: 2403154
uauaucagucugagccaug

SEQ ID NO: 2403156 - RNA, 19 nt, Artificial Sequence
  Description of Artificial Sequence: Synthetic oligonucleotide
  Sense strand starting at position 3365 of SEQ ID NO: 1886339
auauauuuguacgaaccua

SEQ ID NO: 2403157 - RNA, 19 nt, Artificial Sequence
  Description of Artificial Sequence: Synthetic oligonucleotide
  Antisense strand to SEQ ID NO: 2403156
uagguucguacaaauauau

SEQ ID NO: 2403158 - RNA, 19 nt, Artificial Sequence
  Description of Artificial Sequence: Synthetic oligonucleotide
  Sense strand starting at position 3373 of SEQ ID NO: 1886339
guacgaaccuaaguuagau

SEQ ID NO: 2403159 - RNA, 19 nt, Artificial Sequence
  Description of Artificial Sequence: Synthetic oligonucleotide
  Antisense strand to SEQ ID NO: 2403158
aucuaacuuagguucguac

SEQ ID NO: 2403160 - RNA, 19 nt, Artificial Sequence
  Description of Artificial Sequence: Synthetic oligonucleotide
  Sense strand starting at position 3388 of SEQ ID NO: 1886339
agauucuguggugguucaa

SEQ ID NO: 2403161 - RNA, 19 nt, Artificial Sequence
  Description of Artificial Sequence: Synthetic oligonucleotide
  Antisense strand to SEQ ID NO: 2403160
uugaaccaccacagaaucu

SEQ ID NO: 2403162 - RNA, 19 nt, Artificial Sequence
  Description of Artificial Sequence: Synthetic oligonucleotide
  Sense strand starting at position 3464 of SEQ ID NO: 1886339
ccuagaaagugugcuggaa

SEQ ID NO: 2403163 - RNA, 19 nt, Artificial Sequence
  Description of Artificial Sequence: Synthetic oligonucleotide
  Antisense strand to SEQ ID NO: 2403162
uuccagcacacuuucuagg

SEQ ID NO: 2403164 - RNA, 19 nt, Artificial Sequence
  Description of Artificial Sequence: Synthetic oligonucleotide
  Sense strand starting at position 3468 of SEQ ID NO: 1886339
gaaagugugcuggaauuac

SEQ ID NO: 2403165 - RNA, 19 nt, Artificial Sequence
  Description of Artificial Sequence: Synthetic oligonucleotide
  Antisense strand to SEQ ID NO: 2403164
guaauuccagcacacuuuc

SEQ ID NO: 2403166 - RNA, 19 nt, Artificial Sequence
  Description of Artificial Sequence: Synthetic oligonucleotide
  Sense strand starting at position 3510 of SEQ ID NO: 1886339
cguauugagagugaugcuu

SEQ ID NO: 2403167 - RNA, 19 nt, Artificial Sequence
  Description of Artificial Sequence: Synthetic oligonucleotide
  Antisense strand to SEQ ID NO: 2403166
aagcaucacucucaauacg

SEQ ID NO: 2403168 - RNA, 19 nt, Artificial Sequence
  Description of Artificial Sequence: Synthetic oligonucleotide
  Sense strand starting at position 3522 of SEQ ID NO: 1886339
gaugcuuugugaguucuga

SEQ ID NO: 2403169 - RNA, 19 nt, Artificial Sequence
  Description of Artificial Sequence: Synthetic oligonucleotide
  Antisense strand to SEQ ID NO: 2403168
ucagaacucacaaagcauc

SEQ ID NO: 2403170 - RNA, 19 nt, Artificial Sequence
  Description of Artificial Sequence: Synthetic oligonucleotide
  Sense strand starting at position 3571 of SEQ ID NO: 1886339
ccugaauguugcucuugga

SEQ ID NO: 2403171 - RNA, 19 nt, Artificial Sequence
  Description of Artificial Sequence: Synthetic oligonucleotide
  Antisense strand to SEQ ID NO: 2403170
uccaagagcaacauucagg

SEQ ID NO: 2403172 - RNA, 19 nt, Artificial Sequence
  Description of Artificial Sequence: Synthetic oligonucleotide
  Sense strand starting at position 3712 of SEQ ID NO: 1886339
ugucaugugagugagucau

SEQ ID NO: 2403173 - RNA, 19 nt, Artificial Sequence
  Description of Artificial Sequence: Synthetic oligonucleotide
  Antisense strand to SEQ ID NO: 2403172
augacucacucacaugaca

SEQ ID NO: 2403174 - RNA, 19 nt, Artificial Sequence
  Description of Artificial Sequence: Synthetic oligonucleotide
  Sense strand starting at position 3846 of SEQ ID NO: 1886339
ggcugaauuccagaccguu

SEQ ID NO: 2403175 - RNA, 19 nt, Artificial Sequence
  Description of Artificial Sequence: Synthetic oligonucleotide
  Antisense strand to SEQ ID NO: 2403174
aacggucuggaauucagcc

SEQ ID NO: 2403176 - RNA, 19 nt, Artificial Sequence
  Description of Artificial Sequence: Synthetic oligonucleotide
  Sense strand starting at position 3849 of SEQ ID NO: 1886339
ugaauuccagaccguuaaa

SEQ ID NO: 2403177 - RNA, 19 nt, Artificial Sequence
  Description of Artificial Sequence: Synthetic oligonucleotide
  Antisense strand to SEQ ID NO: 2403176
uuuaacggucuggaauuca

SEQ ID NO: 2403178 - RNA, 19 nt, Artificial Sequence
  Description of Artificial Sequence: Synthetic oligonucleotide
  Sense strand starting at position 220 of SEQ ID NO: 1886341
auaggacagcucugaauau

SEQ ID NO: 2403179 - RNA, 19 nt, Artificial Sequence
  Description of Artificial Sequence: Synthetic oligonucleotide
  Antisense strand to SEQ ID NO: 2403178
auauucagagcuguccuau

SEQ ID NO: 2403180 - RNA, 19 nt, Artificial Sequence
  Description of Artificial Sequence: Synthetic oligonucleotide
  Sense strand starting at position 269 of SEQ ID NO: 1886341
guggguaccuccucaauug

SEQ ID NO: 2403181 - RNA, 19 nt, Artificial Sequence
  Description of Artificial Sequence: Synthetic oligonucleotide
  Antisense strand to SEQ ID NO: 2403180
caauugaggagguacccac

SEQ ID NO: 2403182 - RNA, 19 nt, Artificial Sequence
  Description of Artificial Sequence: Synthetic oligonucleotide
  Sense strand starting at position 303 of SEQ ID NO: 1886341
guguuaugacaaggaauga

SEQ ID NO: 2403183 - RNA, 19 nt, Artificial Sequence
  Description of Artificial Sequence: Synthetic oligonucleotide
  Antisense strand to SEQ ID NO: 2403182
ucauuccuugucauaacac

SEQ ID NO: 2403184 - RNA, 19 nt, Artificial Sequence
  Description of Artificial Sequence: Synthetic oligonucleotide
  Sense strand starting at position 590 of SEQ ID NO: 1886341
cucacagguccugacaauu

SEQ ID NO: 2403185 - RNA, 19 nt, Artificial Sequence
  Description of Artificial Sequence: Synthetic oligonucleotide
  Antisense strand to SEQ ID NO: 2403184
aauugucaggaccugugag

SEQ ID NO: 2403186 - RNA, 19 nt, Artificial Sequence
  Description of Artificial Sequence: Synthetic oligonucleotide
  Sense strand starting at position 641 of SEQ ID NO: 1886341
gaucauauaucggcagaga

SEQ ID NO: 2403187 - RNA, 19 nt, Artificial Sequence
  Description of Artificial Sequence: Synthetic oligonucleotide
  Antisense strand to SEQ ID NO: 2403186
ucucugccgauauaugauc

SEQ ID NO: 2403188 - RNA, 19 nt, Artificial Sequence
  Description of Artificial Sequence: Synthetic oligonucleotide
  Sense strand starting at position 2041 of SEQ ID NO: 1886341
ggccaauggaaacguuaga

SEQ ID NO: 2403189 - RNA, 19 nt, Artificial Sequence
  Description of Artificial Sequence: Synthetic oligonucleotide
  Antisense strand to SEQ ID NO: 2403188
ucuaacguuuccauuggcc

SEQ ID NO: 2403190 - RNA, 19 nt, Artificial Sequence
  Description of Artificial Sequence: Synthetic oligonucleotide
  Sense strand starting at position 2087 of SEQ ID NO: 1886341
ugguguccgcuuucgugaa

SEQ ID NO: 2403191 - RNA, 19 nt, Artificial Sequence
  Description of Artificial Sequence: Synthetic oligonucleotide
  Antisense strand to SEQ ID NO: 2403190
uucacgaaagcggacacca

SEQ ID NO: 2403192 - RNA, 19 nt, Artificial Sequence
  Description of Artificial Sequence: Synthetic oligonucleotide
  Sense strand starting at position 2105 of SEQ ID NO: 1886341
aaucgaguugccuaaccca

SEQ ID NO: 2403193 - RNA, 19 nt, Artificial Sequence
  Description of Artificial Sequence: Synthetic oligonucleotide
  Antisense strand to SEQ ID NO: 2403192
uggguuaggcaacucgauu

SEQ ID NO: 2403194 - RNA, 19 nt, Artificial Sequence
  Description of Artificial Sequence: Synthetic oligonucleotide
  Sense strand starting at position 2120 of SEQ ID NO: 1886341
cccagagcuuucccgagau

SEQ ID NO: 2403195 - RNA, 19 nt, Artificial Sequence
  Description of Artificial Sequence: Synthetic oligonucleotide
  Antisense strand to SEQ ID NO: 2403194
aucucgggaaagcucuggg

SEQ ID NO: 2403196 - RNA, 19 nt, Artificial Sequence
  Description of Artificial Sequence: Synthetic oligonucleotide
  Sense strand starting at position 2124 of SEQ ID NO: 1886341
gagcuuucccgagaugguc

SEQ ID NO: 2403197 - RNA, 19 nt, Artificial Sequence
  Description of Artificial Sequence: Synthetic oligonucleotide
  Antisense strand to SEQ ID NO: 2403196
gaccaucucgggaaagcuc

SEQ ID NO: 2403198 - RNA, 19 nt, Artificial Sequence
  Description of Artificial Sequence: Synthetic oligonucleotide
  Sense strand starting at position 2136 of SEQ ID NO: 1886341
gauggucuucguuacaggu

SEQ ID NO: 2403199 - RNA, 19 nt, Artificial Sequence
  Description of Artificial Sequence: Synthetic oligonucleotide
  Antisense strand to SEQ ID NO: 2403198
accuguaacgaagaccauc

SEQ ID NO: 2403200 - RNA, 19 nt, Artificial Sequence
  Description of Artificial Sequence: Synthetic oligonucleotide
  Sense strand starting at position 2180 of SEQ ID NO: 1886341
ucacuaggucauuaagcau

SEQ ID NO: 2403201 - RNA, 19 nt, Artificial Sequence
  Description of Artificial Sequence: Synthetic oligonucleotide
  Antisense strand to SEQ ID NO: 2403200
augcuuaaugaccuaguga

SEQ ID NO: 2403202 - RNA, 19 nt, Artificial Sequence
  Description of Artificial Sequence: Synthetic oligonucleotide
  Sense strand starting at position 2183 of SEQ ID NO: 1886341
cuaggucauuaagcaugua

SEQ ID NO: 2403203 - RNA, 19 nt, Artificial Sequence
  Description of Artificial Sequence: Synthetic oligonucleotide
  Antisense strand to SEQ ID NO: 2403202
uacaugcuuaaugaccuag

SEQ ID NO: 2403204 - RNA, 19 nt, Artificial Sequence
  Description of Artificial Sequence: Synthetic oligonucleotide
  Sense strand starting at position 2197 of SEQ ID NO: 1886341
auguacuuuggugguuaca

SEQ ID NO: 2403205 - RNA, 19 nt, Artificial Sequence
  Description of Artificial Sequence: Synthetic oligonucleotide
  Antisense strand to SEQ ID NO: 2403204
uguaaccaccaaaguacau

SEQ ID NO: 2403206 - RNA, 19 nt, Artificial Sequence
  Description of Artificial Sequence: Synthetic oligonucleotide
  Sense strand starting at position 2199 of SEQ ID NO: 1886341
guacuuuggugguuacaua

SEQ ID NO: 2403207 - RNA, 19 nt, Artificial Sequence
  Description of Artificial Sequence: Synthetic oligonucleotide
  Antisense strand to SEQ ID NO: 2403206
uauguaaccaccaaaguac

SEQ ID NO: 2403208 - RNA, 19 nt, Artificial Sequence
  Description of Artificial Sequence: Synthetic oligonucleotide
  Sense strand starting at position 2206 of SEQ ID NO: 1886341
ggugguuacauauaucuug

SEQ ID NO: 2403209 - RNA, 19 nt, Artificial Sequence
  Description of Artificial Sequence: Synthetic oligonucleotide
  Antisense strand to SEQ ID NO: 2403208
caagauauauguaaccacc

SEQ ID NO: 2403210 - RNA, 19 nt, Artificial Sequence
  Description of Artificial Sequence: Synthetic oligonucleotide
  Sense strand starting at position 2209 of SEQ ID NO: 1886341
gguuacauauaucuuggaa

SEQ ID NO: 2403211 - RNA, 19 nt, Artificial Sequence
  Description of Artificial Sequence: Synthetic oligonucleotide
  Antisense strand to SEQ ID NO: 2403210
uuccaagauauauguaacc

SEQ ID NO: 2403212 - RNA, 19 nt, Artificial Sequence
  Description of Artificial Sequence: Synthetic oligonucleotide
  Sense strand starting at position 2383 of SEQ ID NO: 1886341
ggugacuuggcguaacuga

SEQ ID NO: 2403213 - RNA, 19 nt, Artificial Sequence
  Description of Artificial Sequence: Synthetic oligonucleotide
  Antisense strand to SEQ ID NO: 2403212
ucaguuacgccaagucacc

SEQ ID NO: 2403214 - RNA, 19 nt, Artificial Sequence
  Description of Artificial Sequence: Synthetic oligonucleotide
  Sense strand starting at position 2388 of SEQ ID NO: 1886341
cuuggcguaacugagaaua

SEQ ID NO: 2403215 - RNA, 19 nt, Artificial Sequence
  Description of Artificial Sequence: Synthetic oligonucleotide
  Antisense strand to SEQ ID NO: 2403214
uauucucaguuacgccaag

SEQ ID NO: 2403216 - RNA, 19 nt, Artificial Sequence
  Description of Artificial Sequence: Synthetic oligonucleotide
  Sense strand starting at position 2579 of SEQ ID NO: 1886341
guacauuuguucugauuuc

SEQ ID NO: 2403217 - RNA, 19 nt, Artificial Sequence
  Description of Artificial Sequence: Synthetic oligonucleotide
  Antisense strand to SEQ ID NO: 2403216
gaaaucagaacaaauguac

SEQ ID NO: 2403218 - RNA, 19 nt, Artificial Sequence
  Description of Artificial Sequence: Synthetic oligonucleotide
  Sense strand starting at position 2608 of SEQ ID NO: 1886341
uugaauauucuuuggcaac

SEQ ID NO: 2403219 - RNA, 19 nt, Artificial Sequence
  Description of Artificial Sequence: Synthetic oligonucleotide
  Antisense strand to SEQ ID NO: 2403218
guugccaaagaauauucaa

SEQ ID NO: 2403220 - RNA, 19 nt, Artificial Sequence
  Description of Artificial Sequence: Synthetic oligonucleotide
  Sense strand starting at position 2614 of SEQ ID NO: 1886341
auucuuuggcaacaaguua

SEQ ID NO: 2403221 - RNA, 19 nt, Artificial Sequence
  Description of Artificial Sequence: Synthetic oligonucleotide
  Antisense strand to SEQ ID NO: 2403220
uaacuuguugccaaagaau

SEQ ID NO: 2403222 - RNA, 19 nt, Artificial Sequence
  Description of Artificial Sequence: Synthetic oligonucleotide
  Sense strand starting at position 2691 of SEQ ID NO: 1886341
uccuguauuagaggcgaua

SEQ ID NO: 2403223 - RNA, 19 nt, Artificial Sequence
  Description of Artificial Sequence: Synthetic oligonucleotide
  Antisense strand to SEQ ID NO: 2403222
uaucgccucuaauacagga

SEQ ID NO: 2403224 - RNA, 19 nt, Artificial Sequence
  Description of Artificial Sequence: Synthetic oligonucleotide
  Sense strand starting at position 2704 of SEQ ID NO: 1886341
gcgauaccuaucuacguua

SEQ ID NO: 2403225 - RNA, 19 nt, Artificial Sequence
  Description of Artificial Sequence: Synthetic oligonucleotide
  Antisense strand to SEQ ID NO: 2403224
uaacguagauagguaucgc

SEQ ID NO: 2403226 - RNA, 19 nt, Artificial Sequence
  Description of Artificial Sequence: Synthetic oligonucleotide
  Sense strand starting at position 2707 of SEQ ID NO: 1886341
auaccuaucuacguuauua

SEQ ID NO: 2403227 - RNA, 19 nt, Artificial Sequence
  Description of Artificial Sequence: Synthetic oligonucleotide
  Antisense strand to SEQ ID NO: 2403226
uaauaacguagauagguau

SEQ ID NO: 2403228 - RNA, 19 nt, Artificial Sequence
  Description of Artificial Sequence: Synthetic oligonucleotide
  Sense strand starting at position 2709 of SEQ ID NO: 1886341
accuaucuacguuauuaag

SEQ ID NO: 2403229 - RNA, 19 nt, Artificial Sequence
  Description of Artificial Sequence: Synthetic oligonucleotide
  Antisense strand to SEQ ID NO: 2403228
cuuaauaacguagauaggu

SEQ ID NO: 2403230 - RNA, 19 nt, Artificial Sequence
  Description of Artificial Sequence: Synthetic oligonucleotide
  Sense strand starting at position 2711 of SEQ ID NO: 1886341
cuaucuacguuauuaagac

SEQ ID NO: 2403231 - RNA, 19 nt, Artificial Sequence
  Description of Artificial Sequence: Synthetic oligonucleotide
  Antisense strand to SEQ ID NO: 2403230
gucuuaauaacguagauag

SEQ ID NO: 2403232 - RNA, 19 nt, Artificial Sequence
  Description of Artificial Sequence: Synthetic oligonucleotide
  Sense strand starting at position 2771 of SEQ ID NO: 1886341
cccuuucgcacagggaauu

SEQ ID NO: 2403233 - RNA, 19 nt, Artificial Sequence
  Description of Artificial Sequence: Synthetic oligonucleotide
  Antisense strand to SEQ ID NO: 2403232
aauucccugugcgaaaggg

SEQ ID NO: 2403234 - RNA, 19 nt, Artificial Sequence
  Description of Artificial Sequence: Synthetic oligonucleotide
  Sense strand starting at position 2931 of SEQ ID NO: 1886341
acccaaauuugugaguuga

SEQ ID NO: 2403235 - RNA, 19 nt, Artificial Sequence
  Description of Artificial Sequence: Synthetic oligonucleotide
  Antisense strand to SEQ ID NO: 2403234
ucaacucacaaauuugggu

SEQ ID NO: 2403236 - RNA, 19 nt, Artificial Sequence
  Description of Artificial Sequence: Synthetic oligonucleotide
  Sense strand starting at position 3056 of SEQ ID NO: 1886341
cugucagaucugggaucuu

SEQ ID NO: 2403237 - RNA, 19 nt, Artificial Sequence
  Description of Artificial Sequence: Synthetic oligonucleotide
  Antisense strand to SEQ ID NO: 2403236
aagaucccagaucugacag

SEQ ID NO: 2403238 - RNA, 19 nt, Artificial Sequence
  Description of Artificial Sequence: Synthetic oligonucleotide
  Sense strand starting at position 3082 of SEQ ID NO: 1886341
augccaguuccugaucuca

SEQ ID NO: 2403239 - RNA, 19 nt, Artificial Sequence
  Description of Artificial Sequence: Synthetic oligonucleotide
  Antisense strand to SEQ ID NO: 2403238
ugagaucaggaacuggcau

SEQ ID NO: 2403240 - RNA, 19 nt, Artificial Sequence
  Description of Artificial Sequence: Synthetic oligonucleotide
  Sense strand starting at position 3125 of SEQ ID NO: 1886341
augacagacuucuugacuu

SEQ ID NO: 2403241 - RNA, 19 nt, Artificial Sequence
  Description of Artificial Sequence: Synthetic oligonucleotide
  Antisense strand to SEQ ID NO: 2403240
aagucaagaagucugucau

SEQ ID NO: 2403242 - RNA, 19 nt, Artificial Sequence
  Description of Artificial Sequence: Synthetic oligonucleotide
  Sense strand starting at position 3132 of SEQ ID NO: 1886341
acuucuugacuugacagua

SEQ ID NO: 2403243 - RNA, 19 nt, Artificial Sequence
  Description of Artificial Sequence: Synthetic oligonucleotide
  Antisense strand to SEQ ID NO: 2403242
uacugucaagucaagaagu

SEQ ID NO: 2403244 - RNA, 19 nt, Artificial Sequence
  Description of Artificial Sequence: Synthetic oligonucleotide
  Sense strand starting at position 3237 of SEQ ID NO: 1886341
auggauaagucacccauua

SEQ ID NO: 2403245 - RNA, 19 nt, Artificial Sequence
  Description of Artificial Sequence: Synthetic oligonucleotide
  Antisense strand to SEQ ID NO: 2403244
uaaugggugacuuauccau

SEQ ID NO: 2403246 - RNA, 19 nt, Artificial Sequence
  Description of Artificial Sequence: Synthetic oligonucleotide
  Sense strand starting at position 3459 of SEQ ID NO: 1886341
gcuuuaaggaucugggaga

SEQ ID NO: 2403247 - RNA, 19 nt, Artificial Sequence
  Description of Artificial Sequence: Synthetic oligonucleotide
  Antisense strand to SEQ ID NO: 2403246
ucucccagauccuuaaagc

SEQ ID NO: 2403248 - RNA, 19 nt, Artificial Sequence
  Description of Artificial Sequence: Synthetic oligonucleotide
  Sense strand starting at position 3593 of SEQ ID NO: 1886341
gguuuaauggaguggaaua

SEQ ID NO: 2403249 - RNA, 19 nt, Artificial Sequence
  Description of Artificial Sequence: Synthetic oligonucleotide
  Antisense strand to SEQ ID NO: 2403248
uauuccacuccauuaaacc

SEQ ID NO: 2403250 - RNA, 19 nt, Artificial Sequence
  Description of Artificial Sequence: Synthetic oligonucleotide
  Sense strand starting at position 3594 of SEQ ID NO: 1886341
guuuaauggaguggaauaa

SEQ ID NO: 2403251 - RNA, 19 nt, Artificial Sequence
  Description of Artificial Sequence: Synthetic oligonucleotide
  Antisense strand to SEQ ID NO: 2403250
uuauuccacuccauuaaac

SEQ ID NO: 2403252 - RNA, 19 nt, Artificial Sequence
  Description of Artificial Sequence: Synthetic oligonucleotide
  Sense strand starting at position 3682 of SEQ ID NO: 1886341
ggcacaaacuaugcuauua

SEQ ID NO: 2403253 - RNA, 19 nt, Artificial Sequence
  Description of Artificial Sequence: Synthetic oligonucleotide
  Antisense strand to SEQ ID NO: 2403252
uaauagcauaguuugugcc

SEQ ID NO: 2403254 - RNA, 19 nt, Artificial Sequence
  Description of Artificial Sequence: Synthetic oligonucleotide
  Sense strand starting at position 3701 of SEQ ID NO: 1886341
ggaauaugaugagaaggaa

SEQ ID NO: 2403255 - RNA, 19 nt, Artificial Sequence
  Description of Artificial Sequence: Synthetic oligonucleotide
  Antisense strand to SEQ ID NO: 2403254
uuccuucucaucauauucc

SEQ ID NO: 2403256 - RNA, 19 nt, Artificial Sequence
  Description of Artificial Sequence: Synthetic oligonucleotide
  Sense strand starting at position 3737 of SEQ ID NO: 1886341
guuggucuaagagguugau

SEQ ID NO: 2403257 - RNA, 19 nt, Artificial Sequence
  Description of Artificial Sequence: Synthetic oligonucleotide
  Antisense strand to SEQ ID NO: 2403256
aucaaccucuuagaccaac

SEQ ID NO: 2403258 - RNA, 19 nt, Artificial Sequence
  Description of Artificial Sequence: Synthetic oligonucleotide
  Sense strand starting at position 133 of SEQ ID NO: 1886343
uugauaaagcaaugagcuu

SEQ ID NO: 2403259 - RNA, 19 nt, Artificial Sequence
  Description of Artificial Sequence: Synthetic oligonucleotide
  Antisense strand to SEQ ID NO: 2403258
aagcucauugcuuuaucaa

SEQ ID NO: 2403260 - RNA, 19 nt, Artificial Sequence
  Description of Artificial Sequence: Synthetic oligonucleotide
  Sense strand starting at position 145 of SEQ ID NO: 1886343
ugagcuuacagauggguga

SEQ ID NO: 2403261 - RNA, 19 nt, Artificial Sequence
  Description of Artificial Sequence: Synthetic oligonucleotide
  Antisense strand to SEQ ID NO: 2403260
ucacccaucuguaagcuca

SEQ ID NO: 2403262 - RNA, 19 nt, Artificial Sequence
  Description of Artificial Sequence: Synthetic oligonucleotide
  Sense strand starting at position 146 of SEQ ID NO: 1886343
gagcuuacagaugggugaa

SEQ ID NO: 2403263 - RNA, 19 nt, Artificial Sequence
  Description of Artificial Sequence: Synthetic oligonucleotide
  Antisense strand to SEQ ID NO: 2403262
uucacccaucuguaagcuc

SEQ ID NO: 2403264 - RNA, 19 nt, Artificial Sequence
  Description of Artificial Sequence: Synthetic oligonucleotide
  Sense strand starting at position 147 of SEQ ID NO: 1886343
agcuuacagaugggugaau

SEQ ID NO: 2403265 - RNA, 19 nt, Artificial Sequence
  Description of Artificial Sequence: Synthetic oligonucleotide
  Antisense strand to SEQ ID NO: 2403264
auucacccaucuguaagcu

SEQ ID NO: 2403266 - RNA, 19 nt, Artificial Sequence
  Description of Artificial Sequence: Synthetic oligonucleotide
  Sense strand starting at position 148 of SEQ ID NO: 1886343
gcuuacagaugggugaauu

SEQ ID NO: 2403267 - RNA, 19 nt, Artificial Sequence
  Description of Artificial Sequence: Synthetic oligonucleotide
  Antisense strand to SEQ ID NO: 2403266
aauucacccaucuguaagc

SEQ ID NO: 2403268 - RNA, 19 nt, Artificial Sequence
  Description of Artificial Sequence: Synthetic oligonucleotide
  Sense strand starting at position 149 of SEQ ID NO: 1886343
cuuacagaugggugaauuc

SEQ ID NO: 2403269 - RNA, 19 nt, Artificial Sequence
  Description of Artificial Sequence: Synthetic oligonucleotide
  Antisense strand to SEQ ID NO: 2403268
gaauucacccaucuguaag

SEQ ID NO: 2403270 - RNA, 19 nt, Artificial Sequence
  Description of Artificial Sequence: Synthetic oligonucleotide
  Sense strand starting at position 156 of SEQ ID NO: 1886343
augggugaauuccugaaca

SEQ ID NO: 2403271 - RNA, 19 nt, Artificial Sequence
  Description of Artificial Sequence: Synthetic oligonucleotide
  Antisense strand to SEQ ID NO: 2403270
uguucaggaauucacccau

SEQ ID NO: 2403272 - RNA, 19 nt, Artificial Sequence
  Description of Artificial Sequence: Synthetic oligonucleotide
  Sense strand starting at position 170 of SEQ ID NO: 1886343
gaacaaauaucagacgaga

SEQ ID NO: 2403273 - RNA, 19 nt, Artificial Sequence
  Description of Artificial Sequence: Synthetic oligonucleotide
  Antisense strand to SEQ ID NO: 2403272
ucucgucugauauuuguuc

SEQ ID NO: 2403274 - RNA, 19 nt, Artificial Sequence
  Description of Artificial Sequence: Synthetic oligonucleotide
  Sense strand starting at position 172 of SEQ ID NO: 1886343
acaaauaucagacgagagu

SEQ ID NO: 2403275 - RNA, 19 nt, Artificial Sequence
  Description of Artificial Sequence: Synthetic oligonucleotide
  Antisense strand to SEQ ID NO: 2403274
acucucgucugauauuugu

SEQ ID NO: 2403276 - RNA, 19 nt, Artificial Sequence
  Description of Artificial Sequence: Synthetic oligonucleotide
  Sense strand starting at position 255 of SEQ ID NO: 1886343
ggcauuugggucuguugaa

SEQ ID NO: 2403277 - RNA, 19 nt, Artificial Sequence
  Description of Artificial Sequence: Synthetic oligonucleotide
  Antisense strand to SEQ ID NO: 2403276
uucaacagacccaaaugcc

SEQ ID NO: 2403278 - RNA, 19 nt, Artificial Sequence
  Description of Artificial Sequence: Synthetic oligonucleotide
  Sense strand starting at position 256 of SEQ ID NO: 1886343
gcauuugggucuguugaac

SEQ ID NO: 2403279 - RNA, 19 nt, Artificial Sequence
  Description of Artificial Sequence: Synthetic oligonucleotide
  Antisense strand to SEQ ID NO: 2403278
guucaacagacccaaaugc

SEQ ID NO: 2403280 - RNA, 19 nt, Artificial Sequence
  Description of Artificial Sequence: Synthetic oligonucleotide
  Sense strand starting at position 329 of SEQ ID NO: 1886343
aggcucucuacauguguga

SEQ ID NO: 2403281 - RNA, 19 nt, Artificial Sequence
  Description of Artificial Sequence: Synthetic oligonucleotide
  Antisense strand to SEQ ID NO: 2403280
ucacacauguagagagccu

SEQ ID NO: 2403282 - RNA, 19 nt, Artificial Sequence
  Description of Artificial Sequence: Synthetic oligonucleotide
  Sense strand starting at position 332 of SEQ ID NO: 1886343
cucucuacaugugugaaca

SEQ ID NO: 2403283 - RNA, 19 nt, Artificial Sequence
  Description of Artificial Sequence: Synthetic oligonucleotide
  Antisense strand to SEQ ID NO: 2403282
uguucacacauguagagag

SEQ ID NO: 2403284 - RNA, 19 nt, Artificial Sequence
  Description of Artificial Sequence: Synthetic oligonucleotide
  Sense strand starting at position 333 of SEQ ID NO: 1886343
ucucuacaugugugaacau

SEQ ID NO: 2403285 - RNA, 19 nt, Artificial Sequence
  Description of Artificial Sequence: Synthetic oligonucleotide
  Antisense strand to SEQ ID NO: 2403284
auguucacacauguagaga

SEQ ID NO: 2403286 - RNA, 19 nt, Artificial Sequence
  Description of Artificial Sequence: Synthetic oligonucleotide
  Sense strand starting at position 342 of SEQ ID NO: 1886343
gugugaacaugauccaaca

SEQ ID NO: 2403287 - RNA, 19 nt, Artificial Sequence
  Description of Artificial Sequence: Synthetic oligonucleotide
  Antisense strand to SEQ ID NO: 2403286
uguuggaucauguucacac

SEQ ID NO: 2403288 - RNA, 19 nt, Artificial Sequence
  Description of Artificial Sequence: Synthetic oligonucleotide
  Sense strand starting at position 490 of SEQ ID NO: 1886343
ccagaugucugauucuggu

SEQ ID NO: 2403289 - RNA, 19 nt, Artificial Sequence
  Description of Artificial Sequence: Synthetic oligonucleotide
  Antisense strand to SEQ ID NO: 2403288
accagaaucagacaucugg

SEQ ID NO: 2403290 - RNA, 19 nt, Artificial Sequence
  Description of Artificial Sequence: Synthetic oligonucleotide
  Sense strand starting at position 544 of SEQ ID NO: 1886343
ggcacugggcccugagaua

SEQ ID NO: 2403291 - RNA, 19 nt, Artificial Sequence
  Description of Artificial Sequence: Synthetic oligonucleotide
  Antisense strand to SEQ ID NO: 2403290
uaucucagggcccagugcc

SEQ ID NO: 2403292 - RNA, 19 nt, Artificial Sequence
  Description of Artificial Sequence: Synthetic oligonucleotide
  Sense strand starting at position 582 of SEQ ID NO: 1886343
ggacuaugugagggcuucu

SEQ ID NO: 2403293 - RNA, 19 nt, Artificial Sequence
  Description of Artificial Sequence: Synthetic oligonucleotide
  Antisense strand to SEQ ID NO: 2403292
agaagcccucacauagucc

SEQ ID NO: 2403294 - RNA, 19 nt, Artificial Sequence
  Description of Artificial Sequence: Synthetic oligonucleotide
  Sense strand starting at position 593 of SEQ ID NO: 1886343
gggcuucucuggguccaaa

SEQ ID NO: 2403295 - RNA, 19 nt, Artificial Sequence
  Description of Artificial Sequence: Synthetic oligonucleotide
  Antisense strand to SEQ ID NO: 2403294
uuuggacccagagaagccc

SEQ ID NO: 2403296 - RNA, 19 nt, Artificial Sequence
  Description of Artificial Sequence: Synthetic oligonucleotide
  Sense strand starting at position 846 of SEQ ID NO: 1886343
acaggagaccucggcuaga

SEQ ID NO: 2403297 - RNA, 19 nt, Artificial Sequence
  Description of Artificial Sequence: Synthetic oligonucleotide
  Antisense strand to SEQ ID NO: 2403296
ucuagccgaggucuccugu

SEQ ID NO: 2403298 - RNA, 19 nt, Artificial Sequence
  Description of Artificial Sequence: Synthetic oligonucleotide
  Sense strand starting at position 964 of SEQ ID NO: 1886343
ucagcugaucacuguuaag

SEQ ID NO: 2403299 - RNA, 19 nt, Artificial Sequence
  Description of Artificial Sequence: Synthetic oligonucleotide
  Antisense strand to SEQ ID NO: 2403298
cuuaacagugaucagcuga

SEQ ID NO: 2403300 - RNA, 19 nt, Artificial Sequence
  Description of Artificial Sequence: Synthetic oligonucleotide
  Sense strand starting at position 986 of SEQ ID NO: 1886343
ucauuucucucuggaaagg

SEQ ID NO: 2403301 - RNA, 19 nt, Artificial Sequence
  Description of Artificial Sequence: Synthetic oligonucleotide
  Antisense strand to SEQ ID NO: 2403300
ccuuuccagagagaaauga

SEQ ID NO: 2403302 - RNA, 19 nt, Artificial Sequence
  Description of Artificial Sequence: Synthetic oligonucleotide
  Sense strand starting at position 1425 of SEQ ID NO: 1886343
cuacuugaucuccguaacu

SEQ ID NO: 2403303 - RNA, 19 nt, Artificial Sequence
  Description of Artificial Sequence: Synthetic oligonucleotide
  Antisense strand to SEQ ID NO: 2403302
aguuacggagaucaaguag

SEQ ID NO: 2403304 - RNA, 19 nt, Artificial Sequence
  Description of Artificial Sequence: Synthetic oligonucleotide
  Sense strand starting at position 1427 of SEQ ID NO: 1886343
acuugaucuccguaacuuu

SEQ ID NO: 2403305 - RNA, 19 nt, Artificial Sequence
  Description of Artificial Sequence: Synthetic oligonucleotide
  Antisense strand to SEQ ID NO: 2403304
aaaguuacggagaucaagu

SEQ ID NO: 2403306 - RNA, 19 nt, Artificial Sequence
  Description of Artificial Sequence: Synthetic oligonucleotide
  Sense strand starting at position 1500 of SEQ ID NO: 1886343
uuguguauuugucucuuga

SEQ ID NO: 2403307 - RNA, 19 nt, Artificial Sequence
  Description of Artificial Sequence: Synthetic oligonucleotide
  Antisense strand to SEQ ID NO: 2403306
ucaagagacaaauacacaa

SEQ ID NO: 2403308 - RNA, 19 nt, Artificial Sequence
  Description of Artificial Sequence: Synthetic oligonucleotide
  Sense strand starting at position 1502 of SEQ ID NO: 1886343
guguauuugucucuugaug

SEQ ID NO: 2403309 - RNA, 19 nt, Artificial Sequence
  Description of Artificial Sequence: Synthetic oligonucleotide
  Antisense strand to SEQ ID NO: 2403308
caucaagagacaaauacac

SEQ ID NO: 2403310 - RNA, 19 nt, Artificial Sequence
  Description of Artificial Sequence: Synthetic oligonucleotide
  Sense strand starting at position 1848 of SEQ ID NO: 1886343
gaggaagccucacugcuau

SEQ ID NO: 2403311 - RNA, 19 nt, Artificial Sequence
  Description of Artificial Sequence: Synthetic oligonucleotide
  Antisense strand to SEQ ID NO: 2403310
auagcagugaggcuuccuc

SEQ ID NO: 2403312 - RNA, 19 nt, Artificial Sequence
  Description of Artificial Sequence: Synthetic oligonucleotide
  Sense strand starting at position 2474 of SEQ ID NO: 1886343
auuucuuugugggaagaca

SEQ ID NO: 2403313 - RNA, 19 nt, Artificial Sequence
  Description of Artificial Sequence: Synthetic oligonucleotide
  Antisense strand to SEQ ID NO: 2403312
ugucuucccacaaagaaau

SEQ ID NO: 2403314 - RNA, 19 nt, Artificial Sequence
  Description of Artificial Sequence: Synthetic oligonucleotide
  Sense strand starting at position 2796 of SEQ ID NO: 1886343
cccuguguucucuucugca

SEQ ID NO: 2403315 - RNA, 19 nt, Artificial Sequence
  Description of Artificial Sequence: Synthetic oligonucleotide
  Antisense strand to SEQ ID NO: 2403314
ugcagaagagaacacaggg

SEQ ID NO: 2403316 - RNA, 19 nt, Artificial Sequence
  Description of Artificial Sequence: Synthetic oligonucleotide
  Sense strand starting at position 3122 of SEQ ID NO: 1886343
agugcugcucgugcauauu

SEQ ID NO: 2403317 - RNA, 19 nt, Artificial Sequence
  Description of Artificial Sequence: Synthetic oligonucleotide
  Antisense strand to SEQ ID NO: 2403316
aauaugcacgagcagcacu

SEQ ID NO: 2403318 - RNA, 19 nt, Artificial Sequence
  Description of Artificial Sequence: Synthetic oligonucleotide
  Sense strand starting at position 3171 of SEQ ID NO: 1886343
cguauucuccuuuaagaag

SEQ ID NO: 2403319 - RNA, 19 nt, Artificial Sequence
  Description of Artificial Sequence: Synthetic oligonucleotide
  Antisense strand to SEQ ID NO: 2403318
cuucuuaaaggagaauacg

SEQ ID NO: 2403320 - RNA, 19 nt, Artificial Sequence
  Description of Artificial Sequence: Synthetic oligonucleotide
  Sense strand starting at position 3187 of SEQ ID NO: 1886343
aaguguaaaccagacgagu

SEQ ID NO: 2403321 - RNA, 19 nt, Artificial Sequence
  Description of Artificial Sequence: Synthetic oligonucleotide
  Antisense strand to SEQ ID NO: 2403320
acucgucugguuuacacuu

SEQ ID NO: 2403322 - RNA, 19 nt, Artificial Sequence
  Description of Artificial Sequence: Synthetic oligonucleotide
  Sense strand starting at position 3198 of SEQ ID NO: 1886343
agacgagucucuucgguga

SEQ ID NO: 2403323 - RNA, 19 nt, Artificial Sequence
  Description of Artificial Sequence: Synthetic oligonucleotide
  Antisense strand to SEQ ID NO: 2403322
ucaccgaagagacucgucu

SEQ ID NO: 2403324 - RNA, 19 nt, Artificial Sequence
  Description of Artificial Sequence: Synthetic oligonucleotide
  Sense strand starting at position 3203 of SEQ ID NO: 1886343
agucucuucggugauagcu

SEQ ID NO: 2403325 - RNA, 19 nt, Artificial Sequence
  Description of Artificial Sequence: Synthetic oligonucleotide
  Antisense strand to SEQ ID NO: 2403324
agcuaucaccgaagagacu

SEQ ID NO: 2403326 - RNA, 19 nt, Artificial Sequence
  Description of Artificial Sequence: Synthetic oligonucleotide
  Sense strand starting at position 3213 of SEQ ID NO: 1886343
gugauagcucaaggcauag

SEQ ID NO: 2403327 - RNA, 19 nt, Artificial Sequence
  Description of Artificial Sequence: Synthetic oligonucleotide
  Antisense strand to SEQ ID NO: 2403326
cuaugccuugagcuaucac

SEQ ID NO: 2403328 - RNA, 19 nt, Artificial Sequence
  Description of Artificial Sequence: Synthetic oligonucleotide
  Sense strand starting at position 3373 of SEQ ID NO: 1886343
uuggaauggcagcaucauu

SEQ ID NO: 2403329 - RNA, 19 nt, Artificial Sequence
  Description of Artificial Sequence: Synthetic oligonucleotide
  Antisense strand to SEQ ID NO: 2403328
aaugaugcugccauuccaa

SEQ ID NO: 2403330 - RNA, 19 nt, Artificial Sequence
  Description of Artificial Sequence: Synthetic oligonucleotide
  Sense strand starting at position 3394 of SEQ ID NO: 1886343
gcagcuucucggucagcau

SEQ ID NO: 2403331 - RNA, 19 nt, Artificial Sequence
  Description of Artificial Sequence: Synthetic oligonucleotide
  Antisense strand to SEQ ID NO: 2403330
augcugaccgagaagcugc

SEQ ID NO: 2403332 - RNA, 19 nt, Artificial Sequence
  Description of Artificial Sequence: Synthetic oligonucleotide
  Sense strand starting at position 3491 of SEQ ID NO: 1886343
ccaaauguguucuccagau

SEQ ID NO: 2403333 - RNA, 19 nt, Artificial Sequence
  Description of Artificial Sequence: Synthetic oligonucleotide
  Antisense strand to SEQ ID NO: 2403332
aucuggagaacacauuugg

SEQ ID NO: 2403334 - RNA, 19 nt, Artificial Sequence
  Description of Artificial Sequence: Synthetic oligonucleotide
  Sense strand starting at position 3495 of SEQ ID NO: 1886343
auguguucuccagauaacc

SEQ ID NO: 2403335 - RNA, 19 nt, Artificial Sequence
  Description of Artificial Sequence: Synthetic oligonucleotide
  Antisense strand to SEQ ID NO: 2403334
gguuaucuggagaacacau

SEQ ID NO: 2403336 - RNA, 19 nt, Artificial Sequence
  Description of Artificial Sequence: Synthetic oligonucleotide
  Sense strand starting at position 3591 of SEQ ID NO: 1886343
caucaucugggaugucuuu

SEQ ID NO: 2403337 - RNA, 19 nt, Artificial Sequence
  Description of Artificial Sequence: Synthetic oligonucleotide
  Antisense strand to SEQ ID NO: 2403336
aaagacaucccagaugaug

SEQ ID NO: 2403338 - RNA, 19 nt, Artificial Sequence
  Description of Artificial Sequence: Synthetic oligonucleotide
  Sense strand starting at position 156 of SEQ ID NO: 1886342
aacagacuguaguuaagau

SEQ ID NO: 2403339 - RNA, 19 nt, Artificial Sequence
  Description of Artificial Sequence: Synthetic oligonucleotide
  Antisense strand to SEQ ID NO: 2403338
aucuuaacuacagucuguu

SEQ ID NO: 2403340 - RNA, 19 nt, Artificial Sequence
  Description of Artificial Sequence: Synthetic oligonucleotide
  Sense strand starting at position 164 of SEQ ID NO: 1886342
guaguuaagaugcagaucu

SEQ ID NO: 2403341 - RNA, 19 nt, Artificial Sequence
  Description of Artificial Sequence: Synthetic oligonucleotide
  Antisense strand to SEQ ID NO: 2403340
agaucugcaucuuaacuac

SEQ ID NO: 2403342 - RNA, 19 nt, Artificial Sequence
  Description of Artificial Sequence: Synthetic oligonucleotide
  Sense strand starting at position 166 of SEQ ID NO: 1886342
aguuaagaugcagaucuuu

SEQ ID NO: 2403343 - RNA, 19 nt, Artificial Sequence
  Description of Artificial Sequence: Synthetic oligonucleotide
  Antisense strand to SEQ ID NO: 2403342
aaagaucugcaucuuaacu

SEQ ID NO: 2403344 - RNA, 19 nt, Artificial Sequence
  Description of Artificial Sequence: Synthetic oligonucleotide
  Sense strand starting at position 607 of SEQ ID NO: 1886342
cucaauccucuuuggguga

SEQ ID NO: 2403345 - RNA, 19 nt, Artificial Sequence
  Description of Artificial Sequence: Synthetic oligonucleotide
  Antisense strand to SEQ ID NO: 2403344
ucacccaaagaggauugag

SEQ ID NO: 2403346 - RNA, 19 nt, Artificial Sequence
  Description of Artificial Sequence: Synthetic oligonucleotide
  Sense strand starting at position 651 of SEQ ID NO: 1886342
gcuguuagccuuguccuga

SEQ ID NO: 2403347 - RNA, 19 nt, Artificial Sequence
  Description of Artificial Sequence: Synthetic oligonucleotide
  Antisense strand to SEQ ID NO: 2403346
ucaggacaaggcuaacagc

SEQ ID NO: 2403348 - RNA, 19 nt, Artificial Sequence
  Description of Artificial Sequence: Synthetic oligonucleotide
  Sense strand starting at position 675 of SEQ ID NO: 1886342
cucugacucugguuuccua

SEQ ID NO: 2403349 - RNA, 19 nt, Artificial Sequence
  Description of Artificial Sequence: Synthetic oligonucleotide
  Antisense strand to SEQ ID NO: 2403348
uaggaaaccagagucagag

SEQ ID NO: 2403350 - RNA, 19 nt, Artificial Sequence
  Description of Artificial Sequence: Synthetic oligonucleotide
  Sense strand starting at position 865 of SEQ ID NO: 1886342
guggguauuuaagacugau

SEQ ID NO: 2403351 - RNA, 19 nt, Artificial Sequence
  Description of Artificial Sequence: Synthetic oligonucleotide
  Antisense strand to SEQ ID NO: 2403350
aucagucuuaaauacccac

SEQ ID NO: 2403352 - RNA, 19 nt, Artificial Sequence
  Description of Artificial Sequence: Synthetic oligonucleotide
  Sense strand starting at position 1316 of SEQ ID NO: 1886342
aguccauauggccaucaga

SEQ ID NO: 2403353 - RNA, 19 nt, Artificial Sequence
  Description of Artificial Sequence: Synthetic oligonucleotide
  Antisense strand to SEQ ID NO: 2403352
ucugauggccauauggacu

SEQ ID NO: 2403354 - RNA, 19 nt, Artificial Sequence
  Description of Artificial Sequence: Synthetic oligonucleotide
  Sense strand starting at position 1345 of SEQ ID NO: 1886342
accugaggucuccagcauu

SEQ ID NO: 2403355 - RNA, 19 nt, Artificial Sequence
  Description of Artificial Sequence: Synthetic oligonucleotide
  Antisense strand to SEQ ID NO: 2403354
aaugcuggagaccucaggu

SEQ ID NO: 2403356 - RNA, 19 nt, Artificial Sequence
  Description of Artificial Sequence: Synthetic oligonucleotide
  Sense strand starting at position 1469 of SEQ ID NO: 1886342
gauuaauaggugugaguau

SEQ ID NO: 2403357 - RNA, 19 nt, Artificial Sequence
  Description of Artificial Sequence: Synthetic oligonucleotide
  Antisense strand to SEQ ID NO: 2403356
auacucacaccuauuaauc

SEQ ID NO: 2403358 - RNA, 19 nt, Artificial Sequence
  Description of Artificial Sequence: Synthetic oligonucleotide
  Sense strand starting at position 1524 of SEQ ID NO: 1886342
agaacuuucugguuuccaa

SEQ ID NO: 2403359 - RNA, 19 nt, Artificial Sequence
  Description of Artificial Sequence: Synthetic oligonucleotide
  Antisense strand to SEQ ID NO: 2403358
uuggaaaccagaaaguucu

SEQ ID NO: 2403360 - RNA, 19 nt, Artificial Sequence
  Description of Artificial Sequence: Synthetic oligonucleotide
  Sense strand starting at position 1605 of SEQ ID NO: 1886342
auguuaacuuucucccagu

SEQ ID NO: 2403361 - RNA, 19 nt, Artificial Sequence
  Description of Artificial Sequence: Synthetic oligonucleotide
  Antisense strand to SEQ ID NO: 2403360
acugggagaaaguuaacau

SEQ ID NO: 2403362 - RNA, 19 nt, Artificial Sequence
  Description of Artificial Sequence: Synthetic oligonucleotide
  Sense strand starting at position 1606 of SEQ ID NO: 1886342
uguuaacuuucucccagua

SEQ ID NO: 2403363 - RNA, 19 nt, Artificial Sequence
  Description of Artificial Sequence: Synthetic oligonucleotide
  Antisense strand to SEQ ID NO: 2403362
uacugggagaaaguuaaca

SEQ ID NO: 2403364 - RNA, 19 nt, Artificial Sequence
  Description of Artificial Sequence: Synthetic oligonucleotide
  Sense strand starting at position 1658 of SEQ ID NO: 1886342
guaugucuaccugagccau

SEQ ID NO: 2403365 - RNA, 19 nt, Artificial Sequence
  Description of Artificial Sequence: Synthetic oligonucleotide
  Antisense strand to SEQ ID NO: 2403364
auggcucagguagacauac

SEQ ID NO: 2403366 - RNA, 19 nt, Artificial Sequence
  Description of Artificial Sequence: Synthetic oligonucleotide
  Sense strand starting at position 1679 of SEQ ID NO: 1886342
gccugcauccuguauuucu

SEQ ID NO: 2403367 - RNA, 19 nt, Artificial Sequence
  Description of Artificial Sequence: Synthetic oligonucleotide
  Antisense strand to SEQ ID NO: 2403366
agaaauacaggaugcaggc

SEQ ID NO: 2403368 - RNA, 19 nt, Artificial Sequence
  Description of Artificial Sequence: Synthetic oligonucleotide
  Sense strand starting at position 1816 of SEQ ID NO: 1886342
uugauaaagcaaugagcuu

SEQ ID NO: 2403369 - RNA, 19 nt, Artificial Sequence
  Description of Artificial Sequence: Synthetic oligonucleotide
  Antisense strand to SEQ ID NO: 2403368
aagcucauugcuuuaucaa

SEQ ID NO: 2403370 - RNA, 19 nt, Artificial Sequence
  Description of Artificial Sequence: Synthetic oligonucleotide
  Sense strand starting at position 1828 of SEQ ID NO: 1886342
ugagcuuacagauggguga

SEQ ID NO: 2403371 - RNA, 19 nt, Artificial Sequence
  Description of Artificial Sequence: Synthetic oligonucleotide
  Antisense strand to SEQ ID NO: 2403370
ucacccaucuguaagcuca

SEQ ID NO: 2403372 - RNA, 19 nt, Artificial Sequence
  Description of Artificial Sequence: Synthetic oligonucleotide
  Sense strand starting at position 1829 of SEQ ID NO: 1886342
gagcuuacagaugggugaa

SEQ ID NO: 2403373 - RNA, 19 nt, Artificial Sequence
  Description of Artificial Sequence: Synthetic oligonucleotide
  Antisense strand to SEQ ID NO: 2403372
uucacccaucuguaagcuc

SEQ ID NO: 2403374 - RNA, 19 nt, Artificial Sequence
  Description of Artificial Sequence: Synthetic oligonucleotide
  Sense strand starting at position 1830 of SEQ ID NO: 1886342
agcuuacagaugggugaau

SEQ ID NO: 2403375 - RNA, 19 nt, Artificial Sequence
  Description of Artificial Sequence: Synthetic oligonucleotide
  Antisense strand to SEQ ID NO: 2403374
auucacccaucuguaagcu

SEQ ID NO: 2403376 - RNA, 19 nt, Artificial Sequence
  Description of Artificial Sequence: Synthetic oligonucleotide
  Sense strand starting at position 1831 of SEQ ID NO: 1886342
gcuuacagaugggugaauu

SEQ ID NO: 2403377 - RNA, 19 nt, Artificial Sequence
  Description of Artificial Sequence: Synthetic oligonucleotide
  Antisense strand to SEQ ID NO: 2403376
aauucacccaucuguaagc

SEQ ID NO: 2403378 - RNA, 19 nt, Artificial Sequence
  Description of Artificial Sequence: Synthetic oligonucleotide
  Sense strand starting at position 1832 of SEQ ID NO: 1886342
cuuacagaugggugaauuc

SEQ ID NO: 2403379 - RNA, 19 nt, Artificial Sequence
  Description of Artificial Sequence: Synthetic oligonucleotide
  Antisense strand to SEQ ID NO: 2403378
gaauucacccaucuguaag

SEQ ID NO: 2403380 - RNA, 19 nt, Artificial Sequence
  Description of Artificial Sequence: Synthetic oligonucleotide
  Sense strand starting at position 1839 of SEQ ID NO: 1886342
augggugaauuccugaaca

SEQ ID NO: 2403381 - RNA, 19 nt, Artificial Sequence
  Description of Artificial Sequence: Synthetic oligonucleotide
  Antisense strand to SEQ ID NO: 2403380
uguucaggaauucacccau

SEQ ID NO: 2403382 - RNA, 19 nt, Artificial Sequence
  Description of Artificial Sequence: Synthetic oligonucleotide
  Sense strand starting at position 1853 of SEQ ID NO: 1886342
gaacaaauaucagacgaga

SEQ ID NO: 2403383 - RNA, 19 nt, Artificial Sequence
  Description of Artificial Sequence: Synthetic oligonucleotide
  Antisense strand to SEQ ID NO: 2403382
ucucgucugauauuuguuc

SEQ ID NO: 2403384 - RNA, 19 nt, Artificial Sequence
  Description of Artificial Sequence: Synthetic oligonucleotide
  Sense strand starting at position 1855 of SEQ ID NO: 1886342
acaaauaucagacgagagu

SEQ ID NO: 2403385 - RNA, 19 nt, Artificial Sequence
  Description of Artificial Sequence: Synthetic oligonucleotide
  Antisense strand to SEQ ID NO: 2403384
acucucgucugauauuugu

SEQ ID NO: 2403386 - RNA, 19 nt, Artificial Sequence
  Description of Artificial Sequence: Synthetic oligonucleotide
  Sense strand starting at position 1938 of SEQ ID NO: 1886342
ggcauuugggucuguugaa

SEQ ID NO: 2403387 - RNA, 19 nt, Artificial Sequence
  Description of Artificial Sequence: Synthetic oligonucleotide
  Antisense strand to SEQ ID NO: 2403386
uucaacagacccaaaugcc

SEQ ID NO: 2403388 - RNA, 19 nt, Artificial Sequence
  Description of Artificial Sequence: Synthetic oligonucleotide
  Sense strand starting at position 1939 of SEQ ID NO: 1886342
gcauuugggucuguugaac

SEQ ID NO: 2403389 - RNA, 19 nt, Artificial Sequence
  Description of Artificial Sequence: Synthetic oligonucleotide
  Antisense strand to SEQ ID NO: 2403388
guucaacagacccaaaugc

SEQ ID NO: 2403390 - RNA, 19 nt, Artificial Sequence
  Description of Artificial Sequence: Synthetic oligonucleotide
  Sense strand starting at position 2015 of SEQ ID NO: 1886342
cucucuacaugugugaaca

SEQ ID NO: 2403391 - RNA, 19 nt, Artificial Sequence
  Description of Artificial Sequence: Synthetic oligonucleotide
  Antisense strand to SEQ ID NO: 2403390
uguucacacauguagagag

SEQ ID NO: 2403392 - RNA, 19 nt, Artificial Sequence
  Description of Artificial Sequence: Synthetic oligonucleotide
  Sense strand starting at position 2016 of SEQ ID NO: 1886342
ucucuacaugugugaacau

SEQ ID NO: 2403393 - RNA, 19 nt, Artificial Sequence
  Description of Artificial Sequence: Synthetic oligonucleotide
  Antisense strand to SEQ ID NO: 2403392
auguucacacauguagaga

SEQ ID NO: 2403394 - RNA, 19 nt, Artificial Sequence
  Description of Artificial Sequence: Synthetic oligonucleotide
  Sense strand starting at position 2025 of SEQ ID NO: 1886342
gugugaacaugauccaaca

SEQ ID NO: 2403395 - RNA, 19 nt, Artificial Sequence
  Description of Artificial Sequence: Synthetic oligonucleotide
  Antisense strand to SEQ ID NO: 2403394
uguuggaucauguucacac

SEQ ID NO: 2403396 - RNA, 19 nt, Artificial Sequence
  Description of Artificial Sequence: Synthetic oligonucleotide
  Sense strand starting at position 2173 of SEQ ID NO: 1886342
ccagaugucugauucuggu

SEQ ID NO: 2403397 - RNA, 19 nt, Artificial Sequence
  Description of Artificial Sequence: Synthetic oligonucleotide
  Antisense strand to SEQ ID NO: 2403396
accagaaucagacaucugg

SEQ ID NO: 2403398 - RNA, 19 nt, Artificial Sequence
  Description of Artificial Sequence: Synthetic oligonucleotide
  Sense strand starting at position 2227 of SEQ ID NO: 1886342
ggcacugggcccugagaua

SEQ ID NO: 2403399 - RNA, 19 nt, Artificial Sequence
  Description of Artificial Sequence: Synthetic oligonucleotide
  Antisense strand to SEQ ID NO: 2403398
uaucucagggcccagugcc

SEQ ID NO: 2403400 - RNA, 19 nt, Artificial Sequence
  Description of Artificial Sequence: Synthetic oligonucleotide
  Sense strand starting at position 2265 of SEQ ID NO: 1886342
ggacuaugugagggcuucu

SEQ ID NO: 2403401 - RNA, 19 nt, Artificial Sequence
  Description of Artificial Sequence: Synthetic oligonucleotide
  Antisense strand to SEQ ID NO: 2403400
agaagcccucacauagucc

SEQ ID NO: 2403402 - RNA, 19 nt, Artificial Sequence
  Description of Artificial Sequence: Synthetic oligonucleotide
  Sense strand starting at position 2276 of SEQ ID NO: 1886342
gggcuucucuggguccaaa

SEQ ID NO: 2403403 - RNA, 19 nt, Artificial Sequence
  Description of Artificial Sequence: Synthetic oligonucleotide
  Antisense strand to SEQ ID NO: 2403402
uuuggacccagagaagccc

SEQ ID NO: 2403404 - RNA, 19 nt, Artificial Sequence
  Description of Artificial Sequence: Synthetic oligonucleotide
  Sense strand starting at position 2529 of SEQ ID NO: 1886342
acaggagaccucggcuaga

SEQ ID NO: 2403405 - RNA, 19 nt, Artificial Sequence
  Description of Artificial Sequence: Synthetic oligonucleotide
  Antisense strand to SEQ ID NO: 2403404
ucuagccgaggucuccugu

SEQ ID NO: 2403406 - RNA, 19 nt, Artificial Sequence
  Description of Artificial Sequence: Synthetic oligonucleotide
  Sense strand starting at position 2647 of SEQ ID NO: 1886342
ucagcugaucacuguuaag

SEQ ID NO: 2403407 - RNA, 19 nt, Artificial Sequence
  Description of Artificial Sequence: Synthetic oligonucleotide
  Antisense strand to SEQ ID NO: 2403406
cuuaacagugaucagcuga

SEQ ID NO: 2403408 - RNA, 19 nt, Artificial Sequence
  Description of Artificial Sequence: Synthetic oligonucleotide
  Sense strand starting at position 2669 of SEQ ID NO: 1886342
ucauuucucucuggaaagg

SEQ ID NO: 2403409 - RNA, 19 nt, Artificial Sequence
  Description of Artificial Sequence: Synthetic oligonucleotide
  Antisense strand to SEQ ID NO: 2403408
ccuuuccagagagaaauga

SEQ ID NO: 2403410 - RNA, 19 nt, Artificial Sequence
  Description of Artificial Sequence: Synthetic oligonucleotide
  Sense strand starting at position 3110 of SEQ ID NO: 1886342
acuugaucuccguaacuuu

SEQ ID NO: 2403411 - RNA, 19 nt, Artificial Sequence
  Description of Artificial Sequence: Synthetic oligonucleotide
  Antisense strand to SEQ ID NO: 2403410
aaaguuacggagaucaagu

SEQ ID NO: 2403412 - RNA, 19 nt, Artificial Sequence
  Description of Artificial Sequence: Synthetic oligonucleotide
  Sense strand starting at position 3183 of SEQ ID NO: 1886342
uuguguauuugucucuuga

SEQ ID NO: 2403413 - RNA, 19 nt, Artificial Sequence
  Description of Artificial Sequence: Synthetic oligonucleotide
  Antisense strand to SEQ ID NO: 2403412
ucaagagacaaauacacaa

SEQ ID NO: 2403414 - RNA, 19 nt, Artificial Sequence
  Description of Artificial Sequence: Synthetic oligonucleotide
  Sense strand starting at position 3185 of SEQ ID NO: 1886342
guguauuugucucuugaug

SEQ ID NO: 2403415 - RNA, 19 nt, Artificial Sequence
  Description of Artificial Sequence: Synthetic oligonucleotide
  Antisense strand to SEQ ID NO: 2403414
caucaagagacaaauacac

SEQ ID NO: 2403416 - RNA, 19 nt, Artificial Sequence
  Description of Artificial Sequence: Synthetic oligonucleotide
  Sense strand starting at position 3531 of SEQ ID NO: 1886342
gaggaagccucacugcuau

SEQ ID NO: 2403417 - RNA, 19 nt, Artificial Sequence
  Description of Artificial Sequence: Synthetic oligonucleotide
  Antisense strand to SEQ ID NO: 2403416
auagcagugaggcuuccuc

SEQ ID NO: 2403418 - RNA, 19 nt, Artificial Sequence
  Description of Artificial Sequence: Synthetic oligonucleotide
  Sense strand starting at position 131 of SEQ ID NO: 1886344
cccuuagaaagguggcauu

SEQ ID NO: 2403419 - RNA, 19 nt, Artificial Sequence
  Description of Artificial Sequence: Synthetic oligonucleotide
  Antisense strand to SEQ ID NO: 2403418
aaugccaccuuucuaaggg

SEQ ID NO: 2403420 - RNA, 19 nt, Artificial Sequence
  Description of Artificial Sequence: Synthetic oligonucleotide
  Sense strand starting at position 181 of SEQ ID NO: 1886344
gaggacuucucaguauuaa

SEQ ID NO: 2403421 - RNA, 19 nt, Artificial Sequence
  Description of Artificial Sequence: Synthetic oligonucleotide
  Antisense strand to SEQ ID NO: 2403420
uuaauacugagaaguccuc

SEQ ID NO: 2403422 - RNA, 19 nt, Artificial Sequence
  Description of Artificial Sequence: Synthetic oligonucleotide
  Sense strand starting at position 326 of SEQ ID NO: 1886344
gaagaacacuccuuagguu

SEQ ID NO: 2403423 - RNA, 19 nt, Artificial Sequence
  Description of Artificial Sequence: Synthetic oligonucleotide
  Antisense strand to SEQ ID NO: 2403422
aaccuaaggaguguucuuc

SEQ ID NO: 2403424 - RNA, 19 nt, Artificial Sequence
  Description of Artificial Sequence: Synthetic oligonucleotide
  Sense strand starting at position 417 of SEQ ID NO: 1886344
gauaacuuguccuuagguu

SEQ ID NO: 2403425 - RNA, 19 nt, Artificial Sequence
  Description of Artificial Sequence: Synthetic oligonucleotide
  Antisense strand to SEQ ID NO: 2403424
aaccuaaggacaaguuauc

SEQ ID NO: 2403426 - RNA, 19 nt, Artificial Sequence
  Description of Artificial Sequence: Synthetic oligonucleotide
  Sense strand starting at position 418 of SEQ ID NO: 1886344
auaacuuguccuuagguuu

SEQ ID NO: 2403427 - RNA, 19 nt, Artificial Sequence
  Description of Artificial Sequence: Synthetic oligonucleotide
  Antisense strand to SEQ ID NO: 2403426
aaaccuaaggacaaguuau

SEQ ID NO: 2403428 - RNA, 19 nt, Artificial Sequence
  Description of Artificial Sequence: Synthetic oligonucleotide
  Sense strand starting at position 546 of SEQ ID NO: 1886344
ucaugcagucaguauccua

SEQ ID NO: 2403429 - RNA, 19 nt, Artificial Sequence
  Description of Artificial Sequence: Synthetic oligonucleotide
  Antisense strand to SEQ ID NO: 2403428
uaggauacugacugcauga

SEQ ID NO: 2403430 - RNA, 19 nt, Artificial Sequence
  Description of Artificial Sequence: Synthetic oligonucleotide
  Sense strand starting at position 553 of SEQ ID NO: 1886344
gucaguauccuacacuaau

SEQ ID NO: 2403431 - RNA, 19 nt, Artificial Sequence
  Description of Artificial Sequence: Synthetic oligonucleotide
  Antisense strand to SEQ ID NO: 2403430
auuaguguaggauacugac

SEQ ID NO: 2403432 - RNA, 19 nt, Artificial Sequence
  Description of Artificial Sequence: Synthetic oligonucleotide
  Sense strand starting at position 659 of SEQ ID NO: 1886344
agggcucuugacuaaaugu

SEQ ID NO: 2403433 - RNA, 19 nt, Artificial Sequence
  Description of Artificial Sequence: Synthetic oligonucleotide
  Antisense strand to SEQ ID NO: 2403432
acauuuagucaagagcccu

SEQ ID NO: 2403434 - RNA, 19 nt, Artificial Sequence
  Description of Artificial Sequence: Synthetic oligonucleotide
  Sense strand starting at position 730 of SEQ ID NO: 1886344
ccacaaagauaaggaaaua

SEQ ID NO: 2403435 - RNA, 19 nt, Artificial Sequence
  Description of Artificial Sequence: Synthetic oligonucleotide
  Antisense strand to SEQ ID NO: 2403434
uauuuccuuaucuuugugg

SEQ ID NO: 2403436 - RNA, 19 nt, Artificial Sequence
  Description of Artificial Sequence: Synthetic oligonucleotide
  Sense strand starting at position 835 of SEQ ID NO: 1886344
cuuacaguacuacgaauaa

SEQ ID NO: 2403437 - RNA, 19 nt, Artificial Sequence
  Description of Artificial Sequence: Synthetic oligonucleotide
  Antisense strand to SEQ ID NO: 2403436
uuauucguaguacuguaag

SEQ ID NO: 2403438 - RNA, 19 nt, Artificial Sequence
  Description of Artificial Sequence: Synthetic oligonucleotide
  Sense strand starting at position 877 of SEQ ID NO: 1886344
ccacaagagcuuuagcaga

SEQ ID NO: 2403439 - RNA, 19 nt, Artificial Sequence
  Description of Artificial Sequence: Synthetic oligonucleotide
  Antisense strand to SEQ ID NO: 2403438
ucugcuaaagcucuugugg

SEQ ID NO: 2403440 - RNA, 19 nt, Artificial Sequence
  Description of Artificial Sequence: Synthetic oligonucleotide
  Sense strand starting at position 882 of SEQ ID NO: 1886344
agagcuuuagcagaacuaa

SEQ ID NO: 2403441 - RNA, 19 nt, Artificial Sequence
  Description of Artificial Sequence: Synthetic oligonucleotide
  Antisense strand to SEQ ID NO: 2403440
uuaguucugcuaaagcucu

SEQ ID NO: 2403442 - RNA, 19 nt, Artificial Sequence
  Description of Artificial Sequence: Synthetic oligonucleotide
  Sense strand starting at position 893 of SEQ ID NO: 1886344
agaacuaacgacugucuga

SEQ ID NO: 2403443 - RNA, 19 nt, Artificial Sequence
  Description of Artificial Sequence: Synthetic oligonucleotide
  Antisense strand to SEQ ID NO: 2403442
ucagacagucguuaguucu

SEQ ID NO: 2403444 - RNA, 19 nt, Artificial Sequence
  Description of Artificial Sequence: Synthetic oligonucleotide
  Sense strand starting at position 1141 of SEQ ID NO: 1886344
uguugucugcgggcucaaa

SEQ ID NO: 2403445 - RNA, 19 nt, Artificial Sequence
  Description of Artificial Sequence: Synthetic oligonucleotide
  Antisense strand to SEQ ID NO: 2403444
uuugagcccgcagacaaca

SEQ ID NO: 2403446 - RNA, 19 nt, Artificial Sequence
  Description of Artificial Sequence: Synthetic oligonucleotide
  Sense strand starting at position 1167 of SEQ ID NO: 1886344
acaguacccuucuuuggaa

SEQ ID NO: 2403447 - RNA, 19 nt, Artificial Sequence
  Description of Artificial Sequence: Synthetic oligonucleotide
  Antisense strand to SEQ ID NO: 2403446
uuccaaagaaggguacugu

SEQ ID NO: 2403448 - RNA, 19 nt, Artificial Sequence
  Description of Artificial Sequence: Synthetic oligonucleotide
  Sense strand starting at position 1187 of SEQ ID NO: 1886344
ggguuugguucgaccguca

SEQ ID NO: 2403449 - RNA, 19 nt, Artificial Sequence
  Description of Artificial Sequence: Synthetic oligonucleotide
  Antisense strand to SEQ ID NO: 2403448
ugacggucgaaccaaaccc

SEQ ID NO: 2403450 - RNA, 19 nt, Artificial Sequence
  Description of Artificial Sequence: Synthetic oligonucleotide
  Sense strand starting at position 1355 of SEQ ID NO: 1886344
uggcgaaacccuggagaaa

SEQ ID NO: 2403451 - RNA, 19 nt, Artificial Sequence
  Description of Artificial Sequence: Synthetic oligonucleotide
  Antisense strand to SEQ ID NO: 2403450
uuucuccaggguuucgcca

SEQ ID NO: 2403452 - RNA, 19 nt, Artificial Sequence
  Description of Artificial Sequence: Synthetic oligonucleotide
  Sense strand starting at position 1398 of SEQ ID NO: 1886344
guaauaucgaagcacguua

SEQ ID NO: 2403453 - RNA, 19 nt, Artificial Sequence
  Description of Artificial Sequence: Synthetic oligonucleotide
  Antisense strand to SEQ ID NO: 2403452
uaacgugcuucgauauuac

SEQ ID NO: 2403454 - RNA, 19 nt, Artificial Sequence
  Description of Artificial Sequence: Synthetic oligonucleotide
  Sense strand starting at position 1475 of SEQ ID NO: 1886344
ggcccauuguuaccagaag

SEQ ID NO: 2403455 - RNA, 19 nt, Artificial Sequence
  Description of Artificial Sequence: Synthetic oligonucleotide
  Antisense strand to SEQ ID NO: 2403454
cuucugguaacaaugggcc

SEQ ID NO: 2403456 - RNA, 19 nt, Artificial Sequence
  Description of Artificial Sequence: Synthetic oligonucleotide
  Sense strand starting at position 1561 of SEQ ID NO: 1886344
cccgaaugugcucaguaca

SEQ ID NO: 2403457 - RNA, 19 nt, Artificial Sequence
  Description of Artificial Sequence: Synthetic oligonucleotide
  Antisense strand to SEQ ID NO: 2403456
uguacugagcacauucggg

SEQ ID NO: 2403458 - RNA, 19 nt, Artificial Sequence
  Description of Artificial Sequence: Synthetic oligonucleotide
  Sense strand starting at position 1842 of SEQ ID NO: 1886344
ggcacaggucucgaguaac

SEQ ID NO: 2403459 - RNA, 19 nt, Artificial Sequence
  Description of Artificial Sequence: Synthetic oligonucleotide
  Antisense strand to SEQ ID NO: 2403458
guuacucgagaccugugcc

SEQ ID NO: 2403460 - RNA, 19 nt, Artificial Sequence
  Description of Artificial Sequence: Synthetic oligonucleotide
  Sense strand starting at position 2002 of SEQ ID NO: 1886344
cgggacuuccgcuacuaga

SEQ ID NO: 2403461 - RNA, 19 nt, Artificial Sequence
  Description of Artificial Sequence: Synthetic oligonucleotide
  Antisense strand to SEQ ID NO: 2403460
ucuaguagcggaagucccg

SEQ ID NO: 2403462 - RNA, 19 nt, Artificial Sequence
  Description of Artificial Sequence: Synthetic oligonucleotide
  Sense strand starting at position 2403 of SEQ ID NO: 1886344
guagguaucagcuauuguu

SEQ ID NO: 2403463 - RNA, 19 nt, Artificial Sequence
  Description of Artificial Sequence: Synthetic oligonucleotide
  Antisense strand to SEQ ID NO: 2403462
aacaauagcugauaccuac

SEQ ID NO: 2403464 - RNA, 19 nt, Artificial Sequence
  Description of Artificial Sequence: Synthetic oligonucleotide
  Sense strand starting at position 2857 of SEQ ID NO: 1886344
ucaggagaacuagguugua

SEQ ID NO: 2403465 - RNA, 19 nt, Artificial Sequence
  Description of Artificial Sequence: Synthetic oligonucleotide
  Antisense strand to SEQ ID NO: 2403464
uacaaccuaguucuccuga

SEQ ID NO: 2403466 - RNA, 19 nt, Artificial Sequence
  Description of Artificial Sequence: Synthetic oligonucleotide
  Sense strand starting at position 3026 of SEQ ID NO: 1886344
ccugguuuccuggaaguug

SEQ ID NO: 2403467 - RNA, 19 nt, Artificial Sequence
  Description of Artificial Sequence: Synthetic oligonucleotide
  Antisense strand to SEQ ID NO: 2403466
caacuuccaggaaaccagg

SEQ ID NO: 2403468 - RNA, 19 nt, Artificial Sequence
  Description of Artificial Sequence: Synthetic oligonucleotide
  Sense strand starting at position 3106 of SEQ ID NO: 1886344
uaaugaauuccgugagaca

SEQ ID NO: 2403469 - RNA, 19 nt, Artificial Sequence
  Description of Artificial Sequence: Synthetic oligonucleotide
  Antisense strand to SEQ ID NO: 2403468
ugucucacggaauucauua

SEQ ID NO: 2403470 - RNA, 19 nt, Artificial Sequence
  Description of Artificial Sequence: Synthetic oligonucleotide
  Sense strand starting at position 3201 of SEQ ID NO: 1886344
agaacuuugaguugaaagc

SEQ ID NO: 2403471 - RNA, 19 nt, Artificial Sequence
  Description of Artificial Sequence: Synthetic oligonucleotide
  Antisense strand to SEQ ID NO: 2403470
gcuuucaacucaaaguucu

SEQ ID NO: 2403472 - RNA, 19 nt, Artificial Sequence
  Description of Artificial Sequence: Synthetic oligonucleotide
  Sense strand starting at position 3202 of SEQ ID NO: 1886344
gaacuuugaguugaaagcu

SEQ ID NO: 2403473 - RNA, 19 nt, Artificial Sequence
  Description of Artificial Sequence: Synthetic oligonucleotide
  Antisense strand to SEQ ID NO: 2403472
agcuuucaacucaaaguuc

SEQ ID NO: 2403474 - RNA, 19 nt, Artificial Sequence
  Description of Artificial Sequence: Synthetic oligonucleotide
  Sense strand starting at position 3459 of SEQ ID NO: 1886344
agacucguuaaggaaguuu

SEQ ID NO: 2403475 - RNA, 19 nt, Artificial Sequence
  Description of Artificial Sequence: Synthetic oligonucleotide
  Antisense strand to SEQ ID NO: 2403474
aaacuuccuuaacgagucu

SEQ ID NO: 2403476 - RNA, 19 nt, Artificial Sequence
  Description of Artificial Sequence: Synthetic oligonucleotide
  Sense strand starting at position 3525 of SEQ ID NO: 1886344
gucuguguuguggagaaug

SEQ ID NO: 2403477 - RNA, 19 nt, Artificial Sequence
  Description of Artificial Sequence: Synthetic oligonucleotide
  Antisense strand to SEQ ID NO: 2403476
cauucuccacaacacagac

SEQ ID NO: 2403478 - RNA, 19 nt, Artificial Sequence
  Description of Artificial Sequence: Synthetic oligonucleotide
  Sense strand starting at position 3527 of SEQ ID NO: 1886344
cuguguuguggagaaugca

SEQ ID NO: 2403479 - RNA, 19 nt, Artificial Sequence
  Description of Artificial Sequence: Synthetic oligonucleotide
  Antisense strand to SEQ ID NO: 2403478
ugcauucuccacaacacag

SEQ ID NO: 2403480 - RNA, 19 nt, Artificial Sequence
  Description of Artificial Sequence: Synthetic oligonucleotide
  Sense strand starting at position 3676 of SEQ ID NO: 1886344
ggcugaugaccuuguguag

SEQ ID NO: 2403481 - RNA, 19 nt, Artificial Sequence
  Description of Artificial Sequence: Synthetic oligonucleotide
  Antisense strand to SEQ ID NO: 2403480
cuacacaaggucaucagcc

SEQ ID NO: 2403482 - RNA, 19 nt, Artificial Sequence
  Description of Artificial Sequence: Synthetic oligonucleotide
  Sense strand starting at position 3843 of SEQ ID NO: 1886344
ugaccuaacgugggucaau

SEQ ID NO: 2403483 - RNA, 19 nt, Artificial Sequence
  Description of Artificial Sequence: Synthetic oligonucleotide
  Antisense strand to SEQ ID NO: 2403482
auugacccacguuagguca

SEQ ID NO: 2403484 - RNA, 19 nt, Artificial Sequence
  Description of Artificial Sequence: Synthetic oligonucleotide
  Sense strand starting at position 3875 of SEQ ID NO: 1886344
ccaggacuuugacuucuga

SEQ ID NO: 2403485 - RNA, 19 nt, Artificial Sequence
  Description of Artificial Sequence: Synthetic oligonucleotide
  Antisense strand to SEQ ID NO: 2403484
ucagaagucaaaguccugg

SEQ ID NO: 2403486 - RNA, 19 nt, Artificial Sequence
  Description of Artificial Sequence: Synthetic oligonucleotide
  Sense strand starting at position 3882 of SEQ ID NO: 1886344
uuugacuucugagcuagua

SEQ ID NO: 2403487 - RNA, 19 nt, Artificial Sequence
  Description of Artificial Sequence: Synthetic oligonucleotide
  Antisense strand to SEQ ID NO: 2403486
uacuagcucagaagucaaa

SEQ ID NO: 2403488 - RNA, 19 nt, Artificial Sequence
  Description of Artificial Sequence: Synthetic oligonucleotide
  Sense strand starting at position 3929 of SEQ ID NO: 1886344
uguccagucauuugaaugu

SEQ ID NO: 2403489 - RNA, 19 nt, Artificial Sequence
  Description of Artificial Sequence: Synthetic oligonucleotide
  Antisense strand to SEQ ID NO: 2403488
acauucaaaugacuggaca

SEQ ID NO: 2403490 - RNA, 19 nt, Artificial Sequence
  Description of Artificial Sequence: Synthetic oligonucleotide
  Sense strand starting at position 3939 of SEQ ID NO: 1886344
uuugaaugugaggauguuu

SEQ ID NO: 2403491 - RNA, 19 nt, Artificial Sequence
  Description of Artificial Sequence: Synthetic oligonucleotide
  Antisense strand to SEQ ID NO: 2403490
aaacauccucacauucaaa

SEQ ID NO: 2403492 - RNA, 19 nt, Artificial Sequence
  Description of Artificial Sequence: Synthetic oligonucleotide
  Sense strand starting at position 3962 of SEQ ID NO: 1886344
ucaucuguauuggcagaua

SEQ ID NO: 2403493 - RNA, 19 nt, Artificial Sequence
  Description of Artificial Sequence: Synthetic oligonucleotide
  Antisense strand to SEQ ID NO: 2403492
uaucugccaauacagauga

SEQ ID NO: 2403494 - RNA, 19 nt, Artificial Sequence
  Description of Artificial Sequence: Synthetic oligonucleotide
  Sense strand starting at position 3965 of SEQ ID NO: 1886344
ucuguauuggcagauauca

SEQ ID NO: 2403495 - RNA, 19 nt, Artificial Sequence
  Description of Artificial Sequence: Synthetic oligonucleotide
  Antisense strand to SEQ ID NO: 2403494
ugauaucugccaauacaga

SEQ ID NO: 2403496 - RNA, 19 nt, Artificial Sequence
  Description of Artificial Sequence: Synthetic oligonucleotide
  Sense strand starting at position 3967 of SEQ ID NO: 1886344
uguauuggcagauaucaug

SEQ ID NO: 2403497 - RNA, 19 nt, Artificial Sequence
  Description of Artificial Sequence: Synthetic oligonucleotide
  Antisense strand to SEQ ID NO: 2403496
caugauaucugccaauaca

SEQ ID NO: 2403498 - RNA, 19 nt, Artificial Sequence
  Description of Artificial Sequence: Synthetic oligonucleotide
  Sense strand starting at position 38 of SEQ ID NO: 1886345
gccacauugaaagaaucgu

SEQ ID NO: 2403499 - RNA, 19 nt, Artificial Sequence
  Description of Artificial Sequence: Synthetic oligonucleotide
  Antisense strand to SEQ ID NO: 2403498
acgauucuuucaauguggc

SEQ ID NO: 2403500 - RNA, 19 nt, Artificial Sequence
  Description of Artificial Sequence: Synthetic oligonucleotide
  Sense strand starting at position 49 of SEQ ID NO: 1886345
agaaucguccugggccaua

SEQ ID NO: 2403501 - RNA, 19 nt, Artificial Sequence
  Description of Artificial Sequence: Synthetic oligonucleotide
  Antisense strand to SEQ ID NO: 2403500
uauggcccaggacgauucu

SEQ ID NO: 2403502 - RNA, 19 nt, Artificial Sequence
  Description of Artificial Sequence: Synthetic oligonucleotide
  Sense strand starting at position 54 of SEQ ID NO: 1886345
cguccugggccauauguaa

SEQ ID NO: 2403503 - RNA, 19 nt, Artificial Sequence
  Description of Artificial Sequence: Synthetic oligonucleotide
  Antisense strand to SEQ ID NO: 2403502
uuacauauggcccaggacg

SEQ ID NO: 2403504 - RNA, 19 nt, Artificial Sequence
  Description of Artificial Sequence: Synthetic oligonucleotide
  Sense strand starting at position 218 of SEQ ID NO: 1886345
ugguauuacuagcucagaa

SEQ ID NO: 2403505 - RNA, 19 nt, Artificial Sequence
  Description of Artificial Sequence: Synthetic oligonucleotide
  Antisense strand to SEQ ID NO: 2403504
uucugagcuaguaauacca

SEQ ID NO: 2403506 - RNA, 19 nt, Artificial Sequence
  Description of Artificial Sequence: Synthetic oligonucleotide
  Sense strand starting at position 220 of SEQ ID NO: 1886345
guauuacuagcucagaagu

SEQ ID NO: 2403507 - RNA, 19 nt, Artificial Sequence
  Description of Artificial Sequence: Synthetic oligonucleotide
  Antisense strand to SEQ ID NO: 2403506
acuucugagcuaguaauac

SEQ ID NO: 2403508 - RNA, 19 nt, Artificial Sequence
  Description of Artificial Sequence: Synthetic oligonucleotide
  Sense strand starting at position 277 of SEQ ID NO: 1886345
ggucauaugcuugagccca

SEQ ID NO: 2403509 - RNA, 19 nt, Artificial Sequence
  Description of Artificial Sequence: Synthetic oligonucleotide
  Antisense strand to SEQ ID NO: 2403508
ugggcucaagcauaugacc

SEQ ID NO: 2403510 - RNA, 19 nt, Artificial Sequence
  Description of Artificial Sequence: Synthetic oligonucleotide
  Sense strand starting at position 473 of SEQ ID NO: 1886345
gcuggccauuuggaagaaa

SEQ ID NO: 2403511 - RNA, 19 nt, Artificial Sequence
  Description of Artificial Sequence: Synthetic oligonucleotide
  Antisense strand to SEQ ID NO: 2403510
uuucuuccaaauggccagc

SEQ ID NO: 2403512 - RNA, 19 nt, Artificial Sequence
  Description of Artificial Sequence: Synthetic oligonucleotide
  Sense strand starting at position 520 of SEQ ID NO: 1886345
agccauuaaguuugaaucu

SEQ ID NO: 2403513 - RNA, 19 nt, Artificial Sequence
  Description of Artificial Sequence: Synthetic oligonucleotide
  Antisense strand to SEQ ID NO: 2403512
agauucaaacuuaauggcu

SEQ ID NO: 2403514 - RNA, 19 nt, Artificial Sequence
  Description of Artificial Sequence: Synthetic oligonucleotide
  Sense strand starting at position 1188 of SEQ ID NO: 1886345
gguggaaugcuugacuuua

SEQ ID NO: 2403515 - RNA, 19 nt, Artificial Sequence
  Description of Artificial Sequence: Synthetic oligonucleotide
  Antisense strand to SEQ ID NO: 2403514
uaaagucaagcauuccacc

SEQ ID NO: 2403516 - RNA, 19 nt, Artificial Sequence
  Description of Artificial Sequence: Synthetic oligonucleotide
  Sense strand starting at position 1190 of SEQ ID NO: 1886345
uggaaugcuugacuuuaua

SEQ ID NO: 2403517 - RNA, 19 nt, Artificial Sequence
  Description of Artificial Sequence: Synthetic oligonucleotide
  Antisense strand to SEQ ID NO: 2403516
uauaaagucaagcauucca

SEQ ID NO: 2403518 - RNA, 19 nt, Artificial Sequence
  Description of Artificial Sequence: Synthetic oligonucleotide
  Sense strand starting at position 1644 of SEQ ID NO: 1886345
agcguuuagggagaguuua

SEQ ID NO: 2403519 - RNA, 19 nt, Artificial Sequence
  Description of Artificial Sequence: Synthetic oligonucleotide
  Antisense strand to SEQ ID NO: 2403518
uaaacucucccuaaacgcu

SEQ ID NO: 2403520 - RNA, 19 nt, Artificial Sequence
  Description of Artificial Sequence: Synthetic oligonucleotide
  Sense strand starting at position 2061 of SEQ ID NO: 1886345
cgggauugguggaagagaa

SEQ ID NO: 2403521 - RNA, 19 nt, Artificial Sequence
  Description of Artificial Sequence: Synthetic oligonucleotide
  Antisense strand to SEQ ID NO: 2403520
uucucuuccaccaaucccg

SEQ ID NO: 2403522 - RNA, 19 nt, Artificial Sequence
  Description of Artificial Sequence: Synthetic oligonucleotide
  Sense strand starting at position 2704 of SEQ ID NO: 1886345
aauuuaacgugcuucgaua

SEQ ID NO: 2403523 - RNA, 19 nt, Artificial Sequence
  Description of Artificial Sequence: Synthetic oligonucleotide
  Antisense strand to SEQ ID NO: 2403522
uaucgaagcacguuaaauu

SEQ ID NO: 2403524 - RNA, 19 nt, Artificial Sequence
  Description of Artificial Sequence: Synthetic oligonucleotide
  Sense strand starting at position 2744 of SEQ ID NO: 1886345
auaauaguuucuccagggu

SEQ ID NO: 2403525 - RNA, 19 nt, Artificial Sequence
  Description of Artificial Sequence: Synthetic oligonucleotide
  Antisense strand to SEQ ID NO: 2403524
acccuggagaaacuauuau

SEQ ID NO: 2403526 - RNA, 19 nt, Artificial Sequence
  Description of Artificial Sequence: Synthetic oligonucleotide
  Sense strand starting at position 2817 of SEQ ID NO: 1886345
uggguuaggucaucacuua

SEQ ID NO: 2403527 - RNA, 19 nt, Artificial Sequence
  Description of Artificial Sequence: Synthetic oligonucleotide
  Antisense strand to SEQ ID NO: 2403526
uaagugaugaccuaaccca

SEQ ID NO: 2403528 - RNA, 19 nt, Artificial Sequence
  Description of Artificial Sequence: Synthetic oligonucleotide
  Sense strand starting at position 2818 of SEQ ID NO: 1886345
ggguuaggucaucacuuac

SEQ ID NO: 2403529 - RNA, 19 nt, Artificial Sequence
  Description of Artificial Sequence: Synthetic oligonucleotide
  Antisense strand to SEQ ID NO: 2403528
guaagugaugaccuaaccc

SEQ ID NO: 2403530 - RNA, 19 nt, Artificial Sequence
  Description of Artificial Sequence: Synthetic oligonucleotide
  Sense strand starting at position 2977 of SEQ ID NO: 1886345
gacaacaagugucuguuaa

SEQ ID NO: 2403531 - RNA, 19 nt, Artificial Sequence
  Description of Artificial Sequence: Synthetic oligonucleotide
  Antisense strand to SEQ ID NO: 2403530
uuaacagacacuuguuguc

SEQ ID NO: 2403532 - RNA, 19 nt, Artificial Sequence
  Description of Artificial Sequence: Synthetic oligonucleotide
  Sense strand starting at position 2978 of SEQ ID NO: 1886345
acaacaagugucuguuaag

SEQ ID NO: 2403533 - RNA, 19 nt, Artificial Sequence
  Description of Artificial Sequence: Synthetic oligonucleotide
  Antisense strand to SEQ ID NO: 2403532
cuuaacagacacuuguugu

SEQ ID NO: 2403534 - RNA, 19 nt, Artificial Sequence
  Description of Artificial Sequence: Synthetic oligonucleotide
  Sense strand starting at position 2979 of SEQ ID NO: 1886345
caacaagugucuguuaaga

SEQ ID NO: 2403535 - RNA, 19 nt, Artificial Sequence
  Description of Artificial Sequence: Synthetic oligonucleotide
  Antisense strand to SEQ ID NO: 2403534
ucuuaacagacacuuguug

SEQ ID NO: 2403536 - RNA, 19 nt, Artificial Sequence
  Description of Artificial Sequence: Synthetic oligonucleotide
  Sense strand starting at position 2988 of SEQ ID NO: 1886345
ucuguuaagagcuaccgau

SEQ ID NO: 2403537 - RNA, 19 nt, Artificial Sequence
  Description of Artificial Sequence: Synthetic oligonucleotide
  Antisense strand to SEQ ID NO: 2403536
aucgguagcucuuaacaga

SEQ ID NO: 2403538 - RNA, 19 nt, Artificial Sequence
  Description of Artificial Sequence: Synthetic oligonucleotide
  Sense strand starting at position 3217 of SEQ ID NO: 1886345
acagucguuaguucugcua

SEQ ID NO: 2403539 - RNA, 19 nt, Artificial Sequence
  Description of Artificial Sequence: Synthetic oligonucleotide
  Antisense strand to SEQ ID NO: 2403538
uagcagaacuaacgacugu

SEQ ID NO: 2403540 - RNA, 19 nt, Artificial Sequence
  Description of Artificial Sequence: Synthetic oligonucleotide
  Sense strand starting at position 3221 of SEQ ID NO: 1886345
ucguuaguucugcuaaagc

SEQ ID NO: 2403541 - RNA, 19 nt, Artificial Sequence
  Description of Artificial Sequence: Synthetic oligonucleotide
  Antisense strand to SEQ ID NO: 2403540
gcuuuagcagaacuaacga

SEQ ID NO: 2403542 - RNA, 19 nt, Artificial Sequence
  Description of Artificial Sequence: Synthetic oligonucleotide
  Sense strand starting at position 3414 of SEQ ID NO: 1886345
gcuagauguuagguuugac

SEQ ID NO: 2403543 - RNA, 19 nt, Artificial Sequence
  Description of Artificial Sequence: Synthetic oligonucleotide
  Antisense strand to SEQ ID NO: 2403542
gucaaaccuaacaucuagc

SEQ ID NO: 2403544 - RNA, 19 nt, Artificial Sequence
  Description of Artificial Sequence: Synthetic oligonucleotide
  Sense strand starting at position 3417 of SEQ ID NO: 1886345
agauguuagguuugacacu

SEQ ID NO: 2403545 - RNA, 19 nt, Artificial Sequence
  Description of Artificial Sequence: Synthetic oligonucleotide
  Antisense strand to SEQ ID NO: 2403544
agugucaaaccuaacaucu

SEQ ID NO: 2403546 - RNA, 19 nt, Artificial Sequence
  Description of Artificial Sequence: Synthetic oligonucleotide
  Sense strand starting at position 3453 of SEQ ID NO: 1886345
agucaagagcccuagucuu

SEQ ID NO: 2403547 - RNA, 19 nt, Artificial Sequence
  Description of Artificial Sequence: Synthetic oligonucleotide
  Antisense strand to SEQ ID NO: 2403546
aagacuagggcucuugacu

SEQ ID NO: 2403548 - RNA, 19 nt, Artificial Sequence
  Description of Artificial Sequence: Synthetic oligonucleotide
  Sense strand starting at position 3496 of SEQ ID NO: 1886345
ggaagaggcuccuugaauu

SEQ ID NO: 2403549 - RNA, 19 nt, Artificial Sequence
  Description of Artificial Sequence: Synthetic oligonucleotide
  Antisense strand to SEQ ID NO: 2403548
aauucaaggagccucuucc

SEQ ID NO: 2403550 - RNA, 19 nt, Artificial Sequence
  Description of Artificial Sequence: Synthetic oligonucleotide
  Sense strand starting at position 3502 of SEQ ID NO: 1886345
ggcuccuugaauugaguga

SEQ ID NO: 2403551 - RNA, 19 nt, Artificial Sequence
  Description of Artificial Sequence: Synthetic oligonucleotide
  Antisense strand to SEQ ID NO: 2403550
ucacucaauucaaggagcc

SEQ ID NO: 2403552 - RNA, 19 nt, Artificial Sequence
  Description of Artificial Sequence: Synthetic oligonucleotide
  Sense strand starting at position 3503 of SEQ ID NO: 1886345
gcuccuugaauugagugaa

SEQ ID NO: 2403553 - RNA, 19 nt, Artificial Sequence
  Description of Artificial Sequence: Synthetic oligonucleotide
  Antisense strand to SEQ ID NO: 2403552
uucacucaauucaaggagc

SEQ ID NO: 2403554 - RNA, 19 nt, Artificial Sequence
  Description of Artificial Sequence: Synthetic oligonucleotide
  Sense strand starting at position 3506 of SEQ ID NO: 1886345
ccuugaauugagugaauac

SEQ ID NO: 2403555 - RNA, 19 nt, Artificial Sequence
  Description of Artificial Sequence: Synthetic oligonucleotide
  Antisense strand to SEQ ID NO: 2403554
guauucacucaauucaagg

SEQ ID NO: 2403556 - RNA, 19 nt, Artificial Sequence
  Description of Artificial Sequence: Synthetic oligonucleotide
  Sense strand starting at position 3533 of SEQ ID NO: 1886345
ucugcuguggcagaaauca

SEQ ID NO: 2403557 - RNA, 19 nt, Artificial Sequence
  Description of Artificial Sequence: Synthetic oligonucleotide
  Antisense strand to SEQ ID NO: 2403556
ugauuucugccacagcaga

SEQ ID NO: 2403558 - RNA, 19 nt, Artificial Sequence
  Description of Artificial Sequence: Synthetic oligonucleotide
  Sense strand starting at position 3550 of SEQ ID NO: 1886345
cacauuaguguaggauacu

SEQ ID NO: 2403559 - RNA, 19 nt, Artificial Sequence
  Description of Artificial Sequence: Synthetic oligonucleotide
  Antisense strand to SEQ ID NO: 2403558
aguauccuacacuaaugug

SEQ ID NO: 2403560 - RNA, 19 nt, Artificial Sequence
  Description of Artificial Sequence: Synthetic oligonucleotide
  Sense strand starting at position 3585 of SEQ ID NO: 1886345
agacuauacuuaguuggaa

SEQ ID NO: 2403561 - RNA, 19 nt, Artificial Sequence
  Description of Artificial Sequence: Synthetic oligonucleotide
  Antisense strand to SEQ ID NO: 2403560
uuccaacuaaguauagucu

SEQ ID NO: 2403562 - RNA, 19 nt, Artificial Sequence
  Description of Artificial Sequence: Synthetic oligonucleotide
  Sense strand starting at position 3597 of SEQ ID NO: 1886345
guuggaagucuugaguuau

SEQ ID NO: 2403563 - RNA, 19 nt, Artificial Sequence
  Description of Artificial Sequence: Synthetic oligonucleotide
  Antisense strand to SEQ ID NO: 2403562
auaacucaagacuuccaac

SEQ ID NO: 2403564 - RNA, 19 nt, Artificial Sequence
  Description of Artificial Sequence: Synthetic oligonucleotide
  Sense strand starting at position 3603 of SEQ ID NO: 1886345
agucuugaguuaucuugag

SEQ ID NO: 2403565 - RNA, 19 nt, Artificial Sequence
  Description of Artificial Sequence: Synthetic oligonucleotide
  Antisense strand to SEQ ID NO: 2403564
cucaagauaacucaagacu

SEQ ID NO: 2403566 - RNA, 19 nt, Artificial Sequence
  Description of Artificial Sequence: Synthetic oligonucleotide
  Sense strand starting at position 3611 of SEQ ID NO: 1886345
guuaucuugagaggacuuc

SEQ ID NO: 2403567 - RNA, 19 nt, Artificial Sequence
  Description of Artificial Sequence: Synthetic oligonucleotide
  Antisense strand to SEQ ID NO: 2403566
gaaguccucucaagauaac

SEQ ID NO: 2403568 - RNA, 19 nt, Artificial Sequence
  Description of Artificial Sequence: Synthetic oligonucleotide
  Sense strand starting at position 3779 of SEQ ID NO: 1886345
aaaccuaaggaguguucuu

SEQ ID NO: 2403569 - RNA, 19 nt, Artificial Sequence
  Description of Artificial Sequence: Synthetic oligonucleotide
  Antisense strand to SEQ ID NO: 2403568
aagaacacuccuuagguuu

SEQ ID NO: 2403570 - RNA, 19 nt, Artificial Sequence
  Description of Artificial Sequence: Synthetic oligonucleotide
  Sense strand starting at position 3786 of SEQ ID NO: 1886345
aggaguguucuucagaggu

SEQ ID NO: 2403571 - RNA, 19 nt, Artificial Sequence
  Description of Artificial Sequence: Synthetic oligonucleotide
  Antisense strand to SEQ ID NO: 2403570
accucugaagaacacuccu

SEQ ID NO: 2403572 - RNA, 19 nt, Artificial Sequence
  Description of Artificial Sequence: Synthetic oligonucleotide
  Sense strand starting at position 3823 of SEQ ID NO: 1886345
gcucgcauugugcuuaaau

SEQ ID NO: 2403573 - RNA, 19 nt, Artificial Sequence
  Description of Artificial Sequence: Synthetic oligonucleotide
  Antisense strand to SEQ ID NO: 2403572
auuuaagcacaaugcgagc

SEQ ID NO: 2403574 - RNA, 19 nt, Artificial Sequence
  Description of Artificial Sequence: Synthetic oligonucleotide
  Sense strand starting at position 3832 of SEQ ID NO: 1886345
gugcuuaaauaugcuugaa

SEQ ID NO: 2403575 - RNA, 19 nt, Artificial Sequence
  Description of Artificial Sequence: Synthetic oligonucleotide
  Antisense strand to SEQ ID NO: 2403574
uucaagcauauuuaagcac

SEQ ID NO: 2403576 - RNA, 19 nt, Artificial Sequence
  Description of Artificial Sequence: Synthetic oligonucleotide
  Sense strand starting at position 3932 of SEQ ID NO: 1886345
ugagaaguccucugacuuu

SEQ ID NO: 2403577 - RNA, 19 nt, Artificial Sequence
  Description of Artificial Sequence: Synthetic oligonucleotide
  Antisense strand to SEQ ID NO: 2403576
aaagucagaggacuucuca

SEQ ID NO: 2403578 - RNA, 19 nt, Artificial Sequence
  Description of Artificial Sequence: Synthetic oligonucleotide
  Sense strand starting at position 211 of SEQ ID NO: 1886346
ccaagaucucaacagugcu

SEQ ID NO: 2403579 - RNA, 19 nt, Artificial Sequence
  Description of Artificial Sequence: Synthetic oligonucleotide
  Antisense strand to SEQ ID NO: 2403578
agcacuguugagaucuugg

SEQ ID NO: 2403580 - RNA, 19 nt, Artificial Sequence
  Description of Artificial Sequence: Synthetic oligonucleotide
  Sense strand starting at position 214 of SEQ ID NO: 1886346
agaucucaacagugcuaaa

SEQ ID NO: 2403581 - RNA, 19 nt, Artificial Sequence
  Description of Artificial Sequence: Synthetic oligonucleotide
  Antisense strand to SEQ ID NO: 2403580
uuuagcacuguugagaucu

SEQ ID NO: 2403582 - RNA, 19 nt, Artificial Sequence
  Description of Artificial Sequence: Synthetic oligonucleotide
  Sense strand starting at position 234 of SEQ ID NO: 1886346
gcauacauggauuaucuua

SEQ ID NO: 2403583 - RNA, 19 nt, Artificial Sequence
  Description of Artificial Sequence: Synthetic oligonucleotide
  Antisense strand to SEQ ID NO: 2403582
uaagauaauccauguaugc

SEQ ID NO: 2403584 - RNA, 19 nt, Artificial Sequence
  Description of Artificial Sequence: Synthetic oligonucleotide
  Sense strand starting at position 273 of SEQ ID NO: 1886346
agagguaagugcuaucauu

SEQ ID NO: 2403585 - RNA, 19 nt, Artificial Sequence
  Description of Artificial Sequence: Synthetic oligonucleotide
  Antisense strand to SEQ ID NO: 2403584
aaugauagcacuuaccucu

SEQ ID NO: 2403586 - RNA, 19 nt, Artificial Sequence
  Description of Artificial Sequence: Synthetic oligonucleotide
  Sense strand starting at position 326 of SEQ ID NO: 1886346
agaauaacuugcucaaggu

SEQ ID NO: 2403587 - RNA, 19 nt, Artificial Sequence
  Description of Artificial Sequence: Synthetic oligonucleotide
  Antisense strand to SEQ ID NO: 2403586
accuugagcaaguuauucu

SEQ ID NO: 2403588 - RNA, 19 nt, Artificial Sequence
  Description of Artificial Sequence: Synthetic oligonucleotide
  Sense strand starting at position 369 of SEQ ID NO: 1886346
gccugaauccagcaaagcu

SEQ ID NO: 2403589 - RNA, 19 nt, Artificial Sequence
  Description of Artificial Sequence: Synthetic oligonucleotide
  Antisense strand to SEQ ID NO: 2403588
agcuuugcuggauucaggc

SEQ ID NO: 2403590 - RNA, 19 nt, Artificial Sequence
  Description of Artificial Sequence: Synthetic oligonucleotide
  Sense strand starting at position 411 of SEQ ID NO: 1886346
caguucgagcccugcaaua

SEQ ID NO: 2403591 - RNA, 19 nt, Artificial Sequence
  Description of Artificial Sequence: Synthetic oligonucleotide
  Antisense strand to SEQ ID NO: 2403590
uauugcagggcucgaacug

SEQ ID NO: 2403592 - RNA, 19 nt, Artificial Sequence
  Description of Artificial Sequence: Synthetic oligonucleotide
  Sense strand starting at position 413 of SEQ ID NO: 1886346
guucgagcccugcaauacu

SEQ ID NO: 2403593 - RNA, 19 nt, Artificial Sequence
  Description of Artificial Sequence: Synthetic oligonucleotide
  Antisense strand to SEQ ID NO: 2403592
aguauugcagggcucgaac

SEQ ID NO: 2403594 - RNA, 19 nt, Artificial Sequence
  Description of Artificial Sequence: Synthetic oligonucleotide
  Sense strand starting at position 429 of SEQ ID NO: 1886346
acuacagucuaugaaugau

SEQ ID NO: 2403595 - RNA, 19 nt, Artificial Sequence
  Description of Artificial Sequence: Synthetic oligonucleotide
  Antisense strand to SEQ ID NO: 2403594
aucauucauagacuguagu

SEQ ID NO: 2403596 - RNA, 19 nt, Artificial Sequence
  Description of Artificial Sequence: Synthetic oligonucleotide
  Sense strand starting at position 594 of SEQ ID NO: 1886346
aagugauauuaaggugugu

SEQ ID NO: 2403597 - RNA, 19 nt, Artificial Sequence
  Description of Artificial Sequence: Synthetic oligonucleotide
  Antisense strand to SEQ ID NO: 2403596
acacaccuuaauaucacuu

SEQ ID NO: 2403598 - RNA, 19 nt, Artificial Sequence
  Description of Artificial Sequence: Synthetic oligonucleotide
  Sense strand starting at position 628 of SEQ ID NO: 1886346
agaaguggcuuaugacaau

SEQ ID NO: 2403599 - RNA, 19 nt, Artificial Sequence
  Description of Artificial Sequence: Synthetic oligonucleotide
  Antisense strand to SEQ ID NO: 2403598
auugucauaagccacuucu

SEQ ID NO: 2403600 - RNA, 19 nt, Artificial Sequence
  Description of Artificial Sequence: Synthetic oligonucleotide
  Sense strand starting at position 631 of SEQ ID NO: 1886346
aguggcuuaugacaauaca

SEQ ID NO: 2403601 - RNA, 19 nt, Artificial Sequence
  Description of Artificial Sequence: Synthetic oligonucleotide
  Antisense strand to SEQ ID NO: 2403600
uguauugucauaagccacu

SEQ ID NO: 2403602 - RNA, 19 nt, Artificial Sequence
  Description of Artificial Sequence: Synthetic oligonucleotide
  Sense strand starting at position 634 of SEQ ID NO: 1886346
ggcuuaugacaauacagcu

SEQ ID NO: 2403603 - RNA, 19 nt, Artificial Sequence
  Description of Artificial Sequence: Synthetic oligonucleotide
  Antisense strand to SEQ ID NO: 2403602
agcuguauugucauaagcc

SEQ ID NO: 2403604 - RNA, 19 nt, Artificial Sequence
  Description of Artificial Sequence: Synthetic oligonucleotide
  Sense strand starting at position 647 of SEQ ID NO: 1886346
acagcuuugguuuagguau

SEQ ID NO: 2403605 - RNA, 19 nt, Artificial Sequence
  Description of Artificial Sequence: Synthetic oligonucleotide
  Antisense strand to SEQ ID NO: 2403604
auaccuaaaccaaagcugu

SEQ ID NO: 2403606 - RNA, 19 nt, Artificial Sequence
  Description of Artificial Sequence: Synthetic oligonucleotide
  Sense strand starting at position 649 of SEQ ID NO: 1886346
agcuuugguuuagguauua

SEQ ID NO: 2403607 - RNA, 19 nt, Artificial Sequence
  Description of Artificial Sequence: Synthetic oligonucleotide
  Antisense strand to SEQ ID NO: 2403606
uaauaccuaaaccaaagcu

SEQ ID NO: 2403608 - RNA, 19 nt, Artificial Sequence
  Description of Artificial Sequence: Synthetic oligonucleotide
  Sense strand starting at position 708 of SEQ ID NO: 1886346
aaggauagaugugauaaau

SEQ ID NO: 2403609 - RNA, 19 nt, Artificial Sequence
  Description of Artificial Sequence: Synthetic oligonucleotide
  Antisense strand to SEQ ID NO: 2403608
auuuaucacaucuauccuu

SEQ ID NO: 2403610 - RNA, 19 nt, Artificial Sequence
  Description of Artificial Sequence: Synthetic oligonucleotide
  Sense strand starting at position 909 of SEQ ID NO: 1886346
gcuagaaauugaucccaaa

SEQ ID NO: 2403611 - RNA, 19 nt, Artificial Sequence
  Description of Artificial Sequence: Synthetic oligonucleotide
  Antisense strand to SEQ ID NO: 2403610
uuugggaucaauuucuagc

SEQ ID NO: 2403612 - RNA, 19 nt, Artificial Sequence
  Description of Artificial Sequence: Synthetic oligonucleotide
  Sense strand starting at position 980 of SEQ ID NO: 1886346
gugauaccucaucaagcca

SEQ ID NO: 2403613 - RNA, 19 nt, Artificial Sequence
  Description of Artificial Sequence: Synthetic oligonucleotide
  Antisense strand to SEQ ID NO: 2403612
uggcuugaugagguaucac

SEQ ID NO: 2403614 - RNA, 19 nt, Artificial Sequence
  Description of Artificial Sequence: Synthetic oligonucleotide
  Sense strand starting at position 3095 of SEQ ID NO: 1886346
gcugacagauacugaagaa

SEQ ID NO: 2403615 - RNA, 19 nt, Artificial Sequence
  Description of Artificial Sequence: Synthetic oligonucleotide
  Antisense strand to SEQ ID NO: 2403614
uucuucaguaucugucagc

SEQ ID NO: 2403616 - RNA, 19 nt, Artificial Sequence
  Description of Artificial Sequence: Synthetic oligonucleotide
  Sense strand starting at position 3143 of SEQ ID NO: 1886346
gccuuuacgauguguacua

SEQ ID NO: 2403617 - RNA, 19 nt, Artificial Sequence
  Description of Artificial Sequence: Synthetic oligonucleotide
  Antisense strand to SEQ ID NO: 2403616
uaguacacaucguaaaggc

SEQ ID NO: 2403618 - RNA, 19 nt, Artificial Sequence
  Description of Artificial Sequence: Synthetic oligonucleotide
  Sense strand starting at position 3154 of SEQ ID NO: 1886346
guguacuaguggcagcaaa

SEQ ID NO: 2403619 - RNA, 19 nt, Artificial Sequence
  Description of Artificial Sequence: Synthetic oligonucleotide
  Antisense strand to SEQ ID NO: 2403618
uuugcugccacuaguacac

SEQ ID NO: 2403620 - RNA, 19 nt, Artificial Sequence
  Description of Artificial Sequence: Synthetic oligonucleotide
  Sense strand starting at position 3272 of SEQ ID NO: 1886346
uggaguuauuaacgccacu

SEQ ID NO: 2403621 - RNA, 19 nt, Artificial Sequence
  Description of Artificial Sequence: Synthetic oligonucleotide
  Antisense strand to SEQ ID NO: 2403620
aguggcguuaauaacucca

SEQ ID NO: 2403622 - RNA, 19 nt, Artificial Sequence
  Description of Artificial Sequence: Synthetic oligonucleotide
  Sense strand starting at position 3302 of SEQ ID NO: 1886346
aguggaaguuauuaagagu

SEQ ID NO: 2403623 - RNA, 19 nt, Artificial Sequence
  Description of Artificial Sequence: Synthetic oligonucleotide
  Antisense strand to SEQ ID NO: 2403622
acucuuaauaacuuccacu

SEQ ID NO: 2403624 - RNA, 19 nt, Artificial Sequence
  Description of Artificial Sequence: Synthetic oligonucleotide
  Sense strand starting at position 3305 of SEQ ID NO: 1886346
ggaaguuauuaagagugga

SEQ ID NO: 2403625 - RNA, 19 nt, Artificial Sequence
  Description of Artificial Sequence: Synthetic oligonucleotide
  Antisense strand to SEQ ID NO: 2403624
uccacucuuaauaacuucc

SEQ ID NO: 2403626 - RNA, 19 nt, Artificial Sequence
  Description of Artificial Sequence: Synthetic oligonucleotide
  Sense strand starting at position 3308 of SEQ ID NO: 1886346
aguuauuaagaguggaggu

SEQ ID NO: 2403627 - RNA, 19 nt, Artificial Sequence
  Description of Artificial Sequence: Synthetic oligonucleotide
  Antisense strand to SEQ ID NO: 2403626
accuccacucuuaauaacu

SEQ ID NO: 2403628 - RNA, 19 nt, Artificial Sequence
  Description of Artificial Sequence: Synthetic oligonucleotide
  Sense strand starting at position 3309 of SEQ ID NO: 1886346
guuauuaagaguggagguu

SEQ ID NO: 2403629 - RNA, 19 nt, Artificial Sequence
  Description of Artificial Sequence: Synthetic oligonucleotide
  Antisense strand to SEQ ID NO: 2403628
aaccuccacucuuaauaac

SEQ ID NO: 2403630 - RNA, 19 nt, Artificial Sequence
  Description of Artificial Sequence: Synthetic oligonucleotide
  Sense strand starting at position 3664 of SEQ ID NO: 1886346
gugauccaguucuauuaca

SEQ ID NO: 2403631 - RNA, 19 nt, Artificial Sequence
  Description of Artificial Sequence: Synthetic oligonucleotide
  Antisense strand to SEQ ID NO: 2403630
uguaauagaacuggaucac

SEQ ID NO: 2403632 - RNA, 19 nt, Artificial Sequence
  Description of Artificial Sequence: Synthetic oligonucleotide
  Sense strand starting at position 3692 of SEQ ID NO: 1886346
ggacucaugccacgacuga

SEQ ID NO: 2403633 - RNA, 19 nt, Artificial Sequence
  Description of Artificial Sequence: Synthetic oligonucleotide
  Antisense strand to SEQ ID NO: 2403632
ucagucguggcaugagucc

SEQ ID NO: 2403634 - RNA, 19 nt, Artificial Sequence
  Description of Artificial Sequence: Synthetic oligonucleotide
  Sense strand starting at position 3693 of SEQ ID NO: 1886346
gacucaugccacgacugau

SEQ ID NO: 2403635 - RNA, 19 nt, Artificial Sequence
  Description of Artificial Sequence: Synthetic oligonucleotide
  Antisense strand to SEQ ID NO: 2403634
aucagucguggcaugaguc

SEQ ID NO: 2403636 - RNA, 19 nt, Artificial Sequence
  Description of Artificial Sequence: Synthetic oligonucleotide
  Sense strand starting at position 3739 of SEQ ID NO: 1886346
gccuuaguuuccuugccua

SEQ ID NO: 2403637 - RNA, 19 nt, Artificial Sequence
  Description of Artificial Sequence: Synthetic oligonucleotide
  Antisense strand to SEQ ID NO: 2403636
uaggcaaggaaacuaaggc

SEQ ID NO: 2403638 - RNA, 19 nt, Artificial Sequence
  Description of Artificial Sequence: Synthetic oligonucleotide
  Sense strand starting at position 3742 of SEQ ID NO: 1886346
uuaguuuccuugccuagaa

SEQ ID NO: 2403639 - RNA, 19 nt, Artificial Sequence
  Description of Artificial Sequence: Synthetic oligonucleotide
  Antisense strand to SEQ ID NO: 2403638
uucuaggcaaggaaacuaa

SEQ ID NO: 2403640 - RNA, 19 nt, Artificial Sequence
  Description of Artificial Sequence: Synthetic oligonucleotide
  Sense strand starting at position 3744 of SEQ ID NO: 1886346
aguuuccuugccuagaaua

SEQ ID NO: 2403641 - RNA, 19 nt, Artificial Sequence
  Description of Artificial Sequence: Synthetic oligonucleotide
  Antisense strand to SEQ ID NO: 2403640
uauucuaggcaaggaaacu

SEQ ID NO: 2403642 - RNA, 19 nt, Artificial Sequence
  Description of Artificial Sequence: Synthetic oligonucleotide
  Sense strand starting at position 3857 of SEQ ID NO: 1886346
uucuuuguauucuagcauu

SEQ ID NO: 2403643 - RNA, 19 nt, Artificial Sequence
  Description of Artificial Sequence: Synthetic oligonucleotide
  Antisense strand to SEQ ID NO: 2403642
aaugcuagaauacaaagaa

SEQ ID NO: 2403644 - RNA, 19 nt, Artificial Sequence
  Description of Artificial Sequence: Synthetic oligonucleotide
  Sense strand starting at position 3863 of SEQ ID NO: 1886346
guauucuagcauuacccga

SEQ ID NO: 2403645 - RNA, 19 nt, Artificial Sequence
  Description of Artificial Sequence: Synthetic oligonucleotide
  Antisense strand to SEQ ID NO: 2403644
ucggguaaugcuagaauac

SEQ ID NO: 2403646 - RNA, 19 nt, Artificial Sequence
  Description of Artificial Sequence: Synthetic oligonucleotide
  Sense strand starting at position 3868 of SEQ ID NO: 1886346
cuagcauuacccgagccau

SEQ ID NO: 2403647 - RNA, 19 nt, Artificial Sequence
  Description of Artificial Sequence: Synthetic oligonucleotide
  Antisense strand to SEQ ID NO: 2403646
auggcucggguaaugcuag

SEQ ID NO: 2403648 - RNA, 19 nt, Artificial Sequence
  Description of Artificial Sequence: Synthetic oligonucleotide
  Sense strand starting at position 3892 of SEQ ID NO: 1886346
ucaauagguguuugcacuu

SEQ ID NO: 2403649 - RNA, 19 nt, Artificial Sequence
  Description of Artificial Sequence: Synthetic oligonucleotide
  Antisense strand to SEQ ID NO: 2403648
aagugcaaacaccuauuga

SEQ ID NO: 2403650 - RNA, 19 nt, Artificial Sequence
  Description of Artificial Sequence: Synthetic oligonucleotide
  Sense strand starting at position 3953 of SEQ ID NO: 1886346
uuugucuguuuacuugauu

SEQ ID NO: 2403651 - RNA, 19 nt, Artificial Sequence
  Description of Artificial Sequence: Synthetic oligonucleotide
  Antisense strand to SEQ ID NO: 2403650
aaucaaguaaacagacaaa

SEQ ID NO: 2403652 - RNA, 19 nt, Artificial Sequence
  Description of Artificial Sequence: Synthetic oligonucleotide
  Sense strand starting at position 3954 of SEQ ID NO: 1886346
uugucuguuuacuugauuu

SEQ ID NO: 2403653 - RNA, 19 nt, Artificial Sequence
  Description of Artificial Sequence: Synthetic oligonucleotide
  Antisense strand to SEQ ID NO: 2403652
aaaucaaguaaacagacaa

SEQ ID NO: 2403654 - RNA, 19 nt, Artificial Sequence
  Description of Artificial Sequence: Synthetic oligonucleotide
  Sense strand starting at position 2158 of SEQ ID NO: 1886347
uaaagcuugcucuguguga

SEQ ID NO: 2403655 - RNA, 19 nt, Artificial Sequence
  Description of Artificial Sequence: Synthetic oligonucleotide
  Antisense strand to SEQ ID NO: 2403654
ucacacagagcaagcuuua

SEQ ID NO: 2403656 - RNA, 19 nt, Artificial Sequence
  Description of Artificial Sequence: Synthetic oligonucleotide
  Sense strand starting at position 2159 of SEQ ID NO: 1886347
aaagcuugcucugugugaa

SEQ ID NO: 2403657 - RNA, 19 nt, Artificial Sequence
  Description of Artificial Sequence: Synthetic oligonucleotide
  Antisense strand to SEQ ID NO: 2403656
uucacacagagcaagcuuu

SEQ ID NO: 2403658 - RNA, 19 nt, Artificial Sequence
  Description of Artificial Sequence: Synthetic oligonucleotide
  Sense strand starting at position 2160 of SEQ ID NO: 1886347
aagcuugcucugugugaag

SEQ ID NO: 2403659 - RNA, 19 nt, Artificial Sequence
  Description of Artificial Sequence: Synthetic oligonucleotide
  Antisense strand to SEQ ID NO: 2403658
cuucacacagagcaagcuu

SEQ ID NO: 2403660 - RNA, 19 nt, Artificial Sequence
  Description of Artificial Sequence: Synthetic oligonucleotide
  Sense strand starting at position 2162 of SEQ ID NO: 1886347
gcuugcucugugugaagag

SEQ ID NO: 2403661 - RNA, 19 nt, Artificial Sequence
  Description of Artificial Sequence: Synthetic oligonucleotide
  Antisense strand to SEQ ID NO: 2403660
cucuucacacagagcaagc

SEQ ID NO: 2403662 - RNA, 19 nt, Artificial Sequence
  Description of Artificial Sequence: Synthetic oligonucleotide
  Sense strand starting at position 2253 of SEQ ID NO: 1886347
aagaauugagucuggcauu

SEQ ID NO: 2403663 - RNA, 19 nt, Artificial Sequence
  Description of Artificial Sequence: Synthetic oligonucleotide
  Antisense strand to SEQ ID NO: 2403662
aaugccagacucaauucuu

SEQ ID NO: 2403664 - RNA, 19 nt, Artificial Sequence
  Description of Artificial Sequence: Synthetic oligonucleotide
  Sense strand starting at position 2254 of SEQ ID NO: 1886347
agaauugagucuggcauuu

SEQ ID NO: 2403665 - RNA, 19 nt, Artificial Sequence
  Description of Artificial Sequence: Synthetic oligonucleotide
  Antisense strand to SEQ ID NO: 2403664
aaaugccagacucaauucu

SEQ ID NO: 2403666 - RNA, 19 nt, Artificial Sequence
  Description of Artificial Sequence: Synthetic oligonucleotide
  Sense strand starting at position 2364 of SEQ ID NO: 1886347
aaagcuguauugucauaag

SEQ ID NO: 2403667 - RNA, 19 nt, Artificial Sequence
  Description of Artificial Sequence: Synthetic oligonucleotide
  Antisense strand to SEQ ID NO: 2403666
cuuaugacaauacagcuuu

SEQ ID NO: 2403668 - RNA, 19 nt, Artificial Sequence
  Description of Artificial Sequence: Synthetic oligonucleotide
  Sense strand starting at position 2464 of SEQ ID NO: 1886347
uauaaagaugucuguggga

SEQ ID NO: 2403669 - RNA, 19 nt, Artificial Sequence
  Description of Artificial Sequence: Synthetic oligonucleotide
  Antisense strand to SEQ ID NO: 2403668
ucccacagacaucuuuaua

SEQ ID NO: 2403670 - RNA, 19 nt, Artificial Sequence
  Description of Artificial Sequence: Synthetic oligonucleotide
  Sense strand starting at position 2466 of SEQ ID NO: 1886347
uaaagaugucugugggaaa

SEQ ID NO: 2403671 - RNA, 19 nt, Artificial Sequence
  Description of Artificial Sequence: Synthetic oligonucleotide
  Antisense strand to SEQ ID NO: 2403670
uuucccacagacaucuuua

SEQ ID NO: 2403672 - RNA, 19 nt, Artificial Sequence
  Description of Artificial Sequence: Synthetic oligonucleotide
  Sense strand starting at position 2477 of SEQ ID NO: 1886347
gugggaaauucucuuaauu

SEQ ID NO: 2403673 - RNA, 19 nt, Artificial Sequence
  Description of Artificial Sequence: Synthetic oligonucleotide
  Antisense strand to SEQ ID NO: 2403672
aauuaagagaauuucccac

SEQ ID NO: 2403674 - RNA, 19 nt, Artificial Sequence
  Description of Artificial Sequence: Synthetic oligonucleotide
  Sense strand starting at position 2608 of SEQ ID NO: 1886347
ugcaguguucugagguagu

SEQ ID NO: 2403675 - RNA, 19 nt, Artificial Sequence
  Description of Artificial Sequence: Synthetic oligonucleotide
  Antisense strand to SEQ ID NO: 2403674
acuaccucagaacacugca

SEQ ID NO: 2403676 - RNA, 19 nt, Artificial Sequence
  Description of Artificial Sequence: Synthetic oligonucleotide
  Sense strand starting at position 2611 of SEQ ID NO: 1886347
aguguucugagguaguuaa

SEQ ID NO: 2403677 - RNA, 19 nt, Artificial Sequence
  Description of Artificial Sequence: Synthetic oligonucleotide
  Antisense strand to SEQ ID NO: 2403676
uuaacuaccucagaacacu

SEQ ID NO: 2403678 - RNA, 19 nt, Artificial Sequence
  Description of Artificial Sequence: Synthetic oligonucleotide
  Sense strand starting at position 2624 of SEQ ID NO: 1886347
aguuaagagcuuugcugga

SEQ ID NO: 2403679 - RNA, 19 nt, Artificial Sequence
  Description of Artificial Sequence: Synthetic oligonucleotide
  Antisense strand to SEQ ID NO: 2403678
uccagcaaagcucuuaacu

SEQ ID NO: 2403680 - RNA, 19 nt, Artificial Sequence
  Description of Artificial Sequence: Synthetic oligonucleotide
  Sense strand starting at position 2626 of SEQ ID NO: 1886347
uuaagagcuuugcuggauu

SEQ ID NO: 2403681 - RNA, 19 nt, Artificial Sequence
  Description of Artificial Sequence: Synthetic oligonucleotide
  Antisense strand to SEQ ID NO: 2403680
aauccagcaaagcucuuaa

SEQ ID NO: 2403682 - RNA, 19 nt, Artificial Sequence
  Description of Artificial Sequence: Synthetic oligonucleotide
  Sense strand starting at position 2702 of SEQ ID NO: 1886347
uuucuuccucuaugaugga

SEQ ID NO: 2403683 - RNA, 19 nt, Artificial Sequence
  Description of Artificial Sequence: Synthetic oligonucleotide
  Antisense strand to SEQ ID NO: 2403682
uccaucauagaggaagaaa

SEQ ID NO: 2403684 - RNA, 19 nt, Artificial Sequence
  Description of Artificial Sequence: Synthetic oligonucleotide
  Sense strand starting at position 2733 of SEQ ID NO: 1886347
agcacuuaccucuauagag

SEQ ID NO: 2403685 - RNA, 19 nt, Artificial Sequence
  Description of Artificial Sequence: Synthetic oligonucleotide
  Antisense strand to SEQ ID NO: 2403684
cucuauagagguaagugcu

SEQ ID NO: 2403686 - RNA, 19 nt, Artificial Sequence
  Description of Artificial Sequence: Synthetic oligonucleotide
  Sense strand starting at position 2762 of SEQ ID NO: 1886347
uuaguaagauaauccaugu

SEQ ID NO: 2403687 - RNA, 19 nt, Artificial Sequence
  Description of Artificial Sequence: Synthetic oligonucleotide
  Antisense strand to SEQ ID NO: 2403686
acauggauuaucuuacuaa

SEQ ID NO: 2403688 - RNA, 19 nt, Artificial Sequence
  Description of Artificial Sequence: Synthetic oligonucleotide
  Sense strand starting at position 2794 of SEQ ID NO: 1886347
uguugagaucuuggcuuac

SEQ ID NO: 2403689 - RNA, 19 nt, Artificial Sequence
  Description of Artificial Sequence: Synthetic oligonucleotide
  Antisense strand to SEQ ID NO: 2403688
guaagccaagaucucaaca

SEQ ID NO: 2403690 - RNA, 19 nt, Artificial Sequence
  Description of Artificial Sequence: Synthetic oligonucleotide
  Sense strand starting at position 2796 of SEQ ID NO: 1886347
uugagaucuuggcuuacug

SEQ ID NO: 2403691 - RNA, 19 nt, Artificial Sequence
  Description of Artificial Sequence: Synthetic oligonucleotide
  Antisense strand to SEQ ID NO: 2403690
caguaagccaagaucucaa

SEQ ID NO: 2403692 - RNA, 19 nt, Artificial Sequence
  Description of Artificial Sequence: Synthetic oligonucleotide
  Sense strand starting at position 3078 of SEQ ID NO: 1886347
gagcucuuacaugauguua

SEQ ID NO: 2403693 - RNA, 19 nt, Artificial Sequence
  Description of Artificial Sequence: Synthetic oligonucleotide
  Antisense strand to SEQ ID NO: 2403692
uaacaucauguaagagcuc

SEQ ID NO: 2403694 - RNA, 19 nt, Artificial Sequence
  Description of Artificial Sequence: Synthetic oligonucleotide
  Sense strand starting at position 3083 of SEQ ID NO: 1886347
cuuacaugauguuauagga

SEQ ID NO: 2403695 - RNA, 19 nt, Artificial Sequence
  Description of Artificial Sequence: Synthetic oligonucleotide
  Antisense strand to SEQ ID NO: 2403694
uccuauaacaucauguaag

SEQ ID NO: 2403696 - RNA, 19 nt, Artificial Sequence
  Description of Artificial Sequence: Synthetic oligonucleotide
  Sense strand starting at position 3096 of SEQ ID NO: 1886347
auaggagacucugaagauu

SEQ ID NO: 2403697 - RNA, 19 nt, Artificial Sequence
  Description of Artificial Sequence: Synthetic oligonucleotide
  Antisense strand to SEQ ID NO: 2403696
aaucuucagagucuccuau

SEQ ID NO: 2403698 - RNA, 19 nt, Artificial Sequence
  Description of Artificial Sequence: Synthetic oligonucleotide
  Sense strand starting at position 3144 of SEQ ID NO: 1886347
guuauagucuuguugagaa

SEQ ID NO: 2403699 - RNA, 19 nt, Artificial Sequence
  Description of Artificial Sequence: Synthetic oligonucleotide
  Antisense strand to SEQ ID NO: 2403698
uucucaacaagacuauaac

SEQ ID NO: 2403700 - RNA, 19 nt, Artificial Sequence
  Description of Artificial Sequence: Synthetic oligonucleotide
  Sense strand starting at position 3187 of SEQ ID NO: 1886347
cuagaaaguguauggugaa

SEQ ID NO: 2403701 - RNA, 19 nt, Artificial Sequence
  Description of Artificial Sequence: Synthetic oligonucleotide
  Antisense strand to SEQ ID NO: 2403700
uucaccauacacuuucuag

SEQ ID NO: 2403702 - RNA, 19 nt, Artificial Sequence
  Description of Artificial Sequence: Synthetic oligonucleotide
  Sense strand starting at position 3199 of SEQ ID NO: 1886347
uggugaauugccgaaagag

SEQ ID NO: 2403703 - RNA, 19 nt, Artificial Sequence
  Description of Artificial Sequence: Synthetic oligonucleotide
  Antisense strand to SEQ ID NO: 2403702
cucuuucggcaauucacca

SEQ ID NO: 2403704 - RNA, 19 nt, Artificial Sequence
  Description of Artificial Sequence: Synthetic oligonucleotide
  Sense strand starting at position 3239 of SEQ ID NO: 1886347
cgcaguaacugggaagaaa

SEQ ID NO: 2403705 - RNA, 19 nt, Artificial Sequence
  Description of Artificial Sequence: Synthetic oligonucleotide
  Antisense strand to SEQ ID NO: 2403704
uuucuucccaguuacugcg

SEQ ID NO: 2403706 - RNA, 19 nt, Artificial Sequence
  Description of Artificial Sequence: Synthetic oligonucleotide
  Sense strand starting at position 3297 of SEQ ID NO: 1886347
ggcuuuggagucuggaagu

SEQ ID NO: 2403707 - RNA, 19 nt, Artificial Sequence
  Description of Artificial Sequence: Synthetic oligonucleotide
  Antisense strand to SEQ ID NO: 2403706
acuuccagacuccaaagcc

SEQ ID NO: 2403708 - RNA, 19 nt, Artificial Sequence
  Description of Artificial Sequence: Synthetic oligonucleotide
  Sense strand starting at position 3358 of SEQ ID NO: 1886347
agagcagagucagagauau

SEQ ID NO: 2403709 - RNA, 19 nt, Artificial Sequence
  Description of Artificial Sequence: Synthetic oligonucleotide
  Antisense strand to SEQ ID NO: 2403708
auaucucugacucugcucu

SEQ ID NO: 2403710 - RNA, 19 nt, Artificial Sequence
  Description of Artificial Sequence: Synthetic oligonucleotide
  Sense strand starting at position 3395 of SEQ ID NO: 1886347
agauuugaauaacagaagu

SEQ ID NO: 2403711 - RNA, 19 nt, Artificial Sequence
  Description of Artificial Sequence: Synthetic oligonucleotide
  Antisense strand to SEQ ID NO: 2403710
acuucuguuauucaaaucu

SEQ ID NO: 2403712 - RNA, 19 nt, Artificial Sequence
  Description of Artificial Sequence: Synthetic oligonucleotide
  Sense strand starting at position 3410 of SEQ ID NO: 1886347
aaguacucuugaguauaug

SEQ ID NO: 2403713 - RNA, 19 nt, Artificial Sequence
  Description of Artificial Sequence: Synthetic oligonucleotide
  Antisense strand to SEQ ID NO: 2403712
cauauacucaagaguacuu

SEQ ID NO: 2403714 - RNA, 19 nt, Artificial Sequence
  Description of Artificial Sequence: Synthetic oligonucleotide
  Sense strand starting at position 3748 of SEQ ID NO: 1886347
ccuuuauuaccaggugaua

SEQ ID NO: 2403715 - RNA, 19 nt, Artificial Sequence
  Description of Artificial Sequence: Synthetic oligonucleotide
  Antisense strand to SEQ ID NO: 2403714
uaucaccugguaauaaagg

SEQ ID NO: 2403716 - RNA, 19 nt, Artificial Sequence
  Description of Artificial Sequence: Synthetic oligonucleotide
  Sense strand starting at position 3753 of SEQ ID NO: 1886347
auuaccaggugauaucaaa

SEQ ID NO: 2403717 - RNA, 19 nt, Artificial Sequence
  Description of Artificial Sequence: Synthetic oligonucleotide
  Antisense strand to SEQ ID NO: 2403716
uuugauaucaccugguaau

SEQ ID NO: 2403718 - RNA, 19 nt, Artificial Sequence
  Description of Artificial Sequence: Synthetic oligonucleotide
  Sense strand starting at position 3776 of SEQ ID NO: 1886347
auuagagcugacuguggua

SEQ ID NO: 2403719 - RNA, 19 nt, Artificial Sequence
  Description of Artificial Sequence: Synthetic oligonucleotide
  Antisense strand to SEQ ID NO: 2403718
uaccacagucagcucuaau

SEQ ID NO: 2403720 - RNA, 19 nt, Artificial Sequence
  Description of Artificial Sequence: Synthetic oligonucleotide
  Sense strand starting at position 3833 of SEQ ID NO: 1886347
aaggaauccugaguaugua

SEQ ID NO: 2403721 - RNA, 19 nt, Artificial Sequence
  Description of Artificial Sequence: Synthetic oligonucleotide
  Antisense strand to SEQ ID NO: 2403720
uacauacucaggauuccuu

SEQ ID NO: 2403722 - RNA, 19 nt, Artificial Sequence
  Description of Artificial Sequence: Synthetic oligonucleotide
  Sense strand starting at position 3841 of SEQ ID NO: 1886347
cugaguauguaugcacuuu

SEQ ID NO: 2403723 - RNA, 19 nt, Artificial Sequence
  Description of Artificial Sequence: Synthetic oligonucleotide
  Antisense strand to SEQ ID NO: 2403722
aaagugcauacauacucag

SEQ ID NO: 2403724 - RNA, 19 nt, Artificial Sequence
  Description of Artificial Sequence: Synthetic oligonucleotide
  Sense strand starting at position 3894 of SEQ ID NO: 1886347
ggcucuugcaagugaugau

SEQ ID NO: 2403725 - RNA, 19 nt, Artificial Sequence
  Description of Artificial Sequence: Synthetic oligonucleotide
  Antisense strand to SEQ ID NO: 2403724
aucaucacuugcaagagcc

SEQ ID NO: 2403726 - RNA, 19 nt, Artificial Sequence
  Description of Artificial Sequence: Synthetic oligonucleotide
  Sense strand starting at position 3895 of SEQ ID NO: 1886347
gcucuugcaagugaugaua

SEQ ID NO: 2403727 - RNA, 19 nt, Artificial Sequence
  Description of Artificial Sequence: Synthetic oligonucleotide
  Antisense strand to SEQ ID NO: 2403726
uaucaucacuugcaagagc

SEQ ID NO: 2403728 - RNA, 19 nt, Artificial Sequence
  Description of Artificial Sequence: Synthetic oligonucleotide
  Sense strand starting at position 3898 of SEQ ID NO: 1886347
cuugcaagugaugauaaua

SEQ ID NO: 2403729 - RNA, 19 nt, Artificial Sequence
  Description of Artificial Sequence: Synthetic oligonucleotide
  Antisense strand to SEQ ID NO: 2403728
uauuaucaucacuugcaag

SEQ ID NO: 2403730 - RNA, 19 nt, Artificial Sequence
  Description of Artificial Sequence: Synthetic oligonucleotide
  Sense strand starting at position 3903 of SEQ ID NO: 1886347
aagugaugauaauagugau

SEQ ID NO: 2403731 - RNA, 19 nt, Artificial Sequence
  Description of Artificial Sequence: Synthetic oligonucleotide
  Antisense strand to SEQ ID NO: 2403730
aucacuauuaucaucacuu

SEQ ID NO: 2403732 - RNA, 19 nt, Artificial Sequence
  Description of Artificial Sequence: Synthetic oligonucleotide
  Sense strand starting at position 3934 of SEQ ID NO: 1886347
gaggauuagcugcacucau

SEQ ID NO: 2403733 - RNA, 19 nt, Artificial Sequence
  Description of Artificial Sequence: Synthetic oligonucleotide
  Antisense strand to SEQ ID NO: 2403732
augagugcagcuaauccuc

SEQ ID NO: 2403734 - RNA, 19 nt, Artificial Sequence
  Description of Artificial Sequence: Synthetic oligonucleotide
  Sense strand starting at position 89 of SEQ ID NO: 1886348
aagggcugaucccugacau

SEQ ID NO: 2403735 - RNA, 19 nt, Artificial Sequence
  Description of Artificial Sequence: Synthetic oligonucleotide
  Antisense strand to SEQ ID NO: 2403734
augucagggaucagcccuu

SEQ ID NO: 2403736 - RNA, 19 nt, Artificial Sequence
  Description of Artificial Sequence: Synthetic oligonucleotide
  Sense strand starting at position 90 of SEQ ID NO: 1886348
agggcugaucccugacauu

SEQ ID NO: 2403737 - RNA, 19 nt, Artificial Sequence
  Description of Artificial Sequence: Synthetic oligonucleotide
  Antisense strand to SEQ ID NO: 2403736
aaugucagggaucagcccu

SEQ ID NO: 2403738 - RNA, 19 nt, Artificial Sequence
  Description of Artificial Sequence: Synthetic oligonucleotide
  Sense strand starting at position 120 of SEQ ID NO: 1886348
gggugaugacugcauugaa

SEQ ID NO: 2403739 - RNA, 19 nt, Artificial Sequence
  Description of Artificial Sequence: Synthetic oligonucleotide
  Antisense strand to SEQ ID NO: 2403738
uucaaugcagucaucaccc

SEQ ID NO: 2403740 - RNA, 19 nt, Artificial Sequence
  Description of Artificial Sequence: Synthetic oligonucleotide
  Sense strand starting at position 189 of SEQ ID NO: 1886348
guuaaagacuuucuggaaa

SEQ ID NO: 2403741 - RNA, 19 nt, Artificial Sequence
  Description of Artificial Sequence: Synthetic oligonucleotide
  Antisense strand to SEQ ID NO: 2403740
uuuccagaaagucuuuaac

SEQ ID NO: 2403742 - RNA, 19 nt, Artificial Sequence
  Description of Artificial Sequence: Synthetic oligonucleotide
  Sense strand starting at position 297 of SEQ ID NO: 1886348
ggacuuggugaaggguaua

SEQ ID NO: 2403743 - RNA, 19 nt, Artificial Sequence
  Description of Artificial Sequence: Synthetic oligonucleotide
  Antisense strand to SEQ ID NO: 2403742
uauacccuucaccaagucc

SEQ ID NO: 2403744 - RNA, 19 nt, Artificial Sequence
  Description of Artificial Sequence: Synthetic oligonucleotide
  Sense strand starting at position 346 of SEQ ID NO: 1886348
gguaaucuggacugauuga

SEQ ID NO: 2403745 - RNA, 19 nt, Artificial Sequence
  Description of Artificial Sequence: Synthetic oligonucleotide
  Antisense strand to SEQ ID NO: 2403744
ucaaucaguccagauuacc

SEQ ID NO: 2403746 - RNA, 19 nt, Artificial Sequence
  Description of Artificial Sequence: Synthetic oligonucleotide
  Sense strand starting at position 441 of SEQ ID NO: 1886348
ggccaaaugcuguugcuuu

SEQ ID NO: 2403747 - RNA, 19 nt, Artificial Sequence
  Description of Artificial Sequence: Synthetic oligonucleotide
  Antisense strand to SEQ ID NO: 2403746
aaagcaacagcauuuggcc

SEQ ID NO: 2403748 - RNA, 19 nt, Artificial Sequence
  Description of Artificial Sequence: Synthetic oligonucleotide
  Sense strand starting at position 556 of SEQ ID NO: 1886348
guagcugaccaugaguaga

SEQ ID NO: 2403749 - RNA, 19 nt, Artificial Sequence
  Description of Artificial Sequence: Synthetic oligonucleotide
  Antisense strand to SEQ ID NO: 2403748
ucuacucauggucagcuac

SEQ ID NO: 2403750 - RNA, 19 nt, Artificial Sequence
  Description of Artificial Sequence: Synthetic oligonucleotide
  Sense strand starting at position 558 of SEQ ID NO: 1886348
agcugaccaugaguagaua

SEQ ID NO: 2403751 - RNA, 19 nt, Artificial Sequence
  Description of Artificial Sequence: Synthetic oligonucleotide
  Antisense strand to SEQ ID NO: 2403750
uaucuacucauggucagcu

SEQ ID NO: 2403752 - RNA, 19 nt, Artificial Sequence
  Description of Artificial Sequence: Synthetic oligonucleotide
  Sense strand starting at position 559 of SEQ ID NO: 1886348
gcugaccaugaguagauau

SEQ ID NO: 2403753 - RNA, 19 nt, Artificial Sequence
  Description of Artificial Sequence: Synthetic oligonucleotide
  Antisense strand to SEQ ID NO: 2403752
auaucuacucauggucagc

SEQ ID NO: 2403754 - RNA, 19 nt, Artificial Sequence
  Description of Artificial Sequence: Synthetic oligonucleotide
  Sense strand starting at position 750 of SEQ ID NO: 1886348
acagcacugccagauuaau

SEQ ID NO: 2403755 - RNA, 19 nt, Artificial Sequence
  Description of Artificial Sequence: Synthetic oligonucleotide
  Antisense strand to SEQ ID NO: 2403754
auuaaucuggcagugcugu

SEQ ID NO: 2403756 - RNA, 19 nt, Artificial Sequence
  Description of Artificial Sequence: Synthetic oligonucleotide
  Sense strand starting at position 790 of SEQ ID NO: 1886348
gcgaguuugguucccagca

SEQ ID NO: 2403757 - RNA, 19 nt, Artificial Sequence
  Description of Artificial Sequence: Synthetic oligonucleotide
  Antisense strand to SEQ ID NO: 2403756
ugcugggaaccaaacucgc

SEQ ID NO: 2403758 - RNA, 19 nt, Artificial Sequence
  Description of Artificial Sequence: Synthetic oligonucleotide
  Sense strand starting at position 841 of SEQ ID NO: 1886348
aggugcugagagggauaua

SEQ ID NO: 2403759 - RNA, 19 nt, Artificial Sequence
  Description of Artificial Sequence: Synthetic oligonucleotide
  Antisense strand to SEQ ID NO: 2403758
uauaucccucucagcaccu

SEQ ID NO: 2403760 - RNA, 19 nt, Artificial Sequence
  Description of Artificial Sequence: Synthetic oligonucleotide
  Sense strand starting at position 905 of SEQ ID NO: 1886348
cuuugucugggacaaucau

SEQ ID NO: 2403761 - RNA, 19 nt, Artificial Sequence
  Description of Artificial Sequence: Synthetic oligonucleotide
  Antisense strand to SEQ ID NO: 2403760
augauugucccagacaaag

SEQ ID NO: 2403762 - RNA, 19 nt, Artificial Sequence
  Description of Artificial Sequence: Synthetic oligonucleotide
  Sense strand starting at position 911 of SEQ ID NO: 1886348
cugggacaaucauugcuua

SEQ ID NO: 2403763 - RNA, 19 nt, Artificial Sequence
  Description of Artificial Sequence: Synthetic oligonucleotide
  Antisense strand to SEQ ID NO: 2403762
uaagcaaugauugucccag

SEQ ID NO: 2403764 - RNA, 19 nt, Artificial Sequence
  Description of Artificial Sequence: Synthetic oligonucleotide
  Sense strand starting at position 912 of SEQ ID NO: 1886348
ugggacaaucauugcuuau

SEQ ID NO: 2403765 - RNA, 19 nt, Artificial Sequence
  Description of Artificial Sequence: Synthetic oligonucleotide
  Antisense strand to SEQ ID NO: 2403764
auaagcaaugauuguccca

SEQ ID NO: 2403766 - RNA, 19 nt, Artificial Sequence
  Description of Artificial Sequence: Synthetic oligonucleotide
  Sense strand starting at position 931 of SEQ ID NO: 1886348
gcuuguuauccugauacaa

SEQ ID NO: 2403767 - RNA, 19 nt, Artificial Sequence
  Description of Artificial Sequence: Synthetic oligonucleotide
  Antisense strand to SEQ ID NO: 2403766
uuguaucaggauaacaagc

SEQ ID NO: 2403768 - RNA, 19 nt, Artificial Sequence
  Description of Artificial Sequence: Synthetic oligonucleotide
  Sense strand starting at position 979 of SEQ ID NO: 1886348
aagugauccugauuagaca

SEQ ID NO: 2403769 - RNA, 19 nt, Artificial Sequence
  Description of Artificial Sequence: Synthetic oligonucleotide
  Antisense strand to SEQ ID NO: 2403768
ugucuaaucaggaucacuu

SEQ ID NO: 2403770 - RNA, 19 nt, Artificial Sequence
  Description of Artificial Sequence: Synthetic oligonucleotide
  Sense strand starting at position 1092 of SEQ ID NO: 1886348
gguagagauuggagguaga

SEQ ID NO: 2403771 - RNA, 19 nt, Artificial Sequence
  Description of Artificial Sequence: Synthetic oligonucleotide
  Antisense strand to SEQ ID NO: 2403770
ucuaccuccaaucucuacc

SEQ ID NO: 2403772 - RNA, 19 nt, Artificial Sequence
  Description of Artificial Sequence: Synthetic oligonucleotide
  Sense strand starting at position 1246 of SEQ ID NO: 1886348
gugggagccgugagaguua

SEQ ID NO: 2403773 - RNA, 19 nt, Artificial Sequence
  Description of Artificial Sequence: Synthetic oligonucleotide
  Antisense strand to SEQ ID NO: 2403772
uaacucucacggcucccac

SEQ ID NO: 2403774 - RNA, 19 nt, Artificial Sequence
  Description of Artificial Sequence: Synthetic oligonucleotide
  Sense strand starting at position 1259 of SEQ ID NO: 1886348
gaguuaaggguguauucca

SEQ ID NO: 2403775 - RNA, 19 nt, Artificial Sequence
  Description of Artificial Sequence: Synthetic oligonucleotide
  Antisense strand to SEQ ID NO: 2403774
uggaauacacccuuaacuc

SEQ ID NO: 2403776 - RNA, 19 nt, Artificial Sequence
  Description of Artificial Sequence: Synthetic oligonucleotide
  Sense strand starting at position 1267 of SEQ ID NO: 1886348
gguguauuccaugacucuc

SEQ ID NO: 2403777 - RNA, 19 nt, Artificial Sequence
  Description of Artificial Sequence: Synthetic oligonucleotide
  Antisense strand to SEQ ID NO: 2403776
gagagucauggaauacacc

SEQ ID NO: 2403778 - RNA, 19 nt, Artificial Sequence
  Description of Artificial Sequence: Synthetic oligonucleotide
  Sense strand starting at position 1283 of SEQ ID NO: 1886348
cucaaagggucaccuagau

SEQ ID NO: 2403779 - RNA, 19 nt, Artificial Sequence
  Description of Artificial Sequence: Synthetic oligonucleotide
  Antisense strand to SEQ ID NO: 2403778
aucuaggugacccuuugag

SEQ ID NO: 2403780 - RNA, 19 nt, Artificial Sequence
  Description of Artificial Sequence: Synthetic oligonucleotide
  Sense strand starting at position 1299 of SEQ ID NO: 1886348
gauggagcuuccucuggga

SEQ ID NO: 2403781 - RNA, 19 nt, Artificial Sequence
  Description of Artificial Sequence: Synthetic oligonucleotide
  Antisense strand to SEQ ID NO: 2403780
ucccagaggaagcuccauc

SEQ ID NO: 2403782 - RNA, 19 nt, Artificial Sequence
  Description of Artificial Sequence: Synthetic oligonucleotide
  Sense strand starting at position 1414 of SEQ ID NO: 1886348
cauagagauacugguguga

SEQ ID NO: 2403783 - RNA, 19 nt, Artificial Sequence
  Description of Artificial Sequence: Synthetic oligonucleotide
  Antisense strand to SEQ ID NO: 2403782
ucacaccaguaucucuaug

SEQ ID NO: 2403784 - RNA, 19 nt, Artificial Sequence
  Description of Artificial Sequence: Synthetic oligonucleotide
  Sense strand starting at position 1418 of SEQ ID NO: 1886348
gagauacuggugugaaaua

SEQ ID NO: 2403785 - RNA, 19 nt, Artificial Sequence
  Description of Artificial Sequence: Synthetic oligonucleotide
  Antisense strand to SEQ ID NO: 2403784
uauuucacaccaguaucuc

SEQ ID NO: 2403786 - RNA, 19 nt, Artificial Sequence
  Description of Artificial Sequence: Synthetic oligonucleotide
  Sense strand starting at position 1423 of SEQ ID NO: 1886348
acuggugugaaauagccaa

SEQ ID NO: 2403787 - RNA, 19 nt, Artificial Sequence
  Description of Artificial Sequence: Synthetic oligonucleotide
  Antisense strand to SEQ ID NO: 2403786
uuggcuauuucacaccagu

SEQ ID NO: 2403788 - RNA, 19 nt, Artificial Sequence
  Description of Artificial Sequence: Synthetic oligonucleotide
  Sense strand starting at position 1479 of SEQ ID NO: 1886348
uggucaucucaucaccagu

SEQ ID NO: 2403789 - RNA, 19 nt, Artificial Sequence
  Description of Artificial Sequence: Synthetic oligonucleotide
  Antisense strand to SEQ ID NO: 2403788
acuggugaugagaugacca

SEQ ID NO: 2403790 - RNA, 19 nt, Artificial Sequence
  Description of Artificial Sequence: Synthetic oligonucleotide
  Sense strand starting at position 1485 of SEQ ID NO: 1886348
ucucaucaccagugaagac

SEQ ID NO: 2403791 - RNA, 19 nt, Artificial Sequence
  Description of Artificial Sequence: Synthetic oligonucleotide
  Antisense strand to SEQ ID NO: 2403790
gucuucacuggugaugaga

SEQ ID NO: 2403792 - RNA, 19 nt, Artificial Sequence
  Description of Artificial Sequence: Synthetic oligonucleotide
  Sense strand starting at position 1798 of SEQ ID NO: 1886348
gggccuuucgggagugagu

SEQ ID NO: 2403793 - RNA, 19 nt, Artificial Sequence
  Description of Artificial Sequence: Synthetic oligonucleotide
  Antisense strand to SEQ ID NO: 2403792
acucacucccgaaaggccc

SEQ ID NO: 2403794 - RNA, 19 nt, Artificial Sequence
  Description of Artificial Sequence: Synthetic oligonucleotide
  Sense strand starting at position 2182 of SEQ ID NO: 1886348
caagcaggucucuaugaau

SEQ ID NO: 2403795 - RNA, 19 nt, Artificial Sequence
  Description of Artificial Sequence: Synthetic oligonucleotide
  Antisense strand to SEQ ID NO: 2403794
auucauagagaccugcuug

SEQ ID NO: 2403796 - RNA, 19 nt, Artificial Sequence
  Description of Artificial Sequence: Synthetic oligonucleotide
  Sense strand starting at position 2191 of SEQ ID NO: 1886348
cucuaugaauaguuugauu

SEQ ID NO: 2403797 - RNA, 19 nt, Artificial Sequence
  Description of Artificial Sequence: Synthetic oligonucleotide
  Antisense strand to SEQ ID NO: 2403796
aaucaaacuauucauagag

SEQ ID NO: 2403798 - RNA, 19 nt, Artificial Sequence
  Description of Artificial Sequence: Synthetic oligonucleotide
  Sense strand starting at position 2216 of SEQ ID NO: 1886348
aguaaugcuguugaggaaa

SEQ ID NO: 2403799 - RNA, 19 nt, Artificial Sequence
  Description of Artificial Sequence: Synthetic oligonucleotide
  Antisense strand to SEQ ID NO: 2403798
uuuccucaacagcauuacu

SEQ ID NO: 2403800 - RNA, 19 nt, Artificial Sequence
  Description of Artificial Sequence: Synthetic oligonucleotide
  Sense strand starting at position 2670 of SEQ ID NO: 1886348
ccugguggagcuuaagaau

SEQ ID NO: 2403801 - RNA, 19 nt, Artificial Sequence
  Description of Artificial Sequence: Synthetic oligonucleotide
  Antisense strand to SEQ ID NO: 2403800
auucuuaagcuccaccagg

SEQ ID NO: 2403802 - RNA, 19 nt, Artificial Sequence
  Description of Artificial Sequence: Synthetic oligonucleotide
  Sense strand starting at position 2990 of SEQ ID NO: 1886348
ccgggauggcuacauauga

SEQ ID NO: 2403803 - RNA, 19 nt, Artificial Sequence
  Description of Artificial Sequence: Synthetic oligonucleotide
  Antisense strand to SEQ ID NO: 2403802
ucauauguagccaucccgg

SEQ ID NO: 2403804 - RNA, 19 nt, Artificial Sequence
  Description of Artificial Sequence: Synthetic oligonucleotide
  Sense strand starting at position 3279 of SEQ ID NO: 1886348
ugacauuggcugcacauua

SEQ ID NO: 2403805 - RNA, 19 nt, Artificial Sequence
  Description of Artificial Sequence: Synthetic oligonucleotide
  Antisense strand to SEQ ID NO: 2403804
uaaugugcagccaauguca

SEQ ID NO: 2403806 - RNA, 19 nt, Artificial Sequence
  Description of Artificial Sequence: Synthetic oligonucleotide
  Sense strand starting at position 3372 of SEQ ID NO: 1886348
gcugcuagcagcuuuauga

SEQ ID NO: 2403807 - RNA, 19 nt, Artificial Sequence
  Description of Artificial Sequence: Synthetic oligonucleotide
  Antisense strand to SEQ ID NO: 2403806
ucauaaagcugcuagcagc

SEQ ID NO: 2403808 - RNA, 19 nt, Artificial Sequence
  Description of Artificial Sequence: Synthetic oligonucleotide
  Sense strand starting at position 3387 of SEQ ID NO: 1886348
augagcauuacaggugauu

SEQ ID NO: 2403809 - RNA, 19 nt, Artificial Sequence
  Description of Artificial Sequence: Synthetic oligonucleotide
  Antisense strand to SEQ ID NO: 2403808
aaucaccuguaaugcucau

SEQ ID NO: 2403810 - RNA, 19 nt, Artificial Sequence
  Description of Artificial Sequence: Synthetic oligonucleotide
  Sense strand starting at position 3390 of SEQ ID NO: 1886348
agcauuacaggugauucua

SEQ ID NO: 2403811 - RNA, 19 nt, Artificial Sequence
  Description of Artificial Sequence: Synthetic oligonucleotide
  Antisense strand to SEQ ID NO: 2403810
uagaaucaccuguaaugcu

SEQ ID NO: 2403812 - RNA, 19 nt, Artificial Sequence
  Description of Artificial Sequence: Synthetic oligonucleotide
  Sense strand starting at position 3654 of SEQ ID NO: 1886348
guccuagaauagcuagaaa

SEQ ID NO: 2403813 - RNA, 19 nt, Artificial Sequence
  Description of Artificial Sequence: Synthetic oligonucleotide
  Antisense strand to SEQ ID NO: 2403812
uuucuagcuauucuaggac

SEQ ID NO: 2403814 - RNA, 19 nt, Artificial Sequence
  Description of Artificial Sequence: Synthetic oligonucleotide
  Sense strand starting at position 48 of SEQ ID NO: 1886349
cagagaggugugugggaua

SEQ ID NO: 2403815 - RNA, 19 nt, Artificial Sequence
  Description of Artificial Sequence: Synthetic oligonucleotide
  Antisense strand to SEQ ID NO: 2403814
uaucccacacaccucucug

SEQ ID NO: 2403816 - RNA, 19 nt, Artificial Sequence
  Description of Artificial Sequence: Synthetic oligonucleotide
  Sense strand starting at position 131 of SEQ ID NO: 1886349
gcgugcaucaccucaguuu

SEQ ID NO: 2403817 - RNA, 19 nt, Artificial Sequence
  Description of Artificial Sequence: Synthetic oligonucleotide
  Antisense strand to SEQ ID NO: 2403816
aaacugaggugaugcacgc

SEQ ID NO: 2403818 - RNA, 19 nt, Artificial Sequence
  Description of Artificial Sequence: Synthetic oligonucleotide
  Sense strand starting at position 248 of SEQ ID NO: 1886349
ggaagagauuccucgggug

SEQ ID NO: 2403819 - RNA, 19 nt, Artificial Sequence
  Description of Artificial Sequence: Synthetic oligonucleotide
  Antisense strand to SEQ ID NO: 2403818
cacccgaggaaucucuucc

SEQ ID NO: 2403820 - RNA, 19 nt, Artificial Sequence
  Description of Artificial Sequence: Synthetic oligonucleotide
  Sense strand starting at position 263 of SEQ ID NO: 1886349
gguguuauuucccuccagu

SEQ ID NO: 2403821 - RNA, 19 nt, Artificial Sequence
  Description of Artificial Sequence: Synthetic oligonucleotide
  Antisense strand to SEQ ID NO: 2403820
acuggagggaaauaacacc

SEQ ID NO: 2403822 - RNA, 19 nt, Artificial Sequence
  Description of Artificial Sequence: Synthetic oligonucleotide
  Sense strand starting at position 461 of SEQ ID NO: 1886349
acuggugaugcaugaaaua

SEQ ID NO: 2403823 - RNA, 19 nt, Artificial Sequence
  Description of Artificial Sequence: Synthetic oligonucleotide
  Antisense strand to SEQ ID NO: 2403822
uauuucaugcaucaccagu

SEQ ID NO: 2403824 - RNA, 19 nt, Artificial Sequence
  Description of Artificial Sequence: Synthetic oligonucleotide
  Sense strand starting at position 551 of SEQ ID NO: 1886349
aaagucaaucuuuggugga

SEQ ID NO: 2403825 - RNA, 19 nt, Artificial Sequence
  Description of Artificial Sequence: Synthetic oligonucleotide
  Antisense strand to SEQ ID NO: 2403824
uccaccaaagauugacuuu

SEQ ID NO: 2403826 - RNA, 19 nt, Artificial Sequence
  Description of Artificial Sequence: Synthetic oligonucleotide
  Sense strand starting at position 553 of SEQ ID NO: 1886349
agucaaucuuugguggaaa

SEQ ID NO: 2403827 - RNA, 19 nt, Artificial Sequence
  Description of Artificial Sequence: Synthetic oligonucleotide
  Antisense strand to SEQ ID NO: 2403826
uuuccaccaaagauugacu

SEQ ID NO: 2403828 - RNA, 19 nt, Artificial Sequence
  Description of Artificial Sequence: Synthetic oligonucleotide
  Sense strand starting at position 656 of SEQ ID NO: 1886349
ugugauuaauggguaauug

SEQ ID NO: 2403829 - RNA, 19 nt, Artificial Sequence
  Description of Artificial Sequence: Synthetic oligonucleotide
  Antisense strand to SEQ ID NO: 2403828
caauuacccauuaaucaca

SEQ ID NO: 2403830 - RNA, 19 nt, Artificial Sequence
  Description of Artificial Sequence: Synthetic oligonucleotide
  Sense strand starting at position 757 of SEQ ID NO: 1886349
ccagaauccuugcugagaa

SEQ ID NO: 2403831 - RNA, 19 nt, Artificial Sequence
  Description of Artificial Sequence: Synthetic oligonucleotide
  Antisense strand to SEQ ID NO: 2403830
uucucagcaaggauucugg

SEQ ID NO: 2403832 - RNA, 19 nt, Artificial Sequence
  Description of Artificial Sequence: Synthetic oligonucleotide
  Sense strand starting at position 839 of SEQ ID NO: 1886349
ucuguacuucuagauaguc

SEQ ID NO: 2403833 - RNA, 19 nt, Artificial Sequence
  Description of Artificial Sequence: Synthetic oligonucleotide
  Antisense strand to SEQ ID NO: 2403832
gacuaucuagaaguacaga

SEQ ID NO: 2403834 - RNA, 19 nt, Artificial Sequence
  Description of Artificial Sequence: Synthetic oligonucleotide
  Sense strand starting at position 879 of SEQ ID NO: 1886349
ggagccaagagucaguaua

SEQ ID NO: 2403835 - RNA, 19 nt, Artificial Sequence
  Description of Artificial Sequence: Synthetic oligonucleotide
  Antisense strand to SEQ ID NO: 2403834
uauacugacucuuggcucc

SEQ ID NO: 2403836 - RNA, 19 nt, Artificial Sequence
  Description of Artificial Sequence: Synthetic oligonucleotide
  Sense strand starting at position 951 of SEQ ID NO: 1886349
ugauacucacuaugguaga

SEQ ID NO: 2403837 - RNA, 19 nt, Artificial Sequence
  Description of Artificial Sequence: Synthetic oligonucleotide
  Antisense strand to SEQ ID NO: 2403836
ucuaccauagugaguauca

SEQ ID NO: 2403838 - RNA, 19 nt, Artificial Sequence
  Description of Artificial Sequence: Synthetic oligonucleotide
  Sense strand starting at position 1019 of SEQ ID NO: 1886349
ugaacauguuaaguuacau

SEQ ID NO: 2403839 - RNA, 19 nt, Artificial Sequence
  Description of Artificial Sequence: Synthetic oligonucleotide
  Antisense strand to SEQ ID NO: 2403838
auguaacuuaacauguuca

SEQ ID NO: 2403840 - RNA, 19 nt, Artificial Sequence
  Description of Artificial Sequence: Synthetic oligonucleotide
  Sense strand starting at position 1433 of SEQ ID NO: 1886349
aaugaagacccuugugaug

SEQ ID NO: 2403841 - RNA, 19 nt, Artificial Sequence
  Description of Artificial Sequence: Synthetic oligonucleotide
  Antisense strand to SEQ ID NO: 2403840
caucacaagggucuucauu

SEQ ID NO: 2403842 - RNA, 19 nt, Artificial Sequence
  Description of Artificial Sequence: Synthetic oligonucleotide
  Sense strand starting at position 1496 of SEQ ID NO: 1886349
aggguccuucuagguagaa

SEQ ID NO: 2403843 - RNA, 19 nt, Artificial Sequence
  Description of Artificial Sequence: Synthetic oligonucleotide
  Antisense strand to SEQ ID NO: 2403842
uucuaccuagaaggacccu

SEQ ID NO: 2403844 - RNA, 19 nt, Artificial Sequence
  Description of Artificial Sequence: Synthetic oligonucleotide
  Sense strand starting at position 1566 of SEQ ID NO: 1886349
gggcuuugcagaugaagga

SEQ ID NO: 2403845 - RNA, 19 nt, Artificial Sequence
  Description of Artificial Sequence: Synthetic oligonucleotide
  Antisense strand to SEQ ID NO: 2403844
uccuucaucugcaaagccc

SEQ ID NO: 2403846 - RNA, 19 nt, Artificial Sequence
  Description of Artificial Sequence: Synthetic oligonucleotide
  Sense strand starting at position 1772 of SEQ ID NO: 1886349
ccacuaagugaauggugau

SEQ ID NO: 2403847 - RNA, 19 nt, Artificial Sequence
  Description of Artificial Sequence: Synthetic oligonucleotide
  Antisense strand to SEQ ID NO: 2403846
aucaccauucacuuagugg

SEQ ID NO: 2403848 - RNA, 19 nt, Artificial Sequence
  Description of Artificial Sequence: Synthetic oligonucleotide
  Sense strand starting at position 2040 of SEQ ID NO: 1886349
gcucuaaagcaggaaucau

SEQ ID NO: 2403849 - RNA, 19 nt, Artificial Sequence
  Description of Artificial Sequence: Synthetic oligonucleotide
  Antisense strand to SEQ ID NO: 2403848
augauuccugcuuuagagc

SEQ ID NO: 2403850 - RNA, 19 nt, Artificial Sequence
  Description of Artificial Sequence: Synthetic oligonucleotide
  Sense strand starting at position 2134 of SEQ ID NO: 1886349
uaguaaugaugaguugaac

SEQ ID NO: 2403851 - RNA, 19 nt, Artificial Sequence
  Description of Artificial Sequence: Synthetic oligonucleotide
  Antisense strand to SEQ ID NO: 2403850
guucaacucaucauuacua

SEQ ID NO: 2403852 - RNA, 19 nt, Artificial Sequence
  Description of Artificial Sequence: Synthetic oligonucleotide
  Sense strand starting at position 2564 of SEQ ID NO: 1886349
ccauguaauuaguuuaaga

SEQ ID NO: 2403853 - RNA, 19 nt, Artificial Sequence
  Description of Artificial Sequence: Synthetic oligonucleotide
  Antisense strand to SEQ ID NO: 2403852
ucuuaaacuaauuacaugg

SEQ ID NO: 2403854 - RNA, 19 nt, Artificial Sequence
  Description of Artificial Sequence: Synthetic oligonucleotide
  Sense strand starting at position 2633 of SEQ ID NO: 1886349
cuaggcacagacugauaaa

SEQ ID NO: 2403855 - RNA, 19 nt, Artificial Sequence
  Description of Artificial Sequence: Synthetic oligonucleotide
  Antisense strand to SEQ ID NO: 2403854
uuuaucagucugugccuag

SEQ ID NO: 2403856 - RNA, 19 nt, Artificial Sequence
  Description of Artificial Sequence: Synthetic oligonucleotide
  Sense strand starting at position 2677 of SEQ ID NO: 1886349
uacguuaaagaugaguuaa

SEQ ID NO: 2403857 - RNA, 19 nt, Artificial Sequence
  Description of Artificial Sequence: Synthetic oligonucleotide
  Antisense strand to SEQ ID NO: 2403856
uuaacucaucuuuaacgua

SEQ ID NO: 2403858 - RNA, 19 nt, Artificial Sequence
  Description of Artificial Sequence: Synthetic oligonucleotide
  Sense strand starting at position 2743 of SEQ ID NO: 1886349
agaauuacauagcuuauga

SEQ ID NO: 2403859 - RNA, 19 nt, Artificial Sequence
  Description of Artificial Sequence: Synthetic oligonucleotide
  Antisense strand to SEQ ID NO: 2403858
ucauaagcuauguaauucu

SEQ ID NO: 2403860 - RNA, 19 nt, Artificial Sequence
  Description of Artificial Sequence: Synthetic oligonucleotide
  Sense strand starting at position 2763 of SEQ ID NO: 1886349
gucaucuggcuggaacuau

SEQ ID NO: 2403861 - RNA, 19 nt, Artificial Sequence
  Description of Artificial Sequence: Synthetic oligonucleotide
  Antisense strand to SEQ ID NO: 2403860
auaguuccagccagaugac

SEQ ID NO: 2403862 - RNA, 19 nt, Artificial Sequence
  Description of Artificial Sequence: Synthetic oligonucleotide
  Sense strand starting at position 2873 of SEQ ID NO: 1886349
uacuuuauggcaggacaua

SEQ ID NO: 2403863 - RNA, 19 nt, Artificial Sequence
  Description of Artificial Sequence: Synthetic oligonucleotide
  Antisense strand to SEQ ID NO: 2403862
uauguccugccauaaagua

SEQ ID NO: 2403864 - RNA, 19 nt, Artificial Sequence
  Description of Artificial Sequence: Synthetic oligonucleotide
  Sense strand starting at position 2962 of SEQ ID NO: 1886349
aagauuuagcucugcagug

SEQ ID NO: 2403865 - RNA, 19 nt, Artificial Sequence
  Description of Artificial Sequence: Synthetic oligonucleotide
  Antisense strand to SEQ ID NO: 2403864
cacugcagagcuaaaucuu

SEQ ID NO: 2403866 - RNA, 19 nt, Artificial Sequence
  Description of Artificial Sequence: Synthetic oligonucleotide
  Sense strand starting at position 2964 of SEQ ID NO: 1886349
gauuuagcucugcagugua

SEQ ID NO: 2403867 - RNA, 19 nt, Artificial Sequence
  Description of Artificial Sequence: Synthetic oligonucleotide
  Antisense strand to SEQ ID NO: 2403866
uacacugcagagcuaaauc

SEQ ID NO: 2403868 - RNA, 19 nt, Artificial Sequence
  Description of Artificial Sequence: Synthetic oligonucleotide
  Sense strand starting at position 3089 of SEQ ID NO: 1886349
gcuugauggaguuaacuag

SEQ ID NO: 2403869 - RNA, 19 nt, Artificial Sequence
  Description of Artificial Sequence: Synthetic oligonucleotide
  Antisense strand to SEQ ID NO: 2403868
cuaguuaacuccaucaagc

SEQ ID NO: 2403870 - RNA, 19 nt, Artificial Sequence
  Description of Artificial Sequence: Synthetic oligonucleotide
  Sense strand starting at position 3104 of SEQ ID NO: 1886349
cuaggagaucucugaguug

SEQ ID NO: 2403871 - RNA, 19 nt, Artificial Sequence
  Description of Artificial Sequence: Synthetic oligonucleotide
  Antisense strand to SEQ ID NO: 2403870
caacucagagaucuccuag

SEQ ID NO: 2403872 - RNA, 19 nt, Artificial Sequence
  Description of Artificial Sequence: Synthetic oligonucleotide
  Sense strand starting at position 3107 of SEQ ID NO: 1886349
ggagaucucugaguuggag

SEQ ID NO: 2403873 - RNA, 19 nt, Artificial Sequence
  Description of Artificial Sequence: Synthetic oligonucleotide
  Antisense strand to SEQ ID NO: 2403872
cuccaacucagagaucucc

SEQ ID NO: 2403874 - RNA, 19 nt, Artificial Sequence
  Description of Artificial Sequence: Synthetic oligonucleotide
  Sense strand starting at position 3261 of SEQ ID NO: 1886349
acucauguuccagggaaga

SEQ ID NO: 2403875 - RNA, 19 nt, Artificial Sequence
  Description of Artificial Sequence: Synthetic oligonucleotide
  Antisense strand to SEQ ID NO: 2403874
ucuucccuggaacaugagu

SEQ ID NO: 2403876 - RNA, 19 nt, Artificial Sequence
  Description of Artificial Sequence: Synthetic oligonucleotide
  Sense strand starting at position 3355 of SEQ ID NO: 1886349
acaagucagucuccugaaa

SEQ ID NO: 2403877 - RNA, 19 nt, Artificial Sequence
  Description of Artificial Sequence: Synthetic oligonucleotide
  Antisense strand to SEQ ID NO: 2403876
uuucaggagacugacuugu

SEQ ID NO: 2403878 - RNA, 19 nt, Artificial Sequence
  Description of Artificial Sequence: Synthetic oligonucleotide
  Sense strand starting at position 3483 of SEQ ID NO: 1886349
ggucucaaauuucuugcua

SEQ ID NO: 2403879 - RNA, 19 nt, Artificial Sequence
  Description of Artificial Sequence: Synthetic oligonucleotide
  Antisense strand to SEQ ID NO: 2403878
uagcaagaaauuugagacc

SEQ ID NO: 2403880 - RNA, 19 nt, Artificial Sequence
  Description of Artificial Sequence: Synthetic oligonucleotide
  Sense strand starting at position 3487 of SEQ ID NO: 1886349
ucaaauuucuugcuauggu

SEQ ID NO: 2403881 - RNA, 19 nt, Artificial Sequence
  Description of Artificial Sequence: Synthetic oligonucleotide
  Antisense strand to SEQ ID NO: 2403880
accauagcaagaaauuuga

SEQ ID NO: 2403882 - RNA, 19 nt, Artificial Sequence
  Description of Artificial Sequence: Synthetic oligonucleotide
  Sense strand starting at position 3506 of SEQ ID NO: 1886349
ucugaauguuuagugauag

SEQ ID NO: 2403883 - RNA, 19 nt, Artificial Sequence
  Description of Artificial Sequence: Synthetic oligonucleotide
  Antisense strand to SEQ ID NO: 2403882
cuaucacuaaacauucaga

SEQ ID NO: 2403884 - RNA, 19 nt, Artificial Sequence
  Description of Artificial Sequence: Synthetic oligonucleotide
  Sense strand starting at position 3526 of SEQ ID NO: 1886349
uucguuugaagaugaaauc

SEQ ID NO: 2403885 - RNA, 19 nt, Artificial Sequence
  Description of Artificial Sequence: Synthetic oligonucleotide
  Antisense strand to SEQ ID NO: 2403884
gauuucaucuucaaacgaa

SEQ ID NO: 2403886 - RNA, 19 nt, Artificial Sequence
  Description of Artificial Sequence: Synthetic oligonucleotide
  Sense strand starting at position 3538 of SEQ ID NO: 1886349
ugaaaucaacccugauguu

SEQ ID NO: 2403887 - RNA, 19 nt, Artificial Sequence
  Description of Artificial Sequence: Synthetic oligonucleotide
  Antisense strand to SEQ ID NO: 2403886
aacaucaggguugauuuca

SEQ ID NO: 2403888 - RNA, 19 nt, Artificial Sequence
  Description of Artificial Sequence: Synthetic oligonucleotide
  Sense strand starting at position 3794 of SEQ ID NO: 1886349
gauccuaaauugguggaua

SEQ ID NO: 2403889 - RNA, 19 nt, Artificial Sequence
  Description of Artificial Sequence: Synthetic oligonucleotide
  Antisense strand to SEQ ID NO: 2403888
uauccaccaauuuaggauc

SEQ ID NO: 2403890 - RNA, 19 nt, Artificial Sequence
  Description of Artificial Sequence: Synthetic oligonucleotide
  Sense strand starting at position 3796 of SEQ ID NO: 1886349
uccuaaauugguggauaaa

SEQ ID NO: 2403891 - RNA, 19 nt, Artificial Sequence
  Description of Artificial Sequence: Synthetic oligonucleotide
  Antisense strand to SEQ ID NO: 2403890
uuuauccaccaauuuagga

SEQ ID NO: 2403892 - RNA, 19 nt, Artificial Sequence
  Description of Artificial Sequence: Synthetic oligonucleotide
  Sense strand starting at position 3926 of SEQ ID NO: 1886349
gaugaaaccuggucuguac

SEQ ID NO: 2403893 - RNA, 19 nt, Artificial Sequence
  Description of Artificial Sequence: Synthetic oligonucleotide
  Antisense strand to SEQ ID NO: 2403892
guacagaccagguuucauc

SEQ ID NO: 2403894 - RNA, 19 nt, Artificial Sequence
  Description of Artificial Sequence: Synthetic oligonucleotide
  Sense strand starting at position 69 of SEQ ID NO: 1886350
ccacuaaguggauguucua

SEQ ID NO: 2403895 - RNA, 19 nt, Artificial Sequence
  Description of Artificial Sequence: Synthetic oligonucleotide
  Antisense strand to SEQ ID NO: 2403894
uagaacauccacuuagugg

SEQ ID NO: 2403896 - RNA, 19 nt, Artificial Sequence
  Description of Artificial Sequence: Synthetic oligonucleotide
  Sense strand starting at position 72 of SEQ ID NO: 1886350
cuaaguggauguucuauaa

SEQ ID NO: 2403897 - RNA, 19 nt, Artificial Sequence
  Description of Artificial Sequence: Synthetic oligonucleotide
  Antisense strand to SEQ ID NO: 2403896
uuauagaacauccacuuag

SEQ ID NO: 2403898 - RNA, 19 nt, Artificial Sequence
  Description of Artificial Sequence: Synthetic oligonucleotide
  Sense strand starting at position 76 of SEQ ID NO: 1886350
guggauguucuauaacuuu

SEQ ID NO: 2403899 - RNA, 19 nt, Artificial Sequence
  Description of Artificial Sequence: Synthetic oligonucleotide
  Antisense strand to SEQ ID NO: 2403898
aaaguuauagaacauccac

SEQ ID NO: 2403900 - RNA, 19 nt, Artificial Sequence
  Description of Artificial Sequence: Synthetic oligonucleotide
  Sense strand starting at position 82 of SEQ ID NO: 1886350
guucuauaacuuugguuaa

SEQ ID NO: 2403901 - RNA, 19 nt, Artificial Sequence
  Description of Artificial Sequence: Synthetic oligonucleotide
  Antisense strand to SEQ ID NO: 2403900
uuaaccaaaguuauagaac

SEQ ID NO: 2403902 - RNA, 19 nt, Artificial Sequence
  Description of Artificial Sequence: Synthetic oligonucleotide
  Sense strand starting at position 143 of SEQ ID NO: 1886350
augcaucuuugugcaggaa

SEQ ID NO: 2403903 - RNA, 19 nt, Artificial Sequence
  Description of Artificial Sequence: Synthetic oligonucleotide
  Antisense strand to SEQ ID NO: 2403902
uuccugcacaaagaugcau

SEQ ID NO: 2403904 - RNA, 19 nt, Artificial Sequence
  Description of Artificial Sequence: Synthetic oligonucleotide
  Sense strand starting at position 147 of SEQ ID NO: 1886350
aucuuugugcaggaagagu

SEQ ID NO: 2403905 - RNA, 19 nt, Artificial Sequence
  Description of Artificial Sequence: Synthetic oligonucleotide
  Antisense strand to SEQ ID NO: 2403904
acucuuccugcacaaagau

SEQ ID NO: 2403906 - RNA, 19 nt, Artificial Sequence
  Description of Artificial Sequence: Synthetic oligonucleotide
  Sense strand starting at position 366 of SEQ ID NO: 1886350
ccuaacaaugagugagguu

SEQ ID NO: 2403907 - RNA, 19 nt, Artificial Sequence
  Description of Artificial Sequence: Synthetic oligonucleotide
  Antisense strand to SEQ ID NO: 2403906
aaccucacucauuguuagg

SEQ ID NO: 2403908 - RNA, 19 nt, Artificial Sequence
  Description of Artificial Sequence: Synthetic oligonucleotide
  Sense strand starting at position 609 of SEQ ID NO: 1886350
ggauuaauuuacuagucuu

SEQ ID NO: 2403909 - RNA, 19 nt, Artificial Sequence
  Description of Artificial Sequence: Synthetic oligonucleotide
  Antisense strand to SEQ ID NO: 2403908
aagacuaguaaauuaaucc

SEQ ID NO: 2403910 - RNA, 19 nt, Artificial Sequence
  Description of Artificial Sequence: Synthetic oligonucleotide
  Sense strand starting at position 645 of SEQ ID NO: 1886350
agaguauuuacaugcguua

SEQ ID NO: 2403911 - RNA, 19 nt, Artificial Sequence
  Description of Artificial Sequence: Synthetic oligonucleotide
  Antisense strand to SEQ ID NO: 2403910
uaacgcauguaaauacucu

SEQ ID NO: 2403912 - RNA, 19 nt, Artificial Sequence
  Description of Artificial Sequence: Synthetic oligonucleotide
  Sense strand starting at position 648 of SEQ ID NO: 1886350
guauuuacaugcguuacuu

SEQ ID NO: 2403913 - RNA, 19 nt, Artificial Sequence
  Description of Artificial Sequence: Synthetic oligonucleotide
  Antisense strand to SEQ ID NO: 2403912
aaguaacgcauguaaauac

SEQ ID NO: 2403914 - RNA, 19 nt, Artificial Sequence
  Description of Artificial Sequence: Synthetic oligonucleotide
  Sense strand starting at position 1013 of SEQ ID NO: 1886350
caggaacauuuaugaugua

SEQ ID NO: 2403915 - RNA, 19 nt, Artificial Sequence
  Description of Artificial Sequence: Synthetic oligonucleotide
  Antisense strand to SEQ ID NO: 2403914
uacaucauaaauguuccug

SEQ ID NO: 2403916 - RNA, 19 nt, Artificial Sequence
  Description of Artificial Sequence: Synthetic oligonucleotide
  Sense strand starting at position 1014 of SEQ ID NO: 1886350
aggaacauuuaugauguau

SEQ ID NO: 2403917 - RNA, 19 nt, Artificial Sequence
  Description of Artificial Sequence: Synthetic oligonucleotide
  Antisense strand to SEQ ID NO: 2403916
auacaucauaaauguuccu

SEQ ID NO: 2403918 - RNA, 19 nt, Artificial Sequence
  Description of Artificial Sequence: Synthetic oligonucleotide
  Sense strand starting at position 1071 of SEQ ID NO: 1886350
augagugaaacuggguuua

SEQ ID NO: 2403919 - RNA, 19 nt, Artificial Sequence
  Description of Artificial Sequence: Synthetic oligonucleotide
  Antisense strand to SEQ ID NO: 2403918
uaaacccaguuucacucau

SEQ ID NO: 2403920 - RNA, 19 nt, Artificial Sequence
  Description of Artificial Sequence: Synthetic oligonucleotide
  Sense strand starting at position 1073 of SEQ ID NO: 1886350
gagugaaacuggguuuaga

SEQ ID NO: 2403921 - RNA, 19 nt, Artificial Sequence
  Description of Artificial Sequence: Synthetic oligonucleotide
  Antisense strand to SEQ ID NO: 2403920
ucuaaacccaguuucacuc

SEQ ID NO: 2403922 - RNA, 19 nt, Artificial Sequence
  Description of Artificial Sequence: Synthetic oligonucleotide
  Sense strand starting at position 1169 of SEQ ID NO: 1886350
aguugucaauuuguuuaca

SEQ ID NO: 2403923 - RNA, 19 nt, Artificial Sequence
  Description of Artificial Sequence: Synthetic oligonucleotide
  Antisense strand to SEQ ID NO: 2403922
uguaaacaaauugacaacu

SEQ ID NO: 2403924 - RNA, 19 nt, Artificial Sequence
  Description of Artificial Sequence: Synthetic oligonucleotide
  Sense strand starting at position 2265 of SEQ ID NO: 1886350
gaggcuguggccgagaaga

SEQ ID NO: 2403925 - RNA, 19 nt, Artificial Sequence
  Description of Artificial Sequence: Synthetic oligonucleotide
  Antisense strand to SEQ ID NO: 2403924
ucuucucggccacagccuc

SEQ ID NO: 2403926 - RNA, 19 nt, Artificial Sequence
  Description of Artificial Sequence: Synthetic oligonucleotide
  Sense strand starting at position 2275 of SEQ ID NO: 1886350
ccgagaagaugcuccagua

SEQ ID NO: 2403927 - RNA, 19 nt, Artificial Sequence
  Description of Artificial Sequence: Synthetic oligonucleotide
  Antisense strand to SEQ ID NO: 2403926
uacuggagcaucuucucgg

SEQ ID NO: 2403928 - RNA, 19 nt, Artificial Sequence
  Description of Artificial Sequence: Synthetic oligonucleotide
  Sense strand starting at position 2495 of SEQ ID NO: 1886350
aaagauugggccuguuaug

SEQ ID NO: 2403929 - RNA, 19 nt, Artificial Sequence
  Description of Artificial Sequence: Synthetic oligonucleotide
  Antisense strand to SEQ ID NO: 2403928
cauaacaggcccaaucuuu

SEQ ID NO: 2403930 - RNA, 19 nt, Artificial Sequence
  Description of Artificial Sequence: Synthetic oligonucleotide
  Sense strand starting at position 2504 of SEQ ID NO: 1886350
gccuguuaugcucacaaug

SEQ ID NO: 2403931 - RNA, 19 nt, Artificial Sequence
  Description of Artificial Sequence: Synthetic oligonucleotide
  Antisense strand to SEQ ID NO: 2403930
cauugugagcauaacaggc

SEQ ID NO: 2403932 - RNA, 19 nt, Artificial Sequence
  Description of Artificial Sequence: Synthetic oligonucleotide
  Sense strand starting at position 2520 of SEQ ID NO: 1886350
augacuucaggugguaagu

SEQ ID NO: 2403933 - RNA, 19 nt, Artificial Sequence
  Description of Artificial Sequence: Synthetic oligonucleotide
  Antisense strand to SEQ ID NO: 2403932
acuuaccaccugaagucau

SEQ ID NO: 2403934 - RNA, 19 nt, Artificial Sequence
  Description of Artificial Sequence: Synthetic oligonucleotide
  Sense strand starting at position 2582 of SEQ ID NO: 1886350
guugaaugcuguuuaggac

SEQ ID NO: 2403935 - RNA, 19 nt, Artificial Sequence
  Description of Artificial Sequence: Synthetic oligonucleotide
  Antisense strand to SEQ ID NO: 2403934
guccuaaacagcauucaac

SEQ ID NO: 2403936 - RNA, 19 nt, Artificial Sequence
  Description of Artificial Sequence: Synthetic oligonucleotide
  Sense strand starting at position 2591 of SEQ ID NO: 1886350
uguuuaggacuggauguuu

SEQ ID NO: 2403937 - RNA, 19 nt, Artificial Sequence
  Description of Artificial Sequence: Synthetic oligonucleotide
  Antisense strand to SEQ ID NO: 2403936
aaacauccaguccuaaaca

SEQ ID NO: 2403938 - RNA, 19 nt, Artificial Sequence
  Description of Artificial Sequence: Synthetic oligonucleotide
  Sense strand starting at position 2880 of SEQ ID NO: 1886350
ugucguugccagaggguaa

SEQ ID NO: 2403939 - RNA, 19 nt, Artificial Sequence
  Description of Artificial Sequence: Synthetic oligonucleotide
  Antisense strand to SEQ ID NO: 2403938
uuacccucuggcaacgaca

SEQ ID NO: 2403940 - RNA, 19 nt, Artificial Sequence
  Description of Artificial Sequence: Synthetic oligonucleotide
  Sense strand starting at position 3103 of SEQ ID NO: 1886350
uggguugcucaaggaaaca

SEQ ID NO: 2403941 - RNA, 19 nt, Artificial Sequence
  Description of Artificial Sequence: Synthetic oligonucleotide
  Antisense strand to SEQ ID NO: 2403940
uguuuccuugagcaaccca

SEQ ID NO: 2403942 - RNA, 19 nt, Artificial Sequence
  Description of Artificial Sequence: Synthetic oligonucleotide
  Sense strand starting at position 3168 of SEQ ID NO: 1886350
cuuggagucagccaguuaa

SEQ ID NO: 2403943 - RNA, 19 nt, Artificial Sequence
  Description of Artificial Sequence: Synthetic oligonucleotide
  Antisense strand to SEQ ID NO: 2403942
uuaacuggcugacuccaag

SEQ ID NO: 2403944 - RNA, 19 nt, Artificial Sequence
  Description of Artificial Sequence: Synthetic oligonucleotide
  Sense strand starting at position 3221 of SEQ ID NO: 1886350
agcuuugcccaagacuagu

SEQ ID NO: 2403945 - RNA, 19 nt, Artificial Sequence
  Description of Artificial Sequence: Synthetic oligonucleotide
  Antisense strand to SEQ ID NO: 2403944
acuagucuugggcaaagcu

SEQ ID NO: 2403946 - RNA, 19 nt, Artificial Sequence
  Description of Artificial Sequence: Synthetic oligonucleotide
  Sense strand starting at position 3417 of SEQ ID NO: 1886350
uggaguuuccagggaaccu

SEQ ID NO: 2403947 - RNA, 19 nt, Artificial Sequence
  Description of Artificial Sequence: Synthetic oligonucleotide
  Antisense strand to SEQ ID NO: 2403946
agguucccuggaaacucca

SEQ ID NO: 2403948 - RNA, 19 nt, Artificial Sequence
  Description of Artificial Sequence: Synthetic oligonucleotide
  Sense strand starting at position 3603 of SEQ ID NO: 1886350
ugugaaagcuuacugucca

SEQ ID NO: 2403949 - RNA, 19 nt, Artificial Sequence
  Description of Artificial Sequence: Synthetic oligonucleotide
  Antisense strand to SEQ ID NO: 2403948
uggacaguaagcuuucaca

SEQ ID NO: 2403950 - RNA, 19 nt, Artificial Sequence
  Description of Artificial Sequence: Synthetic oligonucleotide
  Sense strand starting at position 3671 of SEQ ID NO: 1886350
cugcaagucuguccuaaag

SEQ ID NO: 2403951 - RNA, 19 nt, Artificial Sequence
  Description of Artificial Sequence: Synthetic oligonucleotide
  Antisense strand to SEQ ID NO: 2403950
cuuuaggacagacuugcag

SEQ ID NO: 2403952 - RNA, 19 nt, Artificial Sequence
  Description of Artificial Sequence: Synthetic oligonucleotide
  Sense strand starting at position 3677 of SEQ ID NO: 1886350
gucuguccuaaagaguagu

SEQ ID NO: 2403953 - RNA, 19 nt, Artificial Sequence
  Description of Artificial Sequence: Synthetic oligonucleotide
  Antisense strand to SEQ ID NO: 2403952
acuacucuuuaggacagac

SEQ ID NO: 2403954 - RNA, 19 nt, Artificial Sequence
  Description of Artificial Sequence: Synthetic oligonucleotide
  Sense strand starting at position 3715 of SEQ ID NO: 1886350
accuucuaguccuuagaua

SEQ ID NO: 2403955 - RNA, 19 nt, Artificial Sequence
  Description of Artificial Sequence: Synthetic oligonucleotide
  Antisense strand to SEQ ID NO: 2403954
uaucuaaggacuagaaggu

SEQ ID NO: 2403956 - RNA, 19 nt, Artificial Sequence
  Description of Artificial Sequence: Synthetic oligonucleotide
  Sense strand starting at position 3716 of SEQ ID NO: 1886350
ccuucuaguccuuagauac

SEQ ID NO: 2403957 - RNA, 19 nt, Artificial Sequence
  Description of Artificial Sequence: Synthetic oligonucleotide
  Antisense strand to SEQ ID NO: 2403956
guaucuaaggacuagaagg

SEQ ID NO: 2403958 - RNA, 19 nt, Artificial Sequence
  Description of Artificial Sequence: Synthetic oligonucleotide
  Sense strand starting at position 3747 of SEQ ID NO: 1886350
acaaguuugauugaugcgu

SEQ ID NO: 2403959 - RNA, 19 nt, Artificial Sequence
  Description of Artificial Sequence: Synthetic oligonucleotide
  Antisense strand to SEQ ID NO: 2403958
acgcaucaaucaaacuugu

SEQ ID NO: 2403960 - RNA, 19 nt, Artificial Sequence
  Description of Artificial Sequence: Synthetic oligonucleotide
  Sense strand starting at position 3800 of SEQ ID NO: 1886350
aggagaaggcauuguauau

SEQ ID NO: 2403961 - RNA, 19 nt, Artificial Sequence
  Description of Artificial Sequence: Synthetic oligonucleotide
  Antisense strand to SEQ ID NO: 2403960
auauacaaugccuucuccu

SEQ ID NO: 2403962 - RNA, 19 nt, Artificial Sequence
  Description of Artificial Sequence: Synthetic oligonucleotide
  Sense strand starting at position 3806 of SEQ ID NO: 1886350
aggcauuguauaugggaca

SEQ ID NO: 2403963 - RNA, 19 nt, Artificial Sequence
  Description of Artificial Sequence: Synthetic oligonucleotide
  Antisense strand to SEQ ID NO: 2403962
ugucccauauacaaugccu

SEQ ID NO: 2403964 - RNA, 19 nt, Artificial Sequence
  Description of Artificial Sequence: Synthetic oligonucleotide
  Sense strand starting at position 3883 of SEQ ID NO: 1886350
augagaaugugaccgguuu

SEQ ID NO: 2403965 - RNA, 19 nt, Artificial Sequence
  Description of Artificial Sequence: Synthetic oligonucleotide
  Antisense strand to SEQ ID NO: 2403964
aaaccggucacauucucau

SEQ ID NO: 2403966 - RNA, 19 nt, Artificial Sequence
  Description of Artificial Sequence: Synthetic oligonucleotide
  Sense strand starting at position 3916 of SEQ ID NO: 1886350
gcaucacugacguaagucu

SEQ ID NO: 2403967 - RNA, 19 nt, Artificial Sequence
  Description of Artificial Sequence: Synthetic oligonucleotide
  Antisense strand to SEQ ID NO: 2403966
agacuuacgucagugaugc

SEQ ID NO: 2403968 - RNA, 19 nt, Artificial Sequence
  Description of Artificial Sequence: Synthetic oligonucleotide
  Sense strand starting at position 3923 of SEQ ID NO: 1886350
ugacguaagucuuuccaag

SEQ ID NO: 2403969 - RNA, 19 nt, Artificial Sequence
  Description of Artificial Sequence: Synthetic oligonucleotide
  Antisense strand to SEQ ID NO: 2403968
cuuggaaagacuuacguca

SEQ ID NO: 2403970 - RNA, 19 nt, Artificial Sequence
  Description of Artificial Sequence: Synthetic oligonucleotide
  Sense strand starting at position 3941 of SEQ ID NO: 1886350
gcauguuaucucuagauag

SEQ ID NO: 2403971 - RNA, 19 nt, Artificial Sequence
  Description of Artificial Sequence: Synthetic oligonucleotide
  Antisense strand to SEQ ID NO: 2403970
cuaucuagagauaacaugc

SEQ ID NO: 2403972 - RNA, 19 nt, Artificial Sequence
  Description of Artificial Sequence: Synthetic oligonucleotide
  Sense strand starting at position 3943 of SEQ ID NO: 1886350
auguuaucucuagauagug

SEQ ID NO: 2403973 - RNA, 19 nt, Artificial Sequence
  Description of Artificial Sequence: Synthetic oligonucleotide
  Antisense strand to SEQ ID NO: 2403972
cacuaucuagagauaacau

SEQ ID NO: 2403974 - RNA, 19 nt, Artificial Sequence
  Description of Artificial Sequence: Synthetic oligonucleotide
  Sense strand starting at position 647 of SEQ ID NO: 1886351
uuagaugaaguaugcagaa

SEQ ID NO: 2403975 - RNA, 19 nt, Artificial Sequence
  Description of Artificial Sequence: Synthetic oligonucleotide
  Antisense strand to SEQ ID NO: 2403974
uucugcauacuucaucuaa

SEQ ID NO: 2403976 - RNA, 19 nt, Artificial Sequence
  Description of Artificial Sequence: Synthetic oligonucleotide
  Sense strand starting at position 799 of SEQ ID NO: 1886351
cugauuagcuguuugagac

SEQ ID NO: 2403977 - RNA, 19 nt, Artificial Sequence
  Description of Artificial Sequence: Synthetic oligonucleotide
  Antisense strand to SEQ ID NO: 2403976
gucucaaacagcuaaucag

SEQ ID NO: 2403978 - RNA, 19 nt, Artificial Sequence
  Description of Artificial Sequence: Synthetic oligonucleotide
  Sense strand starting at position 800 of SEQ ID NO: 1886351
ugauuagcuguuugagaca

SEQ ID NO: 2403979 - RNA, 19 nt, Artificial Sequence
  Description of Artificial Sequence: Synthetic oligonucleotide
  Antisense strand to SEQ ID NO: 2403978
ugucucaaacagcuaauca

SEQ ID NO: 2403980 - RNA, 19 nt, Artificial Sequence
  Description of Artificial Sequence: Synthetic oligonucleotide
  Sense strand starting at position 805 of SEQ ID NO: 1886351
agcuguuugagacacuaga

SEQ ID NO: 2403981 - RNA, 19 nt, Artificial Sequence
  Description of Artificial Sequence: Synthetic oligonucleotide
  Antisense strand to SEQ ID NO: 2403980
ucuagugucucaaacagcu

SEQ ID NO: 2403982 - RNA, 19 nt, Artificial Sequence
  Description of Artificial Sequence: Synthetic oligonucleotide
  Sense strand starting at position 877 of SEQ ID NO: 1886351
aguuucuuaucccuaggaa

SEQ ID NO: 2403983 - RNA, 19 nt, Artificial Sequence
  Description of Artificial Sequence: Synthetic oligonucleotide
  Antisense strand to SEQ ID NO: 2403982
uuccuagggauaagaaacu

SEQ ID NO: 2403984 - RNA, 19 nt, Artificial Sequence
  Description of Artificial Sequence: Synthetic oligonucleotide
  Sense strand starting at position 878 of SEQ ID NO: 1886351
guuucuuaucccuaggaag

SEQ ID NO: 2403985 - RNA, 19 nt, Artificial Sequence
  Description of Artificial Sequence: Synthetic oligonucleotide
  Antisense strand to SEQ ID NO: 2403984
cuuccuagggauaagaaac

SEQ ID NO: 2403986 - RNA, 19 nt, Artificial Sequence
  Description of Artificial Sequence: Synthetic oligonucleotide
  Sense strand starting at position 971 of SEQ ID NO: 1886351
uggagcuuccucuacugaa

SEQ ID NO: 2403987 - RNA, 19 nt, Artificial Sequence
  Description of Artificial Sequence: Synthetic oligonucleotide
  Antisense strand to SEQ ID NO: 2403986
uucaguagaggaagcucca

SEQ ID NO: 2403988 - RNA, 19 nt, Artificial Sequence
  Description of Artificial Sequence: Synthetic oligonucleotide
  Sense strand starting at position 1379 of SEQ ID NO: 1886351
aguuacuaagaguacucau

SEQ ID NO: 2403989 - RNA, 19 nt, Artificial Sequence
  Description of Artificial Sequence: Synthetic oligonucleotide
  Antisense strand to SEQ ID NO: 2403988
augaguacucuuaguaacu

SEQ ID NO: 2403990 - RNA, 19 nt, Artificial Sequence
  Description of Artificial Sequence: Synthetic oligonucleotide
  Sense strand starting at position 1387 of SEQ ID NO: 1886351
agaguacucauguaugucu

SEQ ID NO: 2403991 - RNA, 19 nt, Artificial Sequence
  Description of Artificial Sequence: Synthetic oligonucleotide
  Antisense strand to SEQ ID NO: 2403990
agacauacaugaguacucu

SEQ ID NO: 2403992 - RNA, 19 nt, Artificial Sequence
  Description of Artificial Sequence: Synthetic oligonucleotide
  Sense strand starting at position 1389 of SEQ ID NO: 1886351
aguacucauguaugucuau

SEQ ID NO: 2403993 - RNA, 19 nt, Artificial Sequence
  Description of Artificial Sequence: Synthetic oligonucleotide
  Antisense strand to SEQ ID NO: 2403992
auagacauacaugaguacu

SEQ ID NO: 2403994 - RNA, 19 nt, Artificial Sequence
  Description of Artificial Sequence: Synthetic oligonucleotide
  Sense strand starting at position 1390 of SEQ ID NO: 1886351
guacucauguaugucuauu

SEQ ID NO: 2403995 - RNA, 19 nt, Artificial Sequence
  Description of Artificial Sequence: Synthetic oligonucleotide
  Antisense strand to SEQ ID NO: 2403994
aauagacauacaugaguac

SEQ ID NO: 2403996 - RNA, 19 nt, Artificial Sequence
  Description of Artificial Sequence: Synthetic oligonucleotide
  Sense strand starting at position 1392 of SEQ ID NO: 1886351
acucauguaugucuauuga

SEQ ID NO: 2403997 - RNA, 19 nt, Artificial Sequence
  Description of Artificial Sequence: Synthetic oligonucleotide
  Antisense strand to SEQ ID NO: 2403996
ucaauagacauacaugagu

SEQ ID NO: 2403998 - RNA, 19 nt, Artificial Sequence
  Description of Artificial Sequence: Synthetic oligonucleotide
  Sense strand starting at position 1411 of SEQ ID NO: 1886351
caaauauacugaguguuug

SEQ ID NO: 2403999 - RNA, 19 nt, Artificial Sequence
  Description of Artificial Sequence: Synthetic oligonucleotide
  Antisense strand to SEQ ID NO: 2403998
caaacacucaguauauuug

SEQ ID NO: 2404000 - RNA, 19 nt, Artificial Sequence
  Description of Artificial Sequence: Synthetic oligonucleotide
  Sense strand starting at position 1412 of SEQ ID NO: 1886351
aaauauacugaguguuugu

SEQ ID NO: 2404001 - RNA, 19 nt, Artificial Sequence
  Description of Artificial Sequence: Synthetic oligonucleotide
  Antisense strand to SEQ ID NO: 2404000
acaaacacucaguauauuu

SEQ ID NO: 2404002 - RNA, 19 nt, Artificial Sequence
  Description of Artificial Sequence: Synthetic oligonucleotide
  Sense strand starting at position 1541 of SEQ ID NO: 1886351
ucucuauuauaaguggagu

SEQ ID NO: 2404003 - RNA, 19 nt, Artificial Sequence
  Description of Artificial Sequence: Synthetic oligonucleotide
  Antisense strand to SEQ ID NO: 2404002
acuccacuuauaauagaga

SEQ ID NO: 2404004 - RNA, 19 nt, Artificial Sequence
  Description of Artificial Sequence: Synthetic oligonucleotide
  Sense strand starting at position 1857 of SEQ ID NO: 1886351
uuucuauggucuuuacaca

SEQ ID NO: 2404005 - RNA, 19 nt, Artificial Sequence
  Description of Artificial Sequence: Synthetic oligonucleotide
  Antisense strand to SEQ ID NO: 2404004
uguguaaagaccauagaaa

SEQ ID NO: 2404006 - RNA, 19 nt, Artificial Sequence
  Description of Artificial Sequence: Synthetic oligonucleotide
  Sense strand starting at position 1858 of SEQ ID NO: 1886351
uucuauggucuuuacacau

SEQ ID NO: 2404007 - RNA, 19 nt, Artificial Sequence
  Description of Artificial Sequence: Synthetic oligonucleotide
  Antisense strand to SEQ ID NO: 2404006
auguguaaagaccauagaa

SEQ ID NO: 2404008 - RNA, 19 nt, Artificial Sequence
  Description of Artificial Sequence: Synthetic oligonucleotide
  Sense strand starting at position 1877 of SEQ ID NO: 1886351
agcaauguggugugaugau

SEQ ID NO: 2404009 - RNA, 19 nt, Artificial Sequence
  Description of Artificial Sequence: Synthetic oligonucleotide
  Antisense strand to SEQ ID NO: 2404008
aucaucacaccacauugcu

SEQ ID NO: 2404010 - RNA, 19 nt, Artificial Sequence
  Description of Artificial Sequence: Synthetic oligonucleotide
  Sense strand starting at position 1985 of SEQ ID NO: 1886351
agggcaaugccuuacugau

SEQ ID NO: 2404011 - RNA, 19 nt, Artificial Sequence
  Description of Artificial Sequence: Synthetic oligonucleotide
  Antisense strand to SEQ ID NO: 2404010
aucaguaaggcauugcccu

SEQ ID NO: 2404012 - RNA, 19 nt, Artificial Sequence
  Description of Artificial Sequence: Synthetic oligonucleotide
  Sense strand starting at position 2206 of SEQ ID NO: 1886351
gaaacagauuucuagguac

SEQ ID NO: 2404013 - RNA, 19 nt, Artificial Sequence
  Description of Artificial Sequence: Synthetic oligonucleotide
  Antisense strand to SEQ ID NO: 2404012
guaccuagaaaucuguuuc

SEQ ID NO: 2404014 - RNA, 19 nt, Artificial Sequence
  Description of Artificial Sequence: Synthetic oligonucleotide
  Sense strand starting at position 2291 of SEQ ID NO: 1886351
gccuaaugguaccugugau

SEQ ID NO: 2404015 - RNA, 19 nt, Artificial Sequence
  Description of Artificial Sequence: Synthetic oligonucleotide
  Antisense strand to SEQ ID NO: 2404014
aucacagguaccauuaggc

SEQ ID NO: 2404016 - RNA, 19 nt, Artificial Sequence
  Description of Artificial Sequence: Synthetic oligonucleotide
  Sense strand starting at position 2297 of SEQ ID NO: 1886351
ugguaccugugaucacuuu

SEQ ID NO: 2404017 - RNA, 19 nt, Artificial Sequence
  Description of Artificial Sequence: Synthetic oligonucleotide
  Antisense strand to SEQ ID NO: 2404016
aaagugaucacagguacca

SEQ ID NO: 2404018 - RNA, 19 nt, Artificial Sequence
  Description of Artificial Sequence: Synthetic oligonucleotide
  Sense strand starting at position 2368 of SEQ ID NO: 1886351
auccaaagugugcaucuau

SEQ ID NO: 2404019 - RNA, 19 nt, Artificial Sequence
  Description of Artificial Sequence: Synthetic oligonucleotide
  Antisense strand to SEQ ID NO: 2404018
auagaugcacacuuuggau

SEQ ID NO: 2404020 - RNA, 19 nt, Artificial Sequence
  Description of Artificial Sequence: Synthetic oligonucleotide
  Sense strand starting at position 2390 of SEQ ID NO: 1886351
gaaugcauccaggagcuau

SEQ ID NO: 2404021 - RNA, 19 nt, Artificial Sequence
  Description of Artificial Sequence: Synthetic oligonucleotide
  Antisense strand to SEQ ID NO: 2404020
auagcuccuggaugcauuc

SEQ ID NO: 2404022 - RNA, 19 nt, Artificial Sequence
  Description of Artificial Sequence: Synthetic oligonucleotide
  Sense strand starting at position 2489 of SEQ ID NO: 1886351
ccaaucagauucuuggagu

SEQ ID NO: 2404023 - RNA, 19 nt, Artificial Sequence
  Description of Artificial Sequence: Synthetic oligonucleotide
  Antisense strand to SEQ ID NO: 2404022
acuccaagaaucugauugg

SEQ ID NO: 2404024 - RNA, 19 nt, Artificial Sequence
  Description of Artificial Sequence: Synthetic oligonucleotide
  Sense strand starting at position 2620 of SEQ ID NO: 1886351
gagcguaggguccagagau

SEQ ID NO: 2404025 - RNA, 19 nt, Artificial Sequence
  Description of Artificial Sequence: Synthetic oligonucleotide
  Antisense strand to SEQ ID NO: 2404024
aucucuggacccuacgcuc

SEQ ID NO: 2404026 - RNA, 19 nt, Artificial Sequence
  Description of Artificial Sequence: Synthetic oligonucleotide
  Sense strand starting at position 2647 of SEQ ID NO: 1886351
acugccuacuccuuuggaa

SEQ ID NO: 2404027 - RNA, 19 nt, Artificial Sequence
  Description of Artificial Sequence: Synthetic oligonucleotide
  Antisense strand to SEQ ID NO: 2404026
uuccaaaggaguaggcagu

SEQ ID NO: 2404028 - RNA, 19 nt, Artificial Sequence
  Description of Artificial Sequence: Synthetic oligonucleotide
  Sense strand starting at position 2649 of SEQ ID NO: 1886351
ugccuacuccuuuggaauu

SEQ ID NO: 2404029 - RNA, 19 nt, Artificial Sequence
  Description of Artificial Sequence: Synthetic oligonucleotide
  Antisense strand to SEQ ID NO: 2404028
aauuccaaaggaguaggca

SEQ ID NO: 2404030 - RNA, 19 nt, Artificial Sequence
  Description of Artificial Sequence: Synthetic oligonucleotide
  Sense strand starting at position 2688 of SEQ ID NO: 1886351
cuuaaauugccggaacagu

SEQ ID NO: 2404031 - RNA, 19 nt, Artificial Sequence
  Description of Artificial Sequence: Synthetic oligonucleotide
  Antisense strand to SEQ ID NO: 2404030
acuguuccggcaauuuaag

SEQ ID NO: 2404032 - RNA, 19 nt, Artificial Sequence
  Description of Artificial Sequence: Synthetic oligonucleotide
  Sense strand starting at position 2750 of SEQ ID NO: 1886351
ggauucuucucuguguuga

SEQ ID NO: 2404033 - RNA, 19 nt, Artificial Sequence
  Description of Artificial Sequence: Synthetic oligonucleotide
  Antisense strand to SEQ ID NO: 2404032
ucaacacagagaagaaucc

SEQ ID NO: 2404034 - RNA, 19 nt, Artificial Sequence
  Description of Artificial Sequence: Synthetic oligonucleotide
  Sense strand starting at position 2751 of SEQ ID NO: 1886351
gauucuucucuguguugac

SEQ ID NO: 2404035 - RNA, 19 nt, Artificial Sequence
  Description of Artificial Sequence: Synthetic oligonucleotide
  Antisense strand to SEQ ID NO: 2404034
gucaacacagagaagaauc

SEQ ID NO: 2404036 - RNA, 19 nt, Artificial Sequence
  Description of Artificial Sequence: Synthetic oligonucleotide
  Sense strand starting at position 2758 of SEQ ID NO: 1886351
cucuguguugacuaagaag

SEQ ID NO: 2404037 - RNA, 19 nt, Artificial Sequence
  Description of Artificial Sequence: Synthetic oligonucleotide
  Antisense strand to SEQ ID NO: 2404036
cuucuuagucaacacagag

SEQ ID NO: 2404038 - RNA, 19 nt, Artificial Sequence
  Description of Artificial Sequence: Synthetic oligonucleotide
  Sense strand starting at position 2838 of SEQ ID NO: 1886351
guccauuucuguccuguau

SEQ ID NO: 2404039 - RNA, 19 nt, Artificial Sequence
  Description of Artificial Sequence: Synthetic oligonucleotide
  Antisense strand to SEQ ID NO: 2404038
auacaggacagaaauggac

SEQ ID NO: 2404040 - RNA, 19 nt, Artificial Sequence
  Description of Artificial Sequence: Synthetic oligonucleotide
  Sense strand starting at position 3076 of SEQ ID NO: 1886351
gcugaaaugcugcuucugu

SEQ ID NO: 2404041 - RNA, 19 nt, Artificial Sequence
  Description of Artificial Sequence: Synthetic oligonucleotide
  Antisense strand to SEQ ID NO: 2404040
acagaagcagcauuucagc

SEQ ID NO: 2404042 - RNA, 19 nt, Artificial Sequence
  Description of Artificial Sequence: Synthetic oligonucleotide
  Sense strand starting at position 3301 of SEQ ID NO: 1886351
gccgucucccaauaaauac

SEQ ID NO: 2404043 - RNA, 19 nt, Artificial Sequence
  Description of Artificial Sequence: Synthetic oligonucleotide
  Antisense strand to SEQ ID NO: 2404042
guauuuauugggagacggc

SEQ ID NO: 2404044 - RNA, 19 nt, Artificial Sequence
  Description of Artificial Sequence: Synthetic oligonucleotide
  Sense strand starting at position 3409 of SEQ ID NO: 1886351
gggagaguuuaacugguau

SEQ ID NO: 2404045 - RNA, 19 nt, Artificial Sequence
  Description of Artificial Sequence: Synthetic oligonucleotide
  Antisense strand to SEQ ID NO: 2404044
auaccaguuaaacucuccc

SEQ ID NO: 2404046 - RNA, 19 nt, Artificial Sequence
  Description of Artificial Sequence: Synthetic oligonucleotide
  Sense strand starting at position 3424 of SEQ ID NO: 1886351
guauaugacuuccuaggaa

SEQ ID NO: 2404047 - RNA, 19 nt, Artificial Sequence
  Description of Artificial Sequence: Synthetic oligonucleotide
  Antisense strand to SEQ ID NO: 2404046
uuccuaggaagucauauac

SEQ ID NO: 2404048 - RNA, 19 nt, Artificial Sequence
  Description of Artificial Sequence: Synthetic oligonucleotide
  Sense strand starting at position 3456 of SEQ ID NO: 1886351
agggaagaaugccucgaau

SEQ ID NO: 2404049 - RNA, 19 nt, Artificial Sequence
  Description of Artificial Sequence: Synthetic oligonucleotide
  Antisense strand to SEQ ID NO: 2404048
auucgaggcauucuucccu

SEQ ID NO: 2404050 - RNA, 19 nt, Artificial Sequence
  Description of Artificial Sequence: Synthetic oligonucleotide
  Sense strand starting at position 3458 of SEQ ID NO: 1886351
ggaagaaugccucgaauga

SEQ ID NO: 2404051 - RNA, 19 nt, Artificial Sequence
  Description of Artificial Sequence: Synthetic oligonucleotide
  Antisense strand to SEQ ID NO: 2404050
ucauucgaggcauucuucc

SEQ ID NO: 2404052 - RNA, 19 nt, Artificial Sequence
  Description of Artificial Sequence: Synthetic oligonucleotide
  Sense strand starting at position 3957 of SEQ ID NO: 1886351
ggcuucucgguugaauucu

SEQ ID NO: 2404053 - RNA, 19 nt, Artificial Sequence
  Description of Artificial Sequence: Synthetic oligonucleotide
  Antisense strand to SEQ ID NO: 2404052
agaauucaaccgagaagcc

SEQ ID NO: 2404054 - RNA, 19 nt, Artificial Sequence
  Description of Artificial Sequence: Synthetic oligonucleotide
  Sense strand starting at position 17 of SEQ ID NO: 1886352
cacgguguccaacauaaau

SEQ ID NO: 2404055 - RNA, 19 nt, Artificial Sequence
  Description of Artificial Sequence: Synthetic oligonucleotide
  Antisense strand to SEQ ID NO: 2404054
auuuauguuggacaccgug

SEQ ID NO: 2404056 - RNA, 19 nt, Artificial Sequence
  Description of Artificial Sequence: Synthetic oligonucleotide
  Sense strand starting at position 67 of SEQ ID NO: 1886352
acuggacaaucgucagacu

SEQ ID NO: 2404057 - RNA, 19 nt, Artificial Sequence
  Description of Artificial Sequence: Synthetic oligonucleotide
  Antisense strand to SEQ ID NO: 2404056
agucugacgauuguccagu

SEQ ID NO: 2404058 - RNA, 19 nt, Artificial Sequence
  Description of Artificial Sequence: Synthetic oligonucleotide
  Sense strand starting at position 239 of SEQ ID NO: 1886352
ugggucaaguagcuauuaa

SEQ ID NO: 2404059 - RNA, 19 nt, Artificial Sequence
  Description of Artificial Sequence: Synthetic oligonucleotide
  Antisense strand to SEQ ID NO: 2404058
uuaauagcuacuugaccca

SEQ ID NO: 2404060 - RNA, 19 nt, Artificial Sequence
  Description of Artificial Sequence: Synthetic oligonucleotide
  Sense strand starting at position 240 of SEQ ID NO: 1886352
gggucaaguagcuauuaac

SEQ ID NO: 2404061 - RNA, 19 nt, Artificial Sequence
  Description of Artificial Sequence: Synthetic oligonucleotide
  Antisense strand to SEQ ID NO: 2404060
guuaauagcuacuugaccc

SEQ ID NO: 2404062 - RNA, 19 nt, Artificial Sequence
  Description of Artificial Sequence: Synthetic oligonucleotide
  Sense strand starting at position 313 of SEQ ID NO: 1886352
cauggaauuucugaguguc

SEQ ID NO: 2404063 - RNA, 19 nt, Artificial Sequence
  Description of Artificial Sequence: Synthetic oligonucleotide
  Antisense strand to SEQ ID NO: 2404062
gacacucagaaauuccaug

SEQ ID NO: 2404064 - RNA, 19 nt, Artificial Sequence
  Description of Artificial Sequence: Synthetic oligonucleotide
  Sense strand starting at position 316 of SEQ ID NO: 1886352
ggaauuucugagugucagc

SEQ ID NO: 2404065 - RNA, 19 nt, Artificial Sequence
  Description of Artificial Sequence: Synthetic oligonucleotide
  Antisense strand to SEQ ID NO: 2404064
gcugacacucagaaauucc

SEQ ID NO: 2404066 - RNA, 19 nt, Artificial Sequence
  Description of Artificial Sequence: Synthetic oligonucleotide
  Sense strand starting at position 336 of SEQ ID NO: 1886352
guggaagagucuuugggaa

SEQ ID NO: 2404067 - RNA, 19 nt, Artificial Sequence
  Description of Artificial Sequence: Synthetic oligonucleotide
  Antisense strand to SEQ ID NO: 2404066
uucccaaagacucuuccac

SEQ ID NO: 2404068 - RNA, 19 nt, Artificial Sequence
  Description of Artificial Sequence: Synthetic oligonucleotide
  Sense strand starting at position 423 of SEQ ID NO: 1886352
aggcaauggcuauaaccaa

SEQ ID NO: 2404069 - RNA, 19 nt, Artificial Sequence
  Description of Artificial Sequence: Synthetic oligonucleotide
  Antisense strand to SEQ ID NO: 2404068
uugguuauagccauugccu

SEQ ID NO: 2404070 - RNA, 19 nt, Artificial Sequence
  Description of Artificial Sequence: Synthetic oligonucleotide
  Sense strand starting at position 716 of SEQ ID NO: 1886352
gcauguuguccacaaagac

SEQ ID NO: 2404071 - RNA, 19 nt, Artificial Sequence
  Description of Artificial Sequence: Synthetic oligonucleotide
  Antisense strand to SEQ ID NO: 2404070
gucuuuguggacaacaugc

SEQ ID NO: 2404072 - RNA, 19 nt, Artificial Sequence
  Description of Artificial Sequence: Synthetic oligonucleotide
  Sense strand starting at position 746 of SEQ ID NO: 1886352
caaaucagugacugagacu

SEQ ID NO: 2404073 - RNA, 19 nt, Artificial Sequence
  Description of Artificial Sequence: Synthetic oligonucleotide
  Antisense strand to SEQ ID NO: 2404072
agucucagucacugauuug

SEQ ID NO: 2404074 - RNA, 19 nt, Artificial Sequence
  Description of Artificial Sequence: Synthetic oligonucleotide
  Sense strand starting at position 902 of SEQ ID NO: 1886352
cagauagcugucugaguau

SEQ ID NO: 2404075 - RNA, 19 nt, Artificial Sequence
  Description of Artificial Sequence: Synthetic oligonucleotide
  Antisense strand to SEQ ID NO: 2404074
auacucagacagcuaucug

SEQ ID NO: 2404076 - RNA, 19 nt, Artificial Sequence
  Description of Artificial Sequence: Synthetic oligonucleotide
  Sense strand starting at position 905 of SEQ ID NO: 1886352
auagcugucugaguaugau

SEQ ID NO: 2404077 - RNA, 19 nt, Artificial Sequence
  Description of Artificial Sequence: Synthetic oligonucleotide
  Antisense strand to SEQ ID NO: 2404076
aucauacucagacagcuau

SEQ ID NO: 2404078 - RNA, 19 nt, Artificial Sequence
  Description of Artificial Sequence: Synthetic oligonucleotide
  Sense strand starting at position 968 of SEQ ID NO: 1886352
gcagacuacucacucaaga

SEQ ID NO: 2404079 - RNA, 19 nt, Artificial Sequence
  Description of Artificial Sequence: Synthetic oligonucleotide
  Antisense strand to SEQ ID NO: 2404078
ucuugagugaguagucugc

SEQ ID NO: 2404080 - RNA, 19 nt, Artificial Sequence
  Description of Artificial Sequence: Synthetic oligonucleotide
  Sense strand starting at position 1265 of SEQ ID NO: 1886352
ggcacaagguggucuaaga

SEQ ID NO: 2404081 - RNA, 19 nt, Artificial Sequence
  Description of Artificial Sequence: Synthetic oligonucleotide
  Antisense strand to SEQ ID NO: 2404080
ucuuagaccaccuugugcc

SEQ ID NO: 2404082 - RNA, 19 nt, Artificial Sequence
  Description of Artificial Sequence: Synthetic oligonucleotide
  Sense strand starting at position 2281 of SEQ ID NO: 1886352
uugacaggcucuguaacuu

SEQ ID NO: 2404083 - RNA, 19 nt, Artificial Sequence
  Description of Artificial Sequence: Synthetic oligonucleotide
  Antisense strand to SEQ ID NO: 2404082
aaguuacagagccugucaa

SEQ ID NO: 2404084 - RNA, 19 nt, Artificial Sequence
  Description of Artificial Sequence: Synthetic oligonucleotide
  Sense strand starting at position 2305 of SEQ ID NO: 1886352
ucacacuucccucgagaac

SEQ ID NO: 2404085 - RNA, 19 nt, Artificial Sequence
  Description of Artificial Sequence: Synthetic oligonucleotide
  Antisense strand to SEQ ID NO: 2404084
guucucgagggaaguguga

SEQ ID NO: 2404086 - RNA, 19 nt, Artificial Sequence
  Description of Artificial Sequence: Synthetic oligonucleotide
  Sense strand starting at position 2323 of SEQ ID NO: 1886352
ccagucuccuugucuugaa

SEQ ID NO: 2404087 - RNA, 19 nt, Artificial Sequence
  Description of Artificial Sequence: Synthetic oligonucleotide
  Antisense strand to SEQ ID NO: 2404086
uucaagacaaggagacugg

SEQ ID NO: 2404088 - RNA, 19 nt, Artificial Sequence
  Description of Artificial Sequence: Synthetic oligonucleotide
  Sense strand starting at position 2338 of SEQ ID NO: 1886352
ugaaaugggugugcccaaa

SEQ ID NO: 2404089 - RNA, 19 nt, Artificial Sequence
  Description of Artificial Sequence: Synthetic oligonucleotide
  Antisense strand to SEQ ID NO: 2404088
uuugggcacacccauuuca

SEQ ID NO: 2404090 - RNA, 19 nt, Artificial Sequence
  Description of Artificial Sequence: Synthetic oligonucleotide
  Sense strand starting at position 2508 of SEQ ID NO: 1886352
uuacaccugcucugggaaa

SEQ ID NO: 2404091 - RNA, 19 nt, Artificial Sequence
  Description of Artificial Sequence: Synthetic oligonucleotide
  Antisense strand to SEQ ID NO: 2404090
uuucccagagcagguguaa

SEQ ID NO: 2404092 - RNA, 19 nt, Artificial Sequence
  Description of Artificial Sequence: Synthetic oligonucleotide
  Sense strand starting at position 2571 of SEQ ID NO: 1886352
uaaagucucgcagcgacuu

SEQ ID NO: 2404093 - RNA, 19 nt, Artificial Sequence
  Description of Artificial Sequence: Synthetic oligonucleotide
  Antisense strand to SEQ ID NO: 2404092
aagucgcugcgagacuuua

SEQ ID NO: 2404094 - RNA, 19 nt, Artificial Sequence
  Description of Artificial Sequence: Synthetic oligonucleotide
  Sense strand starting at position 2678 of SEQ ID NO: 1886352
gcagauaaauugguuuacu

SEQ ID NO: 2404095 - RNA, 19 nt, Artificial Sequence
  Description of Artificial Sequence: Synthetic oligonucleotide
  Antisense strand to SEQ ID NO: 2404094
aguaaaccaauuuaucugc

SEQ ID NO: 2404096 - RNA, 19 nt, Artificial Sequence
  Description of Artificial Sequence: Synthetic oligonucleotide
  Sense strand starting at position 2679 of SEQ ID NO: 1886352
cagauaaauugguuuacug

SEQ ID NO: 2404097 - RNA, 19 nt, Artificial Sequence
  Description of Artificial Sequence: Synthetic oligonucleotide
  Antisense strand to SEQ ID NO: 2404096
caguaaaccaauuuaucug

SEQ ID NO: 2404098 - RNA, 19 nt, Artificial Sequence
  Description of Artificial Sequence: Synthetic oligonucleotide
  Sense strand starting at position 2681 of SEQ ID NO: 1886352
gauaaauugguuuacuguc

SEQ ID NO: 2404099 - RNA, 19 nt, Artificial Sequence
  Description of Artificial Sequence: Synthetic oligonucleotide
  Antisense strand to SEQ ID NO: 2404098
gacaguaaaccaauuuauc

SEQ ID NO: 2404100 - RNA, 19 nt, Artificial Sequence
  Description of Artificial Sequence: Synthetic oligonucleotide
  Sense strand starting at position 2737 of SEQ ID NO: 1886352
ucguaacuauagguauagu

SEQ ID NO: 2404101 - RNA, 19 nt, Artificial Sequence
  Description of Artificial Sequence: Synthetic oligonucleotide
  Antisense strand to SEQ ID NO: 2404100
acuauaccuauaguuacga

SEQ ID NO: 2404102 - RNA, 19 nt, Artificial Sequence
  Description of Artificial Sequence: Synthetic oligonucleotide
  Sense strand starting at position 2738 of SEQ ID NO: 1886352
cguaacuauagguauaguu

SEQ ID NO: 2404103 - RNA, 19 nt, Artificial Sequence
  Description of Artificial Sequence: Synthetic oligonucleotide
  Antisense strand to SEQ ID NO: 2404102
aacuauaccuauaguuacg

SEQ ID NO: 2404104 - RNA, 19 nt, Artificial Sequence
  Description of Artificial Sequence: Synthetic oligonucleotide
  Sense strand starting at position 2798 of SEQ ID NO: 1886352
gauugugaugucgauacuc

SEQ ID NO: 2404105 - RNA, 19 nt, Artificial Sequence
  Description of Artificial Sequence: Synthetic oligonucleotide
  Antisense strand to SEQ ID NO: 2404104
gaguaucgacaucacaauc

SEQ ID NO: 2404106 - RNA, 19 nt, Artificial Sequence
  Description of Artificial Sequence: Synthetic oligonucleotide
  Sense strand starting at position 2800 of SEQ ID NO: 1886352
uugugaugucgauacucaa

SEQ ID NO: 2404107 - RNA, 19 nt, Artificial Sequence
  Description of Artificial Sequence: Synthetic oligonucleotide
  Antisense strand to SEQ ID NO: 2404106
uugaguaucgacaucacaa

SEQ ID NO: 2404108 - RNA, 19 nt, Artificial Sequence
  Description of Artificial Sequence: Synthetic oligonucleotide
  Sense strand starting at position 2803 of SEQ ID NO: 1886352
ugaugucgauacucaauaa

SEQ ID NO: 2404109 - RNA, 19 nt, Artificial Sequence
  Description of Artificial Sequence: Synthetic oligonucleotide
  Antisense strand to SEQ ID NO: 2404108
uuauugaguaucgacauca

SEQ ID NO: 2404110 - RNA, 19 nt, Artificial Sequence
  Description of Artificial Sequence: Synthetic oligonucleotide
  Sense strand starting at position 2838 of SEQ ID NO: 1886352
agcauuacuagacguggua

SEQ ID NO: 2404111 - RNA, 19 nt, Artificial Sequence
  Description of Artificial Sequence: Synthetic oligonucleotide
  Antisense strand to SEQ ID NO: 2404110
uaccacgucuaguaaugcu

SEQ ID NO: 2404112 - RNA, 19 nt, Artificial Sequence
  Description of Artificial Sequence: Synthetic oligonucleotide
  Sense strand starting at position 2841 of SEQ ID NO: 1886352
auuacuagacgugguauau

SEQ ID NO: 2404113 - RNA, 19 nt, Artificial Sequence
  Description of Artificial Sequence: Synthetic oligonucleotide
  Antisense strand to SEQ ID NO: 2404112
auauaccacgucuaguaau

SEQ ID NO: 2404114 - RNA, 19 nt, Artificial Sequence
  Description of Artificial Sequence: Synthetic oligonucleotide
  Sense strand starting at position 2871 of SEQ ID NO: 1886352
gaaagaauguuacugccca

SEQ ID NO: 2404115 - RNA, 19 nt, Artificial Sequence
  Description of Artificial Sequence: Synthetic oligonucleotide
  Antisense strand to SEQ ID NO: 2404114
ugggcaguaacauucuuuc

SEQ ID NO: 2404116 - RNA, 19 nt, Artificial Sequence
  Description of Artificial Sequence: Synthetic oligonucleotide
  Sense strand starting at position 2878 of SEQ ID NO: 1886352
uguuacugcccauauagau

SEQ ID NO: 2404117 - RNA, 19 nt, Artificial Sequence
  Description of Artificial Sequence: Synthetic oligonucleotide
  Antisense strand to SEQ ID NO: 2404116
aucuauaugggcaguaaca

SEQ ID NO: 2404118 - RNA, 19 nt, Artificial Sequence
  Description of Artificial Sequence: Synthetic oligonucleotide
  Sense strand starting at position 2892 of SEQ ID NO: 1886352
uagauuuccgcuggccaca

SEQ ID NO: 2404119 - RNA, 19 nt, Artificial Sequence
  Description of Artificial Sequence: Synthetic oligonucleotide
  Antisense strand to SEQ ID NO: 2404118
uguggccagcggaaaucua

SEQ ID NO: 2404120 - RNA, 19 nt, Artificial Sequence
  Description of Artificial Sequence: Synthetic oligonucleotide
  Sense strand starting at position 2939 of SEQ ID NO: 1886352
gaaagcaaucuguaggcuu

SEQ ID NO: 2404121 - RNA, 19 nt, Artificial Sequence
  Description of Artificial Sequence: Synthetic oligonucleotide
  Antisense strand to SEQ ID NO: 2404120
aagccuacagauugcuuuc

SEQ ID NO: 2404122 - RNA, 19 nt, Artificial Sequence
  Description of Artificial Sequence: Synthetic oligonucleotide
  Sense strand starting at position 2946 of SEQ ID NO: 1886352
aucuguaggcuuggaaaua

SEQ ID NO: 2404123 - RNA, 19 nt, Artificial Sequence
  Description of Artificial Sequence: Synthetic oligonucleotide
  Antisense strand to SEQ ID NO: 2404122
uauuuccaagccuacagau

SEQ ID NO: 2404124 - RNA, 19 nt, Artificial Sequence
  Description of Artificial Sequence: Synthetic oligonucleotide
  Sense strand starting at position 3016 of SEQ ID NO: 1886352
ggaagagguguuuaguagu

SEQ ID NO: 2404125 - RNA, 19 nt, Artificial Sequence
  Description of Artificial Sequence: Synthetic oligonucleotide
  Antisense strand to SEQ ID NO: 2404124
acuacuaaacaccucuucc

SEQ ID NO: 2404126 - RNA, 19 nt, Artificial Sequence
  Description of Artificial Sequence: Synthetic oligonucleotide
  Sense strand starting at position 3029 of SEQ ID NO: 1886352
aguagugucccuuaagcuu

SEQ ID NO: 2404127 - RNA, 19 nt, Artificial Sequence
  Description of Artificial Sequence: Synthetic oligonucleotide
  Antisense strand to SEQ ID NO: 2404126
aagcuuaagggacacuacu

SEQ ID NO: 2404128 - RNA, 19 nt, Artificial Sequence
  Description of Artificial Sequence: Synthetic oligonucleotide
  Sense strand starting at position 3947 of SEQ ID NO: 1886352
ucgguucuccuccaagcau

SEQ ID NO: 2404129 - RNA, 19 nt, Artificial Sequence
  Description of Artificial Sequence: Synthetic oligonucleotide
  Antisense strand to SEQ ID NO: 2404128
augcuuggaggagaaccga

SEQ ID NO: 2404130 - RNA, 19 nt, Artificial Sequence
  Description of Artificial Sequence: Synthetic oligonucleotide
  Sense strand starting at position 3975 of SEQ ID NO: 1886352
ucuaauaggcuagauuacu

SEQ ID NO: 2404131 - RNA, 19 nt, Artificial Sequence
  Description of Artificial Sequence: Synthetic oligonucleotide
  Antisense strand to SEQ ID NO: 2404130
aguaaucuagccuauuaga

SEQ ID NO: 2404132 - RNA, 19 nt, Artificial Sequence
  Description of Artificial Sequence: Synthetic oligonucleotide
  Sense strand starting at position 3981 of SEQ ID NO: 1886352
aggcuagauuacuuccuua

SEQ ID NO: 2404133 - RNA, 19 nt, Artificial Sequence
  Description of Artificial Sequence: Synthetic oligonucleotide
  Antisense strand to SEQ ID NO: 2404132
uaaggaaguaaucuagccu

SEQ ID NO: 2404134 - RNA, 19 nt, Artificial Sequence
  Description of Artificial Sequence: Synthetic oligonucleotide
  Sense strand starting at position 266 of SEQ ID NO: 1886353
ugaguuauauccuuaagac

SEQ ID NO: 2404135 - RNA, 19 nt, Artificial Sequence
  Description of Artificial Sequence: Synthetic oligonucleotide
  Antisense strand to SEQ ID NO: 2404134
gucuuaaggauauaacuca

SEQ ID NO: 2404136 - RNA, 19 nt, Artificial Sequence
  Description of Artificial Sequence: Synthetic oligonucleotide
  Sense strand starting at position 537 of SEQ ID NO: 1886353
aauguauucggguaagaag

SEQ ID NO: 2404137 - RNA, 19 nt, Artificial Sequence
  Description of Artificial Sequence: Synthetic oligonucleotide
  Antisense strand to SEQ ID NO: 2404136
cuucuuacccgaauacauu

SEQ ID NO: 2404138 - RNA, 19 nt, Artificial Sequence
  Description of Artificial Sequence: Synthetic oligonucleotide
  Sense strand starting at position 546 of SEQ ID NO: 1886353
ggguaagaagcaugguuac

SEQ ID NO: 2404139 - RNA, 19 nt, Artificial Sequence
  Description of Artificial Sequence: Synthetic oligonucleotide
  Antisense strand to SEQ ID NO: 2404138
guaaccaugcuucuuaccc

SEQ ID NO: 2404140 - RNA, 19 nt, Artificial Sequence
  Description of Artificial Sequence: Synthetic oligonucleotide
  Sense strand starting at position 826 of SEQ ID NO: 1886353
ggcugcauguauuugcuaa

SEQ ID NO: 2404141 - RNA, 19 nt, Artificial Sequence
  Description of Artificial Sequence: Synthetic oligonucleotide
  Antisense strand to SEQ ID NO: 2404140
uuagcaaauacaugcagcc

SEQ ID NO: 2404142 - RNA, 19 nt, Artificial Sequence
  Description of Artificial Sequence: Synthetic oligonucleotide
  Sense strand starting at position 828 of SEQ ID NO: 1886353
cugcauguauuugcuaaca

SEQ ID NO: 2404143 - RNA, 19 nt, Artificial Sequence
  Description of Artificial Sequence: Synthetic oligonucleotide
  Antisense strand to SEQ ID NO: 2404142
uguuagcaaauacaugcag

SEQ ID NO: 2404144 - RNA, 19 nt, Artificial Sequence
  Description of Artificial Sequence: Synthetic oligonucleotide
  Sense strand starting at position 921 of SEQ ID NO: 1886353
gagucuuacccauacugug

SEQ ID NO: 2404145 - RNA, 19 nt, Artificial Sequence
  Description of Artificial Sequence: Synthetic oligonucleotide
  Antisense strand to SEQ ID NO: 2404144
cacaguauggguaagacuc

SEQ ID NO: 2404146 - RNA, 19 nt, Artificial Sequence
  Description of Artificial Sequence: Synthetic oligonucleotide
  Sense strand starting at position 1003 of SEQ ID NO: 1886353
cagucauccgggcauuaag

SEQ ID NO: 2404147 - RNA, 19 nt, Artificial Sequence
  Description of Artificial Sequence: Synthetic oligonucleotide
  Antisense strand to SEQ ID NO: 2404146
cuuaaugcccggaugacug

SEQ ID NO: 2404148 - RNA, 19 nt, Artificial Sequence
  Description of Artificial Sequence: Synthetic oligonucleotide
  Sense strand starting at position 1204 of SEQ ID NO: 1886353
uugaaauaugauugcugga

SEQ ID NO: 2404149 - RNA, 19 nt, Artificial Sequence
  Description of Artificial Sequence: Synthetic oligonucleotide
  Antisense strand to SEQ ID NO: 2404148
uccagcaaucauauuucaa

SEQ ID NO: 2404150 - RNA, 19 nt, Artificial Sequence
  Description of Artificial Sequence: Synthetic oligonucleotide
  Sense strand starting at position 1295 of SEQ ID NO: 1886353
cagaucugucccuggaauc

SEQ ID NO: 2404151 - RNA, 19 nt, Artificial Sequence
  Description of Artificial Sequence: Synthetic oligonucleotide
  Antisense strand to SEQ ID NO: 2404150
gauuccagggacagaucug

SEQ ID NO: 2404152 - RNA, 19 nt, Artificial Sequence
  Description of Artificial Sequence: Synthetic oligonucleotide
  Sense strand starting at position 1393 of SEQ ID NO: 1886353
uuaugccagguaugacaau

SEQ ID NO: 2404153 - RNA, 19 nt, Artificial Sequence
  Description of Artificial Sequence: Synthetic oligonucleotide
  Antisense strand to SEQ ID NO: 2404152
auugucauaccuggcauaa

SEQ ID NO: 2404154 - RNA, 19 nt, Artificial Sequence
  Description of Artificial Sequence: Synthetic oligonucleotide
  Sense strand starting at position 1565 of SEQ ID NO: 1886353
acugauaaucugggcauga

SEQ ID NO: 2404155 - RNA, 19 nt, Artificial Sequence
  Description of Artificial Sequence: Synthetic oligonucleotide
  Antisense strand to SEQ ID NO: 2404154
ucaugcccagauuaucagu

SEQ ID NO: 2404156 - RNA, 19 nt, Artificial Sequence
  Description of Artificial Sequence: Synthetic oligonucleotide
  Sense strand starting at position 1566 of SEQ ID NO: 1886353
cugauaaucugggcaugau

SEQ ID NO: 2404157 - RNA, 19 nt, Artificial Sequence
  Description of Artificial Sequence: Synthetic oligonucleotide
  Antisense strand to SEQ ID NO: 2404156
aucaugcccagauuaucag

SEQ ID NO: 2404158 - RNA, 19 nt, Artificial Sequence
  Description of Artificial Sequence: Synthetic oligonucleotide
  Sense strand starting at position 1645 of SEQ ID NO: 1886353
uuaaauugugccuguauuu

SEQ ID NO: 2404159 - RNA, 19 nt, Artificial Sequence
  Description of Artificial Sequence: Synthetic oligonucleotide
  Antisense strand to SEQ ID NO: 2404158
aaauacaggcacaauuuaa

SEQ ID NO: 2404160 - RNA, 19 nt, Artificial Sequence
  Description of Artificial Sequence: Synthetic oligonucleotide
  Sense strand starting at position 1824 of SEQ ID NO: 1886353
guugucuuggcagcgugau

SEQ ID NO: 2404161 - RNA, 19 nt, Artificial Sequence
  Description of Artificial Sequence: Synthetic oligonucleotide
  Antisense strand to SEQ ID NO: 2404160
aucacgcugccaagacaac

SEQ ID NO: 2404162 - RNA, 19 nt, Artificial Sequence
  Description of Artificial Sequence: Synthetic oligonucleotide
  Sense strand starting at position 1879 of SEQ ID NO: 1886353
cuuuguacagauugauaac

SEQ ID NO: 2404163 - RNA, 19 nt, Artificial Sequence
  Description of Artificial Sequence: Synthetic oligonucleotide
  Antisense strand to SEQ ID NO: 2404162
guuaucaaucuguacaaag

SEQ ID NO: 2404164 - RNA, 19 nt, Artificial Sequence
  Description of Artificial Sequence: Synthetic oligonucleotide
  Sense strand starting at position 2001 of SEQ ID NO: 1886353
accaauagcgaguggagaa

SEQ ID NO: 2404165 - RNA, 19 nt, Artificial Sequence
  Description of Artificial Sequence: Synthetic oligonucleotide
  Antisense strand to SEQ ID NO: 2404164
uucuccacucgcuauuggu

SEQ ID NO: 2404166 - RNA, 19 nt, Artificial Sequence
  Description of Artificial Sequence: Synthetic oligonucleotide
  Sense strand starting at position 2008 of SEQ ID NO: 1886353
gcgaguggagaagaguauu

SEQ ID NO: 2404167 - RNA, 19 nt, Artificial Sequence
  Description of Artificial Sequence: Synthetic oligonucleotide
  Antisense strand to SEQ ID NO: 2404166
aauacucuucuccacucgc

SEQ ID NO: 2404168 - RNA, 19 nt, Artificial Sequence
  Description of Artificial Sequence: Synthetic oligonucleotide
  Sense strand starting at position 2107 of SEQ ID NO: 1886353
agugguaucguugccuguu

SEQ ID NO: 2404169 - RNA, 19 nt, Artificial Sequence
  Description of Artificial Sequence: Synthetic oligonucleotide
  Antisense strand to SEQ ID NO: 2404168
aacaggcaacgauaccacu

SEQ ID NO: 2404170 - RNA, 19 nt, Artificial Sequence
  Description of Artificial Sequence: Synthetic oligonucleotide
  Sense strand starting at position 2126 of SEQ ID NO: 1886353
gauauugaaguuugucaaa

SEQ ID NO: 2404171 - RNA, 19 nt, Artificial Sequence
  Description of Artificial Sequence: Synthetic oligonucleotide
  Antisense strand to SEQ ID NO: 2404170
uuugacaaacuucaauauc

SEQ ID NO: 2404172 - RNA, 19 nt, Artificial Sequence
  Description of Artificial Sequence: Synthetic oligonucleotide
  Sense strand starting at position 2128 of SEQ ID NO: 1886353
uauugaaguuugucaaaga

SEQ ID NO: 2404173 - RNA, 19 nt, Artificial Sequence
  Description of Artificial Sequence: Synthetic oligonucleotide
  Antisense strand to SEQ ID NO: 2404172
ucuuugacaaacuucaaua

SEQ ID NO: 2404174 - RNA, 19 nt, Artificial Sequence
  Description of Artificial Sequence: Synthetic oligonucleotide
  Sense strand starting at position 2138 of SEQ ID NO: 1886353
ugucaaagaacgugaaauc

SEQ ID NO: 2404175 - RNA, 19 nt, Artificial Sequence
  Description of Artificial Sequence: Synthetic oligonucleotide
  Antisense strand to SEQ ID NO: 2404174
gauuucacguucuuugaca

SEQ ID NO: 2404176 - RNA, 19 nt, Artificial Sequence
  Description of Artificial Sequence: Synthetic oligonucleotide
  Sense strand starting at position 2147 of SEQ ID NO: 1886353
acgugaaaucaccagcuua

SEQ ID NO: 2404177 - RNA, 19 nt, Artificial Sequence
  Description of Artificial Sequence: Synthetic oligonucleotide
  Antisense strand to SEQ ID NO: 2404176
uaagcuggugauuucacgu

SEQ ID NO: 2404178 - RNA, 19 nt, Artificial Sequence
  Description of Artificial Sequence: Synthetic oligonucleotide
  Sense strand starting at position 2202 of SEQ ID NO: 1886353
cgaauugauucucuacaaa

SEQ ID NO: 2404179 - RNA, 19 nt, Artificial Sequence
  Description of Artificial Sequence: Synthetic oligonucleotide
  Antisense strand to SEQ ID NO: 2404178
uuuguagagaaucaauucg

SEQ ID NO: 2404180 - RNA, 19 nt, Artificial Sequence
  Description of Artificial Sequence: Synthetic oligonucleotide
  Sense strand starting at position 2295 of SEQ ID NO: 1886353
ggaggaggugaagguuauu

SEQ ID NO: 2404181 - RNA, 19 nt, Artificial Sequence
  Description of Artificial Sequence: Synthetic oligonucleotide
  Antisense strand to SEQ ID NO: 2404180
aauaaccuucaccuccucc

SEQ ID NO: 2404182 - RNA, 19 nt, Artificial Sequence
  Description of Artificial Sequence: Synthetic oligonucleotide
  Sense strand starting at position 2590 of SEQ ID NO: 1886353
auucuuagguauuccgaaa

SEQ ID NO: 2404183 - RNA, 19 nt, Artificial Sequence
  Description of Artificial Sequence: Synthetic oligonucleotide
  Antisense strand to SEQ ID NO: 2404182
uuucggaauaccuaagaau

SEQ ID NO: 2404184 - RNA, 19 nt, Artificial Sequence
  Description of Artificial Sequence: Synthetic oligonucleotide
  Sense strand starting at position 2601 of SEQ ID NO: 1886353
uuccgaaacuaucuuagaa

SEQ ID NO: 2404185 - RNA, 19 nt, Artificial Sequence
  Description of Artificial Sequence: Synthetic oligonucleotide
  Antisense strand to SEQ ID NO: 2404184
uucuaagauaguuucggaa

SEQ ID NO: 2404186 - RNA, 19 nt, Artificial Sequence
  Description of Artificial Sequence: Synthetic oligonucleotide
  Sense strand starting at position 2766 of SEQ ID NO: 1886353
cgucucuaugaauaauuaa

SEQ ID NO: 2404187 - RNA, 19 nt, Artificial Sequence
  Description of Artificial Sequence: Synthetic oligonucleotide
  Antisense strand to SEQ ID NO: 2404186
uuaauuauucauagagacg

SEQ ID NO: 2404188 - RNA, 19 nt, Artificial Sequence
  Description of Artificial Sequence: Synthetic oligonucleotide
  Sense strand starting at position 2816 of SEQ ID NO: 1886353
aguuaaaguuccuugacaa

SEQ ID NO: 2404189 - RNA, 19 nt, Artificial Sequence
  Description of Artificial Sequence: Synthetic oligonucleotide
  Antisense strand to SEQ ID NO: 2404188
uugucaaggaacuuuaacu

SEQ ID NO: 2404190 - RNA, 19 nt, Artificial Sequence
  Description of Artificial Sequence: Synthetic oligonucleotide
  Sense strand starting at position 2817 of SEQ ID NO: 1886353
guuaaaguuccuugacaag

SEQ ID NO: 2404191 - RNA, 19 nt, Artificial Sequence
  Description of Artificial Sequence: Synthetic oligonucleotide
  Antisense strand to SEQ ID NO: 2404190
cuugucaaggaacuuuaac

SEQ ID NO: 2404192 - RNA, 19 nt, Artificial Sequence
  Description of Artificial Sequence: Synthetic oligonucleotide
  Sense strand starting at position 2886 of SEQ ID NO: 1886353
gguuguaguagaggauuau

SEQ ID NO: 2404193 - RNA, 19 nt, Artificial Sequence
  Description of Artificial Sequence: Synthetic oligonucleotide
  Antisense strand to SEQ ID NO: 2404192
auaauccucuacuacaacc

SEQ ID NO: 2404194 - RNA, 19 nt, Artificial Sequence
  Description of Artificial Sequence: Synthetic oligonucleotide
  Sense strand starting at position 2887 of SEQ ID NO: 1886353
guuguaguagaggauuaua

SEQ ID NO: 2404195 - RNA, 19 nt, Artificial Sequence
  Description of Artificial Sequence: Synthetic oligonucleotide
  Antisense strand to SEQ ID NO: 2404194
uauaauccucuacuacaac

SEQ ID NO: 2404196 - RNA, 19 nt, Artificial Sequence
  Description of Artificial Sequence: Synthetic oligonucleotide
  Sense strand starting at position 3025 of SEQ ID NO: 1886353
ucaugcuauuucgcugaca

SEQ ID NO: 2404197 - RNA, 19 nt, Artificial Sequence
  Description of Artificial Sequence: Synthetic oligonucleotide
  Antisense strand to SEQ ID NO: 2404196
ugucagcgaaauagcauga

SEQ ID NO: 2404198 - RNA, 19 nt, Artificial Sequence
  Description of Artificial Sequence: Synthetic oligonucleotide
  Sense strand starting at position 3026 of SEQ ID NO: 1886353
caugcuauuucgcugacau

SEQ ID NO: 2404199 - RNA, 19 nt, Artificial Sequence
  Description of Artificial Sequence: Synthetic oligonucleotide
  Antisense strand to SEQ ID NO: 2404198
augucagcgaaauagcaug

SEQ ID NO: 2404200 - RNA, 19 nt, Artificial Sequence
  Description of Artificial Sequence: Synthetic oligonucleotide
  Sense strand starting at position 3027 of SEQ ID NO: 1886353
augcuauuucgcugacaua

SEQ ID NO: 2404201 - RNA, 19 nt, Artificial Sequence
  Description of Artificial Sequence: Synthetic oligonucleotide
  Antisense strand to SEQ ID NO: 2404200
uaugucagcgaaauagcau

SEQ ID NO: 2404202 - RNA, 19 nt, Artificial Sequence
  Description of Artificial Sequence: Synthetic oligonucleotide
  Sense strand starting at position 3051 of SEQ ID NO: 1886353
uuucgucuugaagaaauac

SEQ ID NO: 2404203 - RNA, 19 nt, Artificial Sequence
  Description of Artificial Sequence: Synthetic oligonucleotide
  Antisense strand to SEQ ID NO: 2404202
guauuucuucaagacgaaa

SEQ ID NO: 2404204 - RNA, 19 nt, Artificial Sequence
  Description of Artificial Sequence: Synthetic oligonucleotide
  Sense strand starting at position 3101 of SEQ ID NO: 1886353
gugucauuguauuuaacuc

SEQ ID NO: 2404205 - RNA, 19 nt, Artificial Sequence
  Description of Artificial Sequence: Synthetic oligonucleotide
  Antisense strand to SEQ ID NO: 2404204
gaguuaaauacaaugacac

SEQ ID NO: 2404206 - RNA, 19 nt, Artificial Sequence
  Description of Artificial Sequence: Synthetic oligonucleotide
  Sense strand starting at position 3455 of SEQ ID NO: 1886353
agccgagugacugaaugaa

SEQ ID NO: 2404207 - RNA, 19 nt, Artificial Sequence
  Description of Artificial Sequence: Synthetic oligonucleotide
  Antisense strand to SEQ ID NO: 2404206
uucauucagucacucggcu

SEQ ID NO: 2404208 - RNA, 19 nt, Artificial Sequence
  Description of Artificial Sequence: Synthetic oligonucleotide
  Sense strand starting at position 3513 of SEQ ID NO: 1886353
gaaguuggagccgacuaaa

SEQ ID NO: 2404209 - RNA, 19 nt, Artificial Sequence
  Description of Artificial Sequence: Synthetic oligonucleotide
  Antisense strand to SEQ ID NO: 2404208
uuuagucggcuccaacuuc

SEQ ID NO: 2404210 - RNA, 19 nt, Artificial Sequence
  Description of Artificial Sequence: Synthetic oligonucleotide
  Sense strand starting at position 3516 of SEQ ID NO: 1886353
guuggagccgacuaaauua

SEQ ID NO: 2404211 - RNA, 19 nt, Artificial Sequence
  Description of Artificial Sequence: Synthetic oligonucleotide
  Antisense strand to SEQ ID NO: 2404210
uaauuuagucggcuccaac

SEQ ID NO: 2404212 - RNA, 19 nt, Artificial Sequence
  Description of Artificial Sequence: Synthetic oligonucleotide
  Sense strand starting at position 3559 of SEQ ID NO: 1886353
ccacuccgucgacaucaaa

SEQ ID NO: 2404213 - RNA, 19 nt, Artificial Sequence
  Description of Artificial Sequence: Synthetic oligonucleotide
  Antisense strand to SEQ ID NO: 2404212
uuugaugucgacggagugg

SEQ ID NO: 2404214 - RNA, 19 nt, Artificial Sequence
  Description of Artificial Sequence: Synthetic oligonucleotide
  Sense strand starting at position 463 of SEQ ID NO: 1886354
cagccuaaaugguucugaa

SEQ ID NO: 2404215 - RNA, 19 nt, Artificial Sequence
  Description of Artificial Sequence: Synthetic oligonucleotide
  Antisense strand to SEQ ID NO: 2404214
uucagaaccauuuaggcug

SEQ ID NO: 2404216 - RNA, 19 nt, Artificial Sequence
  Description of Artificial Sequence: Synthetic oligonucleotide
  Sense strand starting at position 466 of SEQ ID NO: 1886354
ccuaaaugguucugaauuu

SEQ ID NO: 2404217 - RNA, 19 nt, Artificial Sequence
  Description of Artificial Sequence: Synthetic oligonucleotide
  Antisense strand to SEQ ID NO: 2404216
aaauucagaaccauuuagg

SEQ ID NO: 2404218 - RNA, 19 nt, Artificial Sequence
  Description of Artificial Sequence: Synthetic oligonucleotide
  Sense strand starting at position 491 of SEQ ID NO: 1886354
uguuguaucaaaggguuaa

SEQ ID NO: 2404219 - RNA, 19 nt, Artificial Sequence
  Description of Artificial Sequence: Synthetic oligonucleotide
  Antisense strand to SEQ ID NO: 2404218
uuaacccuuugauacaaca

SEQ ID NO: 2404220 - RNA, 19 nt, Artificial Sequence
  Description of Artificial Sequence: Synthetic oligonucleotide
  Sense strand starting at position 492 of SEQ ID NO: 1886354
guuguaucaaaggguuaau

SEQ ID NO: 2404221 - RNA, 19 nt, Artificial Sequence
  Description of Artificial Sequence: Synthetic oligonucleotide
  Antisense strand to SEQ ID NO: 2404220
auuaacccuuugauacaac

SEQ ID NO: 2404222 - RNA, 19 nt, Artificial Sequence
  Description of Artificial Sequence: Synthetic oligonucleotide
  Sense strand starting at position 634 of SEQ ID NO: 1886354
gggaauaguuaccugcguu

SEQ ID NO: 2404223 - RNA, 19 nt, Artificial Sequence
  Description of Artificial Sequence: Synthetic oligonucleotide
  Antisense strand to SEQ ID NO: 2404222
aacgcagguaacuauuccc

SEQ ID NO: 2404224 - RNA, 19 nt, Artificial Sequence
  Description of Artificial Sequence: Synthetic oligonucleotide
  Sense strand starting at position 635 of SEQ ID NO: 1886354
ggaauaguuaccugcguuu

SEQ ID NO: 2404225 - RNA, 19 nt, Artificial Sequence
  Description of Artificial Sequence: Synthetic oligonucleotide
  Antisense strand to SEQ ID NO: 2404224
aaacgcagguaacuauucc

SEQ ID NO: 2404226 - RNA, 19 nt, Artificial Sequence
  Description of Artificial Sequence: Synthetic oligonucleotide
  Sense strand starting at position 929 of SEQ ID NO: 1886354
gugggaaugaaguguauau

SEQ ID NO: 2404227 - RNA, 19 nt, Artificial Sequence
  Description of Artificial Sequence: Synthetic oligonucleotide
  Antisense strand to SEQ ID NO: 2404226
auauacacuucauucccac

SEQ ID NO: 2404228 - RNA, 19 nt, Artificial Sequence
  Description of Artificial Sequence: Synthetic oligonucleotide
  Sense strand starting at position 1009 of SEQ ID NO: 1886354
ugcuguuauaagggaaagu

SEQ ID NO: 2404229 - RNA, 19 nt, Artificial Sequence
  Description of Artificial Sequence: Synthetic oligonucleotide
  Antisense strand to SEQ ID NO: 2404228
acuuucccuuauaacagca

SEQ ID NO: 2404230 - RNA, 19 nt, Artificial Sequence
  Description of Artificial Sequence: Synthetic oligonucleotide
  Sense strand starting at position 1010 of SEQ ID NO: 1886354
gcuguuauaagggaaaguu

SEQ ID NO: 2404231 - RNA, 19 nt, Artificial Sequence
  Description of Artificial Sequence: Synthetic oligonucleotide
  Antisense strand to SEQ ID NO: 2404230
aacuuucccuuauaacagc

SEQ ID NO: 2404232 - RNA, 19 nt, Artificial Sequence
  Description of Artificial Sequence: Synthetic oligonucleotide
  Sense strand starting at position 1066 of SEQ ID NO: 1886354
gggauguguccagguaggu

SEQ ID NO: 2404233 - RNA, 19 nt, Artificial Sequence
  Description of Artificial Sequence: Synthetic oligonucleotide
  Antisense strand to SEQ ID NO: 2404232
accuaccuggacacauccc

SEQ ID NO: 2404234 - RNA, 19 nt, Artificial Sequence
  Description of Artificial Sequence: Synthetic oligonucleotide
  Sense strand starting at position 1120 of SEQ ID NO: 1886354
uggauucccugaugacaag

SEQ ID NO: 2404235 - RNA, 19 nt, Artificial Sequence
  Description of Artificial Sequence: Synthetic oligonucleotide
  Antisense strand to SEQ ID NO: 2404234
cuugucaucagggaaucca

SEQ ID NO: 2404236 - RNA, 19 nt, Artificial Sequence
  Description of Artificial Sequence: Synthetic oligonucleotide
  Sense strand starting at position 1233 of SEQ ID NO: 1886354
uguuccuaauugggaaaga

SEQ ID NO: 2404237 - RNA, 19 nt, Artificial Sequence
  Description of Artificial Sequence: Synthetic oligonucleotide
  Antisense strand to SEQ ID NO: 2404236
ucuuucccaauuaggaaca

SEQ ID NO: 2404238 - RNA, 19 nt, Artificial Sequence
  Description of Artificial Sequence: Synthetic oligonucleotide
  Sense strand starting at position 2016 of SEQ ID NO: 1886354
ggcaguucccauuggagaa

SEQ ID NO: 2404239 - RNA, 19 nt, Artificial Sequence
  Description of Artificial Sequence: Synthetic oligonucleotide
  Antisense strand to SEQ ID NO: 2404238
uucuccaaugggaacugcc

SEQ ID NO: 2404240 - RNA, 19 nt, Artificial Sequence
  Description of Artificial Sequence: Synthetic oligonucleotide
  Sense strand starting at position 2017 of SEQ ID NO: 1886354
gcaguucccauuggagaag

SEQ ID NO: 2404241 - RNA, 19 nt, Artificial Sequence
  Description of Artificial Sequence: Synthetic oligonucleotide
  Antisense strand to SEQ ID NO: 2404240
cuucuccaaugggaacugc

SEQ ID NO: 2404242 - RNA, 19 nt, Artificial Sequence
  Description of Artificial Sequence: Synthetic oligonucleotide
  Sense strand starting at position 2146 of SEQ ID NO: 1886354
agauucuuccgguguauca

SEQ ID NO: 2404243 - RNA, 19 nt, Artificial Sequence
  Description of Artificial Sequence: Synthetic oligonucleotide
  Antisense strand to SEQ ID NO: 2404242
ugauacaccggaagaaucu

SEQ ID NO: 2404244 - RNA, 19 nt, Artificial Sequence
  Description of Artificial Sequence: Synthetic oligonucleotide
  Sense strand starting at position 2155 of SEQ ID NO: 1886354
cgguguaucaugggacuug

SEQ ID NO: 2404245 - RNA, 19 nt, Artificial Sequence
  Description of Artificial Sequence: Synthetic oligonucleotide
  Antisense strand to SEQ ID NO: 2404244
caagucccaugauacaccg

SEQ ID NO: 2404246 - RNA, 19 nt, Artificial Sequence
  Description of Artificial Sequence: Synthetic oligonucleotide
  Sense strand starting at position 2249 of SEQ ID NO: 1886354
agcauauaaugaggacaaa

SEQ ID NO: 2404247 - RNA, 19 nt, Artificial Sequence
  Description of Artificial Sequence: Synthetic oligonucleotide
  Antisense strand to SEQ ID NO: 2404246
uuuguccucauuauaugcu

SEQ ID NO: 2404248 - RNA, 19 nt, Artificial Sequence
  Description of Artificial Sequence: Synthetic oligonucleotide
  Sense strand starting at position 2356 of SEQ ID NO: 1886354
aguggaaugcaccaucaua

SEQ ID NO: 2404249 - RNA, 19 nt, Artificial Sequence
  Description of Artificial Sequence: Synthetic oligonucleotide
  Antisense strand to SEQ ID NO: 2404248
uaugauggugcauuccacu

SEQ ID NO: 2404250 - RNA, 19 nt, Artificial Sequence
  Description of Artificial Sequence: Synthetic oligonucleotide
  Sense strand starting at position 2464 of SEQ ID NO: 1886354
cgggcucaauucuuuagua

SEQ ID NO: 2404251 - RNA, 19 nt, Artificial Sequence
  Description of Artificial Sequence: Synthetic oligonucleotide
  Antisense strand to SEQ ID NO: 2404250
uacuaaagaauugagcccg

SEQ ID NO: 2404252 - RNA, 19 nt, Artificial Sequence
  Description of Artificial Sequence: Synthetic oligonucleotide
  Sense strand starting at position 2465 of SEQ ID NO: 1886354
gggcucaauucuuuaguaa

SEQ ID NO: 2404253 - RNA, 19 nt, Artificial Sequence
  Description of Artificial Sequence: Synthetic oligonucleotide
  Antisense strand to SEQ ID NO: 2404252
uuacuaaagaauugagccc

SEQ ID NO: 2404254 - RNA, 19 nt, Artificial Sequence
  Description of Artificial Sequence: Synthetic oligonucleotide
  Sense strand starting at position 2466 of SEQ ID NO: 1886354
ggcucaauucuuuaguaac

SEQ ID NO: 2404255 - RNA, 19 nt, Artificial Sequence
  Description of Artificial Sequence: Synthetic oligonucleotide
  Antisense strand to SEQ ID NO: 2404254
guuacuaaagaauugagcc

SEQ ID NO: 2404256 - RNA, 19 nt, Artificial Sequence
  Description of Artificial Sequence: Synthetic oligonucleotide
  Sense strand starting at position 2484 of SEQ ID NO: 1886354
cucuaaguuuagcuagcaa

SEQ ID NO: 2404257 - RNA, 19 nt, Artificial Sequence
  Description of Artificial Sequence: Synthetic oligonucleotide
  Antisense strand to SEQ ID NO: 2404256
uugcuagcuaaacuuagag

SEQ ID NO: 2404258 - RNA, 19 nt, Artificial Sequence
  Description of Artificial Sequence: Synthetic oligonucleotide
  Sense strand starting at position 2516 of SEQ ID NO: 1886354
aagagugacagccauggua

SEQ ID NO: 2404259 - RNA, 19 nt, Artificial Sequence
  Description of Artificial Sequence: Synthetic oligonucleotide
  Antisense strand to SEQ ID NO: 2404258
uaccauggcugucacucuu

SEQ ID NO: 2404260 - RNA, 19 nt, Artificial Sequence
  Description of Artificial Sequence: Synthetic oligonucleotide
  Sense strand starting at position 2518 of SEQ ID NO: 1886354
gagugacagccaugguaag

SEQ ID NO: 2404261 - RNA, 19 nt, Artificial Sequence
  Description of Artificial Sequence: Synthetic oligonucleotide
  Antisense strand to SEQ ID NO: 2404260
cuuaccauggcugucacuc

SEQ ID NO: 2404262 - RNA, 19 nt, Artificial Sequence
  Description of Artificial Sequence: Synthetic oligonucleotide
  Sense strand starting at position 2707 of SEQ ID NO: 1886354
aaauuauacuguguggcua

SEQ ID NO: 2404263 - RNA, 19 nt, Artificial Sequence
  Description of Artificial Sequence: Synthetic oligonucleotide
  Antisense strand to SEQ ID NO: 2404262
uagccacacaguauaauuu

SEQ ID NO: 2404264 - RNA, 19 nt, Artificial Sequence
  Description of Artificial Sequence: Synthetic oligonucleotide
  Sense strand starting at position 2708 of SEQ ID NO: 1886354
aauuauacuguguggcuaa

SEQ ID NO: 2404265 - RNA, 19 nt, Artificial Sequence
  Description of Artificial Sequence: Synthetic oligonucleotide
  Antisense strand to SEQ ID NO: 2404264
uuagccacacaguauaauu

SEQ ID NO: 2404266 - RNA, 19 nt, Artificial Sequence
  Description of Artificial Sequence: Synthetic oligonucleotide
  Sense strand starting at position 3141 of SEQ ID NO: 1886354
uguuguuguuaauugucua

SEQ ID NO: 2404267 - RNA, 19 nt, Artificial Sequence
  Description of Artificial Sequence: Synthetic oligonucleotide
  Antisense strand to SEQ ID NO: 2404266
uagacaauuaacaacaaca

SEQ ID NO: 2404268 - RNA, 19 nt, Artificial Sequence
  Description of Artificial Sequence: Synthetic oligonucleotide
  Sense strand starting at position 3142 of SEQ ID NO: 1886354
guuguuguuaauugucuau

SEQ ID NO: 2404269 - RNA, 19 nt, Artificial Sequence
  Description of Artificial Sequence: Synthetic oligonucleotide
  Antisense strand to SEQ ID NO: 2404268
auagacaauuaacaacaac

SEQ ID NO: 2404270 - RNA, 19 nt, Artificial Sequence
  Description of Artificial Sequence: Synthetic oligonucleotide
  Sense strand starting at position 3208 of SEQ ID NO: 1886354
gaacauagguuagugauaa

SEQ ID NO: 2404271 - RNA, 19 nt, Artificial Sequence
  Description of Artificial Sequence: Synthetic oligonucleotide
  Antisense strand to SEQ ID NO: 2404270
uuaucacuaaccuauguuc

SEQ ID NO: 2404272 - RNA, 19 nt, Artificial Sequence
  Description of Artificial Sequence: Synthetic oligonucleotide
  Sense strand starting at position 3209 of SEQ ID NO: 1886354
aacauagguuagugauaaa

SEQ ID NO: 2404273 - RNA, 19 nt, Artificial Sequence
  Description of Artificial Sequence: Synthetic oligonucleotide
  Antisense strand to SEQ ID NO: 2404272
uuuaucacuaaccuauguu

SEQ ID NO: 2404274 - RNA, 19 nt, Artificial Sequence
  Description of Artificial Sequence: Synthetic oligonucleotide
  Sense strand starting at position 3212 of SEQ ID NO: 1886354
auagguuagugauaaacuu

SEQ ID NO: 2404275 - RNA, 19 nt, Artificial Sequence
  Description of Artificial Sequence: Synthetic oligonucleotide
  Antisense strand to SEQ ID NO: 2404274
aaguuuaucacuaaccuau

SEQ ID NO: 2404276 - RNA, 19 nt, Artificial Sequence
  Description of Artificial Sequence: Synthetic oligonucleotide
  Sense strand starting at position 3220 of SEQ ID NO: 1886354
gugauaaacuucuauguaa

SEQ ID NO: 2404277 - RNA, 19 nt, Artificial Sequence
  Description of Artificial Sequence: Synthetic oligonucleotide
  Antisense strand to SEQ ID NO: 2404276
uuacauagaaguuuaucac

SEQ ID NO: 2404278 - RNA, 19 nt, Artificial Sequence
  Description of Artificial Sequence: Synthetic oligonucleotide
  Sense strand starting at position 3382 of SEQ ID NO: 1886354
ugaggaucucuugagcaug

SEQ ID NO: 2404279 - RNA, 19 nt, Artificial Sequence
  Description of Artificial Sequence: Synthetic oligonucleotide
  Antisense strand to SEQ ID NO: 2404278
caugcucaagagauccuca

SEQ ID NO: 2404280 - RNA, 19 nt, Artificial Sequence
  Description of Artificial Sequence: Synthetic oligonucleotide
  Sense strand starting at position 3390 of SEQ ID NO: 1886354
ucuugagcaugggaguuaa

SEQ ID NO: 2404281 - RNA, 19 nt, Artificial Sequence
  Description of Artificial Sequence: Synthetic oligonucleotide
  Antisense strand to SEQ ID NO: 2404280
uuaacucccaugcucaaga

SEQ ID NO: 2404282 - RNA, 19 nt, Artificial Sequence
  Description of Artificial Sequence: Synthetic oligonucleotide
  Sense strand starting at position 3408 of SEQ ID NO: 1886354
agaggaugccgugagcuau

SEQ ID NO: 2404283 - RNA, 19 nt, Artificial Sequence
  Description of Artificial Sequence: Synthetic oligonucleotide
  Antisense strand to SEQ ID NO: 2404282
auagcucacggcauccucu

SEQ ID NO: 2404284 - RNA, 19 nt, Artificial Sequence
  Description of Artificial Sequence: Synthetic oligonucleotide
  Sense strand starting at position 3869 of SEQ ID NO: 1886354
aaauguauagagugcuaca

SEQ ID NO: 2404285 - RNA, 19 nt, Artificial Sequence
  Description of Artificial Sequence: Synthetic oligonucleotide
  Antisense strand to SEQ ID NO: 2404284
uguagcacucuauacauuu

SEQ ID NO: 2404286 - RNA, 19 nt, Artificial Sequence
  Description of Artificial Sequence: Synthetic oligonucleotide
  Sense strand starting at position 3889 of SEQ ID NO: 1886354
cccucuauacagggauaca

SEQ ID NO: 2404287 - RNA, 19 nt, Artificial Sequence
  Description of Artificial Sequence: Synthetic oligonucleotide
  Antisense strand to SEQ ID NO: 2404286
uguaucccuguauagaggg

SEQ ID NO: 2404288 - RNA, 19 nt, Artificial Sequence
  Description of Artificial Sequence: Synthetic oligonucleotide
  Sense strand starting at position 3900 of SEQ ID NO: 1886354
gggauacagcaaugugaaa

SEQ ID NO: 2404289 - RNA, 19 nt, Artificial Sequence
  Description of Artificial Sequence: Synthetic oligonucleotide
  Antisense strand to SEQ ID NO: 2404288
uuucacauugcuguauccc

SEQ ID NO: 2404290 - RNA, 19 nt, Artificial Sequence
  Description of Artificial Sequence: Synthetic oligonucleotide
  Sense strand starting at position 3966 of SEQ ID NO: 1886354
uaguuauuguccuugauag

SEQ ID NO: 2404291 - RNA, 19 nt, Artificial Sequence
  Description of Artificial Sequence: Synthetic oligonucleotide
  Antisense strand to SEQ ID NO: 2404290
cuaucaaggacaauaacua

SEQ ID NO: 2404292 - RNA, 19 nt, Artificial Sequence
  Description of Artificial Sequence: Synthetic oligonucleotide
  Sense strand starting at position 3976 of SEQ ID NO: 1886354
ccuugauagguaugucaac

SEQ ID NO: 2404293 - RNA, 19 nt, Artificial Sequence
  Description of Artificial Sequence: Synthetic oligonucleotide
  Antisense strand to SEQ ID NO: 2404292
guugacauaccuaucaagg

SEQ ID NO: 2404294 - RNA, 19 nt, Artificial Sequence
  Description of Artificial Sequence: Synthetic oligonucleotide
  Sense strand starting at position 46 of SEQ ID NO: 1886355
uuugaaauuugguagcaug

SEQ ID NO: 2404295 - RNA, 19 nt, Artificial Sequence
  Description of Artificial Sequence: Synthetic oligonucleotide
  Antisense strand to SEQ ID NO: 2404294
caugcuaccaaauuucaaa

SEQ ID NO: 2404296 - RNA, 19 nt, Artificial Sequence
  Description of Artificial Sequence: Synthetic oligonucleotide
  Sense strand starting at position 54 of SEQ ID NO: 1886355
uugguagcaugcucagauu

SEQ ID NO: 2404297 - RNA, 19 nt, Artificial Sequence
  Description of Artificial Sequence: Synthetic oligonucleotide
  Antisense strand to SEQ ID NO: 2404296
aaucugagcaugcuaccaa

SEQ ID NO: 2404298 - RNA, 19 nt, Artificial Sequence
  Description of Artificial Sequence: Synthetic oligonucleotide
  Sense strand starting at position 358 of SEQ ID NO: 1886355
agaacaucucuuugugacu

SEQ ID NO: 2404299 - RNA, 19 nt, Artificial Sequence
  Description of Artificial Sequence: Synthetic oligonucleotide
  Antisense strand to SEQ ID NO: 2404298
agucacaaagagauguucu

SEQ ID NO: 2404300 - RNA, 19 nt, Artificial Sequence
  Description of Artificial Sequence: Synthetic oligonucleotide
  Sense strand starting at position 570 of SEQ ID NO: 1886355
ccagcugucuggguucaga

SEQ ID NO: 2404301 - RNA, 19 nt, Artificial Sequence
  Description of Artificial Sequence: Synthetic oligonucleotide
  Antisense strand to SEQ ID NO: 2404300
ucugaacccagacagcugg

SEQ ID NO: 2404302 - RNA, 19 nt, Artificial Sequence
  Description of Artificial Sequence: Synthetic oligonucleotide
  Sense strand starting at position 573 of SEQ ID NO: 1886355
gcugucuggguucagacaa

SEQ ID NO: 2404303 - RNA, 19 nt, Artificial Sequence
  Description of Artificial Sequence: Synthetic oligonucleotide
  Antisense strand to SEQ ID NO: 2404302
uugucugaacccagacagc

SEQ ID NO: 2404304 - RNA, 19 nt, Artificial Sequence
  Description of Artificial Sequence: Synthetic oligonucleotide
  Sense strand starting at position 648 of SEQ ID NO: 1886355
agagugguugcaggaggaa

SEQ ID NO: 2404305 - RNA, 19 nt, Artificial Sequence
  Description of Artificial Sequence: Synthetic oligonucleotide
  Antisense strand to SEQ ID NO: 2404304
uuccuccugcaaccacucu

SEQ ID NO: 2404306 - RNA, 19 nt, Artificial Sequence
  Description of Artificial Sequence: Synthetic oligonucleotide
  Sense strand starting at position 767 of SEQ ID NO: 1886355
ggcuuugucagccagcaca

SEQ ID NO: 2404307 - RNA, 19 nt, Artificial Sequence
  Description of Artificial Sequence: Synthetic oligonucleotide
  Antisense strand to SEQ ID NO: 2404306
ugugcuggcugacaaagcc

SEQ ID NO: 2404308 - RNA, 19 nt, Artificial Sequence
  Description of Artificial Sequence: Synthetic oligonucleotide
  Sense strand starting at position 1135 of SEQ ID NO: 1886355
cccagaauguucuccaguu

SEQ ID NO: 2404309 - RNA, 19 nt, Artificial Sequence
  Description of Artificial Sequence: Synthetic oligonucleotide
  Antisense strand to SEQ ID NO: 2404308
aacuggagaacauucuggg

SEQ ID NO: 2404310 - RNA, 19 nt, Artificial Sequence
  Description of Artificial Sequence: Synthetic oligonucleotide
  Sense strand starting at position 1136 of SEQ ID NO: 1886355
ccagaauguucuccaguuc

SEQ ID NO: 2404311 - RNA, 19 nt, Artificial Sequence
  Description of Artificial Sequence: Synthetic oligonucleotide
  Antisense strand to SEQ ID NO: 2404310
gaacuggagaacauucugg

SEQ ID NO: 2404312 - RNA, 19 nt, Artificial Sequence
  Description of Artificial Sequence: Synthetic oligonucleotide
  Sense strand starting at position 1151 of SEQ ID NO: 1886355
guuccauucgcagacaagu

SEQ ID NO: 2404313 - RNA, 19 nt, Artificial Sequence
  Description of Artificial Sequence: Synthetic oligonucleotide
  Antisense strand to SEQ ID NO: 2404312
acuugucugcgaauggaac

SEQ ID NO: 2404314 - RNA, 19 nt, Artificial Sequence
  Description of Artificial Sequence: Synthetic oligonucleotide
  Sense strand starting at position 1246 of SEQ ID NO: 1886355
aggagaccuuggcuuggau

SEQ ID NO: 2404315 - RNA, 19 nt, Artificial Sequence
  Description of Artificial Sequence: Synthetic oligonucleotide
  Antisense strand to SEQ ID NO: 2404314
auccaagccaaggucuccu

SEQ ID NO: 2404316 - RNA, 19 nt, Artificial Sequence
  Description of Artificial Sequence: Synthetic oligonucleotide
  Sense strand starting at position 1276 of SEQ ID NO: 1886355
guaagaacguccuccauac

SEQ ID NO: 2404317 - RNA, 19 nt, Artificial Sequence
  Description of Artificial Sequence: Synthetic oligonucleotide
  Antisense strand to SEQ ID NO: 2404316
guauggaggacguucuuac

SEQ ID NO: 2404318 - RNA, 19 nt, Artificial Sequence
  Description of Artificial Sequence: Synthetic oligonucleotide
  Sense strand starting at position 1313 of SEQ ID NO: 1886355
ggugauucccgccaaugag

SEQ ID NO: 2404319 - RNA, 19 nt, Artificial Sequence
  Description of Artificial Sequence: Synthetic oligonucleotide
  Antisense strand to SEQ ID NO: 2404318
cucauuggcgggaaucacc

SEQ ID NO: 2404320 - RNA, 19 nt, Artificial Sequence
  Description of Artificial Sequence: Synthetic oligonucleotide
  Sense strand starting at position 1382 of SEQ ID NO: 1886355
gugucaugaucucccacau

SEQ ID NO: 2404321 - RNA, 19 nt, Artificial Sequence
  Description of Artificial Sequence: Synthetic oligonucleotide
  Antisense strand to SEQ ID NO: 2404320
augugggagaucaugacac

SEQ ID NO: 2404322 - RNA, 19 nt, Artificial Sequence
  Description of Artificial Sequence: Synthetic oligonucleotide
  Sense strand starting at position 1516 of SEQ ID NO: 1886355
cgcuguagaucuuccagga

SEQ ID NO: 2404323 - RNA, 19 nt, Artificial Sequence
  Description of Artificial Sequence: Synthetic oligonucleotide
  Antisense strand to SEQ ID NO: 2404322
uccuggaagaucuacagcg

SEQ ID NO: 2404324 - RNA, 19 nt, Artificial Sequence
  Description of Artificial Sequence: Synthetic oligonucleotide
  Sense strand starting at position 1520 of SEQ ID NO: 1886355
guagaucuuccaggagagu

SEQ ID NO: 2404325 - RNA, 19 nt, Artificial Sequence
  Description of Artificial Sequence: Synthetic oligonucleotide
  Antisense strand to SEQ ID NO: 2404324
acucuccuggaagaucuac

SEQ ID NO: 2404326 - RNA, 19 nt, Artificial Sequence
  Description of Artificial Sequence: Synthetic oligonucleotide
  Sense strand starting at position 1593 of SEQ ID NO: 1886355
gccaggucucgguggauga

SEQ ID NO: 2404327 - RNA, 19 nt, Artificial Sequence
  Description of Artificial Sequence: Synthetic oligonucleotide
  Antisense strand to SEQ ID NO: 2404326
ucauccaccgagaccuggc

SEQ ID NO: 2404328 - RNA, 19 nt, Artificial Sequence
  Description of Artificial Sequence: Synthetic oligonucleotide
  Sense strand starting at position 1594 of SEQ ID NO: 1886355
ccaggucucgguggaugaa

SEQ ID NO: 2404329 - RNA, 19 nt, Artificial Sequence
  Description of Artificial Sequence: Synthetic oligonucleotide
  Antisense strand to SEQ ID NO: 2404328
uucauccaccgagaccugg

SEQ ID NO: 2404330 - RNA, 19 nt, Artificial Sequence
  Description of Artificial Sequence: Synthetic oligonucleotide
  Sense strand starting at position 1814 of SEQ ID NO: 1886355
gccacauguggauggucaa

SEQ ID NO: 2404331 - RNA, 19 nt, Artificial Sequence
  Description of Artificial Sequence: Synthetic oligonucleotide
  Antisense strand to SEQ ID NO: 2404330
uugaccauccacauguggc

SEQ ID NO: 2404332 - RNA, 19 nt, Artificial Sequence
  Description of Artificial Sequence: Synthetic oligonucleotide
  Sense strand starting at position 1815 of SEQ ID NO: 1886355
ccacauguggauggucaaa

SEQ ID NO: 2404333 - RNA, 19 nt, Artificial Sequence
  Description of Artificial Sequence: Synthetic oligonucleotide
  Antisense strand to SEQ ID NO: 2404332
uuugaccauccacaugugg

SEQ ID NO: 2404334 - RNA, 19 nt, Artificial Sequence
  Description of Artificial Sequence: Synthetic oligonucleotide
  Sense strand starting at position 1817 of SEQ ID NO: 1886355
acauguggauggucaaacu

SEQ ID NO: 2404335 - RNA, 19 nt, Artificial Sequence
  Description of Artificial Sequence: Synthetic oligonucleotide
  Antisense strand to SEQ ID NO: 2404334
aguuugaccauccacaugu

SEQ ID NO: 2404336 - RNA, 19 nt, Artificial Sequence
  Description of Artificial Sequence: Synthetic oligonucleotide
  Sense strand starting at position 2090 of SEQ ID NO: 1886355
ugggccuuucuugauugaa

SEQ ID NO: 2404337 - RNA, 19 nt, Artificial Sequence
  Description of Artificial Sequence: Synthetic oligonucleotide
  Antisense strand to SEQ ID NO: 2404336
uucaaucaagaaaggccca

SEQ ID NO: 2404338 - RNA, 19 nt, Artificial Sequence
  Description of Artificial Sequence: Synthetic oligonucleotide
  Sense strand starting at position 2093 of SEQ ID NO: 1886355
gccuuucuugauugaagga

SEQ ID NO: 2404339 - RNA, 19 nt, Artificial Sequence
  Description of Artificial Sequence: Synthetic oligonucleotide
  Antisense strand to SEQ ID NO: 2404338
uccuucaaucaagaaaggc

SEQ ID NO: 2404340 - RNA, 19 nt, Artificial Sequence
  Description of Artificial Sequence: Synthetic oligonucleotide
  Sense strand starting at position 2397 of SEQ ID NO: 1886355
gggaucccagccugucaaa

SEQ ID NO: 2404341 - RNA, 19 nt, Artificial Sequence
  Description of Artificial Sequence: Synthetic oligonucleotide
  Antisense strand to SEQ ID NO: 2404340
uuugacaggcugggauccc

SEQ ID NO: 2404342 - RNA, 19 nt, Artificial Sequence
  Description of Artificial Sequence: Synthetic oligonucleotide
  Sense strand starting at position 2449 of SEQ ID NO: 1886355
uggguuccauugucuuaaa

SEQ ID NO: 2404343 - RNA, 19 nt, Artificial Sequence
  Description of Artificial Sequence: Synthetic oligonucleotide
  Antisense strand to SEQ ID NO: 2404342
uuuaagacaauggaaccca

SEQ ID NO: 2404344 - RNA, 19 nt, Artificial Sequence
  Description of Artificial Sequence: Synthetic oligonucleotide
  Sense strand starting at position 2450 of SEQ ID NO: 1886355
ggguuccauugucuuaaac

SEQ ID NO: 2404345 - RNA, 19 nt, Artificial Sequence
  Description of Artificial Sequence: Synthetic oligonucleotide
  Antisense strand to SEQ ID NO: 2404344
guuuaagacaauggaaccc

SEQ ID NO: 2404346 - RNA, 19 nt, Artificial Sequence
  Description of Artificial Sequence: Synthetic oligonucleotide
  Sense strand starting at position 2460 of SEQ ID NO: 1886355
gucuuaaacccaggacagu

SEQ ID NO: 2404347 - RNA, 19 nt, Artificial Sequence
  Description of Artificial Sequence: Synthetic oligonucleotide
  Antisense strand to SEQ ID NO: 2404346
acuguccuggguuuaagac

SEQ ID NO: 2404348 - RNA, 19 nt, Artificial Sequence
  Description of Artificial Sequence: Synthetic oligonucleotide
  Sense strand starting at position 2515 of SEQ ID NO: 1886355
gggaucacuucuucccacu

SEQ ID NO: 2404349 - RNA, 19 nt, Artificial Sequence
  Description of Artificial Sequence: Synthetic oligonucleotide
  Antisense strand to SEQ ID NO: 2404348
agugggaagaagugauccc

SEQ ID NO: 2404350 - RNA, 19 nt, Artificial Sequence
  Description of Artificial Sequence: Synthetic oligonucleotide
  Sense strand starting at position 2535 of SEQ ID NO: 1886355
caagaugaggccugaaucu

SEQ ID NO: 2404351 - RNA, 19 nt, Artificial Sequence
  Description of Artificial Sequence: Synthetic oligonucleotide
  Antisense strand to SEQ ID NO: 2404350
agauucaggccucaucuug

SEQ ID NO: 2404352 - RNA, 19 nt, Artificial Sequence
  Description of Artificial Sequence: Synthetic oligonucleotide
  Sense strand starting at position 2544 of SEQ ID NO: 1886355
gccugaaucuguguggaug

SEQ ID NO: 2404353 - RNA, 19 nt, Artificial Sequence
  Description of Artificial Sequence: Synthetic oligonucleotide
  Antisense strand to SEQ ID NO: 2404352
cauccacacagauucaggc

SEQ ID NO: 2404354 - RNA, 19 nt, Artificial Sequence
  Description of Artificial Sequence: Synthetic oligonucleotide
  Sense strand starting at position 2593 of SEQ ID NO: 1886355
gcuagacccuuggucugaa

SEQ ID NO: 2404355 - RNA, 19 nt, Artificial Sequence
  Description of Artificial Sequence: Synthetic oligonucleotide
  Antisense strand to SEQ ID NO: 2404354
uucagaccaagggucuagc

SEQ ID NO: 2404356 - RNA, 19 nt, Artificial Sequence
  Description of Artificial Sequence: Synthetic oligonucleotide
  Sense strand starting at position 2594 of SEQ ID NO: 1886355
cuagacccuuggucugaaa

SEQ ID NO: 2404357 - RNA, 19 nt, Artificial Sequence
  Description of Artificial Sequence: Synthetic oligonucleotide
  Antisense strand to SEQ ID NO: 2404356
uuucagaccaagggucuag

SEQ ID NO: 2404358 - RNA, 19 nt, Artificial Sequence
  Description of Artificial Sequence: Synthetic oligonucleotide
  Sense strand starting at position 2843 of SEQ ID NO: 1886355
uggaaagcuuugucacggu

SEQ ID NO: 2404359 - RNA, 19 nt, Artificial Sequence
  Description of Artificial Sequence: Synthetic oligonucleotide
  Antisense strand to SEQ ID NO: 2404358
accgugacaaagcuuucca

SEQ ID NO: 2404360 - RNA, 19 nt, Artificial Sequence
  Description of Artificial Sequence: Synthetic oligonucleotide
  Sense strand starting at position 2847 of SEQ ID NO: 1886355
aagcuuugucacggugaug

SEQ ID NO: 2404361 - RNA, 19 nt, Artificial Sequence
  Description of Artificial Sequence: Synthetic oligonucleotide
  Antisense strand to SEQ ID NO: 2404360
caucaccgugacaaagcuu

SEQ ID NO: 2404362 - RNA, 19 nt, Artificial Sequence
  Description of Artificial Sequence: Synthetic oligonucleotide
  Sense strand starting at position 2891 of SEQ ID NO: 1886355
gaaggagaacaguggcuau

SEQ ID NO: 2404363 - RNA, 19 nt, Artificial Sequence
  Description of Artificial Sequence: Synthetic oligonucleotide
  Antisense strand to SEQ ID NO: 2404362
auagccacuguucuccuuc

SEQ ID NO: 2404364 - RNA, 19 nt, Artificial Sequence
  Description of Artificial Sequence: Synthetic oligonucleotide
  Sense strand starting at position 3023 of SEQ ID NO: 1886355
guaguuccucuccaccaga

SEQ ID NO: 2404365 - RNA, 19 nt, Artificial Sequence
  Description of Artificial Sequence: Synthetic oligonucleotide
  Antisense strand to SEQ ID NO: 2404364
ucugguggagaggaacuac

SEQ ID NO: 2404366 - RNA, 19 nt, Artificial Sequence
  Description of Artificial Sequence: Synthetic oligonucleotide
  Sense strand starting at position 3102 of SEQ ID NO: 1886355
guggcacugccagaucuuu

SEQ ID NO: 2404367 - RNA, 19 nt, Artificial Sequence
  Description of Artificial Sequence: Synthetic oligonucleotide
  Antisense strand to SEQ ID NO: 2404366
aaagaucuggcagugccac

SEQ ID NO: 2404368 - RNA, 19 nt, Artificial Sequence
  Description of Artificial Sequence: Synthetic oligonucleotide
  Sense strand starting at position 3589 of SEQ ID NO: 1886355
gagggcugaaugugacuuu

SEQ ID NO: 2404369 - RNA, 19 nt, Artificial Sequence
  Description of Artificial Sequence: Synthetic oligonucleotide
  Antisense strand to SEQ ID NO: 2404368
aaagucacauucagcccuc

SEQ ID NO: 2404370 - RNA, 19 nt, Artificial Sequence
  Description of Artificial Sequence: Synthetic oligonucleotide
  Sense strand starting at position 3859 of SEQ ID NO: 1886355
ugcgcaaggauguaaagua

SEQ ID NO: 2404371 - RNA, 19 nt, Artificial Sequence
  Description of Artificial Sequence: Synthetic oligonucleotide
  Antisense strand to SEQ ID NO: 2404370
uacuuuacauccuugcgca

SEQ ID NO: 2404372 - RNA, 19 nt, Artificial Sequence
  Description of Artificial Sequence: Synthetic oligonucleotide
  Sense strand starting at position 3983 of SEQ ID NO: 1886355
gucccuggauagguuuaaa

SEQ ID NO: 2404373 - RNA, 19 nt, Artificial Sequence
  Description of Artificial Sequence: Synthetic oligonucleotide
  Antisense strand to SEQ ID NO: 2404372
uuuaaaccuauccagggac

SEQ ID NO: 2404374 - RNA, 19 nt, Artificial Sequence
  Description of Artificial Sequence: Synthetic oligonucleotide
  Sense strand starting at position 40 of SEQ ID NO: 1886356
gaugguuuccuagguucca

SEQ ID NO: 2404375 - RNA, 19 nt, Artificial Sequence
  Description of Artificial Sequence: Synthetic oligonucleotide
  Antisense strand to SEQ ID NO: 2404374
uggaaccuaggaaaccauc

SEQ ID NO: 2404376 - RNA, 19 nt, Artificial Sequence
  Description of Artificial Sequence: Synthetic oligonucleotide
  Sense strand starting at position 41 of SEQ ID NO: 1886356
augguuuccuagguuccaa

SEQ ID NO: 2404377 - RNA, 19 nt, Artificial Sequence
  Description of Artificial Sequence: Synthetic oligonucleotide
  Antisense strand to SEQ ID NO: 2404376
uuggaaccuaggaaaccau

SEQ ID NO: 2404378 - RNA, 19 nt, Artificial Sequence
  Description of Artificial Sequence: Synthetic oligonucleotide
  Sense strand starting at position 56 of SEQ ID NO: 1886356
ccaaguuggcauuaucuuu

SEQ ID NO: 2404379 - RNA, 19 nt, Artificial Sequence
  Description of Artificial Sequence: Synthetic oligonucleotide
  Antisense strand to SEQ ID NO: 2404378
aaagauaaugccaacuugg

SEQ ID NO: 2404380 - RNA, 19 nt, Artificial Sequence
  Description of Artificial Sequence: Synthetic oligonucleotide
  Sense strand starting at position 730 of SEQ ID NO: 1886356
ugugccuuuccagaacaca

SEQ ID NO: 2404381 - RNA, 19 nt, Artificial Sequence
  Description of Artificial Sequence: Synthetic oligonucleotide
  Antisense strand to SEQ ID NO: 2404380
uguguucuggaaaggcaca

SEQ ID NO: 2404382 - RNA, 19 nt, Artificial Sequence
  Description of Artificial Sequence: Synthetic oligonucleotide
  Sense strand starting at position 2866 of SEQ ID NO: 1886356
ggguucaaguuccgauuua

SEQ ID NO: 2404383 - RNA, 19 nt, Artificial Sequence
  Description of Artificial Sequence: Synthetic oligonucleotide
  Antisense strand to SEQ ID NO: 2404382
uaaaucggaacuugaaccc

SEQ ID NO: 2404384 - RNA, 19 nt, Artificial Sequence
  Description of Artificial Sequence: Synthetic oligonucleotide
  Sense strand starting at position 2867 of SEQ ID NO: 1886356
gguucaaguuccgauuuag

SEQ ID NO: 2404385 - RNA, 19 nt, Artificial Sequence
  Description of Artificial Sequence: Synthetic oligonucleotide
  Antisense strand to SEQ ID NO: 2404384
cuaaaucggaacuugaacc

SEQ ID NO: 2404386 - RNA, 19 nt, Artificial Sequence
  Description of Artificial Sequence: Synthetic oligonucleotide
  Sense strand starting at position 2885 of SEQ ID NO: 1886356
gcugcuugcuggcugugaa

SEQ ID NO: 2404387 - RNA, 19 nt, Artificial Sequence
  Description of Artificial Sequence: Synthetic oligonucleotide
  Antisense strand to SEQ ID NO: 2404386
uucacagccagcaagcagc

SEQ ID NO: 2404388 - RNA, 19 nt, Artificial Sequence
  Description of Artificial Sequence: Synthetic oligonucleotide
  Sense strand starting at position 2886 of SEQ ID NO: 1886356
cugcuugcuggcugugaaa

SEQ ID NO: 2404389 - RNA, 19 nt, Artificial Sequence
  Description of Artificial Sequence: Synthetic oligonucleotide
  Antisense strand to SEQ ID NO: 2404388
uuucacagccagcaagcag

SEQ ID NO: 2404390 - RNA, 19 nt, Artificial Sequence
  Description of Artificial Sequence: Synthetic oligonucleotide
  Sense strand starting at position 2888 of SEQ ID NO: 1886356
gcuugcuggcugugaaaug

SEQ ID NO: 2404391 - RNA, 19 nt, Artificial Sequence
  Description of Artificial Sequence: Synthetic oligonucleotide
  Antisense strand to SEQ ID NO: 2404390
cauuucacagccagcaagc

SEQ ID NO: 2404392 - RNA, 19 nt, Artificial Sequence
  Description of Artificial Sequence: Synthetic oligonucleotide
  Sense strand starting at position 2897 of SEQ ID NO: 1886356
cugugaaaugcuugacagc

SEQ ID NO: 2404393 - RNA, 19 nt, Artificial Sequence
  Description of Artificial Sequence: Synthetic oligonucleotide
  Antisense strand to SEQ ID NO: 2404392
gcugucaagcauuucacag

SEQ ID NO: 2404394 - RNA, 19 nt, Artificial Sequence
  Description of Artificial Sequence: Synthetic oligonucleotide
  Sense strand starting at position 2898 of SEQ ID NO: 1886356
ugugaaaugcuugacagcu

SEQ ID NO: 2404395 - RNA, 19 nt, Artificial Sequence
  Description of Artificial Sequence: Synthetic oligonucleotide
  Antisense strand to SEQ ID NO: 2404394
agcugucaagcauuucaca

SEQ ID NO: 2404396 - RNA, 19 nt, Artificial Sequence
  Description of Artificial Sequence: Synthetic oligonucleotide
  Sense strand starting at position 2900 of SEQ ID NO: 1886356
ugaaaugcuugacagcuuu

SEQ ID NO: 2404397 - RNA, 19 nt, Artificial Sequence
  Description of Artificial Sequence: Synthetic oligonucleotide
  Antisense strand to SEQ ID NO: 2404396
aaagcugucaagcauuuca

SEQ ID NO: 2404398 - RNA, 19 nt, Artificial Sequence
  Description of Artificial Sequence: Synthetic oligonucleotide
  Sense strand starting at position 3045 of SEQ ID NO: 1886356
cuuucuggcucaggaaagu

SEQ ID NO: 2404399 - RNA, 19 nt, Artificial Sequence
  Description of Artificial Sequence: Synthetic oligonucleotide
  Antisense strand to SEQ ID NO: 2404398
acuuuccugagccagaaag

SEQ ID NO: 2404400 - RNA, 19 nt, Artificial Sequence
  Description of Artificial Sequence: Synthetic oligonucleotide
  Sense strand starting at position 3163 of SEQ ID NO: 1886356
uuauuauugugcuggcuac

SEQ ID NO: 2404401 - RNA, 19 nt, Artificial Sequence
  Description of Artificial Sequence: Synthetic oligonucleotide
  Antisense strand to SEQ ID NO: 2404400
guagccagcacaauaauaa

SEQ ID NO: 2404402 - RNA, 19 nt, Artificial Sequence
  Description of Artificial Sequence: Synthetic oligonucleotide
  Sense strand starting at position 3164 of SEQ ID NO: 1886356
uauuauugugcuggcuaca

SEQ ID NO: 2404403 - RNA, 19 nt, Artificial Sequence
  Description of Artificial Sequence: Synthetic oligonucleotide
  Antisense strand to SEQ ID NO: 2404402
uguagccagcacaauaaua

SEQ ID NO: 2404404 - RNA, 19 nt, Artificial Sequence
  Description of Artificial Sequence: Synthetic oligonucleotide
  Sense strand starting at position 3237 of SEQ ID NO: 1886356
aucucaucagaccgaaaca

SEQ ID NO: 2404405 - RNA, 19 nt, Artificial Sequence
  Description of Artificial Sequence: Synthetic oligonucleotide
  Antisense strand to SEQ ID NO: 2404404
uguuucggucugaugagau

SEQ ID NO: 2404406 - RNA, 19 nt, Artificial Sequence
  Description of Artificial Sequence: Synthetic oligonucleotide
  Sense strand starting at position 3250 of SEQ ID NO: 1886356
gaaacagaugcauauguuu

SEQ ID NO: 2404407 - RNA, 19 nt, Artificial Sequence
  Description of Artificial Sequence: Synthetic oligonucleotide
  Antisense strand to SEQ ID NO: 2404406
aaacauaugcaucuguuuc

SEQ ID NO: 2404408 - RNA, 19 nt, Artificial Sequence
  Description of Artificial Sequence: Synthetic oligonucleotide
  Sense strand starting at position 3350 of SEQ ID NO: 1886356
cagugaagccaucacguuu

SEQ ID NO: 2404409 - RNA, 19 nt, Artificial Sequence
  Description of Artificial Sequence: Synthetic oligonucleotide
  Antisense strand to SEQ ID NO: 2404408
aaacgugauggcuucacug

SEQ ID NO: 2404410 - RNA, 19 nt, Artificial Sequence
  Description of Artificial Sequence: Synthetic oligonucleotide
  Sense strand starting at position 3356 of SEQ ID NO: 1886356
agccaucacguuuguuaau

SEQ ID NO: 2404411 - RNA, 19 nt, Artificial Sequence
  Description of Artificial Sequence: Synthetic oligonucleotide
  Antisense strand to SEQ ID NO: 2404410
auuaacaaacgugauggcu

SEQ ID NO: 2404412 - RNA, 19 nt, Artificial Sequence
  Description of Artificial Sequence: Synthetic oligonucleotide
  Sense strand starting at position 3358 of SEQ ID NO: 1886356
ccaucacguuuguuaauca

SEQ ID NO: 2404413 - RNA, 19 nt, Artificial Sequence
  Description of Artificial Sequence: Synthetic oligonucleotide
  Antisense strand to SEQ ID NO: 2404412
ugauuaacaaacgugaugg

SEQ ID NO: 2404414 - RNA, 19 nt, Artificial Sequence
  Description of Artificial Sequence: Synthetic oligonucleotide
  Sense strand starting at position 3362 of SEQ ID NO: 1886356
cacguuuguuaaucaauga

SEQ ID NO: 2404415 - RNA, 19 nt, Artificial Sequence
  Description of Artificial Sequence: Synthetic oligonucleotide
  Antisense strand to SEQ ID NO: 2404414
ucauugauuaacaaacgug

SEQ ID NO: 2404416 - RNA, 19 nt, Artificial Sequence
  Description of Artificial Sequence: Synthetic oligonucleotide
  Sense strand starting at position 3610 of SEQ ID NO: 1886356
ggccucuggcccuacagau

SEQ ID NO: 2404417 - RNA, 19 nt, Artificial Sequence
  Description of Artificial Sequence: Synthetic oligonucleotide
  Antisense strand to SEQ ID NO: 2404416
aucuguagggccagaggcc

SEQ ID NO: 2404418 - RNA, 19 nt, Artificial Sequence
  Description of Artificial Sequence: Synthetic oligonucleotide
  Sense strand starting at position 3911 of SEQ ID NO: 1886356
uuagaaagcucagcagauu

SEQ ID NO: 2404419 - RNA, 19 nt, Artificial Sequence
  Description of Artificial Sequence: Synthetic oligonucleotide
  Antisense strand to SEQ ID NO: 2404418
aaucugcugagcuuucuaa

SEQ ID NO: 2404420 - RNA, 19 nt, Artificial Sequence
  Description of Artificial Sequence: Synthetic oligonucleotide
  Sense strand starting at position 3922 of SEQ ID NO: 1886356
agcagauucucaggauggu

SEQ ID NO: 2404421 - RNA, 19 nt, Artificial Sequence
  Description of Artificial Sequence: Synthetic oligonucleotide
  Antisense strand to SEQ ID NO: 2404420
accauccugagaaucugcu

SEQ ID NO: 2404422 - RNA, 19 nt, Artificial Sequence
  Description of Artificial Sequence: Synthetic oligonucleotide
  Sense strand starting at position 3957 of SEQ ID NO: 1886356
cuagcuacccuuugacagu

SEQ ID NO: 2404423 - RNA, 19 nt, Artificial Sequence
  Description of Artificial Sequence: Synthetic oligonucleotide
  Antisense strand to SEQ ID NO: 2404422
acugucaaaggguagcuag

SEQ ID NO: 2404424 - RNA, 19 nt, Artificial Sequence
  Description of Artificial Sequence: Synthetic oligonucleotide
  Sense strand starting at position 3963 of SEQ ID NO: 1886356
acccuuugacagugacuga

SEQ ID NO: 2404425 - RNA, 19 nt, Artificial Sequence
  Description of Artificial Sequence: Synthetic oligonucleotide
  Antisense strand to SEQ ID NO: 2404424
ucagucacugucaaagggu

SEQ ID NO: 2404426 - RNA, 19 nt, Artificial Sequence
  Description of Artificial Sequence: Synthetic oligonucleotide
  Sense strand starting at position 2646 of SEQ ID NO: 1886357
uuaguugguacacggagaa

SEQ ID NO: 2404427 - RNA, 19 nt, Artificial Sequence
  Description of Artificial Sequence: Synthetic oligonucleotide
  Antisense strand to SEQ ID NO: 2404426
uucuccguguaccaacuaa

SEQ ID NO: 2404428 - RNA, 19 nt, Artificial Sequence
  Description of Artificial Sequence: Synthetic oligonucleotide
  Sense strand starting at position 2850 of SEQ ID NO: 1886357
acuaguugacagugcuuga

SEQ ID NO: 2404429 - RNA, 19 nt, Artificial Sequence
  Description of Artificial Sequence: Synthetic oligonucleotide
  Antisense strand to SEQ ID NO: 2404428
ucaagcacugucaacuagu

SEQ ID NO: 2404430 - RNA, 19 nt, Artificial Sequence
  Description of Artificial Sequence: Synthetic oligonucleotide
  Sense strand starting at position 2853 of SEQ ID NO: 1886357
aguugacagugcuugaagu

SEQ ID NO: 2404431 - RNA, 19 nt, Artificial Sequence
  Description of Artificial Sequence: Synthetic oligonucleotide
  Antisense strand to SEQ ID NO: 2404430
acuucaagcacugucaacu

SEQ ID NO: 2404432 - RNA, 19 nt, Artificial Sequence
  Description of Artificial Sequence: Synthetic oligonucleotide
  Sense strand starting at position 2854 of SEQ ID NO: 1886357
guugacagugcuugaagua

SEQ ID NO: 2404433 - RNA, 19 nt, Artificial Sequence
  Description of Artificial Sequence: Synthetic oligonucleotide
  Antisense strand to SEQ ID NO: 2404432
uacuucaagcacugucaac

SEQ ID NO: 2404434 - RNA, 19 nt, Artificial Sequence
  Description of Artificial Sequence: Synthetic oligonucleotide
  Sense strand starting at position 2855 of SEQ ID NO: 1886357
uugacagugcuugaaguaa

SEQ ID NO: 2404435 - RNA, 19 nt, Artificial Sequence
  Description of Artificial Sequence: Synthetic oligonucleotide
  Antisense strand to SEQ ID NO: 2404434
uuacuucaagcacugucaa

SEQ ID NO: 2404436 - RNA, 19 nt, Artificial Sequence
  Description of Artificial Sequence: Synthetic oligonucleotide
  Sense strand starting at position 3268 of SEQ ID NO: 1886357
cuccuaaccucguguugag

SEQ ID NO: 2404437 - RNA, 19 nt, Artificial Sequence
  Description of Artificial Sequence: Synthetic oligonucleotide
  Antisense strand to SEQ ID NO: 2404436
cucaacacgagguuaggag

SEQ ID NO: 2404438 - RNA, 19 nt, Artificial Sequence
  Description of Artificial Sequence: Synthetic oligonucleotide
  Sense strand starting at position 3749 of SEQ ID NO: 1886357
aucuguccuuguugauauu

SEQ ID NO: 2404439 - RNA, 19 nt, Artificial Sequence
  Description of Artificial Sequence: Synthetic oligonucleotide
  Antisense strand to SEQ ID NO: 2404438
aauaucaacaaggacagau

SEQ ID NO: 2404440 - RNA, 19 nt, Artificial Sequence
  Description of Artificial Sequence: Synthetic oligonucleotide
  Sense strand starting at position 31 of SEQ ID NO: 1886358
aguuaacaauugucaucua

SEQ ID NO: 2404441 - RNA, 19 nt, Artificial Sequence
  Description of Artificial Sequence: Synthetic oligonucleotide
  Antisense strand to SEQ ID NO: 2404440
uagaugacaauuguuaacu

SEQ ID NO: 2404442 - RNA, 19 nt, Artificial Sequence
  Description of Artificial Sequence: Synthetic oligonucleotide
  Sense strand starting at position 41 of SEQ ID NO: 1886358
ugucaucuauuggugauag

SEQ ID NO: 2404443 - RNA, 19 nt, Artificial Sequence
  Description of Artificial Sequence: Synthetic oligonucleotide
  Antisense strand to SEQ ID NO: 2404442
cuaucaccaauagaugaca

SEQ ID NO: 2404444 - RNA, 19 nt, Artificial Sequence
  Description of Artificial Sequence: Synthetic oligonucleotide
  Sense strand starting at position 109 of SEQ ID NO: 1886358
acucuaaaguuagagaaau

SEQ ID NO: 2404445 - RNA, 19 nt, Artificial Sequence
  Description of Artificial Sequence: Synthetic oligonucleotide
  Antisense strand to SEQ ID NO: 2404444
auuucucuaacuuuagagu

SEQ ID NO: 2404446 - RNA, 19 nt, Artificial Sequence
  Description of Artificial Sequence: Synthetic oligonucleotide
  Sense strand starting at position 121 of SEQ ID NO: 1886358
gagaaaucaagacguguga

SEQ ID NO: 2404447 - RNA, 19 nt, Artificial Sequence
  Description of Artificial Sequence: Synthetic oligonucleotide
  Antisense strand to SEQ ID NO: 2404446
ucacacgucuugauuucuc

SEQ ID NO: 2404448 - RNA, 19 nt, Artificial Sequence
  Description of Artificial Sequence: Synthetic oligonucleotide
  Sense strand starting at position 125 of SEQ ID NO: 1886358
aaucaagacgugugacauu

SEQ ID NO: 2404449 - RNA, 19 nt, Artificial Sequence
  Description of Artificial Sequence: Synthetic oligonucleotide
  Antisense strand to SEQ ID NO: 2404448
aaugucacacgucuugauu

SEQ ID NO: 2404450 - RNA, 19 nt, Artificial Sequence
  Description of Artificial Sequence: Synthetic oligonucleotide
  Sense strand starting at position 132 of SEQ ID NO: 1886358
acgugugacauuggcacaa

SEQ ID NO: 2404451 - RNA, 19 nt, Artificial Sequence
  Description of Artificial Sequence: Synthetic oligonucleotide
  Antisense strand to SEQ ID NO: 2404450
uugugccaaugucacacgu

SEQ ID NO: 2404452 - RNA, 19 nt, Artificial Sequence
  Description of Artificial Sequence: Synthetic oligonucleotide
  Sense strand starting at position 203 of SEQ ID NO: 1886358
cauacauagucaccggauu

SEQ ID NO: 2404453 - RNA, 19 nt, Artificial Sequence
  Description of Artificial Sequence: Synthetic oligonucleotide
  Antisense strand to SEQ ID NO: 2404452
aauccggugacuauguaug

SEQ ID NO: 2404454 - RNA, 19 nt, Artificial Sequence
  Description of Artificial Sequence: Synthetic oligonucleotide
  Sense strand starting at position 215 of SEQ ID NO: 1886358
ccggauuuaugacaaagcu

SEQ ID NO: 2404455 - RNA, 19 nt, Artificial Sequence
  Description of Artificial Sequence: Synthetic oligonucleotide
  Antisense strand to SEQ ID NO: 2404454
agcuuugucauaaauccgg

SEQ ID NO: 2404456 - RNA, 19 nt, Artificial Sequence
  Description of Artificial Sequence: Synthetic oligonucleotide
  Sense strand starting at position 263 of SEQ ID NO: 1886358
uuaaauagugcuggaucaa

SEQ ID NO: 2404457 - RNA, 19 nt, Artificial Sequence
  Description of Artificial Sequence: Synthetic oligonucleotide
  Antisense strand to SEQ ID NO: 2404456
uugauccagcacuauuuaa

SEQ ID NO: 2404458 - RNA, 19 nt, Artificial Sequence
  Description of Artificial Sequence: Synthetic oligonucleotide
  Sense strand starting at position 264 of SEQ ID NO: 1886358
uaaauagugcuggaucaau

SEQ ID NO: 2404459 - RNA, 19 nt, Artificial Sequence
  Description of Artificial Sequence: Synthetic oligonucleotide
  Antisense strand to SEQ ID NO: 2404458
auugauccagcacuauuua

SEQ ID NO: 2404460 - RNA, 19 nt, Artificial Sequence
  Description of Artificial Sequence: Synthetic oligonucleotide
  Sense strand starting at position 492 of SEQ ID NO: 1886358
gguggcuaccgcuuguaau

SEQ ID NO: 2404461 - RNA, 19 nt, Artificial Sequence
  Description of Artificial Sequence: Synthetic oligonucleotide
  Antisense strand to SEQ ID NO: 2404460
auuacaagcgguagccacc

SEQ ID NO: 2404462 - RNA, 19 nt, Artificial Sequence
  Description of Artificial Sequence: Synthetic oligonucleotide
  Sense strand starting at position 869 of SEQ ID NO: 1886358
gcaaguaacuuaguaggca

SEQ ID NO: 2404463 - RNA, 19 nt, Artificial Sequence
  Description of Artificial Sequence: Synthetic oligonucleotide
  Antisense strand to SEQ ID NO: 2404462
ugccuacuaaguuacuugc

SEQ ID NO: 2404464 - RNA, 19 nt, Artificial Sequence
  Description of Artificial Sequence: Synthetic oligonucleotide
  Sense strand starting at position 1101 of SEQ ID NO: 1886358
gugaucugccuuuaauguu

SEQ ID NO: 2404465 - RNA, 19 nt, Artificial Sequence
  Description of Artificial Sequence: Synthetic oligonucleotide
  Antisense strand to SEQ ID NO: 2404464
aacauuaaaggcagaucac

SEQ ID NO: 2404466 - RNA, 19 nt, Artificial Sequence
  Description of Artificial Sequence: Synthetic oligonucleotide
  Sense strand starting at position 1147 of SEQ ID NO: 1886358
cgcucuccucaguaacauu

SEQ ID NO: 2404467 - RNA, 19 nt, Artificial Sequence
  Description of Artificial Sequence: Synthetic oligonucleotide
  Antisense strand to SEQ ID NO: 2404466
aauguuacugaggagagcg

SEQ ID NO: 2404468 - RNA, 19 nt, Artificial Sequence
  Description of Artificial Sequence: Synthetic oligonucleotide
  Sense strand starting at position 1984 of SEQ ID NO: 1886358
accggaagcuuugcaacua

SEQ ID NO: 2404469 - RNA, 19 nt, Artificial Sequence
  Description of Artificial Sequence: Synthetic oligonucleotide
  Antisense strand to SEQ ID NO: 2404468
uaguugcaaagcuuccggu

SEQ ID NO: 2404470 - RNA, 19 nt, Artificial Sequence
  Description of Artificial Sequence: Synthetic oligonucleotide
  Sense strand starting at position 1996 of SEQ ID NO: 1886358
gcaacuagcgccucuugua

SEQ ID NO: 2404471 - RNA, 19 nt, Artificial Sequence
  Description of Artificial Sequence: Synthetic oligonucleotide
  Antisense strand to SEQ ID NO: 2404470
uacaagaggcgcuaguugc

SEQ ID NO: 2404472 - RNA, 19 nt, Artificial Sequence
  Description of Artificial Sequence: Synthetic oligonucleotide
  Sense strand starting at position 2101 of SEQ ID NO: 1886358
gggccagagugaguguuua

SEQ ID NO: 2404473 - RNA, 19 nt, Artificial Sequence
  Description of Artificial Sequence: Synthetic oligonucleotide
  Antisense strand to SEQ ID NO: 2404472
uaaacacucacucuggccc

SEQ ID NO: 2404474 - RNA, 19 nt, Artificial Sequence
  Description of Artificial Sequence: Synthetic oligonucleotide
  Sense strand starting at position 2189 of SEQ ID NO: 1886358
gcucgaugugugucagcca

SEQ ID NO: 2404475 - RNA, 19 nt, Artificial Sequence
  Description of Artificial Sequence: Synthetic oligonucleotide
  Antisense strand to SEQ ID NO: 2404474
uggcugacacacaucgagc

SEQ ID NO: 2404476 - RNA, 19 nt, Artificial Sequence
  Description of Artificial Sequence: Synthetic oligonucleotide
  Sense strand starting at position 2350 of SEQ ID NO: 1886358
aaccguugugaggauuaag

SEQ ID NO: 2404477 - RNA, 19 nt, Artificial Sequence
  Description of Artificial Sequence: Synthetic oligonucleotide
  Antisense strand to SEQ ID NO: 2404476
cuuaauccucacaacgguu

SEQ ID NO: 2404478 - RNA, 19 nt, Artificial Sequence
  Description of Artificial Sequence: Synthetic oligonucleotide
  Sense strand starting at position 2364 of SEQ ID NO: 1886358
uuaagugagacaugguaua

SEQ ID NO: 2404479 - RNA, 19 nt, Artificial Sequence
  Description of Artificial Sequence: Synthetic oligonucleotide
  Antisense strand to SEQ ID NO: 2404478
uauaccaugucucacuuaa

SEQ ID NO: 2404480 - RNA, 19 nt, Artificial Sequence
  Description of Artificial Sequence: Synthetic oligonucleotide
  Sense strand starting at position 2527 of SEQ ID NO: 1886358
cuuaucuugcuuugcaaga

SEQ ID NO: 2404481 - RNA, 19 nt, Artificial Sequence
  Description of Artificial Sequence: Synthetic oligonucleotide
  Antisense strand to SEQ ID NO: 2404480
ucuugcaaagcaagauaag

SEQ ID NO: 2404482 - RNA, 19 nt, Artificial Sequence
  Description of Artificial Sequence: Synthetic oligonucleotide
  Sense strand starting at position 2528 of SEQ ID NO: 1886358
uuaucuugcuuugcaagau

SEQ ID NO: 2404483 - RNA, 19 nt, Artificial Sequence
  Description of Artificial Sequence: Synthetic oligonucleotide
  Antisense strand to SEQ ID NO: 2404482
aucuugcaaagcaagauaa

SEQ ID NO: 2404484 - RNA, 19 nt, Artificial Sequence
  Description of Artificial Sequence: Synthetic oligonucleotide
  Sense strand starting at position 2532 of SEQ ID NO: 1886358
cuugcuuugcaagauucuu

SEQ ID NO: 2404485 - RNA, 19 nt, Artificial Sequence
  Description of Artificial Sequence: Synthetic oligonucleotide
  Antisense strand to SEQ ID NO: 2404484
aagaaucuugcaaagcaag

SEQ ID NO: 2404486 - RNA, 19 nt, Artificial Sequence
  Description of Artificial Sequence: Synthetic oligonucleotide
  Sense strand starting at position 2545 of SEQ ID NO: 1886358
auucuuccgccgucagagu

SEQ ID NO: 2404487 - RNA, 19 nt, Artificial Sequence
  Description of Artificial Sequence: Synthetic oligonucleotide
  Antisense strand to SEQ ID NO: 2404486
acucugacggcggaagaau

SEQ ID NO: 2404488 - RNA, 19 nt, Artificial Sequence
  Description of Artificial Sequence: Synthetic oligonucleotide
  Sense strand starting at position 2552 of SEQ ID NO: 1886358
cgccgucagaguuucugau

SEQ ID NO: 2404489 - RNA, 19 nt, Artificial Sequence
  Description of Artificial Sequence: Synthetic oligonucleotide
  Antisense strand to SEQ ID NO: 2404488
aucagaaacucugacggcg

SEQ ID NO: 2404490 - RNA, 19 nt, Artificial Sequence
  Description of Artificial Sequence: Synthetic oligonucleotide
  Sense strand starting at position 2554 of SEQ ID NO: 1886358
ccgucagaguuucugauuu

SEQ ID NO: 2404491 - RNA, 19 nt, Artificial Sequence
  Description of Artificial Sequence: Synthetic oligonucleotide
  Antisense strand to SEQ ID NO: 2404490
aaaucagaaacucugacgg

SEQ ID NO: 2404492 - RNA, 19 nt, Artificial Sequence
  Description of Artificial Sequence: Synthetic oligonucleotide
  Sense strand starting at position 2556 of SEQ ID NO: 1886358
gucagaguuucugauuuau

SEQ ID NO: 2404493 - RNA, 19 nt, Artificial Sequence
  Description of Artificial Sequence: Synthetic oligonucleotide
  Antisense strand to SEQ ID NO: 2404492
auaaaucagaaacucugac

SEQ ID NO: 2404494 - RNA, 19 nt, Artificial Sequence
  Description of Artificial Sequence: Synthetic oligonucleotide
  Sense strand starting at position 2743 of SEQ ID NO: 1886358
gguuauugaaucuguguug

SEQ ID NO: 2404495 - RNA, 19 nt, Artificial Sequence
  Description of Artificial Sequence: Synthetic oligonucleotide
  Antisense strand to SEQ ID NO: 2404494
caacacagauucaauaacc

SEQ ID NO: 2404496 - RNA, 19 nt, Artificial Sequence
  Description of Artificial Sequence: Synthetic oligonucleotide
  Sense strand starting at position 2746 of SEQ ID NO: 1886358
uauugaaucuguguugguu

SEQ ID NO: 2404497 - RNA, 19 nt, Artificial Sequence
  Description of Artificial Sequence: Synthetic oligonucleotide
  Antisense strand to SEQ ID NO: 2404496
aaccaacacagauucaaua

SEQ ID NO: 2404498 - RNA, 19 nt, Artificial Sequence
  Description of Artificial Sequence: Synthetic oligonucleotide
  Sense strand starting at position 2752 of SEQ ID NO: 1886358
aucuguguugguuucggua

SEQ ID NO: 2404499 - RNA, 19 nt, Artificial Sequence
  Description of Artificial Sequence: Synthetic oligonucleotide
  Antisense strand to SEQ ID NO: 2404498
uaccgaaaccaacacagau

SEQ ID NO: 2404500 - RNA, 19 nt, Artificial Sequence
  Description of Artificial Sequence: Synthetic oligonucleotide
  Sense strand starting at position 2757 of SEQ ID NO: 1886358
uguugguuucgguaggagu

SEQ ID NO: 2404501 - RNA, 19 nt, Artificial Sequence
  Description of Artificial Sequence: Synthetic oligonucleotide
  Antisense strand to SEQ ID NO: 2404500
acuccuaccgaaaccaaca

SEQ ID NO: 2404502 - RNA, 19 nt, Artificial Sequence
  Description of Artificial Sequence: Synthetic oligonucleotide
  Sense strand starting at position 2758 of SEQ ID NO: 1886358
guugguuucgguaggaguu

SEQ ID NO: 2404503 - RNA, 19 nt, Artificial Sequence
  Description of Artificial Sequence: Synthetic oligonucleotide
  Antisense strand to SEQ ID NO: 2404502
aacuccuaccgaaaccaac

SEQ ID NO: 2404504 - RNA, 19 nt, Artificial Sequence
  Description of Artificial Sequence: Synthetic oligonucleotide
  Sense strand starting at position 2765 of SEQ ID NO: 1886358
ucgguaggaguuugcuaaa

SEQ ID NO: 2404505 - RNA, 19 nt, Artificial Sequence
  Description of Artificial Sequence: Synthetic oligonucleotide
  Antisense strand to SEQ ID NO: 2404504
uuuagcaaacuccuaccga

SEQ ID NO: 2404506 - RNA, 19 nt, Artificial Sequence
  Description of Artificial Sequence: Synthetic oligonucleotide
  Sense strand starting at position 2842 of SEQ ID NO: 1886358
gggagagcuuuguuaugag

SEQ ID NO: 2404507 - RNA, 19 nt, Artificial Sequence
  Description of Artificial Sequence: Synthetic oligonucleotide
  Antisense strand to SEQ ID NO: 2404506
cucauaacaaagcucuccc

SEQ ID NO: 2404508 - RNA, 19 nt, Artificial Sequence
  Description of Artificial Sequence: Synthetic oligonucleotide
  Sense strand starting at position 2856 of SEQ ID NO: 1886358
augaguguguacuuacaug

SEQ ID NO: 2404509 - RNA, 19 nt, Artificial Sequence
  Description of Artificial Sequence: Synthetic oligonucleotide
  Antisense strand to SEQ ID NO: 2404508
cauguaaguacacacucau

SEQ ID NO: 2404510 - RNA, 19 nt, Artificial Sequence
  Description of Artificial Sequence: Synthetic oligonucleotide
  Sense strand starting at position 2943 of SEQ ID NO: 1886358
ggcgaugaaguuuagacuu

SEQ ID NO: 2404511 - RNA, 19 nt, Artificial Sequence
  Description of Artificial Sequence: Synthetic oligonucleotide
  Antisense strand to SEQ ID NO: 2404510
aagucuaaacuucaucgcc

SEQ ID NO: 2404512 - RNA, 19 nt, Artificial Sequence
  Description of Artificial Sequence: Synthetic oligonucleotide
  Sense strand starting at position 2983 of SEQ ID NO: 1886358
gguauuggaagaggucuuu

SEQ ID NO: 2404513 - RNA, 19 nt, Artificial Sequence
  Description of Artificial Sequence: Synthetic oligonucleotide
  Antisense strand to SEQ ID NO: 2404512
aaagaccucuuccaauacc

SEQ ID NO: 2404514 - RNA, 19 nt, Artificial Sequence
  Description of Artificial Sequence: Synthetic oligonucleotide
  Sense strand starting at position 3179 of SEQ ID NO: 1886358
ucuauuauaguagagaugu

SEQ ID NO: 2404515 - RNA, 19 nt, Artificial Sequence
  Description of Artificial Sequence: Synthetic oligonucleotide
  Antisense strand to SEQ ID NO: 2404514
acaucucuacuauaauaga

SEQ ID NO: 2404516 - RNA, 19 nt, Artificial Sequence
  Description of Artificial Sequence: Synthetic oligonucleotide
  Sense strand starting at position 3594 of SEQ ID NO: 1886358
gaguucuaagcagagaagu

SEQ ID NO: 2404517 - RNA, 19 nt, Artificial Sequence
  Description of Artificial Sequence: Synthetic oligonucleotide
  Antisense strand to SEQ ID NO: 2404516
acuucucugcuuagaacuc

SEQ ID NO: 2404518 - RNA, 19 nt, Artificial Sequence
  Description of Artificial Sequence: Synthetic oligonucleotide
  Sense strand starting at position 3596 of SEQ ID NO: 1886358
guucuaagcagagaaguga

SEQ ID NO: 2404519 - RNA, 19 nt, Artificial Sequence
  Description of Artificial Sequence: Synthetic oligonucleotide
  Antisense strand to SEQ ID NO: 2404518
ucacuucucugcuuagaac

SEQ ID NO: 2404520 - RNA, 19 nt, Artificial Sequence
  Description of Artificial Sequence: Synthetic oligonucleotide
  Sense strand starting at position 73 of SEQ ID NO: 1886359
gccugucacucuuugagga

SEQ ID NO: 2404521 - RNA, 19 nt, Artificial Sequence
  Description of Artificial Sequence: Synthetic oligonucleotide
  Antisense strand to SEQ ID NO: 2404520
uccucaaagagugacaggc

SEQ ID NO: 2404522 - RNA, 19 nt, Artificial Sequence
  Description of Artificial Sequence: Synthetic oligonucleotide
  Sense strand starting at position 75 of SEQ ID NO: 1886359
cugucacucuuugaggacu

SEQ ID NO: 2404523 - RNA, 19 nt, Artificial Sequence
  Description of Artificial Sequence: Synthetic oligonucleotide
  Antisense strand to SEQ ID NO: 2404522
aguccucaaagagugacag

SEQ ID NO: 2404524 - RNA, 19 nt, Artificial Sequence
  Description of Artificial Sequence: Synthetic oligonucleotide
  Sense strand starting at position 230 of SEQ ID NO: 1886359
guagaauguucuguggcuu

SEQ ID NO: 2404525 - RNA, 19 nt, Artificial Sequence
  Description of Artificial Sequence: Synthetic oligonucleotide
  Antisense strand to SEQ ID NO: 2404524
aagccacagaacauucuac

SEQ ID NO: 2404526 - RNA, 19 nt, Artificial Sequence
  Description of Artificial Sequence: Synthetic oligonucleotide
  Sense strand starting at position 245 of SEQ ID NO: 1886359
gcuucagauccaggugaga

SEQ ID NO: 2404527 - RNA, 19 nt, Artificial Sequence
  Description of Artificial Sequence: Synthetic oligonucleotide
  Antisense strand to SEQ ID NO: 2404526
ucucaccuggaucugaagc

SEQ ID NO: 2404528 - RNA, 19 nt, Artificial Sequence
  Description of Artificial Sequence: Synthetic oligonucleotide
  Sense strand starting at position 250 of SEQ ID NO: 1886359
agauccaggugagagauau

SEQ ID NO: 2404529 - RNA, 19 nt, Artificial Sequence
  Description of Artificial Sequence: Synthetic oligonucleotide
  Antisense strand to SEQ ID NO: 2404528
auaucucucaccuggaucu

SEQ ID NO: 2404530 - RNA, 19 nt, Artificial Sequence
  Description of Artificial Sequence: Synthetic oligonucleotide
  Sense strand starting at position 446 of SEQ ID NO: 1886359
acaccacuucuaggaguuu

SEQ ID NO: 2404531 - RNA, 19 nt, Artificial Sequence
  Description of Artificial Sequence: Synthetic oligonucleotide
  Antisense strand to SEQ ID NO: 2404530
aaacuccuagaaguggugu

SEQ ID NO: 2404532 - RNA, 19 nt, Artificial Sequence
  Description of Artificial Sequence: Synthetic oligonucleotide
  Sense strand starting at position 524 of SEQ ID NO: 1886359
cucagaagcuucucuggau

SEQ ID NO: 2404533 - RNA, 19 nt, Artificial Sequence
  Description of Artificial Sequence: Synthetic oligonucleotide
  Antisense strand to SEQ ID NO: 2404532
auccagagaagcuucugag

SEQ ID NO: 2404534 - RNA, 19 nt, Artificial Sequence
  Description of Artificial Sequence: Synthetic oligonucleotide
  Sense strand starting at position 581 of SEQ ID NO: 1886359
gcacuugaguccuaccuac

SEQ ID NO: 2404535 - RNA, 19 nt, Artificial Sequence
  Description of Artificial Sequence: Synthetic oligonucleotide
  Antisense strand to SEQ ID NO: 2404534
guagguaggacucaagugc

SEQ ID NO: 2404536 - RNA, 19 nt, Artificial Sequence
  Description of Artificial Sequence: Synthetic oligonucleotide
  Sense strand starting at position 600 of SEQ ID NO: 1886359
aggacucuggaauguucua

SEQ ID NO: 2404537 - RNA, 19 nt, Artificial Sequence
  Description of Artificial Sequence: Synthetic oligonucleotide
  Antisense strand to SEQ ID NO: 2404536
uagaacauuccagaguccu

SEQ ID NO: 2404538 - RNA, 19 nt, Artificial Sequence
  Description of Artificial Sequence: Synthetic oligonucleotide
  Sense strand starting at position 710 of SEQ ID NO: 1886359
gguugaguguaugagauaa

SEQ ID NO: 2404539 - RNA, 19 nt, Artificial Sequence
  Description of Artificial Sequence: Synthetic oligonucleotide
  Antisense strand to SEQ ID NO: 2404538
uuaucucauacacucaacc

SEQ ID NO: 2404540 - RNA, 19 nt, Artificial Sequence
  Description of Artificial Sequence: Synthetic oligonucleotide
  Sense strand starting at position 712 of SEQ ID NO: 1886359
uugaguguaugagauaaac

SEQ ID NO: 2404541 - RNA, 19 nt, Artificial Sequence
  Description of Artificial Sequence: Synthetic oligonucleotide
  Antisense strand to SEQ ID NO: 2404540
guuuaucucauacacucaa

SEQ ID NO: 2404542 - RNA, 19 nt, Artificial Sequence
  Description of Artificial Sequence: Synthetic oligonucleotide
  Sense strand starting at position 862 of SEQ ID NO: 1886359
accuaauugcugcaugaag

SEQ ID NO: 2404543 - RNA, 19 nt, Artificial Sequence
  Description of Artificial Sequence: Synthetic oligonucleotide
  Antisense strand to SEQ ID NO: 2404542
cuucaugcagcaauuaggu

SEQ ID NO: 2404544 - RNA, 19 nt, Artificial Sequence
  Description of Artificial Sequence: Synthetic oligonucleotide
  Sense strand starting at position 864 of SEQ ID NO: 1886359
cuaauugcugcaugaagac

SEQ ID NO: 2404545 - RNA, 19 nt, Artificial Sequence
  Description of Artificial Sequence: Synthetic oligonucleotide
  Antisense strand to SEQ ID NO: 2404544
gucuucaugcagcaauuag

SEQ ID NO: 2404546 - RNA, 19 nt, Artificial Sequence
  Description of Artificial Sequence: Synthetic oligonucleotide
  Sense strand starting at position 899 of SEQ ID NO: 1886359
ggcagaauccugcggguau

SEQ ID NO: 2404547 - RNA, 19 nt, Artificial Sequence
  Description of Artificial Sequence: Synthetic oligonucleotide
  Antisense strand to SEQ ID NO: 2404546
auacccgcaggauucugcc

SEQ ID NO: 2404548 - RNA, 19 nt, Artificial Sequence
  Description of Artificial Sequence: Synthetic oligonucleotide
  Sense strand starting at position 903 of SEQ ID NO: 1886359
gaauccugcggguauggau

SEQ ID NO: 2404549 - RNA, 19 nt, Artificial Sequence
  Description of Artificial Sequence: Synthetic oligonucleotide
  Antisense strand to SEQ ID NO: 2404548
auccauacccgcaggauuc

SEQ ID NO: 2404550 - RNA, 19 nt, Artificial Sequence
  Description of Artificial Sequence: Synthetic oligonucleotide
  Sense strand starting at position 960 of SEQ ID NO: 1886359
ugagguagauauugucacu

SEQ ID NO: 2404551 - RNA, 19 nt, Artificial Sequence
  Description of Artificial Sequence: Synthetic oligonucleotide
  Antisense strand to SEQ ID NO: 2404550
agugacaauaucuaccuca

SEQ ID NO: 2404552 - RNA, 19 nt, Artificial Sequence
  Description of Artificial Sequence: Synthetic oligonucleotide
  Sense strand starting at position 963 of SEQ ID NO: 1886359
gguagauauugucacuguc

SEQ ID NO: 2404553 - RNA, 19 nt, Artificial Sequence
  Description of Artificial Sequence: Synthetic oligonucleotide
  Antisense strand to SEQ ID NO: 2404552
gacagugacaauaucuacc

SEQ ID NO: 2404554 - RNA, 19 nt, Artificial Sequence
  Description of Artificial Sequence: Synthetic oligonucleotide
  Sense strand starting at position 966 of SEQ ID NO: 1886359
agauauugucacuguccca

SEQ ID NO: 2404555 - RNA, 19 nt, Artificial Sequence
  Description of Artificial Sequence: Synthetic oligonucleotide
  Antisense strand to SEQ ID NO: 2404554
ugggacagugacaauaucu

SEQ ID NO: 2404556 - RNA, 19 nt, Artificial Sequence
  Description of Artificial Sequence: Synthetic oligonucleotide
  Sense strand starting at position 1101 of SEQ ID NO: 1886359
gucgaaugcccuugaggau

SEQ ID NO: 2404557 - RNA, 19 nt, Artificial Sequence
  Description of Artificial Sequence: Synthetic oligonucleotide
  Antisense strand to SEQ ID NO: 2404556
auccucaagggcauucgac

SEQ ID NO: 2404558 - RNA, 19 nt, Artificial Sequence
  Description of Artificial Sequence: Synthetic oligonucleotide
  Sense strand starting at position 1118 of SEQ ID NO: 1886359
aucucaaucuccgugagga

SEQ ID NO: 2404559 - RNA, 19 nt, Artificial Sequence
  Description of Artificial Sequence: Synthetic oligonucleotide
  Antisense strand to SEQ ID NO: 2404558
uccucacggagauugagau

SEQ ID NO: 2404560 - RNA, 19 nt, Artificial Sequence
  Description of Artificial Sequence: Synthetic oligonucleotide
  Sense strand starting at position 1119 of SEQ ID NO: 1886359
ucucaaucuccgugaggag

SEQ ID NO: 2404561 - RNA, 19 nt, Artificial Sequence
  Description of Artificial Sequence: Synthetic oligonucleotide
  Antisense strand to SEQ ID NO: 2404560
cuccucacggagauugaga

SEQ ID NO: 2404562 - RNA, 19 nt, Artificial Sequence
  Description of Artificial Sequence: Synthetic oligonucleotide
  Sense strand starting at position 1201 of SEQ ID NO: 1886359
aguguccuucugcgagaca

SEQ ID NO: 2404563 - RNA, 19 nt, Artificial Sequence
  Description of Artificial Sequence: Synthetic oligonucleotide
  Antisense strand to SEQ ID NO: 2404562
ugucucgcagaaggacacu

SEQ ID NO: 2404564 - RNA, 19 nt, Artificial Sequence
  Description of Artificial Sequence: Synthetic oligonucleotide
  Sense strand starting at position 1254 of SEQ ID NO: 1886359
acccuugucugacuggaaa

SEQ ID NO: 2404565 - RNA, 19 nt, Artificial Sequence
  Description of Artificial Sequence: Synthetic oligonucleotide
  Antisense strand to SEQ ID NO: 2404564
uuuccagucagacaagggu

SEQ ID NO: 2404566 - RNA, 19 nt, Artificial Sequence
  Description of Artificial Sequence: Synthetic oligonucleotide
  Sense strand starting at position 1367 of SEQ ID NO: 1886359
gccagugaggaaugcugau

SEQ ID NO: 2404567 - RNA, 19 nt, Artificial Sequence
  Description of Artificial Sequence: Synthetic oligonucleotide
  Antisense strand to SEQ ID NO: 2404566
aucagcauuccucacuggc

SEQ ID NO: 2404568 - RNA, 19 nt, Artificial Sequence
  Description of Artificial Sequence: Synthetic oligonucleotide
  Sense strand starting at position 1373 of SEQ ID NO: 1886359
gaggaaugcugauucugga

SEQ ID NO: 2404569 - RNA, 19 nt, Artificial Sequence
  Description of Artificial Sequence: Synthetic oligonucleotide
  Antisense strand to SEQ ID NO: 2404568
uccagaaucagcauuccuc

SEQ ID NO: 2404570 - RNA, 19 nt, Artificial Sequence
  Description of Artificial Sequence: Synthetic oligonucleotide
  Sense strand starting at position 1376 of SEQ ID NO: 1886359
gaaugcugauucuggaauc

SEQ ID NO: 2404571 - RNA, 19 nt, Artificial Sequence
  Description of Artificial Sequence: Synthetic oligonucleotide
  Antisense strand to SEQ ID NO: 2404570
gauuccagaaucagcauuc

SEQ ID NO: 2404572 - RNA, 19 nt, Artificial Sequence
  Description of Artificial Sequence: Synthetic oligonucleotide
  Sense strand starting at position 1485 of SEQ ID NO: 1886359
caugucacucaggguucua

SEQ ID NO: 2404573 - RNA, 19 nt, Artificial Sequence
  Description of Artificial Sequence: Synthetic oligonucleotide
  Antisense strand to SEQ ID NO: 2404572
uagaacccugagugacaug

SEQ ID NO: 2404574 - RNA, 19 nt, Artificial Sequence
  Description of Artificial Sequence: Synthetic oligonucleotide
  Sense strand starting at position 1610 of SEQ ID NO: 1886359
gcaggugcgcucuuuaaga

SEQ ID NO: 2404575 - RNA, 19 nt, Artificial Sequence
  Description of Artificial Sequence: Synthetic oligonucleotide
  Antisense strand to SEQ ID NO: 2404574
ucuuaaagagcgcaccugc

SEQ ID NO: 2404576 - RNA, 19 nt, Artificial Sequence
  Description of Artificial Sequence: Synthetic oligonucleotide
  Sense strand starting at position 2194 of SEQ ID NO: 1886359
cgcagaggcgucuagagau

SEQ ID NO: 2404577 - RNA, 19 nt, Artificial Sequence
  Description of Artificial Sequence: Synthetic oligonucleotide
  Antisense strand to SEQ ID NO: 2404576
aucucuagacgccucugcg

SEQ ID NO: 2404578 - RNA, 19 nt, Artificial Sequence
  Description of Artificial Sequence: Synthetic oligonucleotide
  Sense strand starting at position 2392 of SEQ ID NO: 1886359
gaggaagggccuugaccua

SEQ ID NO: 2404579 - RNA, 19 nt, Artificial Sequence
  Description of Artificial Sequence: Synthetic oligonucleotide
  Antisense strand to SEQ ID NO: 2404578
uaggucaaggcccuuccuc

SEQ ID NO: 2404580 - RNA, 19 nt, Artificial Sequence
  Description of Artificial Sequence: Synthetic oligonucleotide
  Sense strand starting at position 2510 of SEQ ID NO: 1886359
ggacccguguugucugaaa

SEQ ID NO: 2404581 - RNA, 19 nt, Artificial Sequence
  Description of Artificial Sequence: Synthetic oligonucleotide
  Antisense strand to SEQ ID NO: 2404580
uuucagacaacacgggucc

SEQ ID NO: 2404582 - RNA, 19 nt, Artificial Sequence
  Description of Artificial Sequence: Synthetic oligonucleotide
  Sense strand starting at position 2625 of SEQ ID NO: 1886359
agccgcugccaguaucauu

SEQ ID NO: 2404583 - RNA, 19 nt, Artificial Sequence
  Description of Artificial Sequence: Synthetic oligonucleotide
  Antisense strand to SEQ ID NO: 2404582
aaugauacuggcagcggcu

SEQ ID NO: 2404584 - RNA, 19 nt, Artificial Sequence
  Description of Artificial Sequence: Synthetic oligonucleotide
  Sense strand starting at position 2775 of SEQ ID NO: 1886359
gucccaucacagugacaca

SEQ ID NO: 2404585 - RNA, 19 nt, Artificial Sequence
  Description of Artificial Sequence: Synthetic oligonucleotide
  Antisense strand to SEQ ID NO: 2404584
ugugucacugugaugggac

SEQ ID NO: 2404586 - RNA, 19 nt, Artificial Sequence
  Description of Artificial Sequence: Synthetic oligonucleotide
  Sense strand starting at position 2811 of SEQ ID NO: 1886359
cagacuccacuggguauua

SEQ ID NO: 2404587 - RNA, 19 nt, Artificial Sequence
  Description of Artificial Sequence: Synthetic oligonucleotide
  Antisense strand to SEQ ID NO: 2404586
uaauacccaguggagucug

SEQ ID NO: 2404588 - RNA, 19 nt, Artificial Sequence
  Description of Artificial Sequence: Synthetic oligonucleotide
  Sense strand starting at position 2901 of SEQ ID NO: 1886359
uccugaaagucuggaugcu

SEQ ID NO: 2404589 - RNA, 19 nt, Artificial Sequence
  Description of Artificial Sequence: Synthetic oligonucleotide
  Antisense strand to SEQ ID NO: 2404588
agcauccagacuuucagga

SEQ ID NO: 2404590 - RNA, 19 nt, Artificial Sequence
  Description of Artificial Sequence: Synthetic oligonucleotide
  Sense strand starting at position 3241 of SEQ ID NO: 1886359
gggcuauuaauccguuucu

SEQ ID NO: 2404591 - RNA, 19 nt, Artificial Sequence
  Description of Artificial Sequence: Synthetic oligonucleotide
  Antisense strand to SEQ ID NO: 2404590
agaaacggauuaauagccc

SEQ ID NO: 2404592 - RNA, 19 nt, Artificial Sequence
  Description of Artificial Sequence: Synthetic oligonucleotide
  Sense strand starting at position 3247 of SEQ ID NO: 1886359
uuaauccguuucucaggaa

SEQ ID NO: 2404593 - RNA, 19 nt, Artificial Sequence
  Description of Artificial Sequence: Synthetic oligonucleotide
  Antisense strand to SEQ ID NO: 2404592
uuccugagaaacggauuaa

SEQ ID NO: 2404594 - RNA, 19 nt, Artificial Sequence
  Description of Artificial Sequence: Synthetic oligonucleotide
  Sense strand starting at position 3309 of SEQ ID NO: 1886359
ccguuuaugaggcagagaa

SEQ ID NO: 2404595 - RNA, 19 nt, Artificial Sequence
  Description of Artificial Sequence: Synthetic oligonucleotide
  Antisense strand to SEQ ID NO: 2404594
uucucugccucauaaacgg

SEQ ID NO: 2404596 - RNA, 19 nt, Artificial Sequence
  Description of Artificial Sequence: Synthetic oligonucleotide
  Sense strand starting at position 3412 of SEQ ID NO: 1886359
gaggcuuauucccagccca

SEQ ID NO: 2404597 - RNA, 19 nt, Artificial Sequence
  Description of Artificial Sequence: Synthetic oligonucleotide
  Antisense strand to SEQ ID NO: 2404596
ugggcugggaauaagccuc

SEQ ID NO: 2404598 - RNA, 19 nt, Artificial Sequence
  Description of Artificial Sequence: Synthetic oligonucleotide
  Sense strand starting at position 3438 of SEQ ID NO: 1886359
aggacugggcugugucuaa

SEQ ID NO: 2404599 - RNA, 19 nt, Artificial Sequence
  Description of Artificial Sequence: Synthetic oligonucleotide
  Antisense strand to SEQ ID NO: 2404598
uuagacacagcccaguccu

SEQ ID NO: 2404600 - RNA, 19 nt, Artificial Sequence
  Description of Artificial Sequence: Synthetic oligonucleotide
  Sense strand starting at position 1251 of SEQ ID NO: 1886360
gaccaugggucccaagaga

SEQ ID NO: 2404601 - RNA, 19 nt, Artificial Sequence
  Description of Artificial Sequence: Synthetic oligonucleotide
  Antisense strand to SEQ ID NO: 2404600
ucucuugggacccaugguc

SEQ ID NO: 2404602 - RNA, 19 nt, Artificial Sequence
  Description of Artificial Sequence: Synthetic oligonucleotide
  Sense strand starting at position 2537 of SEQ ID NO: 1886360
agcaacugugugcaaauaa

SEQ ID NO: 2404603 - RNA, 19 nt, Artificial Sequence
  Description of Artificial Sequence: Synthetic oligonucleotide
  Antisense strand to SEQ ID NO: 2404602
uuauuugcacacaguugcu

SEQ ID NO: 2404604 - RNA, 19 nt, Artificial Sequence
  Description of Artificial Sequence: Synthetic oligonucleotide
  Sense strand starting at position 2538 of SEQ ID NO: 1886361
acuaguggucagcaacuau

SEQ ID NO: 2404605 - RNA, 19 nt, Artificial Sequence
  Description of Artificial Sequence: Synthetic oligonucleotide
  Antisense strand to SEQ ID NO: 2404604
auaguugcugaccacuagu

SEQ ID NO: 2404606 - RNA, 19 nt, Artificial Sequence
  Description of Artificial Sequence: Synthetic oligonucleotide
  Sense strand starting at position 2548 of SEQ ID NO: 1886361
agcaacuaugugcaaauaa

SEQ ID NO: 2404607 - RNA, 19 nt, Artificial Sequence
  Description of Artificial Sequence: Synthetic oligonucleotide
  Antisense strand to SEQ ID NO: 2404606
uuauuugcacauaguugcu

SEQ ID NO: 2404608 - RNA, 19 nt, Artificial Sequence
  Description of Artificial Sequence: Synthetic oligonucleotide
  Sense strand starting at position 2527 of SEQ ID NO: 1886362
acuaguggucagcaacuau

SEQ ID NO: 2404609 - RNA, 19 nt, Artificial Sequence
  Description of Artificial Sequence: Synthetic oligonucleotide
  Antisense strand to SEQ ID NO: 2404608
auaguugcugaccacuagu

SEQ ID NO: 2404610 - RNA, 19 nt, Artificial Sequence
  Description of Artificial Sequence: Synthetic oligonucleotide
  Sense strand starting at position 1251 of SEQ ID NO: 1886363
gaccaugggucccaagaga

SEQ ID NO: 2404611 - RNA, 19 nt, Artificial Sequence
  Description of Artificial Sequence: Synthetic oligonucleotide
  Antisense strand to SEQ ID NO: 2404610
ucucuugggacccaugguc

SEQ ID NO: 2404612 - RNA, 19 nt, Artificial Sequence
  Description of Artificial Sequence: Synthetic oligonucleotide
  Sense strand starting at position 2537 of SEQ ID NO: 1886363
agcaacugugugcaaauaa

SEQ ID NO: 2404613 - RNA, 19 nt, Artificial Sequence
  Description of Artificial Sequence: Synthetic oligonucleotide
  Antisense strand to SEQ ID NO: 2404612
uuauuugcacacaguugcu

SEQ ID NO: 2404614 - RNA, 19 nt, Artificial Sequence
  Description of Artificial Sequence: Synthetic oligonucleotide
  Sense strand starting at position 2538 of SEQ ID NO: 1886364
acuaguggucagcaacuau

SEQ ID NO: 2404615 - RNA, 19 nt, Artificial Sequence
  Description of Artificial Sequence: Synthetic oligonucleotide
  Antisense strand to SEQ ID NO: 2404614
auaguugcugaccacuagu

SEQ ID NO: 2404616 - RNA, 19 nt, Artificial Sequence
  Description of Artificial Sequence: Synthetic oligonucleotide
  Sense strand starting at position 2548 of SEQ ID NO: 1886364
agcaacuaugugcaaauaa

SEQ ID NO: 2404617 - RNA, 19 nt, Artificial Sequence
  Description of Artificial Sequence: Synthetic oligonucleotide
  Antisense strand to SEQ ID NO: 2404616
uuauuugcacauaguugcu

SEQ ID NO: 2404618 - RNA, 19 nt, Artificial Sequence
  Description of Artificial Sequence: Synthetic oligonucleotide
  Sense strand starting at position 2527 of SEQ ID NO: 1886365
acuaguggucagcaacuau

SEQ ID NO: 2404619 - RNA, 19 nt, Artificial Sequence
  Description of Artificial Sequence: Synthetic oligonucleotide
  Antisense strand to SEQ ID NO: 2404618
auaguugcugaccacuagu

SEQ ID NO: 2404620 - RNA, 19 nt, Artificial Sequence
  Description of Artificial Sequence: Synthetic oligonucleotide
  Sense strand starting at position 1436 of SEQ ID NO: 1886366
gaccaugggucccaagaga

SEQ ID NO: 2404621 - RNA, 19 nt, Artificial Sequence
  Description of Artificial Sequence: Synthetic oligonucleotide
  Antisense strand to SEQ ID NO: 2404620
ucucuugggacccaugguc

SEQ ID NO: 2404622 - RNA, 19 nt, Artificial Sequence
  Description of Artificial Sequence: Synthetic oligonucleotide
  Sense strand starting at position 2722 of SEQ ID NO: 1886366
agcaacugugugcaaauaa

SEQ ID NO: 2404623 - RNA, 19 nt, Artificial Sequence
  Description of Artificial Sequence: Synthetic oligonucleotide
  Antisense strand to SEQ ID NO: 2404622
uuauuugcacacaguugcu

SEQ ID NO: 2404624 - RNA, 19 nt, Artificial Sequence
  Description of Artificial Sequence: Synthetic oligonucleotide
  Sense strand starting at position 18 of SEQ ID NO: 1886367
augccagaagugugcuaau

SEQ ID NO: 2404625 - RNA, 19 nt, Artificial Sequence
  Description of Artificial Sequence: Synthetic oligonucleotide
  Antisense strand to SEQ ID NO: 2404624
auuagcacacuucuggcau

SEQ ID NO: 2404626 - RNA, 19 nt, Artificial Sequence
  Description of Artificial Sequence: Synthetic oligonucleotide
  Sense strand starting at position 29 of SEQ ID NO: 1886367
gugcuaauuguccauguug

SEQ ID NO: 2404627 - RNA, 19 nt, Artificial Sequence
  Description of Artificial Sequence: Synthetic oligonucleotide
  Antisense strand to SEQ ID NO: 2404626
caacauggacaauuagcac

SEQ ID NO: 2404628 - RNA, 19 nt, Artificial Sequence
  Description of Artificial Sequence: Synthetic oligonucleotide
  Sense strand starting at position 44 of SEQ ID NO: 1886367
guugucuuucuguaguuua

SEQ ID NO: 2404629 - RNA, 19 nt, Artificial Sequence
  Description of Artificial Sequence: Synthetic oligonucleotide
  Antisense strand to SEQ ID NO: 2404628
uaaacuacagaaagacaac

SEQ ID NO: 2404630 - RNA, 19 nt, Artificial Sequence
  Description of Artificial Sequence: Synthetic oligonucleotide
  Sense strand starting at position 51 of SEQ ID NO: 1886367
uucuguaguuuacuacaga

SEQ ID NO: 2404631 - RNA, 19 nt, Artificial Sequence
  Description of Artificial Sequence: Synthetic oligonucleotide
  Antisense strand to SEQ ID NO: 2404630
ucuguaguaaacuacagaa

SEQ ID NO: 2404632 - RNA, 19 nt, Artificial Sequence
  Description of Artificial Sequence: Synthetic oligonucleotide
  Sense strand starting at position 54 of SEQ ID NO: 1886367
uguaguuuacuacagauga

SEQ ID NO: 2404633 - RNA, 19 nt, Artificial Sequence
  Description of Artificial Sequence: Synthetic oligonucleotide
  Antisense strand to SEQ ID NO: 2404632
ucaucuguaguaaacuaca

SEQ ID NO: 2404634 - RNA, 19 nt, Artificial Sequence
  Description of Artificial Sequence: Synthetic oligonucleotide
  Sense strand starting at position 86 of SEQ ID NO: 1886367
caccauucccugugaggua

SEQ ID NO: 2404635 - RNA, 19 nt, Artificial Sequence
  Description of Artificial Sequence: Synthetic oligonucleotide
  Antisense strand to SEQ ID NO: 2404634
uaccucacagggaauggug

SEQ ID NO: 2404636 - RNA, 19 nt, Artificial Sequence
  Description of Artificial Sequence: Synthetic oligonucleotide
  Sense strand starting at position 99 of SEQ ID NO: 1886367
gagguaggcuucuccuagu

SEQ ID NO: 2404637 - RNA, 19 nt, Artificial Sequence
  Description of Artificial Sequence: Synthetic oligonucleotide
  Antisense strand to SEQ ID NO: 2404636
acuaggagaagccuaccuc

SEQ ID NO: 2404638 - RNA, 19 nt, Artificial Sequence
  Description of Artificial Sequence: Synthetic oligonucleotide
  Sense strand starting at position 189 of SEQ ID NO: 1886367
cagcaauggcuacaguuau

SEQ ID NO: 2404639 - RNA, 19 nt, Artificial Sequence
  Description of Artificial Sequence: Synthetic oligonucleotide
  Antisense strand to SEQ ID NO: 2404638
auaacuguagccauugcug

SEQ ID NO: 2404640 - RNA, 19 nt, Artificial Sequence
  Description of Artificial Sequence: Synthetic oligonucleotide
  Sense strand starting at position 253 of SEQ ID NO: 1886367
ccuuauuuguuguucuaua

SEQ ID NO: 2404641 - RNA, 19 nt, Artificial Sequence
  Description of Artificial Sequence: Synthetic oligonucleotide
  Antisense strand to SEQ ID NO: 2404640
uauagaacaacaaauaagg

SEQ ID NO: 2404642 - RNA, 19 nt, Artificial Sequence
  Description of Artificial Sequence: Synthetic oligonucleotide
  Sense strand starting at position 254 of SEQ ID NO: 1886367
cuuauuuguuguucuauac

SEQ ID NO: 2404643 - RNA, 19 nt, Artificial Sequence
  Description of Artificial Sequence: Synthetic oligonucleotide
  Antisense strand to SEQ ID NO: 2404642
guauagaacaacaaauaag

SEQ ID NO: 2404644 - RNA, 19 nt, Artificial Sequence
  Description of Artificial Sequence: Synthetic oligonucleotide
  Sense strand starting at position 258 of SEQ ID NO: 1886367
uuuguuguucuauacucaa

SEQ ID NO: 2404645 - RNA, 19 nt, Artificial Sequence
  Description of Artificial Sequence: Synthetic oligonucleotide
  Antisense strand to SEQ ID NO: 2404644
uugaguauagaacaacaaa

SEQ ID NO: 2404646 - RNA, 19 nt, Artificial Sequence
  Description of Artificial Sequence: Synthetic oligonucleotide
  Sense strand starting at position 261 of SEQ ID NO: 1886367
guuguucuauacucaacau

SEQ ID NO: 2404647 - RNA, 19 nt, Artificial Sequence
  Description of Artificial Sequence: Synthetic oligonucleotide
  Antisense strand to SEQ ID NO: 2404646
auguugaguauagaacaac

SEQ ID NO: 2404648 - RNA, 19 nt, Artificial Sequence
  Description of Artificial Sequence: Synthetic oligonucleotide
  Sense strand starting at position 281 of SEQ ID NO: 1886367
ccgacagauuuacagguaa

SEQ ID NO: 2404649 - RNA, 19 nt, Artificial Sequence
  Description of Artificial Sequence: Synthetic oligonucleotide
  Antisense strand to SEQ ID NO: 2404648
uuaccuguaaaucugucgg

SEQ ID NO: 2404650 - RNA, 19 nt, Artificial Sequence
  Description of Artificial Sequence: Synthetic oligonucleotide
  Sense strand starting at position 341 of SEQ ID NO: 1886367
gcaauacugcucugugaaa

SEQ ID NO: 2404651 - RNA, 19 nt, Artificial Sequence
  Description of Artificial Sequence: Synthetic oligonucleotide
  Antisense strand to SEQ ID NO: 2404650
uuucacagagcaguauugc

SEQ ID NO: 2404652 - RNA, 19 nt, Artificial Sequence
  Description of Artificial Sequence: Synthetic oligonucleotide
  Sense strand starting at position 471 of SEQ ID NO: 1886367
uuccuuaucccagaguaca

SEQ ID NO: 2404653 - RNA, 19 nt, Artificial Sequence
  Description of Artificial Sequence: Synthetic oligonucleotide
  Antisense strand to SEQ ID NO: 2404652
uguacucugggauaaggaa

SEQ ID NO: 2404654 - RNA, 19 nt, Artificial Sequence
  Description of Artificial Sequence: Synthetic oligonucleotide
  Sense strand starting at position 512 of SEQ ID NO: 1886367
uguuguuuccaagaacaua

SEQ ID NO: 2404655 - RNA, 19 nt, Artificial Sequence
  Description of Artificial Sequence: Synthetic oligonucleotide
  Antisense strand to SEQ ID NO: 2404654
uauguucuuggaaacaaca

SEQ ID NO: 2404656 - RNA, 19 nt, Artificial Sequence
  Description of Artificial Sequence: Synthetic oligonucleotide
  Sense strand starting at position 688 of SEQ ID NO: 1886367
cgaauuguacgcuauuaau

SEQ ID NO: 2404657 - RNA, 19 nt, Artificial Sequence
  Description of Artificial Sequence: Synthetic oligonucleotide
  Antisense strand to SEQ ID NO: 2404656
auuaauagcguacaauucg

SEQ ID NO: 2404658 - RNA, 19 nt, Artificial Sequence
  Description of Artificial Sequence: Synthetic oligonucleotide
  Sense strand starting at position 812 of SEQ ID NO: 1886367
uaagaagucgcuuagagca

SEQ ID NO: 2404659 - RNA, 19 nt, Artificial Sequence
  Description of Artificial Sequence: Synthetic oligonucleotide
  Antisense strand to SEQ ID NO: 2404658
ugcucuaagcgacuucuua

SEQ ID NO: 2404660 - RNA, 19 nt, Artificial Sequence
  Description of Artificial Sequence: Synthetic oligonucleotide
  Sense strand starting at position 2123 of SEQ ID NO: 1886367
cgcagaguccggcuguguu

SEQ ID NO: 2404661 - RNA, 19 nt, Artificial Sequence
  Description of Artificial Sequence: Synthetic oligonucleotide
  Antisense strand to SEQ ID NO: 2404660
aacacagccggacucugcg

SEQ ID NO: 2404662 - RNA, 19 nt, Artificial Sequence
  Description of Artificial Sequence: Synthetic oligonucleotide
  Sense strand starting at position 2133 of SEQ ID NO: 1886367
ggcuguguuccgaagugac

SEQ ID NO: 2404663 - RNA, 19 nt, Artificial Sequence
  Description of Artificial Sequence: Synthetic oligonucleotide
  Antisense strand to SEQ ID NO: 2404662
gucacuucggaacacagcc

SEQ ID NO: 2404664 - RNA, 19 nt, Artificial Sequence
  Description of Artificial Sequence: Synthetic oligonucleotide
  Sense strand starting at position 2143 of SEQ ID NO: 1886367
cgaagugacuuuccuaguc

SEQ ID NO: 2404665 - RNA, 19 nt, Artificial Sequence
  Description of Artificial Sequence: Synthetic oligonucleotide
  Antisense strand to SEQ ID NO: 2404664
gacuaggaaagucacuucg

SEQ ID NO: 2404666 - RNA, 19 nt, Artificial Sequence
  Description of Artificial Sequence: Synthetic oligonucleotide
  Sense strand starting at position 2663 of SEQ ID NO: 1886367
auaaacguagccugggauu

SEQ ID NO: 2404667 - RNA, 19 nt, Artificial Sequence
  Description of Artificial Sequence: Synthetic oligonucleotide
  Antisense strand to SEQ ID NO: 2404666
aaucccaggcuacguuuau

SEQ ID NO: 2404668 - RNA, 19 nt, Artificial Sequence
  Description of Artificial Sequence: Synthetic oligonucleotide
  Sense strand starting at position 2676 of SEQ ID NO: 1886367
gggauugcugggcaagcua

SEQ ID NO: 2404669 - RNA, 19 nt, Artificial Sequence
  Description of Artificial Sequence: Synthetic oligonucleotide
  Antisense strand to SEQ ID NO: 2404668
uagcuugcccagcaauccc

SEQ ID NO: 2404670 - RNA, 19 nt, Artificial Sequence
  Description of Artificial Sequence: Synthetic oligonucleotide
  Sense strand starting at position 2701 of SEQ ID NO: 1886367
ccauuaccaggcgauaaga

SEQ ID NO: 2404671 - RNA, 19 nt, Artificial Sequence
  Description of Artificial Sequence: Synthetic oligonucleotide
  Antisense strand to SEQ ID NO: 2404670
ucuuaucgccugguaaugg

SEQ ID NO: 2404672 - RNA, 19 nt, Artificial Sequence
  Description of Artificial Sequence: Synthetic oligonucleotide
  Sense strand starting at position 2730 of SEQ ID NO: 1886367
ucuagcauuuguuagauac

SEQ ID NO: 2404673 - RNA, 19 nt, Artificial Sequence
  Description of Artificial Sequence: Synthetic oligonucleotide
  Antisense strand to SEQ ID NO: 2404672
guaucuaacaaaugcuaga

SEQ ID NO: 2404674 - RNA, 19 nt, Artificial Sequence
  Description of Artificial Sequence: Synthetic oligonucleotide
  Sense strand starting at position 2781 of SEQ ID NO: 1886367
gcauuuaagccucgcaaca

SEQ ID NO: 2404675 - RNA, 19 nt, Artificial Sequence
  Description of Artificial Sequence: Synthetic oligonucleotide
  Antisense strand to SEQ ID NO: 2404674
uguugcgaggcuuaaaugc

SEQ ID NO: 2404676 - RNA, 19 nt, Artificial Sequence
  Description of Artificial Sequence: Synthetic oligonucleotide
  Sense strand starting at position 2838 of SEQ ID NO: 1886367
gaaaccgagucuguaacuu

SEQ ID NO: 2404677 - RNA, 19 nt, Artificial Sequence
  Description of Artificial Sequence: Synthetic oligonucleotide
  Antisense strand to SEQ ID NO: 2404676
aaguuacagacucgguuuc

SEQ ID NO: 2404678 - RNA, 19 nt, Artificial Sequence
  Description of Artificial Sequence: Synthetic oligonucleotide
  Sense strand starting at position 2846 of SEQ ID NO: 1886367
gucuguaacuuguugaucu

SEQ ID NO: 2404679 - RNA, 19 nt, Artificial Sequence
  Description of Artificial Sequence: Synthetic oligonucleotide
  Antisense strand to SEQ ID NO: 2404678
agaucaacaaguuacagac

SEQ ID NO: 2404680 - RNA, 19 nt, Artificial Sequence
  Description of Artificial Sequence: Synthetic oligonucleotide
  Sense strand starting at position 2850 of SEQ ID NO: 1886367
guaacuuguugaucuguau

SEQ ID NO: 2404681 - RNA, 19 nt, Artificial Sequence
  Description of Artificial Sequence: Synthetic oligonucleotide
  Antisense strand to SEQ ID NO: 2404680
auacagaucaacaaguuac

SEQ ID NO: 2404682 - RNA, 19 nt, Artificial Sequence
  Description of Artificial Sequence: Synthetic oligonucleotide
  Sense strand starting at position 2853 of SEQ ID NO: 1886367
acuuguugaucuguaugga

SEQ ID NO: 2404683 - RNA, 19 nt, Artificial Sequence
  Description of Artificial Sequence: Synthetic oligonucleotide
  Antisense strand to SEQ ID NO: 2404682
uccauacagaucaacaagu

SEQ ID NO: 2404684 - RNA, 19 nt, Artificial Sequence
  Description of Artificial Sequence: Synthetic oligonucleotide
  Sense strand starting at position 2854 of SEQ ID NO: 1886367
cuuguugaucuguauggag

SEQ ID NO: 2404685 - RNA, 19 nt, Artificial Sequence
  Description of Artificial Sequence: Synthetic oligonucleotide
  Antisense strand to SEQ ID NO: 2404684
cuccauacagaucaacaag

SEQ ID NO: 2404686 - RNA, 19 nt, Artificial Sequence
  Description of Artificial Sequence: Synthetic oligonucleotide
  Sense strand starting at position 2856 of SEQ ID NO: 1886367
uguugaucuguauggagau

SEQ ID NO: 2404687 - RNA, 19 nt, Artificial Sequence
  Description of Artificial Sequence: Synthetic oligonucleotide
  Antisense strand to SEQ ID NO: 2404686
aucuccauacagaucaaca

SEQ ID NO: 2404688 - RNA, 19 nt, Artificial Sequence
  Description of Artificial Sequence: Synthetic oligonucleotide
  Sense strand starting at position 3090 of SEQ ID NO: 1886367
ggaagacugauguggcaau

SEQ ID NO: 2404689 - RNA, 19 nt, Artificial Sequence
  Description of Artificial Sequence: Synthetic oligonucleotide
  Antisense strand to SEQ ID NO: 2404688
auugccacaucagucuucc

SEQ ID NO: 2404690 - RNA, 19 nt, Artificial Sequence
  Description of Artificial Sequence: Synthetic oligonucleotide
  Sense strand starting at position 3420 of SEQ ID NO: 1886367
ggcagugaugcguugugga

SEQ ID NO: 2404691 - RNA, 19 nt, Artificial Sequence
  Description of Artificial Sequence: Synthetic oligonucleotide
  Antisense strand to SEQ ID NO: 2404690
uccacaacgcaucacugcc

SEQ ID NO: 2404692 - RNA, 19 nt, Artificial Sequence
  Description of Artificial Sequence: Synthetic oligonucleotide
  Sense strand starting at position 3565 of SEQ ID NO: 1886367
gaagaauacuugucucgca

SEQ ID NO: 2404693 - RNA, 19 nt, Artificial Sequence
  Description of Artificial Sequence: Synthetic oligonucleotide
  Antisense strand to SEQ ID NO: 2404692
ugcgagacaaguauucuuc

SEQ ID NO: 2404694 - RNA, 19 nt, Artificial Sequence
  Description of Artificial Sequence: Synthetic oligonucleotide
  Sense strand starting at position 3573 of SEQ ID NO: 1886367
cuugucucgcaaggaacau

SEQ ID NO: 2404695 - RNA, 19 nt, Artificial Sequence
  Description of Artificial Sequence: Synthetic oligonucleotide
  Antisense strand to SEQ ID NO: 2404694
auguuccuugcgagacaag

SEQ ID NO: 2404696 - RNA, 19 nt, Artificial Sequence
  Description of Artificial Sequence: Synthetic oligonucleotide
  Sense strand starting at position 3582 of SEQ ID NO: 1886367
caaggaacaugugagaauu

SEQ ID NO: 2404697 - RNA, 19 nt, Artificial Sequence
  Description of Artificial Sequence: Synthetic oligonucleotide
  Antisense strand to SEQ ID NO: 2404696
aauucucacauguuccuug

SEQ ID NO: 2404698 - RNA, 19 nt, Artificial Sequence
  Description of Artificial Sequence: Synthetic oligonucleotide
  Sense strand starting at position 3622 of SEQ ID NO: 1886367
cuagguggccaauaaauua

SEQ ID NO: 2404699 - RNA, 19 nt, Artificial Sequence
  Description of Artificial Sequence: Synthetic oligonucleotide
  Antisense strand to SEQ ID NO: 2404698
uaauuuauuggccaccuag

SEQ ID NO: 2404700 - RNA, 19 nt, Artificial Sequence
  Description of Artificial Sequence: Synthetic oligonucleotide
  Sense strand starting at position 3878 of SEQ ID NO: 1886367
ucauacugguauguaauau

SEQ ID NO: 2404701 - RNA, 19 nt, Artificial Sequence
  Description of Artificial Sequence: Synthetic oligonucleotide
  Antisense strand to SEQ ID NO: 2404700
auauuacauaccaguauga

SEQ ID NO: 2404702 - RNA, 19 nt, Artificial Sequence
  Description of Artificial Sequence: Synthetic oligonucleotide
  Sense strand starting at position 3964 of SEQ ID NO: 1886367
ggagucuuucccgacccuu

SEQ ID NO: 2404703 - RNA, 19 nt, Artificial Sequence
  Description of Artificial Sequence: Synthetic oligonucleotide
  Antisense strand to SEQ ID NO: 2404702
aagggucgggaaagacucc

SEQ ID NO: 2404704 - RNA, 19 nt, Artificial Sequence
  Description of Artificial Sequence: Synthetic oligonucleotide
  Sense strand starting at position 60 of SEQ ID NO: 1886368
acaacauguccugaaguug

SEQ ID NO: 2404705 - RNA, 19 nt, Artificial Sequence
  Description of Artificial Sequence: Synthetic oligonucleotide
  Antisense strand to SEQ ID NO: 2404704
caacuucaggacauguugu

SEQ ID NO: 2404706 - RNA, 19 nt, Artificial Sequence
  Description of Artificial Sequence: Synthetic oligonucleotide
  Sense strand starting at position 76 of SEQ ID NO: 1886368
uuguuccauucuuacugua

SEQ ID NO: 2404707 - RNA, 19 nt, Artificial Sequence
  Description of Artificial Sequence: Synthetic oligonucleotide
  Antisense strand to SEQ ID NO: 2404706
uacaguaagaauggaacaa

SEQ ID NO: 2404708 - RNA, 19 nt, Artificial Sequence
  Description of Artificial Sequence: Synthetic oligonucleotide
  Sense strand starting at position 78 of SEQ ID NO: 1886368
guuccauucuuacuguaag

SEQ ID NO: 2404709 - RNA, 19 nt, Artificial Sequence
  Description of Artificial Sequence: Synthetic oligonucleotide
  Antisense strand to SEQ ID NO: 2404708
cuuacaguaagaauggaac

SEQ ID NO: 2404710 - RNA, 19 nt, Artificial Sequence
  Description of Artificial Sequence: Synthetic oligonucleotide
  Sense strand starting at position 146 of SEQ ID NO: 1886368
aggccacuguacugaucaa

SEQ ID NO: 2404711 - RNA, 19 nt, Artificial Sequence
  Description of Artificial Sequence: Synthetic oligonucleotide
  Antisense strand to SEQ ID NO: 2404710
uugaucaguacaguggccu

SEQ ID NO: 2404712 - RNA, 19 nt, Artificial Sequence
  Description of Artificial Sequence: Synthetic oligonucleotide
  Sense strand starting at position 170 of SEQ ID NO: 1886368
gggcccugcugucacauaa

SEQ ID NO: 2404713 - RNA, 19 nt, Artificial Sequence
  Description of Artificial Sequence: Synthetic oligonucleotide
  Antisense strand to SEQ ID NO: 2404712
uuaugugacagcagggccc

SEQ ID NO: 2404714 - RNA, 19 nt, Artificial Sequence
  Description of Artificial Sequence: Synthetic oligonucleotide
  Sense strand starting at position 197 of SEQ ID NO: 1886368
gggcuuugcugucagcacu

SEQ ID NO: 2404715 - RNA, 19 nt, Artificial Sequence
  Description of Artificial Sequence: Synthetic oligonucleotide
  Antisense strand to SEQ ID NO: 2404714
agugcugacagcaaagccc

SEQ ID NO: 2404716 - RNA, 19 nt, Artificial Sequence
  Description of Artificial Sequence: Synthetic oligonucleotide
  Sense strand starting at position 312 of SEQ ID NO: 1886368
uuucuuauccaacagggua

SEQ ID NO: 2404717 - RNA, 19 nt, Artificial Sequence
  Description of Artificial Sequence: Synthetic oligonucleotide
  Antisense strand to SEQ ID NO: 2404716
uacccuguuggauaagaaa

SEQ ID NO: 2404718 - RNA, 19 nt, Artificial Sequence
  Description of Artificial Sequence: Synthetic oligonucleotide
  Sense strand starting at position 362 of SEQ ID NO: 1886368
cauaguagguacugaugaa

SEQ ID NO: 2404719 - RNA, 19 nt, Artificial Sequence
  Description of Artificial Sequence: Synthetic oligonucleotide
  Antisense strand to SEQ ID NO: 2404718
uucaucaguaccuacuaug

SEQ ID NO: 2404720 - RNA, 19 nt, Artificial Sequence
  Description of Artificial Sequence: Synthetic oligonucleotide
  Sense strand starting at position 411 of SEQ ID NO: 1886368
agcucaggucgggaggaau

SEQ ID NO: 2404721 - RNA, 19 nt, Artificial Sequence
  Description of Artificial Sequence: Synthetic oligonucleotide
  Antisense strand to SEQ ID NO: 2404720
auuccucccgaccugagcu

SEQ ID NO: 2404722 - RNA, 19 nt, Artificial Sequence
  Description of Artificial Sequence: Synthetic oligonucleotide
  Sense strand starting at position 492 of SEQ ID NO: 1886368
uccaaagauucuuagaaga

SEQ ID NO: 2404723 - RNA, 19 nt, Artificial Sequence
  Description of Artificial Sequence: Synthetic oligonucleotide
  Antisense strand to SEQ ID NO: 2404722
ucuucuaagaaucuuugga

SEQ ID NO: 2404724 - RNA, 19 nt, Artificial Sequence
  Description of Artificial Sequence: Synthetic oligonucleotide
  Sense strand starting at position 621 of SEQ ID NO: 1886368
acaucuguccugggucuga

SEQ ID NO: 2404725 - RNA, 19 nt, Artificial Sequence
  Description of Artificial Sequence: Synthetic oligonucleotide
  Antisense strand to SEQ ID NO: 2404724
ucagacccaggacagaugu

SEQ ID NO: 2404726 - RNA, 19 nt, Artificial Sequence
  Description of Artificial Sequence: Synthetic oligonucleotide
  Sense strand starting at position 985 of SEQ ID NO: 1886368
ucccguuuguuuccaggga

SEQ ID NO: 2404727 - RNA, 19 nt, Artificial Sequence
  Description of Artificial Sequence: Synthetic oligonucleotide
  Antisense strand to SEQ ID NO: 2404726
ucccuggaaacaaacggga

SEQ ID NO: 2404728 - RNA, 19 nt, Artificial Sequence
  Description of Artificial Sequence: Synthetic oligonucleotide
  Sense strand starting at position 986 of SEQ ID NO: 1886368
cccguuuguuuccagggaa

SEQ ID NO: 2404729 - RNA, 19 nt, Artificial Sequence
  Description of Artificial Sequence: Synthetic oligonucleotide
  Antisense strand to SEQ ID NO: 2404728
uucccuggaaacaaacggg

SEQ ID NO: 2404730 - RNA, 19 nt, Artificial Sequence
  Description of Artificial Sequence: Synthetic oligonucleotide
  Sense strand starting at position 989 of SEQ ID NO: 1886368
guuuguuuccagggaaagc

SEQ ID NO: 2404731 - RNA, 19 nt, Artificial Sequence
  Description of Artificial Sequence: Synthetic oligonucleotide
  Antisense strand to SEQ ID NO: 2404730
gcuuucccuggaaacaaac

SEQ ID NO: 2404732 - RNA, 19 nt, Artificial Sequence
  Description of Artificial Sequence: Synthetic oligonucleotide
  Sense strand starting at position 1088 of SEQ ID NO: 1886368
aaaugaaggcuccgugagu

SEQ ID NO: 2404733 - RNA, 19 nt, Artificial Sequence
  Description of Artificial Sequence: Synthetic oligonucleotide
  Antisense strand to SEQ ID NO: 2404732
acucacggagccuucauuu

SEQ ID NO: 2404734 - RNA, 19 nt, Artificial Sequence
  Description of Artificial Sequence: Synthetic oligonucleotide
  Sense strand starting at position 1128 of SEQ ID NO: 1886368
agucuaacuuggcucaaga

SEQ ID NO: 2404735 - RNA, 19 nt, Artificial Sequence
  Description of Artificial Sequence: Synthetic oligonucleotide
  Antisense strand to SEQ ID NO: 2404734
ucuugagccaaguuagacu

SEQ ID NO: 2404736 - RNA, 19 nt, Artificial Sequence
  Description of Artificial Sequence: Synthetic oligonucleotide
  Sense strand starting at position 1196 of SEQ ID NO: 1886368
aagcuuucuggccaagcga

SEQ ID NO: 2404737 - RNA, 19 nt, Artificial Sequence
  Description of Artificial Sequence: Synthetic oligonucleotide
  Antisense strand to SEQ ID NO: 2404736
ucgcuuggccagaaagcuu

SEQ ID NO: 2404738 - RNA, 19 nt, Artificial Sequence
  Description of Artificial Sequence: Synthetic oligonucleotide
  Sense strand starting at position 1220 of SEQ ID NO: 1886368
guggguguccgugacugua

SEQ ID NO: 2404739 - RNA, 19 nt, Artificial Sequence
  Description of Artificial Sequence: Synthetic oligonucleotide
  Antisense strand to SEQ ID NO: 2404738
uacagucacggacacccac

SEQ ID NO: 2404740 - RNA, 19 nt, Artificial Sequence
  Description of Artificial Sequence: Synthetic oligonucleotide
  Sense strand starting at position 1377 of SEQ ID NO: 1886368
uugggaugggccugucacu

SEQ ID NO: 2404741 - RNA, 19 nt, Artificial Sequence
  Description of Artificial Sequence: Synthetic oligonucleotide
  Antisense strand to SEQ ID NO: 2404740
agugacaggcccaucccaa

SEQ ID NO: 2404742 - RNA, 19 nt, Artificial Sequence
  Description of Artificial Sequence: Synthetic oligonucleotide
  Sense strand starting at position 1770 of SEQ ID NO: 1886368
gcccgaguccuccucggua

SEQ ID NO: 2404743 - RNA, 19 nt, Artificial Sequence
  Description of Artificial Sequence: Synthetic oligonucleotide
  Antisense strand to SEQ ID NO: 2404742
uaccgaggaggacucgggc

SEQ ID NO: 2404744 - RNA, 19 nt, Artificial Sequence
  Description of Artificial Sequence: Synthetic oligonucleotide
  Sense strand starting at position 1772 of SEQ ID NO: 1886368
ccgaguccuccucgguaaa

SEQ ID NO: 2404745 - RNA, 19 nt, Artificial Sequence
  Description of Artificial Sequence: Synthetic oligonucleotide
  Antisense strand to SEQ ID NO: 2404744
uuuaccgaggaggacucgg

SEQ ID NO: 2404746 - RNA, 19 nt, Artificial Sequence
  Description of Artificial Sequence: Synthetic oligonucleotide
  Sense strand starting at position 1773 of SEQ ID NO: 1886368
cgaguccuccucgguaaau

SEQ ID NO: 2404747 - RNA, 19 nt, Artificial Sequence
  Description of Artificial Sequence: Synthetic oligonucleotide
  Antisense strand to SEQ ID NO: 2404746
auuuaccgaggaggacucg

SEQ ID NO: 2404748 - RNA, 19 nt, Artificial Sequence
  Description of Artificial Sequence: Synthetic oligonucleotide
  Sense strand starting at position 1774 of SEQ ID NO: 1886368
gaguccuccucgguaaaug

SEQ ID NO: 2404749 - RNA, 19 nt, Artificial Sequence
  Description of Artificial Sequence: Synthetic oligonucleotide
  Antisense strand to SEQ ID NO: 2404748
cauuuaccgaggaggacuc

SEQ ID NO: 2404750 - RNA, 19 nt, Artificial Sequence
  Description of Artificial Sequence: Synthetic oligonucleotide
  Sense strand starting at position 1775 of SEQ ID NO: 1886368
aguccuccucgguaaauga

SEQ ID NO: 2404751 - RNA, 19 nt, Artificial Sequence
  Description of Artificial Sequence: Synthetic oligonucleotide
  Antisense strand to SEQ ID NO: 2404750
ucauuuaccgaggaggacu

SEQ ID NO: 2404752 - RNA, 19 nt, Artificial Sequence
  Description of Artificial Sequence: Synthetic oligonucleotide
  Sense strand starting at position 2040 of SEQ ID NO: 1886368
agacauugcacguggacuu

SEQ ID NO: 2404753 - RNA, 19 nt, Artificial Sequence
  Description of Artificial Sequence: Synthetic oligonucleotide
  Antisense strand to SEQ ID NO: 2404752
aaguccacgugcaaugucu

SEQ ID NO: 2404754 - RNA, 19 nt, Artificial Sequence
  Description of Artificial Sequence: Synthetic oligonucleotide
  Sense strand starting at position 2301 of SEQ ID NO: 1886368
cgcauauucugagccucau

SEQ ID NO: 2404755 - RNA, 19 nt, Artificial Sequence
  Description of Artificial Sequence: Synthetic oligonucleotide
  Antisense strand to SEQ ID NO: 2404754
augaggcucagaauaugcg

SEQ ID NO: 2404756 - RNA, 19 nt, Artificial Sequence
  Description of Artificial Sequence: Synthetic oligonucleotide
  Sense strand starting at position 3741 of SEQ ID NO: 1886368
cagagagacucuugucuca

SEQ ID NO: 2404757 - RNA, 19 nt, Artificial Sequence
  Description of Artificial Sequence: Synthetic oligonucleotide
  Antisense strand to SEQ ID NO: 2404756
ugagacaagagucucucug

SEQ ID NO: 2404758 - RNA, 19 nt, Artificial Sequence
  Description of Artificial Sequence: Synthetic oligonucleotide
  Sense strand starting at position 3812 of SEQ ID NO: 1886368
ggcuguaacaagggcuauu

SEQ ID NO: 2404759 - RNA, 19 nt, Artificial Sequence
  Description of Artificial Sequence: Synthetic oligonucleotide
  Antisense strand to SEQ ID NO: 2404758
aauagcccuuguuacagcc

SEQ ID NO: 2404760 - RNA, 19 nt, Artificial Sequence
  Description of Artificial Sequence: Synthetic oligonucleotide
  Sense strand starting at position 3831 of SEQ ID NO: 1886368
agggauugcuggcaagaga

SEQ ID NO: 2404761 - RNA, 19 nt, Artificial Sequence
  Description of Artificial Sequence: Synthetic oligonucleotide
  Antisense strand to SEQ ID NO: 2404760
ucucuugccagcaaucccu

SEQ ID NO: 2404762 - RNA, 19 nt, Artificial Sequence
  Description of Artificial Sequence: Synthetic oligonucleotide
  Sense strand starting at position 3884 of SEQ ID NO: 1886368
auguaagccucacugagaa

SEQ ID NO: 2404763 - RNA, 19 nt, Artificial Sequence
  Description of Artificial Sequence: Synthetic oligonucleotide
  Antisense strand to SEQ ID NO: 2404762
uucucagugaggcuuacau

SEQ ID NO: 2404764 - RNA, 19 nt, Artificial Sequence
  Description of Artificial Sequence: Synthetic oligonucleotide
  Sense strand starting at position 3903 of SEQ ID NO: 1886368
gaugacaucugaggcauga

SEQ ID NO: 2404765 - RNA, 19 nt, Artificial Sequence
  Description of Artificial Sequence: Synthetic oligonucleotide
  Antisense strand to SEQ ID NO: 2404764
ucaugccucagaugucauc

SEQ ID NO: 2404766 - RNA, 19 nt, Artificial Sequence
  Description of Artificial Sequence: Synthetic oligonucleotide
  Sense strand starting at position 3936 of SEQ ID NO: 1886368
cauagauacuccuggcaga

SEQ ID NO: 2404767 - RNA, 19 nt, Artificial Sequence
  Description of Artificial Sequence: Synthetic oligonucleotide
  Antisense strand to SEQ ID NO: 2404766
ucugccaggaguaucuaug

SEQ ID NO: 2404768 - RNA, 19 nt, Artificial Sequence
  Description of Artificial Sequence: Synthetic oligonucleotide
  Sense strand starting at position 36 of SEQ ID NO: 1886370
gguuguaagcauaggcgua

SEQ ID NO: 2404769 - RNA, 19 nt, Artificial Sequence
  Description of Artificial Sequence: Synthetic oligonucleotide
  Antisense strand to SEQ ID NO: 2404768
uacgccuaugcuuacaacc

SEQ ID NO: 2404770 - RNA, 19 nt, Artificial Sequence
  Description of Artificial Sequence: Synthetic oligonucleotide
  Sense strand starting at position 125 of SEQ ID NO: 1886370
ugagguccugcacaauauu

SEQ ID NO: 2404771 - RNA, 19 nt, Artificial Sequence
  Description of Artificial Sequence: Synthetic oligonucleotide
  Antisense strand to SEQ ID NO: 2404770
aauauugugcaggaccuca

SEQ ID NO: 2404772 - RNA, 19 nt, Artificial Sequence
  Description of Artificial Sequence: Synthetic oligonucleotide
  Sense strand starting at position 250 of SEQ ID NO: 1886370
auaguaggugcccaacaau

SEQ ID NO: 2404773 - RNA, 19 nt, Artificial Sequence
  Description of Artificial Sequence: Synthetic oligonucleotide
  Antisense strand to SEQ ID NO: 2404772
auuguugggcaccuacuau

SEQ ID NO: 2404774 - RNA, 19 nt, Artificial Sequence
  Description of Artificial Sequence: Synthetic oligonucleotide
  Sense strand starting at position 687 of SEQ ID NO: 1886370
uuacaaagucgugggagau

SEQ ID NO: 2404775 - RNA, 19 nt, Artificial Sequence
  Description of Artificial Sequence: Synthetic oligonucleotide
  Antisense strand to SEQ ID NO: 2404774
aucucccacgacuuuguaa

SEQ ID NO: 2404776 - RNA, 19 nt, Artificial Sequence
  Description of Artificial Sequence: Synthetic oligonucleotide
  Sense strand starting at position 688 of SEQ ID NO: 1886370
uacaaagucgugggagauc

SEQ ID NO: 2404777 - RNA, 19 nt, Artificial Sequence
  Description of Artificial Sequence: Synthetic oligonucleotide
  Antisense strand to SEQ ID NO: 2404776
gaucucccacgacuuugua

SEQ ID NO: 2404778 - RNA, 19 nt, Artificial Sequence
  Description of Artificial Sequence: Synthetic oligonucleotide
  Sense strand starting at position 691 of SEQ ID NO: 1886370
aaagucgugggagaucaau

SEQ ID NO: 2404779 - RNA, 19 nt, Artificial Sequence
  Description of Artificial Sequence: Synthetic oligonucleotide
  Antisense strand to SEQ ID NO: 2404778
auugaucucccacgacuuu

SEQ ID NO: 2404780 - RNA, 19 nt, Artificial Sequence
  Description of Artificial Sequence: Synthetic oligonucleotide
  Sense strand starting at position 711 of SEQ ID NO: 1886370
uaguacucagguuggagua

SEQ ID NO: 2404781 - RNA, 19 nt, Artificial Sequence
  Description of Artificial Sequence: Synthetic oligonucleotide
  Antisense strand to SEQ ID NO: 2404780
uacuccaaccugaguacua

SEQ ID NO: 2404782 - RNA, 19 nt, Artificial Sequence
  Description of Artificial Sequence: Synthetic oligonucleotide
  Sense strand starting at position 712 of SEQ ID NO: 1886370
aguacucagguuggaguaa

SEQ ID NO: 2404783 - RNA, 19 nt, Artificial Sequence
  Description of Artificial Sequence: Synthetic oligonucleotide
  Antisense strand to SEQ ID NO: 2404782
uuacuccaaccugaguacu

SEQ ID NO: 2404784 - RNA, 19 nt, Artificial Sequence
  Description of Artificial Sequence: Synthetic oligonucleotide
  Sense strand starting at position 743 of SEQ ID NO: 1886370
aaaguuccugaaggauagu

SEQ ID NO: 2404785 - RNA, 19 nt, Artificial Sequence
  Description of Artificial Sequence: Synthetic oligonucleotide
  Antisense strand to SEQ ID NO: 2404784
acuauccuucaggaacuuu

SEQ ID NO: 2404786 - RNA, 19 nt, Artificial Sequence
  Description of Artificial Sequence: Synthetic oligonucleotide
  Sense strand starting at position 771 of SEQ ID NO: 1886370
caguauaggccugauuaaa

SEQ ID NO: 2404787 - RNA, 19 nt, Artificial Sequence
  Description of Artificial Sequence: Synthetic oligonucleotide
  Antisense strand to SEQ ID NO: 2404786
uuuaaucaggccuauacug

SEQ ID NO: 2404788 - RNA, 19 nt, Artificial Sequence
  Description of Artificial Sequence: Synthetic oligonucleotide
  Sense strand starting at position 1212 of SEQ ID NO: 1886370
cuucuuucucaggaacagu

SEQ ID NO: 2404789 - RNA, 19 nt, Artificial Sequence
  Description of Artificial Sequence: Synthetic oligonucleotide
  Antisense strand to SEQ ID NO: 2404788
acuguuccugagaaagaag

SEQ ID NO: 2404790 - RNA, 19 nt, Artificial Sequence
  Description of Artificial Sequence: Synthetic oligonucleotide
  Sense strand starting at position 1293 of SEQ ID NO: 1886370
uuguaauucuucccugaag

SEQ ID NO: 2404791 - RNA, 19 nt, Artificial Sequence
  Description of Artificial Sequence: Synthetic oligonucleotide
  Antisense strand to SEQ ID NO: 2404790
cuucagggaagaauuacaa

SEQ ID NO: 2404792 - RNA, 19 nt, Artificial Sequence
  Description of Artificial Sequence: Synthetic oligonucleotide
  Sense strand starting at position 1310 of SEQ ID NO: 1886370
aggugauaauuagcucauu

SEQ ID NO: 2404793 - RNA, 19 nt, Artificial Sequence
  Description of Artificial Sequence: Synthetic oligonucleotide
  Antisense strand to SEQ ID NO: 2404792
aaugagcuaauuaucaccu

SEQ ID NO: 2404794 - RNA, 19 nt, Artificial Sequence
  Description of Artificial Sequence: Synthetic oligonucleotide
  Sense strand starting at position 1357 of SEQ ID NO: 1886370
cucucaaagcaggauucua

SEQ ID NO: 2404795 - RNA, 19 nt, Artificial Sequence
  Description of Artificial Sequence: Synthetic oligonucleotide
  Antisense strand to SEQ ID NO: 2404794
uagaauccugcuuugagag

SEQ ID NO: 2404796 - RNA, 19 nt, Artificial Sequence
  Description of Artificial Sequence: Synthetic oligonucleotide
  Sense strand starting at position 1365 of SEQ ID NO: 1886370
gcaggauucuaccugaauu

SEQ ID NO: 2404797 - RNA, 19 nt, Artificial Sequence
  Description of Artificial Sequence: Synthetic oligonucleotide
  Antisense strand to SEQ ID NO: 2404796
aauucagguagaauccugc

SEQ ID NO: 2404798 - RNA, 19 nt, Artificial Sequence
  Description of Artificial Sequence: Synthetic oligonucleotide
  Sense strand starting at position 1525 of SEQ ID NO: 1886370
aaaugugggaucuggaagu

SEQ ID NO: 2404799 - RNA, 19 nt, Artificial Sequence
  Description of Artificial Sequence: Synthetic oligonucleotide
  Antisense strand to SEQ ID NO: 2404798
acuuccagaucccacauuu

SEQ ID NO: 2404800 - RNA, 19 nt, Artificial Sequence
  Description of Artificial Sequence: Synthetic oligonucleotide
  Sense strand starting at position 1536 of SEQ ID NO: 1886370
cuggaagucucucuuggaa

SEQ ID NO: 2404801 - RNA, 19 nt, Artificial Sequence
  Description of Artificial Sequence: Synthetic oligonucleotide
  Antisense strand to SEQ ID NO: 2404800
uuccaagagagacuuccag

SEQ ID NO: 2404802 - RNA, 19 nt, Artificial Sequence
  Description of Artificial Sequence: Synthetic oligonucleotide
  Sense strand starting at position 1539 of SEQ ID NO: 1886370
gaagucucucuuggaaaga

SEQ ID NO: 2404803 - RNA, 19 nt, Artificial Sequence
  Description of Artificial Sequence: Synthetic oligonucleotide
  Antisense strand to SEQ ID NO: 2404802
ucuuuccaagagagacuuc

SEQ ID NO: 2404804 - RNA, 19 nt, Artificial Sequence
  Description of Artificial Sequence: Synthetic oligonucleotide
  Sense strand starting at position 1582 of SEQ ID NO: 1886370
gggcgaaaucgugcaguuu

SEQ ID NO: 2404805 - RNA, 19 nt, Artificial Sequence
  Description of Artificial Sequence: Synthetic oligonucleotide
  Antisense strand to SEQ ID NO: 2404804
aaacugcacgauuucgccc

SEQ ID NO: 2404806 - RNA, 19 nt, Artificial Sequence
  Description of Artificial Sequence: Synthetic oligonucleotide
  Sense strand starting at position 2771 of SEQ ID NO: 1886370
ugcucagauuucccuguaa

SEQ ID NO: 2404807 - RNA, 19 nt, Artificial Sequence
  Description of Artificial Sequence: Synthetic oligonucleotide
  Antisense strand to SEQ ID NO: 2404806
uuacagggaaaucugagca

SEQ ID NO: 2404808 - RNA, 19 nt, Artificial Sequence
  Description of Artificial Sequence: Synthetic oligonucleotide
  Sense strand starting at position 2873 of SEQ ID NO: 1886370
agaggugacuuucuuucua

SEQ ID NO: 2404809 - RNA, 19 nt, Artificial Sequence
  Description of Artificial Sequence: Synthetic oligonucleotide
  Antisense strand to SEQ ID NO: 2404808
uagaaagaaagucaccucu

SEQ ID NO: 2404810 - RNA, 19 nt, Artificial Sequence
  Description of Artificial Sequence: Synthetic oligonucleotide
  Sense strand starting at position 2875 of SEQ ID NO: 1886370
aggugacuuucuuucuaac

SEQ ID NO: 2404811 - RNA, 19 nt, Artificial Sequence
  Description of Artificial Sequence: Synthetic oligonucleotide
  Antisense strand to SEQ ID NO: 2404810
guuagaaagaaagucaccu

SEQ ID NO: 2404812 - RNA, 19 nt, Artificial Sequence
  Description of Artificial Sequence: Synthetic oligonucleotide
  Sense strand starting at position 2957 of SEQ ID NO: 1886370
guaguuacgguucaaagaa

SEQ ID NO: 2404813 - RNA, 19 nt, Artificial Sequence
  Description of Artificial Sequence: Synthetic oligonucleotide
  Antisense strand to SEQ ID NO: 2404812
uucuuugaaccguaacuac

SEQ ID NO: 2404814 - RNA, 19 nt, Artificial Sequence
  Description of Artificial Sequence: Synthetic oligonucleotide
  Sense strand starting at position 2994 of SEQ ID NO: 1886370
guuacaaagugaguacaga

SEQ ID NO: 2404815 - RNA, 19 nt, Artificial Sequence
  Description of Artificial Sequence: Synthetic oligonucleotide
  Antisense strand to SEQ ID NO: 2404814
ucuguacucacuuuguaac

SEQ ID NO: 2404816 - RNA, 19 nt, Artificial Sequence
  Description of Artificial Sequence: Synthetic oligonucleotide
  Sense strand starting at position 3019 of SEQ ID NO: 1886370
ucuagaaggccucaggcau

SEQ ID NO: 2404817 - RNA, 19 nt, Artificial Sequence
  Description of Artificial Sequence: Synthetic oligonucleotide
  Antisense strand to SEQ ID NO: 2404816
augccugaggccuucuaga

SEQ ID NO: 2404818 - RNA, 19 nt, Artificial Sequence
  Description of Artificial Sequence: Synthetic oligonucleotide
  Sense strand starting at position 3115 of SEQ ID NO: 1886370
agacaaaucugucugacuu

SEQ ID NO: 2404819 - RNA, 19 nt, Artificial Sequence
  Description of Artificial Sequence: Synthetic oligonucleotide
  Antisense strand to SEQ ID NO: 2404818
aagucagacagauuugucu

SEQ ID NO: 2404820 - RNA, 19 nt, Artificial Sequence
  Description of Artificial Sequence: Synthetic oligonucleotide
  Sense strand starting at position 3182 of SEQ ID NO: 1886370
uuuccugucccugggaaua

SEQ ID NO: 2404821 - RNA, 19 nt, Artificial Sequence
  Description of Artificial Sequence: Synthetic oligonucleotide
  Antisense strand to SEQ ID NO: 2404820
uauucccagggacaggaaa

SEQ ID NO: 2404822 - RNA, 19 nt, Artificial Sequence
  Description of Artificial Sequence: Synthetic oligonucleotide
  Sense strand starting at position 3270 of SEQ ID NO: 1886370
ggcugaucucaccauguca

SEQ ID NO: 2404823 - RNA, 19 nt, Artificial Sequence
  Description of Artificial Sequence: Synthetic oligonucleotide
  Antisense strand to SEQ ID NO: 2404822
ugacauggugagaucagcc

SEQ ID NO: 2404824 - RNA, 19 nt, Artificial Sequence
  Description of Artificial Sequence: Synthetic oligonucleotide
  Sense strand starting at position 3310 of SEQ ID NO: 1886370
ggcauugggcuccagguaa

SEQ ID NO: 2404825 - RNA, 19 nt, Artificial Sequence
  Description of Artificial Sequence: Synthetic oligonucleotide
  Antisense strand to SEQ ID NO: 2404824
uuaccuggagcccaaugcc

SEQ ID NO: 2404826 - RNA, 19 nt, Artificial Sequence
  Description of Artificial Sequence: Synthetic oligonucleotide
  Sense strand starting at position 3314 of SEQ ID NO: 1886370
uugggcuccagguaaguaa

SEQ ID NO: 2404827 - RNA, 19 nt, Artificial Sequence
  Description of Artificial Sequence: Synthetic oligonucleotide
  Antisense strand to SEQ ID NO: 2404826
uuacuuaccuggagcccaa

SEQ ID NO: 2404828 - RNA, 19 nt, Artificial Sequence
  Description of Artificial Sequence: Synthetic oligonucleotide
  Sense strand starting at position 3341 of SEQ ID NO: 1886370
ccugauaacuuagucauga

SEQ ID NO: 2404829 - RNA, 19 nt, Artificial Sequence
  Description of Artificial Sequence: Synthetic oligonucleotide
  Antisense strand to SEQ ID NO: 2404828
ucaugacuaaguuaucagg

SEQ ID NO: 2404830 - RNA, 19 nt, Artificial Sequence
  Description of Artificial Sequence: Synthetic oligonucleotide
  Sense strand starting at position 3342 of SEQ ID NO: 1886370
cugauaacuuagucaugau

SEQ ID NO: 2404831 - RNA, 19 nt, Artificial Sequence
  Description of Artificial Sequence: Synthetic oligonucleotide
  Antisense strand to SEQ ID NO: 2404830
aucaugacuaaguuaucag

SEQ ID NO: 2404832 - RNA, 19 nt, Artificial Sequence
  Description of Artificial Sequence: Synthetic oligonucleotide
  Sense strand starting at position 3371 of SEQ ID NO: 1886370
gcccuauugggagggaugu

SEQ ID NO: 2404833 - RNA, 19 nt, Artificial Sequence
  Description of Artificial Sequence: Synthetic oligonucleotide
  Antisense strand to SEQ ID NO: 2404832
acaucccucccaauagggc

SEQ ID NO: 2404834 - RNA, 19 nt, Artificial Sequence
  Description of Artificial Sequence: Synthetic oligonucleotide
  Sense strand starting at position 3433 of SEQ ID NO: 1886370
gugacaacgacuuagccau

SEQ ID NO: 2404835 - RNA, 19 nt, Artificial Sequence
  Description of Artificial Sequence: Synthetic oligonucleotide
  Antisense strand to SEQ ID NO: 2404834
auggcuaagucguugucac

SEQ ID NO: 2404836 - RNA, 19 nt, Artificial Sequence
  Description of Artificial Sequence: Synthetic oligonucleotide
  Sense strand starting at position 3439 of SEQ ID NO: 1886370
acgacuuagccauaggguu

SEQ ID NO: 2404837 - RNA, 19 nt, Artificial Sequence
  Description of Artificial Sequence: Synthetic oligonucleotide
  Antisense strand to SEQ ID NO: 2404836
aacccuauggcuaagucgu

SEQ ID NO: 2404838 - RNA, 19 nt, Artificial Sequence
  Description of Artificial Sequence: Synthetic oligonucleotide
  Sense strand starting at position 3558 of SEQ ID NO: 1886370
ugaccuaguucuucugaau

SEQ ID NO: 2404839 - RNA, 19 nt, Artificial Sequence
  Description of Artificial Sequence: Synthetic oligonucleotide
  Antisense strand to SEQ ID NO: 2404838
auucagaagaacuagguca

SEQ ID NO: 2404840 - RNA, 19 nt, Artificial Sequence
  Description of Artificial Sequence: Synthetic oligonucleotide
  Sense strand starting at position 3644 of SEQ ID NO: 1886370
ccaggaggacuguguuacu

SEQ ID NO: 2404841 - RNA, 19 nt, Artificial Sequence
  Description of Artificial Sequence: Synthetic oligonucleotide
  Antisense strand to SEQ ID NO: 2404840
aguaacacaguccuccugg

SEQ ID NO: 2404842 - RNA, 19 nt, Artificial Sequence
  Description of Artificial Sequence: Synthetic oligonucleotide
  Sense strand starting at position 3651 of SEQ ID NO: 1886370
gacuguguuacuuagggca

SEQ ID NO: 2404843 - RNA, 19 nt, Artificial Sequence
  Description of Artificial Sequence: Synthetic oligonucleotide
  Antisense strand to SEQ ID NO: 2404842
ugcccuaaguaacacaguc

SEQ ID NO: 2404844 - RNA, 19 nt, Artificial Sequence
  Description of Artificial Sequence: Synthetic oligonucleotide
  Sense strand starting at position 3718 of SEQ ID NO: 1886370
ucagaagguuguucaguga

SEQ ID NO: 2404845 - RNA, 19 nt, Artificial Sequence
  Description of Artificial Sequence: Synthetic oligonucleotide
  Antisense strand to SEQ ID NO: 2404844
ucacugaacaaccuucuga

SEQ ID NO: 2404846 - RNA, 19 nt, Artificial Sequence
  Description of Artificial Sequence: Synthetic oligonucleotide
  Sense strand starting at position 3798 of SEQ ID NO: 1886370
ccaucacuggcugaugaau

SEQ ID NO: 2404847 - RNA, 19 nt, Artificial Sequence
  Description of Artificial Sequence: Synthetic oligonucleotide
  Antisense strand to SEQ ID NO: 2404846
auucaucagccagugaugg

SEQ ID NO: 2404848 - RNA, 19 nt, Artificial Sequence
  Description of Artificial Sequence: Synthetic oligonucleotide
  Sense strand starting at position 177 of SEQ ID NO: 1886369
gguuguaagcauaggcgua

SEQ ID NO: 2404849 - RNA, 19 nt, Artificial Sequence
  Description of Artificial Sequence: Synthetic oligonucleotide
  Antisense strand to SEQ ID NO: 2404848
uacgccuaugcuuacaacc

SEQ ID NO: 2404850 - RNA, 19 nt, Artificial Sequence
  Description of Artificial Sequence: Synthetic oligonucleotide
  Sense strand starting at position 266 of SEQ ID NO: 1886369
ugagguccugcacaauauu

SEQ ID NO: 2404851 - RNA, 19 nt, Artificial Sequence
  Description of Artificial Sequence: Synthetic oligonucleotide
  Antisense strand to SEQ ID NO: 2404850
aauauugugcaggaccuca

SEQ ID NO: 2404852 - RNA, 19 nt, Artificial Sequence
  Description of Artificial Sequence: Synthetic oligonucleotide
  Sense strand starting at position 391 of SEQ ID NO: 1886369
auaguaggugcccaacaau

SEQ ID NO: 2404853 - RNA, 19 nt, Artificial Sequence
  Description of Artificial Sequence: Synthetic oligonucleotide
  Antisense strand to SEQ ID NO: 2404852
auuguugggcaccuacuau

SEQ ID NO: 2404854 - RNA, 19 nt, Artificial Sequence
  Description of Artificial Sequence: Synthetic oligonucleotide
  Sense strand starting at position 828 of SEQ ID NO: 1886369
uuacaaagucgugggagau

SEQ ID NO: 2404855 - RNA, 19 nt, Artificial Sequence
  Description of Artificial Sequence: Synthetic oligonucleotide
  Antisense strand to SEQ ID NO: 2404854
aucucccacgacuuuguaa

SEQ ID NO: 2404856 - RNA, 19 nt, Artificial Sequence
  Description of Artificial Sequence: Synthetic oligonucleotide
  Sense strand starting at position 829 of SEQ ID NO: 1886369
uacaaagucgugggagauc

SEQ ID NO: 2404857 - RNA, 19 nt, Artificial Sequence
  Description of Artificial Sequence: Synthetic oligonucleotide
  Antisense strand to SEQ ID NO: 2404856
gaucucccacgacuuugua

SEQ ID NO: 2404858 - RNA, 19 nt, Artificial Sequence
  Description of Artificial Sequence: Synthetic oligonucleotide
  Sense strand starting at position 832 of SEQ ID NO: 1886369
aaagucgugggagaucaau

SEQ ID NO: 2404859 - RNA, 19 nt, Artificial Sequence
  Description of Artificial Sequence: Synthetic oligonucleotide
  Antisense strand to SEQ ID NO: 2404858
auugaucucccacgacuuu

SEQ ID NO: 2404860 - RNA, 19 nt, Artificial Sequence
  Description of Artificial Sequence: Synthetic oligonucleotide
  Sense strand starting at position 852 of SEQ ID NO: 1886369
uaguacucagguuggagua

SEQ ID NO: 2404861 - RNA, 19 nt, Artificial Sequence
  Description of Artificial Sequence: Synthetic oligonucleotide
  Antisense strand to SEQ ID NO: 2404860
uacuccaaccugaguacua

SEQ ID NO: 2404862 - RNA, 19 nt, Artificial Sequence
  Description of Artificial Sequence: Synthetic oligonucleotide
  Sense strand starting at position 853 of SEQ ID NO: 1886369
aguacucagguuggaguaa

SEQ ID NO: 2404863 - RNA, 19 nt, Artificial Sequence
  Description of Artificial Sequence: Synthetic oligonucleotide
  Antisense strand to SEQ ID NO: 2404862
uuacuccaaccugaguacu

SEQ ID NO: 2404864 - RNA, 19 nt, Artificial Sequence
  Description of Artificial Sequence: Synthetic oligonucleotide
  Sense strand starting at position 884 of SEQ ID NO: 1886369
aaaguuccugaaggauagu

SEQ ID NO: 2404865 - RNA, 19 nt, Artificial Sequence
  Description of Artificial Sequence: Synthetic oligonucleotide
  Antisense strand to SEQ ID NO: 2404864
acuauccuucaggaacuuu

SEQ ID NO: 2404866 - RNA, 19 nt, Artificial Sequence
  Description of Artificial Sequence: Synthetic oligonucleotide
  Sense strand starting at position 912 of SEQ ID NO: 1886369
caguauaggccugauuaaa

SEQ ID NO: 2404867 - RNA, 19 nt, Artificial Sequence
  Description of Artificial Sequence: Synthetic oligonucleotide
  Antisense strand to SEQ ID NO: 2404866
uuuaaucaggccuauacug

SEQ ID NO: 2404868 - RNA, 19 nt, Artificial Sequence
  Description of Artificial Sequence: Synthetic oligonucleotide
  Sense strand starting at position 1353 of SEQ ID NO: 1886369
cuucuuucucaggaacagu

SEQ ID NO: 2404869 - RNA, 19 nt, Artificial Sequence
  Description of Artificial Sequence: Synthetic oligonucleotide
  Antisense strand to SEQ ID NO: 2404868
acuguuccugagaaagaag

SEQ ID NO: 2404870 - RNA, 19 nt, Artificial Sequence
  Description of Artificial Sequence: Synthetic oligonucleotide
  Sense strand starting at position 1434 of SEQ ID NO: 1886369
uuguaauucuucccugaag

SEQ ID NO: 2404871 - RNA, 19 nt, Artificial Sequence
  Description of Artificial Sequence: Synthetic oligonucleotide
  Antisense strand to SEQ ID NO: 2404870
cuucagggaagaauuacaa

SEQ ID NO: 2404872 - RNA, 19 nt, Artificial Sequence
  Description of Artificial Sequence: Synthetic oligonucleotide
  Sense strand starting at position 1451 of SEQ ID NO: 1886369
aggugauaauuagcucauu

SEQ ID NO: 2404873 - RNA, 19 nt, Artificial Sequence
  Description of Artificial Sequence: Synthetic oligonucleotide
  Antisense strand to SEQ ID NO: 2404872
aaugagcuaauuaucaccu

SEQ ID NO: 2404874 - RNA, 19 nt, Artificial Sequence
  Description of Artificial Sequence: Synthetic oligonucleotide
  Sense strand starting at position 1498 of SEQ ID NO: 1886369
cucucaaagcaggauucua

SEQ ID NO: 2404875 - RNA, 19 nt, Artificial Sequence
  Description of Artificial Sequence: Synthetic oligonucleotide
  Antisense strand to SEQ ID NO: 2404874
uagaauccugcuuugagag

SEQ ID NO: 2404876 - RNA, 19 nt, Artificial Sequence
  Description of Artificial Sequence: Synthetic oligonucleotide
  Sense strand starting at position 1506 of SEQ ID NO: 1886369
gcaggauucuaccugaauu

SEQ ID NO: 2404877 - RNA, 19 nt, Artificial Sequence
  Description of Artificial Sequence: Synthetic oligonucleotide
  Antisense strand to SEQ ID NO: 2404876
aauucagguagaauccugc

SEQ ID NO: 2404878 - RNA, 19 nt, Artificial Sequence
  Description of Artificial Sequence: Synthetic oligonucleotide
  Sense strand starting at position 1666 of SEQ ID NO: 1886369
aaaugugggaucuggaagu

SEQ ID NO: 2404879 - RNA, 19 nt, Artificial Sequence
  Description of Artificial Sequence: Synthetic oligonucleotide
  Antisense strand to SEQ ID NO: 2404878
acuuccagaucccacauuu

SEQ ID NO: 2404880 - RNA, 19 nt, Artificial Sequence
  Description of Artificial Sequence: Synthetic oligonucleotide
  Sense strand starting at position 1677 of SEQ ID NO: 1886369
cuggaagucucucuuggaa

SEQ ID NO: 2404881 - RNA, 19 nt, Artificial Sequence
  Description of Artificial Sequence: Synthetic oligonucleotide
  Antisense strand to SEQ ID NO: 2404880
uuccaagagagacuuccag

SEQ ID NO: 2404882 - RNA, 19 nt, Artificial Sequence
  Description of Artificial Sequence: Synthetic oligonucleotide
  Sense strand starting at position 1680 of SEQ ID NO: 1886369
gaagucucucuuggaaaga

SEQ ID NO: 2404883 - RNA, 19 nt, Artificial Sequence
  Description of Artificial Sequence: Synthetic oligonucleotide
  Antisense strand to SEQ ID NO: 2404882
ucuuuccaagagagacuuc

SEQ ID NO: 2404884 - RNA, 19 nt, Artificial Sequence
  Description of Artificial Sequence: Synthetic oligonucleotide
  Sense strand starting at position 1723 of SEQ ID NO: 1886369
gggcgaaaucgugcaguuu

SEQ ID NO: 2404885 - RNA, 19 nt, Artificial Sequence
  Description of Artificial Sequence: Synthetic oligonucleotide
  Antisense strand to SEQ ID NO: 2404884
aaacugcacgauuucgccc

SEQ ID NO: 2404886 - RNA, 19 nt, Artificial Sequence
  Description of Artificial Sequence: Synthetic oligonucleotide
  Sense strand starting at position 2912 of SEQ ID NO: 1886369
ugcucagauuucccuguaa

SEQ ID NO: 2404887 - RNA, 19 nt, Artificial Sequence
  Description of Artificial Sequence: Synthetic oligonucleotide
  Antisense strand to SEQ ID NO: 2404886
uuacagggaaaucugagca

SEQ ID NO: 2404888 - RNA, 19 nt, Artificial Sequence
  Description of Artificial Sequence: Synthetic oligonucleotide
  Sense strand starting at position 3014 of SEQ ID NO: 1886369
agaggugacuuucuuucua

SEQ ID NO: 2404889 - RNA, 19 nt, Artificial Sequence
  Description of Artificial Sequence: Synthetic oligonucleotide
  Antisense strand to SEQ ID NO: 2404888
uagaaagaaagucaccucu

SEQ ID NO: 2404890 - RNA, 19 nt, Artificial Sequence
  Description of Artificial Sequence: Synthetic oligonucleotide
  Sense strand starting at position 3016 of SEQ ID NO: 1886369
aggugacuuucuuucuaac

SEQ ID NO: 2404891 - RNA, 19 nt, Artificial Sequence
  Description of Artificial Sequence: Synthetic oligonucleotide
  Antisense strand to SEQ ID NO: 2404890
guuagaaagaaagucaccu

SEQ ID NO: 2404892 - RNA, 19 nt, Artificial Sequence
  Description of Artificial Sequence: Synthetic oligonucleotide
  Sense strand starting at position 3098 of SEQ ID NO: 1886369
guaguuacgguucaaagaa

SEQ ID NO: 2404893 - RNA, 19 nt, Artificial Sequence
  Description of Artificial Sequence: Synthetic oligonucleotide
  Antisense strand to SEQ ID NO: 2404892
uucuuugaaccguaacuac

SEQ ID NO: 2404894 - RNA, 19 nt, Artificial Sequence
  Description of Artificial Sequence: Synthetic oligonucleotide
  Sense strand starting at position 3135 of SEQ ID NO: 1886369
guuacaaagugaguacaga

SEQ ID NO: 2404895 - RNA, 19 nt, Artificial Sequence
  Description of Artificial Sequence: Synthetic oligonucleotide
  Antisense strand to SEQ ID NO: 2404894
ucuguacucacuuuguaac

SEQ ID NO: 2404896 - RNA, 19 nt, Artificial Sequence
  Description of Artificial Sequence: Synthetic oligonucleotide
  Sense strand starting at position 3160 of SEQ ID NO: 1886369
ucuagaaggccucaggcau

SEQ ID NO: 2404897 - RNA, 19 nt, Artificial Sequence
  Description of Artificial Sequence: Synthetic oligonucleotide
  Antisense strand to SEQ ID NO: 2404896
augccugaggccuucuaga

SEQ ID NO: 2404898 - RNA, 19 nt, Artificial Sequence
  Description of Artificial Sequence: Synthetic oligonucleotide
  Sense strand starting at position 3256 of SEQ ID NO: 1886369
agacaaaucugucugacuu

SEQ ID NO: 2404899 - RNA, 19 nt, Artificial Sequence
  Description of Artificial Sequence: Synthetic oligonucleotide
  Antisense strand to SEQ ID NO: 2404898
aagucagacagauuugucu

SEQ ID NO: 2404900 - RNA, 19 nt, Artificial Sequence
  Description of Artificial Sequence: Synthetic oligonucleotide
  Sense strand starting at position 3323 of SEQ ID NO: 1886369
uuuccugucccugggaaua

SEQ ID NO: 2404901 - RNA, 19 nt, Artificial Sequence
  Description of Artificial Sequence: Synthetic oligonucleotide
  Antisense strand to SEQ ID NO: 2404900
uauucccagggacaggaaa

SEQ ID NO: 2404902 - RNA, 19 nt, Artificial Sequence
  Description of Artificial Sequence: Synthetic oligonucleotide
  Sense strand starting at position 3411 of SEQ ID NO: 1886369
ggcugaucucaccauguca

SEQ ID NO: 2404903 - RNA, 19 nt, Artificial Sequence
  Description of Artificial Sequence: Synthetic oligonucleotide
  Antisense strand to SEQ ID NO: 2404902
ugacauggugagaucagcc

SEQ ID NO: 2404904 - RNA, 19 nt, Artificial Sequence
  Description of Artificial Sequence: Synthetic oligonucleotide
  Sense strand starting at position 3451 of SEQ ID NO: 1886369
ggcauugggcuccagguaa

SEQ ID NO: 2404905 - RNA, 19 nt, Artificial Sequence
  Description of Artificial Sequence: Synthetic oligonucleotide
  Antisense strand to SEQ ID NO: 2404904
uuaccuggagcccaaugcc

SEQ ID NO: 2404906 - RNA, 19 nt, Artificial Sequence
  Description of Artificial Sequence: Synthetic oligonucleotide
  Sense strand starting at position 3455 of SEQ ID NO: 1886369
uugggcuccagguaaguaa

SEQ ID NO: 2404907 - RNA, 19 nt, Artificial Sequence
  Description of Artificial Sequence: Synthetic oligonucleotide
  Antisense strand to SEQ ID NO: 2404906
uuacuuaccuggagcccaa

SEQ ID NO: 2404908 - RNA, 19 nt, Artificial Sequence
  Description of Artificial Sequence: Synthetic oligonucleotide
  Sense strand starting at position 3482 of SEQ ID NO: 1886369
ccugauaacuuagucauga

SEQ ID NO: 2404909 - RNA, 19 nt, Artificial Sequence
  Description of Artificial Sequence: Synthetic oligonucleotide
  Antisense strand to SEQ ID NO: 2404908
ucaugacuaaguuaucagg

SEQ ID NO: 2404910 - RNA, 19 nt, Artificial Sequence
  Description of Artificial Sequence: Synthetic oligonucleotide
  Sense strand starting at position 3483 of SEQ ID NO: 1886369
cugauaacuuagucaugau

SEQ ID NO: 2404911 - RNA, 19 nt, Artificial Sequence
  Description of Artificial Sequence: Synthetic oligonucleotide
  Antisense strand to SEQ ID NO: 2404910
aucaugacuaaguuaucag

SEQ ID NO: 2404912 - RNA, 19 nt, Artificial Sequence
  Description of Artificial Sequence: Synthetic oligonucleotide
  Sense strand starting at position 3512 of SEQ ID NO: 1886369
gcccuauugggagggaugu

SEQ ID NO: 2404913 - RNA, 19 nt, Artificial Sequence
  Description of Artificial Sequence: Synthetic oligonucleotide
  Antisense strand to SEQ ID NO: 2404912
acaucccucccaauagggc

SEQ ID NO: 2404914 - RNA, 19 nt, Artificial Sequence
  Description of Artificial Sequence: Synthetic oligonucleotide
  Sense strand starting at position 3574 of SEQ ID NO: 1886369
gugacaacgacuuagccau

SEQ ID NO: 2404915 - RNA, 19 nt, Artificial Sequence
  Description of Artificial Sequence: Synthetic oligonucleotide
  Antisense strand to SEQ ID NO: 2404914
auggcuaagucguugucac

SEQ ID NO: 2404916 - RNA, 19 nt, Artificial Sequence
  Description of Artificial Sequence: Synthetic oligonucleotide
  Sense strand starting at position 3580 of SEQ ID NO: 1886369
acgacuuagccauaggguu

SEQ ID NO: 2404917 - RNA, 19 nt, Artificial Sequence
  Description of Artificial Sequence: Synthetic oligonucleotide
  Antisense strand to SEQ ID NO: 2404916
aacccuauggcuaagucgu

SEQ ID NO: 2404918 - RNA, 19 nt, Artificial Sequence
  Description of Artificial Sequence: Synthetic oligonucleotide
  Sense strand starting at position 3699 of SEQ ID NO: 1886369
ugaccuaguucuucugaau

SEQ ID NO: 2404919 - RNA, 19 nt, Artificial Sequence
  Description of Artificial Sequence: Synthetic oligonucleotide
  Antisense strand to SEQ ID NO: 2404918
auucagaagaacuagguca

SEQ ID NO: 2404920 - RNA, 19 nt, Artificial Sequence
  Description of Artificial Sequence: Synthetic oligonucleotide
  Sense strand starting at position 3785 of SEQ ID NO: 1886369
ccaggaggacuguguuacu

SEQ ID NO: 2404921 - RNA, 19 nt, Artificial Sequence
  Description of Artificial Sequence: Synthetic oligonucleotide
  Antisense strand to SEQ ID NO: 2404920
aguaacacaguccuccugg

SEQ ID NO: 2404922 - RNA, 19 nt, Artificial Sequence
  Description of Artificial Sequence: Synthetic oligonucleotide
  Sense strand starting at position 3792 of SEQ ID NO: 1886369
gacuguguuacuuagggca

SEQ ID NO: 2404923 - RNA, 19 nt, Artificial Sequence
  Description of Artificial Sequence: Synthetic oligonucleotide
  Antisense strand to SEQ ID NO: 2404922
ugcccuaaguaacacaguc

SEQ ID NO: 2404924 - RNA, 19 nt, Artificial Sequence
  Description of Artificial Sequence: Synthetic oligonucleotide
  Sense strand starting at position 3859 of SEQ ID NO: 1886369
ucagaagguuguucaguga

SEQ ID NO: 2404925 - RNA, 19 nt, Artificial Sequence
  Description of Artificial Sequence: Synthetic oligonucleotide
  Antisense strand to SEQ ID NO: 2404924
ucacugaacaaccuucuga

SEQ ID NO: 2404926 - RNA, 19 nt, Artificial Sequence
  Description of Artificial Sequence: Synthetic oligonucleotide
  Sense strand starting at position 3939 of SEQ ID NO: 1886369
ccaucacuggcugaugaau

SEQ ID NO: 2404927 - RNA, 19 nt, Artificial Sequence
  Description of Artificial Sequence: Synthetic oligonucleotide
  Antisense strand to SEQ ID NO: 2404926
auucaucagccagugaugg

SEQ ID NO: 2404928 - RNA, 19 nt, Artificial Sequence
  Description of Artificial Sequence: Synthetic oligonucleotide
  Sense strand starting at position 18 of SEQ ID NO: 1886371
gcccguaguguauggucaa

SEQ ID NO: 2404929 - RNA, 19 nt, Artificial Sequence
  Description of Artificial Sequence: Synthetic oligonucleotide
  Antisense strand to SEQ ID NO: 2404928
uugaccauacacuacgggc

SEQ ID NO: 2404930 - RNA, 19 nt, Artificial Sequence
  Description of Artificial Sequence: Synthetic oligonucleotide
  Sense strand starting at position 226 of SEQ ID NO: 1886371
gacaguaacuaguugagaa

SEQ ID NO: 2404931 - RNA, 19 nt, Artificial Sequence
  Description of Artificial Sequence: Synthetic oligonucleotide
  Antisense strand to SEQ ID NO: 2404930
uucucaacuaguuacuguc

SEQ ID NO: 2404932 - RNA, 19 nt, Artificial Sequence
  Description of Artificial Sequence: Synthetic oligonucleotide
  Sense strand starting at position 227 of SEQ ID NO: 1886371
acaguaacuaguugagaag

SEQ ID NO: 2404933 - RNA, 19 nt, Artificial Sequence
  Description of Artificial Sequence: Synthetic oligonucleotide
  Antisense strand to SEQ ID NO: 2404932
cuucucaacuaguuacugu

SEQ ID NO: 2404934 - RNA, 19 nt, Artificial Sequence
  Description of Artificial Sequence: Synthetic oligonucleotide
  Sense strand starting at position 230 of SEQ ID NO: 1886371
guaacuaguugagaagaca

SEQ ID NO: 2404935 - RNA, 19 nt, Artificial Sequence
  Description of Artificial Sequence: Synthetic oligonucleotide
  Antisense strand to SEQ ID NO: 2404934
ugucuucucaacuaguuac

SEQ ID NO: 2404936 - RNA, 19 nt, Artificial Sequence
  Description of Artificial Sequence: Synthetic oligonucleotide
  Sense strand starting at position 287 of SEQ ID NO: 1886371
cgucuucuaucagggaguu

SEQ ID NO: 2404937 - RNA, 19 nt, Artificial Sequence
  Description of Artificial Sequence: Synthetic oligonucleotide
  Antisense strand to SEQ ID NO: 2404936
aacucccugauagaagacg

SEQ ID NO: 2404938 - RNA, 19 nt, Artificial Sequence
  Description of Artificial Sequence: Synthetic oligonucleotide
  Sense strand starting at position 288 of SEQ ID NO: 1886371
gucuucuaucagggaguuu

SEQ ID NO: 2404939 - RNA, 19 nt, Artificial Sequence
  Description of Artificial Sequence: Synthetic oligonucleotide
  Antisense strand to SEQ ID NO: 2404938
aaacucccugauagaagac

SEQ ID NO: 2404940 - RNA, 19 nt, Artificial Sequence
  Description of Artificial Sequence: Synthetic oligonucleotide
  Sense strand starting at position 352 of SEQ ID NO: 1886371
ucauucuaggucugcgaua

SEQ ID NO: 2404941 - RNA, 19 nt, Artificial Sequence
  Description of Artificial Sequence: Synthetic oligonucleotide
  Antisense strand to SEQ ID NO: 2404940
uaucgcagaccuagaauga

SEQ ID NO: 2404942 - RNA, 19 nt, Artificial Sequence
  Description of Artificial Sequence: Synthetic oligonucleotide
  Sense strand starting at position 353 of SEQ ID NO: 1886371
cauucuaggucugcgauau

SEQ ID NO: 2404943 - RNA, 19 nt, Artificial Sequence
  Description of Artificial Sequence: Synthetic oligonucleotide
  Antisense strand to SEQ ID NO: 2404942
auaucgcagaccuagaaug

SEQ ID NO: 2404944 - RNA, 19 nt, Artificial Sequence
  Description of Artificial Sequence: Synthetic oligonucleotide
  Sense strand starting at position 354 of SEQ ID NO: 1886371
auucuaggucugcgauauu

SEQ ID NO: 2404945 - RNA, 19 nt, Artificial Sequence
  Description of Artificial Sequence: Synthetic oligonucleotide
  Antisense strand to SEQ ID NO: 2404944
aauaucgcagaccuagaau

SEQ ID NO: 2404946 - RNA, 19 nt, Artificial Sequence
  Description of Artificial Sequence: Synthetic oligonucleotide
  Sense strand starting at position 500 of SEQ ID NO: 1886371
guacauguguaucgcucaa

SEQ ID NO: 2404947 - RNA, 19 nt, Artificial Sequence
  Description of Artificial Sequence: Synthetic oligonucleotide
  Antisense strand to SEQ ID NO: 2404946
uugagcgauacacauguac

SEQ ID NO: 2404948 - RNA, 19 nt, Artificial Sequence
  Description of Artificial Sequence: Synthetic oligonucleotide
  Sense strand starting at position 502 of SEQ ID NO: 1886371
acauguguaucgcucaaua

SEQ ID NO: 2404949 - RNA, 19 nt, Artificial Sequence
  Description of Artificial Sequence: Synthetic oligonucleotide
  Antisense strand to SEQ ID NO: 2404948
uauugagcgauacacaugu

SEQ ID NO: 2404950 - RNA, 19 nt, Artificial Sequence
  Description of Artificial Sequence: Synthetic oligonucleotide
  Sense strand starting at position 504 of SEQ ID NO: 1886371
auguguaucgcucaauauu

SEQ ID NO: 2404951 - RNA, 19 nt, Artificial Sequence
  Description of Artificial Sequence: Synthetic oligonucleotide
  Antisense strand to SEQ ID NO: 2404950
aauauugagcgauacacau

SEQ ID NO: 2404952 - RNA, 19 nt, Artificial Sequence
  Description of Artificial Sequence: Synthetic oligonucleotide
  Sense strand starting at position 513 of SEQ ID NO: 1886371
gcucaauauuucuagucga

SEQ ID NO: 2404953 - RNA, 19 nt, Artificial Sequence
  Description of Artificial Sequence: Synthetic oligonucleotide
  Antisense strand to SEQ ID NO: 2404952
ucgacuagaaauauugagc

SEQ ID NO: 2404954 - RNA, 19 nt, Artificial Sequence
  Description of Artificial Sequence: Synthetic oligonucleotide
  Sense strand starting at position 533 of SEQ ID NO: 1886371
agcacuacuuucgagaaug

SEQ ID NO: 2404955 - RNA, 19 nt, Artificial Sequence
  Description of Artificial Sequence: Synthetic oligonucleotide
  Antisense strand to SEQ ID NO: 2404954
cauucucgaaaguagugcu

SEQ ID NO: 2404956 - RNA, 19 nt, Artificial Sequence
  Description of Artificial Sequence: Synthetic oligonucleotide
  Sense strand starting at position 535 of SEQ ID NO: 1886371
cacuacuuucgagaaugua

SEQ ID NO: 2404957 - RNA, 19 nt, Artificial Sequence
  Description of Artificial Sequence: Synthetic oligonucleotide
  Antisense strand to SEQ ID NO: 2404956
uacauucucgaaaguagug

SEQ ID NO: 2404958 - RNA, 19 nt, Artificial Sequence
  Description of Artificial Sequence: Synthetic oligonucleotide
  Sense strand starting at position 538 of SEQ ID NO: 1886371
uacuuucgagaauguaaac

SEQ ID NO: 2404959 - RNA, 19 nt, Artificial Sequence
  Description of Artificial Sequence: Synthetic oligonucleotide
  Antisense strand to SEQ ID NO: 2404958
guuuacauucucgaaagua

SEQ ID NO: 2404960 - RNA, 19 nt, Artificial Sequence
  Description of Artificial Sequence: Synthetic oligonucleotide
  Sense strand starting at position 2447 of SEQ ID NO: 1886371
gggaguuagaucgaguugu

SEQ ID NO: 2404961 - RNA, 19 nt, Artificial Sequence
  Description of Artificial Sequence: Synthetic oligonucleotide
  Antisense strand to SEQ ID NO: 2404960
acaacucgaucuaacuccc

SEQ ID NO: 2404962 - RNA, 19 nt, Artificial Sequence
  Description of Artificial Sequence: Synthetic oligonucleotide
  Sense strand starting at position 2448 of SEQ ID NO: 1886371
ggaguuagaucgaguugua

SEQ ID NO: 2404963 - RNA, 19 nt, Artificial Sequence
  Description of Artificial Sequence: Synthetic oligonucleotide
  Antisense strand to SEQ ID NO: 2404962
uacaacucgaucuaacucc

SEQ ID NO: 2404964 - RNA, 19 nt, Artificial Sequence
  Description of Artificial Sequence: Synthetic oligonucleotide
  Sense strand starting at position 2451 of SEQ ID NO: 1886371
guuagaucgaguuguaaca

SEQ ID NO: 2404965 - RNA, 19 nt, Artificial Sequence
  Description of Artificial Sequence: Synthetic oligonucleotide
  Antisense strand to SEQ ID NO: 2404964
uguuacaacucgaucuaac

SEQ ID NO: 2404966 - RNA, 19 nt, Artificial Sequence
  Description of Artificial Sequence: Synthetic oligonucleotide
  Sense strand starting at position 2573 of SEQ ID NO: 1886371
uccaaaugcuuauguugaa

SEQ ID NO: 2404967 - RNA, 19 nt, Artificial Sequence
  Description of Artificial Sequence: Synthetic oligonucleotide
  Antisense strand to SEQ ID NO: 2404966
uucaacauaagcauuugga

SEQ ID NO: 2404968 - RNA, 19 nt, Artificial Sequence
  Description of Artificial Sequence: Synthetic oligonucleotide
  Sense strand starting at position 2574 of SEQ ID NO: 1886371
ccaaaugcuuauguugaaa

SEQ ID NO: 2404969 - RNA, 19 nt, Artificial Sequence
  Description of Artificial Sequence: Synthetic oligonucleotide
  Antisense strand to SEQ ID NO: 2404968
uuucaacauaagcauuugg

SEQ ID NO: 2404970 - RNA, 19 nt, Artificial Sequence
  Description of Artificial Sequence: Synthetic oligonucleotide
  Sense strand starting at position 2699 of SEQ ID NO: 1886371
gagcauugucucugugucu

SEQ ID NO: 2404971 - RNA, 19 nt, Artificial Sequence
  Description of Artificial Sequence: Synthetic oligonucleotide
  Antisense strand to SEQ ID NO: 2404970
agacacagagacaaugcuc

SEQ ID NO: 2404972 - RNA, 19 nt, Artificial Sequence
  Description of Artificial Sequence: Synthetic oligonucleotide
  Sense strand starting at position 576 of SEQ ID NO: 1886374
auuccucugcuggauauau

SEQ ID NO: 2404973 - RNA, 19 nt, Artificial Sequence
  Description of Artificial Sequence: Synthetic oligonucleotide
  Antisense strand to SEQ ID NO: 2404972
auauauccagcagaggaau

SEQ ID NO: 2404974 - RNA, 19 nt, Artificial Sequence
  Description of Artificial Sequence: Synthetic oligonucleotide
  Sense strand starting at position 721 of SEQ ID NO: 1886374
auagauugcuugcucccaa

SEQ ID NO: 2404975 - RNA, 19 nt, Artificial Sequence
  Description of Artificial Sequence: Synthetic oligonucleotide
  Antisense strand to SEQ ID NO: 2404974
uugggagcaagcaaucuau

SEQ ID NO: 2404976 - RNA, 19 nt, Artificial Sequence
  Description of Artificial Sequence: Synthetic oligonucleotide
  Sense strand starting at position 1021 of SEQ ID NO: 1886374
guaucaagagugggugaaa

SEQ ID NO: 2404977 - RNA, 19 nt, Artificial Sequence
  Description of Artificial Sequence: Synthetic oligonucleotide
  Antisense strand to SEQ ID NO: 2404976
uuucacccacucuugauac

SEQ ID NO: 2404978 - RNA, 19 nt, Artificial Sequence
  Description of Artificial Sequence: Synthetic oligonucleotide
  Sense strand starting at position 1066 of SEQ ID NO: 1886374
gccuguugugaauagacua

SEQ ID NO: 2404979 - RNA, 19 nt, Artificial Sequence
  Description of Artificial Sequence: Synthetic oligonucleotide
  Antisense strand to SEQ ID NO: 2404978
uagucuauucacaacaggc

SEQ ID NO: 2404980 - RNA, 19 nt, Artificial Sequence
  Description of Artificial Sequence: Synthetic oligonucleotide
  Sense strand starting at position 1099 of SEQ ID NO: 1886374
augacugggugguuuagua

SEQ ID NO: 2404981 - RNA, 19 nt, Artificial Sequence
  Description of Artificial Sequence: Synthetic oligonucleotide
  Antisense strand to SEQ ID NO: 2404980
uacuaaaccacccagucau

SEQ ID NO: 2404982 - RNA, 19 nt, Artificial Sequence
  Description of Artificial Sequence: Synthetic oligonucleotide
  Sense strand starting at position 1211 of SEQ ID NO: 1886374
ucuaauacuccuggaagca

SEQ ID NO: 2404983 - RNA, 19 nt, Artificial Sequence
  Description of Artificial Sequence: Synthetic oligonucleotide
  Antisense strand to SEQ ID NO: 2404982
ugcuuccaggaguauuaga

SEQ ID NO: 2404984 - RNA, 19 nt, Artificial Sequence
  Description of Artificial Sequence: Synthetic oligonucleotide
  Sense strand starting at position 1263 of SEQ ID NO: 1886374
acugauaucuggcuuccca

SEQ ID NO: 2404985 - RNA, 19 nt, Artificial Sequence
  Description of Artificial Sequence: Synthetic oligonucleotide
  Antisense strand to SEQ ID NO: 2404984
ugggaagccagauaucagu

SEQ ID NO: 2404986 - RNA, 19 nt, Artificial Sequence
  Description of Artificial Sequence: Synthetic oligonucleotide
  Sense strand starting at position 1556 of SEQ ID NO: 1886374
gacuguaagcucuguaaag

SEQ ID NO: 2404987 - RNA, 19 nt, Artificial Sequence
  Description of Artificial Sequence: Synthetic oligonucleotide
  Antisense strand to SEQ ID NO: 2404986
cuuuacagagcuuacaguc

SEQ ID NO: 2404988 - RNA, 19 nt, Artificial Sequence
  Description of Artificial Sequence: Synthetic oligonucleotide
  Sense strand starting at position 1604 of SEQ ID NO: 1886374
gaauaaauguuguugaaug

SEQ ID NO: 2404989 - RNA, 19 nt, Artificial Sequence
  Description of Artificial Sequence: Synthetic oligonucleotide
  Antisense strand to SEQ ID NO: 2404988
cauucaacaacauuuauuc

SEQ ID NO: 2404990 - RNA, 19 nt, Artificial Sequence
  Description of Artificial Sequence: Synthetic oligonucleotide
  Sense strand starting at position 1618 of SEQ ID NO: 1886374
gaaugaugugccugugaca

SEQ ID NO: 2404991 - RNA, 19 nt, Artificial Sequence
  Description of Artificial Sequence: Synthetic oligonucleotide
  Antisense strand to SEQ ID NO: 2404990
ugucacaggcacaucauuc

SEQ ID NO: 2404992 - RNA, 19 nt, Artificial Sequence
  Description of Artificial Sequence: Synthetic oligonucleotide
  Sense strand starting at position 1630 of SEQ ID NO: 1886374
ugugacagucaacgguuaa

SEQ ID NO: 2404993 - RNA, 19 nt, Artificial Sequence
  Description of Artificial Sequence: Synthetic oligonucleotide
  Antisense strand to SEQ ID NO: 2404992
uuaaccguugacugucaca

SEQ ID NO: 2404994 - RNA, 19 nt, Artificial Sequence
  Description of Artificial Sequence: Synthetic oligonucleotide
  Sense strand starting at position 1631 of SEQ ID NO: 1886374
gugacagucaacgguuaag

SEQ ID NO: 2404995 - RNA, 19 nt, Artificial Sequence
  Description of Artificial Sequence: Synthetic oligonucleotide
  Antisense strand to SEQ ID NO: 2404994
cuuaaccguugacugucac

SEQ ID NO: 2404996 - RNA, 19 nt, Artificial Sequence
  Description of Artificial Sequence: Synthetic oligonucleotide
  Sense strand starting at position 1910 of SEQ ID NO: 1886374
agggcuggcuuauccauua

SEQ ID NO: 2404997 - RNA, 19 nt, Artificial Sequence
  Description of Artificial Sequence: Synthetic oligonucleotide
  Antisense strand to SEQ ID NO: 2404996
uaauggauaagccagcccu

SEQ ID NO: 2404998 - RNA, 19 nt, Artificial Sequence
  Description of Artificial Sequence: Synthetic oligonucleotide
  Sense strand starting at position 1915 of SEQ ID NO: 1886374
uggcuuauccauuagggac

SEQ ID NO: 2404999 - RNA, 19 nt, Artificial Sequence
  Description of Artificial Sequence: Synthetic oligonucleotide
  Antisense strand to SEQ ID NO: 2404998
gucccuaauggauaagcca

SEQ ID NO: 2405000 - RNA, 19 nt, Artificial Sequence
  Description of Artificial Sequence: Synthetic oligonucleotide
  Sense strand starting at position 2052 of SEQ ID NO: 1886374
guaccaauguagucacuga

SEQ ID NO: 2405001 - RNA, 19 nt, Artificial Sequence
  Description of Artificial Sequence: Synthetic oligonucleotide
  Antisense strand to SEQ ID NO: 2405000
ucagugacuacauugguac

SEQ ID NO: 2405002 - RNA, 19 nt, Artificial Sequence
  Description of Artificial Sequence: Synthetic oligonucleotide
  Sense strand starting at position 2062 of SEQ ID NO: 1886374
agucacugaccauguugaa

SEQ ID NO: 2405003 - RNA, 19 nt, Artificial Sequence
  Description of Artificial Sequence: Synthetic oligonucleotide
  Antisense strand to SEQ ID NO: 2405002
uucaacauggucagugacu

SEQ ID NO: 2405004 - RNA, 19 nt, Artificial Sequence
  Description of Artificial Sequence: Synthetic oligonucleotide
  Sense strand starting at position 2135 of SEQ ID NO: 1886374
acucuuuaguguuccagaa

SEQ ID NO: 2405005 - RNA, 19 nt, Artificial Sequence
  Description of Artificial Sequence: Synthetic oligonucleotide
  Antisense strand to SEQ ID NO: 2405004
uucuggaacacuaaagagu

SEQ ID NO: 2405006 - RNA, 19 nt, Artificial Sequence
  Description of Artificial Sequence: Synthetic oligonucleotide
  Sense strand starting at position 2182 of SEQ ID NO: 1886374
ccaugugacuuaguuaaga

SEQ ID NO: 2405007 - RNA, 19 nt, Artificial Sequence
  Description of Artificial Sequence: Synthetic oligonucleotide
  Antisense strand to SEQ ID NO: 2405006
ucuuaacuaagucacaugg

SEQ ID NO: 2405008 - RNA, 19 nt, Artificial Sequence
  Description of Artificial Sequence: Synthetic oligonucleotide
  Sense strand starting at position 2276 of SEQ ID NO: 1886374
uaaugauuagcugaacugu

SEQ ID NO: 2405009 - RNA, 19 nt, Artificial Sequence
  Description of Artificial Sequence: Synthetic oligonucleotide
  Antisense strand to SEQ ID NO: 2405008
acaguucagcuaaucauua

SEQ ID NO: 2405010 - RNA, 19 nt, Artificial Sequence
  Description of Artificial Sequence: Synthetic oligonucleotide
  Sense strand starting at position 2398 of SEQ ID NO: 1886374
uugccugagccaugauaca

SEQ ID NO: 2405011 - RNA, 19 nt, Artificial Sequence
  Description of Artificial Sequence: Synthetic oligonucleotide
  Antisense strand to SEQ ID NO: 2405010
uguaucauggcucaggcaa

SEQ ID NO: 2405012 - RNA, 19 nt, Artificial Sequence
  Description of Artificial Sequence: Synthetic oligonucleotide
  Sense strand starting at position 2523 of SEQ ID NO: 1886374
uguuacuuccaguauuguu

SEQ ID NO: 2405013 - RNA, 19 nt, Artificial Sequence
  Description of Artificial Sequence: Synthetic oligonucleotide
  Antisense strand to SEQ ID NO: 2405012
aacaauacuggaaguaaca

SEQ ID NO: 2405014 - RNA, 19 nt, Artificial Sequence
  Description of Artificial Sequence: Synthetic oligonucleotide
  Sense strand starting at position 2581 of SEQ ID NO: 1886374
cuuugagagguuuguauau

SEQ ID NO: 2405015 - RNA, 19 nt, Artificial Sequence
  Description of Artificial Sequence: Synthetic oligonucleotide
  Antisense strand to SEQ ID NO: 2405014
auauacaaaccucucaaag

SEQ ID NO: 2405016 - RNA, 19 nt, Artificial Sequence
  Description of Artificial Sequence: Synthetic oligonucleotide
  Sense strand starting at position 2588 of SEQ ID NO: 1886374
agguuuguauaucucagga

SEQ ID NO: 2405017 - RNA, 19 nt, Artificial Sequence
  Description of Artificial Sequence: Synthetic oligonucleotide
  Antisense strand to SEQ ID NO: 2405016
uccugagauauacaaaccu

SEQ ID NO: 2405018 - RNA, 19 nt, Artificial Sequence
  Description of Artificial Sequence: Synthetic oligonucleotide
  Sense strand starting at position 2804 of SEQ ID NO: 1886374
augugaaccugccucagau

SEQ ID NO: 2405019 - RNA, 19 nt, Artificial Sequence
  Description of Artificial Sequence: Synthetic oligonucleotide
  Antisense strand to SEQ ID NO: 2405018
aucugaggcagguucacau

SEQ ID NO: 2405020 - RNA, 19 nt, Artificial Sequence
  Description of Artificial Sequence: Synthetic oligonucleotide
  Sense strand starting at position 2895 of SEQ ID NO: 1886374
gcagaauuaucugcucuug

SEQ ID NO: 2405021 - RNA, 19 nt, Artificial Sequence
  Description of Artificial Sequence: Synthetic oligonucleotide
  Antisense strand to SEQ ID NO: 2405020
caagagcagauaauucugc

SEQ ID NO: 2405022 - RNA, 19 nt, Artificial Sequence
  Description of Artificial Sequence: Synthetic oligonucleotide
  Sense strand starting at position 2897 of SEQ ID NO: 1886374
agaauuaucugcucuuggu

SEQ ID NO: 2405023 - RNA, 19 nt, Artificial Sequence
  Description of Artificial Sequence: Synthetic oligonucleotide
  Antisense strand to SEQ ID NO: 2405022
accaagagcagauaauucu

SEQ ID NO: 2405024 - RNA, 19 nt, Artificial Sequence
  Description of Artificial Sequence: Synthetic oligonucleotide
  Sense strand starting at position 2910 of SEQ ID NO: 1886374
cuugguuagucaguaggaa

SEQ ID NO: 2405025 - RNA, 19 nt, Artificial Sequence
  Description of Artificial Sequence: Synthetic oligonucleotide
  Antisense strand to SEQ ID NO: 2405024
uuccuacugacuaaccaag

SEQ ID NO: 2405026 - RNA, 19 nt, Artificial Sequence
  Description of Artificial Sequence: Synthetic oligonucleotide
  Sense strand starting at position 3015 of SEQ ID NO: 1886374
gccugacuuaugggauaaa

SEQ ID NO: 2405027 - RNA, 19 nt, Artificial Sequence
  Description of Artificial Sequence: Synthetic oligonucleotide
  Antisense strand to SEQ ID NO: 2405026
uuuaucccauaagucaggc

SEQ ID NO: 2405028 - RNA, 19 nt, Artificial Sequence
  Description of Artificial Sequence: Synthetic oligonucleotide
  Sense strand starting at position 3083 of SEQ ID NO: 1886374
accuuugauuguguaccaa

SEQ ID NO: 2405029 - RNA, 19 nt, Artificial Sequence
  Description of Artificial Sequence: Synthetic oligonucleotide
  Antisense strand to SEQ ID NO: 2405028
uugguacacaaucaaaggu

SEQ ID NO: 2405030 - RNA, 19 nt, Artificial Sequence
  Description of Artificial Sequence: Synthetic oligonucleotide
  Sense strand starting at position 3094 of SEQ ID NO: 1886374
uguaccaaccuauauguau

SEQ ID NO: 2405031 - RNA, 19 nt, Artificial Sequence
  Description of Artificial Sequence: Synthetic oligonucleotide
  Antisense strand to SEQ ID NO: 2405030
auacauauagguugguaca

SEQ ID NO: 2405032 - RNA, 19 nt, Artificial Sequence
  Description of Artificial Sequence: Synthetic oligonucleotide
  Sense strand starting at position 3131 of SEQ ID NO: 1886374
guggguauugguuauagca

SEQ ID NO: 2405033 - RNA, 19 nt, Artificial Sequence
  Description of Artificial Sequence: Synthetic oligonucleotide
  Antisense strand to SEQ ID NO: 2405032
ugcuauaaccaauacccac

SEQ ID NO: 2405034 - RNA, 19 nt, Artificial Sequence
  Description of Artificial Sequence: Synthetic oligonucleotide
  Sense strand starting at position 3139 of SEQ ID NO: 1886374
ugguuauagcaauaguuua

SEQ ID NO: 2405035 - RNA, 19 nt, Artificial Sequence
  Description of Artificial Sequence: Synthetic oligonucleotide
  Antisense strand to SEQ ID NO: 2405034
uaaacuauugcuauaacca

SEQ ID NO: 2405036 - RNA, 19 nt, Artificial Sequence
  Description of Artificial Sequence: Synthetic oligonucleotide
  Sense strand starting at position 3652 of SEQ ID NO: 1886374
auguuauacagguacaguu

SEQ ID NO: 2405037 - RNA, 19 nt, Artificial Sequence
  Description of Artificial Sequence: Synthetic oligonucleotide
  Antisense strand to SEQ ID NO: 2405036
aacuguaccuguauaacau

SEQ ID NO: 2405038 - RNA, 19 nt, Artificial Sequence
  Description of Artificial Sequence: Synthetic oligonucleotide
  Sense strand starting at position 3698 of SEQ ID NO: 1886374
auaagaaguuuaccuuguu

SEQ ID NO: 2405039 - RNA, 19 nt, Artificial Sequence
  Description of Artificial Sequence: Synthetic oligonucleotide
  Antisense strand to SEQ ID NO: 2405038
aacaagguaaacuucuuau

SEQ ID NO: 2405040 - RNA, 19 nt, Artificial Sequence
  Description of Artificial Sequence: Synthetic oligonucleotide
  Sense strand starting at position 3744 of SEQ ID NO: 1886374
uuaauagcugcauaauaga

SEQ ID NO: 2405041 - RNA, 19 nt, Artificial Sequence
  Description of Artificial Sequence: Synthetic oligonucleotide
  Antisense strand to SEQ ID NO: 2405040
ucuauuaugcagcuauuaa

SEQ ID NO: 2405042 - RNA, 19 nt, Artificial Sequence
  Description of Artificial Sequence: Synthetic oligonucleotide
  Sense strand starting at position 3766 of SEQ ID NO: 1886374
ucaaauagaugcuuuguaa

SEQ ID NO: 2405043 - RNA, 19 nt, Artificial Sequence
  Description of Artificial Sequence: Synthetic oligonucleotide
  Antisense strand to SEQ ID NO: 2405042
uuacaaagcaucuauuuga

SEQ ID NO: 2405044 - RNA, 19 nt, Artificial Sequence
  Description of Artificial Sequence: Synthetic oligonucleotide
  Sense strand starting at position 3839 of SEQ ID NO: 1886374
uaaauuaugcuguguugaa

SEQ ID NO: 2405045 - RNA, 19 nt, Artificial Sequence
  Description of Artificial Sequence: Synthetic oligonucleotide
  Antisense strand to SEQ ID NO: 2405044
uucaacacagcauaauuua

SEQ ID NO: 2405046 - RNA, 19 nt, Artificial Sequence
  Description of Artificial Sequence: Synthetic oligonucleotide
  Sense strand starting at position 3840 of SEQ ID NO: 1886374
aaauuaugcuguguugaau

SEQ ID NO: 2405047 - RNA, 19 nt, Artificial Sequence
  Description of Artificial Sequence: Synthetic oligonucleotide
  Antisense strand to SEQ ID NO: 2405046
auucaacacagcauaauuu

SEQ ID NO: 2405048 - RNA, 19 nt, Artificial Sequence
  Description of Artificial Sequence: Synthetic oligonucleotide
  Sense strand starting at position 3843 of SEQ ID NO: 1886374
uuaugcuguguugaauauu

SEQ ID NO: 2405049 - RNA, 19 nt, Artificial Sequence
  Description of Artificial Sequence: Synthetic oligonucleotide
  Antisense strand to SEQ ID NO: 2405048
aauauucaacacagcauaa

SEQ ID NO: 2405050 - RNA, 19 nt, Artificial Sequence
  Description of Artificial Sequence: Synthetic oligonucleotide
  Sense strand starting at position 3971 of SEQ ID NO: 1886374
cuuccaucagugugugaga

SEQ ID NO: 2405051 - RNA, 19 nt, Artificial Sequence
  Description of Artificial Sequence: Synthetic oligonucleotide
  Antisense strand to SEQ ID NO: 2405050
ucucacacacugauggaag

SEQ ID NO: 2405052 - RNA, 19 nt, Artificial Sequence
  Description of Artificial Sequence: Synthetic oligonucleotide
  Sense strand starting at position 56 of SEQ ID NO: 1886373
cuagaaaggcugcaaguua

SEQ ID NO: 2405053 - RNA, 19 nt, Artificial Sequence
  Description of Artificial Sequence: Synthetic oligonucleotide
  Antisense strand to SEQ ID NO: 2405052
uaacuugcagccuuucuag

SEQ ID NO: 2405054 - RNA, 19 nt, Artificial Sequence
  Description of Artificial Sequence: Synthetic oligonucleotide
  Sense strand starting at position 115 of SEQ ID NO: 1886373
gccuuuccugggugaccua

SEQ ID NO: 2405055 - RNA, 19 nt, Artificial Sequence
  Description of Artificial Sequence: Synthetic oligonucleotide
  Antisense strand to SEQ ID NO: 2405054
uaggucacccaggaaaggc

SEQ ID NO: 2405056 - RNA, 19 nt, Artificial Sequence
  Description of Artificial Sequence: Synthetic oligonucleotide
  Sense strand starting at position 143 of SEQ ID NO: 1886373
agcuuuagauaacuagaau

SEQ ID NO: 2405057 - RNA, 19 nt, Artificial Sequence
  Description of Artificial Sequence: Synthetic oligonucleotide
  Antisense strand to SEQ ID NO: 2405056
auucuaguuaucuaaagcu

SEQ ID NO: 2405058 - RNA, 19 nt, Artificial Sequence
  Description of Artificial Sequence: Synthetic oligonucleotide
  Sense strand starting at position 170 of SEQ ID NO: 1886373
agccaucagcaucagaaua

SEQ ID NO: 2405059 - RNA, 19 nt, Artificial Sequence
  Description of Artificial Sequence: Synthetic oligonucleotide
  Antisense strand to SEQ ID NO: 2405058
uauucugaugcugauggcu

SEQ ID NO: 2405060 - RNA, 19 nt, Artificial Sequence
  Description of Artificial Sequence: Synthetic oligonucleotide
  Sense strand starting at position 178 of SEQ ID NO: 1886373
gcaucagaauaagagguaa

SEQ ID NO: 2405061 - RNA, 19 nt, Artificial Sequence
  Description of Artificial Sequence: Synthetic oligonucleotide
  Antisense strand to SEQ ID NO: 2405060
uuaccucuuauucugaugc

SEQ ID NO: 2405062 - RNA, 19 nt, Artificial Sequence
  Description of Artificial Sequence: Synthetic oligonucleotide
  Sense strand starting at position 238 of SEQ ID NO: 1886373
ugguuauagaaauauggcu

SEQ ID NO: 2405063 - RNA, 19 nt, Artificial Sequence
  Description of Artificial Sequence: Synthetic oligonucleotide
  Antisense strand to SEQ ID NO: 2405062
agccauauuucuauaacca

SEQ ID NO: 2405064 - RNA, 19 nt, Artificial Sequence
  Description of Artificial Sequence: Synthetic oligonucleotide
  Sense strand starting at position 244 of SEQ ID NO: 1886373
uagaaauauggcuguauuc

SEQ ID NO: 2405065 - RNA, 19 nt, Artificial Sequence
  Description of Artificial Sequence: Synthetic oligonucleotide
  Antisense strand to SEQ ID NO: 2405064
gaauacagccauauuucua

SEQ ID NO: 2405066 - RNA, 19 nt, Artificial Sequence
  Description of Artificial Sequence: Synthetic oligonucleotide
  Sense strand starting at position 246 of SEQ ID NO: 1886373
gaaauauggcuguauucuc

SEQ ID NO: 2405067 - RNA, 19 nt, Artificial Sequence
  Description of Artificial Sequence: Synthetic oligonucleotide
  Antisense strand to SEQ ID NO: 2405066
gagaauacagccauauuuc

SEQ ID NO: 2405068 - RNA, 19 nt, Artificial Sequence
  Description of Artificial Sequence: Synthetic oligonucleotide
  Sense strand starting at position 251 of SEQ ID NO: 1886373
auggcuguauucucugaca

SEQ ID NO: 2405069 - RNA, 19 nt, Artificial Sequence
  Description of Artificial Sequence: Synthetic oligonucleotide
  Antisense strand to SEQ ID NO: 2405068
ugucagagaauacagccau

SEQ ID NO: 2405070 - RNA, 19 nt, Artificial Sequence
  Description of Artificial Sequence: Synthetic oligonucleotide
  Sense strand starting at position 253 of SEQ ID NO: 1886373
ggcuguauucucugacaau

SEQ ID NO: 2405071 - RNA, 19 nt, Artificial Sequence
  Description of Artificial Sequence: Synthetic oligonucleotide
  Antisense strand to SEQ ID NO: 2405070
auugucagagaauacagcc

SEQ ID NO: 2405072 - RNA, 19 nt, Artificial Sequence
  Description of Artificial Sequence: Synthetic oligonucleotide
  Sense strand starting at position 254 of SEQ ID NO: 1886373
gcuguauucucugacaauu

SEQ ID NO: 2405073 - RNA, 19 nt, Artificial Sequence
  Description of Artificial Sequence: Synthetic oligonucleotide
  Antisense strand to SEQ ID NO: 2405072
aauugucagagaauacagc

SEQ ID NO: 2405074 - RNA, 19 nt, Artificial Sequence
  Description of Artificial Sequence: Synthetic oligonucleotide
  Sense strand starting at position 308 of SEQ ID NO: 1886373
ggauauggagagugcauaa

SEQ ID NO: 2405075 - RNA, 19 nt, Artificial Sequence
  Description of Artificial Sequence: Synthetic oligonucleotide
  Antisense strand to SEQ ID NO: 2405074
uuaugcacucuccauaucc

SEQ ID NO: 2405076 - RNA, 19 nt, Artificial Sequence
  Description of Artificial Sequence: Synthetic oligonucleotide
  Sense strand starting at position 330 of SEQ ID NO: 1886373
gcaggauaagcugaguaau

SEQ ID NO: 2405077 - RNA, 19 nt, Artificial Sequence
  Description of Artificial Sequence: Synthetic oligonucleotide
  Antisense strand to SEQ ID NO: 2405076
auuacucagcuuauccugc

SEQ ID NO: 2405078 - RNA, 19 nt, Artificial Sequence
  Description of Artificial Sequence: Synthetic oligonucleotide
  Sense strand starting at position 332 of SEQ ID NO: 1886373
aggauaagcugaguaauua

SEQ ID NO: 2405079 - RNA, 19 nt, Artificial Sequence
  Description of Artificial Sequence: Synthetic oligonucleotide
  Antisense strand to SEQ ID NO: 2405078
uaauuacucagcuuauccu

SEQ ID NO: 2405080 - RNA, 19 nt, Artificial Sequence
  Description of Artificial Sequence: Synthetic oligonucleotide
  Sense strand starting at position 374 of SEQ ID NO: 1886373
guauauguauuaccugaga

SEQ ID NO: 2405081 - RNA, 19 nt, Artificial Sequence
  Description of Artificial Sequence: Synthetic oligonucleotide
  Antisense strand to SEQ ID NO: 2405080
ucucagguaauacauauac

SEQ ID NO: 2405082 - RNA, 19 nt, Artificial Sequence
  Description of Artificial Sequence: Synthetic oligonucleotide
  Sense strand starting at position 377 of SEQ ID NO: 1886373
uauguauuaccugagagua

SEQ ID NO: 2405083 - RNA, 19 nt, Artificial Sequence
  Description of Artificial Sequence: Synthetic oligonucleotide
  Antisense strand to SEQ ID NO: 2405082
uacucucagguaauacaua

SEQ ID NO: 2405084 - RNA, 19 nt, Artificial Sequence
  Description of Artificial Sequence: Synthetic oligonucleotide
  Sense strand starting at position 379 of SEQ ID NO: 1886373
uguauuaccugagaguaaa

SEQ ID NO: 2405085 - RNA, 19 nt, Artificial Sequence
  Description of Artificial Sequence: Synthetic oligonucleotide
  Antisense strand to SEQ ID NO: 2405084
uuuacucucagguaauaca

SEQ ID NO: 2405086 - RNA, 19 nt, Artificial Sequence
  Description of Artificial Sequence: Synthetic oligonucleotide
  Sense strand starting at position 410 of SEQ ID NO: 1886373
caaauuagaugcuggaaga

SEQ ID NO: 2405087 - RNA, 19 nt, Artificial Sequence
  Description of Artificial Sequence: Synthetic oligonucleotide
  Antisense strand to SEQ ID NO: 2405086
ucuuccagcaucuaauuug

SEQ ID NO: 2405088 - RNA, 19 nt, Artificial Sequence
  Description of Artificial Sequence: Synthetic oligonucleotide
  Sense strand starting at position 468 of SEQ ID NO: 1886373
gcuaauaguugagggcuaa

SEQ ID NO: 2405089 - RNA, 19 nt, Artificial Sequence
  Description of Artificial Sequence: Synthetic oligonucleotide
  Antisense strand to SEQ ID NO: 2405088
uuagcccucaacuauuagc

SEQ ID NO: 2405090 - RNA, 19 nt, Artificial Sequence
  Description of Artificial Sequence: Synthetic oligonucleotide
  Sense strand starting at position 497 of SEQ ID NO: 1886373
gaagaaagguaauacguaa

SEQ ID NO: 2405091 - RNA, 19 nt, Artificial Sequence
  Description of Artificial Sequence: Synthetic oligonucleotide
  Antisense strand to SEQ ID NO: 2405090
uuacguauuaccuuucuuc

SEQ ID NO: 2405092 - RNA, 19 nt, Artificial Sequence
  Description of Artificial Sequence: Synthetic oligonucleotide
  Sense strand starting at position 501 of SEQ ID NO: 1886373
aaagguaauacguaaaggu

SEQ ID NO: 2405093 - RNA, 19 nt, Artificial Sequence
  Description of Artificial Sequence: Synthetic oligonucleotide
  Antisense strand to SEQ ID NO: 2405092
accuuuacguauuaccuuu

SEQ ID NO: 2405094 - RNA, 19 nt, Artificial Sequence
  Description of Artificial Sequence: Synthetic oligonucleotide
  Sense strand starting at position 625 of SEQ ID NO: 1886373
ugaaauagaugacauagua

SEQ ID NO: 2405095 - RNA, 19 nt, Artificial Sequence
  Description of Artificial Sequence: Synthetic oligonucleotide
  Antisense strand to SEQ ID NO: 2405094
uacuaugucaucuauuuca

SEQ ID NO: 2405096 - RNA, 19 nt, Artificial Sequence
  Description of Artificial Sequence: Synthetic oligonucleotide
  Sense strand starting at position 874 of SEQ ID NO: 1886373
gucacaauauuauugagca

SEQ ID NO: 2405097 - RNA, 19 nt, Artificial Sequence
  Description of Artificial Sequence: Synthetic oligonucleotide
  Antisense strand to SEQ ID NO: 2405096
ugcucaauaauauugugac

SEQ ID NO: 2405098 - RNA, 19 nt, Artificial Sequence
  Description of Artificial Sequence: Synthetic oligonucleotide
  Sense strand starting at position 878 of SEQ ID NO: 1886373
caauauuauugagcauggu

SEQ ID NO: 2405099 - RNA, 19 nt, Artificial Sequence
  Description of Artificial Sequence: Synthetic oligonucleotide
  Antisense strand to SEQ ID NO: 2405098
accaugcucaauaauauug

SEQ ID NO: 2405100 - RNA, 19 nt, Artificial Sequence
  Description of Artificial Sequence: Synthetic oligonucleotide
  Sense strand starting at position 881 of SEQ ID NO: 1886373
uauuauugagcauggugga

SEQ ID NO: 2405101 - RNA, 19 nt, Artificial Sequence
  Description of Artificial Sequence: Synthetic oligonucleotide
  Antisense strand to SEQ ID NO: 2405100
uccaccaugcucaauaaua

SEQ ID NO: 2405102 - RNA, 19 nt, Artificial Sequence
  Description of Artificial Sequence: Synthetic oligonucleotide
  Sense strand starting at position 882 of SEQ ID NO: 1886373
auuauugagcaugguggaa

SEQ ID NO: 2405103 - RNA, 19 nt, Artificial Sequence
  Description of Artificial Sequence: Synthetic oligonucleotide
  Antisense strand to SEQ ID NO: 2405102
uuccaccaugcucaauaau

SEQ ID NO: 2405104 - RNA, 19 nt, Artificial Sequence
  Description of Artificial Sequence: Synthetic oligonucleotide
  Sense strand starting at position 933 of SEQ ID NO: 1886373
agaagaguauuucguaaua

SEQ ID NO: 2405105 - RNA, 19 nt, Artificial Sequence
  Description of Artificial Sequence: Synthetic oligonucleotide
  Antisense strand to SEQ ID NO: 2405104
uauuacgaaauacucuucu

SEQ ID NO: 2405106 - RNA, 19 nt, Artificial Sequence
  Description of Artificial Sequence: Synthetic oligonucleotide
  Sense strand starting at position 935 of SEQ ID NO: 1886373
aagaguauuucguaauacu

SEQ ID NO: 2405107 - RNA, 19 nt, Artificial Sequence
  Description of Artificial Sequence: Synthetic oligonucleotide
  Antisense strand to SEQ ID NO: 2405106
aguauuacgaaauacucuu

SEQ ID NO: 2405108 - RNA, 19 nt, Artificial Sequence
  Description of Artificial Sequence: Synthetic oligonucleotide
  Sense strand starting at position 986 of SEQ ID NO: 1886373
ugacuaauauauguguaag

SEQ ID NO: 2405109 - RNA, 19 nt, Artificial Sequence
  Description of Artificial Sequence: Synthetic oligonucleotide
  Antisense strand to SEQ ID NO: 2405108
cuuacacauauauuaguca

SEQ ID NO: 2405110 - RNA, 19 nt, Artificial Sequence
  Description of Artificial Sequence: Synthetic oligonucleotide
  Sense strand starting at position 996 of SEQ ID NO: 1886373
auguguaaguaauaacaca

SEQ ID NO: 2405111 - RNA, 19 nt, Artificial Sequence
  Description of Artificial Sequence: Synthetic oligonucleotide
  Antisense strand to SEQ ID NO: 2405110
uguguuauuacuuacacau

SEQ ID NO: 2405112 - RNA, 19 nt, Artificial Sequence
  Description of Artificial Sequence: Synthetic oligonucleotide
  Sense strand starting at position 1044 of SEQ ID NO: 1886373
aauggaaacuaacgauaga

SEQ ID NO: 2405113 - RNA, 19 nt, Artificial Sequence
  Description of Artificial Sequence: Synthetic oligonucleotide
  Antisense strand to SEQ ID NO: 2405112
ucuaucguuaguuuccauu

SEQ ID NO: 2405114 - RNA, 19 nt, Artificial Sequence
  Description of Artificial Sequence: Synthetic oligonucleotide
  Sense strand starting at position 1057 of SEQ ID NO: 1886373
gauagauaauguuagcaca

SEQ ID NO: 2405115 - RNA, 19 nt, Artificial Sequence
  Description of Artificial Sequence: Synthetic oligonucleotide
  Antisense strand to SEQ ID NO: 2405114
ugugcuaacauuaucuauc

SEQ ID NO: 2405116 - RNA, 19 nt, Artificial Sequence
  Description of Artificial Sequence: Synthetic oligonucleotide
  Sense strand starting at position 1060 of SEQ ID NO: 1886373
agauaauguuagcacauau

SEQ ID NO: 2405117 - RNA, 19 nt, Artificial Sequence
  Description of Artificial Sequence: Synthetic oligonucleotide
  Antisense strand to SEQ ID NO: 2405116
auaugugcuaacauuaucu

SEQ ID NO: 2405118 - RNA, 19 nt, Artificial Sequence
  Description of Artificial Sequence: Synthetic oligonucleotide
  Sense strand starting at position 1105 of SEQ ID NO: 1886373
acgaaauauugacaagaau

SEQ ID NO: 2405119 - RNA, 19 nt, Artificial Sequence
  Description of Artificial Sequence: Synthetic oligonucleotide
  Antisense strand to SEQ ID NO: 2405118
auucuugucaauauuucgu

SEQ ID NO: 2405120 - RNA, 19 nt, Artificial Sequence
  Description of Artificial Sequence: Synthetic oligonucleotide
  Sense strand starting at position 1172 of SEQ ID NO: 1886373
cucuaaugccaauaguaga

SEQ ID NO: 2405121 - RNA, 19 nt, Artificial Sequence
  Description of Artificial Sequence: Synthetic oligonucleotide
  Antisense strand to SEQ ID NO: 2405120
ucuacuauuggcauuagag

SEQ ID NO: 2405122 - RNA, 19 nt, Artificial Sequence
  Description of Artificial Sequence: Synthetic oligonucleotide
  Sense strand starting at position 1302 of SEQ ID NO: 1886373
cucugaucacaacgcaaua

SEQ ID NO: 2405123 - RNA, 19 nt, Artificial Sequence
  Description of Artificial Sequence: Synthetic oligonucleotide
  Antisense strand to SEQ ID NO: 2405122
uauugcguugugaucagag

SEQ ID NO: 2405124 - RNA, 19 nt, Artificial Sequence
  Description of Artificial Sequence: Synthetic oligonucleotide
  Sense strand starting at position 1325 of SEQ ID NO: 1886373
uagaaauuagaucguucca

SEQ ID NO: 2405125 - RNA, 19 nt, Artificial Sequence
  Description of Artificial Sequence: Synthetic oligonucleotide
  Antisense strand to SEQ ID NO: 2405124
uggaacgaucuaauuucua

SEQ ID NO: 2405126 - RNA, 19 nt, Artificial Sequence
  Description of Artificial Sequence: Synthetic oligonucleotide
  Sense strand starting at position 1335 of SEQ ID NO: 1886373
aucguuccaccuggaaauu

SEQ ID NO: 2405127 - RNA, 19 nt, Artificial Sequence
  Description of Artificial Sequence: Synthetic oligonucleotide
  Antisense strand to SEQ ID NO: 2405126
aauuuccagguggaacgau

SEQ ID NO: 2405128 - RNA, 19 nt, Artificial Sequence
  Description of Artificial Sequence: Synthetic oligonucleotide
  Sense strand starting at position 9 of SEQ ID NO: 1886372
uggucucaguaaguacauu

SEQ ID NO: 2405129 - RNA, 19 nt, Artificial Sequence
  Description of Artificial Sequence: Synthetic oligonucleotide
  Antisense strand to SEQ ID NO: 2405128
aauguacuuacugagacca

SEQ ID NO: 2405130 - RNA, 19 nt, Artificial Sequence
  Description of Artificial Sequence: Synthetic oligonucleotide
  Sense strand starting at position 156 of SEQ ID NO: 1886372
ugggucaaguuacucauaa

SEQ ID NO: 2405131 - RNA, 19 nt, Artificial Sequence
  Description of Artificial Sequence: Synthetic oligonucleotide
  Antisense strand to SEQ ID NO: 2405130
uuaugaguaacuugaccca

SEQ ID NO: 2405132 - RNA, 19 nt, Artificial Sequence
  Description of Artificial Sequence: Synthetic oligonucleotide
  Sense strand starting at position 157 of SEQ ID NO: 1886372
gggucaaguuacucauaag

SEQ ID NO: 2405133 - RNA, 19 nt, Artificial Sequence
  Description of Artificial Sequence: Synthetic oligonucleotide
  Antisense strand to SEQ ID NO: 2405132
cuuaugaguaacuugaccc

SEQ ID NO: 2405134 - RNA, 19 nt, Artificial Sequence
  Description of Artificial Sequence: Synthetic oligonucleotide
  Sense strand starting at position 160 of SEQ ID NO: 1886372
ucaaguuacucauaaggga

SEQ ID NO: 2405135 - RNA, 19 nt, Artificial Sequence
  Description of Artificial Sequence: Synthetic oligonucleotide
  Antisense strand to SEQ ID NO: 2405134
ucccuuaugaguaacuuga

SEQ ID NO: 2405136 - RNA, 19 nt, Artificial Sequence
  Description of Artificial Sequence: Synthetic oligonucleotide
  Sense strand starting at position 307 of SEQ ID NO: 1886372
cuagaaaggcugcaaguua

SEQ ID NO: 2405137 - RNA, 19 nt, Artificial Sequence
  Description of Artificial Sequence: Synthetic oligonucleotide
  Antisense strand to SEQ ID NO: 2405136
uaacuugcagccuuucuag

SEQ ID NO: 2405138 - RNA, 19 nt, Artificial Sequence
  Description of Artificial Sequence: Synthetic oligonucleotide
  Sense strand starting at position 366 of SEQ ID NO: 1886372
gccuuuccugggugaccua

SEQ ID NO: 2405139 - RNA, 19 nt, Artificial Sequence
  Description of Artificial Sequence: Synthetic oligonucleotide
  Antisense strand to SEQ ID NO: 2405138
uaggucacccaggaaaggc

SEQ ID NO: 2405140 - RNA, 19 nt, Artificial Sequence
  Description of Artificial Sequence: Synthetic oligonucleotide
  Sense strand starting at position 394 of SEQ ID NO: 1886372
agcuuuagauaacuagaau

SEQ ID NO: 2405141 - RNA, 19 nt, Artificial Sequence
  Description of Artificial Sequence: Synthetic oligonucleotide
  Antisense strand to SEQ ID NO: 2405140
auucuaguuaucuaaagcu

SEQ ID NO: 2405142 - RNA, 19 nt, Artificial Sequence
  Description of Artificial Sequence: Synthetic oligonucleotide
  Sense strand starting at position 421 of SEQ ID NO: 1886372
agccaucagcaucagaaua

SEQ ID NO: 2405143 - RNA, 19 nt, Artificial Sequence
  Description of Artificial Sequence: Synthetic oligonucleotide
  Antisense strand to SEQ ID NO: 2405142
uauucugaugcugauggcu

SEQ ID NO: 2405144 - RNA, 19 nt, Artificial Sequence
  Description of Artificial Sequence: Synthetic oligonucleotide
  Sense strand starting at position 429 of SEQ ID NO: 1886372
gcaucagaauaagagguaa

SEQ ID NO: 2405145 - RNA, 19 nt, Artificial Sequence
  Description of Artificial Sequence: Synthetic oligonucleotide
  Antisense strand to SEQ ID NO: 2405144
uuaccucuuauucugaugc

SEQ ID NO: 2405146 - RNA, 19 nt, Artificial Sequence
  Description of Artificial Sequence: Synthetic oligonucleotide
  Sense strand starting at position 489 of SEQ ID NO: 1886372
ugguuauagaaauauggcu

SEQ ID NO: 2405147 - RNA, 19 nt, Artificial Sequence
  Description of Artificial Sequence: Synthetic oligonucleotide
  Antisense strand to SEQ ID NO: 2405146
agccauauuucuauaacca

SEQ ID NO: 2405148 - RNA, 19 nt, Artificial Sequence
  Description of Artificial Sequence: Synthetic oligonucleotide
  Sense strand starting at position 495 of SEQ ID NO: 1886372
uagaaauauggcuguauuc

SEQ ID NO: 2405149 - RNA, 19 nt, Artificial Sequence
  Description of Artificial Sequence: Synthetic oligonucleotide
  Antisense strand to SEQ ID NO: 2405148
gaauacagccauauuucua

SEQ ID NO: 2405150 - RNA, 19 nt, Artificial Sequence
  Description of Artificial Sequence: Synthetic oligonucleotide
  Sense strand starting at position 497 of SEQ ID NO: 1886372
gaaauauggcuguauucuc

SEQ ID NO: 2405151 - RNA, 19 nt, Artificial Sequence
  Description of Artificial Sequence: Synthetic oligonucleotide
  Antisense strand to SEQ ID NO: 2405150
gagaauacagccauauuuc

SEQ ID NO: 2405152 - RNA, 19 nt, Artificial Sequence
  Description of Artificial Sequence: Synthetic oligonucleotide
  Sense strand starting at position 502 of SEQ ID NO: 1886372
auggcuguauucucugaca

SEQ ID NO: 2405153 - RNA, 19 nt, Artificial Sequence
  Description of Artificial Sequence: Synthetic oligonucleotide
  Antisense strand to SEQ ID NO: 2405152
ugucagagaauacagccau

SEQ ID NO: 2405154 - RNA, 19 nt, Artificial Sequence
  Description of Artificial Sequence: Synthetic oligonucleotide
  Sense strand starting at position 504 of SEQ ID NO: 1886372
ggcuguauucucugacaau

SEQ ID NO: 2405155 - RNA, 19 nt, Artificial Sequence
  Description of Artificial Sequence: Synthetic oligonucleotide
  Antisense strand to SEQ ID NO: 2405154
auugucagagaauacagcc

SEQ ID NO: 2405156 - RNA, 19 nt, Artificial Sequence
  Description of Artificial Sequence: Synthetic oligonucleotide
  Sense strand starting at position 559 of SEQ ID NO: 1886372
ggauauggagagugcauaa

SEQ ID NO: 2405157 - RNA, 19 nt, Artificial Sequence
  Description of Artificial Sequence: Synthetic oligonucleotide
  Antisense strand to SEQ ID NO: 2405156
uuaugcacucuccauaucc

SEQ ID NO: 2405158 - RNA, 19 nt, Artificial Sequence
  Description of Artificial Sequence: Synthetic oligonucleotide
  Sense strand starting at position 581 of SEQ ID NO: 1886372
gcaggauaagcugaguaau

SEQ ID NO: 2405159 - RNA, 19 nt, Artificial Sequence
  Description of Artificial Sequence: Synthetic oligonucleotide
  Antisense strand to SEQ ID NO: 2405158
auuacucagcuuauccugc

SEQ ID NO: 2405160 - RNA, 19 nt, Artificial Sequence
  Description of Artificial Sequence: Synthetic oligonucleotide
  Sense strand starting at position 583 of SEQ ID NO: 1886372
aggauaagcugaguaauua

SEQ ID NO: 2405161 - RNA, 19 nt, Artificial Sequence
  Description of Artificial Sequence: Synthetic oligonucleotide
  Antisense strand to SEQ ID NO: 2405160
uaauuacucagcuuauccu

SEQ ID NO: 2405162 - RNA, 19 nt, Artificial Sequence
  Description of Artificial Sequence: Synthetic oligonucleotide
  Sense strand starting at position 625 of SEQ ID NO: 1886372
guauauguauuaccugaga

SEQ ID NO: 2405163 - RNA, 19 nt, Artificial Sequence
  Description of Artificial Sequence: Synthetic oligonucleotide
  Antisense strand to SEQ ID NO: 2405162
ucucagguaauacauauac

SEQ ID NO: 2405164 - RNA, 19 nt, Artificial Sequence
  Description of Artificial Sequence: Synthetic oligonucleotide
  Sense strand starting at position 628 of SEQ ID NO: 1886372
uauguauuaccugagagua

SEQ ID NO: 2405165 - RNA, 19 nt, Artificial Sequence
  Description of Artificial Sequence: Synthetic oligonucleotide
  Antisense strand to SEQ ID NO: 2405164
uacucucagguaauacaua

SEQ ID NO: 2405166 - RNA, 19 nt, Artificial Sequence
  Description of Artificial Sequence: Synthetic oligonucleotide
  Sense strand starting at position 630 of SEQ ID NO: 1886372
uguauuaccugagaguaaa

SEQ ID NO: 2405167 - RNA, 19 nt, Artificial Sequence
  Description of Artificial Sequence: Synthetic oligonucleotide
  Antisense strand to SEQ ID NO: 2405166
uuuacucucagguaauaca

SEQ ID NO: 2405168 - RNA, 19 nt, Artificial Sequence
  Description of Artificial Sequence: Synthetic oligonucleotide
  Sense strand starting at position 661 of SEQ ID NO: 1886372
caaauuagaugcuggaaga

SEQ ID NO: 2405169 - RNA, 19 nt, Artificial Sequence
  Description of Artificial Sequence: Synthetic oligonucleotide
  Antisense strand to SEQ ID NO: 2405168
ucuuccagcaucuaauuug

SEQ ID NO: 2405170 - RNA, 19 nt, Artificial Sequence
  Description of Artificial Sequence: Synthetic oligonucleotide
  Sense strand starting at position 748 of SEQ ID NO: 1886372
gaagaaagguaauacguaa

SEQ ID NO: 2405171 - RNA, 19 nt, Artificial Sequence
  Description of Artificial Sequence: Synthetic oligonucleotide
  Antisense strand to SEQ ID NO: 2405170
uuacguauuaccuuucuuc

SEQ ID NO: 2405172 - RNA, 19 nt, Artificial Sequence
  Description of Artificial Sequence: Synthetic oligonucleotide
  Sense strand starting at position 752 of SEQ ID NO: 1886372
aaagguaauacguaaaggu

SEQ ID NO: 2405173 - RNA, 19 nt, Artificial Sequence
  Description of Artificial Sequence: Synthetic oligonucleotide
  Antisense strand to SEQ ID NO: 2405172
accuuuacguauuaccuuu

SEQ ID NO: 2405174 - RNA, 19 nt, Artificial Sequence
  Description of Artificial Sequence: Synthetic oligonucleotide
  Sense strand starting at position 876 of SEQ ID NO: 1886372
ugaaauagaugacauagua

SEQ ID NO: 2405175 - RNA, 19 nt, Artificial Sequence
  Description of Artificial Sequence: Synthetic oligonucleotide
  Antisense strand to SEQ ID NO: 2405174
uacuaugucaucuauuuca

SEQ ID NO: 2405176 - RNA, 19 nt, Artificial Sequence
  Description of Artificial Sequence: Synthetic oligonucleotide
  Sense strand starting at position 1125 of SEQ ID NO: 1886372
gucacaauauuauugagca

SEQ ID NO: 2405177 - RNA, 19 nt, Artificial Sequence
  Description of Artificial Sequence: Synthetic oligonucleotide
  Antisense strand to SEQ ID NO: 2405176
ugcucaauaauauugugac

SEQ ID NO: 2405178 - RNA, 19 nt, Artificial Sequence
  Description of Artificial Sequence: Synthetic oligonucleotide
  Sense strand starting at position 1129 of SEQ ID NO: 1886372
caauauuauugagcauggu

SEQ ID NO: 2405179 - RNA, 19 nt, Artificial Sequence
  Description of Artificial Sequence: Synthetic oligonucleotide
  Antisense strand to SEQ ID NO: 2405178
accaugcucaauaauauug

SEQ ID NO: 2405180 - RNA, 19 nt, Artificial Sequence
  Description of Artificial Sequence: Synthetic oligonucleotide
  Sense strand starting at position 1132 of SEQ ID NO: 1886372
uauuauugagcauggugga

SEQ ID NO: 2405181 - RNA, 19 nt, Artificial Sequence
  Description of Artificial Sequence: Synthetic oligonucleotide
  Antisense strand to SEQ ID NO: 2405180
uccaccaugcucaauaaua

SEQ ID NO: 2405182 - RNA, 19 nt, Artificial Sequence
  Description of Artificial Sequence: Synthetic oligonucleotide
  Sense strand starting at position 1133 of SEQ ID NO: 1886372
auuauugagcaugguggaa

SEQ ID NO: 2405183 - RNA, 19 nt, Artificial Sequence
  Description of Artificial Sequence: Synthetic oligonucleotide
  Antisense strand to SEQ ID NO: 2405182
uuccaccaugcucaauaau

SEQ ID NO: 2405184 - RNA, 19 nt, Artificial Sequence
  Description of Artificial Sequence: Synthetic oligonucleotide
  Sense strand starting at position 1184 of SEQ ID NO: 1886372
agaagaguauuucguaaua

SEQ ID NO: 2405185 - RNA, 19 nt, Artificial Sequence
  Description of Artificial Sequence: Synthetic oligonucleotide
  Antisense strand to SEQ ID NO: 2405184
uauuacgaaauacucuucu

SEQ ID NO: 2405186 - RNA, 19 nt, Artificial Sequence
  Description of Artificial Sequence: Synthetic oligonucleotide
  Sense strand starting at position 1186 of SEQ ID NO: 1886372
aagaguauuucguaauacu

SEQ ID NO: 2405187 - RNA, 19 nt, Artificial Sequence
  Description of Artificial Sequence: Synthetic oligonucleotide
  Antisense strand to SEQ ID NO: 2405186
aguauuacgaaauacucuu

SEQ ID NO: 2405188 - RNA, 19 nt, Artificial Sequence
  Description of Artificial Sequence: Synthetic oligonucleotide
  Sense strand starting at position 1237 of SEQ ID NO: 1886372
ugacuaauauauguguaag

SEQ ID NO: 2405189 - RNA, 19 nt, Artificial Sequence
  Description of Artificial Sequence: Synthetic oligonucleotide
  Antisense strand to SEQ ID NO: 2405188
cuuacacauauauuaguca

SEQ ID NO: 2405190 - RNA, 19 nt, Artificial Sequence
  Description of Artificial Sequence: Synthetic oligonucleotide
  Sense strand starting at position 1247 of SEQ ID NO: 1886372
auguguaaguaauaacaca

SEQ ID NO: 2405191 - RNA, 19 nt, Artificial Sequence
  Description of Artificial Sequence: Synthetic oligonucleotide
  Antisense strand to SEQ ID NO: 2405190
uguguuauuacuuacacau

SEQ ID NO: 2405192 - RNA, 19 nt, Artificial Sequence
  Description of Artificial Sequence: Synthetic oligonucleotide
  Sense strand starting at position 1295 of SEQ ID NO: 1886372
aauggaaacuaacgauaga

SEQ ID NO: 2405193 - RNA, 19 nt, Artificial Sequence
  Description of Artificial Sequence: Synthetic oligonucleotide
  Antisense strand to SEQ ID NO: 2405192
ucuaucguuaguuuccauu

SEQ ID NO: 2405194 - RNA, 19 nt, Artificial Sequence
  Description of Artificial Sequence: Synthetic oligonucleotide
  Sense strand starting at position 1308 of SEQ ID NO: 1886372
gauagauaauguuagcaca

SEQ ID NO: 2405195 - RNA, 19 nt, Artificial Sequence
  Description of Artificial Sequence: Synthetic oligonucleotide
  Antisense strand to SEQ ID NO: 2405194
ugugcuaacauuaucuauc

SEQ ID NO: 2405196 - RNA, 19 nt, Artificial Sequence
  Description of Artificial Sequence: Synthetic oligonucleotide
  Sense strand starting at position 1311 of SEQ ID NO: 1886372
agauaauguuagcacauau

SEQ ID NO: 2405197 - RNA, 19 nt, Artificial Sequence
  Description of Artificial Sequence: Synthetic oligonucleotide
  Antisense strand to SEQ ID NO: 2405196
auaugugcuaacauuaucu

SEQ ID NO: 2405198 - RNA, 19 nt, Artificial Sequence
  Description of Artificial Sequence: Synthetic oligonucleotide
  Sense strand starting at position 1356 of SEQ ID NO: 1886372
acgaaauauugacaagaau

SEQ ID NO: 2405199 - RNA, 19 nt, Artificial Sequence
  Description of Artificial Sequence: Synthetic oligonucleotide
  Antisense strand to SEQ ID NO: 2405198
auucuugucaauauuucgu

SEQ ID NO: 2405200 - RNA, 19 nt, Artificial Sequence
  Description of Artificial Sequence: Synthetic oligonucleotide
  Sense strand starting at position 1423 of SEQ ID NO: 1886372
cucuaaugccaauaguaga

SEQ ID NO: 2405201 - RNA, 19 nt, Artificial Sequence
  Description of Artificial Sequence: Synthetic oligonucleotide
  Antisense strand to SEQ ID NO: 2405200
ucuacuauuggcauuagag

SEQ ID NO: 2405202 - RNA, 19 nt, Artificial Sequence
  Description of Artificial Sequence: Synthetic oligonucleotide
  Sense strand starting at position 1553 of SEQ ID NO: 1886372
cucugaucacaacgcaaua

SEQ ID NO: 2405203 - RNA, 19 nt, Artificial Sequence
  Description of Artificial Sequence: Synthetic oligonucleotide
  Antisense strand to SEQ ID NO: 2405202
uauugcguugugaucagag

SEQ ID NO: 2405204 - RNA, 19 nt, Artificial Sequence
  Description of Artificial Sequence: Synthetic oligonucleotide
  Sense strand starting at position 1576 of SEQ ID NO: 1886372
uagaaauuagaucguucca

SEQ ID NO: 2405205 - RNA, 19 nt, Artificial Sequence
  Description of Artificial Sequence: Synthetic oligonucleotide
  Antisense strand to SEQ ID NO: 2405204
uggaacgaucuaauuucua

SEQ ID NO: 2405206 - RNA, 19 nt, Artificial Sequence
  Description of Artificial Sequence: Synthetic oligonucleotide
  Sense strand starting at position 1586 of SEQ ID NO: 1886372
aucguuccaccuggaaauu

SEQ ID NO: 2405207 - RNA, 19 nt, Artificial Sequence
  Description of Artificial Sequence: Synthetic oligonucleotide
  Antisense strand to SEQ ID NO: 2405206
aauuuccagguggaacgau

SEQ ID NO: 2405208 - RNA, 19 nt, Artificial Sequence
  Description of Artificial Sequence: Synthetic oligonucleotide
  Sense strand starting at position 361 of SEQ ID NO: 1886375
guuagaguggcaugaguuu

SEQ ID NO: 2405209 - RNA, 19 nt, Artificial Sequence
  Description of Artificial Sequence: Synthetic oligonucleotide
  Antisense strand to SEQ ID NO: 2405208
aaacucaugccacucuaac

SEQ ID NO: 2405210 - RNA, 19 nt, Artificial Sequence
  Description of Artificial Sequence: Synthetic oligonucleotide
  Sense strand starting at position 476 of SEQ ID NO: 1886375
gagaucucuuaggugucuu

SEQ ID NO: 2405211 - RNA, 19 nt, Artificial Sequence
  Description of Artificial Sequence: Synthetic oligonucleotide
  Antisense strand to SEQ ID NO: 2405210
aagacaccuaagagaucuc

SEQ ID NO: 2405212 - RNA, 19 nt, Artificial Sequence
  Description of Artificial Sequence: Synthetic oligonucleotide
  Sense strand starting at position 480 of SEQ ID NO: 1886375
ucucuuaggugucuucuga

SEQ ID NO: 2405213 - RNA, 19 nt, Artificial Sequence
  Description of Artificial Sequence: Synthetic oligonucleotide
  Antisense strand to SEQ ID NO: 2405212
ucagaagacaccuaagaga

SEQ ID NO: 2405214 - RNA, 19 nt, Artificial Sequence
  Description of Artificial Sequence: Synthetic oligonucleotide
  Sense strand starting at position 504 of SEQ ID NO: 1886375
guuguugagacccaaggua

SEQ ID NO: 2405215 - RNA, 19 nt, Artificial Sequence
  Description of Artificial Sequence: Synthetic oligonucleotide
  Antisense strand to SEQ ID NO: 2405214
uaccuugggucucaacaac

SEQ ID NO: 2405216 - RNA, 19 nt, Artificial Sequence
  Description of Artificial Sequence: Synthetic oligonucleotide
  Sense strand starting at position 512 of SEQ ID NO: 1886375
gacccaagguaagauauuu

SEQ ID NO: 2405217 - RNA, 19 nt, Artificial Sequence
  Description of Artificial Sequence: Synthetic oligonucleotide
  Antisense strand to SEQ ID NO: 2405216
aaauaucuuaccuuggguc

SEQ ID NO: 2405218 - RNA, 19 nt, Artificial Sequence
  Description of Artificial Sequence: Synthetic oligonucleotide
  Sense strand starting at position 563 of SEQ ID NO: 1886375
cuggaauaagaaugccuuu

SEQ ID NO: 2405219 - RNA, 19 nt, Artificial Sequence
  Description of Artificial Sequence: Synthetic oligonucleotide
  Antisense strand to SEQ ID NO: 2405218
aaaggcauucuuauuccag

SEQ ID NO: 2405220 - RNA, 19 nt, Artificial Sequence
  Description of Artificial Sequence: Synthetic oligonucleotide
  Sense strand starting at position 600 of SEQ ID NO: 1886375
guuguuugauggcucaaug

SEQ ID NO: 2405221 - RNA, 19 nt, Artificial Sequence
  Description of Artificial Sequence: Synthetic oligonucleotide
  Antisense strand to SEQ ID NO: 2405220
cauugagccaucaaacaac

SEQ ID NO: 2405222 - RNA, 19 nt, Artificial Sequence
  Description of Artificial Sequence: Synthetic oligonucleotide
  Sense strand starting at position 703 of SEQ ID NO: 1886375
uuaagaaauuuggaugagu

SEQ ID NO: 2405223 - RNA, 19 nt, Artificial Sequence
  Description of Artificial Sequence: Synthetic oligonucleotide
  Antisense strand to SEQ ID NO: 2405222
acucauccaaauuucuuaa

SEQ ID NO: 2405224 - RNA, 19 nt, Artificial Sequence
  Description of Artificial Sequence: Synthetic oligonucleotide
  Sense strand starting at position 712 of SEQ ID NO: 1886375
uuggaugaguccuuagagg

SEQ ID NO: 2405225 - RNA, 19 nt, Artificial Sequence
  Description of Artificial Sequence: Synthetic oligonucleotide
  Antisense strand to SEQ ID NO: 2405224
ccucuaaggacucauccaa

SEQ ID NO: 2405226 - RNA, 19 nt, Artificial Sequence
  Description of Artificial Sequence: Synthetic oligonucleotide
  Sense strand starting at position 1120 of SEQ ID NO: 1886375
caggaaucuuaagcuagua

SEQ ID NO: 2405227 - RNA, 19 nt, Artificial Sequence
  Description of Artificial Sequence: Synthetic oligonucleotide
  Antisense strand to SEQ ID NO: 2405226
uacuagcuuaagauuccug

SEQ ID NO: 2405228 - RNA, 19 nt, Artificial Sequence
  Description of Artificial Sequence: Synthetic oligonucleotide
  Sense strand starting at position 1367 of SEQ ID NO: 1886375
aagugcagagauugaacau

SEQ ID NO: 2405229 - RNA, 19 nt, Artificial Sequence
  Description of Artificial Sequence: Synthetic oligonucleotide
  Antisense strand to SEQ ID NO: 2405228
auguucaaucucugcacuu

SEQ ID NO: 2405230 - RNA, 19 nt, Artificial Sequence
  Description of Artificial Sequence: Synthetic oligonucleotide
  Sense strand starting at position 1526 of SEQ ID NO: 1886375
caugguugccaugguaacu

SEQ ID NO: 2405231 - RNA, 19 nt, Artificial Sequence
  Description of Artificial Sequence: Synthetic oligonucleotide
  Antisense strand to SEQ ID NO: 2405230
aguuaccauggcaaccaug

SEQ ID NO: 2405232 - RNA, 19 nt, Artificial Sequence
  Description of Artificial Sequence: Synthetic oligonucleotide
  Sense strand starting at position 1608 of SEQ ID NO: 1886375
uuuccauguccuuggauaa

SEQ ID NO: 2405233 - RNA, 19 nt, Artificial Sequence
  Description of Artificial Sequence: Synthetic oligonucleotide
  Antisense strand to SEQ ID NO: 2405232
uuauccaaggacauggaaa

SEQ ID NO: 2405234 - RNA, 19 nt, Artificial Sequence
  Description of Artificial Sequence: Synthetic oligonucleotide
  Sense strand starting at position 1631 of SEQ ID NO: 1886375
gagagcaaaugugaauaaa

SEQ ID NO: 2405235 - RNA, 19 nt, Artificial Sequence
  Description of Artificial Sequence: Synthetic oligonucleotide
  Antisense strand to SEQ ID NO: 2405234
uuuauucacauuugcucuc

SEQ ID NO: 2405236 - RNA, 19 nt, Artificial Sequence
  Description of Artificial Sequence: Synthetic oligonucleotide
  Sense strand starting at position 1634 of SEQ ID NO: 1886375
agcaaaugugaauaaagcu

SEQ ID NO: 2405237 - RNA, 19 nt, Artificial Sequence
  Description of Artificial Sequence: Synthetic oligonucleotide
  Antisense strand to SEQ ID NO: 2405236
agcuuuauucacauuugcu

SEQ ID NO: 2405238 - RNA, 19 nt, Artificial Sequence
  Description of Artificial Sequence: Synthetic oligonucleotide
  Sense strand starting at position 1641 of SEQ ID NO: 1886375
gugaauaaagcucaaguca

SEQ ID NO: 2405239 - RNA, 19 nt, Artificial Sequence
  Description of Artificial Sequence: Synthetic oligonucleotide
  Antisense strand to SEQ ID NO: 2405238
ugacuugagcuuuauucac

SEQ ID NO: 2405240 - RNA, 19 nt, Artificial Sequence
  Description of Artificial Sequence: Synthetic oligonucleotide
  Sense strand starting at position 1650 of SEQ ID NO: 1886375
gcucaagucagacagugua

SEQ ID NO: 2405241 - RNA, 19 nt, Artificial Sequence
  Description of Artificial Sequence: Synthetic oligonucleotide
  Antisense strand to SEQ ID NO: 2405240
uacacugucugacuugagc

SEQ ID NO: 2405242 - RNA, 19 nt, Artificial Sequence
  Description of Artificial Sequence: Synthetic oligonucleotide
  Sense strand starting at position 1653 of SEQ ID NO: 1886375
caagucagacaguguaaua

SEQ ID NO: 2405243 - RNA, 19 nt, Artificial Sequence
  Description of Artificial Sequence: Synthetic oligonucleotide
  Antisense strand to SEQ ID NO: 2405242
uauuacacugucugacuug

SEQ ID NO: 2405244 - RNA, 19 nt, Artificial Sequence
  Description of Artificial Sequence: Synthetic oligonucleotide
  Sense strand starting at position 1814 of SEQ ID NO: 1886375
augauauauccauggcaga

SEQ ID NO: 2405245 - RNA, 19 nt, Artificial Sequence
  Description of Artificial Sequence: Synthetic oligonucleotide
  Antisense strand to SEQ ID NO: 2405244
ucugccauggauauaucau

SEQ ID NO: 2405246 - RNA, 19 nt, Artificial Sequence
  Description of Artificial Sequence: Synthetic oligonucleotide
  Sense strand starting at position 1815 of SEQ ID NO: 1886375
ugauauauccauggcagaa

SEQ ID NO: 2405247 - RNA, 19 nt, Artificial Sequence
  Description of Artificial Sequence: Synthetic oligonucleotide
  Antisense strand to SEQ ID NO: 2405246
uucugccauggauauauca

SEQ ID NO: 2405248 - RNA, 19 nt, Artificial Sequence
  Description of Artificial Sequence: Synthetic oligonucleotide
  Sense strand starting at position 1827 of SEQ ID NO: 1886375
ggcagaauauuauuacugu

SEQ ID NO: 2405249 - RNA, 19 nt, Artificial Sequence
  Description of Artificial Sequence: Synthetic oligonucleotide
  Antisense strand to SEQ ID NO: 2405248
acaguaauaauauucugcc

SEQ ID NO: 2405250 - RNA, 19 nt, Artificial Sequence
  Description of Artificial Sequence: Synthetic oligonucleotide
  Sense strand starting at position 1862 of SEQ ID NO: 1886375
gcuucugaagauuguuuaa

SEQ ID NO: 2405251 - RNA, 19 nt, Artificial Sequence
  Description of Artificial Sequence: Synthetic oligonucleotide
  Antisense strand to SEQ ID NO: 2405250
uuaaacaaucuucagaagc

SEQ ID NO: 2405252 - RNA, 19 nt, Artificial Sequence
  Description of Artificial Sequence: Synthetic oligonucleotide
  Sense strand starting at position 2278 of SEQ ID NO: 1886375
gaagguuugagguguggau

SEQ ID NO: 2405253 - RNA, 19 nt, Artificial Sequence
  Description of Artificial Sequence: Synthetic oligonucleotide
  Antisense strand to SEQ ID NO: 2405252
auccacaccucaaaccuuc

SEQ ID NO: 2405254 - RNA, 19 nt, Artificial Sequence
  Description of Artificial Sequence: Synthetic oligonucleotide
  Sense strand starting at position 2280 of SEQ ID NO: 1886375
agguuugagguguggauau

SEQ ID NO: 2405255 - RNA, 19 nt, Artificial Sequence
  Description of Artificial Sequence: Synthetic oligonucleotide
  Antisense strand to SEQ ID NO: 2405254
auauccacaccucaaaccu

SEQ ID NO: 2405256 - RNA, 19 nt, Artificial Sequence
  Description of Artificial Sequence: Synthetic oligonucleotide
  Sense strand starting at position 2693 of SEQ ID NO: 1886375
ccaaguacuuuagcauguu

SEQ ID NO: 2405257 - RNA, 19 nt, Artificial Sequence
  Description of Artificial Sequence: Synthetic oligonucleotide
  Antisense strand to SEQ ID NO: 2405256
aacaugcuaaaguacuugg

SEQ ID NO: 2405258 - RNA, 19 nt, Artificial Sequence
  Description of Artificial Sequence: Synthetic oligonucleotide
  Sense strand starting at position 2696 of SEQ ID NO: 1886375
aguacuuuagcauguugau

SEQ ID NO: 2405259 - RNA, 19 nt, Artificial Sequence
  Description of Artificial Sequence: Synthetic oligonucleotide
  Antisense strand to SEQ ID NO: 2405258
aucaacaugcuaaaguacu

SEQ ID NO: 2405260 - RNA, 19 nt, Artificial Sequence
  Description of Artificial Sequence: Synthetic oligonucleotide
  Sense strand starting at position 2705 of SEQ ID NO: 1886375
gcauguugauucucuuaau

SEQ ID NO: 2405261 - RNA, 19 nt, Artificial Sequence
  Description of Artificial Sequence: Synthetic oligonucleotide
  Antisense strand to SEQ ID NO: 2405260
auuaagagaaucaacaugc

SEQ ID NO: 2405262 - RNA, 19 nt, Artificial Sequence
  Description of Artificial Sequence: Synthetic oligonucleotide
  Sense strand starting at position 2835 of SEQ ID NO: 1886375
cugaacaguguauaaucua

SEQ ID NO: 2405263 - RNA, 19 nt, Artificial Sequence
  Description of Artificial Sequence: Synthetic oligonucleotide
  Antisense strand to SEQ ID NO: 2405262
uagauuauacacuguucag

SEQ ID NO: 2405264 - RNA, 19 nt, Artificial Sequence
  Description of Artificial Sequence: Synthetic oligonucleotide
  Sense strand starting at position 2842 of SEQ ID NO: 1886375
guguauaaucuagguggac

SEQ ID NO: 2405265 - RNA, 19 nt, Artificial Sequence
  Description of Artificial Sequence: Synthetic oligonucleotide
  Antisense strand to SEQ ID NO: 2405264
guccaccuagauuauacac

SEQ ID NO: 2405266 - RNA, 19 nt, Artificial Sequence
  Description of Artificial Sequence: Synthetic oligonucleotide
  Sense strand starting at position 2843 of SEQ ID NO: 1886375
uguauaaucuagguggacu

SEQ ID NO: 2405267 - RNA, 19 nt, Artificial Sequence
  Description of Artificial Sequence: Synthetic oligonucleotide
  Antisense strand to SEQ ID NO: 2405266
aguccaccuagauuauaca

SEQ ID NO: 2405268 - RNA, 19 nt, Artificial Sequence
  Description of Artificial Sequence: Synthetic oligonucleotide
  Sense strand starting at position 2844 of SEQ ID NO: 1886375
guauaaucuagguggacug

SEQ ID NO: 2405269 - RNA, 19 nt, Artificial Sequence
  Description of Artificial Sequence: Synthetic oligonucleotide
  Antisense strand to SEQ ID NO: 2405268
caguccaccuagauuauac

SEQ ID NO: 2405270 - RNA, 19 nt, Artificial Sequence
  Description of Artificial Sequence: Synthetic oligonucleotide
  Sense strand starting at position 2860 of SEQ ID NO: 1886375
cugauuugguuggaaauua

SEQ ID NO: 2405271 - RNA, 19 nt, Artificial Sequence
  Description of Artificial Sequence: Synthetic oligonucleotide
  Antisense strand to SEQ ID NO: 2405270
uaauuuccaaccaaaucag

SEQ ID NO: 2405272 - RNA, 19 nt, Artificial Sequence
  Description of Artificial Sequence: Synthetic oligonucleotide
  Sense strand starting at position 3184 of SEQ ID NO: 1886375
gcuagcaauuagucuaauu

SEQ ID NO: 2405273 - RNA, 19 nt, Artificial Sequence
  Description of Artificial Sequence: Synthetic oligonucleotide
  Antisense strand to SEQ ID NO: 2405272
aauuagacuaauugcuagc

SEQ ID NO: 2405274 - RNA, 19 nt, Artificial Sequence
  Description of Artificial Sequence: Synthetic oligonucleotide
  Sense strand starting at position 3313 of SEQ ID NO: 1886375
agauaaauaugugaacuac

SEQ ID NO: 2405275 - RNA, 19 nt, Artificial Sequence
  Description of Artificial Sequence: Synthetic oligonucleotide
  Antisense strand to SEQ ID NO: 2405274
guaguucacauauuuaucu

SEQ ID NO: 2405276 - RNA, 19 nt, Artificial Sequence
  Description of Artificial Sequence: Synthetic oligonucleotide
  Sense strand starting at position 3473 of SEQ ID NO: 1886375
accaccuaucucugugaga

SEQ ID NO: 2405277 - RNA, 19 nt, Artificial Sequence
  Description of Artificial Sequence: Synthetic oligonucleotide
  Antisense strand to SEQ ID NO: 2405276
ucucacagagauagguggu

SEQ ID NO: 2405278 - RNA, 19 nt, Artificial Sequence
  Description of Artificial Sequence: Synthetic oligonucleotide
  Sense strand starting at position 3474 of SEQ ID NO: 1886375
ccaccuaucucugugagaa

SEQ ID NO: 2405279 - RNA, 19 nt, Artificial Sequence
  Description of Artificial Sequence: Synthetic oligonucleotide
  Antisense strand to SEQ ID NO: 2405278
uucucacagagauaggugg

SEQ ID NO: 2405280 - RNA, 19 nt, Artificial Sequence
  Description of Artificial Sequence: Synthetic oligonucleotide
  Sense strand starting at position 3544 of SEQ ID NO: 1886375
uccggugggcucgucauau

SEQ ID NO: 2405281 - RNA, 19 nt, Artificial Sequence
  Description of Artificial Sequence: Synthetic oligonucleotide
  Antisense strand to SEQ ID NO: 2405280
auaugacgagcccaccgga

SEQ ID NO: 2405282 - RNA, 19 nt, Artificial Sequence
  Description of Artificial Sequence: Synthetic oligonucleotide
  Sense strand starting at position 3596 of SEQ ID NO: 1886375
agcugacuggccugaaacu

SEQ ID NO: 2405283 - RNA, 19 nt, Artificial Sequence
  Description of Artificial Sequence: Synthetic oligonucleotide
  Antisense strand to SEQ ID NO: 2405282
aguuucaggccagucagcu

SEQ ID NO: 2405284 - RNA, 19 nt, Artificial Sequence
  Description of Artificial Sequence: Synthetic oligonucleotide
  Sense strand starting at position 3863 of SEQ ID NO: 1886375
ccuggcucugcuuaguaaa

SEQ ID NO: 2405285 - RNA, 19 nt, Artificial Sequence
  Description of Artificial Sequence: Synthetic oligonucleotide
  Antisense strand to SEQ ID NO: 2405284
uuuacuaagcagagccagg

SEQ ID NO: 2405286 - RNA, 19 nt, Artificial Sequence
  Description of Artificial Sequence: Synthetic oligonucleotide
  Sense strand starting at position 3956 of SEQ ID NO: 1886375
ucaguaaguuuaccacuca

SEQ ID NO: 2405287 - RNA, 19 nt, Artificial Sequence
  Description of Artificial Sequence: Synthetic oligonucleotide
  Antisense strand to SEQ ID NO: 2405286
ugagugguaaacuuacuga

SEQ ID NO: 2405288 - RNA, 19 nt, Artificial Sequence
  Description of Artificial Sequence: Synthetic oligonucleotide
  Sense strand starting at position 30 of SEQ ID NO: 1886376
ccuagcaauuggucuaauu

SEQ ID NO: 2405289 - RNA, 19 nt, Artificial Sequence
  Description of Artificial Sequence: Synthetic oligonucleotide
  Antisense strand to SEQ ID NO: 2405288
aauuagaccaauugcuagg

SEQ ID NO: 2405290 - RNA, 19 nt, Artificial Sequence
  Description of Artificial Sequence: Synthetic oligonucleotide
  Sense strand starting at position 398 of SEQ ID NO: 1886376
uccucauauccucagguga

SEQ ID NO: 2405291 - RNA, 19 nt, Artificial Sequence
  Description of Artificial Sequence: Synthetic oligonucleotide
  Antisense strand to SEQ ID NO: 2405290
ucaccugaggauaugagga

SEQ ID NO: 2405292 - RNA, 19 nt, Artificial Sequence
  Description of Artificial Sequence: Synthetic oligonucleotide
  Sense strand starting at position 400 of SEQ ID NO: 1886376
cucauauccucaggugaaa

SEQ ID NO: 2405293 - RNA, 19 nt, Artificial Sequence
  Description of Artificial Sequence: Synthetic oligonucleotide
  Antisense strand to SEQ ID NO: 2405292
uuucaccugaggauaugag

SEQ ID NO: 2405294 - RNA, 19 nt, Artificial Sequence
  Description of Artificial Sequence: Synthetic oligonucleotide
  Sense strand starting at position 403 of SEQ ID NO: 1886376
auauccucaggugaaaguu

SEQ ID NO: 2405295 - RNA, 19 nt, Artificial Sequence
  Description of Artificial Sequence: Synthetic oligonucleotide
  Antisense strand to SEQ ID NO: 2405294
aacuuucaccugaggauau

SEQ ID NO: 2405296 - RNA, 19 nt, Artificial Sequence
  Description of Artificial Sequence: Synthetic oligonucleotide
  Sense strand starting at position 852 of SEQ ID NO: 1886376
gggcacuaaugcgguuaaa

SEQ ID NO: 2405297 - RNA, 19 nt, Artificial Sequence
  Description of Artificial Sequence: Synthetic oligonucleotide
  Antisense strand to SEQ ID NO: 2405296
uuuaaccgcauuagugccc

SEQ ID NO: 2405298 - RNA, 19 nt, Artificial Sequence
  Description of Artificial Sequence: Synthetic oligonucleotide
  Sense strand starting at position 1002 of SEQ ID NO: 1886376
gacacagacuuagaauugu

SEQ ID NO: 2405299 - RNA, 19 nt, Artificial Sequence
  Description of Artificial Sequence: Synthetic oligonucleotide
  Antisense strand to SEQ ID NO: 2405298
acaauucuaagucuguguc

SEQ ID NO: 2405300 - RNA, 19 nt, Artificial Sequence
  Description of Artificial Sequence: Synthetic oligonucleotide
  Sense strand starting at position 1008 of SEQ ID NO: 1886376
gacuuagaauuguuuacgu

SEQ ID NO: 2405301 - RNA, 19 nt, Artificial Sequence
  Description of Artificial Sequence: Synthetic oligonucleotide
  Antisense strand to SEQ ID NO: 2405300
acguaaacaauucuaaguc

SEQ ID NO: 2405302 - RNA, 19 nt, Artificial Sequence
  Description of Artificial Sequence: Synthetic oligonucleotide
  Sense strand starting at position 1010 of SEQ ID NO: 1886376
cuuagaauuguuuacgugu

SEQ ID NO: 2405303 - RNA, 19 nt, Artificial Sequence
  Description of Artificial Sequence: Synthetic oligonucleotide
  Antisense strand to SEQ ID NO: 2405302
acacguaaacaauucuaag

SEQ ID NO: 2405304 - RNA, 19 nt, Artificial Sequence
  Description of Artificial Sequence: Synthetic oligonucleotide
  Sense strand starting at position 1013 of SEQ ID NO: 1886376
agaauuguuuacguguagu

SEQ ID NO: 2405305 - RNA, 19 nt, Artificial Sequence
  Description of Artificial Sequence: Synthetic oligonucleotide
  Antisense strand to SEQ ID NO: 2405304
acuacacguaaacaauucu

SEQ ID NO: 2405306 - RNA, 19 nt, Artificial Sequence
  Description of Artificial Sequence: Synthetic oligonucleotide
  Sense strand starting at position 2161 of SEQ ID NO: 1886376
aacaaacgugccuaggaau

SEQ ID NO: 2405307 - RNA, 19 nt, Artificial Sequence
  Description of Artificial Sequence: Synthetic oligonucleotide
  Antisense strand to SEQ ID NO: 2405306
auuccuaggcacguuuguu

SEQ ID NO: 2405308 - RNA, 19 nt, Artificial Sequence
  Description of Artificial Sequence: Synthetic oligonucleotide
  Sense strand starting at position 2164 of SEQ ID NO: 1886376
aaacgugccuaggaaucau

SEQ ID NO: 2405309 - RNA, 19 nt, Artificial Sequence
  Description of Artificial Sequence: Synthetic oligonucleotide
  Antisense strand to SEQ ID NO: 2405308
augauuccuaggcacguuu

SEQ ID NO: 2405310 - RNA, 19 nt, Artificial Sequence
  Description of Artificial Sequence: Synthetic oligonucleotide
  Sense strand starting at position 2196 of SEQ ID NO: 1886376
agaggagggucuuacugaa

SEQ ID NO: 2405311 - RNA, 19 nt, Artificial Sequence
  Description of Artificial Sequence: Synthetic oligonucleotide
  Antisense strand to SEQ ID NO: 2405310
uucaguaagacccuccucu

SEQ ID NO: 2405312 - RNA, 19 nt, Artificial Sequence
  Description of Artificial Sequence: Synthetic oligonucleotide
  Sense strand starting at position 2716 of SEQ ID NO: 1886376
aauggaagcucuuggccaa

SEQ ID NO: 2405313 - RNA, 19 nt, Artificial Sequence
  Description of Artificial Sequence: Synthetic oligonucleotide
  Antisense strand to SEQ ID NO: 2405312
uuggccaagagcuuccauu

SEQ ID NO: 2405314 - RNA, 19 nt, Artificial Sequence
  Description of Artificial Sequence: Synthetic oligonucleotide
  Sense strand starting at position 2717 of SEQ ID NO: 1886376
auggaagcucuuggccaaa

SEQ ID NO: 2405315 - RNA, 19 nt, Artificial Sequence
  Description of Artificial Sequence: Synthetic oligonucleotide
  Antisense strand to SEQ ID NO: 2405314
uuuggccaagagcuuccau

SEQ ID NO: 2405316 - RNA, 19 nt, Artificial Sequence
  Description of Artificial Sequence: Synthetic oligonucleotide
  Sense strand starting at position 3658 of SEQ ID NO: 1886376
acagaaacaccuggauguu

SEQ ID NO: 2405317 - RNA, 19 nt, Artificial Sequence
  Description of Artificial Sequence: Synthetic oligonucleotide
  Antisense strand to SEQ ID NO: 2405316
aacauccagguguuucugu

SEQ ID NO: 2405318 - RNA, 19 nt, Artificial Sequence
  Description of Artificial Sequence: Synthetic oligonucleotide
  Sense strand starting at position 3670 of SEQ ID NO: 1886376
ggauguucaucaggcuaga

SEQ ID NO: 2405319 - RNA, 19 nt, Artificial Sequence
  Description of Artificial Sequence: Synthetic oligonucleotide
  Antisense strand to SEQ ID NO: 2405318
ucuagccugaugaacaucc

SEQ ID NO: 2405320 - RNA, 19 nt, Artificial Sequence
  Description of Artificial Sequence: Synthetic oligonucleotide
  Sense strand starting at position 3875 of SEQ ID NO: 1886376
augugagacugacuucuuu

SEQ ID NO: 2405321 - RNA, 19 nt, Artificial Sequence
  Description of Artificial Sequence: Synthetic oligonucleotide
  Antisense strand to SEQ ID NO: 2405320
aaagaagucagucucacau

SEQ ID NO: 2405322 - RNA, 19 nt, Artificial Sequence
  Description of Artificial Sequence: Synthetic oligonucleotide
  Sense strand starting at position 398 of SEQ ID NO: 1886377
gcuagcaauuggucuaauu

SEQ ID NO: 2405323 - RNA, 19 nt, Artificial Sequence
  Description of Artificial Sequence: Synthetic oligonucleotide
  Antisense strand to SEQ ID NO: 2405322
aauuagaccaauugcuagc

SEQ ID NO: 2405324 - RNA, 19 nt, Artificial Sequence
  Description of Artificial Sequence: Synthetic oligonucleotide
  Sense strand starting at position 472 of SEQ ID NO: 1886377
uuggacauguugugaauuu

SEQ ID NO: 2405325 - RNA, 19 nt, Artificial Sequence
  Description of Artificial Sequence: Synthetic oligonucleotide
  Antisense strand to SEQ ID NO: 2405324
aaauucacaacauguccaa

SEQ ID NO: 2405326 - RNA, 19 nt, Artificial Sequence
  Description of Artificial Sequence: Synthetic oligonucleotide
  Sense strand starting at position 771 of SEQ ID NO: 1886377
cucauauccuaaggugaaa

SEQ ID NO: 2405327 - RNA, 19 nt, Artificial Sequence
  Description of Artificial Sequence: Synthetic oligonucleotide
  Antisense strand to SEQ ID NO: 2405326
uuucaccuuaggauaugag

SEQ ID NO: 2405328 - RNA, 19 nt, Artificial Sequence
  Description of Artificial Sequence: Synthetic oligonucleotide
  Sense strand starting at position 1078 of SEQ ID NO: 1886377
uggcucugcuuaguaaacu

SEQ ID NO: 2405329 - RNA, 19 nt, Artificial Sequence
  Description of Artificial Sequence: Synthetic oligonucleotide
  Antisense strand to SEQ ID NO: 2405328
aguuuacuaagcagagcca

SEQ ID NO: 2405330 - RNA, 19 nt, Artificial Sequence
  Description of Artificial Sequence: Synthetic oligonucleotide
  Sense strand starting at position 1093 of SEQ ID NO: 1886377
aacuguagguguggauuua

SEQ ID NO: 2405331 - RNA, 19 nt, Artificial Sequence
  Description of Artificial Sequence: Synthetic oligonucleotide
  Antisense strand to SEQ ID NO: 2405330
uaaauccacaccuacaguu

SEQ ID NO: 2405332 - RNA, 19 nt, Artificial Sequence
  Description of Artificial Sequence: Synthetic oligonucleotide
  Sense strand starting at position 1228 of SEQ ID NO: 1886377
gggcacuaaugcgguuauu

SEQ ID NO: 2405333 - RNA, 19 nt, Artificial Sequence
  Description of Artificial Sequence: Synthetic oligonucleotide
  Antisense strand to SEQ ID NO: 2405332
aauaaccgcauuagugccc

SEQ ID NO: 2405334 - RNA, 19 nt, Artificial Sequence
  Description of Artificial Sequence: Synthetic oligonucleotide
  Sense strand starting at position 1231 of SEQ ID NO: 1886377
cacuaaugcgguuauucua

SEQ ID NO: 2405335 - RNA, 19 nt, Artificial Sequence
  Description of Artificial Sequence: Synthetic oligonucleotide
  Antisense strand to SEQ ID NO: 2405334
uagaauaaccgcauuagug

SEQ ID NO: 2405336 - RNA, 19 nt, Artificial Sequence
  Description of Artificial Sequence: Synthetic oligonucleotide
  Sense strand starting at position 2540 of SEQ ID NO: 1886377
aacagacgugccuaggaau

SEQ ID NO: 2405337 - RNA, 19 nt, Artificial Sequence
  Description of Artificial Sequence: Synthetic oligonucleotide
  Antisense strand to SEQ ID NO: 2405336
auuccuaggcacgucuguu

SEQ ID NO: 2405338 - RNA, 19 nt, Artificial Sequence
  Description of Artificial Sequence: Synthetic oligonucleotide
  Sense strand starting at position 2543 of SEQ ID NO: 1886377
agacgugccuaggaaucau

SEQ ID NO: 2405339 - RNA, 19 nt, Artificial Sequence
  Description of Artificial Sequence: Synthetic oligonucleotide
  Antisense strand to SEQ ID NO: 2405338
augauuccuaggcacgucu

SEQ ID NO: 2405340 - RNA, 19 nt, Artificial Sequence
  Description of Artificial Sequence: Synthetic oligonucleotide
  Sense strand starting at position 2575 of SEQ ID NO: 1886377
agaggagggucuuauugaa

SEQ ID NO: 2405341 - RNA, 19 nt, Artificial Sequence
  Description of Artificial Sequence: Synthetic oligonucleotide
  Antisense strand to SEQ ID NO: 2405340
uucaauaagacccuccucu

SEQ ID NO: 2405342 - RNA, 19 nt, Artificial Sequence
  Description of Artificial Sequence: Synthetic oligonucleotide
  Sense strand starting at position 3093 of SEQ ID NO: 1886377
aauggaagcucuucgccaa

SEQ ID NO: 2405343 - RNA, 19 nt, Artificial Sequence
  Description of Artificial Sequence: Synthetic oligonucleotide
  Antisense strand to SEQ ID NO: 2405342
uuggcgaagagcuuccauu

SEQ ID NO: 2405344 - RNA, 19 nt, Artificial Sequence
  Description of Artificial Sequence: Synthetic oligonucleotide
  Sense strand starting at position 3094 of SEQ ID NO: 1886377
auggaagcucuucgccaaa

SEQ ID NO: 2405345 - RNA, 19 nt, Artificial Sequence
  Description of Artificial Sequence: Synthetic oligonucleotide
  Antisense strand to SEQ ID NO: 2405344
uuuggcgaagagcuuccau

SEQ ID NO: 2405346 - RNA, 19 nt, Artificial Sequence
  Description of Artificial Sequence: Synthetic oligonucleotide
  Sense strand starting at position 3746 of SEQ ID NO: 1886377
ucgugauccgcuugucucu

SEQ ID NO: 2405347 - RNA, 19 nt, Artificial Sequence
  Description of Artificial Sequence: Synthetic oligonucleotide
  Antisense strand to SEQ ID NO: 2405346
agagacaagcggaucacga

SEQ ID NO: 2405348 - RNA, 19 nt, Artificial Sequence
  Description of Artificial Sequence: Synthetic oligonucleotide
  Sense strand starting at position 3920 of SEQ ID NO: 1886377
uuuagauuguuagaagguc

SEQ ID NO: 2405349 - RNA, 19 nt, Artificial Sequence
  Description of Artificial Sequence: Synthetic oligonucleotide
  Antisense strand to SEQ ID NO: 2405348
gaccuucuaacaaucuaaa

SEQ ID NO: 2405350 - RNA, 19 nt, Artificial Sequence
  Description of Artificial Sequence: Synthetic oligonucleotide
  Sense strand starting at position 3928 of SEQ ID NO: 1886377
guuagaaggucuucacgua

SEQ ID NO: 2405351 - RNA, 19 nt, Artificial Sequence
  Description of Artificial Sequence: Synthetic oligonucleotide
  Antisense strand to SEQ ID NO: 2405350
uacgugaagaccuucuaac

SEQ ID NO: 2405352 - RNA, 19 nt, Artificial Sequence
  Description of Artificial Sequence: Synthetic oligonucleotide
  Sense strand starting at position 51 of SEQ ID NO: 1886378
gaggauaugaccgggugaa

SEQ ID NO: 2405353 - RNA, 19 nt, Artificial Sequence
  Description of Artificial Sequence: Synthetic oligonucleotide
  Antisense strand to SEQ ID NO: 2405352
uucacccggucauauccuc

SEQ ID NO: 2405354 - RNA, 19 nt, Artificial Sequence
  Description of Artificial Sequence: Synthetic oligonucleotide
  Sense strand starting at position 52 of SEQ ID NO: 1886378
aggauaugaccgggugaag

SEQ ID NO: 2405355 - RNA, 19 nt, Artificial Sequence
  Description of Artificial Sequence: Synthetic oligonucleotide
  Antisense strand to SEQ ID NO: 2405354
cuucacccggucauauccu

SEQ ID NO: 2405356 - RNA, 19 nt, Artificial Sequence
  Description of Artificial Sequence: Synthetic oligonucleotide
  Sense strand starting at position 148 of SEQ ID NO: 1886378
gcagucugugaagacugau

SEQ ID NO: 2405357 - RNA, 19 nt, Artificial Sequence
  Description of Artificial Sequence: Synthetic oligonucleotide
  Antisense strand to SEQ ID NO: 2405356
aucagucuucacagacugc

SEQ ID NO: 2405358 - RNA, 19 nt, Artificial Sequence
  Description of Artificial Sequence: Synthetic oligonucleotide
  Sense strand starting at position 187 of SEQ ID NO: 1886378
auguuugcagcgcauuaau

SEQ ID NO: 2405359 - RNA, 19 nt, Artificial Sequence
  Description of Artificial Sequence: Synthetic oligonucleotide
  Antisense strand to SEQ ID NO: 2405358
auuaaugcgcugcaaacau

SEQ ID NO: 2405360 - RNA, 19 nt, Artificial Sequence
  Description of Artificial Sequence: Synthetic oligonucleotide
  Sense strand starting at position 190 of SEQ ID NO: 1886378
uuugcagcgcauuaauaau

SEQ ID NO: 2405361 - RNA, 19 nt, Artificial Sequence
  Description of Artificial Sequence: Synthetic oligonucleotide
  Antisense strand to SEQ ID NO: 2405360
auuauuaaugcgcugcaaa

SEQ ID NO: 2405362 - RNA, 19 nt, Artificial Sequence
  Description of Artificial Sequence: Synthetic oligonucleotide
  Sense strand starting at position 263 of SEQ ID NO: 1886378
ccuguaugcucauuacgga

SEQ ID NO: 2405363 - RNA, 19 nt, Artificial Sequence
  Description of Artificial Sequence: Synthetic oligonucleotide
  Antisense strand to SEQ ID NO: 2405362
uccguaaugagcauacagg

SEQ ID NO: 2405364 - RNA, 19 nt, Artificial Sequence
  Description of Artificial Sequence: Synthetic oligonucleotide
  Sense strand starting at position 268 of SEQ ID NO: 1886378
augcucauuacggagacua

SEQ ID NO: 2405365 - RNA, 19 nt, Artificial Sequence
  Description of Artificial Sequence: Synthetic oligonucleotide
  Antisense strand to SEQ ID NO: 2405364
uagucuccguaaugagcau

SEQ ID NO: 2405366 - RNA, 19 nt, Artificial Sequence
  Description of Artificial Sequence: Synthetic oligonucleotide
  Sense strand starting at position 278 of SEQ ID NO: 1886378
cggagacuaggcuauguaa

SEQ ID NO: 2405367 - RNA, 19 nt, Artificial Sequence
  Description of Artificial Sequence: Synthetic oligonucleotide
  Antisense strand to SEQ ID NO: 2405366
uuacauagccuagucuccg

SEQ ID NO: 2405368 - RNA, 19 nt, Artificial Sequence
  Description of Artificial Sequence: Synthetic oligonucleotide
  Sense strand starting at position 280 of SEQ ID NO: 1886378
gagacuaggcuauguaaau

SEQ ID NO: 2405369 - RNA, 19 nt, Artificial Sequence
  Description of Artificial Sequence: Synthetic oligonucleotide
  Antisense strand to SEQ ID NO: 2405368
auuuacauagccuagucuc

SEQ ID NO: 2405370 - RNA, 19 nt, Artificial Sequence
  Description of Artificial Sequence: Synthetic oligonucleotide
  Sense strand starting at position 281 of SEQ ID NO: 1886378
agacuaggcuauguaaauc

SEQ ID NO: 2405371 - RNA, 19 nt, Artificial Sequence
  Description of Artificial Sequence: Synthetic oligonucleotide
  Antisense strand to SEQ ID NO: 2405370
gauuuacauagccuagucu

SEQ ID NO: 2405372 - RNA, 19 nt, Artificial Sequence
  Description of Artificial Sequence: Synthetic oligonucleotide
  Sense strand starting at position 341 of SEQ ID NO: 1886378
uuaugugucagguauugua

SEQ ID NO: 2405373 - RNA, 19 nt, Artificial Sequence
  Description of Artificial Sequence: Synthetic oligonucleotide
  Antisense strand to SEQ ID NO: 2405372
uacaauaccugacacauaa

SEQ ID NO: 2405374 - RNA, 19 nt, Artificial Sequence
  Description of Artificial Sequence: Synthetic oligonucleotide
  Sense strand starting at position 423 of SEQ ID NO: 1886378
accuuugaguuugcuauua

SEQ ID NO: 2405375 - RNA, 19 nt, Artificial Sequence
  Description of Artificial Sequence: Synthetic oligonucleotide
  Antisense strand to SEQ ID NO: 2405374
uaauagcaaacucaaaggu

SEQ ID NO: 2405376 - RNA, 19 nt, Artificial Sequence
  Description of Artificial Sequence: Synthetic oligonucleotide
  Sense strand starting at position 517 of SEQ ID NO: 1886378
acauuaauuggugggucaa

SEQ ID NO: 2405377 - RNA, 19 nt, Artificial Sequence
  Description of Artificial Sequence: Synthetic oligonucleotide
  Antisense strand to SEQ ID NO: 2405376
uugacccaccaauuaaugu

SEQ ID NO: 2405378 - RNA, 19 nt, Artificial Sequence
  Description of Artificial Sequence: Synthetic oligonucleotide
  Sense strand starting at position 518 of SEQ ID NO: 1886378
cauuaauuggugggucaag

SEQ ID NO: 2405379 - RNA, 19 nt, Artificial Sequence
  Description of Artificial Sequence: Synthetic oligonucleotide
  Antisense strand to SEQ ID NO: 2405378
cuugacccaccaauuaaug

SEQ ID NO: 2405380 - RNA, 19 nt, Artificial Sequence
  Description of Artificial Sequence: Synthetic oligonucleotide
  Sense strand starting at position 519 of SEQ ID NO: 1886378
auuaauuggugggucaaga

SEQ ID NO: 2405381 - RNA, 19 nt, Artificial Sequence
  Description of Artificial Sequence: Synthetic oligonucleotide
  Antisense strand to SEQ ID NO: 2405380
ucuugacccaccaauuaau

SEQ ID NO: 2405382 - RNA, 19 nt, Artificial Sequence
  Description of Artificial Sequence: Synthetic oligonucleotide
  Sense strand starting at position 541 of SEQ ID NO: 1886378
gaagccaggucucugugau

SEQ ID NO: 2405383 - RNA, 19 nt, Artificial Sequence
  Description of Artificial Sequence: Synthetic oligonucleotide
  Antisense strand to SEQ ID NO: 2405382
aucacagagaccuggcuuc

SEQ ID NO: 2405384 - RNA, 19 nt, Artificial Sequence
  Description of Artificial Sequence: Synthetic oligonucleotide
  Sense strand starting at position 542 of SEQ ID NO: 1886378
aagccaggucucugugauu

SEQ ID NO: 2405385 - RNA, 19 nt, Artificial Sequence
  Description of Artificial Sequence: Synthetic oligonucleotide
  Antisense strand to SEQ ID NO: 2405384
aaucacagagaccuggcuu

SEQ ID NO: 2405386 - RNA, 19 nt, Artificial Sequence
  Description of Artificial Sequence: Synthetic oligonucleotide
  Sense strand starting at position 553 of SEQ ID NO: 1886378
cugugauuccacugaacaa

SEQ ID NO: 2405387 - RNA, 19 nt, Artificial Sequence
  Description of Artificial Sequence: Synthetic oligonucleotide
  Antisense strand to SEQ ID NO: 2405386
uuguucaguggaaucacag

SEQ ID NO: 2405388 - RNA, 19 nt, Artificial Sequence
  Description of Artificial Sequence: Synthetic oligonucleotide
  Sense strand starting at position 641 of SEQ ID NO: 1886378
gucccuuugcucgcggaau

SEQ ID NO: 2405389 - RNA, 19 nt, Artificial Sequence
  Description of Artificial Sequence: Synthetic oligonucleotide
  Antisense strand to SEQ ID NO: 2405388
auuccgcgagcaaagggac

SEQ ID NO: 2405390 - RNA, 19 nt, Artificial Sequence
  Description of Artificial Sequence: Synthetic oligonucleotide
  Sense strand starting at position 666 of SEQ ID NO: 1886378
uccagaacaucaucagagu

SEQ ID NO: 2405391 - RNA, 19 nt, Artificial Sequence
  Description of Artificial Sequence: Synthetic oligonucleotide
  Antisense strand to SEQ ID NO: 2405390
acucugaugauguucugga

SEQ ID NO: 2405392 - RNA, 19 nt, Artificial Sequence
  Description of Artificial Sequence: Synthetic oligonucleotide
  Sense strand starting at position 669 of SEQ ID NO: 1886378
agaacaucaucagagugaa

SEQ ID NO: 2405393 - RNA, 19 nt, Artificial Sequence
  Description of Artificial Sequence: Synthetic oligonucleotide
  Antisense strand to SEQ ID NO: 2405392
uucacucugaugauguucu

SEQ ID NO: 2405394 - RNA, 19 nt, Artificial Sequence
  Description of Artificial Sequence: Synthetic oligonucleotide
  Sense strand starting at position 690 of SEQ ID NO: 1886378
gugcuauguacacaguaaa

SEQ ID NO: 2405395 - RNA, 19 nt, Artificial Sequence
  Description of Artificial Sequence: Synthetic oligonucleotide
  Antisense strand to SEQ ID NO: 2405394
uuuacuguguacauagcac

SEQ ID NO: 2405396 - RNA, 19 nt, Artificial Sequence
  Description of Artificial Sequence: Synthetic oligonucleotide
  Sense strand starting at position 3041 of SEQ ID NO: 1886378
ugucuuggcucuguuccaa

SEQ ID NO: 2405397 - RNA, 19 nt, Artificial Sequence
  Description of Artificial Sequence: Synthetic oligonucleotide
  Antisense strand to SEQ ID NO: 2405396
uuggaacagagccaagaca

SEQ ID NO: 2405398 - RNA, 19 nt, Artificial Sequence
  Description of Artificial Sequence: Synthetic oligonucleotide
  Sense strand starting at position 3124 of SEQ ID NO: 1886378
gugucugucgcacagauga

SEQ ID NO: 2405399 - RNA, 19 nt, Artificial Sequence
  Description of Artificial Sequence: Synthetic oligonucleotide
  Antisense strand to SEQ ID NO: 2405398
ucaucugugcgacagacac

SEQ ID NO: 2405400 - RNA, 19 nt, Artificial Sequence
  Description of Artificial Sequence: Synthetic oligonucleotide
  Sense strand starting at position 3158 of SEQ ID NO: 1886378
ggguaauugccgcuuguuc

SEQ ID NO: 2405401 - RNA, 19 nt, Artificial Sequence
  Description of Artificial Sequence: Synthetic oligonucleotide
  Antisense strand to SEQ ID NO: 2405400
gaacaagcggcaauuaccc

SEQ ID NO: 2405402 - RNA, 19 nt, Artificial Sequence
  Description of Artificial Sequence: Synthetic oligonucleotide
  Sense strand starting at position 3180 of SEQ ID NO: 1886378
ggguuacguccuggacugu

SEQ ID NO: 2405403 - RNA, 19 nt, Artificial Sequence
  Description of Artificial Sequence: Synthetic oligonucleotide
  Antisense strand to SEQ ID NO: 2405402
acaguccaggacguaaccc

SEQ ID NO: 2405404 - RNA, 19 nt, Artificial Sequence
  Description of Artificial Sequence: Synthetic oligonucleotide
  Sense strand starting at position 3232 of SEQ ID NO: 1886378
ggguuuguguuccuggaac

SEQ ID NO: 2405405 - RNA, 19 nt, Artificial Sequence
  Description of Artificial Sequence: Synthetic oligonucleotide
  Antisense strand to SEQ ID NO: 2405404
guuccaggaacacaaaccc

SEQ ID NO: 2405406 - RNA, 19 nt, Artificial Sequence
  Description of Artificial Sequence: Synthetic oligonucleotide
  Sense strand starting at position 3234 of SEQ ID NO: 1886378
guuuguguuccuggaacuc

SEQ ID NO: 2405407 - RNA, 19 nt, Artificial Sequence
  Description of Artificial Sequence: Synthetic oligonucleotide
  Antisense strand to SEQ ID NO: 2405406
gaguuccaggaacacaaac

SEQ ID NO: 2405408 - RNA, 19 nt, Artificial Sequence
  Description of Artificial Sequence: Synthetic oligonucleotide
  Sense strand starting at position 3254 of SEQ ID NO: 1886378
agaaaugcccgcugaguga

SEQ ID NO: 2405409 - RNA, 19 nt, Artificial Sequence
  Description of Artificial Sequence: Synthetic oligonucleotide
  Antisense strand to SEQ ID NO: 2405408
ucacucagcgggcauuucu

SEQ ID NO: 2405410 - RNA, 19 nt, Artificial Sequence
  Description of Artificial Sequence: Synthetic oligonucleotide
  Sense strand starting at position 3317 of SEQ ID NO: 1886378
gugggagagguucacucuu

SEQ ID NO: 2405411 - RNA, 19 nt, Artificial Sequence
  Description of Artificial Sequence: Synthetic oligonucleotide
  Antisense strand to SEQ ID NO: 2405410
aagagugaaccucucccac

SEQ ID NO: 2405412 - RNA, 19 nt, Artificial Sequence
  Description of Artificial Sequence: Synthetic oligonucleotide
  Sense strand starting at position 3319 of SEQ ID NO: 1886378
gggagagguucacucuucu

SEQ ID NO: 2405413 - RNA, 19 nt, Artificial Sequence
  Description of Artificial Sequence: Synthetic oligonucleotide
  Antisense strand to SEQ ID NO: 2405412
agaagagugaaccucuccc

SEQ ID NO: 2405414 - RNA, 19 nt, Artificial Sequence
  Description of Artificial Sequence: Synthetic oligonucleotide
  Sense strand starting at position 3410 of SEQ ID NO: 1886378
uuuagaaaguuugccucau

SEQ ID NO: 2405415 - RNA, 19 nt, Artificial Sequence
  Description of Artificial Sequence: Synthetic oligonucleotide
  Antisense strand to SEQ ID NO: 2405414
augaggcaaacuuucuaaa

SEQ ID NO: 2405416 - RNA, 19 nt, Artificial Sequence
  Description of Artificial Sequence: Synthetic oligonucleotide
  Sense strand starting at position 3411 of SEQ ID NO: 1886378
uuagaaaguuugccucaug

SEQ ID NO: 2405417 - RNA, 19 nt, Artificial Sequence
  Description of Artificial Sequence: Synthetic oligonucleotide
  Antisense strand to SEQ ID NO: 2405416
caugaggcaaacuuucuaa

SEQ ID NO: 2405418 - RNA, 19 nt, Artificial Sequence
  Description of Artificial Sequence: Synthetic oligonucleotide
  Sense strand starting at position 3412 of SEQ ID NO: 1886378
uagaaaguuugccucauga

SEQ ID NO: 2405419 - RNA, 19 nt, Artificial Sequence
  Description of Artificial Sequence: Synthetic oligonucleotide
  Antisense strand to SEQ ID NO: 2405418
ucaugaggcaaacuuucua

SEQ ID NO: 2405420 - RNA, 19 nt, Artificial Sequence
  Description of Artificial Sequence: Synthetic oligonucleotide
  Sense strand starting at position 3414 of SEQ ID NO: 1886378
gaaaguuugccucaugaga

SEQ ID NO: 2405421 - RNA, 19 nt, Artificial Sequence
  Description of Artificial Sequence: Synthetic oligonucleotide
  Antisense strand to SEQ ID NO: 2405420
ucucaugaggcaaacuuuc

SEQ ID NO: 2405422 - RNA, 19 nt, Artificial Sequence
  Description of Artificial Sequence: Synthetic oligonucleotide
  Sense strand starting at position 3463 of SEQ ID NO: 1886378
auggaugucaugggaaucu

SEQ ID NO: 2405423 - RNA, 19 nt, Artificial Sequence
  Description of Artificial Sequence: Synthetic oligonucleotide
  Antisense strand to SEQ ID NO: 2405422
agauucccaugacauccau

SEQ ID NO: 2405424 - RNA, 19 nt, Artificial Sequence
  Description of Artificial Sequence: Synthetic oligonucleotide
  Sense strand starting at position 3631 of SEQ ID NO: 1886378
uagcacgaguuguuucuaa

SEQ ID NO: 2405425 - RNA, 19 nt, Artificial Sequence
  Description of Artificial Sequence: Synthetic oligonucleotide
  Antisense strand to SEQ ID NO: 2405424
uuagaaacaacucgugcua

SEQ ID NO: 2405426 - RNA, 19 nt, Artificial Sequence
  Description of Artificial Sequence: Synthetic oligonucleotide
  Sense strand starting at position 3707 of SEQ ID NO: 1886378
cguagucucaacugggaag

SEQ ID NO: 2405427 - RNA, 19 nt, Artificial Sequence
  Description of Artificial Sequence: Synthetic oligonucleotide
  Antisense strand to SEQ ID NO: 2405426
cuucccaguugagacuacg

SEQ ID NO: 2405428 - RNA, 19 nt, Artificial Sequence
  Description of Artificial Sequence: Synthetic oligonucleotide
  Sense strand starting at position 3729 of SEQ ID NO: 1886378
cagguaagaucccuaguuu

SEQ ID NO: 2405429 - RNA, 19 nt, Artificial Sequence
  Description of Artificial Sequence: Synthetic oligonucleotide
  Antisense strand to SEQ ID NO: 2405428
aaacuagggaucuuaccug

SEQ ID NO: 2405430 - RNA, 19 nt, Artificial Sequence
  Description of Artificial Sequence: Synthetic oligonucleotide
  Sense strand starting at position 3730 of SEQ ID NO: 1886378
agguaagaucccuaguuug

SEQ ID NO: 2405431 - RNA, 19 nt, Artificial Sequence
  Description of Artificial Sequence: Synthetic oligonucleotide
  Antisense strand to SEQ ID NO: 2405430
caaacuagggaucuuaccu

SEQ ID NO: 2405432 - RNA, 19 nt, Artificial Sequence
  Description of Artificial Sequence: Synthetic oligonucleotide
  Sense strand starting at position 484 of SEQ ID NO: 1886379
ccaagcacucuuuggaaua

SEQ ID NO: 2405433 - RNA, 19 nt, Artificial Sequence
  Description of Artificial Sequence: Synthetic oligonucleotide
  Antisense strand to SEQ ID NO: 2405432
uauuccaaagagugcuugg

SEQ ID NO: 2405434 - RNA, 19 nt, Artificial Sequence
  Description of Artificial Sequence: Synthetic oligonucleotide
  Sense strand starting at position 532 of SEQ ID NO: 1886379
acauuaacccuagguaguu

SEQ ID NO: 2405435 - RNA, 19 nt, Artificial Sequence
  Description of Artificial Sequence: Synthetic oligonucleotide
  Antisense strand to SEQ ID NO: 2405434
aacuaccuaggguuaaugu

SEQ ID NO: 2405436 - RNA, 19 nt, Artificial Sequence
  Description of Artificial Sequence: Synthetic oligonucleotide
  Sense strand starting at position 544 of SEQ ID NO: 1886379
gguaguugcaauuauauug

SEQ ID NO: 2405437 - RNA, 19 nt, Artificial Sequence
  Description of Artificial Sequence: Synthetic oligonucleotide
  Antisense strand to SEQ ID NO: 2405436
caauauaauugcaacuacc

SEQ ID NO: 2405438 - RNA, 19 nt, Artificial Sequence
  Description of Artificial Sequence: Synthetic oligonucleotide
  Sense strand starting at position 663 of SEQ ID NO: 1886379
ggccauguggucuaggaga

SEQ ID NO: 2405439 - RNA, 19 nt, Artificial Sequence
  Description of Artificial Sequence: Synthetic oligonucleotide
  Antisense strand to SEQ ID NO: 2405438
ucuccuagaccacauggcc

SEQ ID NO: 2405440 - RNA, 19 nt, Artificial Sequence
  Description of Artificial Sequence: Synthetic oligonucleotide
  Sense strand starting at position 707 of SEQ ID NO: 1886379
cauggacugucaguuaauc

SEQ ID NO: 2405441 - RNA, 19 nt, Artificial Sequence
  Description of Artificial Sequence: Synthetic oligonucleotide
  Antisense strand to SEQ ID NO: 2405440
gauuaacugacaguccaug

SEQ ID NO: 2405442 - RNA, 19 nt, Artificial Sequence
  Description of Artificial Sequence: Synthetic oligonucleotide
  Sense strand starting at position 968 of SEQ ID NO: 1886379
gcugaaguggcacaaucaa

SEQ ID NO: 2405443 - RNA, 19 nt, Artificial Sequence
  Description of Artificial Sequence: Synthetic oligonucleotide
  Antisense strand to SEQ ID NO: 2405442
uugauugugccacuucagc

SEQ ID NO: 2405444 - RNA, 19 nt, Artificial Sequence
  Description of Artificial Sequence: Synthetic oligonucleotide
  Sense strand starting at position 1000 of SEQ ID NO: 1886379
uucgaauuuccugggcuca

SEQ ID NO: 2405445 - RNA, 19 nt, Artificial Sequence
  Description of Artificial Sequence: Synthetic oligonucleotide
  Antisense strand to SEQ ID NO: 2405444
ugagcccaggaaauucgaa

SEQ ID NO: 2405446 - RNA, 19 nt, Artificial Sequence
  Description of Artificial Sequence: Synthetic oligonucleotide
  Sense strand starting at position 1174 of SEQ ID NO: 1886379
cuccuagguacugggauua

SEQ ID NO: 2405447 - RNA, 19 nt, Artificial Sequence
  Description of Artificial Sequence: Synthetic oligonucleotide
  Antisense strand to SEQ ID NO: 2405446
uaaucccaguaccuaggag

SEQ ID NO: 2405448 - RNA, 19 nt, Artificial Sequence
  Description of Artificial Sequence: Synthetic oligonucleotide
  Sense strand starting at position 1211 of SEQ ID NO: 1886379
ccagcuugaucuguuauuu

SEQ ID NO: 2405449 - RNA, 19 nt, Artificial Sequence
  Description of Artificial Sequence: Synthetic oligonucleotide
  Antisense strand to SEQ ID NO: 2405448
aaauaacagaucaagcugg

SEQ ID NO: 2405450 - RNA, 19 nt, Artificial Sequence
  Description of Artificial Sequence: Synthetic oligonucleotide
  Sense strand starting at position 1249 of SEQ ID NO: 1886379
gguccuaucuaacccuaga

SEQ ID NO: 2405451 - RNA, 19 nt, Artificial Sequence
  Description of Artificial Sequence: Synthetic oligonucleotide
  Antisense strand to SEQ ID NO: 2405450
ucuaggguuagauaggacc

SEQ ID NO: 2405452 - RNA, 19 nt, Artificial Sequence
  Description of Artificial Sequence: Synthetic oligonucleotide
  Sense strand starting at position 1410 of SEQ ID NO: 1886379
agacucuaccucuaugagu

SEQ ID NO: 2405453 - RNA, 19 nt, Artificial Sequence
  Description of Artificial Sequence: Synthetic oligonucleotide
  Antisense strand to SEQ ID NO: 2405452
acucauagagguagagucu

SEQ ID NO: 2405454 - RNA, 19 nt, Artificial Sequence
  Description of Artificial Sequence: Synthetic oligonucleotide
  Sense strand starting at position 1412 of SEQ ID NO: 1886379
acucuaccucuaugaguug

SEQ ID NO: 2405455 - RNA, 19 nt, Artificial Sequence
  Description of Artificial Sequence: Synthetic oligonucleotide
  Antisense strand to SEQ ID NO: 2405454
caacucauagagguagagu

SEQ ID NO: 2405456 - RNA, 19 nt, Artificial Sequence
  Description of Artificial Sequence: Synthetic oligonucleotide
  Sense strand starting at position 1426 of SEQ ID NO: 1886379
aguuguauuaaauggauga

SEQ ID NO: 2405457 - RNA, 19 nt, Artificial Sequence
  Description of Artificial Sequence: Synthetic oligonucleotide
  Antisense strand to SEQ ID NO: 2405456
ucauccauuuaauacaacu

SEQ ID NO: 2405458 - RNA, 19 nt, Artificial Sequence
  Description of Artificial Sequence: Synthetic oligonucleotide
  Sense strand starting at position 1427 of SEQ ID NO: 1886379
guuguauuaaauggaugaa

SEQ ID NO: 2405459 - RNA, 19 nt, Artificial Sequence
  Description of Artificial Sequence: Synthetic oligonucleotide
  Antisense strand to SEQ ID NO: 2405458
uucauccauuuaauacaac

SEQ ID NO: 2405460 - RNA, 19 nt, Artificial Sequence
  Description of Artificial Sequence: Synthetic oligonucleotide
  Sense strand starting at position 1440 of SEQ ID NO: 1886379
gaugaauagcagcaaaguu

SEQ ID NO: 2405461 - RNA, 19 nt, Artificial Sequence
  Description of Artificial Sequence: Synthetic oligonucleotide
  Antisense strand to SEQ ID NO: 2405460
aacuuugcugcuauucauc

SEQ ID NO: 2405462 - RNA, 19 nt, Artificial Sequence
  Description of Artificial Sequence: Synthetic oligonucleotide
  Sense strand starting at position 1686 of SEQ ID NO: 1886379
gcuuuaugcaaagaagggu

SEQ ID NO: 2405463 - RNA, 19 nt, Artificial Sequence
  Description of Artificial Sequence: Synthetic oligonucleotide
  Antisense strand to SEQ ID NO: 2405462
acccuucuuugcauaaagc

SEQ ID NO: 2405464 - RNA, 19 nt, Artificial Sequence
  Description of Artificial Sequence: Synthetic oligonucleotide
  Sense strand starting at position 1874 of SEQ ID NO: 1886379
ccgagagaucugcagccaa

SEQ ID NO: 2405465 - RNA, 19 nt, Artificial Sequence
  Description of Artificial Sequence: Synthetic oligonucleotide
  Antisense strand to SEQ ID NO: 2405464
uuggcugcagaucucucgg

SEQ ID NO: 2405466 - RNA, 19 nt, Artificial Sequence
  Description of Artificial Sequence: Synthetic oligonucleotide
  Sense strand starting at position 2602 of SEQ ID NO: 1886379
guaugaucccaggagugca

SEQ ID NO: 2405467 - RNA, 19 nt, Artificial Sequence
  Description of Artificial Sequence: Synthetic oligonucleotide
  Antisense strand to SEQ ID NO: 2405466
ugcacuccugggaucauac

SEQ ID NO: 2405468 - RNA, 19 nt, Artificial Sequence
  Description of Artificial Sequence: Synthetic oligonucleotide
  Sense strand starting at position 2795 of SEQ ID NO: 1886379
cuugucagauauuugucuu

SEQ ID NO: 2405469 - RNA, 19 nt, Artificial Sequence
  Description of Artificial Sequence: Synthetic oligonucleotide
  Antisense strand to SEQ ID NO: 2405468
aagacaaauaucugacaag

SEQ ID NO: 2405470 - RNA, 19 nt, Artificial Sequence
  Description of Artificial Sequence: Synthetic oligonucleotide
  Sense strand starting at position 2839 of SEQ ID NO: 1886379
cuugcuguggucgcuuauu

SEQ ID NO: 2405471 - RNA, 19 nt, Artificial Sequence
  Description of Artificial Sequence: Synthetic oligonucleotide
  Antisense strand to SEQ ID NO: 2405470
aauaagcgaccacagcaag

SEQ ID NO: 2405472 - RNA, 19 nt, Artificial Sequence
  Description of Artificial Sequence: Synthetic oligonucleotide
  Sense strand starting at position 2844 of SEQ ID NO: 1886379
uguggucgcuuauuuaaca

SEQ ID NO: 2405473 - RNA, 19 nt, Artificial Sequence
  Description of Artificial Sequence: Synthetic oligonucleotide
  Antisense strand to SEQ ID NO: 2405472
uguuaaauaagcgaccaca

SEQ ID NO: 2405474 - RNA, 19 nt, Artificial Sequence
  Description of Artificial Sequence: Synthetic oligonucleotide
  Sense strand starting at position 2891 of SEQ ID NO: 1886379
gggagagacuguuccuaau

SEQ ID NO: 2405475 - RNA, 19 nt, Artificial Sequence
  Description of Artificial Sequence: Synthetic oligonucleotide
  Antisense strand to SEQ ID NO: 2405474
auuaggaacagucucuccc

SEQ ID NO: 2405476 - RNA, 19 nt, Artificial Sequence
  Description of Artificial Sequence: Synthetic oligonucleotide
  Sense strand starting at position 2893 of SEQ ID NO: 1886379
gagagacuguuccuaauau

SEQ ID NO: 2405477 - RNA, 19 nt, Artificial Sequence
  Description of Artificial Sequence: Synthetic oligonucleotide
  Antisense strand to SEQ ID NO: 2405476
auauuaggaacagucucuc

SEQ ID NO: 2405478 - RNA, 19 nt, Artificial Sequence
  Description of Artificial Sequence: Synthetic oligonucleotide
  Sense strand starting at position 2901 of SEQ ID NO: 1886379
guuccuaauauccgaggga

SEQ ID NO: 2405479 - RNA, 19 nt, Artificial Sequence
  Description of Artificial Sequence: Synthetic oligonucleotide
  Antisense strand to SEQ ID NO: 2405478
ucccucggauauuaggaac

SEQ ID NO: 2405480 - RNA, 19 nt, Artificial Sequence
  Description of Artificial Sequence: Synthetic oligonucleotide
  Sense strand starting at position 2904 of SEQ ID NO: 1886379
ccuaauauccgagggagau

SEQ ID NO: 2405481 - RNA, 19 nt, Artificial Sequence
  Description of Artificial Sequence: Synthetic oligonucleotide
  Antisense strand to SEQ ID NO: 2405480
aucucccucggauauuagg

SEQ ID NO: 2405482 - RNA, 19 nt, Artificial Sequence
  Description of Artificial Sequence: Synthetic oligonucleotide
  Sense strand starting at position 2968 of SEQ ID NO: 1886379
ucugauacgauugguaaua

SEQ ID NO: 2405483 - RNA, 19 nt, Artificial Sequence
  Description of Artificial Sequence: Synthetic oligonucleotide
  Antisense strand to SEQ ID NO: 2405482
uauuaccaaucguaucaga

SEQ ID NO: 2405484 - RNA, 19 nt, Artificial Sequence
  Description of Artificial Sequence: Synthetic oligonucleotide
  Sense strand starting at position 2969 of SEQ ID NO: 1886379
cugauacgauugguaauau

SEQ ID NO: 2405485 - RNA, 19 nt, Artificial Sequence
  Description of Artificial Sequence: Synthetic oligonucleotide
  Antisense strand to SEQ ID NO: 2405484
auauuaccaaucguaucag

SEQ ID NO: 2405486 - RNA, 19 nt, Artificial Sequence
  Description of Artificial Sequence: Synthetic oligonucleotide
  Sense strand starting at position 3005 of SEQ ID NO: 1886379
cuaacaucccaguggguga

SEQ ID NO: 2405487 - RNA, 19 nt, Artificial Sequence
  Description of Artificial Sequence: Synthetic oligonucleotide
  Antisense strand to SEQ ID NO: 2405486
ucacccacugggauguuag

SEQ ID NO: 2405488 - RNA, 19 nt, Artificial Sequence
  Description of Artificial Sequence: Synthetic oligonucleotide
  Sense strand starting at position 3032 of SEQ ID NO: 1886379
uguguaaacgcugugguau

SEQ ID NO: 2405489 - RNA, 19 nt, Artificial Sequence
  Description of Artificial Sequence: Synthetic oligonucleotide
  Antisense strand to SEQ ID NO: 2405488
auaccacagcguuuacaca

SEQ ID NO: 2405490 - RNA, 19 nt, Artificial Sequence
  Description of Artificial Sequence: Synthetic oligonucleotide
  Sense strand starting at position 3157 of SEQ ID NO: 1886379
gggaguacacacugugaua

SEQ ID NO: 2405491 - RNA, 19 nt, Artificial Sequence
  Description of Artificial Sequence: Synthetic oligonucleotide
  Antisense strand to SEQ ID NO: 2405490
uaucacaguguguacuccc

SEQ ID NO: 2405492 - RNA, 19 nt, Artificial Sequence
  Description of Artificial Sequence: Synthetic oligonucleotide
  Sense strand starting at position 3255 of SEQ ID NO: 1886379
agagauauauuacuccagu

SEQ ID NO: 2405493 - RNA, 19 nt, Artificial Sequence
  Description of Artificial Sequence: Synthetic oligonucleotide
  Antisense strand to SEQ ID NO: 2405492
acuggaguaauauaucucu

SEQ ID NO: 2405494 - RNA, 19 nt, Artificial Sequence
  Description of Artificial Sequence: Synthetic oligonucleotide
  Sense strand starting at position 3256 of SEQ ID NO: 1886379
gagauauauuacuccagug

SEQ ID NO: 2405495 - RNA, 19 nt, Artificial Sequence
  Description of Artificial Sequence: Synthetic oligonucleotide
  Antisense strand to SEQ ID NO: 2405494
cacuggaguaauauaucuc

SEQ ID NO: 2405496 - RNA, 19 nt, Artificial Sequence
  Description of Artificial Sequence: Synthetic oligonucleotide
  Sense strand starting at position 3289 of SEQ ID NO: 1886379
cacagaauucgugauaucc

SEQ ID NO: 2405497 - RNA, 19 nt, Artificial Sequence
  Description of Artificial Sequence: Synthetic oligonucleotide
  Antisense strand to SEQ ID NO: 2405496
ggauaucacgaauucugug

SEQ ID NO: 2405498 - RNA, 19 nt, Artificial Sequence
  Description of Artificial Sequence: Synthetic oligonucleotide
  Sense strand starting at position 3324 of SEQ ID NO: 1886379
cuaauaucacagugagagu

SEQ ID NO: 2405499 - RNA, 19 nt, Artificial Sequence
  Description of Artificial Sequence: Synthetic oligonucleotide
  Antisense strand to SEQ ID NO: 2405498
acucucacugugauauuag

SEQ ID NO: 2405500 - RNA, 19 nt, Artificial Sequence
  Description of Artificial Sequence: Synthetic oligonucleotide
  Sense strand starting at position 3424 of SEQ ID NO: 1886379
cguaauauucuaugaagau

SEQ ID NO: 2405501 - RNA, 19 nt, Artificial Sequence
  Description of Artificial Sequence: Synthetic oligonucleotide
  Antisense strand to SEQ ID NO: 2405500
aucuucauagaauauuacg

SEQ ID NO: 2405502 - RNA, 19 nt, Artificial Sequence
  Description of Artificial Sequence: Synthetic oligonucleotide
  Sense strand starting at position 3487 of SEQ ID NO: 1886379
uguuauauccuagggagau

SEQ ID NO: 2405503 - RNA, 19 nt, Artificial Sequence
  Description of Artificial Sequence: Synthetic oligonucleotide
  Antisense strand to SEQ ID NO: 2405502
aucucccuaggauauaaca

SEQ ID NO: 2405504 - RNA, 19 nt, Artificial Sequence
  Description of Artificial Sequence: Synthetic oligonucleotide
  Sense strand starting at position 3589 of SEQ ID NO: 1886379
gggaguacacccuguaaua

SEQ ID NO: 2405505 - RNA, 19 nt, Artificial Sequence
  Description of Artificial Sequence: Synthetic oligonucleotide
  Antisense strand to SEQ ID NO: 2405504
uauuacaggguguacuccc

SEQ ID NO: 2405506 - RNA, 19 nt, Artificial Sequence
  Description of Artificial Sequence: Synthetic oligonucleotide
  Sense strand starting at position 3778 of SEQ ID NO: 1886379
ggguguauacccuaugaua

SEQ ID NO: 2405507 - RNA, 19 nt, Artificial Sequence
  Description of Artificial Sequence: Synthetic oligonucleotide
  Antisense strand to SEQ ID NO: 2405506
uaucauaggguauacaccc

SEQ ID NO: 2405508 - RNA, 19 nt, Artificial Sequence
  Description of Artificial Sequence: Synthetic oligonucleotide
  Sense strand starting at position 3806 of SEQ ID NO: 1886379
auaucuuaagaagguagua

SEQ ID NO: 2405509 - RNA, 19 nt, Artificial Sequence
  Description of Artificial Sequence: Synthetic oligonucleotide
  Antisense strand to SEQ ID NO: 2405508
uacuaccuucuuaagauau

SEQ ID NO: 2405510 - RNA, 19 nt, Artificial Sequence
  Description of Artificial Sequence: Synthetic oligonucleotide
  Sense strand starting at position 3979 of SEQ ID NO: 1886379
ugugauaugauucgaaaua

SEQ ID NO: 2405511 - RNA, 19 nt, Artificial Sequence
  Description of Artificial Sequence: Synthetic oligonucleotide
  Antisense strand to SEQ ID NO: 2405510
uauuucgaaucauaucaca

SEQ ID NO: 2405512 - RNA, 19 nt, Artificial Sequence
  Description of Artificial Sequence: Synthetic oligonucleotide
  Sense strand starting at position 1117 of SEQ ID NO: 1886380
ucucuaugcuggucucgau

SEQ ID NO: 2405513 - RNA, 19 nt, Artificial Sequence
  Description of Artificial Sequence: Synthetic oligonucleotide
  Antisense strand to SEQ ID NO: 2405512
aucgagaccagcauagaga

SEQ ID NO: 2405514 - RNA, 19 nt, Artificial Sequence
  Description of Artificial Sequence: Synthetic oligonucleotide
  Sense strand starting at position 1420 of SEQ ID NO: 1886380
aguuguauuaaauggauga

SEQ ID NO: 2405515 - RNA, 19 nt, Artificial Sequence
  Description of Artificial Sequence: Synthetic oligonucleotide
  Antisense strand to SEQ ID NO: 2405514
ucauccauuuaauacaacu

SEQ ID NO: 2405516 - RNA, 19 nt, Artificial Sequence
  Description of Artificial Sequence: Synthetic oligonucleotide
  Sense strand starting at position 1421 of SEQ ID NO: 1886380
guuguauuaaauggaugaa

SEQ ID NO: 2405517 - RNA, 19 nt, Artificial Sequence
  Description of Artificial Sequence: Synthetic oligonucleotide
  Antisense strand to SEQ ID NO: 2405516
uucauccauuuaauacaac

SEQ ID NO: 2405518 - RNA, 19 nt, Artificial Sequence
  Description of Artificial Sequence: Synthetic oligonucleotide
  Sense strand starting at position 1434 of SEQ ID NO: 1886380
gaugaauagcagcaaaguu

SEQ ID NO: 2405519 - RNA, 19 nt, Artificial Sequence
  Description of Artificial Sequence: Synthetic oligonucleotide
  Antisense strand to SEQ ID NO: 2405518
aacuuugcugcuauucauc

SEQ ID NO: 2405520 - RNA, 19 nt, Artificial Sequence
  Description of Artificial Sequence: Synthetic oligonucleotide
  Sense strand starting at position 1680 of SEQ ID NO: 1886380
gcuuuaugcaaagaagggu

SEQ ID NO: 2405521 - RNA, 19 nt, Artificial Sequence
  Description of Artificial Sequence: Synthetic oligonucleotide
  Antisense strand to SEQ ID NO: 2405520
acccuucuuugcauaaagc

SEQ ID NO: 2405522 - RNA, 19 nt, Artificial Sequence
  Description of Artificial Sequence: Synthetic oligonucleotide
  Sense strand starting at position 2256 of SEQ ID NO: 1886380
cagugacaccuccagaguu

SEQ ID NO: 2405523 - RNA, 19 nt, Artificial Sequence
  Description of Artificial Sequence: Synthetic oligonucleotide
  Antisense strand to SEQ ID NO: 2405522
aacucuggaggugucacug

SEQ ID NO: 2405524 - RNA, 19 nt, Artificial Sequence
  Description of Artificial Sequence: Synthetic oligonucleotide
  Sense strand starting at position 2792 of SEQ ID NO: 1886380
gucagauauuugucgucau

SEQ ID NO: 2405525 - RNA, 19 nt, Artificial Sequence
  Description of Artificial Sequence: Synthetic oligonucleotide
  Antisense strand to SEQ ID NO: 2405524
augacgacaaauaucugac

SEQ ID NO: 2405526 - RNA, 19 nt, Artificial Sequence
  Description of Artificial Sequence: Synthetic oligonucleotide
  Sense strand starting at position 2793 of SEQ ID NO: 1886380
ucagauauuugucgucauu

SEQ ID NO: 2405527 - RNA, 19 nt, Artificial Sequence
  Description of Artificial Sequence: Synthetic oligonucleotide
  Antisense strand to SEQ ID NO: 2405526
aaugacgacaaauaucuga

SEQ ID NO: 2405528 - RNA, 19 nt, Artificial Sequence
  Description of Artificial Sequence: Synthetic oligonucleotide
  Sense strand starting at position 3105 of SEQ ID NO: 1886380
uauuauucguaauauccga

SEQ ID NO: 2405529 - RNA, 19 nt, Artificial Sequence
  Description of Artificial Sequence: Synthetic oligonucleotide
  Antisense strand to SEQ ID NO: 2405528
ucggauauuacgaauaaua

SEQ ID NO: 2405530 - RNA, 19 nt, Artificial Sequence
  Description of Artificial Sequence: Synthetic oligonucleotide
  Sense strand starting at position 3109 of SEQ ID NO: 1886380
auucguaauauccgaagga

SEQ ID NO: 2405531 - RNA, 19 nt, Artificial Sequence
  Description of Artificial Sequence: Synthetic oligonucleotide
  Antisense strand to SEQ ID NO: 2405530
uccuucggauauuacgaau

SEQ ID NO: 2405532 - RNA, 19 nt, Artificial Sequence
  Description of Artificial Sequence: Synthetic oligonucleotide
  Sense strand starting at position 3110 of SEQ ID NO: 1886380
uucguaauauccgaaggag

SEQ ID NO: 2405533 - RNA, 19 nt, Artificial Sequence
  Description of Artificial Sequence: Synthetic oligonucleotide
  Antisense strand to SEQ ID NO: 2405532
cuccuucggauauuacgaa

SEQ ID NO: 2405534 - RNA, 19 nt, Artificial Sequence
  Description of Artificial Sequence: Synthetic oligonucleotide
  Sense strand starting at position 3113 of SEQ ID NO: 1886380
guaauauccgaaggagauu

SEQ ID NO: 2405535 - RNA, 19 nt, Artificial Sequence
  Description of Artificial Sequence: Synthetic oligonucleotide
  Antisense strand to SEQ ID NO: 2405534
aaucuccuucggauauuac

SEQ ID NO: 2405536 - RNA, 19 nt, Artificial Sequence
  Description of Artificial Sequence: Synthetic oligonucleotide
  Sense strand starting at position 3425 of SEQ ID NO: 1886380
uucguaauauucuaugaag

SEQ ID NO: 2405537 - RNA, 19 nt, Artificial Sequence
  Description of Artificial Sequence: Synthetic oligonucleotide
  Antisense strand to SEQ ID NO: 2405536
cuucauagaauauuacgaa

SEQ ID NO: 2405538 - RNA, 19 nt, Artificial Sequence
  Description of Artificial Sequence: Synthetic oligonucleotide
  Sense strand starting at position 3427 of SEQ ID NO: 1886380
cguaauauucuaugaagau

SEQ ID NO: 2405539 - RNA, 19 nt, Artificial Sequence
  Description of Artificial Sequence: Synthetic oligonucleotide
  Antisense strand to SEQ ID NO: 2405538
aucuucauagaauauuacg

SEQ ID NO: 2405540 - RNA, 19 nt, Artificial Sequence
  Description of Artificial Sequence: Synthetic oligonucleotide
  Sense strand starting at position 162 of SEQ ID NO: 1886382
ugcccaguguccugugaag

SEQ ID NO: 2405541 - RNA, 19 nt, Artificial Sequence
  Description of Artificial Sequence: Synthetic oligonucleotide
  Antisense strand to SEQ ID NO: 2405540
cuucacaggacacugggca

SEQ ID NO: 2405542 - RNA, 19 nt, Artificial Sequence
  Description of Artificial Sequence: Synthetic oligonucleotide
  Sense strand starting at position 497 of SEQ ID NO: 1886382
gccagugagucccaacuaa

SEQ ID NO: 2405543 - RNA, 19 nt, Artificial Sequence
  Description of Artificial Sequence: Synthetic oligonucleotide
  Antisense strand to SEQ ID NO: 2405542
uuaguugggacucacuggc

SEQ ID NO: 2405544 - RNA, 19 nt, Artificial Sequence
  Description of Artificial Sequence: Synthetic oligonucleotide
  Sense strand starting at position 540 of SEQ ID NO: 1886382
gccacuggcccagauguaa

SEQ ID NO: 2405545 - RNA, 19 nt, Artificial Sequence
  Description of Artificial Sequence: Synthetic oligonucleotide
  Antisense strand to SEQ ID NO: 2405544
uuacaucugggccaguggc

SEQ ID NO: 2405546 - RNA, 19 nt, Artificial Sequence
  Description of Artificial Sequence: Synthetic oligonucleotide
  Sense strand starting at position 782 of SEQ ID NO: 1886382
ucucgcuccgagcagaauu

SEQ ID NO: 2405547 - RNA, 19 nt, Artificial Sequence
  Description of Artificial Sequence: Synthetic oligonucleotide
  Antisense strand to SEQ ID NO: 2405546
aauucugcucggagcgaga

SEQ ID NO: 2405548 - RNA, 19 nt, Artificial Sequence
  Description of Artificial Sequence: Synthetic oligonucleotide
  Sense strand starting at position 792 of SEQ ID NO: 1886382
agcagaauuucucagucug

SEQ ID NO: 2405549 - RNA, 19 nt, Artificial Sequence
  Description of Artificial Sequence: Synthetic oligonucleotide
  Antisense strand to SEQ ID NO: 2405548
cagacugagaaauucugcu

SEQ ID NO: 2405550 - RNA, 19 nt, Artificial Sequence
  Description of Artificial Sequence: Synthetic oligonucleotide
  Sense strand starting at position 1325 of SEQ ID NO: 1886382
gcucuucucuaaggaguuc

SEQ ID NO: 2405551 - RNA, 19 nt, Artificial Sequence
  Description of Artificial Sequence: Synthetic oligonucleotide
  Antisense strand to SEQ ID NO: 2405550
gaacuccuuagagaagagc

SEQ ID NO: 2405552 - RNA, 19 nt, Artificial Sequence
  Description of Artificial Sequence: Synthetic oligonucleotide
  Sense strand starting at position 1331 of SEQ ID NO: 1886382
cucuaaggaguucgguuau

SEQ ID NO: 2405553 - RNA, 19 nt, Artificial Sequence
  Description of Artificial Sequence: Synthetic oligonucleotide
  Antisense strand to SEQ ID NO: 2405552
auaaccgaacuccuuagag

SEQ ID NO: 2405554 - RNA, 19 nt, Artificial Sequence
  Description of Artificial Sequence: Synthetic oligonucleotide
  Sense strand starting at position 1337 of SEQ ID NO: 1886382
ggaguucgguuaucagguu

SEQ ID NO: 2405555 - RNA, 19 nt, Artificial Sequence
  Description of Artificial Sequence: Synthetic oligonucleotide
  Antisense strand to SEQ ID NO: 2405554
aaccugauaaccgaacucc

SEQ ID NO: 2405556 - RNA, 19 nt, Artificial Sequence
  Description of Artificial Sequence: Synthetic oligonucleotide
  Sense strand starting at position 1528 of SEQ ID NO: 1886382
ggcaaaugugcgcgugugu

SEQ ID NO: 2405557 - RNA, 19 nt, Artificial Sequence
  Description of Artificial Sequence: Synthetic oligonucleotide
  Antisense strand to SEQ ID NO: 2405556
acacacgcgcacauuugcc

SEQ ID NO: 2405558 - RNA, 19 nt, Artificial Sequence
  Description of Artificial Sequence: Synthetic oligonucleotide
  Sense strand starting at position 1571 of SEQ ID NO: 1886382
agagcaucugcagagauca

SEQ ID NO: 2405559 - RNA, 19 nt, Artificial Sequence
  Description of Artificial Sequence: Synthetic oligonucleotide
  Antisense strand to SEQ ID NO: 2405558
ugaucucugcagaugcucu

SEQ ID NO: 2405560 - RNA, 19 nt, Artificial Sequence
  Description of Artificial Sequence: Synthetic oligonucleotide
  Sense strand starting at position 1585 of SEQ ID NO: 1886382
gaucauuguggccgucaga

SEQ ID NO: 2405561 - RNA, 19 nt, Artificial Sequence
  Description of Artificial Sequence: Synthetic oligonucleotide
  Antisense strand to SEQ ID NO: 2405560
ucugacggccacaaugauc

SEQ ID NO: 2405562 - RNA, 19 nt, Artificial Sequence
  Description of Artificial Sequence: Synthetic oligonucleotide
  Sense strand starting at position 1658 of SEQ ID NO: 1886382
ggaguuaccugagacagac

SEQ ID NO: 2405563 - RNA, 19 nt, Artificial Sequence
  Description of Artificial Sequence: Synthetic oligonucleotide
  Antisense strand to SEQ ID NO: 2405562
gucugucucagguaacucc

SEQ ID NO: 2405564 - RNA, 19 nt, Artificial Sequence
  Description of Artificial Sequence: Synthetic oligonucleotide
  Sense strand starting at position 1675 of SEQ ID NO: 1886382
accuuugacgucugaagac

SEQ ID NO: 2405565 - RNA, 19 nt, Artificial Sequence
  Description of Artificial Sequence: Synthetic oligonucleotide
  Antisense strand to SEQ ID NO: 2405564
gucuucagacgucaaaggu

SEQ ID NO: 2405566 - RNA, 19 nt, Artificial Sequence
  Description of Artificial Sequence: Synthetic oligonucleotide
  Sense strand starting at position 1693 of SEQ ID NO: 1886382
caucguuguggccgucaga

SEQ ID NO: 2405567 - RNA, 19 nt, Artificial Sequence
  Description of Artificial Sequence: Synthetic oligonucleotide
  Antisense strand to SEQ ID NO: 2405566
ucugacggccacaacgaug

SEQ ID NO: 2405568 - RNA, 19 nt, Artificial Sequence
  Description of Artificial Sequence: Synthetic oligonucleotide
  Sense strand starting at position 1700 of SEQ ID NO: 1886382
guggccgucagaggaguua

SEQ ID NO: 2405569 - RNA, 19 nt, Artificial Sequence
  Description of Artificial Sequence: Synthetic oligonucleotide
  Antisense strand to SEQ ID NO: 2405568
uaacuccucugacggccac

SEQ ID NO: 2405570 - RNA, 19 nt, Artificial Sequence
  Description of Artificial Sequence: Synthetic oligonucleotide
  Sense strand starting at position 2112 of SEQ ID NO: 1886382
ucgcuaauggccugugaca

SEQ ID NO: 2405571 - RNA, 19 nt, Artificial Sequence
  Description of Artificial Sequence: Synthetic oligonucleotide
  Antisense strand to SEQ ID NO: 2405570
ugucacaggccauuagcga

SEQ ID NO: 2405572 - RNA, 19 nt, Artificial Sequence
  Description of Artificial Sequence: Synthetic oligonucleotide
  Sense strand starting at position 2114 of SEQ ID NO: 1886382
gcuaauggccugugacaaa

SEQ ID NO: 2405573 - RNA, 19 nt, Artificial Sequence
  Description of Artificial Sequence: Synthetic oligonucleotide
  Antisense strand to SEQ ID NO: 2405572
uuugucacaggccauuagc

SEQ ID NO: 2405574 - RNA, 19 nt, Artificial Sequence
  Description of Artificial Sequence: Synthetic oligonucleotide
  Sense strand starting at position 2188 of SEQ ID NO: 1886382
uccuguuugcagcacauua

SEQ ID NO: 2405575 - RNA, 19 nt, Artificial Sequence
  Description of Artificial Sequence: Synthetic oligonucleotide
  Antisense strand to SEQ ID NO: 2405574
uaaugugcugcaaacagga

SEQ ID NO: 2405576 - RNA, 19 nt, Artificial Sequence
  Description of Artificial Sequence: Synthetic oligonucleotide
  Sense strand starting at position 2319 of SEQ ID NO: 1886382
gaguguuuccacgcucgca

SEQ ID NO: 2405577 - RNA, 19 nt, Artificial Sequence
  Description of Artificial Sequence: Synthetic oligonucleotide
  Antisense strand to SEQ ID NO: 2405576
ugcgagcguggaaacacuc

SEQ ID NO: 2405578 - RNA, 19 nt, Artificial Sequence
  Description of Artificial Sequence: Synthetic oligonucleotide
  Sense strand starting at position 2831 of SEQ ID NO: 1886382
gagggaugcucagagcaag

SEQ ID NO: 2405579 - RNA, 19 nt, Artificial Sequence
  Description of Artificial Sequence: Synthetic oligonucleotide
  Antisense strand to SEQ ID NO: 2405578
cuugcucugagcaucccuc

SEQ ID NO: 2405580 - RNA, 19 nt, Artificial Sequence
  Description of Artificial Sequence: Synthetic oligonucleotide
  Sense strand starting at position 2858 of SEQ ID NO: 1886382
aaguccgguuccuguaauu

SEQ ID NO: 2405581 - RNA, 19 nt, Artificial Sequence
  Description of Artificial Sequence: Synthetic oligonucleotide
  Antisense strand to SEQ ID NO: 2405580
aauuacaggaaccggacuu

SEQ ID NO: 2405582 - RNA, 19 nt, Artificial Sequence
  Description of Artificial Sequence: Synthetic oligonucleotide
  Sense strand starting at position 2963 of SEQ ID NO: 1886382
gaguguuugaugugcugac

SEQ ID NO: 2405583 - RNA, 19 nt, Artificial Sequence
  Description of Artificial Sequence: Synthetic oligonucleotide
  Antisense strand to SEQ ID NO: 2405582
gucagcacaucaaacacuc

SEQ ID NO: 2405584 - RNA, 19 nt, Artificial Sequence
  Description of Artificial Sequence: Synthetic oligonucleotide
  Sense strand starting at position 3068 of SEQ ID NO: 1886382
uugggaagccuaugagaug

SEQ ID NO: 2405585 - RNA, 19 nt, Artificial Sequence
  Description of Artificial Sequence: Synthetic oligonucleotide
  Antisense strand to SEQ ID NO: 2405584
caucucauaggcuucccaa

SEQ ID NO: 2405586 - RNA, 19 nt, Artificial Sequence
  Description of Artificial Sequence: Synthetic oligonucleotide
  Sense strand starting at position 3306 of SEQ ID NO: 1886382
cgcucugcucccuguggaa

SEQ ID NO: 2405587 - RNA, 19 nt, Artificial Sequence
  Description of Artificial Sequence: Synthetic oligonucleotide
  Antisense strand to SEQ ID NO: 2405586
uuccacagggagcagagcg

SEQ ID NO: 2405588 - RNA, 19 nt, Artificial Sequence
  Description of Artificial Sequence: Synthetic oligonucleotide
  Sense strand starting at position 3334 of SEQ ID NO: 1886382
gcagaugcguuucugauuu

SEQ ID NO: 2405589 - RNA, 19 nt, Artificial Sequence
  Description of Artificial Sequence: Synthetic oligonucleotide
  Antisense strand to SEQ ID NO: 2405588
aaaucagaaacgcaucugc

SEQ ID NO: 2405590 - RNA, 19 nt, Artificial Sequence
  Description of Artificial Sequence: Synthetic oligonucleotide
  Sense strand starting at position 3357 of SEQ ID NO: 1886382
ccagcagauucugaugcau

SEQ ID NO: 2405591 - RNA, 19 nt, Artificial Sequence
  Description of Artificial Sequence: Synthetic oligonucleotide
  Antisense strand to SEQ ID NO: 2405590
augcaucagaaucugcugg

SEQ ID NO: 2405592 - RNA, 19 nt, Artificial Sequence
  Description of Artificial Sequence: Synthetic oligonucleotide
  Sense strand starting at position 3359 of SEQ ID NO: 1886382
agcagauucugaugcauga

SEQ ID NO: 2405593 - RNA, 19 nt, Artificial Sequence
  Description of Artificial Sequence: Synthetic oligonucleotide
  Antisense strand to SEQ ID NO: 2405592
ucaugcaucagaaucugcu

SEQ ID NO: 2405594 - RNA, 19 nt, Artificial Sequence
  Description of Artificial Sequence: Synthetic oligonucleotide
  Sense strand starting at position 3529 of SEQ ID NO: 1886382
gugcacaucuuccggauaa

SEQ ID NO: 2405595 - RNA, 19 nt, Artificial Sequence
  Description of Artificial Sequence: Synthetic oligonucleotide
  Antisense strand to SEQ ID NO: 2405594
uuauccggaagaugugcac

SEQ ID NO: 2405596 - RNA, 19 nt, Artificial Sequence
  Description of Artificial Sequence: Synthetic oligonucleotide
  Sense strand starting at position 3530 of SEQ ID NO: 1886382
ugcacaucuuccggauaaa

SEQ ID NO: 2405597 - RNA, 19 nt, Artificial Sequence
  Description of Artificial Sequence: Synthetic oligonucleotide
  Antisense strand to SEQ ID NO: 2405596
uuuauccggaagaugugca

SEQ ID NO: 2405598 - RNA, 19 nt, Artificial Sequence
  Description of Artificial Sequence: Synthetic oligonucleotide
  Sense strand starting at position 3531 of SEQ ID NO: 1886382
gcacaucuuccggauaaau

SEQ ID NO: 2405599 - RNA, 19 nt, Artificial Sequence
  Description of Artificial Sequence: Synthetic oligonucleotide
  Antisense strand to SEQ ID NO: 2405598
auuuauccggaagaugugc

SEQ ID NO: 2405600 - RNA, 19 nt, Artificial Sequence
  Description of Artificial Sequence: Synthetic oligonucleotide
  Sense strand starting at position 3586 of SEQ ID NO: 1886382
guguccacucuccaaaugu

SEQ ID NO: 2405601 - RNA, 19 nt, Artificial Sequence
  Description of Artificial Sequence: Synthetic oligonucleotide
  Antisense strand to SEQ ID NO: 2405600
acauuuggagaguggacac

SEQ ID NO: 2405602 - RNA, 19 nt, Artificial Sequence
  Description of Artificial Sequence: Synthetic oligonucleotide
  Sense strand starting at position 208 of SEQ ID NO: 1886381
cccagaccuuguguuugaa

SEQ ID NO: 2405603 - RNA, 19 nt, Artificial Sequence
  Description of Artificial Sequence: Synthetic oligonucleotide
  Antisense strand to SEQ ID NO: 2405602
uucaaacacaaggucuggg

SEQ ID NO: 2405604 - RNA, 19 nt, Artificial Sequence
  Description of Artificial Sequence: Synthetic oligonucleotide
  Sense strand starting at position 210 of SEQ ID NO: 1886381
cagaccuuguguuugaagu

SEQ ID NO: 2405605 - RNA, 19 nt, Artificial Sequence
  Description of Artificial Sequence: Synthetic oligonucleotide
  Antisense strand to SEQ ID NO: 2405604
acuucaaacacaaggucug

SEQ ID NO: 2405606 - RNA, 19 nt, Artificial Sequence
  Description of Artificial Sequence: Synthetic oligonucleotide
  Sense strand starting at position 304 of SEQ ID NO: 1886381
gcaggaugcguuucagcau

SEQ ID NO: 2405607 - RNA, 19 nt, Artificial Sequence
  Description of Artificial Sequence: Synthetic oligonucleotide
  Antisense strand to SEQ ID NO: 2405606
augcugaaacgcauccugc

SEQ ID NO: 2405608 - RNA, 19 nt, Artificial Sequence
  Description of Artificial Sequence: Synthetic oligonucleotide
  Sense strand starting at position 329 of SEQ ID NO: 1886381
ugugguuuggaggguuauu

SEQ ID NO: 2405609 - RNA, 19 nt, Artificial Sequence
  Description of Artificial Sequence: Synthetic oligonucleotide
  Antisense strand to SEQ ID NO: 2405608
aauaacccuccaaaccaca

SEQ ID NO: 2405610 - RNA, 19 nt, Artificial Sequence
  Description of Artificial Sequence: Synthetic oligonucleotide
  Sense strand starting at position 494 of SEQ ID NO: 1886381
aggugacacuuacaacuau

SEQ ID NO: 2405611 - RNA, 19 nt, Artificial Sequence
  Description of Artificial Sequence: Synthetic oligonucleotide
  Antisense strand to SEQ ID NO: 2405610
auaguuguaagugucaccu

SEQ ID NO: 2405612 - RNA, 19 nt, Artificial Sequence
  Description of Artificial Sequence: Synthetic oligonucleotide
  Sense strand starting at position 522 of SEQ ID NO: 1886381
acaguuuaauccgccauuu

SEQ ID NO: 2405613 - RNA, 19 nt, Artificial Sequence
  Description of Artificial Sequence: Synthetic oligonucleotide
  Antisense strand to SEQ ID NO: 2405612
aaauggcggauuaaacugu

SEQ ID NO: 2405614 - RNA, 19 nt, Artificial Sequence
  Description of Artificial Sequence: Synthetic oligonucleotide
  Sense strand starting at position 524 of SEQ ID NO: 1886381
aguuuaauccgccauuucu

SEQ ID NO: 2405615 - RNA, 19 nt, Artificial Sequence
  Description of Artificial Sequence: Synthetic oligonucleotide
  Antisense strand to SEQ ID NO: 2405614
agaaauggcggauuaaacu

SEQ ID NO: 2405616 - RNA, 19 nt, Artificial Sequence
  Description of Artificial Sequence: Synthetic oligonucleotide
  Sense strand starting at position 554 of SEQ ID NO: 1886381
ggagaugguucagagccaa

SEQ ID NO: 2405617 - RNA, 19 nt, Artificial Sequence
  Description of Artificial Sequence: Synthetic oligonucleotide
  Antisense strand to SEQ ID NO: 2405616
uuggcucugaaccaucucc

SEQ ID NO: 2405618 - RNA, 19 nt, Artificial Sequence
  Description of Artificial Sequence: Synthetic oligonucleotide
  Sense strand starting at position 586 of SEQ ID NO: 1886381
agggaagccucaucuuaug

SEQ ID NO: 2405619 - RNA, 19 nt, Artificial Sequence
  Description of Artificial Sequence: Synthetic oligonucleotide
  Antisense strand to SEQ ID NO: 2405618
cauaagaugaggcuucccu

SEQ ID NO: 2405620 - RNA, 19 nt, Artificial Sequence
  Description of Artificial Sequence: Synthetic oligonucleotide
  Sense strand starting at position 812 of SEQ ID NO: 1886381
ucguguuccuaucucuaaa

SEQ ID NO: 2405621 - RNA, 19 nt, Artificial Sequence
  Description of Artificial Sequence: Synthetic oligonucleotide
  Antisense strand to SEQ ID NO: 2405620
uuuagagauaggaacacga

SEQ ID NO: 2405622 - RNA, 19 nt, Artificial Sequence
  Description of Artificial Sequence: Synthetic oligonucleotide
  Sense strand starting at position 815 of SEQ ID NO: 1886381
uguuccuaucucuaaacgu

SEQ ID NO: 2405623 - RNA, 19 nt, Artificial Sequence
  Description of Artificial Sequence: Synthetic oligonucleotide
  Antisense strand to SEQ ID NO: 2405622
acguuuagagauaggaaca

SEQ ID NO: 2405624 - RNA, 19 nt, Artificial Sequence
  Description of Artificial Sequence: Synthetic oligonucleotide
  Sense strand starting at position 824 of SEQ ID NO: 1886381
cucuaaacguguucccuuu

SEQ ID NO: 2405625 - RNA, 19 nt, Artificial Sequence
  Description of Artificial Sequence: Synthetic oligonucleotide
  Antisense strand to SEQ ID NO: 2405624
aaagggaacacguuuagag

SEQ ID NO: 2405626 - RNA, 19 nt, Artificial Sequence
  Description of Artificial Sequence: Synthetic oligonucleotide
  Sense strand starting at position 831 of SEQ ID NO: 1886381
cguguucccuuucuagcaa

SEQ ID NO: 2405627 - RNA, 19 nt, Artificial Sequence
  Description of Artificial Sequence: Synthetic oligonucleotide
  Antisense strand to SEQ ID NO: 2405626
uugcuagaaagggaacacg

SEQ ID NO: 2405628 - RNA, 19 nt, Artificial Sequence
  Description of Artificial Sequence: Synthetic oligonucleotide
  Sense strand starting at position 1337 of SEQ ID NO: 1886381
uccauugcuugcucauaga

SEQ ID NO: 2405629 - RNA, 19 nt, Artificial Sequence
  Description of Artificial Sequence: Synthetic oligonucleotide
  Antisense strand to SEQ ID NO: 2405628
ucuaugagcaagcaaugga

SEQ ID NO: 2405630 - RNA, 19 nt, Artificial Sequence
  Description of Artificial Sequence: Synthetic oligonucleotide
  Sense strand starting at position 1460 of SEQ ID NO: 1886381
ucugaagcccaaugagaaa

SEQ ID NO: 2405631 - RNA, 19 nt, Artificial Sequence
  Description of Artificial Sequence: Synthetic oligonucleotide
  Antisense strand to SEQ ID NO: 2405630
uuucucauugggcuucaga

SEQ ID NO: 2405632 - RNA, 19 nt, Artificial Sequence
  Description of Artificial Sequence: Synthetic oligonucleotide
  Sense strand starting at position 2245 of SEQ ID NO: 1886381
cgcugagcuccugggugau

SEQ ID NO: 2405633 - RNA, 19 nt, Artificial Sequence
  Description of Artificial Sequence: Synthetic oligonucleotide
  Antisense strand to SEQ ID NO: 2405632
aucacccaggagcucagcg

SEQ ID NO: 2405634 - RNA, 19 nt, Artificial Sequence
  Description of Artificial Sequence: Synthetic oligonucleotide
  Sense strand starting at position 2466 of SEQ ID NO: 1886381
uuuguauuucuugggugau

SEQ ID NO: 2405635 - RNA, 19 nt, Artificial Sequence
  Description of Artificial Sequence: Synthetic oligonucleotide
  Antisense strand to SEQ ID NO: 2405634
aucacccaagaaauacaaa

SEQ ID NO: 2405636 - RNA, 19 nt, Artificial Sequence
  Description of Artificial Sequence: Synthetic oligonucleotide
  Sense strand starting at position 2467 of SEQ ID NO: 1886381
uuguauuucuugggugauu

SEQ ID NO: 2405637 - RNA, 19 nt, Artificial Sequence
  Description of Artificial Sequence: Synthetic oligonucleotide
  Antisense strand to SEQ ID NO: 2405636
aaucacccaagaaauacaa

SEQ ID NO: 2405638 - RNA, 19 nt, Artificial Sequence
  Description of Artificial Sequence: Synthetic oligonucleotide
  Sense strand starting at position 2501 of SEQ ID NO: 1886381
uugagaaucucuccucgaa

SEQ ID NO: 2405639 - RNA, 19 nt, Artificial Sequence
  Description of Artificial Sequence: Synthetic oligonucleotide
  Antisense strand to SEQ ID NO: 2405638
uucgaggagagauucucaa

SEQ ID NO: 2405640 - RNA, 19 nt, Artificial Sequence
  Description of Artificial Sequence: Synthetic oligonucleotide
  Sense strand starting at position 2503 of SEQ ID NO: 1886381
gagaaucucuccucgaagg

SEQ ID NO: 2405641 - RNA, 19 nt, Artificial Sequence
  Description of Artificial Sequence: Synthetic oligonucleotide
  Antisense strand to SEQ ID NO: 2405640
ccuucgaggagagauucuc

SEQ ID NO: 2405642 - RNA, 19 nt, Artificial Sequence
  Description of Artificial Sequence: Synthetic oligonucleotide
  Sense strand starting at position 2599 of SEQ ID NO: 1886381
aaguccaguuggcugaaau

SEQ ID NO: 2405643 - RNA, 19 nt, Artificial Sequence
  Description of Artificial Sequence: Synthetic oligonucleotide
  Antisense strand to SEQ ID NO: 2405642
auuucagccaacuggacuu

SEQ ID NO: 2405644 - RNA, 19 nt, Artificial Sequence
  Description of Artificial Sequence: Synthetic oligonucleotide
  Sense strand starting at position 2600 of SEQ ID NO: 1886381
aguccaguuggcugaaauu

SEQ ID NO: 2405645 - RNA, 19 nt, Artificial Sequence
  Description of Artificial Sequence: Synthetic oligonucleotide
  Antisense strand to SEQ ID NO: 2405644
aauuucagccaacuggacu

SEQ ID NO: 2405646 - RNA, 19 nt, Artificial Sequence
  Description of Artificial Sequence: Synthetic oligonucleotide
  Sense strand starting at position 2655 of SEQ ID NO: 1886381
aaagacauguacuggcaaa

SEQ ID NO: 2405647 - RNA, 19 nt, Artificial Sequence
  Description of Artificial Sequence: Synthetic oligonucleotide
  Antisense strand to SEQ ID NO: 2405646
uuugccaguacaugucuuu

SEQ ID NO: 2405648 - RNA, 19 nt, Artificial Sequence
  Description of Artificial Sequence: Synthetic oligonucleotide
  Sense strand starting at position 2678 of SEQ ID NO: 1886381
aguacaaauuaucugcaga

SEQ ID NO: 2405649 - RNA, 19 nt, Artificial Sequence
  Description of Artificial Sequence: Synthetic oligonucleotide
  Antisense strand to SEQ ID NO: 2405648
ucugcagauaauuuguacu

SEQ ID NO: 2405650 - RNA, 19 nt, Artificial Sequence
  Description of Artificial Sequence: Synthetic oligonucleotide
  Sense strand starting at position 2683 of SEQ ID NO: 1886381
aaauuaucugcagaaccgu

SEQ ID NO: 2405651 - RNA, 19 nt, Artificial Sequence
  Description of Artificial Sequence: Synthetic oligonucleotide
  Antisense strand to SEQ ID NO: 2405650
acgguucugcagauaauuu

SEQ ID NO: 2405652 - RNA, 19 nt, Artificial Sequence
  Description of Artificial Sequence: Synthetic oligonucleotide
  Sense strand starting at position 3044 of SEQ ID NO: 1886381
ccaucuuccucucuuguga

SEQ ID NO: 2405653 - RNA, 19 nt, Artificial Sequence
  Description of Artificial Sequence: Synthetic oligonucleotide
  Antisense strand to SEQ ID NO: 2405652
ucacaagagaggaagaugg

SEQ ID NO: 2405654 - RNA, 19 nt, Artificial Sequence
  Description of Artificial Sequence: Synthetic oligonucleotide
  Sense strand starting at position 3077 of SEQ ID NO: 1886381
gcaguuguguccuuggaaa

SEQ ID NO: 2405655 - RNA, 19 nt, Artificial Sequence
  Description of Artificial Sequence: Synthetic oligonucleotide
  Antisense strand to SEQ ID NO: 2405654
uuuccaaggacacaacugc

SEQ ID NO: 2405656 - RNA, 19 nt, Artificial Sequence
  Description of Artificial Sequence: Synthetic oligonucleotide
  Sense strand starting at position 3079 of SEQ ID NO: 1886381
aguuguguccuuggaaagc

SEQ ID NO: 2405657 - RNA, 19 nt, Artificial Sequence
  Description of Artificial Sequence: Synthetic oligonucleotide
  Antisense strand to SEQ ID NO: 2405656
gcuuuccaaggacacaacu

SEQ ID NO: 2405658 - RNA, 19 nt, Artificial Sequence
  Description of Artificial Sequence: Synthetic oligonucleotide
  Sense strand starting at position 3161 of SEQ ID NO: 1886381
ggaaguuuguaacacagag

SEQ ID NO: 2405659 - RNA, 19 nt, Artificial Sequence
  Description of Artificial Sequence: Synthetic oligonucleotide
  Antisense strand to SEQ ID NO: 2405658
cucuguguuacaaacuucc

SEQ ID NO: 2405660 - RNA, 19 nt, Artificial Sequence
  Description of Artificial Sequence: Synthetic oligonucleotide
  Sense strand starting at position 3289 of SEQ ID NO: 1886381
ucagaauucugucugcuuc

SEQ ID NO: 2405661 - RNA, 19 nt, Artificial Sequence
  Description of Artificial Sequence: Synthetic oligonucleotide
  Antisense strand to SEQ ID NO: 2405660
gaagcagacagaauucuga

SEQ ID NO: 2405662 - RNA, 19 nt, Artificial Sequence
  Description of Artificial Sequence: Synthetic oligonucleotide
  Sense strand starting at position 3291 of SEQ ID NO: 1886381
agaauucugucugcuucca

SEQ ID NO: 2405663 - RNA, 19 nt, Artificial Sequence
  Description of Artificial Sequence: Synthetic oligonucleotide
  Antisense strand to SEQ ID NO: 2405662
uggaagcagacagaauucu

SEQ ID NO: 2405664 - RNA, 19 nt, Artificial Sequence
  Description of Artificial Sequence: Synthetic oligonucleotide
  Sense strand starting at position 3364 of SEQ ID NO: 1886381
ggcgucuaacaucaggauu

SEQ ID NO: 2405665 - RNA, 19 nt, Artificial Sequence
  Description of Artificial Sequence: Synthetic oligonucleotide
  Antisense strand to SEQ ID NO: 2405664
aauccugauguuagacgcc

SEQ ID NO: 2405666 - RNA, 19 nt, Artificial Sequence
  Description of Artificial Sequence: Synthetic oligonucleotide
  Sense strand starting at position 3408 of SEQ ID NO: 1886381
uuucuaucccugggaaguu

SEQ ID NO: 2405667 - RNA, 19 nt, Artificial Sequence
  Description of Artificial Sequence: Synthetic oligonucleotide
  Antisense strand to SEQ ID NO: 2405666
aacuucccagggauagaaa

SEQ ID NO: 2405668 - RNA, 19 nt, Artificial Sequence
  Description of Artificial Sequence: Synthetic oligonucleotide
  Sense strand starting at position 3529 of SEQ ID NO: 1886381
gggugcagucuccgagaaa

SEQ ID NO: 2405669 - RNA, 19 nt, Artificial Sequence
  Description of Artificial Sequence: Synthetic oligonucleotide
  Antisense strand to SEQ ID NO: 2405668
uuucucggagacugcaccc

SEQ ID NO: 2405670 - RNA, 19 nt, Artificial Sequence
  Description of Artificial Sequence: Synthetic oligonucleotide
  Sense strand starting at position 3532 of SEQ ID NO: 1886381
ugcagucuccgagaaaugg

SEQ ID NO: 2405671 - RNA, 19 nt, Artificial Sequence
  Description of Artificial Sequence: Synthetic oligonucleotide
  Antisense strand to SEQ ID NO: 2405670
ccauuucucggagacugca

SEQ ID NO: 2405672 - RNA, 19 nt, Artificial Sequence
  Description of Artificial Sequence: Synthetic oligonucleotide
  Sense strand starting at position 3541 of SEQ ID NO: 1886381
cgagaaauggcccagucau

SEQ ID NO: 2405673 - RNA, 19 nt, Artificial Sequence
  Description of Artificial Sequence: Synthetic oligonucleotide
  Antisense strand to SEQ ID NO: 2405672
augacugggccauuucucg

SEQ ID NO: 2405674 - RNA, 19 nt, Artificial Sequence
  Description of Artificial Sequence: Synthetic oligonucleotide
  Sense strand starting at position 3552 of SEQ ID NO: 1886381
ccagucauccuaugagcag

SEQ ID NO: 2405675 - RNA, 19 nt, Artificial Sequence
  Description of Artificial Sequence: Synthetic oligonucleotide
  Antisense strand to SEQ ID NO: 2405674
cugcucauaggaugacugg

SEQ ID NO: 2405676 - RNA, 19 nt, Artificial Sequence
  Description of Artificial Sequence: Synthetic oligonucleotide
  Sense strand starting at position 3589 of SEQ ID NO: 1886381
ggcucuggucagcaucaua

SEQ ID NO: 2405677 - RNA, 19 nt, Artificial Sequence
  Description of Artificial Sequence: Synthetic oligonucleotide
  Antisense strand to SEQ ID NO: 2405676
uaugaugcugaccagagcc

SEQ ID NO: 2405678 - RNA, 19 nt, Artificial Sequence
  Description of Artificial Sequence: Synthetic oligonucleotide
  Sense strand starting at position 3900 of SEQ ID NO: 1886381
aaggacgucuccuagaaau

SEQ ID NO: 2405679 - RNA, 19 nt, Artificial Sequence
  Description of Artificial Sequence: Synthetic oligonucleotide
  Antisense strand to SEQ ID NO: 2405678
auuucuaggagacguccuu

SEQ ID NO: 2405680 - RNA, 19 nt, Artificial Sequence
  Description of Artificial Sequence: Synthetic oligonucleotide
  Sense strand starting at position 3981 of SEQ ID NO: 1886381
gcaggcauccaauaugcua

SEQ ID NO: 2405681 - RNA, 19 nt, Artificial Sequence
  Description of Artificial Sequence: Synthetic oligonucleotide
  Antisense strand to SEQ ID NO: 2405680
uagcauauuggaugccugc

SEQ ID NO: 2405682 - RNA, 19 nt, Artificial Sequence
  Description of Artificial Sequence: Synthetic oligonucleotide
  Sense strand starting at position 14 of SEQ ID NO: 1886383
agcaguuacguguucucau

SEQ ID NO: 2405683 - RNA, 19 nt, Artificial Sequence
  Description of Artificial Sequence: Synthetic oligonucleotide
  Antisense strand to SEQ ID NO: 2405682
augagaacacguaacugcu

SEQ ID NO: 2405684 - RNA, 19 nt, Artificial Sequence
  Description of Artificial Sequence: Synthetic oligonucleotide
  Sense strand starting at position 86 of SEQ ID NO: 1886383
uuggcuuugccacaaauua

SEQ ID NO: 2405685 - RNA, 19 nt, Artificial Sequence
  Description of Artificial Sequence: Synthetic oligonucleotide
  Antisense strand to SEQ ID NO: 2405684
uaauuuguggcaaagccaa

SEQ ID NO: 2405686 - RNA, 19 nt, Artificial Sequence
  Description of Artificial Sequence: Synthetic oligonucleotide
  Sense strand starting at position 94 of SEQ ID NO: 1886383
gccacaaauuaacugugau

SEQ ID NO: 2405687 - RNA, 19 nt, Artificial Sequence
  Description of Artificial Sequence: Synthetic oligonucleotide
  Antisense strand to SEQ ID NO: 2405686
aucacaguuaauuuguggc

SEQ ID NO: 2405688 - RNA, 19 nt, Artificial Sequence
  Description of Artificial Sequence: Synthetic oligonucleotide
  Sense strand starting at position 97 of SEQ ID NO: 1886383
acaaauuaacugugaugcu

SEQ ID NO: 2405689 - RNA, 19 nt, Artificial Sequence
  Description of Artificial Sequence: Synthetic oligonucleotide
  Antisense strand to SEQ ID NO: 2405688
agcaucacaguuaauuugu

SEQ ID NO: 2405690 - RNA, 19 nt, Artificial Sequence
  Description of Artificial Sequence: Synthetic oligonucleotide
  Sense strand starting at position 107 of SEQ ID NO: 1886383
ugugaugcugaauagacua

SEQ ID NO: 2405691 - RNA, 19 nt, Artificial Sequence
  Description of Artificial Sequence: Synthetic oligonucleotide
  Antisense strand to SEQ ID NO: 2405690
uagucuauucagcaucaca

SEQ ID NO: 2405692 - RNA, 19 nt, Artificial Sequence
  Description of Artificial Sequence: Synthetic oligonucleotide
  Sense strand starting at position 267 of SEQ ID NO: 1886383
cuacuauguugagcauaau

SEQ ID NO: 2405693 - RNA, 19 nt, Artificial Sequence
  Description of Artificial Sequence: Synthetic oligonucleotide
  Antisense strand to SEQ ID NO: 2405692
auuaugcucaacauaguag

SEQ ID NO: 2405694 - RNA, 19 nt, Artificial Sequence
  Description of Artificial Sequence: Synthetic oligonucleotide
  Sense strand starting at position 289 of SEQ ID NO: 1886383
ggucaacugugauuacuau

SEQ ID NO: 2405695 - RNA, 19 nt, Artificial Sequence
  Description of Artificial Sequence: Synthetic oligonucleotide
  Antisense strand to SEQ ID NO: 2405694
auaguaaucacaguugacc

SEQ ID NO: 2405696 - RNA, 19 nt, Artificial Sequence
  Description of Artificial Sequence: Synthetic oligonucleotide
  Sense strand starting at position 290 of SEQ ID NO: 1886383
gucaacugugauuacuauu

SEQ ID NO: 2405697 - RNA, 19 nt, Artificial Sequence
  Description of Artificial Sequence: Synthetic oligonucleotide
  Antisense strand to SEQ ID NO: 2405696
aauaguaaucacaguugac

SEQ ID NO: 2405698 - RNA, 19 nt, Artificial Sequence
  Description of Artificial Sequence: Synthetic oligonucleotide
  Sense strand starting at position 338 of SEQ ID NO: 1886383
guuaauuugccuugagcua

SEQ ID NO: 2405699 - RNA, 19 nt, Artificial Sequence
  Description of Artificial Sequence: Synthetic oligonucleotide
  Antisense strand to SEQ ID NO: 2405698
uagcucaaggcaaauuaac

SEQ ID NO: 2405700 - RNA, 19 nt, Artificial Sequence
  Description of Artificial Sequence: Synthetic oligonucleotide
  Sense strand starting at position 383 of SEQ ID NO: 1886383
ggcuguaaugggcauagaa

SEQ ID NO: 2405701 - RNA, 19 nt, Artificial Sequence
  Description of Artificial Sequence: Synthetic oligonucleotide
  Antisense strand to SEQ ID NO: 2405700
uucuaugcccauuacagcc

SEQ ID NO: 2405702 - RNA, 19 nt, Artificial Sequence
  Description of Artificial Sequence: Synthetic oligonucleotide
  Sense strand starting at position 425 of SEQ ID NO: 1886383
agcagaucccuaggauacu

SEQ ID NO: 2405703 - RNA, 19 nt, Artificial Sequence
  Description of Artificial Sequence: Synthetic oligonucleotide
  Antisense strand to SEQ ID NO: 2405702
aguauccuagggaucugcu

SEQ ID NO: 2405704 - RNA, 19 nt, Artificial Sequence
  Description of Artificial Sequence: Synthetic oligonucleotide
  Sense strand starting at position 437 of SEQ ID NO: 1886383
ggauacuuugcagggaaau

SEQ ID NO: 2405705 - RNA, 19 nt, Artificial Sequence
  Description of Artificial Sequence: Synthetic oligonucleotide
  Antisense strand to SEQ ID NO: 2405704
auuucccugcaaaguaucc

SEQ ID NO: 2405706 - RNA, 19 nt, Artificial Sequence
  Description of Artificial Sequence: Synthetic oligonucleotide
  Sense strand starting at position 438 of SEQ ID NO: 1886383
gauacuuugcagggaaauc

SEQ ID NO: 2405707 - RNA, 19 nt, Artificial Sequence
  Description of Artificial Sequence: Synthetic oligonucleotide
  Antisense strand to SEQ ID NO: 2405706
gauuucccugcaaaguauc

SEQ ID NO: 2405708 - RNA, 19 nt, Artificial Sequence
  Description of Artificial Sequence: Synthetic oligonucleotide
  Sense strand starting at position 496 of SEQ ID NO: 1886383
ugaucucauuuggacucaa

SEQ ID NO: 2405709 - RNA, 19 nt, Artificial Sequence
  Description of Artificial Sequence: Synthetic oligonucleotide
  Antisense strand to SEQ ID NO: 2405708
uugaguccaaaugagauca

SEQ ID NO: 2405710 - RNA, 19 nt, Artificial Sequence
  Description of Artificial Sequence: Synthetic oligonucleotide
  Sense strand starting at position 536 of SEQ ID NO: 1886383
agaagaugagcuugugaua

SEQ ID NO: 2405711 - RNA, 19 nt, Artificial Sequence
  Description of Artificial Sequence: Synthetic oligonucleotide
  Antisense strand to SEQ ID NO: 2405710
uaucacaagcucaucuucu

SEQ ID NO: 2405712 - RNA, 19 nt, Artificial Sequence
  Description of Artificial Sequence: Synthetic oligonucleotide
  Sense strand starting at position 545 of SEQ ID NO: 1886383
gcuugugauagacauagcu

SEQ ID NO: 2405713 - RNA, 19 nt, Artificial Sequence
  Description of Artificial Sequence: Synthetic oligonucleotide
  Antisense strand to SEQ ID NO: 2405712
agcuaugucuaucacaagc

SEQ ID NO: 2405714 - RNA, 19 nt, Artificial Sequence
  Description of Artificial Sequence: Synthetic oligonucleotide
  Sense strand starting at position 986 of SEQ ID NO: 1886383
gagacccugugacuugaaa

SEQ ID NO: 2405715 - RNA, 19 nt, Artificial Sequence
  Description of Artificial Sequence: Synthetic oligonucleotide
  Antisense strand to SEQ ID NO: 2405714
uuucaagucacagggucuc

SEQ ID NO: 2405716 - RNA, 19 nt, Artificial Sequence
  Description of Artificial Sequence: Synthetic oligonucleotide
  Sense strand starting at position 1052 of SEQ ID NO: 1886383
cuagaauccucguuuggaa

SEQ ID NO: 2405717 - RNA, 19 nt, Artificial Sequence
  Description of Artificial Sequence: Synthetic oligonucleotide
  Antisense strand to SEQ ID NO: 2405716
uuccaaacgaggauucuag

SEQ ID NO: 2405718 - RNA, 19 nt, Artificial Sequence
  Description of Artificial Sequence: Synthetic oligonucleotide
  Sense strand starting at position 1106 of SEQ ID NO: 1886383
ggcaguauaguuuaugaag

SEQ ID NO: 2405719 - RNA, 19 nt, Artificial Sequence
  Description of Artificial Sequence: Synthetic oligonucleotide
  Antisense strand to SEQ ID NO: 2405718
cuucauaaacuauacugcc

SEQ ID NO: 2405720 - RNA, 19 nt, Artificial Sequence
  Description of Artificial Sequence: Synthetic oligonucleotide
  Sense strand starting at position 1132 of SEQ ID NO: 1886383
ggccaucgaccugaaauua

SEQ ID NO: 2405721 - RNA, 19 nt, Artificial Sequence
  Description of Artificial Sequence: Synthetic oligonucleotide
  Antisense strand to SEQ ID NO: 2405720
uaauuucaggucgauggcc

SEQ ID NO: 2405722 - RNA, 19 nt, Artificial Sequence
  Description of Artificial Sequence: Synthetic oligonucleotide
  Sense strand starting at position 1282 of SEQ ID NO: 1886383
ugcacaauuguuuaaauga

SEQ ID NO: 2405723 - RNA, 19 nt, Artificial Sequence
  Description of Artificial Sequence: Synthetic oligonucleotide
  Antisense strand to SEQ ID NO: 2405722
ucauuuaaacaauugugca

SEQ ID NO: 2405724 - RNA, 19 nt, Artificial Sequence
  Description of Artificial Sequence: Synthetic oligonucleotide
  Sense strand starting at position 1313 of SEQ ID NO: 1886383
cuacacuggguccauuaua

SEQ ID NO: 2405725 - RNA, 19 nt, Artificial Sequence
  Description of Artificial Sequence: Synthetic oligonucleotide
  Antisense strand to SEQ ID NO: 2405724
uauaauggacccaguguag

SEQ ID NO: 2405726 - RNA, 19 nt, Artificial Sequence
  Description of Artificial Sequence: Synthetic oligonucleotide
  Sense strand starting at position 1853 of SEQ ID NO: 1886383
caaaguuagcccggauaaa

SEQ ID NO: 2405727 - RNA, 19 nt, Artificial Sequence
  Description of Artificial Sequence: Synthetic oligonucleotide
  Antisense strand to SEQ ID NO: 2405726
uuuauccgggcuaacuuug

SEQ ID NO: 2405728 - RNA, 19 nt, Artificial Sequence
  Description of Artificial Sequence: Synthetic oligonucleotide
  Sense strand starting at position 1854 of SEQ ID NO: 1886383
aaaguuagcccggauaaac

SEQ ID NO: 2405729 - RNA, 19 nt, Artificial Sequence
  Description of Artificial Sequence: Synthetic oligonucleotide
  Antisense strand to SEQ ID NO: 2405728
guuuauccgggcuaacuuu

SEQ ID NO: 2405730 - RNA, 19 nt, Artificial Sequence
  Description of Artificial Sequence: Synthetic oligonucleotide
  Sense strand starting at position 2066 of SEQ ID NO: 1886383
cgagauucccgcgcuucaa

SEQ ID NO: 2405731 - RNA, 19 nt, Artificial Sequence
  Description of Artificial Sequence: Synthetic oligonucleotide
  Antisense strand to SEQ ID NO: 2405730
uugaagcgcgggaaucucg

SEQ ID NO: 2405732 - RNA, 19 nt, Artificial Sequence
  Description of Artificial Sequence: Synthetic oligonucleotide
  Sense strand starting at position 2164 of SEQ ID NO: 1886383
acuagaaugacguaucuug

SEQ ID NO: 2405733 - RNA, 19 nt, Artificial Sequence
  Description of Artificial Sequence: Synthetic oligonucleotide
  Antisense strand to SEQ ID NO: 2405732
caagauacgucauucuagu

SEQ ID NO: 2405734 - RNA, 19 nt, Artificial Sequence
  Description of Artificial Sequence: Synthetic oligonucleotide
  Sense strand starting at position 2182 of SEQ ID NO: 1886383
gcagcacucggcugaauuu

SEQ ID NO: 2405735 - RNA, 19 nt, Artificial Sequence
  Description of Artificial Sequence: Synthetic oligonucleotide
  Antisense strand to SEQ ID NO: 2405734
aaauucagccgagugcugc

SEQ ID NO: 2405736 - RNA, 19 nt, Artificial Sequence
  Description of Artificial Sequence: Synthetic oligonucleotide
  Sense strand starting at position 2305 of SEQ ID NO: 1886383
agcgauucuccugacuaug

SEQ ID NO: 2405737 - RNA, 19 nt, Artificial Sequence
  Description of Artificial Sequence: Synthetic oligonucleotide
  Antisense strand to SEQ ID NO: 2405736
cauagucaggagaaucgcu

SEQ ID NO: 2405738 - RNA, 19 nt, Artificial Sequence
  Description of Artificial Sequence: Synthetic oligonucleotide
  Sense strand starting at position 3162 of SEQ ID NO: 1886383
uaaugcgaaguuuaagaaa

SEQ ID NO: 2405739 - RNA, 19 nt, Artificial Sequence
  Description of Artificial Sequence: Synthetic oligonucleotide
  Antisense strand to SEQ ID NO: 2405738
uuucuuaaacuucgcauua

SEQ ID NO: 2405740 - RNA, 19 nt, Artificial Sequence
  Description of Artificial Sequence: Synthetic oligonucleotide
  Sense strand starting at position 3187 of SEQ ID NO: 1886383
guguguuacacuuagaaua

SEQ ID NO: 2405741 - RNA, 19 nt, Artificial Sequence
  Description of Artificial Sequence: Synthetic oligonucleotide
  Antisense strand to SEQ ID NO: 2405740
uauucuaaguguaacacac

SEQ ID NO: 2405742 - RNA, 19 nt, Artificial Sequence
  Description of Artificial Sequence: Synthetic oligonucleotide
  Sense strand starting at position 3285 of SEQ ID NO: 1886383
caguguagugggcagaaca

SEQ ID NO: 2405743 - RNA, 19 nt, Artificial Sequence
  Description of Artificial Sequence: Synthetic oligonucleotide
  Antisense strand to SEQ ID NO: 2405742
uguucugcccacuacacug

SEQ ID NO: 2405744 - RNA, 19 nt, Artificial Sequence
  Description of Artificial Sequence: Synthetic oligonucleotide
  Sense strand starting at position 3316 of SEQ ID NO: 1886383
uuuggauugccgggaauaa

SEQ ID NO: 2405745 - RNA, 19 nt, Artificial Sequence
  Description of Artificial Sequence: Synthetic oligonucleotide
  Antisense strand to SEQ ID NO: 2405744
uuauucccggcaauccaaa

SEQ ID NO: 2405746 - RNA, 19 nt, Artificial Sequence
  Description of Artificial Sequence: Synthetic oligonucleotide
  Sense strand starting at position 3317 of SEQ ID NO: 1886383
uuggauugccgggaauaag

SEQ ID NO: 2405747 - RNA, 19 nt, Artificial Sequence
  Description of Artificial Sequence: Synthetic oligonucleotide
  Antisense strand to SEQ ID NO: 2405746
cuuauucccggcaauccaa

SEQ ID NO: 2405748 - RNA, 19 nt, Artificial Sequence
  Description of Artificial Sequence: Synthetic oligonucleotide
  Sense strand starting at position 3377 of SEQ ID NO: 1886383
guaacugaaugcucuauua

SEQ ID NO: 2405749 - RNA, 19 nt, Artificial Sequence
  Description of Artificial Sequence: Synthetic oligonucleotide
  Antisense strand to SEQ ID NO: 2405748
uaauagagcauucaguuac

SEQ ID NO: 2405750 - RNA, 19 nt, Artificial Sequence
  Description of Artificial Sequence: Synthetic oligonucleotide
  Sense strand starting at position 3628 of SEQ ID NO: 1886383
cuuuaucucagggauuggu

SEQ ID NO: 2405751 - RNA, 19 nt, Artificial Sequence
  Description of Artificial Sequence: Synthetic oligonucleotide
  Antisense strand to SEQ ID NO: 2405750
accaaucccugagauaaag

SEQ ID NO: 2405752 - RNA, 19 nt, Artificial Sequence
  Description of Artificial Sequence: Synthetic oligonucleotide
  Sense strand starting at position 3631 of SEQ ID NO: 1886383
uaucucagggauugguauu

SEQ ID NO: 2405753 - RNA, 19 nt, Artificial Sequence
  Description of Artificial Sequence: Synthetic oligonucleotide
  Antisense strand to SEQ ID NO: 2405752
aauaccaaucccugagaua

SEQ ID NO: 2405754 - RNA, 19 nt, Artificial Sequence
  Description of Artificial Sequence: Synthetic oligonucleotide
  Sense strand starting at position 3632 of SEQ ID NO: 1886383
aucucagggauugguauua

SEQ ID NO: 2405755 - RNA, 19 nt, Artificial Sequence
  Description of Artificial Sequence: Synthetic oligonucleotide
  Antisense strand to SEQ ID NO: 2405754
uaauaccaaucccugagau

SEQ ID NO: 2405756 - RNA, 19 nt, Artificial Sequence
  Description of Artificial Sequence: Synthetic oligonucleotide
  Sense strand starting at position 3720 of SEQ ID NO: 1886383
agugcaauccauuaccaag

SEQ ID NO: 2405757 - RNA, 19 nt, Artificial Sequence
  Description of Artificial Sequence: Synthetic oligonucleotide
  Antisense strand to SEQ ID NO: 2405756
cuugguaauggauugcacu

SEQ ID NO: 2405758 - RNA, 19 nt, Artificial Sequence
  Description of Artificial Sequence: Synthetic oligonucleotide
  Sense strand starting at position 3829 of SEQ ID NO: 1886383
cuuggauugcuacacucau

SEQ ID NO: 2405759 - RNA, 19 nt, Artificial Sequence
  Description of Artificial Sequence: Synthetic oligonucleotide
  Antisense strand to SEQ ID NO: 2405758
augaguguagcaauccaag

SEQ ID NO: 2405760 - RNA, 19 nt, Artificial Sequence
  Description of Artificial Sequence: Synthetic oligonucleotide
  Sense strand starting at position 3929 of SEQ ID NO: 1886383
uggugucagauuugugacu

SEQ ID NO: 2405761 - RNA, 19 nt, Artificial Sequence
  Description of Artificial Sequence: Synthetic oligonucleotide
  Antisense strand to SEQ ID NO: 2405760
agucacaaaucugacacca

SEQ ID NO: 2405762 - RNA, 19 nt, Artificial Sequence
  Description of Artificial Sequence: Synthetic oligonucleotide
  Sense strand starting at position 197 of SEQ ID NO: 1886384
cccagccgucucuacuaaa

SEQ ID NO: 2405763 - RNA, 19 nt, Artificial Sequence
  Description of Artificial Sequence: Synthetic oligonucleotide
  Antisense strand to SEQ ID NO: 2405762
uuuaguagagacggcuggg

SEQ ID NO: 2405764 - RNA, 19 nt, Artificial Sequence
  Description of Artificial Sequence: Synthetic oligonucleotide
  Sense strand starting at position 500 of SEQ ID NO: 1886384
ccaagauauucccugguaa

SEQ ID NO: 2405765 - RNA, 19 nt, Artificial Sequence
  Description of Artificial Sequence: Synthetic oligonucleotide
  Antisense strand to SEQ ID NO: 2405764
uuaccagggaauaucuugg

SEQ ID NO: 2405766 - RNA, 19 nt, Artificial Sequence
  Description of Artificial Sequence: Synthetic oligonucleotide
  Sense strand starting at position 646 of SEQ ID NO: 1886384
acucuccugggcuauauua

SEQ ID NO: 2405767 - RNA, 19 nt, Artificial Sequence
  Description of Artificial Sequence: Synthetic oligonucleotide
  Antisense strand to SEQ ID NO: 2405766
uaauauagcccaggagagu

SEQ ID NO: 2405768 - RNA, 19 nt, Artificial Sequence
  Description of Artificial Sequence: Synthetic oligonucleotide
  Sense strand starting at position 665 of SEQ ID NO: 1886384
ggcuguacacaccgauauu

SEQ ID NO: 2405769 - RNA, 19 nt, Artificial Sequence
  Description of Artificial Sequence: Synthetic oligonucleotide
  Antisense strand to SEQ ID NO: 2405768
aauaucgguguguacagcc

SEQ ID NO: 2405770 - RNA, 19 nt, Artificial Sequence
  Description of Artificial Sequence: Synthetic oligonucleotide
  Sense strand starting at position 722 of SEQ ID NO: 1886384
ggaccucugcaaugcugau

SEQ ID NO: 2405771 - RNA, 19 nt, Artificial Sequence
  Description of Artificial Sequence: Synthetic oligonucleotide
  Antisense strand to SEQ ID NO: 2405770
aucagcauugcagaggucc

SEQ ID NO: 2405772 - RNA, 19 nt, Artificial Sequence
  Description of Artificial Sequence: Synthetic oligonucleotide
  Sense strand starting at position 838 of SEQ ID NO: 1886384
gggaguucauuccugaaga

SEQ ID NO: 2405773 - RNA, 19 nt, Artificial Sequence
  Description of Artificial Sequence: Synthetic oligonucleotide
  Antisense strand to SEQ ID NO: 2405772
ucuucaggaaugaacuccc

SEQ ID NO: 2405774 - RNA, 19 nt, Artificial Sequence
  Description of Artificial Sequence: Synthetic oligonucleotide
  Sense strand starting at position 873 of SEQ ID NO: 1886384
augggauccuucuucuuau

SEQ ID NO: 2405775 - RNA, 19 nt, Artificial Sequence
  Description of Artificial Sequence: Synthetic oligonucleotide
  Antisense strand to SEQ ID NO: 2405774
auaagaagaaggaucccau

SEQ ID NO: 2405776 - RNA, 19 nt, Artificial Sequence
  Description of Artificial Sequence: Synthetic oligonucleotide
  Sense strand starting at position 914 of SEQ ID NO: 1886384
gacagcuuucugggaucaa

SEQ ID NO: 2405777 - RNA, 19 nt, Artificial Sequence
  Description of Artificial Sequence: Synthetic oligonucleotide
  Antisense strand to SEQ ID NO: 2405776
uugaucccagaaagcuguc

SEQ ID NO: 2405778 - RNA, 19 nt, Artificial Sequence
  Description of Artificial Sequence: Synthetic oligonucleotide
  Sense strand starting at position 976 of SEQ ID NO: 1886384
ugcucacugggauguauca

SEQ ID NO: 2405779 - RNA, 19 nt, Artificial Sequence
  Description of Artificial Sequence: Synthetic oligonucleotide
  Antisense strand to SEQ ID NO: 2405778
ugauacaucccagugagca

SEQ ID NO: 2405780 - RNA, 19 nt, Artificial Sequence
  Description of Artificial Sequence: Synthetic oligonucleotide
  Sense strand starting at position 1135 of SEQ ID NO: 1886384
ugcccaugaguucgagauc

SEQ ID NO: 2405781 - RNA, 19 nt, Artificial Sequence
  Description of Artificial Sequence: Synthetic oligonucleotide
  Antisense strand to SEQ ID NO: 2405780
gaucucgaacucaugggca

SEQ ID NO: 2405782 - RNA, 19 nt, Artificial Sequence
  Description of Artificial Sequence: Synthetic oligonucleotide
  Sense strand starting at position 1224 of SEQ ID NO: 1886384
ggguuauagcgauaucuac

SEQ ID NO: 2405783 - RNA, 19 nt, Artificial Sequence
  Description of Artificial Sequence: Synthetic oligonucleotide
  Antisense strand to SEQ ID NO: 2405782
guagauaucgcuauaaccc

SEQ ID NO: 2405784 - RNA, 19 nt, Artificial Sequence
  Description of Artificial Sequence: Synthetic oligonucleotide
  Sense strand starting at position 1232 of SEQ ID NO: 1886384
gcgauaucuaccuauaggg

SEQ ID NO: 2405785 - RNA, 19 nt, Artificial Sequence
  Description of Artificial Sequence: Synthetic oligonucleotide
  Antisense strand to SEQ ID NO: 2405784
cccuauagguagauaucgc

SEQ ID NO: 2405786 - RNA, 19 nt, Artificial Sequence
  Description of Artificial Sequence: Synthetic oligonucleotide
  Sense strand starting at position 1262 of SEQ ID NO: 1886384
cuuagauaauccgcguaaa

SEQ ID NO: 2405787 - RNA, 19 nt, Artificial Sequence
  Description of Artificial Sequence: Synthetic oligonucleotide
  Antisense strand to SEQ ID NO: 2405786
uuuacgcggauuaucuaag

SEQ ID NO: 2405788 - RNA, 19 nt, Artificial Sequence
  Description of Artificial Sequence: Synthetic oligonucleotide
  Sense strand starting at position 1263 of SEQ ID NO: 1886384
uuagauaauccgcguaaag

SEQ ID NO: 2405789 - RNA, 19 nt, Artificial Sequence
  Description of Artificial Sequence: Synthetic oligonucleotide
  Antisense strand to SEQ ID NO: 2405788
cuuuacgcggauuaucuaa

SEQ ID NO: 2405790 - RNA, 19 nt, Artificial Sequence
  Description of Artificial Sequence: Synthetic oligonucleotide
  Sense strand starting at position 1318 of SEQ ID NO: 1886384
cuggucgcuguauaaagaa

SEQ ID NO: 2405791 - RNA, 19 nt, Artificial Sequence
  Description of Artificial Sequence: Synthetic oligonucleotide
  Antisense strand to SEQ ID NO: 2405790
uucuuuauacagcgaccag

SEQ ID NO: 2405792 - RNA, 19 nt, Artificial Sequence
  Description of Artificial Sequence: Synthetic oligonucleotide
  Sense strand starting at position 1359 of SEQ ID NO: 1886384
ccucuuaucgugucugguu

SEQ ID NO: 2405793 - RNA, 19 nt, Artificial Sequence
  Description of Artificial Sequence: Synthetic oligonucleotide
  Antisense strand to SEQ ID NO: 2405792
aaccagacacgauaagagg

SEQ ID NO: 2405794 - RNA, 19 nt, Artificial Sequence
  Description of Artificial Sequence: Synthetic oligonucleotide
  Sense strand starting at position 1382 of SEQ ID NO: 1886384
gaguaacugcgagguggau

SEQ ID NO: 2405795 - RNA, 19 nt, Artificial Sequence
  Description of Artificial Sequence: Synthetic oligonucleotide
  Antisense strand to SEQ ID NO: 2405794
auccaccucgcaguuacuc

SEQ ID NO: 2405796 - RNA, 19 nt, Artificial Sequence
  Description of Artificial Sequence: Synthetic oligonucleotide
  Sense strand starting at position 1569 of SEQ ID NO: 1886384
ccaguaaacagcgggaauu

SEQ ID NO: 2405797 - RNA, 19 nt, Artificial Sequence
  Description of Artificial Sequence: Synthetic oligonucleotide
  Antisense strand to SEQ ID NO: 2405796
aauucccgcuguuuacugg

SEQ ID NO: 2405798 - RNA, 19 nt, Artificial Sequence
  Description of Artificial Sequence: Synthetic oligonucleotide
  Sense strand starting at position 1579 of SEQ ID NO: 1886384
gcgggaauuccgcaagaag

SEQ ID NO: 2405799 - RNA, 19 nt, Artificial Sequence
  Description of Artificial Sequence: Synthetic oligonucleotide
  Antisense strand to SEQ ID NO: 2405798
cuucuugcggaauucccgc

SEQ ID NO: 2405800 - RNA, 19 nt, Artificial Sequence
  Description of Artificial Sequence: Synthetic oligonucleotide
  Sense strand starting at position 1590 of SEQ ID NO: 1886384
gcaagaaguggguggaaga

SEQ ID NO: 2405801 - RNA, 19 nt, Artificial Sequence
  Description of Artificial Sequence: Synthetic oligonucleotide
  Antisense strand to SEQ ID NO: 2405800
ucuuccacccacuucuugc

SEQ ID NO: 2405802 - RNA, 19 nt, Artificial Sequence
  Description of Artificial Sequence: Synthetic oligonucleotide
  Sense strand starting at position 2324 of SEQ ID NO: 1886384
cacggaguuccguuugucu

SEQ ID NO: 2405803 - RNA, 19 nt, Artificial Sequence
  Description of Artificial Sequence: Synthetic oligonucleotide
  Antisense strand to SEQ ID NO: 2405802
agacaaacggaacuccgug

SEQ ID NO: 2405804 - RNA, 19 nt, Artificial Sequence
  Description of Artificial Sequence: Synthetic oligonucleotide
  Sense strand starting at position 2607 of SEQ ID NO: 1886384
agcguucuugcgcuugaga

SEQ ID NO: 2405805 - RNA, 19 nt, Artificial Sequence
  Description of Artificial Sequence: Synthetic oligonucleotide
  Antisense strand to SEQ ID NO: 2405804
ucucaagcgcaagaacgcu

SEQ ID NO: 2405806 - RNA, 19 nt, Artificial Sequence
  Description of Artificial Sequence: Synthetic oligonucleotide
  Sense strand starting at position 2719 of SEQ ID NO: 1886384
gcgauuacccuugaccuca

SEQ ID NO: 2405807 - RNA, 19 nt, Artificial Sequence
  Description of Artificial Sequence: Synthetic oligonucleotide
  Antisense strand to SEQ ID NO: 2405806
ugaggucaaggguaaucgc

SEQ ID NO: 2405808 - RNA, 19 nt, Artificial Sequence
  Description of Artificial Sequence: Synthetic oligonucleotide
  Sense strand starting at position 2768 of SEQ ID NO: 1886384
gugagaagcucagucagau

SEQ ID NO: 2405809 - RNA, 19 nt, Artificial Sequence
  Description of Artificial Sequence: Synthetic oligonucleotide
  Antisense strand to SEQ ID NO: 2405808
aucugacugagcuucucac

SEQ ID NO: 2405810 - RNA, 19 nt, Artificial Sequence
  Description of Artificial Sequence: Synthetic oligonucleotide
  Sense strand starting at position 2786 of SEQ ID NO: 1886384
ucgcaaaggccuuagaucu

SEQ ID NO: 2405811 - RNA, 19 nt, Artificial Sequence
  Description of Artificial Sequence: Synthetic oligonucleotide
  Antisense strand to SEQ ID NO: 2405810
agaucuaaggccuuugcga

SEQ ID NO: 2405812 - RNA, 19 nt, Artificial Sequence
  Description of Artificial Sequence: Synthetic oligonucleotide
  Sense strand starting at position 2821 of SEQ ID NO: 1886384
gcgaccauucgagauagua

SEQ ID NO: 2405813 - RNA, 19 nt, Artificial Sequence
  Description of Artificial Sequence: Synthetic oligonucleotide
  Antisense strand to SEQ ID NO: 2405812
uacuaucucgaauggucgc

SEQ ID NO: 2405814 - RNA, 19 nt, Artificial Sequence
  Description of Artificial Sequence: Synthetic oligonucleotide
  Sense strand starting at position 2939 of SEQ ID NO: 1886384
ugagcuuguggcuggaaga

SEQ ID NO: 2405815 - RNA, 19 nt, Artificial Sequence
  Description of Artificial Sequence: Synthetic oligonucleotide
  Antisense strand to SEQ ID NO: 2405814
ucuuccagccacaagcuca

SEQ ID NO: 2405816 - RNA, 19 nt, Artificial Sequence
  Description of Artificial Sequence: Synthetic oligonucleotide
  Sense strand starting at position 2997 of SEQ ID NO: 1886384
ucaggagaaggcugaguuu

SEQ ID NO: 2405817 - RNA, 19 nt, Artificial Sequence
  Description of Artificial Sequence: Synthetic oligonucleotide
  Antisense strand to SEQ ID NO: 2405816
aaacucagccuucuccuga

SEQ ID NO: 2405818 - RNA, 19 nt, Artificial Sequence
  Description of Artificial Sequence: Synthetic oligonucleotide
  Sense strand starting at position 3000 of SEQ ID NO: 1886384
ggagaaggcugaguuugau

SEQ ID NO: 2405819 - RNA, 19 nt, Artificial Sequence
  Description of Artificial Sequence: Synthetic oligonucleotide
  Antisense strand to SEQ ID NO: 2405818
aucaaacucagccuucucc

SEQ ID NO: 2405820 - RNA, 19 nt, Artificial Sequence
  Description of Artificial Sequence: Synthetic oligonucleotide
  Sense strand starting at position 3009 of SEQ ID NO: 1886384
ugaguuugaugacuuacag

SEQ ID NO: 2405821 - RNA, 19 nt, Artificial Sequence
  Description of Artificial Sequence: Synthetic oligonucleotide
  Antisense strand to SEQ ID NO: 2405820
cuguaagucaucaaacuca

SEQ ID NO: 2405822 - RNA, 19 nt, Artificial Sequence
  Description of Artificial Sequence: Synthetic oligonucleotide
  Sense strand starting at position 3018 of SEQ ID NO: 1886384
ugacuuacagcgugaacau

SEQ ID NO: 2405823 - RNA, 19 nt, Artificial Sequence
  Description of Artificial Sequence: Synthetic oligonucleotide
  Antisense strand to SEQ ID NO: 2405822
auguucacgcuguaaguca

SEQ ID NO: 2405824 - RNA, 19 nt, Artificial Sequence
  Description of Artificial Sequence: Synthetic oligonucleotide
  Sense strand starting at position 3208 of SEQ ID NO: 1886384
gugucuuuaacguagauga

SEQ ID NO: 2405825 - RNA, 19 nt, Artificial Sequence
  Description of Artificial Sequence: Synthetic oligonucleotide
  Antisense strand to SEQ ID NO: 2405824
ucaucuacguuaaagacac

SEQ ID NO: 2405826 - RNA, 19 nt, Artificial Sequence
  Description of Artificial Sequence: Synthetic oligonucleotide
  Sense strand starting at position 3210 of SEQ ID NO: 1886384
gucuuuaacguagaugaga

SEQ ID NO: 2405827 - RNA, 19 nt, Artificial Sequence
  Description of Artificial Sequence: Synthetic oligonucleotide
  Antisense strand to SEQ ID NO: 2405826
ucucaucuacguuaaagac

SEQ ID NO: 2405828 - RNA, 19 nt, Artificial Sequence
  Description of Artificial Sequence: Synthetic oligonucleotide
  Sense strand starting at position 3230 of SEQ ID NO: 1886384
gagacuugauuggaagaga

SEQ ID NO: 2405829 - RNA, 19 nt, Artificial Sequence
  Description of Artificial Sequence: Synthetic oligonucleotide
  Antisense strand to SEQ ID NO: 2405828
ucucuuccaaucaagucuc

SEQ ID NO: 2405830 - RNA, 19 nt, Artificial Sequence
  Description of Artificial Sequence: Synthetic oligonucleotide
  Sense strand starting at position 3294 of SEQ ID NO: 1886384
ggguuuaagucauccaaag

SEQ ID NO: 2405831 - RNA, 19 nt, Artificial Sequence
  Description of Artificial Sequence: Synthetic oligonucleotide
  Antisense strand to SEQ ID NO: 2405830
cuuuggaugacuuaaaccc

SEQ ID NO: 2405832 - RNA, 19 nt, Artificial Sequence
  Description of Artificial Sequence: Synthetic oligonucleotide
  Sense strand starting at position 3305 of SEQ ID NO: 1886384
auccaaagaucgcuugaug

SEQ ID NO: 2405833 - RNA, 19 nt, Artificial Sequence
  Description of Artificial Sequence: Synthetic oligonucleotide
  Antisense strand to SEQ ID NO: 2405832
caucaagcgaucuuuggau

SEQ ID NO: 2405834 - RNA, 19 nt, Artificial Sequence
  Description of Artificial Sequence: Synthetic oligonucleotide
  Sense strand starting at position 3373 of SEQ ID NO: 1886384
ugguguaccgcucagaaac

SEQ ID NO: 2405835 - RNA, 19 nt, Artificial Sequence
  Description of Artificial Sequence: Synthetic oligonucleotide
  Antisense strand to SEQ ID NO: 2405834
guuucugagcgguacacca

SEQ ID NO: 2405836 - RNA, 19 nt, Artificial Sequence
  Description of Artificial Sequence: Synthetic oligonucleotide
  Sense strand starting at position 3420 of SEQ ID NO: 1886384
ccaguuugcccgugauuug

SEQ ID NO: 2405837 - RNA, 19 nt, Artificial Sequence
  Description of Artificial Sequence: Synthetic oligonucleotide
  Antisense strand to SEQ ID NO: 2405836
caaaucacgggcaaacugg

SEQ ID NO: 2405838 - RNA, 19 nt, Artificial Sequence
  Description of Artificial Sequence: Synthetic oligonucleotide
  Sense strand starting at position 3567 of SEQ ID NO: 1886384
gcgucaugccacucuguaa

SEQ ID NO: 2405839 - RNA, 19 nt, Artificial Sequence
  Description of Artificial Sequence: Synthetic oligonucleotide
  Antisense strand to SEQ ID NO: 2405838
uuacagaguggcaugacgc

SEQ ID NO: 2405840 - RNA, 19 nt, Artificial Sequence
  Description of Artificial Sequence: Synthetic oligonucleotide
  Sense strand starting at position 3581 of SEQ ID NO: 1886384
uguaaauuugagcgaccuu

SEQ ID NO: 2405841 - RNA, 19 nt, Artificial Sequence
  Description of Artificial Sequence: Synthetic oligonucleotide
  Antisense strand to SEQ ID NO: 2405840
aaggucgcucaaauuuaca

SEQ ID NO: 2405842 - RNA, 19 nt, Artificial Sequence
  Description of Artificial Sequence: Synthetic oligonucleotide
  Sense strand starting at position 47 of SEQ ID NO: 1886385
aacguuaugccauagacua

SEQ ID NO: 2405843 - RNA, 19 nt, Artificial Sequence
  Description of Artificial Sequence: Synthetic oligonucleotide
  Antisense strand to SEQ ID NO: 2405842
uagucuauggcauaacguu

SEQ ID NO: 2405844 - RNA, 19 nt, Artificial Sequence
  Description of Artificial Sequence: Synthetic oligonucleotide
  Sense strand starting at position 60 of SEQ ID NO: 1886385
agacuaggucugcacacaa

SEQ ID NO: 2405845 - RNA, 19 nt, Artificial Sequence
  Description of Artificial Sequence: Synthetic oligonucleotide
  Antisense strand to SEQ ID NO: 2405844
uugugugcagaccuagucu

SEQ ID NO: 2405846 - RNA, 19 nt, Artificial Sequence
  Description of Artificial Sequence: Synthetic oligonucleotide
  Sense strand starting at position 125 of SEQ ID NO: 1886385
aucuuauauguuuggcuaa

SEQ ID NO: 2405847 - RNA, 19 nt, Artificial Sequence
  Description of Artificial Sequence: Synthetic oligonucleotide
  Antisense strand to SEQ ID NO: 2405846
uuagccaaacauauaagau

SEQ ID NO: 2405848 - RNA, 19 nt, Artificial Sequence
  Description of Artificial Sequence: Synthetic oligonucleotide
  Sense strand starting at position 127 of SEQ ID NO: 1886385
cuuauauguuuggcuaagu

SEQ ID NO: 2405849 - RNA, 19 nt, Artificial Sequence
  Description of Artificial Sequence: Synthetic oligonucleotide
  Antisense strand to SEQ ID NO: 2405848
acuuagccaaacauauaag

SEQ ID NO: 2405850 - RNA, 19 nt, Artificial Sequence
  Description of Artificial Sequence: Synthetic oligonucleotide
  Sense strand starting at position 238 of SEQ ID NO: 1886385
uugcucuaaugacugcaua

SEQ ID NO: 2405851 - RNA, 19 nt, Artificial Sequence
  Description of Artificial Sequence: Synthetic oligonucleotide
  Antisense strand to SEQ ID NO: 2405850
uaugcagucauuagagcaa

SEQ ID NO: 2405852 - RNA, 19 nt, Artificial Sequence
  Description of Artificial Sequence: Synthetic oligonucleotide
  Sense strand starting at position 239 of SEQ ID NO: 1886385
ugcucuaaugacugcauaa

SEQ ID NO: 2405853 - RNA, 19 nt, Artificial Sequence
  Description of Artificial Sequence: Synthetic oligonucleotide
  Antisense strand to SEQ ID NO: 2405852
uuaugcagucauuagagca

SEQ ID NO: 2405854 - RNA, 19 nt, Artificial Sequence
  Description of Artificial Sequence: Synthetic oligonucleotide
  Sense strand starting at position 356 of SEQ ID NO: 1886385
gaugaauccuaagcauguu

SEQ ID NO: 2405855 - RNA, 19 nt, Artificial Sequence
  Description of Artificial Sequence: Synthetic oligonucleotide
  Antisense strand to SEQ ID NO: 2405854
aacaugcuuaggauucauc

SEQ ID NO: 2405856 - RNA, 19 nt, Artificial Sequence
  Description of Artificial Sequence: Synthetic oligonucleotide
  Sense strand starting at position 398 of SEQ ID NO: 1886385
agcauagggagcuguuaga

SEQ ID NO: 2405857 - RNA, 19 nt, Artificial Sequence
  Description of Artificial Sequence: Synthetic oligonucleotide
  Antisense strand to SEQ ID NO: 2405856
ucuaacagcucccuaugcu

SEQ ID NO: 2405858 - RNA, 19 nt, Artificial Sequence
  Description of Artificial Sequence: Synthetic oligonucleotide
  Sense strand starting at position 525 of SEQ ID NO: 1886385
aagagcaagccucgagaaa

SEQ ID NO: 2405859 - RNA, 19 nt, Artificial Sequence
  Description of Artificial Sequence: Synthetic oligonucleotide
  Antisense strand to SEQ ID NO: 2405858
uuucucgaggcuugcucuu

SEQ ID NO: 2405860 - RNA, 19 nt, Artificial Sequence
  Description of Artificial Sequence: Synthetic oligonucleotide
  Sense strand starting at position 1498 of SEQ ID NO: 1886385
cauuauuggucccucacga

SEQ ID NO: 2405861 - RNA, 19 nt, Artificial Sequence
  Description of Artificial Sequence: Synthetic oligonucleotide
  Antisense strand to SEQ ID NO: 2405860
ucgugagggaccaauaaug

SEQ ID NO: 2405862 - RNA, 19 nt, Artificial Sequence
  Description of Artificial Sequence: Synthetic oligonucleotide
  Sense strand starting at position 2130 of SEQ ID NO: 1886385
ccgugaguuagugcgcuaa

SEQ ID NO: 2405863 - RNA, 19 nt, Artificial Sequence
  Description of Artificial Sequence: Synthetic oligonucleotide
  Antisense strand to SEQ ID NO: 2405862
uuagcgcacuaacucacgg

SEQ ID NO: 2405864 - RNA, 19 nt, Artificial Sequence
  Description of Artificial Sequence: Synthetic oligonucleotide
  Sense strand starting at position 2134 of SEQ ID NO: 1886385
gaguuagugcgcuaaugga

SEQ ID NO: 2405865 - RNA, 19 nt, Artificial Sequence
  Description of Artificial Sequence: Synthetic oligonucleotide
  Antisense strand to SEQ ID NO: 2405864
uccauuagcgcacuaacuc

SEQ ID NO: 2405866 - RNA, 19 nt, Artificial Sequence
  Description of Artificial Sequence: Synthetic oligonucleotide
  Sense strand starting at position 2142 of SEQ ID NO: 1886385
gcgcuaauggagugaagga

SEQ ID NO: 2405867 - RNA, 19 nt, Artificial Sequence
  Description of Artificial Sequence: Synthetic oligonucleotide
  Antisense strand to SEQ ID NO: 2405866
uccuucacuccauuagcgc

SEQ ID NO: 2405868 - RNA, 19 nt, Artificial Sequence
  Description of Artificial Sequence: Synthetic oligonucleotide
  Sense strand starting at position 2209 of SEQ ID NO: 1886385
aggacgucccgguaacgau

SEQ ID NO: 2405869 - RNA, 19 nt, Artificial Sequence
  Description of Artificial Sequence: Synthetic oligonucleotide
  Antisense strand to SEQ ID NO: 2405868
aucguuaccgggacguccu

SEQ ID NO: 2405870 - RNA, 19 nt, Artificial Sequence
  Description of Artificial Sequence: Synthetic oligonucleotide
  Sense strand starting at position 2331 of SEQ ID NO: 1886385
gacgauuggucuuuccaag

SEQ ID NO: 2405871 - RNA, 19 nt, Artificial Sequence
  Description of Artificial Sequence: Synthetic oligonucleotide
  Antisense strand to SEQ ID NO: 2405870
cuuggaaagaccaaucguc

SEQ ID NO: 2405872 - RNA, 19 nt, Artificial Sequence
  Description of Artificial Sequence: Synthetic oligonucleotide
  Sense strand starting at position 2363 of SEQ ID NO: 1886385
agggaugucgucuggaaac

SEQ ID NO: 2405873 - RNA, 19 nt, Artificial Sequence
  Description of Artificial Sequence: Synthetic oligonucleotide
  Antisense strand to SEQ ID NO: 2405872
guuuccagacgacaucccu

SEQ ID NO: 2405874 - RNA, 19 nt, Artificial Sequence
  Description of Artificial Sequence: Synthetic oligonucleotide
  Sense strand starting at position 2365 of SEQ ID NO: 1886385
ggaugucgucuggaaacaa

SEQ ID NO: 2405875 - RNA, 19 nt, Artificial Sequence
  Description of Artificial Sequence: Synthetic oligonucleotide
  Antisense strand to SEQ ID NO: 2405874
uuguuuccagacgacaucc

SEQ ID NO: 2405876 - RNA, 19 nt, Artificial Sequence
  Description of Artificial Sequence: Synthetic oligonucleotide
  Sense strand starting at position 2618 of SEQ ID NO: 1886385
cuugcucugccgucgaaga

SEQ ID NO: 2405877 - RNA, 19 nt, Artificial Sequence
  Description of Artificial Sequence: Synthetic oligonucleotide
  Antisense strand to SEQ ID NO: 2405876
ucuucgacggcagagcaag

SEQ ID NO: 2405878 - RNA, 19 nt, Artificial Sequence
  Description of Artificial Sequence: Synthetic oligonucleotide
  Sense strand starting at position 2620 of SEQ ID NO: 1886385
ugcucugccgucgaagaga

SEQ ID NO: 2405879 - RNA, 19 nt, Artificial Sequence
  Description of Artificial Sequence: Synthetic oligonucleotide
  Antisense strand to SEQ ID NO: 2405878
ucucuucgacggcagagca

SEQ ID NO: 2405880 - RNA, 19 nt, Artificial Sequence
  Description of Artificial Sequence: Synthetic oligonucleotide
  Sense strand starting at position 2749 of SEQ ID NO: 1886385
gcuaguuaguucuccaaca

SEQ ID NO: 2405881 - RNA, 19 nt, Artificial Sequence
  Description of Artificial Sequence: Synthetic oligonucleotide
  Antisense strand to SEQ ID NO: 2405880
uguuggagaacuaacuagc

SEQ ID NO: 2405882 - RNA, 19 nt, Artificial Sequence
  Description of Artificial Sequence: Synthetic oligonucleotide
  Sense strand starting at position 2750 of SEQ ID NO: 1886385
cuaguuaguucuccaacac

SEQ ID NO: 2405883 - RNA, 19 nt, Artificial Sequence
  Description of Artificial Sequence: Synthetic oligonucleotide
  Antisense strand to SEQ ID NO: 2405882
guguuggagaacuaacuag

SEQ ID NO: 2405884 - RNA, 19 nt, Artificial Sequence
  Description of Artificial Sequence: Synthetic oligonucleotide
  Sense strand starting at position 2812 of SEQ ID NO: 1886385
gaaucaagccucugguaag

SEQ ID NO: 2405885 - RNA, 19 nt, Artificial Sequence
  Description of Artificial Sequence: Synthetic oligonucleotide
  Antisense strand to SEQ ID NO: 2405884
cuuaccagaggcuugauuc

SEQ ID NO: 2405886 - RNA, 19 nt, Artificial Sequence
  Description of Artificial Sequence: Synthetic oligonucleotide
  Sense strand starting at position 2831 of SEQ ID NO: 1886385
uguggauccuguucuaagu

SEQ ID NO: 2405887 - RNA, 19 nt, Artificial Sequence
  Description of Artificial Sequence: Synthetic oligonucleotide
  Antisense strand to SEQ ID NO: 2405886
acuuagaacaggauccaca

SEQ ID NO: 2405888 - RNA, 19 nt, Artificial Sequence
  Description of Artificial Sequence: Synthetic oligonucleotide
  Sense strand starting at position 2855 of SEQ ID NO: 1886385
uguguucuccuccagaacu

SEQ ID NO: 2405889 - RNA, 19 nt, Artificial Sequence
  Description of Artificial Sequence: Synthetic oligonucleotide
  Antisense strand to SEQ ID NO: 2405888
aguucuggaggagaacaca

SEQ ID NO: 2405890 - RNA, 19 nt, Artificial Sequence
  Description of Artificial Sequence: Synthetic oligonucleotide
  Sense strand starting at position 2919 of SEQ ID NO: 1886385
ucuuuaguucugcauguua

SEQ ID NO: 2405891 - RNA, 19 nt, Artificial Sequence
  Description of Artificial Sequence: Synthetic oligonucleotide
  Antisense strand to SEQ ID NO: 2405890
uaacaugcagaacuaaaga

SEQ ID NO: 2405892 - RNA, 19 nt, Artificial Sequence
  Description of Artificial Sequence: Synthetic oligonucleotide
  Sense strand starting at position 2921 of SEQ ID NO: 1886385
uuuaguucugcauguuacu

SEQ ID NO: 2405893 - RNA, 19 nt, Artificial Sequence
  Description of Artificial Sequence: Synthetic oligonucleotide
  Antisense strand to SEQ ID NO: 2405892
aguaacaugcagaacuaaa

SEQ ID NO: 2405894 - RNA, 19 nt, Artificial Sequence
  Description of Artificial Sequence: Synthetic oligonucleotide
  Sense strand starting at position 2975 of SEQ ID NO: 1886385
ggccucaauuuacgaaaua

SEQ ID NO: 2405895 - RNA, 19 nt, Artificial Sequence
  Description of Artificial Sequence: Synthetic oligonucleotide
  Antisense strand to SEQ ID NO: 2405894
uauuucguaaauugaggcc

SEQ ID NO: 2405896 - RNA, 19 nt, Artificial Sequence
  Description of Artificial Sequence: Synthetic oligonucleotide
  Sense strand starting at position 2976 of SEQ ID NO: 1886385
gccucaauuuacgaaauaa

SEQ ID NO: 2405897 - RNA, 19 nt, Artificial Sequence
  Description of Artificial Sequence: Synthetic oligonucleotide
  Antisense strand to SEQ ID NO: 2405896
uuauuucguaaauugaggc

SEQ ID NO: 2405898 - RNA, 19 nt, Artificial Sequence
  Description of Artificial Sequence: Synthetic oligonucleotide
  Sense strand starting at position 3054 of SEQ ID NO: 1886385
acgcauuauggucgagaga

SEQ ID NO: 2405899 - RNA, 19 nt, Artificial Sequence
  Description of Artificial Sequence: Synthetic oligonucleotide
  Antisense strand to SEQ ID NO: 2405898
ucucucgaccauaaugcgu

SEQ ID NO: 2405900 - RNA, 19 nt, Artificial Sequence
  Description of Artificial Sequence: Synthetic oligonucleotide
  Sense strand starting at position 3055 of SEQ ID NO: 1886385
cgcauuauggucgagagau

SEQ ID NO: 2405901 - RNA, 19 nt, Artificial Sequence
  Description of Artificial Sequence: Synthetic oligonucleotide
  Antisense strand to SEQ ID NO: 2405900
aucucucgaccauaaugcg

SEQ ID NO: 2405902 - RNA, 19 nt, Artificial Sequence
  Description of Artificial Sequence: Synthetic oligonucleotide
  Sense strand starting at position 3133 of SEQ ID NO: 1886385
uaggcuuugucucucagau

SEQ ID NO: 2405903 - RNA, 19 nt, Artificial Sequence
  Description of Artificial Sequence: Synthetic oligonucleotide
  Antisense strand to SEQ ID NO: 2405902
aucugagagacaaagccua

SEQ ID NO: 2405904 - RNA, 19 nt, Artificial Sequence
  Description of Artificial Sequence: Synthetic oligonucleotide
  Sense strand starting at position 3153 of SEQ ID NO: 1886385
uucaguuucuuggugggua

SEQ ID NO: 2405905 - RNA, 19 nt, Artificial Sequence
  Description of Artificial Sequence: Synthetic oligonucleotide
  Antisense strand to SEQ ID NO: 2405904
uacccaccaagaaacugaa

SEQ ID NO: 2405906 - RNA, 19 nt, Artificial Sequence
  Description of Artificial Sequence: Synthetic oligonucleotide
  Sense strand starting at position 3155 of SEQ ID NO: 1886385
caguuucuugguggguaaa

SEQ ID NO: 2405907 - RNA, 19 nt, Artificial Sequence
  Description of Artificial Sequence: Synthetic oligonucleotide
  Antisense strand to SEQ ID NO: 2405906
uuuacccaccaagaaacug

SEQ ID NO: 2405908 - RNA, 19 nt, Artificial Sequence
  Description of Artificial Sequence: Synthetic oligonucleotide
  Sense strand starting at position 3577 of SEQ ID NO: 1886385
gggaaacauuaguuaugcu

SEQ ID NO: 2405909 - RNA, 19 nt, Artificial Sequence
  Description of Artificial Sequence: Synthetic oligonucleotide
  Antisense strand to SEQ ID NO: 2405908
agcauaacuaauguuuccc

SEQ ID NO: 2405910 - RNA, 19 nt, Artificial Sequence
  Description of Artificial Sequence: Synthetic oligonucleotide
  Sense strand starting at position 3704 of SEQ ID NO: 1886385
cgcugaugugcguucacga

SEQ ID NO: 2405911 - RNA, 19 nt, Artificial Sequence
  Description of Artificial Sequence: Synthetic oligonucleotide
  Antisense strand to SEQ ID NO: 2405910
ucgugaacgcacaucagcg

SEQ ID NO: 2405912 - RNA, 19 nt, Artificial Sequence
  Description of Artificial Sequence: Synthetic oligonucleotide
  Sense strand starting at position 3705 of SEQ ID NO: 1886385
gcugaugugcguucacgaa

SEQ ID NO: 2405913 - RNA, 19 nt, Artificial Sequence
  Description of Artificial Sequence: Synthetic oligonucleotide
  Antisense strand to SEQ ID NO: 2405912
uucgugaacgcacaucagc

SEQ ID NO: 2405914 - RNA, 19 nt, Artificial Sequence
  Description of Artificial Sequence: Synthetic oligonucleotide
  Sense strand starting at position 3728 of SEQ ID NO: 1886385
ugauccaaguguuuccaua

SEQ ID NO: 2405915 - RNA, 19 nt, Artificial Sequence
  Description of Artificial Sequence: Synthetic oligonucleotide
  Antisense strand to SEQ ID NO: 2405914
uauggaaacacuuggauca

SEQ ID NO: 2405916 - RNA, 19 nt, Artificial Sequence
  Description of Artificial Sequence: Synthetic oligonucleotide
  Sense strand starting at position 3730 of SEQ ID NO: 1886385
auccaaguguuuccauauu

SEQ ID NO: 2405917 - RNA, 19 nt, Artificial Sequence
  Description of Artificial Sequence: Synthetic oligonucleotide
  Antisense strand to SEQ ID NO: 2405916
aauauggaaacacuuggau

SEQ ID NO: 2405918 - RNA, 19 nt, Artificial Sequence
  Description of Artificial Sequence: Synthetic oligonucleotide
  Sense strand starting at position 3815 of SEQ ID NO: 1886385
auggaauuauucuagauga

SEQ ID NO: 2405919 - RNA, 19 nt, Artificial Sequence
  Description of Artificial Sequence: Synthetic oligonucleotide
  Antisense strand to SEQ ID NO: 2405918
ucaucuagaauaauuccau

SEQ ID NO: 2405920 - RNA, 19 nt, Artificial Sequence
  Description of Artificial Sequence: Synthetic oligonucleotide
  Sense strand starting at position 3924 of SEQ ID NO: 1886385
gcucgcacucgagaauguu

SEQ ID NO: 2405921 - RNA, 19 nt, Artificial Sequence
  Description of Artificial Sequence: Synthetic oligonucleotide
  Antisense strand to SEQ ID NO: 2405920
aacauucucgagugcgagc

SEQ ID NO: 2405922 - RNA, 19 nt, Artificial Sequence
  Description of Artificial Sequence: Synthetic oligonucleotide
  Sense strand starting at position 48 of SEQ ID NO: 1886386
uuuccuaugucacuuauag

SEQ ID NO: 2405923 - RNA, 19 nt, Artificial Sequence
  Description of Artificial Sequence: Synthetic oligonucleotide
  Antisense strand to SEQ ID NO: 2405922
cuauaagugacauaggaaa

SEQ ID NO: 2405924 - RNA, 19 nt, Artificial Sequence
  Description of Artificial Sequence: Synthetic oligonucleotide
  Sense strand starting at position 76 of SEQ ID NO: 1886386
agaaguacuuugcccaaau

SEQ ID NO: 2405925 - RNA, 19 nt, Artificial Sequence
  Description of Artificial Sequence: Synthetic oligonucleotide
  Antisense strand to SEQ ID NO: 2405924
auuugggcaaaguacuucu

SEQ ID NO: 2405926 - RNA, 19 nt, Artificial Sequence
  Description of Artificial Sequence: Synthetic oligonucleotide
  Sense strand starting at position 113 of SEQ ID NO: 1886386
ugaucugaauuaucuguaa

SEQ ID NO: 2405927 - RNA, 19 nt, Artificial Sequence
  Description of Artificial Sequence: Synthetic oligonucleotide
  Antisense strand to SEQ ID NO: 2405926
uuacagauaauucagauca

SEQ ID NO: 2405928 - RNA, 19 nt, Artificial Sequence
  Description of Artificial Sequence: Synthetic oligonucleotide
  Sense strand starting at position 148 of SEQ ID NO: 1886386
ucaccugauguguauguau

SEQ ID NO: 2405929 - RNA, 19 nt, Artificial Sequence
  Description of Artificial Sequence: Synthetic oligonucleotide
  Antisense strand to SEQ ID NO: 2405928
auacauacacaucagguga

SEQ ID NO: 2405930 - RNA, 19 nt, Artificial Sequence
  Description of Artificial Sequence: Synthetic oligonucleotide
  Sense strand starting at position 150 of SEQ ID NO: 1886386
accugauguguauguauua

SEQ ID NO: 2405931 - RNA, 19 nt, Artificial Sequence
  Description of Artificial Sequence: Synthetic oligonucleotide
  Antisense strand to SEQ ID NO: 2405930
uaauacauacacaucaggu

SEQ ID NO: 2405932 - RNA, 19 nt, Artificial Sequence
  Description of Artificial Sequence: Synthetic oligonucleotide
  Sense strand starting at position 174 of SEQ ID NO: 1886386
guguguuauauguauguag

SEQ ID NO: 2405933 - RNA, 19 nt, Artificial Sequence
  Description of Artificial Sequence: Synthetic oligonucleotide
  Antisense strand to SEQ ID NO: 2405932
cuacauacauauaacacac

SEQ ID NO: 2405934 - RNA, 19 nt, Artificial Sequence
  Description of Artificial Sequence: Synthetic oligonucleotide
  Sense strand starting at position 178 of SEQ ID NO: 1886386
guuauauguauguagugua

SEQ ID NO: 2405935 - RNA, 19 nt, Artificial Sequence
  Description of Artificial Sequence: Synthetic oligonucleotide
  Antisense strand to SEQ ID NO: 2405934
uacacuacauacauauaac

SEQ ID NO: 2405936 - RNA, 19 nt, Artificial Sequence
  Description of Artificial Sequence: Synthetic oligonucleotide
  Sense strand starting at position 271 of SEQ ID NO: 1886386
cagaaugcuugcuugugaa

SEQ ID NO: 2405937 - RNA, 19 nt, Artificial Sequence
  Description of Artificial Sequence: Synthetic oligonucleotide
  Antisense strand to SEQ ID NO: 2405936
uucacaagcaagcauucug

SEQ ID NO: 2405938 - RNA, 19 nt, Artificial Sequence
  Description of Artificial Sequence: Synthetic oligonucleotide
  Sense strand starting at position 294 of SEQ ID NO: 1886386
uuaagaaagucuuugucaa

SEQ ID NO: 2405939 - RNA, 19 nt, Artificial Sequence
  Description of Artificial Sequence: Synthetic oligonucleotide
  Antisense strand to SEQ ID NO: 2405938
uugacaaagacuuucuuaa

SEQ ID NO: 2405940 - RNA, 19 nt, Artificial Sequence
  Description of Artificial Sequence: Synthetic oligonucleotide
  Sense strand starting at position 499 of SEQ ID NO: 1886386
augucaacauuaucaaguu

SEQ ID NO: 2405941 - RNA, 19 nt, Artificial Sequence
  Description of Artificial Sequence: Synthetic oligonucleotide
  Antisense strand to SEQ ID NO: 2405940
aacuugauaauguugacau

SEQ ID NO: 2405942 - RNA, 19 nt, Artificial Sequence
  Description of Artificial Sequence: Synthetic oligonucleotide
  Sense strand starting at position 604 of SEQ ID NO: 1886386
ggaaauuaauagcacauuu

SEQ ID NO: 2405943 - RNA, 19 nt, Artificial Sequence
  Description of Artificial Sequence: Synthetic oligonucleotide
  Antisense strand to SEQ ID NO: 2405942
aaaugugcuauuaauuucc

SEQ ID NO: 2405944 - RNA, 19 nt, Artificial Sequence
  Description of Artificial Sequence: Synthetic oligonucleotide
  Sense strand starting at position 859 of SEQ ID NO: 1886386
uaacguauuuacguagaug

SEQ ID NO: 2405945 - RNA, 19 nt, Artificial Sequence
  Description of Artificial Sequence: Synthetic oligonucleotide
  Antisense strand to SEQ ID NO: 2405944
caucuacguaaauacguua

SEQ ID NO: 2405946 - RNA, 19 nt, Artificial Sequence
  Description of Artificial Sequence: Synthetic oligonucleotide
  Sense strand starting at position 862 of SEQ ID NO: 1886386
cguauuuacguagauguac

SEQ ID NO: 2405947 - RNA, 19 nt, Artificial Sequence
  Description of Artificial Sequence: Synthetic oligonucleotide
  Antisense strand to SEQ ID NO: 2405946
guacaucuacguaaauacg

SEQ ID NO: 2405948 - RNA, 19 nt, Artificial Sequence
  Description of Artificial Sequence: Synthetic oligonucleotide
  Sense strand starting at position 913 of SEQ ID NO: 1886386
gaagaauuguuagcccaga

SEQ ID NO: 2405949 - RNA, 19 nt, Artificial Sequence
  Description of Artificial Sequence: Synthetic oligonucleotide
  Antisense strand to SEQ ID NO: 2405948
ucugggcuaacaauucuuc

SEQ ID NO: 2405950 - RNA, 19 nt, Artificial Sequence
  Description of Artificial Sequence: Synthetic oligonucleotide
  Sense strand starting at position 934 of SEQ ID NO: 1886386
uugaaaugucaugggaauu

SEQ ID NO: 2405951 - RNA, 19 nt, Artificial Sequence
  Description of Artificial Sequence: Synthetic oligonucleotide
  Antisense strand to SEQ ID NO: 2405950
aauucccaugacauuucaa

SEQ ID NO: 2405952 - RNA, 19 nt, Artificial Sequence
  Description of Artificial Sequence: Synthetic oligonucleotide
  Sense strand starting at position 946 of SEQ ID NO: 1886386
gggaauuauugcucuccuu

SEQ ID NO: 2405953 - RNA, 19 nt, Artificial Sequence
  Description of Artificial Sequence: Synthetic oligonucleotide
  Antisense strand to SEQ ID NO: 2405952
aaggagagcaauaauuccc

SEQ ID NO: 2405954 - RNA, 19 nt, Artificial Sequence
  Description of Artificial Sequence: Synthetic oligonucleotide
  Sense strand starting at position 971 of SEQ ID NO: 1886386
cugucuauagcguauauaa

SEQ ID NO: 2405955 - RNA, 19 nt, Artificial Sequence
  Description of Artificial Sequence: Synthetic oligonucleotide
  Antisense strand to SEQ ID NO: 2405954
uuauauacgcuauagacag

SEQ ID NO: 2405956 - RNA, 19 nt, Artificial Sequence
  Description of Artificial Sequence: Synthetic oligonucleotide
  Sense strand starting at position 973 of SEQ ID NO: 1886386
gucuauagcguauauaacu

SEQ ID NO: 2405957 - RNA, 19 nt, Artificial Sequence
  Description of Artificial Sequence: Synthetic oligonucleotide
  Antisense strand to SEQ ID NO: 2405956
aguuauauacgcuauagac

SEQ ID NO: 2405958 - RNA, 19 nt, Artificial Sequence
  Description of Artificial Sequence: Synthetic oligonucleotide
  Sense strand starting at position 1367 of SEQ ID NO: 1886386
gauaaagugcuguauagac

SEQ ID NO: 2405959 - RNA, 19 nt, Artificial Sequence
  Description of Artificial Sequence: Synthetic oligonucleotide
  Antisense strand to SEQ ID NO: 2405958
gucuauacagcacuuuauc

SEQ ID NO: 2405960 - RNA, 19 nt, Artificial Sequence
  Description of Artificial Sequence: Synthetic oligonucleotide
  Sense strand starting at position 1369 of SEQ ID NO: 1886386
uaaagugcuguauagacuu

SEQ ID NO: 2405961 - RNA, 19 nt, Artificial Sequence
  Description of Artificial Sequence: Synthetic oligonucleotide
  Antisense strand to SEQ ID NO: 2405960
aagucuauacagcacuuua

SEQ ID NO: 2405962 - RNA, 19 nt, Artificial Sequence
  Description of Artificial Sequence: Synthetic oligonucleotide
  Sense strand starting at position 1668 of SEQ ID NO: 1886386
cgagguguuucucuuggau

SEQ ID NO: 2405963 - RNA, 19 nt, Artificial Sequence
  Description of Artificial Sequence: Synthetic oligonucleotide
  Antisense strand to SEQ ID NO: 2405962
auccaagagaaacaccucg

SEQ ID NO: 2405964 - RNA, 19 nt, Artificial Sequence
  Description of Artificial Sequence: Synthetic oligonucleotide
  Sense strand starting at position 1671 of SEQ ID NO: 1886386
gguguuucucuuggauauu

SEQ ID NO: 2405965 - RNA, 19 nt, Artificial Sequence
  Description of Artificial Sequence: Synthetic oligonucleotide
  Antisense strand to SEQ ID NO: 2405964
aauauccaagagaaacacc

SEQ ID NO: 2405966 - RNA, 19 nt, Artificial Sequence
  Description of Artificial Sequence: Synthetic oligonucleotide
  Sense strand starting at position 1674 of SEQ ID NO: 1886386
guuucucuuggauauugua

SEQ ID NO: 2405967 - RNA, 19 nt, Artificial Sequence
  Description of Artificial Sequence: Synthetic oligonucleotide
  Antisense strand to SEQ ID NO: 2405966
uacaauauccaagagaaac

SEQ ID NO: 2405968 - RNA, 19 nt, Artificial Sequence
  Description of Artificial Sequence: Synthetic oligonucleotide
  Sense strand starting at position 1915 of SEQ ID NO: 1886386
ccaggaaacuucgcaguuu

SEQ ID NO: 2405969 - RNA, 19 nt, Artificial Sequence
  Description of Artificial Sequence: Synthetic oligonucleotide
  Antisense strand to SEQ ID NO: 2405968
aaacugcgaaguuuccugg

SEQ ID NO: 2405970 - RNA, 19 nt, Artificial Sequence
  Description of Artificial Sequence: Synthetic oligonucleotide
  Sense strand starting at position 2092 of SEQ ID NO: 1886386
acgugucagaaacaucgau

SEQ ID NO: 2405971 - RNA, 19 nt, Artificial Sequence
  Description of Artificial Sequence: Synthetic oligonucleotide
  Antisense strand to SEQ ID NO: 2405970
aucgauguuucugacacgu

SEQ ID NO: 2405972 - RNA, 19 nt, Artificial Sequence
  Description of Artificial Sequence: Synthetic oligonucleotide
  Sense strand starting at position 2146 of SEQ ID NO: 1886386
gucagugagaguuggcaga

SEQ ID NO: 2405973 - RNA, 19 nt, Artificial Sequence
  Description of Artificial Sequence: Synthetic oligonucleotide
  Antisense strand to SEQ ID NO: 2405972
ucugccaacucucacugac

SEQ ID NO: 2405974 - RNA, 19 nt, Artificial Sequence
  Description of Artificial Sequence: Synthetic oligonucleotide
  Sense strand starting at position 2148 of SEQ ID NO: 1886386
cagugagaguuggcagagu

SEQ ID NO: 2405975 - RNA, 19 nt, Artificial Sequence
  Description of Artificial Sequence: Synthetic oligonucleotide
  Antisense strand to SEQ ID NO: 2405974
acucugccaacucucacug

SEQ ID NO: 2405976 - RNA, 19 nt, Artificial Sequence
  Description of Artificial Sequence: Synthetic oligonucleotide
  Sense strand starting at position 2279 of SEQ ID NO: 1886386
gcuagagaaccuugggaug

SEQ ID NO: 2405977 - RNA, 19 nt, Artificial Sequence
  Description of Artificial Sequence: Synthetic oligonucleotide
  Antisense strand to SEQ ID NO: 2405976
caucccaagguucucuagc

SEQ ID NO: 2405978 - RNA, 19 nt, Artificial Sequence
  Description of Artificial Sequence: Synthetic oligonucleotide
  Sense strand starting at position 2578 of SEQ ID NO: 1886386
cuggcuuccuugguugaga

SEQ ID NO: 2405979 - RNA, 19 nt, Artificial Sequence
  Description of Artificial Sequence: Synthetic oligonucleotide
  Antisense strand to SEQ ID NO: 2405978
ucucaaccaaggaagccag

SEQ ID NO: 2405980 - RNA, 19 nt, Artificial Sequence
  Description of Artificial Sequence: Synthetic oligonucleotide
  Sense strand starting at position 2580 of SEQ ID NO: 1886386
ggcuuccuugguugagacu

SEQ ID NO: 2405981 - RNA, 19 nt, Artificial Sequence
  Description of Artificial Sequence: Synthetic oligonucleotide
  Antisense strand to SEQ ID NO: 2405980
agucucaaccaaggaagcc

SEQ ID NO: 2405982 - RNA, 19 nt, Artificial Sequence
  Description of Artificial Sequence: Synthetic oligonucleotide
  Sense strand starting at position 2637 of SEQ ID NO: 1886386
aggagaugcuggguugcau

SEQ ID NO: 2405983 - RNA, 19 nt, Artificial Sequence
  Description of Artificial Sequence: Synthetic oligonucleotide
  Antisense strand to SEQ ID NO: 2405982
augcaacccagcaucuccu

SEQ ID NO: 2405984 - RNA, 19 nt, Artificial Sequence
  Description of Artificial Sequence: Synthetic oligonucleotide
  Sense strand starting at position 2703 of SEQ ID NO: 1886386
cgcggucugcuccauuuaa

SEQ ID NO: 2405985 - RNA, 19 nt, Artificial Sequence
  Description of Artificial Sequence: Synthetic oligonucleotide
  Antisense strand to SEQ ID NO: 2405984
uuaaauggagcagaccgcg

SEQ ID NO: 2405986 - RNA, 19 nt, Artificial Sequence
  Description of Artificial Sequence: Synthetic oligonucleotide
  Sense strand starting at position 2759 of SEQ ID NO: 1886386
cccugaugcuuagcaacua

SEQ ID NO: 2405987 - RNA, 19 nt, Artificial Sequence
  Description of Artificial Sequence: Synthetic oligonucleotide
  Antisense strand to SEQ ID NO: 2405986
uaguugcuaagcaucaggg

SEQ ID NO: 2405988 - RNA, 19 nt, Artificial Sequence
  Description of Artificial Sequence: Synthetic oligonucleotide
  Sense strand starting at position 2778 of SEQ ID NO: 1886386
ugagcuuuaccagagguca

SEQ ID NO: 2405989 - RNA, 19 nt, Artificial Sequence
  Description of Artificial Sequence: Synthetic oligonucleotide
  Antisense strand to SEQ ID NO: 2405988
ugaccucugguaaagcuca

SEQ ID NO: 2405990 - RNA, 19 nt, Artificial Sequence
  Description of Artificial Sequence: Synthetic oligonucleotide
  Sense strand starting at position 2888 of SEQ ID NO: 1886386
aaccucugcccguagagua

SEQ ID NO: 2405991 - RNA, 19 nt, Artificial Sequence
  Description of Artificial Sequence: Synthetic oligonucleotide
  Antisense strand to SEQ ID NO: 2405990
uacucuacgggcagagguu

SEQ ID NO: 2405992 - RNA, 19 nt, Artificial Sequence
  Description of Artificial Sequence: Synthetic oligonucleotide
  Sense strand starting at position 3215 of SEQ ID NO: 1886386
acgagaccuugucuaacaa

SEQ ID NO: 2405993 - RNA, 19 nt, Artificial Sequence
  Description of Artificial Sequence: Synthetic oligonucleotide
  Antisense strand to SEQ ID NO: 2405992
uuguuagacaaggucucgu

SEQ ID NO: 2405994 - RNA, 19 nt, Artificial Sequence
  Description of Artificial Sequence: Synthetic oligonucleotide
  Sense strand starting at position 3216 of SEQ ID NO: 1886386
cgagaccuugucuaacaaa

SEQ ID NO: 2405995 - RNA, 19 nt, Artificial Sequence
  Description of Artificial Sequence: Synthetic oligonucleotide
  Antisense strand to SEQ ID NO: 2405994
uuuguuagacaaggucucg

SEQ ID NO: 2405996 - RNA, 19 nt, Artificial Sequence
  Description of Artificial Sequence: Synthetic oligonucleotide
  Sense strand starting at position 3741 of SEQ ID NO: 1886386
ggcacuucccagcagagaa

SEQ ID NO: 2405997 - RNA, 19 nt, Artificial Sequence
  Description of Artificial Sequence: Synthetic oligonucleotide
  Antisense strand to SEQ ID NO: 2405996
uucucugcugggaagugcc

SEQ ID NO: 2405998 - RNA, 19 nt, Artificial Sequence
  Description of Artificial Sequence: Synthetic oligonucleotide
  Sense strand starting at position 3938 of SEQ ID NO: 1886386
cuaagugaugcauacauug

SEQ ID NO: 2405999 - RNA, 19 nt, Artificial Sequence
  Description of Artificial Sequence: Synthetic oligonucleotide
  Antisense strand to SEQ ID NO: 2405998
caauguaugcaucacuuag

SEQ ID NO: 2406000 - RNA, 19 nt, Artificial Sequence
  Description of Artificial Sequence: Synthetic oligonucleotide
  Sense strand starting at position 3943 of SEQ ID NO: 1886386
ugaugcauacauugaauca

SEQ ID NO: 2406001 - RNA, 19 nt, Artificial Sequence
  Description of Artificial Sequence: Synthetic oligonucleotide
  Antisense strand to SEQ ID NO: 2406000
ugauucaauguaugcauca

SEQ ID NO: 2406002 - RNA, 19 nt, Artificial Sequence
  Description of Artificial Sequence: Synthetic oligonucleotide
  Sense strand starting at position 19 of SEQ ID NO: 1886387
agacuugcauaucugacau

SEQ ID NO: 2406003 - RNA, 19 nt, Artificial Sequence
  Description of Artificial Sequence: Synthetic oligonucleotide
  Antisense strand to SEQ ID NO: 2406002
augucagauaugcaagucu

SEQ ID NO: 2406004 - RNA, 19 nt, Artificial Sequence
  Description of Artificial Sequence: Synthetic oligonucleotide
  Sense strand starting at position 351 of SEQ ID NO: 1886387
ucccgagugguguggugua

SEQ ID NO: 2406005 - RNA, 19 nt, Artificial Sequence
  Description of Artificial Sequence: Synthetic oligonucleotide
  Antisense strand to SEQ ID NO: 2406004
uacaccacaccacucggga

SEQ ID NO: 2406006 - RNA, 19 nt, Artificial Sequence
  Description of Artificial Sequence: Synthetic oligonucleotide
  Sense strand starting at position 356 of SEQ ID NO: 1886387
aguggugugguguaaagua

SEQ ID NO: 2406007 - RNA, 19 nt, Artificial Sequence
  Description of Artificial Sequence: Synthetic oligonucleotide
  Antisense strand to SEQ ID NO: 2406006
uacuuuacaccacaccacu

SEQ ID NO: 2406008 - RNA, 19 nt, Artificial Sequence
  Description of Artificial Sequence: Synthetic oligonucleotide
  Sense strand starting at position 361 of SEQ ID NO: 1886387
ugugguguaaaguagcauu

SEQ ID NO: 2406009 - RNA, 19 nt, Artificial Sequence
  Description of Artificial Sequence: Synthetic oligonucleotide
  Antisense strand to SEQ ID NO: 2406008
aaugcuacuuuacaccaca

SEQ ID NO: 2406010 - RNA, 19 nt, Artificial Sequence
  Description of Artificial Sequence: Synthetic oligonucleotide
  Sense strand starting at position 369 of SEQ ID NO: 1886387
aaaguagcauuagagauaa

SEQ ID NO: 2406011 - RNA, 19 nt, Artificial Sequence
  Description of Artificial Sequence: Synthetic oligonucleotide
  Antisense strand to SEQ ID NO: 2406010
uuaucucuaaugcuacuuu

SEQ ID NO: 2406012 - RNA, 19 nt, Artificial Sequence
  Description of Artificial Sequence: Synthetic oligonucleotide
  Sense strand starting at position 440 of SEQ ID NO: 1886387
aguaucuguuaccuuuaca

SEQ ID NO: 2406013 - RNA, 19 nt, Artificial Sequence
  Description of Artificial Sequence: Synthetic oligonucleotide
  Antisense strand to SEQ ID NO: 2406012
uguaaagguaacagauacu

SEQ ID NO: 2406014 - RNA, 19 nt, Artificial Sequence
  Description of Artificial Sequence: Synthetic oligonucleotide
  Sense strand starting at position 445 of SEQ ID NO: 1886387
cuguuaccuuuacagugaa

SEQ ID NO: 2406015 - RNA, 19 nt, Artificial Sequence
  Description of Artificial Sequence: Synthetic oligonucleotide
  Antisense strand to SEQ ID NO: 2406014
uucacuguaaagguaacag

SEQ ID NO: 2406016 - RNA, 19 nt, Artificial Sequence
  Description of Artificial Sequence: Synthetic oligonucleotide
  Sense strand starting at position 556 of SEQ ID NO: 1886387
agcggagaucguuauguuu

SEQ ID NO: 2406017 - RNA, 19 nt, Artificial Sequence
  Description of Artificial Sequence: Synthetic oligonucleotide
  Antisense strand to SEQ ID NO: 2406016
aaacauaacgaucuccgcu

SEQ ID NO: 2406018 - RNA, 19 nt, Artificial Sequence
  Description of Artificial Sequence: Synthetic oligonucleotide
  Sense strand starting at position 616 of SEQ ID NO: 1886387
cucaauuauuugugguuau

SEQ ID NO: 2406019 - RNA, 19 nt, Artificial Sequence
  Description of Artificial Sequence: Synthetic oligonucleotide
  Antisense strand to SEQ ID NO: 2406018
auaaccacaaauaauugag

SEQ ID NO: 2406020 - RNA, 19 nt, Artificial Sequence
  Description of Artificial Sequence: Synthetic oligonucleotide
  Sense strand starting at position 617 of SEQ ID NO: 1886387
ucaauuauuugugguuauc

SEQ ID NO: 2406021 - RNA, 19 nt, Artificial Sequence
  Description of Artificial Sequence: Synthetic oligonucleotide
  Antisense strand to SEQ ID NO: 2406020
gauaaccacaaauaauuga

SEQ ID NO: 2406022 - RNA, 19 nt, Artificial Sequence
  Description of Artificial Sequence: Synthetic oligonucleotide
  Sense strand starting at position 675 of SEQ ID NO: 1886387
gaaggaugguuacuucuag

SEQ ID NO: 2406023 - RNA, 19 nt, Artificial Sequence
  Description of Artificial Sequence: Synthetic oligonucleotide
  Antisense strand to SEQ ID NO: 2406022
cuagaaguaaccauccuuc

SEQ ID NO: 2406024 - RNA, 19 nt, Artificial Sequence
  Description of Artificial Sequence: Synthetic oligonucleotide
  Sense strand starting at position 679 of SEQ ID NO: 1886387
gaugguuacuucuagugua

SEQ ID NO: 2406025 - RNA, 19 nt, Artificial Sequence
  Description of Artificial Sequence: Synthetic oligonucleotide
  Antisense strand to SEQ ID NO: 2406024
uacacuagaaguaaccauc

SEQ ID NO: 2406026 - RNA, 19 nt, Artificial Sequence
  Description of Artificial Sequence: Synthetic oligonucleotide
  Sense strand starting at position 684 of SEQ ID NO: 1886387
uuacuucuaguguaaccaa

SEQ ID NO: 2406027 - RNA, 19 nt, Artificial Sequence
  Description of Artificial Sequence: Synthetic oligonucleotide
  Antisense strand to SEQ ID NO: 2406026
uugguuacacuagaaguaa

SEQ ID NO: 2406028 - RNA, 19 nt, Artificial Sequence
  Description of Artificial Sequence: Synthetic oligonucleotide
  Sense strand starting at position 765 of SEQ ID NO: 1886387
gaucuaguauuugaucaag

SEQ ID NO: 2406029 - RNA, 19 nt, Artificial Sequence
  Description of Artificial Sequence: Synthetic oligonucleotide
  Antisense strand to SEQ ID NO: 2406028
cuugaucaaauacuagauc

SEQ ID NO: 2406030 - RNA, 19 nt, Artificial Sequence
  Description of Artificial Sequence: Synthetic oligonucleotide
  Sense strand starting at position 851 of SEQ ID NO: 1886387
ucuaguauuugaccgcaca

SEQ ID NO: 2406031 - RNA, 19 nt, Artificial Sequence
  Description of Artificial Sequence: Synthetic oligonucleotide
  Antisense strand to SEQ ID NO: 2406030
ugugcggucaaauacuaga

SEQ ID NO: 2406032 - RNA, 19 nt, Artificial Sequence
  Description of Artificial Sequence: Synthetic oligonucleotide
  Sense strand starting at position 852 of SEQ ID NO: 1886387
cuaguauuugaccgcacaa

SEQ ID NO: 2406033 - RNA, 19 nt, Artificial Sequence
  Description of Artificial Sequence: Synthetic oligonucleotide
  Antisense strand to SEQ ID NO: 2406032
uugugcggucaaauacuag

SEQ ID NO: 2406034 - RNA, 19 nt, Artificial Sequence
  Description of Artificial Sequence: Synthetic oligonucleotide
  Sense strand starting at position 1129 of SEQ ID NO: 1886387
ggucucaaauccuugacuu

SEQ ID NO: 2406035 - RNA, 19 nt, Artificial Sequence
  Description of Artificial Sequence: Synthetic oligonucleotide
  Antisense strand to SEQ ID NO: 2406034
aagucaaggauuugagacc

SEQ ID NO: 2406036 - RNA, 19 nt, Artificial Sequence
  Description of Artificial Sequence: Synthetic oligonucleotide
  Sense strand starting at position 1249 of SEQ ID NO: 1886387
ucauauuguuuguaacaca

SEQ ID NO: 2406037 - RNA, 19 nt, Artificial Sequence
  Description of Artificial Sequence: Synthetic oligonucleotide
  Antisense strand to SEQ ID NO: 2406036
uguguuacaaacaauauga

SEQ ID NO: 2406038 - RNA, 19 nt, Artificial Sequence
  Description of Artificial Sequence: Synthetic oligonucleotide
  Sense strand starting at position 1305 of SEQ ID NO: 1886387
acaugugauuauuacgaac

SEQ ID NO: 2406039 - RNA, 19 nt, Artificial Sequence
  Description of Artificial Sequence: Synthetic oligonucleotide
  Antisense strand to SEQ ID NO: 2406038
guucguaauaaucacaugu

SEQ ID NO: 2406040 - RNA, 19 nt, Artificial Sequence
  Description of Artificial Sequence: Synthetic oligonucleotide
  Sense strand starting at position 1307 of SEQ ID NO: 1886387
augugauuauuacgaacug

SEQ ID NO: 2406041 - RNA, 19 nt, Artificial Sequence
  Description of Artificial Sequence: Synthetic oligonucleotide
  Antisense strand to SEQ ID NO: 2406040
caguucguaauaaucacau

SEQ ID NO: 2406042 - RNA, 19 nt, Artificial Sequence
  Description of Artificial Sequence: Synthetic oligonucleotide
  Sense strand starting at position 1416 of SEQ ID NO: 1886387
aaaugugaugcugguggua

SEQ ID NO: 2406043 - RNA, 19 nt, Artificial Sequence
  Description of Artificial Sequence: Synthetic oligonucleotide
  Antisense strand to SEQ ID NO: 2406042
uaccaccagcaucacauuu

SEQ ID NO: 2406044 - RNA, 19 nt, Artificial Sequence
  Description of Artificial Sequence: Synthetic oligonucleotide
  Sense strand starting at position 2463 of SEQ ID NO: 1886387
uggcgucugguugccauaa

SEQ ID NO: 2406045 - RNA, 19 nt, Artificial Sequence
  Description of Artificial Sequence: Synthetic oligonucleotide
  Antisense strand to SEQ ID NO: 2406044
uuauggcaaccagacgcca

SEQ ID NO: 2406046 - RNA, 19 nt, Artificial Sequence
  Description of Artificial Sequence: Synthetic oligonucleotide
  Sense strand starting at position 2808 of SEQ ID NO: 1886387
auugucuuguccgccugaa

SEQ ID NO: 2406047 - RNA, 19 nt, Artificial Sequence
  Description of Artificial Sequence: Synthetic oligonucleotide
  Antisense strand to SEQ ID NO: 2406046
uucaggcggacaagacaau

SEQ ID NO: 2406048 - RNA, 19 nt, Artificial Sequence
  Description of Artificial Sequence: Synthetic oligonucleotide
  Sense strand starting at position 2820 of SEQ ID NO: 1886387
gccugaaggguuuaucaga

SEQ ID NO: 2406049 - RNA, 19 nt, Artificial Sequence
  Description of Artificial Sequence: Synthetic oligonucleotide
  Antisense strand to SEQ ID NO: 2406048
ucugauaaacccuucaggc

SEQ ID NO: 2406050 - RNA, 19 nt, Artificial Sequence
  Description of Artificial Sequence: Synthetic oligonucleotide
  Sense strand starting at position 2865 of SEQ ID NO: 1886387
cgauucuguugcccuaaga

SEQ ID NO: 2406051 - RNA, 19 nt, Artificial Sequence
  Description of Artificial Sequence: Synthetic oligonucleotide
  Antisense strand to SEQ ID NO: 2406050
ucuuagggcaacagaaucg

SEQ ID NO: 2406052 - RNA, 19 nt, Artificial Sequence
  Description of Artificial Sequence: Synthetic oligonucleotide
  Sense strand starting at position 2882 of SEQ ID NO: 1886387
gaaauacugugcccugaau

SEQ ID NO: 2406053 - RNA, 19 nt, Artificial Sequence
  Description of Artificial Sequence: Synthetic oligonucleotide
  Antisense strand to SEQ ID NO: 2406052
auucagggcacaguauuuc

SEQ ID NO: 2406054 - RNA, 19 nt, Artificial Sequence
  Description of Artificial Sequence: Synthetic oligonucleotide
  Sense strand starting at position 2884 of SEQ ID NO: 1886387
aauacugugcccugaauug

SEQ ID NO: 2406055 - RNA, 19 nt, Artificial Sequence
  Description of Artificial Sequence: Synthetic oligonucleotide
  Antisense strand to SEQ ID NO: 2406054
caauucagggcacaguauu

SEQ ID NO: 2406056 - RNA, 19 nt, Artificial Sequence
  Description of Artificial Sequence: Synthetic oligonucleotide
  Sense strand starting at position 2893 of SEQ ID NO: 1886387
cccugaauugcggaacaga

SEQ ID NO: 2406057 - RNA, 19 nt, Artificial Sequence
  Description of Artificial Sequence: Synthetic oligonucleotide
  Antisense strand to SEQ ID NO: 2406056
ucuguuccgcaauucaggg

SEQ ID NO: 2406058 - RNA, 19 nt, Artificial Sequence
  Description of Artificial Sequence: Synthetic oligonucleotide
  Sense strand starting at position 2904 of SEQ ID NO: 1886387
ggaacagagcucuaguuac

SEQ ID NO: 2406059 - RNA, 19 nt, Artificial Sequence
  Description of Artificial Sequence: Synthetic oligonucleotide
  Antisense strand to SEQ ID NO: 2406058
guaacuagagcucuguucc

SEQ ID NO: 2406060 - RNA, 19 nt, Artificial Sequence
  Description of Artificial Sequence: Synthetic oligonucleotide
  Sense strand starting at position 2999 of SEQ ID NO: 1886387
gcccuauucccagaaguac

SEQ ID NO: 2406061 - RNA, 19 nt, Artificial Sequence
  Description of Artificial Sequence: Synthetic oligonucleotide
  Antisense strand to SEQ ID NO: 2406060
guacuucugggaauagggc

SEQ ID NO: 2406062 - RNA, 19 nt, Artificial Sequence
  Description of Artificial Sequence: Synthetic oligonucleotide
  Sense strand starting at position 3121 of SEQ ID NO: 1886387
cagaguucuccugacacug

SEQ ID NO: 2406063 - RNA, 19 nt, Artificial Sequence
  Description of Artificial Sequence: Synthetic oligonucleotide
  Antisense strand to SEQ ID NO: 2406062
cagugucaggagaacucug

SEQ ID NO: 2406064 - RNA, 19 nt, Artificial Sequence
  Description of Artificial Sequence: Synthetic oligonucleotide
  Sense strand starting at position 3598 of SEQ ID NO: 1886387
gucuucuguuccuugguaa

SEQ ID NO: 2406065 - RNA, 19 nt, Artificial Sequence
  Description of Artificial Sequence: Synthetic oligonucleotide
  Antisense strand to SEQ ID NO: 2406064
uuaccaaggaacagaagac

SEQ ID NO: 2406066 - RNA, 19 nt, Artificial Sequence
  Description of Artificial Sequence: Synthetic oligonucleotide
  Sense strand starting at position 3599 of SEQ ID NO: 1886387
ucuucuguuccuugguaaa

SEQ ID NO: 2406067 - RNA, 19 nt, Artificial Sequence
  Description of Artificial Sequence: Synthetic oligonucleotide
  Antisense strand to SEQ ID NO: 2406066
uuuaccaaggaacagaaga

SEQ ID NO: 2406068 - RNA, 19 nt, Artificial Sequence
  Description of Artificial Sequence: Synthetic oligonucleotide
  Sense strand starting at position 3629 of SEQ ID NO: 1886387
gguaguaggacuugaaauu

SEQ ID NO: 2406069 - RNA, 19 nt, Artificial Sequence
  Description of Artificial Sequence: Synthetic oligonucleotide
  Antisense strand to SEQ ID NO: 2406068
aauuucaaguccuacuacc

SEQ ID NO: 2406070 - RNA, 19 nt, Artificial Sequence
  Description of Artificial Sequence: Synthetic oligonucleotide
  Sense strand starting at position 3661 of SEQ ID NO: 1886387
aguccacuguugcuauuua

SEQ ID NO: 2406071 - RNA, 19 nt, Artificial Sequence
  Description of Artificial Sequence: Synthetic oligonucleotide
  Antisense strand to SEQ ID NO: 2406070
uaaauagcaacaguggacu

SEQ ID NO: 2406072 - RNA, 19 nt, Artificial Sequence
  Description of Artificial Sequence: Synthetic oligonucleotide
  Sense strand starting at position 3687 of SEQ ID NO: 1886387
cccugagccuaugaaauga

SEQ ID NO: 2406073 - RNA, 19 nt, Artificial Sequence
  Description of Artificial Sequence: Synthetic oligonucleotide
  Antisense strand to SEQ ID NO: 2406072
ucauuucauaggcucaggg

SEQ ID NO: 2406074 - RNA, 19 nt, Artificial Sequence
  Description of Artificial Sequence: Synthetic oligonucleotide
  Sense strand starting at position 3706 of SEQ ID NO: 1886387
agagaauaguuaugcuaua

SEQ ID NO: 2406075 - RNA, 19 nt, Artificial Sequence
  Description of Artificial Sequence: Synthetic oligonucleotide
  Antisense strand to SEQ ID NO: 2406074
uauagcauaacuauucucu

SEQ ID NO: 2406076 - RNA, 19 nt, Artificial Sequence
  Description of Artificial Sequence: Synthetic oligonucleotide
  Sense strand starting at position 3707 of SEQ ID NO: 1886387
gagaauaguuaugcuauau

SEQ ID NO: 2406077 - RNA, 19 nt, Artificial Sequence
  Description of Artificial Sequence: Synthetic oligonucleotide
  Antisense strand to SEQ ID NO: 2406076
auauagcauaacuauucuc

SEQ ID NO: 2406078 - RNA, 19 nt, Artificial Sequence
  Description of Artificial Sequence: Synthetic oligonucleotide
  Sense strand starting at position 3881 of SEQ ID NO: 1886387
uccacaugugugcaugagu

SEQ ID NO: 2406079 - RNA, 19 nt, Artificial Sequence
  Description of Artificial Sequence: Synthetic oligonucleotide
  Antisense strand to SEQ ID NO: 2406078
acucaugcacacaugugga

SEQ ID NO: 2406080 - RNA, 19 nt, Artificial Sequence
  Description of Artificial Sequence: Synthetic oligonucleotide
  Sense strand starting at position 3939 of SEQ ID NO: 1886387
cuaacaggagcuugcauaa

SEQ ID NO: 2406081 - RNA, 19 nt, Artificial Sequence
  Description of Artificial Sequence: Synthetic oligonucleotide
  Antisense strand to SEQ ID NO: 2406080
uuaugcaagcuccuguuag

SEQ ID NO: 2406082 - RNA, 19 nt, Artificial Sequence
  Description of Artificial Sequence: Synthetic oligonucleotide
  Sense strand starting at position 46 of SEQ ID NO: 1886388
caggucaguuuacuugaaa

SEQ ID NO: 2406083 - RNA, 19 nt, Artificial Sequence
  Description of Artificial Sequence: Synthetic oligonucleotide
  Antisense strand to SEQ ID NO: 2406082
uuucaaguaaacugaccug

SEQ ID NO: 2406084 - RNA, 19 nt, Artificial Sequence
  Description of Artificial Sequence: Synthetic oligonucleotide
  Sense strand starting at position 121 of SEQ ID NO: 1886388
auugucaggcaguaaauua

SEQ ID NO: 2406085 - RNA, 19 nt, Artificial Sequence
  Description of Artificial Sequence: Synthetic oligonucleotide
  Antisense strand to SEQ ID NO: 2406084
uaauuuacugccugacaau

SEQ ID NO: 2406086 - RNA, 19 nt, Artificial Sequence
  Description of Artificial Sequence: Synthetic oligonucleotide
  Sense strand starting at position 144 of SEQ ID NO: 1886388
aguaguugaucaucacaca

SEQ ID NO: 2406087 - RNA, 19 nt, Artificial Sequence
  Description of Artificial Sequence: Synthetic oligonucleotide
  Antisense strand to SEQ ID NO: 2406086
ugugugaugaucaacuacu

SEQ ID NO: 2406088 - RNA, 19 nt, Artificial Sequence
  Description of Artificial Sequence: Synthetic oligonucleotide
  Sense strand starting at position 145 of SEQ ID NO: 1886388
guaguugaucaucacacau

SEQ ID NO: 2406089 - RNA, 19 nt, Artificial Sequence
  Description of Artificial Sequence: Synthetic oligonucleotide
  Antisense strand to SEQ ID NO: 2406088
augugugaugaucaacuac

SEQ ID NO: 2406090 - RNA, 19 nt, Artificial Sequence
  Description of Artificial Sequence: Synthetic oligonucleotide
  Sense strand starting at position 194 of SEQ ID NO: 1886388
augacaauuuagggagaaa

SEQ ID NO: 2406091 - RNA, 19 nt, Artificial Sequence
  Description of Artificial Sequence: Synthetic oligonucleotide
  Antisense strand to SEQ ID NO: 2406090
uuucucccuaaauugucau

SEQ ID NO: 2406092 - RNA, 19 nt, Artificial Sequence
  Description of Artificial Sequence: Synthetic oligonucleotide
  Sense strand starting at position 306 of SEQ ID NO: 1886388
gggcucugucaggaugaca

SEQ ID NO: 2406093 - RNA, 19 nt, Artificial Sequence
  Description of Artificial Sequence: Synthetic oligonucleotide
  Antisense strand to SEQ ID NO: 2406092
ugucauccugacagagccc

SEQ ID NO: 2406094 - RNA, 19 nt, Artificial Sequence
  Description of Artificial Sequence: Synthetic oligonucleotide
  Sense strand starting at position 415 of SEQ ID NO: 1886388
cagucaagucagugggaca

SEQ ID NO: 2406095 - RNA, 19 nt, Artificial Sequence
  Description of Artificial Sequence: Synthetic oligonucleotide
  Antisense strand to SEQ ID NO: 2406094
ugucccacugacuugacug

SEQ ID NO: 2406096 - RNA, 19 nt, Artificial Sequence
  Description of Artificial Sequence: Synthetic oligonucleotide
  Sense strand starting at position 416 of SEQ ID NO: 1886388
agucaagucagugggacaa

SEQ ID NO: 2406097 - RNA, 19 nt, Artificial Sequence
  Description of Artificial Sequence: Synthetic oligonucleotide
  Antisense strand to SEQ ID NO: 2406096
uugucccacugacuugacu

SEQ ID NO: 2406098 - RNA, 19 nt, Artificial Sequence
  Description of Artificial Sequence: Synthetic oligonucleotide
  Sense strand starting at position 545 of SEQ ID NO: 1886388
aucuguugucaaugauaga

SEQ ID NO: 2406099 - RNA, 19 nt, Artificial Sequence
  Description of Artificial Sequence: Synthetic oligonucleotide
  Antisense strand to SEQ ID NO: 2406098
ucuaucauugacaacagau

SEQ ID NO: 2406100 - RNA, 19 nt, Artificial Sequence
  Description of Artificial Sequence: Synthetic oligonucleotide
  Sense strand starting at position 740 of SEQ ID NO: 1886388
aaucgaguggucuaaguaa

SEQ ID NO: 2406101 - RNA, 19 nt, Artificial Sequence
  Description of Artificial Sequence: Synthetic oligonucleotide
  Antisense strand to SEQ ID NO: 2406100
uuacuuagaccacucgauu

SEQ ID NO: 2406102 - RNA, 19 nt, Artificial Sequence
  Description of Artificial Sequence: Synthetic oligonucleotide
  Sense strand starting at position 748 of SEQ ID NO: 1886388
ggucuaaguaaggguuaag

SEQ ID NO: 2406103 - RNA, 19 nt, Artificial Sequence
  Description of Artificial Sequence: Synthetic oligonucleotide
  Antisense strand to SEQ ID NO: 2406102
cuuaacccuuacuuagacc

SEQ ID NO: 2406104 - RNA, 19 nt, Artificial Sequence
  Description of Artificial Sequence: Synthetic oligonucleotide
  Sense strand starting at position 832 of SEQ ID NO: 1886388
ucauuuacccuaugugugu

SEQ ID NO: 2406105 - RNA, 19 nt, Artificial Sequence
  Description of Artificial Sequence: Synthetic oligonucleotide
  Antisense strand to SEQ ID NO: 2406104
acacacauaggguaaauga

SEQ ID NO: 2406106 - RNA, 19 nt, Artificial Sequence
  Description of Artificial Sequence: Synthetic oligonucleotide
  Sense strand starting at position 891 of SEQ ID NO: 1886388
cucacuuuauucuuuggga

SEQ ID NO: 2406107 - RNA, 19 nt, Artificial Sequence
  Description of Artificial Sequence: Synthetic oligonucleotide
  Antisense strand to SEQ ID NO: 2406106
ucccaaagaauaaagugag

SEQ ID NO: 2406108 - RNA, 19 nt, Artificial Sequence
  Description of Artificial Sequence: Synthetic oligonucleotide
  Sense strand starting at position 892 of SEQ ID NO: 1886388
ucacuuuauucuuugggaa

SEQ ID NO: 2406109 - RNA, 19 nt, Artificial Sequence
  Description of Artificial Sequence: Synthetic oligonucleotide
  Antisense strand to SEQ ID NO: 2406108
uucccaaagaauaaaguga

SEQ ID NO: 2406110 - RNA, 19 nt, Artificial Sequence
  Description of Artificial Sequence: Synthetic oligonucleotide
  Sense strand starting at position 1011 of SEQ ID NO: 1886388
guacauuaucccuagguga

SEQ ID NO: 2406111 - RNA, 19 nt, Artificial Sequence
  Description of Artificial Sequence: Synthetic oligonucleotide
  Antisense strand to SEQ ID NO: 2406110
ucaccuagggauaauguac

SEQ ID NO: 2406112 - RNA, 19 nt, Artificial Sequence
  Description of Artificial Sequence: Synthetic oligonucleotide
  Sense strand starting at position 1013 of SEQ ID NO: 1886388
acauuaucccuaggugaaa

SEQ ID NO: 2406113 - RNA, 19 nt, Artificial Sequence
  Description of Artificial Sequence: Synthetic oligonucleotide
  Antisense strand to SEQ ID NO: 2406112
uuucaccuagggauaaugu

SEQ ID NO: 2406114 - RNA, 19 nt, Artificial Sequence
  Description of Artificial Sequence: Synthetic oligonucleotide
  Sense strand starting at position 1014 of SEQ ID NO: 1886388
cauuaucccuaggugaaag

SEQ ID NO: 2406115 - RNA, 19 nt, Artificial Sequence
  Description of Artificial Sequence: Synthetic oligonucleotide
  Antisense strand to SEQ ID NO: 2406114
cuuucaccuagggauaaug

SEQ ID NO: 2406116 - RNA, 19 nt, Artificial Sequence
  Description of Artificial Sequence: Synthetic oligonucleotide
  Sense strand starting at position 1073 of SEQ ID NO: 1886388
auaacagaggucugaucua

SEQ ID NO: 2406117 - RNA, 19 nt, Artificial Sequence
  Description of Artificial Sequence: Synthetic oligonucleotide
  Antisense strand to SEQ ID NO: 2406116
uagaucagaccucuguuau

SEQ ID NO: 2406118 - RNA, 19 nt, Artificial Sequence
  Description of Artificial Sequence: Synthetic oligonucleotide
  Sense strand starting at position 1078 of SEQ ID NO: 1886388
agaggucugaucuaguauu

SEQ ID NO: 2406119 - RNA, 19 nt, Artificial Sequence
  Description of Artificial Sequence: Synthetic oligonucleotide
  Antisense strand to SEQ ID NO: 2406118
aauacuagaucagaccucu

SEQ ID NO: 2406120 - RNA, 19 nt, Artificial Sequence
  Description of Artificial Sequence: Synthetic oligonucleotide
  Sense strand starting at position 1189 of SEQ ID NO: 1886388
guguaccuauaacugauua

SEQ ID NO: 2406121 - RNA, 19 nt, Artificial Sequence
  Description of Artificial Sequence: Synthetic oligonucleotide
  Antisense strand to SEQ ID NO: 2406120
uaaucaguuauagguacac

SEQ ID NO: 2406122 - RNA, 19 nt, Artificial Sequence
  Description of Artificial Sequence: Synthetic oligonucleotide
  Sense strand starting at position 1381 of SEQ ID NO: 1886388
ugguuuguuguggauaaua

SEQ ID NO: 2406123 - RNA, 19 nt, Artificial Sequence
  Description of Artificial Sequence: Synthetic oligonucleotide
  Antisense strand to SEQ ID NO: 2406122
uauuauccacaacaaacca

SEQ ID NO: 2406124 - RNA, 19 nt, Artificial Sequence
  Description of Artificial Sequence: Synthetic oligonucleotide
  Sense strand starting at position 1383 of SEQ ID NO: 1886388
guuuguuguggauaauaca

SEQ ID NO: 2406125 - RNA, 19 nt, Artificial Sequence
  Description of Artificial Sequence: Synthetic oligonucleotide
  Antisense strand to SEQ ID NO: 2406124
uguauuauccacaacaaac

SEQ ID NO: 2406126 - RNA, 19 nt, Artificial Sequence
  Description of Artificial Sequence: Synthetic oligonucleotide
  Sense strand starting at position 2109 of SEQ ID NO: 1886388
aaaugaaguccugagcgaa

SEQ ID NO: 2406127 - RNA, 19 nt, Artificial Sequence
  Description of Artificial Sequence: Synthetic oligonucleotide
  Antisense strand to SEQ ID NO: 2406126
uucgcucaggacuucauuu

SEQ ID NO: 2406128 - RNA, 19 nt, Artificial Sequence
  Description of Artificial Sequence: Synthetic oligonucleotide
  Sense strand starting at position 2122 of SEQ ID NO: 1886388
agcgaagugacacaaauau

SEQ ID NO: 2406129 - RNA, 19 nt, Artificial Sequence
  Description of Artificial Sequence: Synthetic oligonucleotide
  Antisense strand to SEQ ID NO: 2406128
auauuugugucacuucgcu

SEQ ID NO: 2406130 - RNA, 19 nt, Artificial Sequence
  Description of Artificial Sequence: Synthetic oligonucleotide
  Sense strand starting at position 2382 of SEQ ID NO: 1886388
ugauauaucguacauguga

SEQ ID NO: 2406131 - RNA, 19 nt, Artificial Sequence
  Description of Artificial Sequence: Synthetic oligonucleotide
  Antisense strand to SEQ ID NO: 2406130
ucacauguacgauauauca

SEQ ID NO: 2406132 - RNA, 19 nt, Artificial Sequence
  Description of Artificial Sequence: Synthetic oligonucleotide
  Sense strand starting at position 2397 of SEQ ID NO: 1886388
gugaaacuguaacuaauau

SEQ ID NO: 2406133 - RNA, 19 nt, Artificial Sequence
  Description of Artificial Sequence: Synthetic oligonucleotide
  Antisense strand to SEQ ID NO: 2406132
auauuaguuacaguuucac

SEQ ID NO: 2406134 - RNA, 19 nt, Artificial Sequence
  Description of Artificial Sequence: Synthetic oligonucleotide
  Sense strand starting at position 2845 of SEQ ID NO: 1886388
gaacccagucaguauuguu

SEQ ID NO: 2406135 - RNA, 19 nt, Artificial Sequence
  Description of Artificial Sequence: Synthetic oligonucleotide
  Antisense strand to SEQ ID NO: 2406134
aacaauacugacuggguuc

SEQ ID NO: 2406136 - RNA, 19 nt, Artificial Sequence
  Description of Artificial Sequence: Synthetic oligonucleotide
  Sense strand starting at position 2899 of SEQ ID NO: 1886388
ucuuuauuccuggauucug

SEQ ID NO: 2406137 - RNA, 19 nt, Artificial Sequence
  Description of Artificial Sequence: Synthetic oligonucleotide
  Antisense strand to SEQ ID NO: 2406136
cagaauccaggaauaaaga

SEQ ID NO: 2406138 - RNA, 19 nt, Artificial Sequence
  Description of Artificial Sequence: Synthetic oligonucleotide
  Sense strand starting at position 2916 of SEQ ID NO: 1886388
ugcugagaugcucaaugga

SEQ ID NO: 2406139 - RNA, 19 nt, Artificial Sequence
  Description of Artificial Sequence: Synthetic oligonucleotide
  Antisense strand to SEQ ID NO: 2406138
uccauugagcaucucagca

SEQ ID NO: 2406140 - RNA, 19 nt, Artificial Sequence
  Description of Artificial Sequence: Synthetic oligonucleotide
  Sense strand starting at position 2925 of SEQ ID NO: 1886388
gcucaauggauccaugagu

SEQ ID NO: 2406141 - RNA, 19 nt, Artificial Sequence
  Description of Artificial Sequence: Synthetic oligonucleotide
  Antisense strand to SEQ ID NO: 2406140
acucauggauccauugagc

SEQ ID NO: 2406142 - RNA, 19 nt, Artificial Sequence
  Description of Artificial Sequence: Synthetic oligonucleotide
  Sense strand starting at position 2961 of SEQ ID NO: 1886388
caaagaacucucugggcga

SEQ ID NO: 2406143 - RNA, 19 nt, Artificial Sequence
  Description of Artificial Sequence: Synthetic oligonucleotide
  Antisense strand to SEQ ID NO: 2406142
ucgcccagagaguucuuug

SEQ ID NO: 2406144 - RNA, 19 nt, Artificial Sequence
  Description of Artificial Sequence: Synthetic oligonucleotide
  Sense strand starting at position 2963 of SEQ ID NO: 1886388
aagaacucucugggcgaga

SEQ ID NO: 2406145 - RNA, 19 nt, Artificial Sequence
  Description of Artificial Sequence: Synthetic oligonucleotide
  Antisense strand to SEQ ID NO: 2406144
ucucgcccagagaguucuu

SEQ ID NO: 2406146 - RNA, 19 nt, Artificial Sequence
  Description of Artificial Sequence: Synthetic oligonucleotide
  Sense strand starting at position 2964 of SEQ ID NO: 1886388
agaacucucugggcgagaa

SEQ ID NO: 2406147 - RNA, 19 nt, Artificial Sequence
  Description of Artificial Sequence: Synthetic oligonucleotide
  Antisense strand to SEQ ID NO: 2406146
uucucgcccagagaguucu

SEQ ID NO: 2406148 - RNA, 19 nt, Artificial Sequence
  Description of Artificial Sequence: Synthetic oligonucleotide
  Sense strand starting at position 3004 of SEQ ID NO: 1886388
uucugagacacuggguaau

SEQ ID NO: 2406149 - RNA, 19 nt, Artificial Sequence
  Description of Artificial Sequence: Synthetic oligonucleotide
  Antisense strand to SEQ ID NO: 2406148
auuacccagugucucagaa

SEQ ID NO: 2406150 - RNA, 19 nt, Artificial Sequence
  Description of Artificial Sequence: Synthetic oligonucleotide
  Sense strand starting at position 3018 of SEQ ID NO: 1886388
guaauaguuguuuaaccac

SEQ ID NO: 2406151 - RNA, 19 nt, Artificial Sequence
  Description of Artificial Sequence: Synthetic oligonucleotide
  Antisense strand to SEQ ID NO: 2406150
gugguuaaacaacuauuac

SEQ ID NO: 2406152 - RNA, 19 nt, Artificial Sequence
  Description of Artificial Sequence: Synthetic oligonucleotide
  Sense strand starting at position 3207 of SEQ ID NO: 1886388
aaagaaaucugaccguacu

SEQ ID NO: 2406153 - RNA, 19 nt, Artificial Sequence
  Description of Artificial Sequence: Synthetic oligonucleotide
  Antisense strand to SEQ ID NO: 2406152
aguacggucagauuucuuu

SEQ ID NO: 2406154 - RNA, 19 nt, Artificial Sequence
  Description of Artificial Sequence: Synthetic oligonucleotide
  Sense strand starting at position 3208 of SEQ ID NO: 1886388
aagaaaucugaccguacuu

SEQ ID NO: 2406155 - RNA, 19 nt, Artificial Sequence
  Description of Artificial Sequence: Synthetic oligonucleotide
  Antisense strand to SEQ ID NO: 2406154
aaguacggucagauuucuu

SEQ ID NO: 2406156 - RNA, 19 nt, Artificial Sequence
  Description of Artificial Sequence: Synthetic oligonucleotide
  Sense strand starting at position 3404 of SEQ ID NO: 1886388
gccuuuaaugugcauauuu

SEQ ID NO: 2406157 - RNA, 19 nt, Artificial Sequence
  Description of Artificial Sequence: Synthetic oligonucleotide
  Antisense strand to SEQ ID NO: 2406156
aaauaugcacauuaaaggc

SEQ ID NO: 2406158 - RNA, 19 nt, Artificial Sequence
  Description of Artificial Sequence: Synthetic oligonucleotide
  Sense strand starting at position 3870 of SEQ ID NO: 1886388
aacugaaaucaggguguca

SEQ ID NO: 2406159 - RNA, 19 nt, Artificial Sequence
  Description of Artificial Sequence: Synthetic oligonucleotide
  Antisense strand to SEQ ID NO: 2406158
ugacacccugauuucaguu

SEQ ID NO: 2406160 - RNA, 19 nt, Artificial Sequence
  Description of Artificial Sequence: Synthetic oligonucleotide
  Sense strand starting at position 3908 of SEQ ID NO: 1886388
ggaagcucuaagugauaau

SEQ ID NO: 2406161 - RNA, 19 nt, Artificial Sequence
  Description of Artificial Sequence: Synthetic oligonucleotide
  Antisense strand to SEQ ID NO: 2406160
auuaucacuuagagcuucc

SEQ ID NO: 2406162 - RNA, 19 nt, Artificial Sequence
  Description of Artificial Sequence: Synthetic oligonucleotide
  Sense strand starting at position 258 of SEQ ID NO: 1886390
ccuggaauuuaagacauca

SEQ ID NO: 2406163 - RNA, 19 nt, Artificial Sequence
  Description of Artificial Sequence: Synthetic oligonucleotide
  Antisense strand to SEQ ID NO: 2406162
ugaugucuuaaauuccagg

SEQ ID NO: 2406164 - RNA, 19 nt, Artificial Sequence
  Description of Artificial Sequence: Synthetic oligonucleotide
  Sense strand starting at position 356 of SEQ ID NO: 1886390
uugacacugucucuccaua

SEQ ID NO: 2406165 - RNA, 19 nt, Artificial Sequence
  Description of Artificial Sequence: Synthetic oligonucleotide
  Antisense strand to SEQ ID NO: 2406164
uauggagagacagugucaa

SEQ ID NO: 2406166 - RNA, 19 nt, Artificial Sequence
  Description of Artificial Sequence: Synthetic oligonucleotide
  Sense strand starting at position 487 of SEQ ID NO: 1886390
cuaguaagccucuaccuga

SEQ ID NO: 2406167 - RNA, 19 nt, Artificial Sequence
  Description of Artificial Sequence: Synthetic oligonucleotide
  Antisense strand to SEQ ID NO: 2406166
ucagguagaggcuuacuag

SEQ ID NO: 2406168 - RNA, 19 nt, Artificial Sequence
  Description of Artificial Sequence: Synthetic oligonucleotide
  Sense strand starting at position 528 of SEQ ID NO: 1886390
guuauaucaccucagugcu

SEQ ID NO: 2406169 - RNA, 19 nt, Artificial Sequence
  Description of Artificial Sequence: Synthetic oligonucleotide
  Antisense strand to SEQ ID NO: 2406168
agcacugaggugauauaac

SEQ ID NO: 2406170 - RNA, 19 nt, Artificial Sequence
  Description of Artificial Sequence: Synthetic oligonucleotide
  Sense strand starting at position 531 of SEQ ID NO: 1886390
auaucaccucagugcuaua

SEQ ID NO: 2406171 - RNA, 19 nt, Artificial Sequence
  Description of Artificial Sequence: Synthetic oligonucleotide
  Antisense strand to SEQ ID NO: 2406170
uauagcacugaggugauau

SEQ ID NO: 2406172 - RNA, 19 nt, Artificial Sequence
  Description of Artificial Sequence: Synthetic oligonucleotide
  Sense strand starting at position 667 of SEQ ID NO: 1886390
auggcaucuguuuaagcuu

SEQ ID NO: 2406173 - RNA, 19 nt, Artificial Sequence
  Description of Artificial Sequence: Synthetic oligonucleotide
  Antisense strand to SEQ ID NO: 2406172
aagcuuaaacagaugccau

SEQ ID NO: 2406174 - RNA, 19 nt, Artificial Sequence
  Description of Artificial Sequence: Synthetic oligonucleotide
  Sense strand starting at position 762 of SEQ ID NO: 1886390
ccgaguuggaaggauuauu

SEQ ID NO: 2406175 - RNA, 19 nt, Artificial Sequence
  Description of Artificial Sequence: Synthetic oligonucleotide
  Antisense strand to SEQ ID NO: 2406174
aauaauccuuccaacucgg

SEQ ID NO: 2406176 - RNA, 19 nt, Artificial Sequence
  Description of Artificial Sequence: Synthetic oligonucleotide
  Sense strand starting at position 771 of SEQ ID NO: 1886390
aaggauuauuugcaguaag

SEQ ID NO: 2406177 - RNA, 19 nt, Artificial Sequence
  Description of Artificial Sequence: Synthetic oligonucleotide
  Antisense strand to SEQ ID NO: 2406176
cuuacugcaaauaauccuu

SEQ ID NO: 2406178 - RNA, 19 nt, Artificial Sequence
  Description of Artificial Sequence: Synthetic oligonucleotide
  Sense strand starting at position 1408 of SEQ ID NO: 1886390
agcgaaucacuugaacuca

SEQ ID NO: 2406179 - RNA, 19 nt, Artificial Sequence
  Description of Artificial Sequence: Synthetic oligonucleotide
  Antisense strand to SEQ ID NO: 2406178
ugaguucaagugauucgcu

SEQ ID NO: 2406180 - RNA, 19 nt, Artificial Sequence
  Description of Artificial Sequence: Synthetic oligonucleotide
  Sense strand starting at position 1606 of SEQ ID NO: 1886390
uuccuauaggacuguguau

SEQ ID NO: 2406181 - RNA, 19 nt, Artificial Sequence
  Description of Artificial Sequence: Synthetic oligonucleotide
  Antisense strand to SEQ ID NO: 2406180
auacacaguccuauaggaa

SEQ ID NO: 2406182 - RNA, 19 nt, Artificial Sequence
  Description of Artificial Sequence: Synthetic oligonucleotide
  Sense strand starting at position 1608 of SEQ ID NO: 1886390
ccuauaggacuguguauua

SEQ ID NO: 2406183 - RNA, 19 nt, Artificial Sequence
  Description of Artificial Sequence: Synthetic oligonucleotide
  Antisense strand to SEQ ID NO: 2406182
uaauacacaguccuauagg

SEQ ID NO: 2406184 - RNA, 19 nt, Artificial Sequence
  Description of Artificial Sequence: Synthetic oligonucleotide
  Sense strand starting at position 1621 of SEQ ID NO: 1886390
guauuauaugauugucucu

SEQ ID NO: 2406185 - RNA, 19 nt, Artificial Sequence
  Description of Artificial Sequence: Synthetic oligonucleotide
  Antisense strand to SEQ ID NO: 2406184
agagacaaucauauaauac

SEQ ID NO: 2406186 - RNA, 19 nt, Artificial Sequence
  Description of Artificial Sequence: Synthetic oligonucleotide
  Sense strand starting at position 1728 of SEQ ID NO: 1886390
agugauaaucaugaugcau

SEQ ID NO: 2406187 - RNA, 19 nt, Artificial Sequence
  Description of Artificial Sequence: Synthetic oligonucleotide
  Antisense strand to SEQ ID NO: 2406186
augcaucaugauuaucacu

SEQ ID NO: 2406188 - RNA, 19 nt, Artificial Sequence
  Description of Artificial Sequence: Synthetic oligonucleotide
  Sense strand starting at position 1754 of SEQ ID NO: 1886390
gcagcuuugccugaagaca

SEQ ID NO: 2406189 - RNA, 19 nt, Artificial Sequence
  Description of Artificial Sequence: Synthetic oligonucleotide
  Antisense strand to SEQ ID NO: 2406188
ugucuucaggcaaagcugc

SEQ ID NO: 2406190 - RNA, 19 nt, Artificial Sequence
  Description of Artificial Sequence: Synthetic oligonucleotide
  Sense strand starting at position 2089 of SEQ ID NO: 1886390
ggaaauugaugagaacgaa

SEQ ID NO: 2406191 - RNA, 19 nt, Artificial Sequence
  Description of Artificial Sequence: Synthetic oligonucleotide
  Antisense strand to SEQ ID NO: 2406190
uucguucucaucaauuucc

SEQ ID NO: 2406192 - RNA, 19 nt, Artificial Sequence
  Description of Artificial Sequence: Synthetic oligonucleotide
  Sense strand starting at position 2131 of SEQ ID NO: 1886390
aucagauaauugggaauuu

SEQ ID NO: 2406193 - RNA, 19 nt, Artificial Sequence
  Description of Artificial Sequence: Synthetic oligonucleotide
  Antisense strand to SEQ ID NO: 2406192
aaauucccaauuaucugau

SEQ ID NO: 2406194 - RNA, 19 nt, Artificial Sequence
  Description of Artificial Sequence: Synthetic oligonucleotide
  Sense strand starting at position 2157 of SEQ ID NO: 1886390
auuaccuucugguuccaua

SEQ ID NO: 2406195 - RNA, 19 nt, Artificial Sequence
  Description of Artificial Sequence: Synthetic oligonucleotide
  Antisense strand to SEQ ID NO: 2406194
uauggaaccagaagguaau

SEQ ID NO: 2406196 - RNA, 19 nt, Artificial Sequence
  Description of Artificial Sequence: Synthetic oligonucleotide
  Sense strand starting at position 2402 of SEQ ID NO: 1886390
ggucuuaaaugacuauacu

SEQ ID NO: 2406197 - RNA, 19 nt, Artificial Sequence
  Description of Artificial Sequence: Synthetic oligonucleotide
  Antisense strand to SEQ ID NO: 2406196
aguauagucauuuaagacc

SEQ ID NO: 2406198 - RNA, 19 nt, Artificial Sequence
  Description of Artificial Sequence: Synthetic oligonucleotide
  Sense strand starting at position 2465 of SEQ ID NO: 1886390
gugaacauauuguuacuau

SEQ ID NO: 2406199 - RNA, 19 nt, Artificial Sequence
  Description of Artificial Sequence: Synthetic oligonucleotide
  Antisense strand to SEQ ID NO: 2406198
auaguaacaauauguucac

SEQ ID NO: 2406200 - RNA, 19 nt, Artificial Sequence
  Description of Artificial Sequence: Synthetic oligonucleotide
  Sense strand starting at position 2583 of SEQ ID NO: 1886390
agacuuguaauauguguua

SEQ ID NO: 2406201 - RNA, 19 nt, Artificial Sequence
  Description of Artificial Sequence: Synthetic oligonucleotide
  Antisense strand to SEQ ID NO: 2406200
uaacacauauuacaagucu

SEQ ID NO: 2406202 - RNA, 19 nt, Artificial Sequence
  Description of Artificial Sequence: Synthetic oligonucleotide
  Sense strand starting at position 2716 of SEQ ID NO: 1886390
cuccauccugaugauguau

SEQ ID NO: 2406203 - RNA, 19 nt, Artificial Sequence
  Description of Artificial Sequence: Synthetic oligonucleotide
  Antisense strand to SEQ ID NO: 2406202
auacaucaucaggauggag

SEQ ID NO: 2406204 - RNA, 19 nt, Artificial Sequence
  Description of Artificial Sequence: Synthetic oligonucleotide
  Sense strand starting at position 2815 of SEQ ID NO: 1886390
uuuguuguugagcaaacua

SEQ ID NO: 2406205 - RNA, 19 nt, Artificial Sequence
  Description of Artificial Sequence: Synthetic oligonucleotide
  Antisense strand to SEQ ID NO: 2406204
uaguuugcucaacaacaaa

SEQ ID NO: 2406206 - RNA, 19 nt, Artificial Sequence
  Description of Artificial Sequence: Synthetic oligonucleotide
  Sense strand starting at position 2902 of SEQ ID NO: 1886390
auucguguucuucuuugca

SEQ ID NO: 2406207 - RNA, 19 nt, Artificial Sequence
  Description of Artificial Sequence: Synthetic oligonucleotide
  Antisense strand to SEQ ID NO: 2406206
ugcaaagaagaacacgaau

SEQ ID NO: 2406208 - RNA, 19 nt, Artificial Sequence
  Description of Artificial Sequence: Synthetic oligonucleotide
  Sense strand starting at position 2922 of SEQ ID NO: 1886390
uguaauaauucuuugggua

SEQ ID NO: 2406209 - RNA, 19 nt, Artificial Sequence
  Description of Artificial Sequence: Synthetic oligonucleotide
  Antisense strand to SEQ ID NO: 2406208
uacccaaagaauuauuaca

SEQ ID NO: 2406210 - RNA, 19 nt, Artificial Sequence
  Description of Artificial Sequence: Synthetic oligonucleotide
  Sense strand starting at position 2923 of SEQ ID NO: 1886390
guaauaauucuuuggguag

SEQ ID NO: 2406211 - RNA, 19 nt, Artificial Sequence
  Description of Artificial Sequence: Synthetic oligonucleotide
  Antisense strand to SEQ ID NO: 2406210
cuacccaaagaauuauuac

SEQ ID NO: 2406212 - RNA, 19 nt, Artificial Sequence
  Description of Artificial Sequence: Synthetic oligonucleotide
  Sense strand starting at position 2926 of SEQ ID NO: 1886390
auaauucuuuggguagaua

SEQ ID NO: 2406213 - RNA, 19 nt, Artificial Sequence
  Description of Artificial Sequence: Synthetic oligonucleotide
  Antisense strand to SEQ ID NO: 2406212
uaucuacccaaagaauuau

SEQ ID NO: 2406214 - RNA, 19 nt, Artificial Sequence
  Description of Artificial Sequence: Synthetic oligonucleotide
  Sense strand starting at position 2962 of SEQ ID NO: 1886390
cugaucauuugugaaagau

SEQ ID NO: 2406215 - RNA, 19 nt, Artificial Sequence
  Description of Artificial Sequence: Synthetic oligonucleotide
  Antisense strand to SEQ ID NO: 2406214
aucuuucacaaaugaucag

SEQ ID NO: 2406216 - RNA, 19 nt, Artificial Sequence
  Description of Artificial Sequence: Synthetic oligonucleotide
  Sense strand starting at position 2972 of SEQ ID NO: 1886390
gugaaagaucuuuggguca

SEQ ID NO: 2406217 - RNA, 19 nt, Artificial Sequence
  Description of Artificial Sequence: Synthetic oligonucleotide
  Antisense strand to SEQ ID NO: 2406216
ugacccaaagaucuuucac

SEQ ID NO: 2406218 - RNA, 19 nt, Artificial Sequence
  Description of Artificial Sequence: Synthetic oligonucleotide
  Sense strand starting at position 3265 of SEQ ID NO: 1886390
ggauuacauuuccaguucu

SEQ ID NO: 2406219 - RNA, 19 nt, Artificial Sequence
  Description of Artificial Sequence: Synthetic oligonucleotide
  Antisense strand to SEQ ID NO: 2406218
agaacuggaaauguaaucc

SEQ ID NO: 2406220 - RNA, 19 nt, Artificial Sequence
  Description of Artificial Sequence: Synthetic oligonucleotide
  Sense strand starting at position 3281 of SEQ ID NO: 1886390
ucuuguugauguucugaca

SEQ ID NO: 2406221 - RNA, 19 nt, Artificial Sequence
  Description of Artificial Sequence: Synthetic oligonucleotide
  Antisense strand to SEQ ID NO: 2406220
ugucagaacaucaacaaga

SEQ ID NO: 2406222 - RNA, 19 nt, Artificial Sequence
  Description of Artificial Sequence: Synthetic oligonucleotide
  Sense strand starting at position 3341 of SEQ ID NO: 1886390
guguaagcauuuccugagu

SEQ ID NO: 2406223 - RNA, 19 nt, Artificial Sequence
  Description of Artificial Sequence: Synthetic oligonucleotide
  Antisense strand to SEQ ID NO: 2406222
acucaggaaaugcuuacac

SEQ ID NO: 2406224 - RNA, 19 nt, Artificial Sequence
  Description of Artificial Sequence: Synthetic oligonucleotide
  Sense strand starting at position 3445 of SEQ ID NO: 1886390
ccauacagucaauacguaa

SEQ ID NO: 2406225 - RNA, 19 nt, Artificial Sequence
  Description of Artificial Sequence: Synthetic oligonucleotide
  Antisense strand to SEQ ID NO: 2406224
uuacguauugacuguaugg

SEQ ID NO: 2406226 - RNA, 19 nt, Artificial Sequence
  Description of Artificial Sequence: Synthetic oligonucleotide
  Sense strand starting at position 3449 of SEQ ID NO: 1886390
acagucaauacguaagagu

SEQ ID NO: 2406227 - RNA, 19 nt, Artificial Sequence
  Description of Artificial Sequence: Synthetic oligonucleotide
  Antisense strand to SEQ ID NO: 2406226
acucuuacguauugacugu

SEQ ID NO: 2406228 - RNA, 19 nt, Artificial Sequence
  Description of Artificial Sequence: Synthetic oligonucleotide
  Sense strand starting at position 3458 of SEQ ID NO: 1886390
acguaagaguuaccacuga

SEQ ID NO: 2406229 - RNA, 19 nt, Artificial Sequence
  Description of Artificial Sequence: Synthetic oligonucleotide
  Antisense strand to SEQ ID NO: 2406228
ucagugguaacucuuacgu

SEQ ID NO: 2406230 - RNA, 19 nt, Artificial Sequence
  Description of Artificial Sequence: Synthetic oligonucleotide
  Sense strand starting at position 3462 of SEQ ID NO: 1886390
aagaguuaccacugagcca

SEQ ID NO: 2406231 - RNA, 19 nt, Artificial Sequence
  Description of Artificial Sequence: Synthetic oligonucleotide
  Antisense strand to SEQ ID NO: 2406230
uggcucagugguaacucuu

SEQ ID NO: 2406232 - RNA, 19 nt, Artificial Sequence
  Description of Artificial Sequence: Synthetic oligonucleotide
  Sense strand starting at position 3474 of SEQ ID NO: 1886390
ugagccacauccucuugaa

SEQ ID NO: 2406233 - RNA, 19 nt, Artificial Sequence
  Description of Artificial Sequence: Synthetic oligonucleotide
  Antisense strand to SEQ ID NO: 2406232
uucaagaggauguggcuca

SEQ ID NO: 2406234 - RNA, 19 nt, Artificial Sequence
  Description of Artificial Sequence: Synthetic oligonucleotide
  Sense strand starting at position 3520 of SEQ ID NO: 1886390
gccaaucuacuuggauaaa

SEQ ID NO: 2406235 - RNA, 19 nt, Artificial Sequence
  Description of Artificial Sequence: Synthetic oligonucleotide
  Antisense strand to SEQ ID NO: 2406234
uuuauccaaguagauuggc

SEQ ID NO: 2406236 - RNA, 19 nt, Artificial Sequence
  Description of Artificial Sequence: Synthetic oligonucleotide
  Sense strand starting at position 3564 of SEQ ID NO: 1886390
ggguuucccuaauuacuau

SEQ ID NO: 2406237 - RNA, 19 nt, Artificial Sequence
  Description of Artificial Sequence: Synthetic oligonucleotide
  Antisense strand to SEQ ID NO: 2406236
auaguaauuagggaaaccc

SEQ ID NO: 2406238 - RNA, 19 nt, Artificial Sequence
  Description of Artificial Sequence: Synthetic oligonucleotide
  Sense strand starting at position 3630 of SEQ ID NO: 1886390
ccugguuauuuccugcuca

SEQ ID NO: 2406239 - RNA, 19 nt, Artificial Sequence
  Description of Artificial Sequence: Synthetic oligonucleotide
  Antisense strand to SEQ ID NO: 2406238
ugagcaggaaauaaccagg

SEQ ID NO: 2406240 - RNA, 19 nt, Artificial Sequence
  Description of Artificial Sequence: Synthetic oligonucleotide
  Sense strand starting at position 3634 of SEQ ID NO: 1886390
guuauuuccugcucaugac

SEQ ID NO: 2406241 - RNA, 19 nt, Artificial Sequence
  Description of Artificial Sequence: Synthetic oligonucleotide
  Antisense strand to SEQ ID NO: 2406240
gucaugagcaggaaauaac

SEQ ID NO: 2406242 - RNA, 19 nt, Artificial Sequence
  Description of Artificial Sequence: Synthetic oligonucleotide
  Sense strand starting at position 121 of SEQ ID NO: 1886389
gcgaaucucugccucacaa

SEQ ID NO: 2406243 - RNA, 19 nt, Artificial Sequence
  Description of Artificial Sequence: Synthetic oligonucleotide
  Antisense strand to SEQ ID NO: 2406242
uugugaggcagagauucgc

SEQ ID NO: 2406244 - RNA, 19 nt, Artificial Sequence
  Description of Artificial Sequence: Synthetic oligonucleotide
  Sense strand starting at position 178 of SEQ ID NO: 1886389
auagauaagucaccgcagu

SEQ ID NO: 2406245 - RNA, 19 nt, Artificial Sequence
  Description of Artificial Sequence: Synthetic oligonucleotide
  Antisense strand to SEQ ID NO: 2406244
acugcggugacuuaucuau

SEQ ID NO: 2406246 - RNA, 19 nt, Artificial Sequence
  Description of Artificial Sequence: Synthetic oligonucleotide
  Sense strand starting at position 245 of SEQ ID NO: 1886389
gacauagaaugagagaaua

SEQ ID NO: 2406247 - RNA, 19 nt, Artificial Sequence
  Description of Artificial Sequence: Synthetic oligonucleotide
  Antisense strand to SEQ ID NO: 2406246
uauucucucauucuauguc

SEQ ID NO: 2406248 - RNA, 19 nt, Artificial Sequence
  Description of Artificial Sequence: Synthetic oligonucleotide
  Sense strand starting at position 280 of SEQ ID NO: 1886389
uguaucaucucgcucaaca

SEQ ID NO: 2406249 - RNA, 19 nt, Artificial Sequence
  Description of Artificial Sequence: Synthetic oligonucleotide
  Antisense strand to SEQ ID NO: 2406248
uguugagcgagaugauaca

SEQ ID NO: 2406250 - RNA, 19 nt, Artificial Sequence
  Description of Artificial Sequence: Synthetic oligonucleotide
  Sense strand starting at position 291 of SEQ ID NO: 1886389
gcucaacaaugagaacuaa

SEQ ID NO: 2406251 - RNA, 19 nt, Artificial Sequence
  Description of Artificial Sequence: Synthetic oligonucleotide
  Antisense strand to SEQ ID NO: 2406250
uuaguucucauuguugagc

SEQ ID NO: 2406252 - RNA, 19 nt, Artificial Sequence
  Description of Artificial Sequence: Synthetic oligonucleotide
  Sense strand starting at position 380 of SEQ ID NO: 1886389
gaaauagauugugcacacu

SEQ ID NO: 2406253 - RNA, 19 nt, Artificial Sequence
  Description of Artificial Sequence: Synthetic oligonucleotide
  Antisense strand to SEQ ID NO: 2406252
agugugcacaaucuauuuc

SEQ ID NO: 2406254 - RNA, 19 nt, Artificial Sequence
  Description of Artificial Sequence: Synthetic oligonucleotide
  Sense strand starting at position 390 of SEQ ID NO: 1886389
gugcacacucacuauaaga

SEQ ID NO: 2406255 - RNA, 19 nt, Artificial Sequence
  Description of Artificial Sequence: Synthetic oligonucleotide
  Antisense strand to SEQ ID NO: 2406254
ucuuauagugagugugcac

SEQ ID NO: 2406256 - RNA, 19 nt, Artificial Sequence
  Description of Artificial Sequence: Synthetic oligonucleotide
  Sense strand starting at position 513 of SEQ ID NO: 1886389
aggugaaguacaggcauaa

SEQ ID NO: 2406257 - RNA, 19 nt, Artificial Sequence
  Description of Artificial Sequence: Synthetic oligonucleotide
  Antisense strand to SEQ ID NO: 2406256
uuaugccuguacuucaccu

SEQ ID NO: 2406258 - RNA, 19 nt, Artificial Sequence
  Description of Artificial Sequence: Synthetic oligonucleotide
  Sense strand starting at position 612 of SEQ ID NO: 1886389
gcucauguauuucuguuga

SEQ ID NO: 2406259 - RNA, 19 nt, Artificial Sequence
  Description of Artificial Sequence: Synthetic oligonucleotide
  Antisense strand to SEQ ID NO: 2406258
ucaacagaaauacaugagc

SEQ ID NO: 2406260 - RNA, 19 nt, Artificial Sequence
  Description of Artificial Sequence: Synthetic oligonucleotide
  Sense strand starting at position 646 of SEQ ID NO: 1886389
uaggauguggucuguacau

SEQ ID NO: 2406261 - RNA, 19 nt, Artificial Sequence
  Description of Artificial Sequence: Synthetic oligonucleotide
  Antisense strand to SEQ ID NO: 2406260
auguacagaccacauccua

SEQ ID NO: 2406262 - RNA, 19 nt, Artificial Sequence
  Description of Artificial Sequence: Synthetic oligonucleotide
  Sense strand starting at position 655 of SEQ ID NO: 1886389
gucuguacauaucugcaga

SEQ ID NO: 2406263 - RNA, 19 nt, Artificial Sequence
  Description of Artificial Sequence: Synthetic oligonucleotide
  Antisense strand to SEQ ID NO: 2406262
ucugcagauauguacagac

SEQ ID NO: 2406264 - RNA, 19 nt, Artificial Sequence
  Description of Artificial Sequence: Synthetic oligonucleotide
  Sense strand starting at position 657 of SEQ ID NO: 1886389
cuguacauaucugcagaua

SEQ ID NO: 2406265 - RNA, 19 nt, Artificial Sequence
  Description of Artificial Sequence: Synthetic oligonucleotide
  Antisense strand to SEQ ID NO: 2406264
uaucugcagauauguacag

SEQ ID NO: 2406266 - RNA, 19 nt, Artificial Sequence
  Description of Artificial Sequence: Synthetic oligonucleotide
  Sense strand starting at position 658 of SEQ ID NO: 1886389
uguacauaucugcagauaa

SEQ ID NO: 2406267 - RNA, 19 nt, Artificial Sequence
  Description of Artificial Sequence: Synthetic oligonucleotide
  Antisense strand to SEQ ID NO: 2406266
uuaucugcagauauguaca

SEQ ID NO: 2406268 - RNA, 19 nt, Artificial Sequence
  Description of Artificial Sequence: Synthetic oligonucleotide
  Sense strand starting at position 668 of SEQ ID NO: 1886389
ugcagauaagacugagagu

SEQ ID NO: 2406269 - RNA, 19 nt, Artificial Sequence
  Description of Artificial Sequence: Synthetic oligonucleotide
  Antisense strand to SEQ ID NO: 2406268
acucucagucuuaucugca

SEQ ID NO: 2406270 - RNA, 19 nt, Artificial Sequence
  Description of Artificial Sequence: Synthetic oligonucleotide
  Sense strand starting at position 671 of SEQ ID NO: 1886389
agauaagacugagagugaa

SEQ ID NO: 2406271 - RNA, 19 nt, Artificial Sequence
  Description of Artificial Sequence: Synthetic oligonucleotide
  Antisense strand to SEQ ID NO: 2406270
uucacucucagucuuaucu

SEQ ID NO: 2406272 - RNA, 19 nt, Artificial Sequence
  Description of Artificial Sequence: Synthetic oligonucleotide
  Sense strand starting at position 692 of SEQ ID NO: 1886389
aaauuugauuaagaucgga

SEQ ID NO: 2406273 - RNA, 19 nt, Artificial Sequence
  Description of Artificial Sequence: Synthetic oligonucleotide
  Antisense strand to SEQ ID NO: 2406272
uccgaucuuaaucaaauuu

SEQ ID NO: 2406274 - RNA, 19 nt, Artificial Sequence
  Description of Artificial Sequence: Synthetic oligonucleotide
  Sense strand starting at position 696 of SEQ ID NO: 1886389
uugauuaagaucggaguca

SEQ ID NO: 2406275 - RNA, 19 nt, Artificial Sequence
  Description of Artificial Sequence: Synthetic oligonucleotide
  Antisense strand to SEQ ID NO: 2406274
ugacuccgaucuuaaucaa

SEQ ID NO: 2406276 - RNA, 19 nt, Artificial Sequence
  Description of Artificial Sequence: Synthetic oligonucleotide
  Sense strand starting at position 728 of SEQ ID NO: 1886389
cguauugcagaauaaacga

SEQ ID NO: 2406277 - RNA, 19 nt, Artificial Sequence
  Description of Artificial Sequence: Synthetic oligonucleotide
  Antisense strand to SEQ ID NO: 2406276
ucguuuauucugcaauacg

SEQ ID NO: 2406278 - RNA, 19 nt, Artificial Sequence
  Description of Artificial Sequence: Synthetic oligonucleotide
  Sense strand starting at position 1016 of SEQ ID NO: 1886389
guacaacuguccucuucuu

SEQ ID NO: 2406279 - RNA, 19 nt, Artificial Sequence
  Description of Artificial Sequence: Synthetic oligonucleotide
  Antisense strand to SEQ ID NO: 2406278
aagaagaggacaguuguac

SEQ ID NO: 2406280 - RNA, 19 nt, Artificial Sequence
  Description of Artificial Sequence: Synthetic oligonucleotide
  Sense strand starting at position 1093 of SEQ ID NO: 1886389
gaaggaacacgugguuaga

SEQ ID NO: 2406281 - RNA, 19 nt, Artificial Sequence
  Description of Artificial Sequence: Synthetic oligonucleotide
  Antisense strand to SEQ ID NO: 2406280
ucuaaccacguguuccuuc

SEQ ID NO: 2406282 - RNA, 19 nt, Artificial Sequence
  Description of Artificial Sequence: Synthetic oligonucleotide
  Sense strand starting at position 1095 of SEQ ID NO: 1886389
aggaacacgugguuagaaa

SEQ ID NO: 2406283 - RNA, 19 nt, Artificial Sequence
  Description of Artificial Sequence: Synthetic oligonucleotide
  Antisense strand to SEQ ID NO: 2406282
uuucuaaccacguguuccu

SEQ ID NO: 2406284 - RNA, 19 nt, Artificial Sequence
  Description of Artificial Sequence: Synthetic oligonucleotide
  Sense strand starting at position 1142 of SEQ ID NO: 1886389
gguagaaaguccguuuccu

SEQ ID NO: 2406285 - RNA, 19 nt, Artificial Sequence
  Description of Artificial Sequence: Synthetic oligonucleotide
  Antisense strand to SEQ ID NO: 2406284
aggaaacggacuuucuacc

SEQ ID NO: 2406286 - RNA, 19 nt, Artificial Sequence
  Description of Artificial Sequence: Synthetic oligonucleotide
  Sense strand starting at position 1146 of SEQ ID NO: 1886389
gaaaguccguuuccuuaag

SEQ ID NO: 2406287 - RNA, 19 nt, Artificial Sequence
  Description of Artificial Sequence: Synthetic oligonucleotide
  Antisense strand to SEQ ID NO: 2406286
cuuaaggaaacggacuuuc

SEQ ID NO: 2406288 - RNA, 19 nt, Artificial Sequence
  Description of Artificial Sequence: Synthetic oligonucleotide
  Sense strand starting at position 1158 of SEQ ID NO: 1886389
ccuuaagugcgguaagguu

SEQ ID NO: 2406289 - RNA, 19 nt, Artificial Sequence
  Description of Artificial Sequence: Synthetic oligonucleotide
  Antisense strand to SEQ ID NO: 2406288
aaccuuaccgcacuuaagg

SEQ ID NO: 2406290 - RNA, 19 nt, Artificial Sequence
  Description of Artificial Sequence: Synthetic oligonucleotide
  Sense strand starting at position 1229 of SEQ ID NO: 1886389
cuugccaaacuuggagaaa

SEQ ID NO: 2406291 - RNA, 19 nt, Artificial Sequence
  Description of Artificial Sequence: Synthetic oligonucleotide
  Antisense strand to SEQ ID NO: 2406290
uuucuccaaguuuggcaag

SEQ ID NO: 2406292 - RNA, 19 nt, Artificial Sequence
  Description of Artificial Sequence: Synthetic oligonucleotide
  Sense strand starting at position 1318 of SEQ ID NO: 1886389
aggaaaucgucuuccuuaa

SEQ ID NO: 2406293 - RNA, 19 nt, Artificial Sequence
  Description of Artificial Sequence: Synthetic oligonucleotide
  Antisense strand to SEQ ID NO: 2406292
uuaaggaagacgauuuccu

SEQ ID NO: 2406294 - RNA, 19 nt, Artificial Sequence
  Description of Artificial Sequence: Synthetic oligonucleotide
  Sense strand starting at position 1695 of SEQ ID NO: 1886389
ccaguaucccucugcgaaa

SEQ ID NO: 2406295 - RNA, 19 nt, Artificial Sequence
  Description of Artificial Sequence: Synthetic oligonucleotide
  Antisense strand to SEQ ID NO: 2406294
uuucgcagagggauacugg

SEQ ID NO: 2406296 - RNA, 19 nt, Artificial Sequence
  Description of Artificial Sequence: Synthetic oligonucleotide
  Sense strand starting at position 2260 of SEQ ID NO: 1886389
gagugacucgugugaagau

SEQ ID NO: 2406297 - RNA, 19 nt, Artificial Sequence
  Description of Artificial Sequence: Synthetic oligonucleotide
  Antisense strand to SEQ ID NO: 2406296
aucuucacacgagucacuc

SEQ ID NO: 2406298 - RNA, 19 nt, Artificial Sequence
  Description of Artificial Sequence: Synthetic oligonucleotide
  Sense strand starting at position 2285 of SEQ ID NO: 1886389
uuucgaaacuuauuaggaa

SEQ ID NO: 2406299 - RNA, 19 nt, Artificial Sequence
  Description of Artificial Sequence: Synthetic oligonucleotide
  Antisense strand to SEQ ID NO: 2406298
uuccuaauaaguuucgaaa

SEQ ID NO: 2406300 - RNA, 19 nt, Artificial Sequence
  Description of Artificial Sequence: Synthetic oligonucleotide
  Sense strand starting at position 2400 of SEQ ID NO: 1886389
uuggacgacuccuuaaauu

SEQ ID NO: 2406301 - RNA, 19 nt, Artificial Sequence
  Description of Artificial Sequence: Synthetic oligonucleotide
  Antisense strand to SEQ ID NO: 2406300
aauuuaaggagucguccaa

SEQ ID NO: 2406302 - RNA, 19 nt, Artificial Sequence
  Description of Artificial Sequence: Synthetic oligonucleotide
  Sense strand starting at position 2765 of SEQ ID NO: 1886389
gcaccauagccuugaguuu

SEQ ID NO: 2406303 - RNA, 19 nt, Artificial Sequence
  Description of Artificial Sequence: Synthetic oligonucleotide
  Antisense strand to SEQ ID NO: 2406302
aaacucaaggcuauggugc

SEQ ID NO: 2406304 - RNA, 19 nt, Artificial Sequence
  Description of Artificial Sequence: Synthetic oligonucleotide
  Sense strand starting at position 2771 of SEQ ID NO: 1886389
uagccuugaguuugcuaaa

SEQ ID NO: 2406305 - RNA, 19 nt, Artificial Sequence
  Description of Artificial Sequence: Synthetic oligonucleotide
  Antisense strand to SEQ ID NO: 2406304
uuuagcaaacucaaggcua

SEQ ID NO: 2406306 - RNA, 19 nt, Artificial Sequence
  Description of Artificial Sequence: Synthetic oligonucleotide
  Sense strand starting at position 2772 of SEQ ID NO: 1886389
agccuugaguuugcuaaau

SEQ ID NO: 2406307 - RNA, 19 nt, Artificial Sequence
  Description of Artificial Sequence: Synthetic oligonucleotide
  Antisense strand to SEQ ID NO: 2406306
auuuagcaaacucaaggcu

SEQ ID NO: 2406308 - RNA, 19 nt, Artificial Sequence
  Description of Artificial Sequence: Synthetic oligonucleotide
  Sense strand starting at position 2782 of SEQ ID NO: 1886389
uugcuaaauugucccagga

SEQ ID NO: 2406309 - RNA, 19 nt, Artificial Sequence
  Description of Artificial Sequence: Synthetic oligonucleotide
  Antisense strand to SEQ ID NO: 2406308
uccugggacaauuuagcaa

SEQ ID NO: 2406310 - RNA, 19 nt, Artificial Sequence
  Description of Artificial Sequence: Synthetic oligonucleotide
  Sense strand starting at position 2814 of SEQ ID NO: 1886389
ggcugcuugugauuucaug

SEQ ID NO: 2406311 - RNA, 19 nt, Artificial Sequence
  Description of Artificial Sequence: Synthetic oligonucleotide
  Antisense strand to SEQ ID NO: 2406310
caugaaaucacaagcagcc

SEQ ID NO: 2406312 - RNA, 19 nt, Artificial Sequence
  Description of Artificial Sequence: Synthetic oligonucleotide
  Sense strand starting at position 3263 of SEQ ID NO: 1886389
cacgcuugucaugaggcua

SEQ ID NO: 2406313 - RNA, 19 nt, Artificial Sequence
  Description of Artificial Sequence: Synthetic oligonucleotide
  Antisense strand to SEQ ID NO: 2406312
uagccucaugacaagcgug

SEQ ID NO: 2406314 - RNA, 19 nt, Artificial Sequence
  Description of Artificial Sequence: Synthetic oligonucleotide
  Sense strand starting at position 3296 of SEQ ID NO: 1886389
gucacuuccaguuaggaga

SEQ ID NO: 2406315 - RNA, 19 nt, Artificial Sequence
  Description of Artificial Sequence: Synthetic oligonucleotide
  Antisense strand to SEQ ID NO: 2406314
ucuccuaacuggaagugac

SEQ ID NO: 2406316 - RNA, 19 nt, Artificial Sequence
  Description of Artificial Sequence: Synthetic oligonucleotide
  Sense strand starting at position 3343 of SEQ ID NO: 1886389
uugggucaucaauggaaua

SEQ ID NO: 2406317 - RNA, 19 nt, Artificial Sequence
  Description of Artificial Sequence: Synthetic oligonucleotide
  Antisense strand to SEQ ID NO: 2406316
uauuccauugaugacccaa

SEQ ID NO: 2406318 - RNA, 19 nt, Artificial Sequence
  Description of Artificial Sequence: Synthetic oligonucleotide
  Sense strand starting at position 3542 of SEQ ID NO: 1886389
gugauauugcuacagauug

SEQ ID NO: 2406319 - RNA, 19 nt, Artificial Sequence
  Description of Artificial Sequence: Synthetic oligonucleotide
  Antisense strand to SEQ ID NO: 2406318
caaucuguagcaauaucac

SEQ ID NO: 2406320 - RNA, 19 nt, Artificial Sequence
  Description of Artificial Sequence: Synthetic oligonucleotide
  Sense strand starting at position 3763 of SEQ ID NO: 1886389
agagcaagagacugucuua

SEQ ID NO: 2406321 - RNA, 19 nt, Artificial Sequence
  Description of Artificial Sequence: Synthetic oligonucleotide
  Antisense strand to SEQ ID NO: 2406320
uaagacagucucuugcucu

SEQ ID NO: 2406322 - RNA, 19 nt, Artificial Sequence
  Description of Artificial Sequence: Synthetic oligonucleotide
  Sense strand starting at position 385 of SEQ ID NO: 1886391
uugcgucccucaugaguga

SEQ ID NO: 2406323 - RNA, 19 nt, Artificial Sequence
  Description of Artificial Sequence: Synthetic oligonucleotide
  Antisense strand to SEQ ID NO: 2406322
ucacucaugagggacgcaa

SEQ ID NO: 2406324 - RNA, 19 nt, Artificial Sequence
  Description of Artificial Sequence: Synthetic oligonucleotide
  Sense strand starting at position 389 of SEQ ID NO: 1886391
gucccucaugagugacauc

SEQ ID NO: 2406325 - RNA, 19 nt, Artificial Sequence
  Description of Artificial Sequence: Synthetic oligonucleotide
  Antisense strand to SEQ ID NO: 2406324
gaugucacucaugagggac

SEQ ID NO: 2406326 - RNA, 19 nt, Artificial Sequence
  Description of Artificial Sequence: Synthetic oligonucleotide
  Sense strand starting at position 392 of SEQ ID NO: 1886391
ccucaugagugacaucuca

SEQ ID NO: 2406327 - RNA, 19 nt, Artificial Sequence
  Description of Artificial Sequence: Synthetic oligonucleotide
  Antisense strand to SEQ ID NO: 2406326
ugagaugucacucaugagg

SEQ ID NO: 2406328 - RNA, 19 nt, Artificial Sequence
  Description of Artificial Sequence: Synthetic oligonucleotide
  Sense strand starting at position 852 of SEQ ID NO: 1886391
gaaauacggccucaauggu

SEQ ID NO: 2406329 - RNA, 19 nt, Artificial Sequence
  Description of Artificial Sequence: Synthetic oligonucleotide
  Antisense strand to SEQ ID NO: 2406328
accauugaggccguauuuc

SEQ ID NO: 2406330 - RNA, 19 nt, Artificial Sequence
  Description of Artificial Sequence: Synthetic oligonucleotide
  Sense strand starting at position 867 of SEQ ID NO: 1886391
ugguaagugucccuuggaa

SEQ ID NO: 2406331 - RNA, 19 nt, Artificial Sequence
  Description of Artificial Sequence: Synthetic oligonucleotide
  Antisense strand to SEQ ID NO: 2406330
uuccaagggacacuuacca

SEQ ID NO: 2406332 - RNA, 19 nt, Artificial Sequence
  Description of Artificial Sequence: Synthetic oligonucleotide
  Sense strand starting at position 869 of SEQ ID NO: 1886391
guaagugucccuuggaaga

SEQ ID NO: 2406333 - RNA, 19 nt, Artificial Sequence
  Description of Artificial Sequence: Synthetic oligonucleotide
  Antisense strand to SEQ ID NO: 2406332
ucuuccaagggacacuuac

SEQ ID NO: 2406334 - RNA, 19 nt, Artificial Sequence
  Description of Artificial Sequence: Synthetic oligonucleotide
  Sense strand starting at position 882 of SEQ ID NO: 1886391
ggaagagcggcugguaauu

SEQ ID NO: 2406335 - RNA, 19 nt, Artificial Sequence
  Description of Artificial Sequence: Synthetic oligonucleotide
  Antisense strand to SEQ ID NO: 2406334
aauuaccagccgcucuucc

SEQ ID NO: 2406336 - RNA, 19 nt, Artificial Sequence
  Description of Artificial Sequence: Synthetic oligonucleotide
  Sense strand starting at position 884 of SEQ ID NO: 1886391
aagagcggcugguaauuaa

SEQ ID NO: 2406337 - RNA, 19 nt, Artificial Sequence
  Description of Artificial Sequence: Synthetic oligonucleotide
  Antisense strand to SEQ ID NO: 2406336
uuaauuaccagccgcucuu

SEQ ID NO: 2406338 - RNA, 19 nt, Artificial Sequence
  Description of Artificial Sequence: Synthetic oligonucleotide
  Sense strand starting at position 957 of SEQ ID NO: 1886391
aggguuucuuaaggaagag

SEQ ID NO: 2406339 - RNA, 19 nt, Artificial Sequence
  Description of Artificial Sequence: Synthetic oligonucleotide
  Antisense strand to SEQ ID NO: 2406338
cucuuccuuaagaaacccu

SEQ ID NO: 2406340 - RNA, 19 nt, Artificial Sequence
  Description of Artificial Sequence: Synthetic oligonucleotide
  Sense strand starting at position 1003 of SEQ ID NO: 1886391
ggaagaagauacugagaaa

SEQ ID NO: 2406341 - RNA, 19 nt, Artificial Sequence
  Description of Artificial Sequence: Synthetic oligonucleotide
  Antisense strand to SEQ ID NO: 2406340
uuucucaguaucuucuucc

SEQ ID NO: 2406342 - RNA, 19 nt, Artificial Sequence
  Description of Artificial Sequence: Synthetic oligonucleotide
  Sense strand starting at position 1061 of SEQ ID NO: 1886391
ggaugaacuugaugaaccu

SEQ ID NO: 2406343 - RNA, 19 nt, Artificial Sequence
  Description of Artificial Sequence: Synthetic oligonucleotide
  Antisense strand to SEQ ID NO: 2406342
agguucaucaaguucaucc

SEQ ID NO: 2406344 - RNA, 19 nt, Artificial Sequence
  Description of Artificial Sequence: Synthetic oligonucleotide
  Sense strand starting at position 1087 of SEQ ID NO: 1886391
gccugauucucuuagccac

SEQ ID NO: 2406345 - RNA, 19 nt, Artificial Sequence
  Description of Artificial Sequence: Synthetic oligonucleotide
  Antisense strand to SEQ ID NO: 2406344
guggcuaagagaaucaggc

SEQ ID NO: 2406346 - RNA, 19 nt, Artificial Sequence
  Description of Artificial Sequence: Synthetic oligonucleotide
  Sense strand starting at position 1101 of SEQ ID NO: 1886391
gccacaaagucuugggugu

SEQ ID NO: 2406347 - RNA, 19 nt, Artificial Sequence
  Description of Artificial Sequence: Synthetic oligonucleotide
  Antisense strand to SEQ ID NO: 2406346
acacccaagacuuuguggc

SEQ ID NO: 2406348 - RNA, 19 nt, Artificial Sequence
  Description of Artificial Sequence: Synthetic oligonucleotide
  Sense strand starting at position 1192 of SEQ ID NO: 1886391
gaagguaaguuacuggaau

SEQ ID NO: 2406349 - RNA, 19 nt, Artificial Sequence
  Description of Artificial Sequence: Synthetic oligonucleotide
  Antisense strand to SEQ ID NO: 2406348
auuccaguaacuuaccuuc

SEQ ID NO: 2406350 - RNA, 19 nt, Artificial Sequence
  Description of Artificial Sequence: Synthetic oligonucleotide
  Sense strand starting at position 1193 of SEQ ID NO: 1886391
aagguaaguuacuggaauc

SEQ ID NO: 2406351 - RNA, 19 nt, Artificial Sequence
  Description of Artificial Sequence: Synthetic oligonucleotide
  Antisense strand to SEQ ID NO: 2406350
gauuccaguaacuuaccuu

SEQ ID NO: 2406352 - RNA, 19 nt, Artificial Sequence
  Description of Artificial Sequence: Synthetic oligonucleotide
  Sense strand starting at position 1272 of SEQ ID NO: 1886391
ucuuuagauucuuugagca

SEQ ID NO: 2406353 - RNA, 19 nt, Artificial Sequence
  Description of Artificial Sequence: Synthetic oligonucleotide
  Antisense strand to SEQ ID NO: 2406352
ugcucaaagaaucuaaaga

SEQ ID NO: 2406354 - RNA, 19 nt, Artificial Sequence
  Description of Artificial Sequence: Synthetic oligonucleotide
  Sense strand starting at position 1274 of SEQ ID NO: 1886391
uuuagauucuuugagcaaa

SEQ ID NO: 2406355 - RNA, 19 nt, Artificial Sequence
  Description of Artificial Sequence: Synthetic oligonucleotide
  Antisense strand to SEQ ID NO: 2406354
uuugcucaaagaaucuaaa

SEQ ID NO: 2406356 - RNA, 19 nt, Artificial Sequence
  Description of Artificial Sequence: Synthetic oligonucleotide
  Sense strand starting at position 1362 of SEQ ID NO: 1886391
gcgcuuucuccuugaagca

SEQ ID NO: 2406357 - RNA, 19 nt, Artificial Sequence
  Description of Artificial Sequence: Synthetic oligonucleotide
  Antisense strand to SEQ ID NO: 2406356
ugcuucaaggagaaagcgc

SEQ ID NO: 2406358 - RNA, 19 nt, Artificial Sequence
  Description of Artificial Sequence: Synthetic oligonucleotide
  Sense strand starting at position 1648 of SEQ ID NO: 1886391
gcaugcauuuccuucguaa

SEQ ID NO: 2406359 - RNA, 19 nt, Artificial Sequence
  Description of Artificial Sequence: Synthetic oligonucleotide
  Antisense strand to SEQ ID NO: 2406358
uuacgaaggaaaugcaugc

SEQ ID NO: 2406360 - RNA, 19 nt, Artificial Sequence
  Description of Artificial Sequence: Synthetic oligonucleotide
  Sense strand starting at position 1650 of SEQ ID NO: 1886391
augcauuuccuucguaagu

SEQ ID NO: 2406361 - RNA, 19 nt, Artificial Sequence
  Description of Artificial Sequence: Synthetic oligonucleotide
  Antisense strand to SEQ ID NO: 2406360
acuuacgaaggaaaugcau

SEQ ID NO: 2406362 - RNA, 19 nt, Artificial Sequence
  Description of Artificial Sequence: Synthetic oligonucleotide
  Sense strand starting at position 1652 of SEQ ID NO: 1886391
gcauuuccuucguaagugu

SEQ ID NO: 2406363 - RNA, 19 nt, Artificial Sequence
  Description of Artificial Sequence: Synthetic oligonucleotide
  Antisense strand to SEQ ID NO: 2406362
acacuuacgaaggaaaugc

SEQ ID NO: 2406364 - RNA, 19 nt, Artificial Sequence
  Description of Artificial Sequence: Synthetic oligonucleotide
  Sense strand starting at position 1806 of SEQ ID NO: 1886391
gugugauucgcguccuccu

SEQ ID NO: 2406365 - RNA, 19 nt, Artificial Sequence
  Description of Artificial Sequence: Synthetic oligonucleotide
  Antisense strand to SEQ ID NO: 2406364
aggaggacgcgaaucacac

SEQ ID NO: 2406366 - RNA, 19 nt, Artificial Sequence
  Description of Artificial Sequence: Synthetic oligonucleotide
  Sense strand starting at position 2332 of SEQ ID NO: 1886391
gcggguucuuccgcagcau

SEQ ID NO: 2406367 - RNA, 19 nt, Artificial Sequence
  Description of Artificial Sequence: Synthetic oligonucleotide
  Antisense strand to SEQ ID NO: 2406366
augcugcggaagaacccgc

SEQ ID NO: 2406368 - RNA, 19 nt, Artificial Sequence
  Description of Artificial Sequence: Synthetic oligonucleotide
  Sense strand starting at position 2694 of SEQ ID NO: 1886391
gccugagcuucgcuucuaa

SEQ ID NO: 2406369 - RNA, 19 nt, Artificial Sequence
  Description of Artificial Sequence: Synthetic oligonucleotide
  Antisense strand to SEQ ID NO: 2406368
uuagaagcgaagcucaggc

SEQ ID NO: 2406370 - RNA, 19 nt, Artificial Sequence
  Description of Artificial Sequence: Synthetic oligonucleotide
  Sense strand starting at position 2717 of SEQ ID NO: 1886391
gcagcuuggucagggaaac

SEQ ID NO: 2406371 - RNA, 19 nt, Artificial Sequence
  Description of Artificial Sequence: Synthetic oligonucleotide
  Antisense strand to SEQ ID NO: 2406370
guuucccugaccaagcugc

SEQ ID NO: 2406372 - RNA, 19 nt, Artificial Sequence
  Description of Artificial Sequence: Synthetic oligonucleotide
  Sense strand starting at position 2736 of SEQ ID NO: 1886391
cugaaagcauucccagcua

SEQ ID NO: 2406373 - RNA, 19 nt, Artificial Sequence
  Description of Artificial Sequence: Synthetic oligonucleotide
  Antisense strand to SEQ ID NO: 2406372
uagcugggaaugcuuucag

SEQ ID NO: 2406374 - RNA, 19 nt, Artificial Sequence
  Description of Artificial Sequence: Synthetic oligonucleotide
  Sense strand starting at position 2782 of SEQ ID NO: 1886391
cgcccaucccgcugaguaa

SEQ ID NO: 2406375 - RNA, 19 nt, Artificial Sequence
  Description of Artificial Sequence: Synthetic oligonucleotide
  Antisense strand to SEQ ID NO: 2406374
uuacucagcgggaugggcg

SEQ ID NO: 2406376 - RNA, 19 nt, Artificial Sequence
  Description of Artificial Sequence: Synthetic oligonucleotide
  Sense strand starting at position 3351 of SEQ ID NO: 1886391
cuagcaauccagugugaaa

SEQ ID NO: 2406377 - RNA, 19 nt, Artificial Sequence
  Description of Artificial Sequence: Synthetic oligonucleotide
  Antisense strand to SEQ ID NO: 2406376
uuucacacuggauugcuag

SEQ ID NO: 2406378 - RNA, 19 nt, Artificial Sequence
  Description of Artificial Sequence: Synthetic oligonucleotide
  Sense strand starting at position 3353 of SEQ ID NO: 1886391
agcaauccagugugaaauc

SEQ ID NO: 2406379 - RNA, 19 nt, Artificial Sequence
  Description of Artificial Sequence: Synthetic oligonucleotide
  Antisense strand to SEQ ID NO: 2406378
gauuucacacuggauugcu

SEQ ID NO: 2406380 - RNA, 19 nt, Artificial Sequence
  Description of Artificial Sequence: Synthetic oligonucleotide
  Sense strand starting at position 3371 of SEQ ID NO: 1886391
cgacuaagaugaugcaugu

SEQ ID NO: 2406381 - RNA, 19 nt, Artificial Sequence
  Description of Artificial Sequence: Synthetic oligonucleotide
  Antisense strand to SEQ ID NO: 2406380
acaugcaucaucuuagucg

SEQ ID NO: 2406382 - RNA, 19 nt, Artificial Sequence
  Description of Artificial Sequence: Synthetic oligonucleotide
  Sense strand starting at position 3381 of SEQ ID NO: 1886391
gaugcauguuccuggcaca

SEQ ID NO: 2406383 - RNA, 19 nt, Artificial Sequence
  Description of Artificial Sequence: Synthetic oligonucleotide
  Antisense strand to SEQ ID NO: 2406382
ugugccaggaacaugcauc

SEQ ID NO: 2406384 - RNA, 19 nt, Artificial Sequence
  Description of Artificial Sequence: Synthetic oligonucleotide
  Sense strand starting at position 3412 of SEQ ID NO: 1886391
aauagacgcuagcuugauu

SEQ ID NO: 2406385 - RNA, 19 nt, Artificial Sequence
  Description of Artificial Sequence: Synthetic oligonucleotide
  Antisense strand to SEQ ID NO: 2406384
aaucaagcuagcgucuauu

SEQ ID NO: 2406386 - RNA, 19 nt, Artificial Sequence
  Description of Artificial Sequence: Synthetic oligonucleotide
  Sense strand starting at position 3585 of SEQ ID NO: 1886391
ggugcucacugguuucuga

SEQ ID NO: 2406387 - RNA, 19 nt, Artificial Sequence
  Description of Artificial Sequence: Synthetic oligonucleotide
  Antisense strand to SEQ ID NO: 2406386
ucagaaaccagugagcacc

SEQ ID NO: 2406388 - RNA, 19 nt, Artificial Sequence
  Description of Artificial Sequence: Synthetic oligonucleotide
  Sense strand starting at position 3588 of SEQ ID NO: 1886391
gcucacugguuucugaaca

SEQ ID NO: 2406389 - RNA, 19 nt, Artificial Sequence
  Description of Artificial Sequence: Synthetic oligonucleotide
  Antisense strand to SEQ ID NO: 2406388
uguucagaaaccagugagc

SEQ ID NO: 2406390 - RNA, 19 nt, Artificial Sequence
  Description of Artificial Sequence: Synthetic oligonucleotide
  Sense strand starting at position 3596 of SEQ ID NO: 1886391
guuucugaacacugaggau

SEQ ID NO: 2406391 - RNA, 19 nt, Artificial Sequence
  Description of Artificial Sequence: Synthetic oligonucleotide
  Antisense strand to SEQ ID NO: 2406390
auccucaguguucagaaac

SEQ ID NO: 2406392 - RNA, 19 nt, Artificial Sequence
  Description of Artificial Sequence: Synthetic oligonucleotide
  Sense strand starting at position 60 of SEQ ID NO: 1886392
gcaccuggcccacaauauu

SEQ ID NO: 2406393 - RNA, 19 nt, Artificial Sequence
  Description of Artificial Sequence: Synthetic oligonucleotide
  Antisense strand to SEQ ID NO: 2406392
aauauugugggccaggugc

SEQ ID NO: 2406394 - RNA, 19 nt, Artificial Sequence
  Description of Artificial Sequence: Synthetic oligonucleotide
  Sense strand starting at position 80 of SEQ ID NO: 1886392
agugaaaucucacugucuu

SEQ ID NO: 2406395 - RNA, 19 nt, Artificial Sequence
  Description of Artificial Sequence: Synthetic oligonucleotide
  Antisense strand to SEQ ID NO: 2406394
aagacagugagauuucacu

SEQ ID NO: 2406396 - RNA, 19 nt, Artificial Sequence
  Description of Artificial Sequence: Synthetic oligonucleotide
  Sense strand starting at position 81 of SEQ ID NO: 1886392
gugaaaucucacugucuuu

SEQ ID NO: 2406397 - RNA, 19 nt, Artificial Sequence
  Description of Artificial Sequence: Synthetic oligonucleotide
  Antisense strand to SEQ ID NO: 2406396
aaagacagugagauuucac

SEQ ID NO: 2406398 - RNA, 19 nt, Artificial Sequence
  Description of Artificial Sequence: Synthetic oligonucleotide
  Sense strand starting at position 142 of SEQ ID NO: 1886392
ggaacuuauuaguucccau

SEQ ID NO: 2406399 - RNA, 19 nt, Artificial Sequence
  Description of Artificial Sequence: Synthetic oligonucleotide
  Antisense strand to SEQ ID NO: 2406398
augggaacuaauaaguucc

SEQ ID NO: 2406400 - RNA, 19 nt, Artificial Sequence
  Description of Artificial Sequence: Synthetic oligonucleotide
  Sense strand starting at position 149 of SEQ ID NO: 1886392
auuaguucccauuaucuag

SEQ ID NO: 2406401 - RNA, 19 nt, Artificial Sequence
  Description of Artificial Sequence: Synthetic oligonucleotide
  Antisense strand to SEQ ID NO: 2406400
cuagauaaugggaacuaau

SEQ ID NO: 2406402 - RNA, 19 nt, Artificial Sequence
  Description of Artificial Sequence: Synthetic oligonucleotide
  Sense strand starting at position 165 of SEQ ID NO: 1886392
uagacuuaagaauguugua

SEQ ID NO: 2406403 - RNA, 19 nt, Artificial Sequence
  Description of Artificial Sequence: Synthetic oligonucleotide
  Antisense strand to SEQ ID NO: 2406402
uacaacauucuuaagucua

SEQ ID NO: 2406404 - RNA, 19 nt, Artificial Sequence
  Description of Artificial Sequence: Synthetic oligonucleotide
  Sense strand starting at position 482 of SEQ ID NO: 1886392
agagaauguugguaugaaa

SEQ ID NO: 2406405 - RNA, 19 nt, Artificial Sequence
  Description of Artificial Sequence: Synthetic oligonucleotide
  Antisense strand to SEQ ID NO: 2406404
uuucauaccaacauucucu

SEQ ID NO: 2406406 - RNA, 19 nt, Artificial Sequence
  Description of Artificial Sequence: Synthetic oligonucleotide
  Sense strand starting at position 485 of SEQ ID NO: 1886392
gaauguugguaugaaauag

SEQ ID NO: 2406407 - RNA, 19 nt, Artificial Sequence
  Description of Artificial Sequence: Synthetic oligonucleotide
  Antisense strand to SEQ ID NO: 2406406
cuauuucauaccaacauuc

SEQ ID NO: 2406408 - RNA, 19 nt, Artificial Sequence
  Description of Artificial Sequence: Synthetic oligonucleotide
  Sense strand starting at position 533 of SEQ ID NO: 1886392
aucuuuccugccuagguua

SEQ ID NO: 2406409 - RNA, 19 nt, Artificial Sequence
  Description of Artificial Sequence: Synthetic oligonucleotide
  Antisense strand to SEQ ID NO: 2406408
uaaccuaggcaggaaagau

SEQ ID NO: 2406410 - RNA, 19 nt, Artificial Sequence
  Description of Artificial Sequence: Synthetic oligonucleotide
  Sense strand starting at position 536 of SEQ ID NO: 1886392
uuuccugccuagguuauua

SEQ ID NO: 2406411 - RNA, 19 nt, Artificial Sequence
  Description of Artificial Sequence: Synthetic oligonucleotide
  Antisense strand to SEQ ID NO: 2406410
uaauaaccuaggcaggaaa

SEQ ID NO: 2406412 - RNA, 19 nt, Artificial Sequence
  Description of Artificial Sequence: Synthetic oligonucleotide
  Sense strand starting at position 538 of SEQ ID NO: 1886392
uccugccuagguuauuaaa

SEQ ID NO: 2406413 - RNA, 19 nt, Artificial Sequence
  Description of Artificial Sequence: Synthetic oligonucleotide
  Antisense strand to SEQ ID NO: 2406412
uuuaauaaccuaggcagga

SEQ ID NO: 2406414 - RNA, 19 nt, Artificial Sequence
  Description of Artificial Sequence: Synthetic oligonucleotide
  Sense strand starting at position 540 of SEQ ID NO: 1886392
cugccuagguuauuaaaua

SEQ ID NO: 2406415 - RNA, 19 nt, Artificial Sequence
  Description of Artificial Sequence: Synthetic oligonucleotide
  Antisense strand to SEQ ID NO: 2406414
uauuuaauaaccuaggcag

SEQ ID NO: 2406416 - RNA, 19 nt, Artificial Sequence
  Description of Artificial Sequence: Synthetic oligonucleotide
  Sense strand starting at position 541 of SEQ ID NO: 1886392
ugccuagguuauuaaauag

SEQ ID NO: 2406417 - RNA, 19 nt, Artificial Sequence
  Description of Artificial Sequence: Synthetic oligonucleotide
  Antisense strand to SEQ ID NO: 2406416
cuauuuaauaaccuaggca

SEQ ID NO: 2406418 - RNA, 19 nt, Artificial Sequence
  Description of Artificial Sequence: Synthetic oligonucleotide
  Sense strand starting at position 1174 of SEQ ID NO: 1886392
gaggcagucagcugagauu

SEQ ID NO: 2406419 - RNA, 19 nt, Artificial Sequence
  Description of Artificial Sequence: Synthetic oligonucleotide
  Antisense strand to SEQ ID NO: 2406418
aaucucagcugacugccuc

SEQ ID NO: 2406420 - RNA, 19 nt, Artificial Sequence
  Description of Artificial Sequence: Synthetic oligonucleotide
  Sense strand starting at position 1567 of SEQ ID NO: 1886392
gacaaaccguccuuagaua

SEQ ID NO: 2406421 - RNA, 19 nt, Artificial Sequence
  Description of Artificial Sequence: Synthetic oligonucleotide
  Antisense strand to SEQ ID NO: 2406420
uaucuaaggacgguuuguc

SEQ ID NO: 2406422 - RNA, 19 nt, Artificial Sequence
  Description of Artificial Sequence: Synthetic oligonucleotide
  Sense strand starting at position 1626 of SEQ ID NO: 1886392
uuaggcucuugauuggaua

SEQ ID NO: 2406423 - RNA, 19 nt, Artificial Sequence
  Description of Artificial Sequence: Synthetic oligonucleotide
  Antisense strand to SEQ ID NO: 2406422
uauccaaucaagagccuaa

SEQ ID NO: 2406424 - RNA, 19 nt, Artificial Sequence
  Description of Artificial Sequence: Synthetic oligonucleotide
  Sense strand starting at position 1627 of SEQ ID NO: 1886392
uaggcucuugauuggauaa

SEQ ID NO: 2406425 - RNA, 19 nt, Artificial Sequence
  Description of Artificial Sequence: Synthetic oligonucleotide
  Antisense strand to SEQ ID NO: 2406424
uuauccaaucaagagccua

SEQ ID NO: 2406426 - RNA, 19 nt, Artificial Sequence
  Description of Artificial Sequence: Synthetic oligonucleotide
  Sense strand starting at position 1628 of SEQ ID NO: 1886392
aggcucuugauuggauaau

SEQ ID NO: 2406427 - RNA, 19 nt, Artificial Sequence
  Description of Artificial Sequence: Synthetic oligonucleotide
  Antisense strand to SEQ ID NO: 2406426
auuauccaaucaagagccu

SEQ ID NO: 2406428 - RNA, 19 nt, Artificial Sequence
  Description of Artificial Sequence: Synthetic oligonucleotide
  Sense strand starting at position 1629 of SEQ ID NO: 1886392
ggcucuugauuggauaauu

SEQ ID NO: 2406429 - RNA, 19 nt, Artificial Sequence
  Description of Artificial Sequence: Synthetic oligonucleotide
  Antisense strand to SEQ ID NO: 2406428
aauuauccaaucaagagcc

SEQ ID NO: 2406430 - RNA, 19 nt, Artificial Sequence
  Description of Artificial Sequence: Synthetic oligonucleotide
  Sense strand starting at position 1646 of SEQ ID NO: 1886392
uugaaauaacacggauucu

SEQ ID NO: 2406431 - RNA, 19 nt, Artificial Sequence
  Description of Artificial Sequence: Synthetic oligonucleotide
  Antisense strand to SEQ ID NO: 2406430
agaauccguguuauuucaa

SEQ ID NO: 2406432 - RNA, 19 nt, Artificial Sequence
  Description of Artificial Sequence: Synthetic oligonucleotide
  Sense strand starting at position 1721 of SEQ ID NO: 1886392
uguaauaccucaguucuau

SEQ ID NO: 2406433 - RNA, 19 nt, Artificial Sequence
  Description of Artificial Sequence: Synthetic oligonucleotide
  Antisense strand to SEQ ID NO: 2406432
auagaacugagguauuaca

SEQ ID NO: 2406434 - RNA, 19 nt, Artificial Sequence
  Description of Artificial Sequence: Synthetic oligonucleotide
  Sense strand starting at position 1727 of SEQ ID NO: 1886392
accucaguucuauaaacgu

SEQ ID NO: 2406435 - RNA, 19 nt, Artificial Sequence
  Description of Artificial Sequence: Synthetic oligonucleotide
  Antisense strand to SEQ ID NO: 2406434
acguuuauagaacugaggu

SEQ ID NO: 2406436 - RNA, 19 nt, Artificial Sequence
  Description of Artificial Sequence: Synthetic oligonucleotide
  Sense strand starting at position 1734 of SEQ ID NO: 1886392
uucuauaaacguugaagaa

SEQ ID NO: 2406437 - RNA, 19 nt, Artificial Sequence
  Description of Artificial Sequence: Synthetic oligonucleotide
  Antisense strand to SEQ ID NO: 2406436
uucuucaacguuuauagaa

SEQ ID NO: 2406438 - RNA, 19 nt, Artificial Sequence
  Description of Artificial Sequence: Synthetic oligonucleotide
  Sense strand starting at position 1780 of SEQ ID NO: 1886392
ggcaaaugcauauagcagu

SEQ ID NO: 2406439 - RNA, 19 nt, Artificial Sequence
  Description of Artificial Sequence: Synthetic oligonucleotide
  Antisense strand to SEQ ID NO: 2406438
acugcuauaugcauuugcc

SEQ ID NO: 2406440 - RNA, 19 nt, Artificial Sequence
  Description of Artificial Sequence: Synthetic oligonucleotide
  Sense strand starting at position 1908 of SEQ ID NO: 1886392
cugagaauucgguaacgau

SEQ ID NO: 2406441 - RNA, 19 nt, Artificial Sequence
  Description of Artificial Sequence: Synthetic oligonucleotide
  Antisense strand to SEQ ID NO: 2406440
aucguuaccgaauucucag

SEQ ID NO: 2406442 - RNA, 19 nt, Artificial Sequence
  Description of Artificial Sequence: Synthetic oligonucleotide
  Sense strand starting at position 1911 of SEQ ID NO: 1886392
agaauucgguaacgauguu

SEQ ID NO: 2406443 - RNA, 19 nt, Artificial Sequence
  Description of Artificial Sequence: Synthetic oligonucleotide
  Antisense strand to SEQ ID NO: 2406442
aacaucguuaccgaauucu

SEQ ID NO: 2406444 - RNA, 19 nt, Artificial Sequence
  Description of Artificial Sequence: Synthetic oligonucleotide
  Sense strand starting at position 1912 of SEQ ID NO: 1886392
gaauucgguaacgauguua

SEQ ID NO: 2406445 - RNA, 19 nt, Artificial Sequence
  Description of Artificial Sequence: Synthetic oligonucleotide
  Antisense strand to SEQ ID NO: 2406444
uaacaucguuaccgaauuc

SEQ ID NO: 2406446 - RNA, 19 nt, Artificial Sequence
  Description of Artificial Sequence: Synthetic oligonucleotide
  Sense strand starting at position 2041 of SEQ ID NO: 1886392
uccuaagucccgcauguau

SEQ ID NO: 2406447 - RNA, 19 nt, Artificial Sequence
  Description of Artificial Sequence: Synthetic oligonucleotide
  Antisense strand to SEQ ID NO: 2406446
auacaugcgggacuuagga

SEQ ID NO: 2406448 - RNA, 19 nt, Artificial Sequence
  Description of Artificial Sequence: Synthetic oligonucleotide
  Sense strand starting at position 2666 of SEQ ID NO: 1886392
ugugcuuaugcuuggaagu

SEQ ID NO: 2406449 - RNA, 19 nt, Artificial Sequence
  Description of Artificial Sequence: Synthetic oligonucleotide
  Antisense strand to SEQ ID NO: 2406448
acuuccaagcauaagcaca

SEQ ID NO: 2406450 - RNA, 19 nt, Artificial Sequence
  Description of Artificial Sequence: Synthetic oligonucleotide
  Sense strand starting at position 2667 of SEQ ID NO: 1886392
gugcuuaugcuuggaagug

SEQ ID NO: 2406451 - RNA, 19 nt, Artificial Sequence
  Description of Artificial Sequence: Synthetic oligonucleotide
  Antisense strand to SEQ ID NO: 2406450
cacuuccaagcauaagcac

SEQ ID NO: 2406452 - RNA, 19 nt, Artificial Sequence
  Description of Artificial Sequence: Synthetic oligonucleotide
  Sense strand starting at position 2683 of SEQ ID NO: 1886392
guggaacuauauguauuau

SEQ ID NO: 2406453 - RNA, 19 nt, Artificial Sequence
  Description of Artificial Sequence: Synthetic oligonucleotide
  Antisense strand to SEQ ID NO: 2406452
auaauacauauaguuccac

SEQ ID NO: 2406454 - RNA, 19 nt, Artificial Sequence
  Description of Artificial Sequence: Synthetic oligonucleotide
  Sense strand starting at position 3101 of SEQ ID NO: 1886392
cgcucuuguugcccgagau

SEQ ID NO: 2406455 - RNA, 19 nt, Artificial Sequence
  Description of Artificial Sequence: Synthetic oligonucleotide
  Antisense strand to SEQ ID NO: 2406454
aucucgggcaacaagagcg

SEQ ID NO: 2406456 - RNA, 19 nt, Artificial Sequence
  Description of Artificial Sequence: Synthetic oligonucleotide
  Sense strand starting at position 3102 of SEQ ID NO: 1886392
gcucuuguugcccgagaug

SEQ ID NO: 2406457 - RNA, 19 nt, Artificial Sequence
  Description of Artificial Sequence: Synthetic oligonucleotide
  Antisense strand to SEQ ID NO: 2406456
caucucgggcaacaagagc

SEQ ID NO: 2406458 - RNA, 19 nt, Artificial Sequence
  Description of Artificial Sequence: Synthetic oligonucleotide
  Sense strand starting at position 3367 of SEQ ID NO: 1886392
ggcuaaucaggcugagucu

SEQ ID NO: 2406459 - RNA, 19 nt, Artificial Sequence
  Description of Artificial Sequence: Synthetic oligonucleotide
  Antisense strand to SEQ ID NO: 2406458
agacucagccugauuagcc

SEQ ID NO: 2406460 - RNA, 19 nt, Artificial Sequence
  Description of Artificial Sequence: Synthetic oligonucleotide
  Sense strand starting at position 3479 of SEQ ID NO: 1886392
uucuguuucugagguccau

SEQ ID NO: 2406461 - RNA, 19 nt, Artificial Sequence
  Description of Artificial Sequence: Synthetic oligonucleotide
  Antisense strand to SEQ ID NO: 2406460
auggaccucagaaacagaa

SEQ ID NO: 2406462 - RNA, 19 nt, Artificial Sequence
  Description of Artificial Sequence: Synthetic oligonucleotide
  Sense strand starting at position 3925 of SEQ ID NO: 1886392
ugacccagcugaguuauau

SEQ ID NO: 2406463 - RNA, 19 nt, Artificial Sequence
  Description of Artificial Sequence: Synthetic oligonucleotide
  Antisense strand to SEQ ID NO: 2406462
auauaacucagcuggguca

SEQ ID NO: 2406464 - RNA, 19 nt, Artificial Sequence
  Description of Artificial Sequence: Synthetic oligonucleotide
  Sense strand starting at position 3931 of SEQ ID NO: 1886392
agcugaguuauauaagcag

SEQ ID NO: 2406465 - RNA, 19 nt, Artificial Sequence
  Description of Artificial Sequence: Synthetic oligonucleotide
  Antisense strand to SEQ ID NO: 2406464
cugcuuauauaacucagcu

SEQ ID NO: 2406466 - RNA, 19 nt, Artificial Sequence
  Description of Artificial Sequence: Synthetic oligonucleotide
  Sense strand starting at position 3935 of SEQ ID NO: 1886392
gaguuauauaagcagguga

SEQ ID NO: 2406467 - RNA, 19 nt, Artificial Sequence
  Description of Artificial Sequence: Synthetic oligonucleotide
  Antisense strand to SEQ ID NO: 2406466
ucaccugcuuauauaacuc

SEQ ID NO: 2406468 - RNA, 19 nt, Artificial Sequence
  Description of Artificial Sequence: Synthetic oligonucleotide
  Sense strand starting at position 3937 of SEQ ID NO: 1886392
guuauauaagcaggugaua

SEQ ID NO: 2406469 - RNA, 19 nt, Artificial Sequence
  Description of Artificial Sequence: Synthetic oligonucleotide
  Antisense strand to SEQ ID NO: 2406468
uaucaccugcuuauauaac

SEQ ID NO: 2406470 - RNA, 19 nt, Artificial Sequence
  Description of Artificial Sequence: Synthetic oligonucleotide
  Sense strand starting at position 3942 of SEQ ID NO: 1886392
auaagcaggugauacuaau

SEQ ID NO: 2406471 - RNA, 19 nt, Artificial Sequence
  Description of Artificial Sequence: Synthetic oligonucleotide
  Antisense strand to SEQ ID NO: 2406470
auuaguaucaccugcuuau

SEQ ID NO: 2406472 - RNA, 19 nt, Artificial Sequence
  Description of Artificial Sequence: Synthetic oligonucleotide
  Sense strand starting at position 61 of SEQ ID NO: 1886393
agagccuuucuguagucua

SEQ ID NO: 2406473 - RNA, 19 nt, Artificial Sequence
  Description of Artificial Sequence: Synthetic oligonucleotide
  Antisense strand to SEQ ID NO: 2406472
uagacuacagaaaggcucu

SEQ ID NO: 2406474 - RNA, 19 nt, Artificial Sequence
  Description of Artificial Sequence: Synthetic oligonucleotide
  Sense strand starting at position 96 of SEQ ID NO: 1886393
agccacaaaucuuugagaa

SEQ ID NO: 2406475 - RNA, 19 nt, Artificial Sequence
  Description of Artificial Sequence: Synthetic oligonucleotide
  Antisense strand to SEQ ID NO: 2406474
uucucaaagauuuguggcu

SEQ ID NO: 2406476 - RNA, 19 nt, Artificial Sequence
  Description of Artificial Sequence: Synthetic oligonucleotide
  Sense strand starting at position 97 of SEQ ID NO: 1886393
gccacaaaucuuugagaau

SEQ ID NO: 2406477 - RNA, 19 nt, Artificial Sequence
  Description of Artificial Sequence: Synthetic oligonucleotide
  Antisense strand to SEQ ID NO: 2406476
auucucaaagauuuguggc

SEQ ID NO: 2406478 - RNA, 19 nt, Artificial Sequence
  Description of Artificial Sequence: Synthetic oligonucleotide
  Sense strand starting at position 464 of SEQ ID NO: 1886393
gcagguuuagagcaaguga

SEQ ID NO: 2406479 - RNA, 19 nt, Artificial Sequence
  Description of Artificial Sequence: Synthetic oligonucleotide
  Antisense strand to SEQ ID NO: 2406478
ucacuugcucuaaaccugc

SEQ ID NO: 2406480 - RNA, 19 nt, Artificial Sequence
  Description of Artificial Sequence: Synthetic oligonucleotide
  Sense strand starting at position 544 of SEQ ID NO: 1886393
gugugagguagaugagauc

SEQ ID NO: 2406481 - RNA, 19 nt, Artificial Sequence
  Description of Artificial Sequence: Synthetic oligonucleotide
  Antisense strand to SEQ ID NO: 2406480
gaucucaucuaccucacac

SEQ ID NO: 2406482 - RNA, 19 nt, Artificial Sequence
  Description of Artificial Sequence: Synthetic oligonucleotide
  Sense strand starting at position 634 of SEQ ID NO: 1886393
ggcagugaacuuggaguga

SEQ ID NO: 2406483 - RNA, 19 nt, Artificial Sequence
  Description of Artificial Sequence: Synthetic oligonucleotide
  Antisense strand to SEQ ID NO: 2406482
ucacuccaaguucacugcc

SEQ ID NO: 2406484 - RNA, 19 nt, Artificial Sequence
  Description of Artificial Sequence: Synthetic oligonucleotide
  Sense strand starting at position 638 of SEQ ID NO: 1886393
gugaacuuggagugauguu

SEQ ID NO: 2406485 - RNA, 19 nt, Artificial Sequence
  Description of Artificial Sequence: Synthetic oligonucleotide
  Antisense strand to SEQ ID NO: 2406484
aacaucacuccaaguucac

SEQ ID NO: 2406486 - RNA, 19 nt, Artificial Sequence
  Description of Artificial Sequence: Synthetic oligonucleotide
  Sense strand starting at position 639 of SEQ ID NO: 1886393
ugaacuuggagugauguua

SEQ ID NO: 2406487 - RNA, 19 nt, Artificial Sequence
  Description of Artificial Sequence: Synthetic oligonucleotide
  Antisense strand to SEQ ID NO: 2406486
uaacaucacuccaaguuca

SEQ ID NO: 2406488 - RNA, 19 nt, Artificial Sequence
  Description of Artificial Sequence: Synthetic oligonucleotide
  Sense strand starting at position 723 of SEQ ID NO: 1886393
uccggaguccuggacuauu

SEQ ID NO: 2406489 - RNA, 19 nt, Artificial Sequence
  Description of Artificial Sequence: Synthetic oligonucleotide
  Antisense strand to SEQ ID NO: 2406488
aauaguccaggacuccgga

SEQ ID NO: 2406490 - RNA, 19 nt, Artificial Sequence
  Description of Artificial Sequence: Synthetic oligonucleotide
  Sense strand starting at position 1051 of SEQ ID NO: 1886393
cagggaucccugugugaca

SEQ ID NO: 2406491 - RNA, 19 nt, Artificial Sequence
  Description of Artificial Sequence: Synthetic oligonucleotide
  Antisense strand to SEQ ID NO: 2406490
ugucacacagggaucccug

SEQ ID NO: 2406492 - RNA, 19 nt, Artificial Sequence
  Description of Artificial Sequence: Synthetic oligonucleotide
  Sense strand starting at position 1753 of SEQ ID NO: 1886393
gggucaugauccucuguca

SEQ ID NO: 2406493 - RNA, 19 nt, Artificial Sequence
  Description of Artificial Sequence: Synthetic oligonucleotide
  Antisense strand to SEQ ID NO: 2406492
ugacagaggaucaugaccc

SEQ ID NO: 2406494 - RNA, 19 nt, Artificial Sequence
  Description of Artificial Sequence: Synthetic oligonucleotide
  Sense strand starting at position 1787 of SEQ ID NO: 1886393
caucaacguguuuggaaua

SEQ ID NO: 2406495 - RNA, 19 nt, Artificial Sequence
  Description of Artificial Sequence: Synthetic oligonucleotide
  Antisense strand to SEQ ID NO: 2406494
uauuccaaacacguugaug

SEQ ID NO: 2406496 - RNA, 19 nt, Artificial Sequence
  Description of Artificial Sequence: Synthetic oligonucleotide
  Sense strand starting at position 1833 of SEQ ID NO: 1886393
gguauauaacccugggauu

SEQ ID NO: 2406497 - RNA, 19 nt, Artificial Sequence
  Description of Artificial Sequence: Synthetic oligonucleotide
  Antisense strand to SEQ ID NO: 2406496
aaucccaggguuauauacc

SEQ ID NO: 2406498 - RNA, 19 nt, Artificial Sequence
  Description of Artificial Sequence: Synthetic oligonucleotide
  Sense strand starting at position 1834 of SEQ ID NO: 1886393
guauauaacccugggauug

SEQ ID NO: 2406499 - RNA, 19 nt, Artificial Sequence
  Description of Artificial Sequence: Synthetic oligonucleotide
  Antisense strand to SEQ ID NO: 2406498
caaucccaggguuauauac

SEQ ID NO: 2406500 - RNA, 19 nt, Artificial Sequence
  Description of Artificial Sequence: Synthetic oligonucleotide
  Sense strand starting at position 1850 of SEQ ID NO: 1886393
uuggaauuguaccugcaga

SEQ ID NO: 2406501 - RNA, 19 nt, Artificial Sequence
  Description of Artificial Sequence: Synthetic oligonucleotide
  Antisense strand to SEQ ID NO: 2406500
ucugcagguacaauuccaa

SEQ ID NO: 2406502 - RNA, 19 nt, Artificial Sequence
  Description of Artificial Sequence: Synthetic oligonucleotide
  Sense strand starting at position 1851 of SEQ ID NO: 1886393
uggaauuguaccugcagau

SEQ ID NO: 2406503 - RNA, 19 nt, Artificial Sequence
  Description of Artificial Sequence: Synthetic oligonucleotide
  Antisense strand to SEQ ID NO: 2406502
aucugcagguacaauucca

SEQ ID NO: 2406504 - RNA, 19 nt, Artificial Sequence
  Description of Artificial Sequence: Synthetic oligonucleotide
  Sense strand starting at position 1955 of SEQ ID NO: 1886393
gguuauacagagugcauaa

SEQ ID NO: 2406505 - RNA, 19 nt, Artificial Sequence
  Description of Artificial Sequence: Synthetic oligonucleotide
  Antisense strand to SEQ ID NO: 2406504
uuaugcacucuguauaacc

SEQ ID NO: 2406506 - RNA, 19 nt, Artificial Sequence
  Description of Artificial Sequence: Synthetic oligonucleotide
  Sense strand starting at position 1957 of SEQ ID NO: 1886393
uuauacagagugcauaaau

SEQ ID NO: 2406507 - RNA, 19 nt, Artificial Sequence
  Description of Artificial Sequence: Synthetic oligonucleotide
  Antisense strand to SEQ ID NO: 2406506
auuuaugcacucuguauaa

SEQ ID NO: 2406508 - RNA, 19 nt, Artificial Sequence
  Description of Artificial Sequence: Synthetic oligonucleotide
  Sense strand starting at position 1997 of SEQ ID NO: 1886393
guaugugacccugaguauc

SEQ ID NO: 2406509 - RNA, 19 nt, Artificial Sequence
  Description of Artificial Sequence: Synthetic oligonucleotide
  Antisense strand to SEQ ID NO: 2406508
gauacucagggucacauac

SEQ ID NO: 2406510 - RNA, 19 nt, Artificial Sequence
  Description of Artificial Sequence: Synthetic oligonucleotide
  Sense strand starting at position 2058 of SEQ ID NO: 1886393
acagcagagaaagguuaua

SEQ ID NO: 2406511 - RNA, 19 nt, Artificial Sequence
  Description of Artificial Sequence: Synthetic oligonucleotide
  Antisense strand to SEQ ID NO: 2406510
uauaaccuuucucugcugu

SEQ ID NO: 2406512 - RNA, 19 nt, Artificial Sequence
  Description of Artificial Sequence: Synthetic oligonucleotide
  Sense strand starting at position 2277 of SEQ ID NO: 1886393
guguguuguccuccagcaa

SEQ ID NO: 2406513 - RNA, 19 nt, Artificial Sequence
  Description of Artificial Sequence: Synthetic oligonucleotide
  Antisense strand to SEQ ID NO: 2406512
uugcuggaggacaacacac

SEQ ID NO: 2406514 - RNA, 19 nt, Artificial Sequence
  Description of Artificial Sequence: Synthetic oligonucleotide
  Sense strand starting at position 2322 of SEQ ID NO: 1886393
uguggaaugagaggauugu

SEQ ID NO: 2406515 - RNA, 19 nt, Artificial Sequence
  Description of Artificial Sequence: Synthetic oligonucleotide
  Antisense strand to SEQ ID NO: 2406514
acaauccucucauuccaca

SEQ ID NO: 2406516 - RNA, 19 nt, Artificial Sequence
  Description of Artificial Sequence: Synthetic oligonucleotide
  Sense strand starting at position 2326 of SEQ ID NO: 1886393
gaaugagaggauugugcuc

SEQ ID NO: 2406517 - RNA, 19 nt, Artificial Sequence
  Description of Artificial Sequence: Synthetic oligonucleotide
  Antisense strand to SEQ ID NO: 2406516
gagcacaauccucucauuc

SEQ ID NO: 2406518 - RNA, 19 nt, Artificial Sequence
  Description of Artificial Sequence: Synthetic oligonucleotide
  Sense strand starting at position 2362 of SEQ ID NO: 1886393
caguguuacuaggucuaag

SEQ ID NO: 2406519 - RNA, 19 nt, Artificial Sequence
  Description of Artificial Sequence: Synthetic oligonucleotide
  Antisense strand to SEQ ID NO: 2406518
cuuagaccuaguaacacug

SEQ ID NO: 2406520 - RNA, 19 nt, Artificial Sequence
  Description of Artificial Sequence: Synthetic oligonucleotide
  Sense strand starting at position 2509 of SEQ ID NO: 1886393
cugccagacucaucauaga

SEQ ID NO: 2406521 - RNA, 19 nt, Artificial Sequence
  Description of Artificial Sequence: Synthetic oligonucleotide
  Antisense strand to SEQ ID NO: 2406520
ucuaugaugagucuggcag

SEQ ID NO: 2406522 - RNA, 19 nt, Artificial Sequence
  Description of Artificial Sequence: Synthetic oligonucleotide
  Sense strand starting at position 2580 of SEQ ID NO: 1886393
aucccagaguucucugaag

SEQ ID NO: 2406523 - RNA, 19 nt, Artificial Sequence
  Description of Artificial Sequence: Synthetic oligonucleotide
  Antisense strand to SEQ ID NO: 2406522
cuucagagaacucugggau

SEQ ID NO: 2406524 - RNA, 19 nt, Artificial Sequence
  Description of Artificial Sequence: Synthetic oligonucleotide
  Sense strand starting at position 2998 of SEQ ID NO: 1886393
uggagcugucacugaugga

SEQ ID NO: 2406525 - RNA, 19 nt, Artificial Sequence
  Description of Artificial Sequence: Synthetic oligonucleotide
  Antisense strand to SEQ ID NO: 2406524
uccaucagugacagcucca

SEQ ID NO: 2406526 - RNA, 19 nt, Artificial Sequence
  Description of Artificial Sequence: Synthetic oligonucleotide
  Sense strand starting at position 2999 of SEQ ID NO: 1886393
ggagcugucacugauggau

SEQ ID NO: 2406527 - RNA, 19 nt, Artificial Sequence
  Description of Artificial Sequence: Synthetic oligonucleotide
  Antisense strand to SEQ ID NO: 2406526
auccaucagugacagcucc

SEQ ID NO: 2406528 - RNA, 19 nt, Artificial Sequence
  Description of Artificial Sequence: Synthetic oligonucleotide
  Sense strand starting at position 3002 of SEQ ID NO: 1886393
gcugucacugauggaugaa

SEQ ID NO: 2406529 - RNA, 19 nt, Artificial Sequence
  Description of Artificial Sequence: Synthetic oligonucleotide
  Antisense strand to SEQ ID NO: 2406528
uucauccaucagugacagc

SEQ ID NO: 2406530 - RNA, 19 nt, Artificial Sequence
  Description of Artificial Sequence: Synthetic oligonucleotide
  Sense strand starting at position 3483 of SEQ ID NO: 1886393
ggcagugugacuuagcaga

SEQ ID NO: 2406531 - RNA, 19 nt, Artificial Sequence
  Description of Artificial Sequence: Synthetic oligonucleotide
  Antisense strand to SEQ ID NO: 2406530
ucugcuaagucacacugcc

SEQ ID NO: 2406532 - RNA, 19 nt, Artificial Sequence
  Description of Artificial Sequence: Synthetic oligonucleotide
  Sense strand starting at position 3485 of SEQ ID NO: 1886393
cagugugacuuagcagaua

SEQ ID NO: 2406533 - RNA, 19 nt, Artificial Sequence
  Description of Artificial Sequence: Synthetic oligonucleotide
  Antisense strand to SEQ ID NO: 2406532
uaucugcuaagucacacug

SEQ ID NO: 2406534 - RNA, 19 nt, Artificial Sequence
  Description of Artificial Sequence: Synthetic oligonucleotide
  Sense strand starting at position 3488 of SEQ ID NO: 1886393
ugugacuuagcagauauca

SEQ ID NO: 2406535 - RNA, 19 nt, Artificial Sequence
  Description of Artificial Sequence: Synthetic oligonucleotide
  Antisense strand to SEQ ID NO: 2406534
ugauaucugcuaagucaca

SEQ ID NO: 2406536 - RNA, 19 nt, Artificial Sequence
  Description of Artificial Sequence: Synthetic oligonucleotide
  Sense strand starting at position 3497 of SEQ ID NO: 1886393
gcagauaucaccuggaagu

SEQ ID NO: 2406537 - RNA, 19 nt, Artificial Sequence
  Description of Artificial Sequence: Synthetic oligonucleotide
  Antisense strand to SEQ ID NO: 2406536
acuuccaggugauaucugc

SEQ ID NO: 2406538 - RNA, 19 nt, Artificial Sequence
  Description of Artificial Sequence: Synthetic oligonucleotide
  Sense strand starting at position 3498 of SEQ ID NO: 1886393
cagauaucaccuggaagug

SEQ ID NO: 2406539 - RNA, 19 nt, Artificial Sequence
  Description of Artificial Sequence: Synthetic oligonucleotide
  Antisense strand to SEQ ID NO: 2406538
cacuuccaggugauaucug

SEQ ID NO: 2406540 - RNA, 19 nt, Artificial Sequence
  Description of Artificial Sequence: Synthetic oligonucleotide
  Sense strand starting at position 3826 of SEQ ID NO: 1886393
ggaaauuguuucuuguaug

SEQ ID NO: 2406541 - RNA, 19 nt, Artificial Sequence
  Description of Artificial Sequence: Synthetic oligonucleotide
  Antisense strand to SEQ ID NO: 2406540
cauacaagaaacaauuucc

SEQ ID NO: 2406542 - RNA, 19 nt, Artificial Sequence
  Description of Artificial Sequence: Synthetic oligonucleotide
  Sense strand starting at position 3838 of SEQ ID NO: 1886393
uuguaugaucaugagcaag

SEQ ID NO: 2406543 - RNA, 19 nt, Artificial Sequence
  Description of Artificial Sequence: Synthetic oligonucleotide
  Antisense strand to SEQ ID NO: 2406542
cuugcucaugaucauacaa

SEQ ID NO: 2406544 - RNA, 19 nt, Artificial Sequence
  Description of Artificial Sequence: Synthetic oligonucleotide
  Sense strand starting at position 3840 of SEQ ID NO: 1886393
guaugaucaugagcaaguu

SEQ ID NO: 2406545 - RNA, 19 nt, Artificial Sequence
  Description of Artificial Sequence: Synthetic oligonucleotide
  Antisense strand to SEQ ID NO: 2406544
aacuugcucaugaucauac

SEQ ID NO: 2406546 - RNA, 19 nt, Artificial Sequence
  Description of Artificial Sequence: Synthetic oligonucleotide
  Sense strand starting at position 3841 of SEQ ID NO: 1886393
uaugaucaugagcaaguua

SEQ ID NO: 2406547 - RNA, 19 nt, Artificial Sequence
  Description of Artificial Sequence: Synthetic oligonucleotide
  Antisense strand to SEQ ID NO: 2406546
uaacuugcucaugaucaua

SEQ ID NO: 2406548 - RNA, 19 nt, Artificial Sequence
  Description of Artificial Sequence: Synthetic oligonucleotide
  Sense strand starting at position 3888 of SEQ ID NO: 1886393
uguggaaauguccauguaa

SEQ ID NO: 2406549 - RNA, 19 nt, Artificial Sequence
  Description of Artificial Sequence: Synthetic oligonucleotide
  Antisense strand to SEQ ID NO: 2406548
uuacauggacauuuccaca

SEQ ID NO: 2406550 - RNA, 19 nt, Artificial Sequence
  Description of Artificial Sequence: Synthetic oligonucleotide
  Sense strand starting at position 3890 of SEQ ID NO: 1886393
uggaaauguccauguaaua

SEQ ID NO: 2406551 - RNA, 19 nt, Artificial Sequence
  Description of Artificial Sequence: Synthetic oligonucleotide
  Antisense strand to SEQ ID NO: 2406550
uauuacauggacauuucca

SEQ ID NO: 2406552 - RNA, 19 nt, Artificial Sequence
  Description of Artificial Sequence: Synthetic oligonucleotide
  Sense strand starting at position 79 of SEQ ID NO: 1886394
gcuuuauucugagcaggcu

SEQ ID NO: 2406553 - RNA, 19 nt, Artificial Sequence
  Description of Artificial Sequence: Synthetic oligonucleotide
  Antisense strand to SEQ ID NO: 2406552
agccugcucagaauaaagc

SEQ ID NO: 2406554 - RNA, 19 nt, Artificial Sequence
  Description of Artificial Sequence: Synthetic oligonucleotide
  Sense strand starting at position 239 of SEQ ID NO: 1886394
uccggaagaucaggcauuu

SEQ ID NO: 2406555 - RNA, 19 nt, Artificial Sequence
  Description of Artificial Sequence: Synthetic oligonucleotide
  Antisense strand to SEQ ID NO: 2406554
aaaugccugaucuuccgga

SEQ ID NO: 2406556 - RNA, 19 nt, Artificial Sequence
  Description of Artificial Sequence: Synthetic oligonucleotide
  Sense strand starting at position 269 of SEQ ID NO: 1886394
gcauguccaccuggagaaa

SEQ ID NO: 2406557 - RNA, 19 nt, Artificial Sequence
  Description of Artificial Sequence: Synthetic oligonucleotide
  Antisense strand to SEQ ID NO: 2406556
uuucuccagguggacaugc

SEQ ID NO: 2406558 - RNA, 19 nt, Artificial Sequence
  Description of Artificial Sequence: Synthetic oligonucleotide
  Sense strand starting at position 281 of SEQ ID NO: 1886394
ggagaaacacuuugcugga

SEQ ID NO: 2406559 - RNA, 19 nt, Artificial Sequence
  Description of Artificial Sequence: Synthetic oligonucleotide
  Antisense strand to SEQ ID NO: 2406558
uccagcaaaguguuucucc

SEQ ID NO: 2406560 - RNA, 19 nt, Artificial Sequence
  Description of Artificial Sequence: Synthetic oligonucleotide
  Sense strand starting at position 284 of SEQ ID NO: 1886394
gaaacacuuugcuggagga

SEQ ID NO: 2406561 - RNA, 19 nt, Artificial Sequence
  Description of Artificial Sequence: Synthetic oligonucleotide
  Antisense strand to SEQ ID NO: 2406560
uccuccagcaaaguguuuc

SEQ ID NO: 2406562 - RNA, 19 nt, Artificial Sequence
  Description of Artificial Sequence: Synthetic oligonucleotide
  Sense strand starting at position 563 of SEQ ID NO: 1886394
gggagaucuucccauugau

SEQ ID NO: 2406563 - RNA, 19 nt, Artificial Sequence
  Description of Artificial Sequence: Synthetic oligonucleotide
  Antisense strand to SEQ ID NO: 2406562
aucaaugggaagaucuccc

SEQ ID NO: 2406564 - RNA, 19 nt, Artificial Sequence
  Description of Artificial Sequence: Synthetic oligonucleotide
  Sense strand starting at position 1166 of SEQ ID NO: 1886394
gggcaaaucuggcauccca

SEQ ID NO: 2406565 - RNA, 19 nt, Artificial Sequence
  Description of Artificial Sequence: Synthetic oligonucleotide
  Antisense strand to SEQ ID NO: 2406564
ugggaugccagauuugccc

SEQ ID NO: 2406566 - RNA, 19 nt, Artificial Sequence
  Description of Artificial Sequence: Synthetic oligonucleotide
  Sense strand starting at position 1266 of SEQ ID NO: 1886394
ugacaugggccauguugau

SEQ ID NO: 2406567 - RNA, 19 nt, Artificial Sequence
  Description of Artificial Sequence: Synthetic oligonucleotide
  Antisense strand to SEQ ID NO: 2406566
aucaacauggcccauguca

SEQ ID NO: 2406568 - RNA, 19 nt, Artificial Sequence
  Description of Artificial Sequence: Synthetic oligonucleotide
  Sense strand starting at position 2005 of SEQ ID NO: 1886394
ggagcuguaguccagauac

SEQ ID NO: 2406569 - RNA, 19 nt, Artificial Sequence
  Description of Artificial Sequence: Synthetic oligonucleotide
  Antisense strand to SEQ ID NO: 2406568
guaucuggacuacagcucc

SEQ ID NO: 2406570 - RNA, 19 nt, Artificial Sequence
  Description of Artificial Sequence: Synthetic oligonucleotide
  Sense strand starting at position 2034 of SEQ ID NO: 1886394
gucggaagcugauaaacua

SEQ ID NO: 2406571 - RNA, 19 nt, Artificial Sequence
  Description of Artificial Sequence: Synthetic oligonucleotide
  Antisense strand to SEQ ID NO: 2406570
uaguuuaucagcuuccgac

SEQ ID NO: 2406572 - RNA, 19 nt, Artificial Sequence
  Description of Artificial Sequence: Synthetic oligonucleotide
  Sense strand starting at position 2067 of SEQ ID NO: 1886394
acgcgcgccuccuguuaaa

SEQ ID NO: 2406573 - RNA, 19 nt, Artificial Sequence
  Description of Artificial Sequence: Synthetic oligonucleotide
  Antisense strand to SEQ ID NO: 2406572
uuuaacaggaggcgcgcgu

SEQ ID NO: 2406574 - RNA, 19 nt, Artificial Sequence
  Description of Artificial Sequence: Synthetic oligonucleotide
  Sense strand starting at position 2239 of SEQ ID NO: 1886394
cugugucacucuccgaaau

SEQ ID NO: 2406575 - RNA, 19 nt, Artificial Sequence
  Description of Artificial Sequence: Synthetic oligonucleotide
  Antisense strand to SEQ ID NO: 2406574
auuucggagagugacacag

SEQ ID NO: 2406576 - RNA, 19 nt, Artificial Sequence
  Description of Artificial Sequence: Synthetic oligonucleotide
  Sense strand starting at position 2240 of SEQ ID NO: 1886394
ugugucacucuccgaaauu

SEQ ID NO: 2406577 - RNA, 19 nt, Artificial Sequence
  Description of Artificial Sequence: Synthetic oligonucleotide
  Antisense strand to SEQ ID NO: 2406576
aauuucggagagugacaca

SEQ ID NO: 2406578 - RNA, 19 nt, Artificial Sequence
  Description of Artificial Sequence: Synthetic oligonucleotide
  Sense strand starting at position 2241 of SEQ ID NO: 1886394
gugucacucuccgaaauuu

SEQ ID NO: 2406579 - RNA, 19 nt, Artificial Sequence
  Description of Artificial Sequence: Synthetic oligonucleotide
  Antisense strand to SEQ ID NO: 2406578
aaauuucggagagugacac

SEQ ID NO: 2406580 - RNA, 19 nt, Artificial Sequence
  Description of Artificial Sequence: Synthetic oligonucleotide
  Sense strand starting at position 2252 of SEQ ID NO: 1886394
cgaaauuugugucagcgcu

SEQ ID NO: 2406581 - RNA, 19 nt, Artificial Sequence
  Description of Artificial Sequence: Synthetic oligonucleotide
  Antisense strand to SEQ ID NO: 2406580
agcgcugacacaaauuucg

SEQ ID NO: 2406582 - RNA, 19 nt, Artificial Sequence
  Description of Artificial Sequence: Synthetic oligonucleotide
  Sense strand starting at position 2326 of SEQ ID NO: 1886394
ggcguuagcgagaguucga

SEQ ID NO: 2406583 - RNA, 19 nt, Artificial Sequence
  Description of Artificial Sequence: Synthetic oligonucleotide
  Antisense strand to SEQ ID NO: 2406582
ucgaacucucgcuaacgcc

SEQ ID NO: 2406584 - RNA, 19 nt, Artificial Sequence
  Description of Artificial Sequence: Synthetic oligonucleotide
  Sense strand starting at position 2327 of SEQ ID NO: 1886394
gcguuagcgagaguucgau

SEQ ID NO: 2406585 - RNA, 19 nt, Artificial Sequence
  Description of Artificial Sequence: Synthetic oligonucleotide
  Antisense strand to SEQ ID NO: 2406584
aucgaacucucgcuaacgc

SEQ ID NO: 2406586 - RNA, 19 nt, Artificial Sequence
  Description of Artificial Sequence: Synthetic oligonucleotide
  Sense strand starting at position 2333 of SEQ ID NO: 1886394
gcgagaguucgauguucaa

SEQ ID NO: 2406587 - RNA, 19 nt, Artificial Sequence
  Description of Artificial Sequence: Synthetic oligonucleotide
  Antisense strand to SEQ ID NO: 2406586
uugaacaucgaacucucgc

SEQ ID NO: 2406588 - RNA, 19 nt, Artificial Sequence
  Description of Artificial Sequence: Synthetic oligonucleotide
  Sense strand starting at position 2336 of SEQ ID NO: 1886394
agaguucgauguucaaaug

SEQ ID NO: 2406589 - RNA, 19 nt, Artificial Sequence
  Description of Artificial Sequence: Synthetic oligonucleotide
  Antisense strand to SEQ ID NO: 2406588
cauuugaacaucgaacucu

SEQ ID NO: 2406590 - RNA, 19 nt, Artificial Sequence
  Description of Artificial Sequence: Synthetic oligonucleotide
  Sense strand starting at position 2435 of SEQ ID NO: 1886394
cggcgcugucuaagacagu

SEQ ID NO: 2406591 - RNA, 19 nt, Artificial Sequence
  Description of Artificial Sequence: Synthetic oligonucleotide
  Antisense strand to SEQ ID NO: 2406590
acugucuuagacagcgccg

SEQ ID NO: 2406592 - RNA, 19 nt, Artificial Sequence
  Description of Artificial Sequence: Synthetic oligonucleotide
  Sense strand starting at position 2436 of SEQ ID NO: 1886394
ggcgcugucuaagacaguu

SEQ ID NO: 2406593 - RNA, 19 nt, Artificial Sequence
  Description of Artificial Sequence: Synthetic oligonucleotide
  Antisense strand to SEQ ID NO: 2406592
aacugucuuagacagcgcc

SEQ ID NO: 2406594 - RNA, 19 nt, Artificial Sequence
  Description of Artificial Sequence: Synthetic oligonucleotide
  Sense strand starting at position 2757 of SEQ ID NO: 1886394
cccuguugguccgaguuua

SEQ ID NO: 2406595 - RNA, 19 nt, Artificial Sequence
  Description of Artificial Sequence: Synthetic oligonucleotide
  Antisense strand to SEQ ID NO: 2406594
uaaacucggaccaacaggg

SEQ ID NO: 2406596 - RNA, 19 nt, Artificial Sequence
  Description of Artificial Sequence: Synthetic oligonucleotide
  Sense strand starting at position 3001 of SEQ ID NO: 1886394
caggguuucucugugacac

SEQ ID NO: 2406597 - RNA, 19 nt, Artificial Sequence
  Description of Artificial Sequence: Synthetic oligonucleotide
  Antisense strand to SEQ ID NO: 2406596
gugucacagagaaacccug

SEQ ID NO: 2406598 - RNA, 19 nt, Artificial Sequence
  Description of Artificial Sequence: Synthetic oligonucleotide
  Sense strand starting at position 3002 of SEQ ID NO: 1886394
aggguuucucugugacacu

SEQ ID NO: 2406599 - RNA, 19 nt, Artificial Sequence
  Description of Artificial Sequence: Synthetic oligonucleotide
  Antisense strand to SEQ ID NO: 2406598
agugucacagagaaacccu

SEQ ID NO: 2406600 - RNA, 19 nt, Artificial Sequence
  Description of Artificial Sequence: Synthetic oligonucleotide
  Sense strand starting at position 3088 of SEQ ID NO: 1886394
gucacaggccgcgauuuau

SEQ ID NO: 2406601 - RNA, 19 nt, Artificial Sequence
  Description of Artificial Sequence: Synthetic oligonucleotide
  Antisense strand to SEQ ID NO: 2406600
auaaaucgcggccugugac

SEQ ID NO: 2406602 - RNA, 19 nt, Artificial Sequence
  Description of Artificial Sequence: Synthetic oligonucleotide
  Sense strand starting at position 3098 of SEQ ID NO: 1886394
gcgauuuaugugcgcccga

SEQ ID NO: 2406603 - RNA, 19 nt, Artificial Sequence
  Description of Artificial Sequence: Synthetic oligonucleotide
  Antisense strand to SEQ ID NO: 2406602
ucgggcgcacauaaaucgc

SEQ ID NO: 2406604 - RNA, 19 nt, Artificial Sequence
  Description of Artificial Sequence: Synthetic oligonucleotide
  Sense strand starting at position 3140 of SEQ ID NO: 1886394
ccgggcucuucuccagaaa

SEQ ID NO: 2406605 - RNA, 19 nt, Artificial Sequence
  Description of Artificial Sequence: Synthetic oligonucleotide
  Antisense strand to SEQ ID NO: 2406604
uuucuggagaagagcccgg

SEQ ID NO: 2406606 - RNA, 19 nt, Artificial Sequence
  Description of Artificial Sequence: Synthetic oligonucleotide
  Sense strand starting at position 3143 of SEQ ID NO: 1886394
ggcucuucuccagaaagug

SEQ ID NO: 2406607 - RNA, 19 nt, Artificial Sequence
  Description of Artificial Sequence: Synthetic oligonucleotide
  Antisense strand to SEQ ID NO: 2406606
cacuuucuggagaagagcc

SEQ ID NO: 2406608 - RNA, 19 nt, Artificial Sequence
  Description of Artificial Sequence: Synthetic oligonucleotide
  Sense strand starting at position 3758 of SEQ ID NO: 1886394
cagguuuaguguugccuga

SEQ ID NO: 2406609 - RNA, 19 nt, Artificial Sequence
  Description of Artificial Sequence: Synthetic oligonucleotide
  Antisense strand to SEQ ID NO: 2406608
ucaggcaacacuaaaccug

SEQ ID NO: 2406610 - RNA, 19 nt, Artificial Sequence
  Description of Artificial Sequence: Synthetic oligonucleotide
  Sense strand starting at position 3760 of SEQ ID NO: 1886394
gguuuaguguugccugacu

SEQ ID NO: 2406611 - RNA, 19 nt, Artificial Sequence
  Description of Artificial Sequence: Synthetic oligonucleotide
  Antisense strand to SEQ ID NO: 2406610
agucaggcaacacuaaacc

SEQ ID NO: 2406612 - RNA, 19 nt, Artificial Sequence
  Description of Artificial Sequence: Synthetic oligonucleotide
  Sense strand starting at position 3762 of SEQ ID NO: 1886394
uuuaguguugccugacuuc

SEQ ID NO: 2406613 - RNA, 19 nt, Artificial Sequence
  Description of Artificial Sequence: Synthetic oligonucleotide
  Antisense strand to SEQ ID NO: 2406612
gaagucaggcaacacuaaa

SEQ ID NO: 2406614 - RNA, 19 nt, Artificial Sequence
  Description of Artificial Sequence: Synthetic oligonucleotide
  Sense strand starting at position 3779 of SEQ ID NO: 1886394
ucagauauggccuauuguu

SEQ ID NO: 2406615 - RNA, 19 nt, Artificial Sequence
  Description of Artificial Sequence: Synthetic oligonucleotide
  Antisense strand to SEQ ID NO: 2406614
aacaauaggccauaucuga

SEQ ID NO: 2406616 - RNA, 19 nt, Artificial Sequence
  Description of Artificial Sequence: Synthetic oligonucleotide
  Sense strand starting at position 3934 of SEQ ID NO: 1886394
cugugugagcucggguuau

SEQ ID NO: 2406617 - RNA, 19 nt, Artificial Sequence
  Description of Artificial Sequence: Synthetic oligonucleotide
  Antisense strand to SEQ ID NO: 2406616
auaacccgagcucacacag

SEQ ID NO: 2406618 - RNA, 19 nt, Artificial Sequence
  Description of Artificial Sequence: Synthetic oligonucleotide
  Sense strand starting at position 67 of SEQ ID NO: 1886395
acuauagaguccucuguuu

SEQ ID NO: 2406619 - RNA, 19 nt, Artificial Sequence
  Description of Artificial Sequence: Synthetic oligonucleotide
  Antisense strand to SEQ ID NO: 2406618
aaacagaggacucuauagu

SEQ ID NO: 2406620 - RNA, 19 nt, Artificial Sequence
  Description of Artificial Sequence: Synthetic oligonucleotide
  Sense strand starting at position 80 of SEQ ID NO: 1886395
cuguuuauagcugacucau

SEQ ID NO: 2406621 - RNA, 19 nt, Artificial Sequence
  Description of Artificial Sequence: Synthetic oligonucleotide
  Antisense strand to SEQ ID NO: 2406620
augagucagcuauaaacag

SEQ ID NO: 2406622 - RNA, 19 nt, Artificial Sequence
  Description of Artificial Sequence: Synthetic oligonucleotide
  Sense strand starting at position 131 of SEQ ID NO: 1886395
cuugguaacuuuccuugaa

SEQ ID NO: 2406623 - RNA, 19 nt, Artificial Sequence
  Description of Artificial Sequence: Synthetic oligonucleotide
  Antisense strand to SEQ ID NO: 2406622
uucaaggaaaguuaccaag

SEQ ID NO: 2406624 - RNA, 19 nt, Artificial Sequence
  Description of Artificial Sequence: Synthetic oligonucleotide
  Sense strand starting at position 132 of SEQ ID NO: 1886395
uugguaacuuuccuugaau

SEQ ID NO: 2406625 - RNA, 19 nt, Artificial Sequence
  Description of Artificial Sequence: Synthetic oligonucleotide
  Antisense strand to SEQ ID NO: 2406624
auucaaggaaaguuaccaa

SEQ ID NO: 2406626 - RNA, 19 nt, Artificial Sequence
  Description of Artificial Sequence: Synthetic oligonucleotide
  Sense strand starting at position 133 of SEQ ID NO: 1886395
ugguaacuuuccuugaauc

SEQ ID NO: 2406627 - RNA, 19 nt, Artificial Sequence
  Description of Artificial Sequence: Synthetic oligonucleotide
  Antisense strand to SEQ ID NO: 2406626
gauucaaggaaaguuacca

SEQ ID NO: 2406628 - RNA, 19 nt, Artificial Sequence
  Description of Artificial Sequence: Synthetic oligonucleotide
  Sense strand starting at position 134 of SEQ ID NO: 1886395
gguaacuuuccuugaauca

SEQ ID NO: 2406629 - RNA, 19 nt, Artificial Sequence
  Description of Artificial Sequence: Synthetic oligonucleotide
  Antisense strand to SEQ ID NO: 2406628
ugauucaaggaaaguuacc

SEQ ID NO: 2406630 - RNA, 19 nt, Artificial Sequence
  Description of Artificial Sequence: Synthetic oligonucleotide
  Sense strand starting at position 154 of SEQ ID NO: 1886395
gcaagucuggugcagauaa

SEQ ID NO: 2406631 - RNA, 19 nt, Artificial Sequence
  Description of Artificial Sequence: Synthetic oligonucleotide
  Antisense strand to SEQ ID NO: 2406630
uuaucugcaccagacuugc

SEQ ID NO: 2406632 - RNA, 19 nt, Artificial Sequence
  Description of Artificial Sequence: Synthetic oligonucleotide
  Sense strand starting at position 191 of SEQ ID NO: 1886395
agggaaugugcaugucauc

SEQ ID NO: 2406633 - RNA, 19 nt, Artificial Sequence
  Description of Artificial Sequence: Synthetic oligonucleotide
  Antisense strand to SEQ ID NO: 2406632
gaugacaugcacauucccu

SEQ ID NO: 2406634 - RNA, 19 nt, Artificial Sequence
  Description of Artificial Sequence: Synthetic oligonucleotide
  Sense strand starting at position 196 of SEQ ID NO: 1886395
augugcaugucaucuggaa

SEQ ID NO: 2406635 - RNA, 19 nt, Artificial Sequence
  Description of Artificial Sequence: Synthetic oligonucleotide
  Antisense strand to SEQ ID NO: 2406634
uuccagaugacaugcacau

SEQ ID NO: 2406636 - RNA, 19 nt, Artificial Sequence
  Description of Artificial Sequence: Synthetic oligonucleotide
  Sense strand starting at position 200 of SEQ ID NO: 1886395
gcaugucaucuggaauacu

SEQ ID NO: 2406637 - RNA, 19 nt, Artificial Sequence
  Description of Artificial Sequence: Synthetic oligonucleotide
  Antisense strand to SEQ ID NO: 2406636
aguauuccagaugacaugc

SEQ ID NO: 2406638 - RNA, 19 nt, Artificial Sequence
  Description of Artificial Sequence: Synthetic oligonucleotide
  Sense strand starting at position 415 of SEQ ID NO: 1886395
cucaguuggcuccaaggaa

SEQ ID NO: 2406639 - RNA, 19 nt, Artificial Sequence
  Description of Artificial Sequence: Synthetic oligonucleotide
  Antisense strand to SEQ ID NO: 2406638
uuccuuggagccaacugag

SEQ ID NO: 2406640 - RNA, 19 nt, Artificial Sequence
  Description of Artificial Sequence: Synthetic oligonucleotide
  Sense strand starting at position 614 of SEQ ID NO: 1886395
aggauaaacucccugucau

SEQ ID NO: 2406641 - RNA, 19 nt, Artificial Sequence
  Description of Artificial Sequence: Synthetic oligonucleotide
  Antisense strand to SEQ ID NO: 2406640
augacagggaguuuauccu

SEQ ID NO: 2406642 - RNA, 19 nt, Artificial Sequence
  Description of Artificial Sequence: Synthetic oligonucleotide
  Sense strand starting at position 615 of SEQ ID NO: 1886395
ggauaaacucccugucauc

SEQ ID NO: 2406643 - RNA, 19 nt, Artificial Sequence
  Description of Artificial Sequence: Synthetic oligonucleotide
  Antisense strand to SEQ ID NO: 2406642
gaugacagggaguuuaucc

SEQ ID NO: 2406644 - RNA, 19 nt, Artificial Sequence
  Description of Artificial Sequence: Synthetic oligonucleotide
  Sense strand starting at position 625 of SEQ ID NO: 1886395
ccugucaucccacacagau

SEQ ID NO: 2406645 - RNA, 19 nt, Artificial Sequence
  Description of Artificial Sequence: Synthetic oligonucleotide
  Antisense strand to SEQ ID NO: 2406644
aucugugugggaugacagg

SEQ ID NO: 2406646 - RNA, 19 nt, Artificial Sequence
  Description of Artificial Sequence: Synthetic oligonucleotide
  Sense strand starting at position 655 of SEQ ID NO: 1886395
gccugaaugacagguguca

SEQ ID NO: 2406647 - RNA, 19 nt, Artificial Sequence
  Description of Artificial Sequence: Synthetic oligonucleotide
  Antisense strand to SEQ ID NO: 2406646
ugacaccugucauucaggc

SEQ ID NO: 2406648 - RNA, 19 nt, Artificial Sequence
  Description of Artificial Sequence: Synthetic oligonucleotide
  Sense strand starting at position 657 of SEQ ID NO: 1886395
cugaaugacaggugucaga

SEQ ID NO: 2406649 - RNA, 19 nt, Artificial Sequence
  Description of Artificial Sequence: Synthetic oligonucleotide
  Antisense strand to SEQ ID NO: 2406648
ucugacaccugucauucag

SEQ ID NO: 2406650 - RNA, 19 nt, Artificial Sequence
  Description of Artificial Sequence: Synthetic oligonucleotide
  Sense strand starting at position 741 of SEQ ID NO: 1886395
ggagacagcaucugucuua

SEQ ID NO: 2406651 - RNA, 19 nt, Artificial Sequence
  Description of Artificial Sequence: Synthetic oligonucleotide
  Antisense strand to SEQ ID NO: 2406650
uaagacagaugcugucucc

SEQ ID NO: 2406652 - RNA, 19 nt, Artificial Sequence
  Description of Artificial Sequence: Synthetic oligonucleotide
  Sense strand starting at position 937 of SEQ ID NO: 1886395
gaaacagagucucuaguga

SEQ ID NO: 2406653 - RNA, 19 nt, Artificial Sequence
  Description of Artificial Sequence: Synthetic oligonucleotide
  Antisense strand to SEQ ID NO: 2406652
ucacuagagacucuguuuc

SEQ ID NO: 2406654 - RNA, 19 nt, Artificial Sequence
  Description of Artificial Sequence: Synthetic oligonucleotide
  Sense strand starting at position 1106 of SEQ ID NO: 1886395
aggguuagucacugaggca

SEQ ID NO: 2406655 - RNA, 19 nt, Artificial Sequence
  Description of Artificial Sequence: Synthetic oligonucleotide
  Antisense strand to SEQ ID NO: 2406654
ugccucagugacuaacccu

SEQ ID NO: 2406656 - RNA, 19 nt, Artificial Sequence
  Description of Artificial Sequence: Synthetic oligonucleotide
  Sense strand starting at position 1454 of SEQ ID NO: 1886395
gaaagaaaugaguggucuu

SEQ ID NO: 2406657 - RNA, 19 nt, Artificial Sequence
  Description of Artificial Sequence: Synthetic oligonucleotide
  Antisense strand to SEQ ID NO: 2406656
aagaccacucauuucuuuc

SEQ ID NO: 2406658 - RNA, 19 nt, Artificial Sequence
  Description of Artificial Sequence: Synthetic oligonucleotide
  Sense strand starting at position 1552 of SEQ ID NO: 1886395
aggccaccucucugagaaa

SEQ ID NO: 2406659 - RNA, 19 nt, Artificial Sequence
  Description of Artificial Sequence: Synthetic oligonucleotide
  Antisense strand to SEQ ID NO: 2406658
uuucucagagagguggccu

SEQ ID NO: 2406660 - RNA, 19 nt, Artificial Sequence
  Description of Artificial Sequence: Synthetic oligonucleotide
  Sense strand starting at position 1645 of SEQ ID NO: 1886395
gacaguugugcccagagca

SEQ ID NO: 2406661 - RNA, 19 nt, Artificial Sequence
  Description of Artificial Sequence: Synthetic oligonucleotide
  Antisense strand to SEQ ID NO: 2406660
ugcucugggcacaacuguc

SEQ ID NO: 2406662 - RNA, 19 nt, Artificial Sequence
  Description of Artificial Sequence: Synthetic oligonucleotide
  Sense strand starting at position 2433 of SEQ ID NO: 1886395
ugaugagguacuugugacu

SEQ ID NO: 2406663 - RNA, 19 nt, Artificial Sequence
  Description of Artificial Sequence: Synthetic oligonucleotide
  Antisense strand to SEQ ID NO: 2406662
agucacaaguaccucauca

SEQ ID NO: 2406664 - RNA, 19 nt, Artificial Sequence
  Description of Artificial Sequence: Synthetic oligonucleotide
  Sense strand starting at position 2566 of SEQ ID NO: 1886395
aagaguucucaaggcuuua

SEQ ID NO: 2406665 - RNA, 19 nt, Artificial Sequence
  Description of Artificial Sequence: Synthetic oligonucleotide
  Antisense strand to SEQ ID NO: 2406664
uaaagccuugagaacucuu

SEQ ID NO: 2406666 - RNA, 19 nt, Artificial Sequence
  Description of Artificial Sequence: Synthetic oligonucleotide
  Sense strand starting at position 2616 of SEQ ID NO: 1886395
ggaggauuccgauggaagu

SEQ ID NO: 2406667 - RNA, 19 nt, Artificial Sequence
  Description of Artificial Sequence: Synthetic oligonucleotide
  Antisense strand to SEQ ID NO: 2406666
acuuccaucggaauccucc

SEQ ID NO: 2406668 - RNA, 19 nt, Artificial Sequence
  Description of Artificial Sequence: Synthetic oligonucleotide
  Sense strand starting at position 2617 of SEQ ID NO: 1886395
gaggauuccgauggaagug

SEQ ID NO: 2406669 - RNA, 19 nt, Artificial Sequence
  Description of Artificial Sequence: Synthetic oligonucleotide
  Antisense strand to SEQ ID NO: 2406668
cacuuccaucggaauccuc

SEQ ID NO: 2406670 - RNA, 19 nt, Artificial Sequence
  Description of Artificial Sequence: Synthetic oligonucleotide
  Sense strand starting at position 2665 of SEQ ID NO: 1886395
gucuguuugggucuucgua

SEQ ID NO: 2406671 - RNA, 19 nt, Artificial Sequence
  Description of Artificial Sequence: Synthetic oligonucleotide
  Antisense strand to SEQ ID NO: 2406670
uacgaagacccaaacagac

SEQ ID NO: 2406672 - RNA, 19 nt, Artificial Sequence
  Description of Artificial Sequence: Synthetic oligonucleotide
  Sense strand starting at position 3108 of SEQ ID NO: 1886395
ugagacaugaauuggcgau

SEQ ID NO: 2406673 - RNA, 19 nt, Artificial Sequence
  Description of Artificial Sequence: Synthetic oligonucleotide
  Antisense strand to SEQ ID NO: 2406672
aucgccaauucaugucuca

SEQ ID NO: 2406674 - RNA, 19 nt, Artificial Sequence
  Description of Artificial Sequence: Synthetic oligonucleotide
  Sense strand starting at position 3112 of SEQ ID NO: 1886395
acaugaauuggcgaucuuu

SEQ ID NO: 2406675 - RNA, 19 nt, Artificial Sequence
  Description of Artificial Sequence: Synthetic oligonucleotide
  Antisense strand to SEQ ID NO: 2406674
aaagaucgccaauucaugu

SEQ ID NO: 2406676 - RNA, 19 nt, Artificial Sequence
  Description of Artificial Sequence: Synthetic oligonucleotide
  Sense strand starting at position 3140 of SEQ ID NO: 1886395
uaaugaguguuagcugaac

SEQ ID NO: 2406677 - RNA, 19 nt, Artificial Sequence
  Description of Artificial Sequence: Synthetic oligonucleotide
  Antisense strand to SEQ ID NO: 2406676
guucagcuaacacucauua

SEQ ID NO: 2406678 - RNA, 19 nt, Artificial Sequence
  Description of Artificial Sequence: Synthetic oligonucleotide
  Sense strand starting at position 3142 of SEQ ID NO: 1886395
augaguguuagcugaacca

SEQ ID NO: 2406679 - RNA, 19 nt, Artificial Sequence
  Description of Artificial Sequence: Synthetic oligonucleotide
  Antisense strand to SEQ ID NO: 2406678
ugguucagcuaacacucau

SEQ ID NO: 2406680 - RNA, 19 nt, Artificial Sequence
  Description of Artificial Sequence: Synthetic oligonucleotide
  Sense strand starting at position 3251 of SEQ ID NO: 1886395
aggguugucccuuggagag

SEQ ID NO: 2406681 - RNA, 19 nt, Artificial Sequence
  Description of Artificial Sequence: Synthetic oligonucleotide
  Antisense strand to SEQ ID NO: 2406680
cucuccaagggacaacccu

SEQ ID NO: 2406682 - RNA, 19 nt, Artificial Sequence
  Description of Artificial Sequence: Synthetic oligonucleotide
  Sense strand starting at position 3341 of SEQ ID NO: 1886395
uagggugaauguguuuaga

SEQ ID NO: 2406683 - RNA, 19 nt, Artificial Sequence
  Description of Artificial Sequence: Synthetic oligonucleotide
  Antisense strand to SEQ ID NO: 2406682
ucuaaacacauucacccua

SEQ ID NO: 2406684 - RNA, 19 nt, Artificial Sequence
  Description of Artificial Sequence: Synthetic oligonucleotide
  Sense strand starting at position 3344 of SEQ ID NO: 1886395
ggugaauguguuuagaguu

SEQ ID NO: 2406685 - RNA, 19 nt, Artificial Sequence
  Description of Artificial Sequence: Synthetic oligonucleotide
  Antisense strand to SEQ ID NO: 2406684
aacucuaaacacauucacc

SEQ ID NO: 2406686 - RNA, 19 nt, Artificial Sequence
  Description of Artificial Sequence: Synthetic oligonucleotide
  Sense strand starting at position 3354 of SEQ ID NO: 1886395
uuuagaguuacuugcagga

SEQ ID NO: 2406687 - RNA, 19 nt, Artificial Sequence
  Description of Artificial Sequence: Synthetic oligonucleotide
  Antisense strand to SEQ ID NO: 2406686
uccugcaaguaacucuaaa

SEQ ID NO: 2406688 - RNA, 19 nt, Artificial Sequence
  Description of Artificial Sequence: Synthetic oligonucleotide
  Sense strand starting at position 3459 of SEQ ID NO: 1886395
caggaugacucagugguua

SEQ ID NO: 2406689 - RNA, 19 nt, Artificial Sequence
  Description of Artificial Sequence: Synthetic oligonucleotide
  Antisense strand to SEQ ID NO: 2406688
uaaccacugagucauccug

SEQ ID NO: 2406690 - RNA, 19 nt, Artificial Sequence
  Description of Artificial Sequence: Synthetic oligonucleotide
  Sense strand starting at position 3461 of SEQ ID NO: 1886395
ggaugacucagugguuaag

SEQ ID NO: 2406691 - RNA, 19 nt, Artificial Sequence
  Description of Artificial Sequence: Synthetic oligonucleotide
  Antisense strand to SEQ ID NO: 2406690
cuuaaccacugagucaucc

SEQ ID NO: 2406692 - RNA, 19 nt, Artificial Sequence
  Description of Artificial Sequence: Synthetic oligonucleotide
  Sense strand starting at position 3464 of SEQ ID NO: 1886395
ugacucagugguuaagagu

SEQ ID NO: 2406693 - RNA, 19 nt, Artificial Sequence
  Description of Artificial Sequence: Synthetic oligonucleotide
  Antisense strand to SEQ ID NO: 2406692
acucuuaaccacugaguca

SEQ ID NO: 2406694 - RNA, 19 nt, Artificial Sequence
  Description of Artificial Sequence: Synthetic oligonucleotide
  Sense strand starting at position 3517 of SEQ ID NO: 1886395
cccagaauaagcuguguga

SEQ ID NO: 2406695 - RNA, 19 nt, Artificial Sequence
  Description of Artificial Sequence: Synthetic oligonucleotide
  Antisense strand to SEQ ID NO: 2406694
ucacacagcuuauucuggg

SEQ ID NO: 2406696 - RNA, 19 nt, Artificial Sequence
  Description of Artificial Sequence: Synthetic oligonucleotide
  Sense strand starting at position 3520 of SEQ ID NO: 1886395
agaauaagcugugugaccu

SEQ ID NO: 2406697 - RNA, 19 nt, Artificial Sequence
  Description of Artificial Sequence: Synthetic oligonucleotide
  Antisense strand to SEQ ID NO: 2406696
aggucacacagcuuauucu

SEQ ID NO: 2406698 - RNA, 19 nt, Artificial Sequence
  Description of Artificial Sequence: Synthetic oligonucleotide
  Sense strand starting at position 114 of SEQ ID NO: 1886396
agguuacugcaauaauuaa

SEQ ID NO: 2406699 - RNA, 19 nt, Artificial Sequence
  Description of Artificial Sequence: Synthetic oligonucleotide
  Antisense strand to SEQ ID NO: 2406698
uuaauuauugcaguaaccu

SEQ ID NO: 2406700 - RNA, 19 nt, Artificial Sequence
  Description of Artificial Sequence: Synthetic oligonucleotide
  Sense strand starting at position 304 of SEQ ID NO: 1886396
gcuaccaaguuauuagaaa

SEQ ID NO: 2406701 - RNA, 19 nt, Artificial Sequence
  Description of Artificial Sequence: Synthetic oligonucleotide
  Antisense strand to SEQ ID NO: 2406700
uuucuaauaacuugguagc

SEQ ID NO: 2406702 - RNA, 19 nt, Artificial Sequence
  Description of Artificial Sequence: Synthetic oligonucleotide
  Sense strand starting at position 381 of SEQ ID NO: 1886396
gcagucaaugauuaccauu

SEQ ID NO: 2406703 - RNA, 19 nt, Artificial Sequence
  Description of Artificial Sequence: Synthetic oligonucleotide
  Antisense strand to SEQ ID NO: 2406702
aaugguaaucauugacugc

SEQ ID NO: 2406704 - RNA, 19 nt, Artificial Sequence
  Description of Artificial Sequence: Synthetic oligonucleotide
  Sense strand starting at position 402 of SEQ ID NO: 1886396
ggagguuuagggugaugac

SEQ ID NO: 2406705 - RNA, 19 nt, Artificial Sequence
  Description of Artificial Sequence: Synthetic oligonucleotide
  Antisense strand to SEQ ID NO: 2406704
gucaucacccuaaaccucc

SEQ ID NO: 2406706 - RNA, 19 nt, Artificial Sequence
  Description of Artificial Sequence: Synthetic oligonucleotide
  Sense strand starting at position 681 of SEQ ID NO: 1886396
aaucguguccucuaaacag

SEQ ID NO: 2406707 - RNA, 19 nt, Artificial Sequence
  Description of Artificial Sequence: Synthetic oligonucleotide
  Antisense strand to SEQ ID NO: 2406706
cuguuuagaggacacgauu

SEQ ID NO: 2406708 - RNA, 19 nt, Artificial Sequence
  Description of Artificial Sequence: Synthetic oligonucleotide
  Sense strand starting at position 742 of SEQ ID NO: 1886396
uauagagucuuuguagaug

SEQ ID NO: 2406709 - RNA, 19 nt, Artificial Sequence
  Description of Artificial Sequence: Synthetic oligonucleotide
  Antisense strand to SEQ ID NO: 2406708
caucuacaaagacucuaua

SEQ ID NO: 2406710 - RNA, 19 nt, Artificial Sequence
  Description of Artificial Sequence: Synthetic oligonucleotide
  Sense strand starting at position 778 of SEQ ID NO: 1886396
ggucauacggaaugagagu

SEQ ID NO: 2406711 - RNA, 19 nt, Artificial Sequence
  Description of Artificial Sequence: Synthetic oligonucleotide
  Antisense strand to SEQ ID NO: 2406710
acucucauuccguaugacc

SEQ ID NO: 2406712 - RNA, 19 nt, Artificial Sequence
  Description of Artificial Sequence: Synthetic oligonucleotide
  Sense strand starting at position 858 of SEQ ID NO: 1886396
gggagaaagcccugugauu

SEQ ID NO: 2406713 - RNA, 19 nt, Artificial Sequence
  Description of Artificial Sequence: Synthetic oligonucleotide
  Antisense strand to SEQ ID NO: 2406712
aaucacagggcuuucuccc

SEQ ID NO: 2406714 - RNA, 19 nt, Artificial Sequence
  Description of Artificial Sequence: Synthetic oligonucleotide
  Sense strand starting at position 863 of SEQ ID NO: 1886396
aaagcccugugauuacaga

SEQ ID NO: 2406715 - RNA, 19 nt, Artificial Sequence
  Description of Artificial Sequence: Synthetic oligonucleotide
  Antisense strand to SEQ ID NO: 2406714
ucuguaaucacagggcuuu

SEQ ID NO: 2406716 - RNA, 19 nt, Artificial Sequence
  Description of Artificial Sequence: Synthetic oligonucleotide
  Sense strand starting at position 880 of SEQ ID NO: 1886396
gaggcagagcuuggagaaa

SEQ ID NO: 2406717 - RNA, 19 nt, Artificial Sequence
  Description of Artificial Sequence: Synthetic oligonucleotide
  Antisense strand to SEQ ID NO: 2406716
uuucuccaagcucugccuc

SEQ ID NO: 2406718 - RNA, 19 nt, Artificial Sequence
  Description of Artificial Sequence: Synthetic oligonucleotide
  Sense strand starting at position 906 of SEQ ID NO: 1886396
acuccaagccgaggaauua

SEQ ID NO: 2406719 - RNA, 19 nt, Artificial Sequence
  Description of Artificial Sequence: Synthetic oligonucleotide
  Antisense strand to SEQ ID NO: 2406718
uaauuccucggcuuggagu

SEQ ID NO: 2406720 - RNA, 19 nt, Artificial Sequence
  Description of Artificial Sequence: Synthetic oligonucleotide
  Sense strand starting at position 1027 of SEQ ID NO: 1886396
acugguagccucuagaacu

SEQ ID NO: 2406721 - RNA, 19 nt, Artificial Sequence
  Description of Artificial Sequence: Synthetic oligonucleotide
  Antisense strand to SEQ ID NO: 2406720
aguucuagaggcuaccagu

SEQ ID NO: 2406722 - RNA, 19 nt, Artificial Sequence
  Description of Artificial Sequence: Synthetic oligonucleotide
  Sense strand starting at position 1117 of SEQ ID NO: 1886396
cuaagacaguccuugauga

SEQ ID NO: 2406723 - RNA, 19 nt, Artificial Sequence
  Description of Artificial Sequence: Synthetic oligonucleotide
  Antisense strand to SEQ ID NO: 2406722
ucaucaaggacugucuuag

SEQ ID NO: 2406724 - RNA, 19 nt, Artificial Sequence
  Description of Artificial Sequence: Synthetic oligonucleotide
  Sense strand starting at position 1118 of SEQ ID NO: 1886396
uaagacaguccuugaugaa

SEQ ID NO: 2406725 - RNA, 19 nt, Artificial Sequence
  Description of Artificial Sequence: Synthetic oligonucleotide
  Antisense strand to SEQ ID NO: 2406724
uucaucaaggacugucuua

SEQ ID NO: 2406726 - RNA, 19 nt, Artificial Sequence
  Description of Artificial Sequence: Synthetic oligonucleotide
  Sense strand starting at position 1125 of SEQ ID NO: 1886396
guccuugaugaagguagau

SEQ ID NO: 2406727 - RNA, 19 nt, Artificial Sequence
  Description of Artificial Sequence: Synthetic oligonucleotide
  Antisense strand to SEQ ID NO: 2406726
aucuaccuucaucaaggac

SEQ ID NO: 2406728 - RNA, 19 nt, Artificial Sequence
  Description of Artificial Sequence: Synthetic oligonucleotide
  Sense strand starting at position 1233 of SEQ ID NO: 1886396
gagaauuaugcgcauaagg

SEQ ID NO: 2406729 - RNA, 19 nt, Artificial Sequence
  Description of Artificial Sequence: Synthetic oligonucleotide
  Antisense strand to SEQ ID NO: 2406728
ccuuaugcgcauaauucuc

SEQ ID NO: 2406730 - RNA, 19 nt, Artificial Sequence
  Description of Artificial Sequence: Synthetic oligonucleotide
  Sense strand starting at position 1235 of SEQ ID NO: 1886396
gaauuaugcgcauaaggac

SEQ ID NO: 2406731 - RNA, 19 nt, Artificial Sequence
  Description of Artificial Sequence: Synthetic oligonucleotide
  Antisense strand to SEQ ID NO: 2406730
guccuuaugcgcauaauuc

SEQ ID NO: 2406732 - RNA, 19 nt, Artificial Sequence
  Description of Artificial Sequence: Synthetic oligonucleotide
  Sense strand starting at position 1244 of SEQ ID NO: 1886396
gcauaaggacucuaccagu

SEQ ID NO: 2406733 - RNA, 19 nt, Artificial Sequence
  Description of Artificial Sequence: Synthetic oligonucleotide
  Antisense strand to SEQ ID NO: 2406732
acugguagaguccuuaugc

SEQ ID NO: 2406734 - RNA, 19 nt, Artificial Sequence
  Description of Artificial Sequence: Synthetic oligonucleotide
  Sense strand starting at position 1642 of SEQ ID NO: 1886396
uuccaucaugucuaagaug

SEQ ID NO: 2406735 - RNA, 19 nt, Artificial Sequence
  Description of Artificial Sequence: Synthetic oligonucleotide
  Antisense strand to SEQ ID NO: 2406734
caucuuagacaugauggaa

SEQ ID NO: 2406736 - RNA, 19 nt, Artificial Sequence
  Description of Artificial Sequence: Synthetic oligonucleotide
  Sense strand starting at position 1650 of SEQ ID NO: 1886396
ugucuaagaugaucucaau

SEQ ID NO: 2406737 - RNA, 19 nt, Artificial Sequence
  Description of Artificial Sequence: Synthetic oligonucleotide
  Antisense strand to SEQ ID NO: 2406736
auugagaucaucuuagaca

SEQ ID NO: 2406738 - RNA, 19 nt, Artificial Sequence
  Description of Artificial Sequence: Synthetic oligonucleotide
  Sense strand starting at position 1794 of SEQ ID NO: 1886396
gugucuuagauacaacgaa

SEQ ID NO: 2406739 - RNA, 19 nt, Artificial Sequence
  Description of Artificial Sequence: Synthetic oligonucleotide
  Antisense strand to SEQ ID NO: 2406738
uucguuguaucuaagacac

SEQ ID NO: 2406740 - RNA, 19 nt, Artificial Sequence
  Description of Artificial Sequence: Synthetic oligonucleotide
  Sense strand starting at position 1816 of SEQ ID NO: 1886396
ugguaaagguuuccacaca

SEQ ID NO: 2406741 - RNA, 19 nt, Artificial Sequence
  Description of Artificial Sequence: Synthetic oligonucleotide
  Antisense strand to SEQ ID NO: 2406740
uguguggaaaccuuuacca

SEQ ID NO: 2406742 - RNA, 19 nt, Artificial Sequence
  Description of Artificial Sequence: Synthetic oligonucleotide
  Sense strand starting at position 1867 of SEQ ID NO: 1886396
uguaaagaccaauguggaa

SEQ ID NO: 2406743 - RNA, 19 nt, Artificial Sequence
  Description of Artificial Sequence: Synthetic oligonucleotide
  Antisense strand to SEQ ID NO: 2406742
uuccacauuggucuuuaca

SEQ ID NO: 2406744 - RNA, 19 nt, Artificial Sequence
  Description of Artificial Sequence: Synthetic oligonucleotide
  Sense strand starting at position 2034 of SEQ ID NO: 1886396
gcuuuagaacccuaguaua

SEQ ID NO: 2406745 - RNA, 19 nt, Artificial Sequence
  Description of Artificial Sequence: Synthetic oligonucleotide
  Antisense strand to SEQ ID NO: 2406744
uauacuaggguucuaaagc

SEQ ID NO: 2406746 - RNA, 19 nt, Artificial Sequence
  Description of Artificial Sequence: Synthetic oligonucleotide
  Sense strand starting at position 2226 of SEQ ID NO: 1886396
uaaggucaugcagaucauu

SEQ ID NO: 2406747 - RNA, 19 nt, Artificial Sequence
  Description of Artificial Sequence: Synthetic oligonucleotide
  Antisense strand to SEQ ID NO: 2406746
aaugaucugcaugaccuua

SEQ ID NO: 2406748 - RNA, 19 nt, Artificial Sequence
  Description of Artificial Sequence: Synthetic oligonucleotide
  Sense strand starting at position 2229 of SEQ ID NO: 1886396
ggucaugcagaucauuaau

SEQ ID NO: 2406749 - RNA, 19 nt, Artificial Sequence
  Description of Artificial Sequence: Synthetic oligonucleotide
  Antisense strand to SEQ ID NO: 2406748
auuaaugaucugcaugacc

SEQ ID NO: 2406750 - RNA, 19 nt, Artificial Sequence
  Description of Artificial Sequence: Synthetic oligonucleotide
  Sense strand starting at position 2352 of SEQ ID NO: 1886396
uuggaaccauuguuaaaca

SEQ ID NO: 2406751 - RNA, 19 nt, Artificial Sequence
  Description of Artificial Sequence: Synthetic oligonucleotide
  Antisense strand to SEQ ID NO: 2406750
uguuuaacaaugguuccaa

SEQ ID NO: 2406752 - RNA, 19 nt, Artificial Sequence
  Description of Artificial Sequence: Synthetic oligonucleotide
  Sense strand starting at position 2479 of SEQ ID NO: 1886396
ccugacucauccuuagaag

SEQ ID NO: 2406753 - RNA, 19 nt, Artificial Sequence
  Description of Artificial Sequence: Synthetic oligonucleotide
  Antisense strand to SEQ ID NO: 2406752
cuucuaaggaugagucagg

SEQ ID NO: 2406754 - RNA, 19 nt, Artificial Sequence
  Description of Artificial Sequence: Synthetic oligonucleotide
  Sense strand starting at position 2480 of SEQ ID NO: 1886396
cugacucauccuuagaagu

SEQ ID NO: 2406755 - RNA, 19 nt, Artificial Sequence
  Description of Artificial Sequence: Synthetic oligonucleotide
  Antisense strand to SEQ ID NO: 2406754
acuucuaaggaugagucag

SEQ ID NO: 2406756 - RNA, 19 nt, Artificial Sequence
  Description of Artificial Sequence: Synthetic oligonucleotide
  Sense strand starting at position 2533 of SEQ ID NO: 1886396
ggcucuuuaacguaaauga

SEQ ID NO: 2406757 - RNA, 19 nt, Artificial Sequence
  Description of Artificial Sequence: Synthetic oligonucleotide
  Antisense strand to SEQ ID NO: 2406756
ucauuuacguuaaagagcc

SEQ ID NO: 2406758 - RNA, 19 nt, Artificial Sequence
  Description of Artificial Sequence: Synthetic oligonucleotide
  Sense strand starting at position 2644 of SEQ ID NO: 1886396
agcaguaaucaauagugaa

SEQ ID NO: 2406759 - RNA, 19 nt, Artificial Sequence
  Description of Artificial Sequence: Synthetic oligonucleotide
  Antisense strand to SEQ ID NO: 2406758
uucacuauugauuacugcu

SEQ ID NO: 2406760 - RNA, 19 nt, Artificial Sequence
  Description of Artificial Sequence: Synthetic oligonucleotide
  Sense strand starting at position 2659 of SEQ ID NO: 1886396
ugaaaucugccugaaucuc

SEQ ID NO: 2406761 - RNA, 19 nt, Artificial Sequence
  Description of Artificial Sequence: Synthetic oligonucleotide
  Antisense strand to SEQ ID NO: 2406760
gagauucaggcagauuuca

SEQ ID NO: 2406762 - RNA, 19 nt, Artificial Sequence
  Description of Artificial Sequence: Synthetic oligonucleotide
  Sense strand starting at position 2724 of SEQ ID NO: 1886396
uucuguuauuuagugccaa

SEQ ID NO: 2406763 - RNA, 19 nt, Artificial Sequence
  Description of Artificial Sequence: Synthetic oligonucleotide
  Antisense strand to SEQ ID NO: 2406762
uuggcacuaaauaacagaa

SEQ ID NO: 2406764 - RNA, 19 nt, Artificial Sequence
  Description of Artificial Sequence: Synthetic oligonucleotide
  Sense strand starting at position 2891 of SEQ ID NO: 1886396
agcuuugaggcugagauaa

SEQ ID NO: 2406765 - RNA, 19 nt, Artificial Sequence
  Description of Artificial Sequence: Synthetic oligonucleotide
  Antisense strand to SEQ ID NO: 2406764
uuaucucagccucaaagcu

SEQ ID NO: 2406766 - RNA, 19 nt, Artificial Sequence
  Description of Artificial Sequence: Synthetic oligonucleotide
  Sense strand starting at position 3170 of SEQ ID NO: 1886396
caacuugaguugucugaaa

SEQ ID NO: 2406767 - RNA, 19 nt, Artificial Sequence
  Description of Artificial Sequence: Synthetic oligonucleotide
  Antisense strand to SEQ ID NO: 2406766
uuucagacaacucaaguug

SEQ ID NO: 2406768 - RNA, 19 nt, Artificial Sequence
  Description of Artificial Sequence: Synthetic oligonucleotide
  Sense strand starting at position 3172 of SEQ ID NO: 1886396
acuugaguugucugaaagg

SEQ ID NO: 2406769 - RNA, 19 nt, Artificial Sequence
  Description of Artificial Sequence: Synthetic oligonucleotide
  Antisense strand to SEQ ID NO: 2406768
ccuuucagacaacucaagu

SEQ ID NO: 2406770 - RNA, 19 nt, Artificial Sequence
  Description of Artificial Sequence: Synthetic oligonucleotide
  Sense strand starting at position 3613 of SEQ ID NO: 1886396
ugaccuuaggucuauccua

SEQ ID NO: 2406771 - RNA, 19 nt, Artificial Sequence
  Description of Artificial Sequence: Synthetic oligonucleotide
  Antisense strand to SEQ ID NO: 2406770
uaggauagaccuaagguca

SEQ ID NO: 2406772 - RNA, 19 nt, Artificial Sequence
  Description of Artificial Sequence: Synthetic oligonucleotide
  Sense strand starting at position 3780 of SEQ ID NO: 1886396
cccagaucugguuggaaag

SEQ ID NO: 2406773 - RNA, 19 nt, Artificial Sequence
  Description of Artificial Sequence: Synthetic oligonucleotide
  Antisense strand to SEQ ID NO: 2406772
cuuuccaaccagaucuggg

SEQ ID NO: 2406774 - RNA, 19 nt, Artificial Sequence
  Description of Artificial Sequence: Synthetic oligonucleotide
  Sense strand starting at position 3896 of SEQ ID NO: 1886396
uugaguauugcacaugaag

SEQ ID NO: 2406775 - RNA, 19 nt, Artificial Sequence
  Description of Artificial Sequence: Synthetic oligonucleotide
  Antisense strand to SEQ ID NO: 2406774
cuucaugugcaauacucaa

SEQ ID NO: 2406776 - RNA, 19 nt, Artificial Sequence
  Description of Artificial Sequence: Synthetic oligonucleotide
  Sense strand starting at position 3944 of SEQ ID NO: 1886396
auauguaaucagcauuagu

SEQ ID NO: 2406777 - RNA, 19 nt, Artificial Sequence
  Description of Artificial Sequence: Synthetic oligonucleotide
  Antisense strand to SEQ ID NO: 2406776
acuaaugcugauuacauau

SEQ ID NO: 2406778 - RNA, 19 nt, Artificial Sequence
  Description of Artificial Sequence: Synthetic oligonucleotide
  Sense strand starting at position 134 of SEQ ID NO: 1886398
guccuuccuguccaauuga

SEQ ID NO: 2406779 - RNA, 19 nt, Artificial Sequence
  Description of Artificial Sequence: Synthetic oligonucleotide
  Antisense strand to SEQ ID NO: 2406778
ucaauuggacaggaaggac

SEQ ID NO: 2406780 - RNA, 19 nt, Artificial Sequence
  Description of Artificial Sequence: Synthetic oligonucleotide
  Sense strand starting at position 145 of SEQ ID NO: 1886398
ccaauugaagcugggauaa

SEQ ID NO: 2406781 - RNA, 19 nt, Artificial Sequence
  Description of Artificial Sequence: Synthetic oligonucleotide
  Antisense strand to SEQ ID NO: 2406780
uuaucccagcuucaauugg

SEQ ID NO: 2406782 - RNA, 19 nt, Artificial Sequence
  Description of Artificial Sequence: Synthetic oligonucleotide
  Sense strand starting at position 147 of SEQ ID NO: 1886398
aauugaagcugggauaaga

SEQ ID NO: 2406783 - RNA, 19 nt, Artificial Sequence
  Description of Artificial Sequence: Synthetic oligonucleotide
  Antisense strand to SEQ ID NO: 2406782
ucuuaucccagcuucaauu

SEQ ID NO: 2406784 - RNA, 19 nt, Artificial Sequence
  Description of Artificial Sequence: Synthetic oligonucleotide
  Sense strand starting at position 158 of SEQ ID NO: 1886398
ggauaagaguacuauccca

SEQ ID NO: 2406785 - RNA, 19 nt, Artificial Sequence
  Description of Artificial Sequence: Synthetic oligonucleotide
  Antisense strand to SEQ ID NO: 2406784
ugggauaguacucuuaucc

SEQ ID NO: 2406786 - RNA, 19 nt, Artificial Sequence
  Description of Artificial Sequence: Synthetic oligonucleotide
  Sense strand starting at position 177 of SEQ ID NO: 1886398
cuguguccauuucuauuau

SEQ ID NO: 2406787 - RNA, 19 nt, Artificial Sequence
  Description of Artificial Sequence: Synthetic oligonucleotide
  Antisense strand to SEQ ID NO: 2406786
auaauagaaauggacacag

SEQ ID NO: 2406788 - RNA, 19 nt, Artificial Sequence
  Description of Artificial Sequence: Synthetic oligonucleotide
  Sense strand starting at position 181 of SEQ ID NO: 1886398
guccauuucuauuauggaa

SEQ ID NO: 2406789 - RNA, 19 nt, Artificial Sequence
  Description of Artificial Sequence: Synthetic oligonucleotide
  Antisense strand to SEQ ID NO: 2406788
uuccauaauagaaauggac

SEQ ID NO: 2406790 - RNA, 19 nt, Artificial Sequence
  Description of Artificial Sequence: Synthetic oligonucleotide
  Sense strand starting at position 200 of SEQ ID NO: 1886398
acuuauccagacuguauua

SEQ ID NO: 2406791 - RNA, 19 nt, Artificial Sequence
  Description of Artificial Sequence: Synthetic oligonucleotide
  Antisense strand to SEQ ID NO: 2406790
uaauacagucuggauaagu

SEQ ID NO: 2406792 - RNA, 19 nt, Artificial Sequence
  Description of Artificial Sequence: Synthetic oligonucleotide
  Sense strand starting at position 297 of SEQ ID NO: 1886398
gucccaagcuccuaagaca

SEQ ID NO: 2406793 - RNA, 19 nt, Artificial Sequence
  Description of Artificial Sequence: Synthetic oligonucleotide
  Antisense strand to SEQ ID NO: 2406792
ugucuuaggagcuugggac

SEQ ID NO: 2406794 - RNA, 19 nt, Artificial Sequence
  Description of Artificial Sequence: Synthetic oligonucleotide
  Sense strand starting at position 343 of SEQ ID NO: 1886398
agguuugguuaauaucgaa

SEQ ID NO: 2406795 - RNA, 19 nt, Artificial Sequence
  Description of Artificial Sequence: Synthetic oligonucleotide
  Antisense strand to SEQ ID NO: 2406794
uucgauauuaaccaaaccu

SEQ ID NO: 2406796 - RNA, 19 nt, Artificial Sequence
  Description of Artificial Sequence: Synthetic oligonucleotide
  Sense strand starting at position 346 of SEQ ID NO: 1886398
uuugguuaauaucgaauag

SEQ ID NO: 2406797 - RNA, 19 nt, Artificial Sequence
  Description of Artificial Sequence: Synthetic oligonucleotide
  Antisense strand to SEQ ID NO: 2406796
cuauucgauauuaaccaaa

SEQ ID NO: 2406798 - RNA, 19 nt, Artificial Sequence
  Description of Artificial Sequence: Synthetic oligonucleotide
  Sense strand starting at position 350 of SEQ ID NO: 1886398
guuaauaucgaauagccuu

SEQ ID NO: 2406799 - RNA, 19 nt, Artificial Sequence
  Description of Artificial Sequence: Synthetic oligonucleotide
  Antisense strand to SEQ ID NO: 2406798
aaggcuauucgauauuaac

SEQ ID NO: 2406800 - RNA, 19 nt, Artificial Sequence
  Description of Artificial Sequence: Synthetic oligonucleotide
  Sense strand starting at position 665 of SEQ ID NO: 1886398
ggugaagaaugcuggaagu

SEQ ID NO: 2406801 - RNA, 19 nt, Artificial Sequence
  Description of Artificial Sequence: Synthetic oligonucleotide
  Antisense strand to SEQ ID NO: 2406800
acuuccagcauucuucacc

SEQ ID NO: 2406802 - RNA, 19 nt, Artificial Sequence
  Description of Artificial Sequence: Synthetic oligonucleotide
  Sense strand starting at position 754 of SEQ ID NO: 1886398
gggauucucggccagcagu

SEQ ID NO: 2406803 - RNA, 19 nt, Artificial Sequence
  Description of Artificial Sequence: Synthetic oligonucleotide
  Antisense strand to SEQ ID NO: 2406802
acugcuggccgagaauccc

SEQ ID NO: 2406804 - RNA, 19 nt, Artificial Sequence
  Description of Artificial Sequence: Synthetic oligonucleotide
  Sense strand starting at position 916 of SEQ ID NO: 1886398
ggcagcgguucucuagaca

SEQ ID NO: 2406805 - RNA, 19 nt, Artificial Sequence
  Description of Artificial Sequence: Synthetic oligonucleotide
  Antisense strand to SEQ ID NO: 2406804
ugucuagagaaccgcugcc

SEQ ID NO: 2406806 - RNA, 19 nt, Artificial Sequence
  Description of Artificial Sequence: Synthetic oligonucleotide
  Sense strand starting at position 1198 of SEQ ID NO: 1886398
caaggagcuugcuccugaa

SEQ ID NO: 2406807 - RNA, 19 nt, Artificial Sequence
  Description of Artificial Sequence: Synthetic oligonucleotide
  Antisense strand to SEQ ID NO: 2406806
uucaggagcaagcuccuug

SEQ ID NO: 2406808 - RNA, 19 nt, Artificial Sequence
  Description of Artificial Sequence: Synthetic oligonucleotide
  Sense strand starting at position 1201 of SEQ ID NO: 1886398
ggagcuugcuccugaagga

SEQ ID NO: 2406809 - RNA, 19 nt, Artificial Sequence
  Description of Artificial Sequence: Synthetic oligonucleotide
  Antisense strand to SEQ ID NO: 2406808
uccuucaggagcaagcucc

SEQ ID NO: 2406810 - RNA, 19 nt, Artificial Sequence
  Description of Artificial Sequence: Synthetic oligonucleotide
  Sense strand starting at position 1237 of SEQ ID NO: 1886398
gcuagaaagcucuggaccu

SEQ ID NO: 2406811 - RNA, 19 nt, Artificial Sequence
  Description of Artificial Sequence: Synthetic oligonucleotide
  Antisense strand to SEQ ID NO: 2406810
agguccagagcuuucuagc

SEQ ID NO: 2406812 - RNA, 19 nt, Artificial Sequence
  Description of Artificial Sequence: Synthetic oligonucleotide
  Sense strand starting at position 1295 of SEQ ID NO: 1886398
agugcugagagcuaugagu

SEQ ID NO: 2406813 - RNA, 19 nt, Artificial Sequence
  Description of Artificial Sequence: Synthetic oligonucleotide
  Antisense strand to SEQ ID NO: 2406812
acucauagcucucagcacu

SEQ ID NO: 2406814 - RNA, 19 nt, Artificial Sequence
  Description of Artificial Sequence: Synthetic oligonucleotide
  Sense strand starting at position 1696 of SEQ ID NO: 1886398
ugcuuuauaucuucgggag

SEQ ID NO: 2406815 - RNA, 19 nt, Artificial Sequence
  Description of Artificial Sequence: Synthetic oligonucleotide
  Antisense strand to SEQ ID NO: 2406814
cucccgaagauauaaagca

SEQ ID NO: 2406816 - RNA, 19 nt, Artificial Sequence
  Description of Artificial Sequence: Synthetic oligonucleotide
  Sense strand starting at position 1697 of SEQ ID NO: 1886398
gcuuuauaucuucgggagu

SEQ ID NO: 2406817 - RNA, 19 nt, Artificial Sequence
  Description of Artificial Sequence: Synthetic oligonucleotide
  Antisense strand to SEQ ID NO: 2406816
acucccgaagauauaaagc

SEQ ID NO: 2406818 - RNA, 19 nt, Artificial Sequence
  Description of Artificial Sequence: Synthetic oligonucleotide
  Sense strand starting at position 1698 of SEQ ID NO: 1886398
cuuuauaucuucgggagug

SEQ ID NO: 2406819 - RNA, 19 nt, Artificial Sequence
  Description of Artificial Sequence: Synthetic oligonucleotide
  Antisense strand to SEQ ID NO: 2406818
cacucccgaagauauaaag

SEQ ID NO: 2406820 - RNA, 19 nt, Artificial Sequence
  Description of Artificial Sequence: Synthetic oligonucleotide
  Sense strand starting at position 1699 of SEQ ID NO: 1886398
uuuauaucuucgggaguga

SEQ ID NO: 2406821 - RNA, 19 nt, Artificial Sequence
  Description of Artificial Sequence: Synthetic oligonucleotide
  Antisense strand to SEQ ID NO: 2406820
ucacucccgaagauauaaa

SEQ ID NO: 2406822 - RNA, 19 nt, Artificial Sequence
  Description of Artificial Sequence: Synthetic oligonucleotide
  Sense strand starting at position 2015 of SEQ ID NO: 1886398
ccucguugcuaggagauca

SEQ ID NO: 2406823 - RNA, 19 nt, Artificial Sequence
  Description of Artificial Sequence: Synthetic oligonucleotide
  Antisense strand to SEQ ID NO: 2406822
ugaucuccuagcaacgagg

SEQ ID NO: 2406824 - RNA, 19 nt, Artificial Sequence
  Description of Artificial Sequence: Synthetic oligonucleotide
  Sense strand starting at position 2151 of SEQ ID NO: 1886398
uugagaagcuugggaggau

SEQ ID NO: 2406825 - RNA, 19 nt, Artificial Sequence
  Description of Artificial Sequence: Synthetic oligonucleotide
  Antisense strand to SEQ ID NO: 2406824
auccucccaagcuucucaa

SEQ ID NO: 2406826 - RNA, 19 nt, Artificial Sequence
  Description of Artificial Sequence: Synthetic oligonucleotide
  Sense strand starting at position 2474 of SEQ ID NO: 1886398
cuaacuuugcuugacguua

SEQ ID NO: 2406827 - RNA, 19 nt, Artificial Sequence
  Description of Artificial Sequence: Synthetic oligonucleotide
  Antisense strand to SEQ ID NO: 2406826
uaacgucaagcaaaguuag

SEQ ID NO: 2406828 - RNA, 19 nt, Artificial Sequence
  Description of Artificial Sequence: Synthetic oligonucleotide
  Sense strand starting at position 2476 of SEQ ID NO: 1886398
aacuuugcuugacguuaau

SEQ ID NO: 2406829 - RNA, 19 nt, Artificial Sequence
  Description of Artificial Sequence: Synthetic oligonucleotide
  Antisense strand to SEQ ID NO: 2406828
auuaacgucaagcaaaguu

SEQ ID NO: 2406830 - RNA, 19 nt, Artificial Sequence
  Description of Artificial Sequence: Synthetic oligonucleotide
  Sense strand starting at position 3112 of SEQ ID NO: 1886398
aagguuaugcccggauugu

SEQ ID NO: 2406831 - RNA, 19 nt, Artificial Sequence
  Description of Artificial Sequence: Synthetic oligonucleotide
  Antisense strand to SEQ ID NO: 2406830
acaauccgggcauaaccuu

SEQ ID NO: 2406832 - RNA, 19 nt, Artificial Sequence
  Description of Artificial Sequence: Synthetic oligonucleotide
  Sense strand starting at position 3121 of SEQ ID NO: 1886398
cccggauugucuucgccau

SEQ ID NO: 2406833 - RNA, 19 nt, Artificial Sequence
  Description of Artificial Sequence: Synthetic oligonucleotide
  Antisense strand to SEQ ID NO: 2406832
auggcgaagacaauccggg

SEQ ID NO: 2406834 - RNA, 19 nt, Artificial Sequence
  Description of Artificial Sequence: Synthetic oligonucleotide
  Sense strand starting at position 3123 of SEQ ID NO: 1886398
cggauugucuucgccauca

SEQ ID NO: 2406835 - RNA, 19 nt, Artificial Sequence
  Description of Artificial Sequence: Synthetic oligonucleotide
  Antisense strand to SEQ ID NO: 2406834
ugauggcgaagacaauccg

SEQ ID NO: 2406836 - RNA, 19 nt, Artificial Sequence
  Description of Artificial Sequence: Synthetic oligonucleotide
  Sense strand starting at position 3125 of SEQ ID NO: 1886398
gauugucuucgccaucauu

SEQ ID NO: 2406837 - RNA, 19 nt, Artificial Sequence
  Description of Artificial Sequence: Synthetic oligonucleotide
  Antisense strand to SEQ ID NO: 2406836
aaugauggcgaagacaauc

SEQ ID NO: 2406838 - RNA, 19 nt, Artificial Sequence
  Description of Artificial Sequence: Synthetic oligonucleotide
  Sense strand starting at position 3227 of SEQ ID NO: 1886398
cgcugcucgcgcucuuaau

SEQ ID NO: 2406839 - RNA, 19 nt, Artificial Sequence
  Description of Artificial Sequence: Synthetic oligonucleotide
  Antisense strand to SEQ ID NO: 2406838
auuaagagcgcgagcagcg

SEQ ID NO: 2406840 - RNA, 19 nt, Artificial Sequence
  Description of Artificial Sequence: Synthetic oligonucleotide
  Sense strand starting at position 3237 of SEQ ID NO: 1886398
gcucuuaaucaaggugaca

SEQ ID NO: 2406841 - RNA, 19 nt, Artificial Sequence
  Description of Artificial Sequence: Synthetic oligonucleotide
  Antisense strand to SEQ ID NO: 2406840
ugucaccuugauuaagagc

SEQ ID NO: 2406842 - RNA, 19 nt, Artificial Sequence
  Description of Artificial Sequence: Synthetic oligonucleotide
  Sense strand starting at position 3326 of SEQ ID NO: 1886398
gagucagagggcugucauu

SEQ ID NO: 2406843 - RNA, 19 nt, Artificial Sequence
  Description of Artificial Sequence: Synthetic oligonucleotide
  Antisense strand to SEQ ID NO: 2406842
aaugacagcccucugacuc

SEQ ID NO: 2406844 - RNA, 19 nt, Artificial Sequence
  Description of Artificial Sequence: Synthetic oligonucleotide
  Sense strand starting at position 3705 of SEQ ID NO: 1886398
gcuagcucuugagaacuca

SEQ ID NO: 2406845 - RNA, 19 nt, Artificial Sequence
  Description of Artificial Sequence: Synthetic oligonucleotide
  Antisense strand to SEQ ID NO: 2406844
ugaguucucaagagcuagc

SEQ ID NO: 2406846 - RNA, 19 nt, Artificial Sequence
  Description of Artificial Sequence: Synthetic oligonucleotide
  Sense strand starting at position 3713 of SEQ ID NO: 1886398
uugagaacucacugcuugu

SEQ ID NO: 2406847 - RNA, 19 nt, Artificial Sequence
  Description of Artificial Sequence: Synthetic oligonucleotide
  Antisense strand to SEQ ID NO: 2406846
acaagcagugaguucucaa

SEQ ID NO: 2406848 - RNA, 19 nt, Artificial Sequence
  Description of Artificial Sequence: Synthetic oligonucleotide
  Sense strand starting at position 3717 of SEQ ID NO: 1886398
gaacucacugcuugugaga

SEQ ID NO: 2406849 - RNA, 19 nt, Artificial Sequence
  Description of Artificial Sequence: Synthetic oligonucleotide
  Antisense strand to SEQ ID NO: 2406848
ucucacaagcagugaguuc

SEQ ID NO: 2406850 - RNA, 19 nt, Artificial Sequence
  Description of Artificial Sequence: Synthetic oligonucleotide
  Sense strand starting at position 3726 of SEQ ID NO: 1886398
gcuugugagagguguggau

SEQ ID NO: 2406851 - RNA, 19 nt, Artificial Sequence
  Description of Artificial Sequence: Synthetic oligonucleotide
  Antisense strand to SEQ ID NO: 2406850
auccacaccucucacaagc

SEQ ID NO: 2406852 - RNA, 19 nt, Artificial Sequence
  Description of Artificial Sequence: Synthetic oligonucleotide
  Sense strand starting at position 3728 of SEQ ID NO: 1886398
uugugagagguguggauua

SEQ ID NO: 2406853 - RNA, 19 nt, Artificial Sequence
  Description of Artificial Sequence: Synthetic oligonucleotide
  Antisense strand to SEQ ID NO: 2406852
uaauccacaccucucacaa

SEQ ID NO: 2406854 - RNA, 19 nt, Artificial Sequence
  Description of Artificial Sequence: Synthetic oligonucleotide
  Sense strand starting at position 3776 of SEQ ID NO: 1886398
ggaggucucucugaauaca

SEQ ID NO: 2406855 - RNA, 19 nt, Artificial Sequence
  Description of Artificial Sequence: Synthetic oligonucleotide
  Antisense strand to SEQ ID NO: 2406854
uguauucagagagaccucc

SEQ ID NO: 2406856 - RNA, 19 nt, Artificial Sequence
  Description of Artificial Sequence: Synthetic oligonucleotide
  Sense strand starting at position 3779 of SEQ ID NO: 1886398
ggucucucugaauacaagu

SEQ ID NO: 2406857 - RNA, 19 nt, Artificial Sequence
  Description of Artificial Sequence: Synthetic oligonucleotide
  Antisense strand to SEQ ID NO: 2406856
acuuguauucagagagacc

SEQ ID NO: 2406858 - RNA, 19 nt, Artificial Sequence
  Description of Artificial Sequence: Synthetic oligonucleotide
  Sense strand starting at position 7 of SEQ ID NO: 1886397
ggauaagaguacuauccca

SEQ ID NO: 2406859 - RNA, 19 nt, Artificial Sequence
  Description of Artificial Sequence: Synthetic oligonucleotide
  Antisense strand to SEQ ID NO: 2406858
ugggauaguacucuuaucc

SEQ ID NO: 2406860 - RNA, 19 nt, Artificial Sequence
  Description of Artificial Sequence: Synthetic oligonucleotide
  Sense strand starting at position 26 of SEQ ID NO: 1886397
cuguguccauuucuauuau

SEQ ID NO: 2406861 - RNA, 19 nt, Artificial Sequence
  Description of Artificial Sequence: Synthetic oligonucleotide
  Antisense strand to SEQ ID NO: 2406860
auaauagaaauggacacag

SEQ ID NO: 2406862 - RNA, 19 nt, Artificial Sequence
  Description of Artificial Sequence: Synthetic oligonucleotide
  Sense strand starting at position 30 of SEQ ID NO: 1886397
guccauuucuauuauggaa

SEQ ID NO: 2406863 - RNA, 19 nt, Artificial Sequence
  Description of Artificial Sequence: Synthetic oligonucleotide
  Antisense strand to SEQ ID NO: 2406862
uuccauaauagaaauggac

SEQ ID NO: 2406864 - RNA, 19 nt, Artificial Sequence
  Description of Artificial Sequence: Synthetic oligonucleotide
  Sense strand starting at position 49 of SEQ ID NO: 1886397
acuuauccagacuguauua

SEQ ID NO: 2406865 - RNA, 19 nt, Artificial Sequence
  Description of Artificial Sequence: Synthetic oligonucleotide
  Antisense strand to SEQ ID NO: 2406864
uaauacagucuggauaagu

SEQ ID NO: 2406866 - RNA, 19 nt, Artificial Sequence
  Description of Artificial Sequence: Synthetic oligonucleotide
  Sense strand starting at position 146 of SEQ ID NO: 1886397
gucccaagcuccuaagaca

SEQ ID NO: 2406867 - RNA, 19 nt, Artificial Sequence
  Description of Artificial Sequence: Synthetic oligonucleotide
  Antisense strand to SEQ ID NO: 2406866
ugucuuaggagcuugggac

SEQ ID NO: 2406868 - RNA, 19 nt, Artificial Sequence
  Description of Artificial Sequence: Synthetic oligonucleotide
  Sense strand starting at position 192 of SEQ ID NO: 1886397
agguuugguuaauaucgaa

SEQ ID NO: 2406869 - RNA, 19 nt, Artificial Sequence
  Description of Artificial Sequence: Synthetic oligonucleotide
  Antisense strand to SEQ ID NO: 2406868
uucgauauuaaccaaaccu

SEQ ID NO: 2406870 - RNA, 19 nt, Artificial Sequence
  Description of Artificial Sequence: Synthetic oligonucleotide
  Sense strand starting at position 195 of SEQ ID NO: 1886397
uuugguuaauaucgaauag

SEQ ID NO: 2406871 - RNA, 19 nt, Artificial Sequence
  Description of Artificial Sequence: Synthetic oligonucleotide
  Antisense strand to SEQ ID NO: 2406870
cuauucgauauuaaccaaa

SEQ ID NO: 2406872 - RNA, 19 nt, Artificial Sequence
  Description of Artificial Sequence: Synthetic oligonucleotide
  Sense strand starting at position 199 of SEQ ID NO: 1886397
guuaauaucgaauagccuu

SEQ ID NO: 2406873 - RNA, 19 nt, Artificial Sequence
  Description of Artificial Sequence: Synthetic oligonucleotide
  Antisense strand to SEQ ID NO: 2406872
aaggcuauucgauauuaac

SEQ ID NO: 2406874 - RNA, 19 nt, Artificial Sequence
  Description of Artificial Sequence: Synthetic oligonucleotide
  Sense strand starting at position 514 of SEQ ID NO: 1886397
ggugaagaaugcuggaagu

SEQ ID NO: 2406875 - RNA, 19 nt, Artificial Sequence
  Description of Artificial Sequence: Synthetic oligonucleotide
  Antisense strand to SEQ ID NO: 2406874
acuuccagcauucuucacc

SEQ ID NO: 2406876 - RNA, 19 nt, Artificial Sequence
  Description of Artificial Sequence: Synthetic oligonucleotide
  Sense strand starting at position 603 of SEQ ID NO: 1886397
gggauucucggccagcagu

SEQ ID NO: 2406877 - RNA, 19 nt, Artificial Sequence
  Description of Artificial Sequence: Synthetic oligonucleotide
  Antisense strand to SEQ ID NO: 2406876
acugcuggccgagaauccc

SEQ ID NO: 2406878 - RNA, 19 nt, Artificial Sequence
  Description of Artificial Sequence: Synthetic oligonucleotide
  Sense strand starting at position 765 of SEQ ID NO: 1886397
ggcagcgguucucuagaca

SEQ ID NO: 2406879 - RNA, 19 nt, Artificial Sequence
  Description of Artificial Sequence: Synthetic oligonucleotide
  Antisense strand to SEQ ID NO: 2406878
ugucuagagaaccgcugcc

SEQ ID NO: 2406880 - RNA, 19 nt, Artificial Sequence
  Description of Artificial Sequence: Synthetic oligonucleotide
  Sense strand starting at position 1047 of SEQ ID NO: 1886397
caaggagcuugcuccugaa

SEQ ID NO: 2406881 - RNA, 19 nt, Artificial Sequence
  Description of Artificial Sequence: Synthetic oligonucleotide
  Antisense strand to SEQ ID NO: 2406880
uucaggagcaagcuccuug

SEQ ID NO: 2406882 - RNA, 19 nt, Artificial Sequence
  Description of Artificial Sequence: Synthetic oligonucleotide
  Sense strand starting at position 1050 of SEQ ID NO: 1886397
ggagcuugcuccugaagga

SEQ ID NO: 2406883 - RNA, 19 nt, Artificial Sequence
  Description of Artificial Sequence: Synthetic oligonucleotide
  Antisense strand to SEQ ID NO: 2406882
uccuucaggagcaagcucc

SEQ ID NO: 2406884 - RNA, 19 nt, Artificial Sequence
  Description of Artificial Sequence: Synthetic oligonucleotide
  Sense strand starting at position 1086 of SEQ ID NO: 1886397
gcuagaaagcucuggaccu

SEQ ID NO: 2406885 - RNA, 19 nt, Artificial Sequence
  Description of Artificial Sequence: Synthetic oligonucleotide
  Antisense strand to SEQ ID NO: 2406884
agguccagagcuuucuagc

SEQ ID NO: 2406886 - RNA, 19 nt, Artificial Sequence
  Description of Artificial Sequence: Synthetic oligonucleotide
  Sense strand starting at position 1144 of SEQ ID NO: 1886397
agugcugagagcuaugagu

SEQ ID NO: 2406887 - RNA, 19 nt, Artificial Sequence
  Description of Artificial Sequence: Synthetic oligonucleotide
  Antisense strand to SEQ ID NO: 2406886
acucauagcucucagcacu

SEQ ID NO: 2406888 - RNA, 19 nt, Artificial Sequence
  Description of Artificial Sequence: Synthetic oligonucleotide
  Sense strand starting at position 1545 of SEQ ID NO: 1886397
ugcuuuauaucuucgggag

SEQ ID NO: 2406889 - RNA, 19 nt, Artificial Sequence
  Description of Artificial Sequence: Synthetic oligonucleotide
  Antisense strand to SEQ ID NO: 2406888
cucccgaagauauaaagca

SEQ ID NO: 2406890 - RNA, 19 nt, Artificial Sequence
  Description of Artificial Sequence: Synthetic oligonucleotide
  Sense strand starting at position 1546 of SEQ ID NO: 1886397
gcuuuauaucuucgggagu

SEQ ID NO: 2406891 - RNA, 19 nt, Artificial Sequence
  Description of Artificial Sequence: Synthetic oligonucleotide
  Antisense strand to SEQ ID NO: 2406890
acucccgaagauauaaagc

SEQ ID NO: 2406892 - RNA, 19 nt, Artificial Sequence
  Description of Artificial Sequence: Synthetic oligonucleotide
  Sense strand starting at position 1547 of SEQ ID NO: 1886397
cuuuauaucuucgggagug

SEQ ID NO: 2406893 - RNA, 19 nt, Artificial Sequence
  Description of Artificial Sequence: Synthetic oligonucleotide
  Antisense strand to SEQ ID NO: 2406892
cacucccgaagauauaaag

SEQ ID NO: 2406894 - RNA, 19 nt, Artificial Sequence
  Description of Artificial Sequence: Synthetic oligonucleotide
  Sense strand starting at position 1548 of SEQ ID NO: 1886397
uuuauaucuucgggaguga

SEQ ID NO: 2406895 - RNA, 19 nt, Artificial Sequence
  Description of Artificial Sequence: Synthetic oligonucleotide
  Antisense strand to SEQ ID NO: 2406894
ucacucccgaagauauaaa

SEQ ID NO: 2406896 - RNA, 19 nt, Artificial Sequence
  Description of Artificial Sequence: Synthetic oligonucleotide
  Sense strand starting at position 1864 of SEQ ID NO: 1886397
ccucguugcuaggagauca

SEQ ID NO: 2406897 - RNA, 19 nt, Artificial Sequence
  Description of Artificial Sequence: Synthetic oligonucleotide
  Antisense strand to SEQ ID NO: 2406896
ugaucuccuagcaacgagg

SEQ ID NO: 2406898 - RNA, 19 nt, Artificial Sequence
  Description of Artificial Sequence: Synthetic oligonucleotide
  Sense strand starting at position 2000 of SEQ ID NO: 1886397
uugagaagcuugggaggau

SEQ ID NO: 2406899 - RNA, 19 nt, Artificial Sequence
  Description of Artificial Sequence: Synthetic oligonucleotide
  Antisense strand to SEQ ID NO: 2406898
auccucccaagcuucucaa

SEQ ID NO: 2406900 - RNA, 19 nt, Artificial Sequence
  Description of Artificial Sequence: Synthetic oligonucleotide
  Sense strand starting at position 2323 of SEQ ID NO: 1886397
cuaacuuugcuugacguua

SEQ ID NO: 2406901 - RNA, 19 nt, Artificial Sequence
  Description of Artificial Sequence: Synthetic oligonucleotide
  Antisense strand to SEQ ID NO: 2406900
uaacgucaagcaaaguuag

SEQ ID NO: 2406902 - RNA, 19 nt, Artificial Sequence
  Description of Artificial Sequence: Synthetic oligonucleotide
  Sense strand starting at position 2325 of SEQ ID NO: 1886397
aacuuugcuugacguuaau

SEQ ID NO: 2406903 - RNA, 19 nt, Artificial Sequence
  Description of Artificial Sequence: Synthetic oligonucleotide
  Antisense strand to SEQ ID NO: 2406902
auuaacgucaagcaaaguu

SEQ ID NO: 2406904 - RNA, 19 nt, Artificial Sequence
  Description of Artificial Sequence: Synthetic oligonucleotide
  Sense strand starting at position 2961 of SEQ ID NO: 1886397
aagguuaugcccggauugu

SEQ ID NO: 2406905 - RNA, 19 nt, Artificial Sequence
  Description of Artificial Sequence: Synthetic oligonucleotide
  Antisense strand to SEQ ID NO: 2406904
acaauccgggcauaaccuu

SEQ ID NO: 2406906 - RNA, 19 nt, Artificial Sequence
  Description of Artificial Sequence: Synthetic oligonucleotide
  Sense strand starting at position 2970 of SEQ ID NO: 1886397
cccggauugucuucgccau

SEQ ID NO: 2406907 - RNA, 19 nt, Artificial Sequence
  Description of Artificial Sequence: Synthetic oligonucleotide
  Antisense strand to SEQ ID NO: 2406906
auggcgaagacaauccggg

SEQ ID NO: 2406908 - RNA, 19 nt, Artificial Sequence
  Description of Artificial Sequence: Synthetic oligonucleotide
  Sense strand starting at position 2972 of SEQ ID NO: 1886397
cggauugucuucgccauca

SEQ ID NO: 2406909 - RNA, 19 nt, Artificial Sequence
  Description of Artificial Sequence: Synthetic oligonucleotide
  Antisense strand to SEQ ID NO: 2406908
ugauggcgaagacaauccg

SEQ ID NO: 2406910 - RNA, 19 nt, Artificial Sequence
  Description of Artificial Sequence: Synthetic oligonucleotide
  Sense strand starting at position 2974 of SEQ ID NO: 1886397
gauugucuucgccaucauu

SEQ ID NO: 2406911 - RNA, 19 nt, Artificial Sequence
  Description of Artificial Sequence: Synthetic oligonucleotide
  Antisense strand to SEQ ID NO: 2406910
aaugauggcgaagacaauc

SEQ ID NO: 2406912 - RNA, 19 nt, Artificial Sequence
  Description of Artificial Sequence: Synthetic oligonucleotide
  Sense strand starting at position 3076 of SEQ ID NO: 1886397
cgcugcucgcgcucuuaau

SEQ ID NO: 2406913 - RNA, 19 nt, Artificial Sequence
  Description of Artificial Sequence: Synthetic oligonucleotide
  Antisense strand to SEQ ID NO: 2406912
auuaagagcgcgagcagcg

SEQ ID NO: 2406914 - RNA, 19 nt, Artificial Sequence
  Description of Artificial Sequence: Synthetic oligonucleotide
  Sense strand starting at position 3086 of SEQ ID NO: 1886397
gcucuuaaucaaggugaca

SEQ ID NO: 2406915 - RNA, 19 nt, Artificial Sequence
  Description of Artificial Sequence: Synthetic oligonucleotide
  Antisense strand to SEQ ID NO: 2406914
ugucaccuugauuaagagc

SEQ ID NO: 2406916 - RNA, 19 nt, Artificial Sequence
  Description of Artificial Sequence: Synthetic oligonucleotide
  Sense strand starting at position 3175 of SEQ ID NO: 1886397
gagucagagggcugucauu

SEQ ID NO: 2406917 - RNA, 19 nt, Artificial Sequence
  Description of Artificial Sequence: Synthetic oligonucleotide
  Antisense strand to SEQ ID NO: 2406916
aaugacagcccucugacuc

SEQ ID NO: 2406918 - RNA, 19 nt, Artificial Sequence
  Description of Artificial Sequence: Synthetic oligonucleotide
  Sense strand starting at position 3554 of SEQ ID NO: 1886397
gcuagcucuugagaacuca

SEQ ID NO: 2406919 - RNA, 19 nt, Artificial Sequence
  Description of Artificial Sequence: Synthetic oligonucleotide
  Antisense strand to SEQ ID NO: 2406918
ugaguucucaagagcuagc

SEQ ID NO: 2406920 - RNA, 19 nt, Artificial Sequence
  Description of Artificial Sequence: Synthetic oligonucleotide
  Sense strand starting at position 3562 of SEQ ID NO: 1886397
uugagaacucacugcuugu

SEQ ID NO: 2406921 - RNA, 19 nt, Artificial Sequence
  Description of Artificial Sequence: Synthetic oligonucleotide
  Antisense strand to SEQ ID NO: 2406920
acaagcagugaguucucaa

SEQ ID NO: 2406922 - RNA, 19 nt, Artificial Sequence
  Description of Artificial Sequence: Synthetic oligonucleotide
  Sense strand starting at position 3566 of SEQ ID NO: 1886397
gaacucacugcuugugaga

SEQ ID NO: 2406923 - RNA, 19 nt, Artificial Sequence
  Description of Artificial Sequence: Synthetic oligonucleotide
  Antisense strand to SEQ ID NO: 2406922
ucucacaagcagugaguuc

SEQ ID NO: 2406924 - RNA, 19 nt, Artificial Sequence
  Description of Artificial Sequence: Synthetic oligonucleotide
  Sense strand starting at position 3575 of SEQ ID NO: 1886397
gcuugugagagguguggau

SEQ ID NO: 2406925 - RNA, 19 nt, Artificial Sequence
  Description of Artificial Sequence: Synthetic oligonucleotide
  Antisense strand to SEQ ID NO: 2406924
auccacaccucucacaagc

SEQ ID NO: 2406926 - RNA, 19 nt, Artificial Sequence
  Description of Artificial Sequence: Synthetic oligonucleotide
  Sense strand starting at position 3577 of SEQ ID NO: 1886397
uugugagagguguggauua

SEQ ID NO: 2406927 - RNA, 19 nt, Artificial Sequence
  Description of Artificial Sequence: Synthetic oligonucleotide
  Antisense strand to SEQ ID NO: 2406926
uaauccacaccucucacaa

SEQ ID NO: 2406928 - RNA, 19 nt, Artificial Sequence
  Description of Artificial Sequence: Synthetic oligonucleotide
  Sense strand starting at position 3625 of SEQ ID NO: 1886397
ggaggucucucugaauaca

SEQ ID NO: 2406929 - RNA, 19 nt, Artificial Sequence
  Description of Artificial Sequence: Synthetic oligonucleotide
  Antisense strand to SEQ ID NO: 2406928
uguauucagagagaccucc

SEQ ID NO: 2406930 - RNA, 19 nt, Artificial Sequence
  Description of Artificial Sequence: Synthetic oligonucleotide
  Sense strand starting at position 3628 of SEQ ID NO: 1886397
ggucucucugaauacaagu

SEQ ID NO: 2406931 - RNA, 19 nt, Artificial Sequence
  Description of Artificial Sequence: Synthetic oligonucleotide
  Antisense strand to SEQ ID NO: 2406930
acuuguauucagagagacc

SEQ ID NO: 2406932 - RNA, 19 nt, Artificial Sequence
  Description of Artificial Sequence: Synthetic oligonucleotide
  Sense strand starting at position 69 of SEQ ID NO: 1886399
gugugacuuccaggugaaa

SEQ ID NO: 2406933 - RNA, 19 nt, Artificial Sequence
  Description of Artificial Sequence: Synthetic oligonucleotide
  Antisense strand to SEQ ID NO: 2406932
uuucaccuggaagucacac

SEQ ID NO: 2406934 - RNA, 19 nt, Artificial Sequence
  Description of Artificial Sequence: Synthetic oligonucleotide
  Sense strand starting at position 71 of SEQ ID NO: 1886399
gugacuuccaggugaaagg

SEQ ID NO: 2406935 - RNA, 19 nt, Artificial Sequence
  Description of Artificial Sequence: Synthetic oligonucleotide
  Antisense strand to SEQ ID NO: 2406934
ccuuucaccuggaagucac

SEQ ID NO: 2406936 - RNA, 19 nt, Artificial Sequence
  Description of Artificial Sequence: Synthetic oligonucleotide
  Sense strand starting at position 166 of SEQ ID NO: 1886399
acugcuucucuccagaaug

SEQ ID NO: 2406937 - RNA, 19 nt, Artificial Sequence
  Description of Artificial Sequence: Synthetic oligonucleotide
  Antisense strand to SEQ ID NO: 2406936
cauucuggagagaagcagu

SEQ ID NO: 2406938 - RNA, 19 nt, Artificial Sequence
  Description of Artificial Sequence: Synthetic oligonucleotide
  Sense strand starting at position 168 of SEQ ID NO: 1886399
ugcuucucuccagaauguu

SEQ ID NO: 2406939 - RNA, 19 nt, Artificial Sequence
  Description of Artificial Sequence: Synthetic oligonucleotide
  Antisense strand to SEQ ID NO: 2406938
aacauucuggagagaagca

SEQ ID NO: 2406940 - RNA, 19 nt, Artificial Sequence
  Description of Artificial Sequence: Synthetic oligonucleotide
  Sense strand starting at position 231 of SEQ ID NO: 1886399
gggucucugaacuaguaga

SEQ ID NO: 2406941 - RNA, 19 nt, Artificial Sequence
  Description of Artificial Sequence: Synthetic oligonucleotide
  Antisense strand to SEQ ID NO: 2406940
ucuacuaguucagagaccc

SEQ ID NO: 2406942 - RNA, 19 nt, Artificial Sequence
  Description of Artificial Sequence: Synthetic oligonucleotide
  Sense strand starting at position 657 of SEQ ID NO: 1886399
guaucaaaccugggcucaa

SEQ ID NO: 2406943 - RNA, 19 nt, Artificial Sequence
  Description of Artificial Sequence: Synthetic oligonucleotide
  Antisense strand to SEQ ID NO: 2406942
uugagcccagguuugauac

SEQ ID NO: 2406944 - RNA, 19 nt, Artificial Sequence
  Description of Artificial Sequence: Synthetic oligonucleotide
  Sense strand starting at position 732 of SEQ ID NO: 1886399
ccgcauuuguccucagucu

SEQ ID NO: 2406945 - RNA, 19 nt, Artificial Sequence
  Description of Artificial Sequence: Synthetic oligonucleotide
  Antisense strand to SEQ ID NO: 2406944
agacugaggacaaaugcgg

SEQ ID NO: 2406946 - RNA, 19 nt, Artificial Sequence
  Description of Artificial Sequence: Synthetic oligonucleotide
  Sense strand starting at position 861 of SEQ ID NO: 1886399
gcuugugcucuucucgaca

SEQ ID NO: 2406947 - RNA, 19 nt, Artificial Sequence
  Description of Artificial Sequence: Synthetic oligonucleotide
  Antisense strand to SEQ ID NO: 2406946
ugucgagaagagcacaagc

SEQ ID NO: 2406948 - RNA, 19 nt, Artificial Sequence
  Description of Artificial Sequence: Synthetic oligonucleotide
  Sense strand starting at position 881 of SEQ ID NO: 1886399
gcuuauuucugggugucca

SEQ ID NO: 2406949 - RNA, 19 nt, Artificial Sequence
  Description of Artificial Sequence: Synthetic oligonucleotide
  Antisense strand to SEQ ID NO: 2406948
uggacacccagaaauaagc

SEQ ID NO: 2406950 - RNA, 19 nt, Artificial Sequence
  Description of Artificial Sequence: Synthetic oligonucleotide
  Sense strand starting at position 894 of SEQ ID NO: 1886399
uguccaaauccuugucaca

SEQ ID NO: 2406951 - RNA, 19 nt, Artificial Sequence
  Description of Artificial Sequence: Synthetic oligonucleotide
  Antisense strand to SEQ ID NO: 2406950
ugugacaaggauuuggaca

SEQ ID NO: 2406952 - RNA, 19 nt, Artificial Sequence
  Description of Artificial Sequence: Synthetic oligonucleotide
  Sense strand starting at position 1169 of SEQ ID NO: 1886399
gcugcacgucuggaugagu

SEQ ID NO: 2406953 - RNA, 19 nt, Artificial Sequence
  Description of Artificial Sequence: Synthetic oligonucleotide
  Antisense strand to SEQ ID NO: 2406952
acucauccagacgugcagc

SEQ ID NO: 2406954 - RNA, 19 nt, Artificial Sequence
  Description of Artificial Sequence: Synthetic oligonucleotide
  Sense strand starting at position 1172 of SEQ ID NO: 1886399
gcacgucuggaugaguaaa

SEQ ID NO: 2406955 - RNA, 19 nt, Artificial Sequence
  Description of Artificial Sequence: Synthetic oligonucleotide
  Antisense strand to SEQ ID NO: 2406954
uuuacucauccagacgugc

SEQ ID NO: 2406956 - RNA, 19 nt, Artificial Sequence
  Description of Artificial Sequence: Synthetic oligonucleotide
  Sense strand starting at position 1174 of SEQ ID NO: 1886399
acgucuggaugaguaaagu

SEQ ID NO: 2406957 - RNA, 19 nt, Artificial Sequence
  Description of Artificial Sequence: Synthetic oligonucleotide
  Antisense strand to SEQ ID NO: 2406956
acuuuacucauccagacgu

SEQ ID NO: 2406958 - RNA, 19 nt, Artificial Sequence
  Description of Artificial Sequence: Synthetic oligonucleotide
  Sense strand starting at position 1222 of SEQ ID NO: 1886399
uguuaaugauucuuacuga

SEQ ID NO: 2406959 - RNA, 19 nt, Artificial Sequence
  Description of Artificial Sequence: Synthetic oligonucleotide
  Antisense strand to SEQ ID NO: 2406958
ucaguaagaaucauuaaca

SEQ ID NO: 2406960 - RNA, 19 nt, Artificial Sequence
  Description of Artificial Sequence: Synthetic oligonucleotide
  Sense strand starting at position 1223 of SEQ ID NO: 1886399
guuaaugauucuuacugaa

SEQ ID NO: 2406961 - RNA, 19 nt, Artificial Sequence
  Description of Artificial Sequence: Synthetic oligonucleotide
  Antisense strand to SEQ ID NO: 2406960
uucaguaagaaucauuaac

SEQ ID NO: 2406962 - RNA, 19 nt, Artificial Sequence
  Description of Artificial Sequence: Synthetic oligonucleotide
  Sense strand starting at position 1494 of SEQ ID NO: 1886399
gaacucgucgcggguguaa

SEQ ID NO: 2406963 - RNA, 19 nt, Artificial Sequence
  Description of Artificial Sequence: Synthetic oligonucleotide
  Antisense strand to SEQ ID NO: 2406962
uuacacccgcgacgaguuc

SEQ ID NO: 2406964 - RNA, 19 nt, Artificial Sequence
  Description of Artificial Sequence: Synthetic oligonucleotide
  Sense strand starting at position 1496 of SEQ ID NO: 1886399
acucgucgcggguguaaau

SEQ ID NO: 2406965 - RNA, 19 nt, Artificial Sequence
  Description of Artificial Sequence: Synthetic oligonucleotide
  Antisense strand to SEQ ID NO: 2406964
auuuacacccgcgacgagu

SEQ ID NO: 2406966 - RNA, 19 nt, Artificial Sequence
  Description of Artificial Sequence: Synthetic oligonucleotide
  Sense strand starting at position 2040 of SEQ ID NO: 1886399
ggcuuccucuccuuagcaa

SEQ ID NO: 2406967 - RNA, 19 nt, Artificial Sequence
  Description of Artificial Sequence: Synthetic oligonucleotide
  Antisense strand to SEQ ID NO: 2406966
uugcuaaggagaggaagcc

SEQ ID NO: 2406968 - RNA, 19 nt, Artificial Sequence
  Description of Artificial Sequence: Synthetic oligonucleotide
  Sense strand starting at position 2195 of SEQ ID NO: 1886399
ggcgauuacccaggugaag

SEQ ID NO: 2406969 - RNA, 19 nt, Artificial Sequence
  Description of Artificial Sequence: Synthetic oligonucleotide
  Antisense strand to SEQ ID NO: 2406968
cuucaccuggguaaucgcc

SEQ ID NO: 2406970 - RNA, 19 nt, Artificial Sequence
  Description of Artificial Sequence: Synthetic oligonucleotide
  Sense strand starting at position 2197 of SEQ ID NO: 1886399
cgauuacccaggugaaggu

SEQ ID NO: 2406971 - RNA, 19 nt, Artificial Sequence
  Description of Artificial Sequence: Synthetic oligonucleotide
  Antisense strand to SEQ ID NO: 2406970
accuucaccuggguaaucg

SEQ ID NO: 2406972 - RNA, 19 nt, Artificial Sequence
  Description of Artificial Sequence: Synthetic oligonucleotide
  Sense strand starting at position 2206 of SEQ ID NO: 1886399
aggugaaggucuuccaggu

SEQ ID NO: 2406973 - RNA, 19 nt, Artificial Sequence
  Description of Artificial Sequence: Synthetic oligonucleotide
  Antisense strand to SEQ ID NO: 2406972
accuggaagaccuucaccu

SEQ ID NO: 2406974 - RNA, 19 nt, Artificial Sequence
  Description of Artificial Sequence: Synthetic oligonucleotide
  Sense strand starting at position 2242 of SEQ ID NO: 1886399
guaagaagguccuccaggu

SEQ ID NO: 2406975 - RNA, 19 nt, Artificial Sequence
  Description of Artificial Sequence: Synthetic oligonucleotide
  Antisense strand to SEQ ID NO: 2406974
accuggaggaccuucuuac

SEQ ID NO: 2406976 - RNA, 19 nt, Artificial Sequence
  Description of Artificial Sequence: Synthetic oligonucleotide
  Sense strand starting at position 2329 of SEQ ID NO: 1886399
guaagaggauccucuaggu

SEQ ID NO: 2406977 - RNA, 19 nt, Artificial Sequence
  Description of Artificial Sequence: Synthetic oligonucleotide
  Antisense strand to SEQ ID NO: 2406976
accuagaggauccucuuac

SEQ ID NO: 2406978 - RNA, 19 nt, Artificial Sequence
  Description of Artificial Sequence: Synthetic oligonucleotide
  Sense strand starting at position 2491 of SEQ ID NO: 1886399
gaggguccuccaggugaga

SEQ ID NO: 2406979 - RNA, 19 nt, Artificial Sequence
  Description of Artificial Sequence: Synthetic oligonucleotide
  Antisense strand to SEQ ID NO: 2406978
ucucaccuggaggacccuc

SEQ ID NO: 2406980 - RNA, 19 nt, Artificial Sequence
  Description of Artificial Sequence: Synthetic oligonucleotide
  Sense strand starting at position 2538 of SEQ ID NO: 1886399
guaagaggguccuccaguu

SEQ ID NO: 2406981 - RNA, 19 nt, Artificial Sequence
  Description of Artificial Sequence: Synthetic oligonucleotide
  Antisense strand to SEQ ID NO: 2406980
aacuggaggacccucuuac

SEQ ID NO: 2406982 - RNA, 19 nt, Artificial Sequence
  Description of Artificial Sequence: Synthetic oligonucleotide
  Sense strand starting at position 2576 of SEQ ID NO: 1886399
ugguccuccaggugagaga

SEQ ID NO: 2406983 - RNA, 19 nt, Artificial Sequence
  Description of Artificial Sequence: Synthetic oligonucleotide
  Antisense strand to SEQ ID NO: 2406982
ucucucaccuggaggacca

SEQ ID NO: 2406984 - RNA, 19 nt, Artificial Sequence
  Description of Artificial Sequence: Synthetic oligonucleotide
  Sense strand starting at position 2587 of SEQ ID NO: 1886399
gugagagagucuuccaggu

SEQ ID NO: 2406985 - RNA, 19 nt, Artificial Sequence
  Description of Artificial Sequence: Synthetic oligonucleotide
  Antisense strand to SEQ ID NO: 2406984
accuggaagacucucucac

SEQ ID NO: 2406986 - RNA, 19 nt, Artificial Sequence
  Description of Artificial Sequence: Synthetic oligonucleotide
  Sense strand starting at position 2591 of SEQ ID NO: 1886399
gagagucuuccaggugaga

SEQ ID NO: 2406987 - RNA, 19 nt, Artificial Sequence
  Description of Artificial Sequence: Synthetic oligonucleotide
  Antisense strand to SEQ ID NO: 2406986
ucucaccuggaagacucuc

SEQ ID NO: 2406988 - RNA, 19 nt, Artificial Sequence
  Description of Artificial Sequence: Synthetic oligonucleotide
  Sense strand starting at position 2593 of SEQ ID NO: 1886399
gagucuuccaggugagagg

SEQ ID NO: 2406989 - RNA, 19 nt, Artificial Sequence
  Description of Artificial Sequence: Synthetic oligonucleotide
  Antisense strand to SEQ ID NO: 2406988
ccucucaccuggaagacuc

SEQ ID NO: 2406990 - RNA, 19 nt, Artificial Sequence
  Description of Artificial Sequence: Synthetic oligonucleotide
  Sense strand starting at position 2659 of SEQ ID NO: 1886399
ggucacuugguccagggau

SEQ ID NO: 2406991 - RNA, 19 nt, Artificial Sequence
  Description of Artificial Sequence: Synthetic oligonucleotide
  Antisense strand to SEQ ID NO: 2406990
aucccuggaccaagugacc

SEQ ID NO: 2406992 - RNA, 19 nt, Artificial Sequence
  Description of Artificial Sequence: Synthetic oligonucleotide
  Sense strand starting at position 2661 of SEQ ID NO: 1886399
ucacuugguccagggaugu

SEQ ID NO: 2406993 - RNA, 19 nt, Artificial Sequence
  Description of Artificial Sequence: Synthetic oligonucleotide
  Antisense strand to SEQ ID NO: 2406992
acaucccuggaccaaguga

SEQ ID NO: 2406994 - RNA, 19 nt, Artificial Sequence
  Description of Artificial Sequence: Synthetic oligonucleotide
  Sense strand starting at position 2873 of SEQ ID NO: 1886399
gucagcauucccuaacaag

SEQ ID NO: 2406995 - RNA, 19 nt, Artificial Sequence
  Description of Artificial Sequence: Synthetic oligonucleotide
  Antisense strand to SEQ ID NO: 2406994
cuuguuagggaaugcugac

SEQ ID NO: 2406996 - RNA, 19 nt, Artificial Sequence
  Description of Artificial Sequence: Synthetic oligonucleotide
  Sense strand starting at position 2946 of SEQ ID NO: 1886399
gguagaagcuucucucaca

SEQ ID NO: 2406997 - RNA, 19 nt, Artificial Sequence
  Description of Artificial Sequence: Synthetic oligonucleotide
  Antisense strand to SEQ ID NO: 2406996
ugugagagaagcuucuacc

SEQ ID NO: 2406998 - RNA, 19 nt, Artificial Sequence
  Description of Artificial Sequence: Synthetic oligonucleotide
  Sense strand starting at position 3075 of SEQ ID NO: 1886399
gccagcauguccucuaauc

SEQ ID NO: 2406999 - RNA, 19 nt, Artificial Sequence
  Description of Artificial Sequence: Synthetic oligonucleotide
  Antisense strand to SEQ ID NO: 2406998
gauuagaggacaugcuggc

SEQ ID NO: 2407000 - RNA, 19 nt, Artificial Sequence
  Description of Artificial Sequence: Synthetic oligonucleotide
  Sense strand starting at position 3105 of SEQ ID NO: 1886399
uugaaauccagucgagcaa

SEQ ID NO: 2407001 - RNA, 19 nt, Artificial Sequence
  Description of Artificial Sequence: Synthetic oligonucleotide
  Antisense strand to SEQ ID NO: 2407000
uugcucgacuggauuucaa

SEQ ID NO: 2407002 - RNA, 19 nt, Artificial Sequence
  Description of Artificial Sequence: Synthetic oligonucleotide
  Sense strand starting at position 3492 of SEQ ID NO: 1886399
aagcacuucuuacgggaaa

SEQ ID NO: 2407003 - RNA, 19 nt, Artificial Sequence
  Description of Artificial Sequence: Synthetic oligonucleotide
  Antisense strand to SEQ ID NO: 2407002
uuucccguaagaagugcuu

SEQ ID NO: 2407004 - RNA, 19 nt, Artificial Sequence
  Description of Artificial Sequence: Synthetic oligonucleotide
  Sense strand starting at position 3494 of SEQ ID NO: 1886399
gcacuucuuacgggaaaua

SEQ ID NO: 2407005 - RNA, 19 nt, Artificial Sequence
  Description of Artificial Sequence: Synthetic oligonucleotide
  Antisense strand to SEQ ID NO: 2407004
uauuucccguaagaagugc

SEQ ID NO: 2407006 - RNA, 19 nt, Artificial Sequence
  Description of Artificial Sequence: Synthetic oligonucleotide
  Sense strand starting at position 3642 of SEQ ID NO: 1886399
cccucauuccaguguggga

SEQ ID NO: 2407007 - RNA, 19 nt, Artificial Sequence
  Description of Artificial Sequence: Synthetic oligonucleotide
  Antisense strand to SEQ ID NO: 2407006
ucccacacuggaaugaggg

SEQ ID NO: 2407008 - RNA, 19 nt, Artificial Sequence
  Description of Artificial Sequence: Synthetic oligonucleotide
  Sense strand starting at position 3818 of SEQ ID NO: 1886399
gggaguugagugugguaua

SEQ ID NO: 2407009 - RNA, 19 nt, Artificial Sequence
  Description of Artificial Sequence: Synthetic oligonucleotide
  Antisense strand to SEQ ID NO: 2407008
uauaccacacucaacuccc

SEQ ID NO: 2407010 - RNA, 19 nt, Artificial Sequence
  Description of Artificial Sequence: Synthetic oligonucleotide
  Sense strand starting at position 3821 of SEQ ID NO: 1886399
aguugagugugguauacaa

SEQ ID NO: 2407011 - RNA, 19 nt, Artificial Sequence
  Description of Artificial Sequence: Synthetic oligonucleotide
  Antisense strand to SEQ ID NO: 2407010
uuguauaccacacucaacu

SEQ ID NO: 2407012 - RNA, 19 nt, Artificial Sequence
  Description of Artificial Sequence: Synthetic oligonucleotide
  Sense strand starting at position 31 of SEQ ID NO: 1886400
ugaagaugccagugugaga

SEQ ID NO: 2407013 - RNA, 19 nt, Artificial Sequence
  Description of Artificial Sequence: Synthetic oligonucleotide
  Antisense strand to SEQ ID NO: 2407012
ucucacacuggcaucuuca

SEQ ID NO: 2407014 - RNA, 19 nt, Artificial Sequence
  Description of Artificial Sequence: Synthetic oligonucleotide
  Sense strand starting at position 205 of SEQ ID NO: 1886400
ggaggagagucaagucaga

SEQ ID NO: 2407015 - RNA, 19 nt, Artificial Sequence
  Description of Artificial Sequence: Synthetic oligonucleotide
  Antisense strand to SEQ ID NO: 2407014
ucugacuugacucuccucc

SEQ ID NO: 2407016 - RNA, 19 nt, Artificial Sequence
  Description of Artificial Sequence: Synthetic oligonucleotide
  Sense strand starting at position 291 of SEQ ID NO: 1886400
ccagauugccaagggugaa

SEQ ID NO: 2407017 - RNA, 19 nt, Artificial Sequence
  Description of Artificial Sequence: Synthetic oligonucleotide
  Antisense strand to SEQ ID NO: 2407016
uucacccuuggcaaucugg

SEQ ID NO: 2407018 - RNA, 19 nt, Artificial Sequence
  Description of Artificial Sequence: Synthetic oligonucleotide
  Sense strand starting at position 330 of SEQ ID NO: 1886400
ggcagaaacaagugugaga

SEQ ID NO: 2407019 - RNA, 19 nt, Artificial Sequence
  Description of Artificial Sequence: Synthetic oligonucleotide
  Antisense strand to SEQ ID NO: 2407018
ucucacacuuguuucugcc

SEQ ID NO: 2407020 - RNA, 19 nt, Artificial Sequence
  Description of Artificial Sequence: Synthetic oligonucleotide
  Sense strand starting at position 364 of SEQ ID NO: 1886400
gcugauguuauaugaagca

SEQ ID NO: 2407021 - RNA, 19 nt, Artificial Sequence
  Description of Artificial Sequence: Synthetic oligonucleotide
  Antisense strand to SEQ ID NO: 2407020
ugcuucauauaacaucagc

SEQ ID NO: 2407022 - RNA, 19 nt, Artificial Sequence
  Description of Artificial Sequence: Synthetic oligonucleotide
  Sense strand starting at position 514 of SEQ ID NO: 1886400
ccuguauggucuuccuaag

SEQ ID NO: 2407023 - RNA, 19 nt, Artificial Sequence
  Description of Artificial Sequence: Synthetic oligonucleotide
  Antisense strand to SEQ ID NO: 2407022
cuuaggaagaccauacagg

SEQ ID NO: 2407024 - RNA, 19 nt, Artificial Sequence
  Description of Artificial Sequence: Synthetic oligonucleotide
  Sense strand starting at position 544 of SEQ ID NO: 1886400
auggcauugccaggaguaa

SEQ ID NO: 2407025 - RNA, 19 nt, Artificial Sequence
  Description of Artificial Sequence: Synthetic oligonucleotide
  Antisense strand to SEQ ID NO: 2407024
uuacuccuggcaaugccau

SEQ ID NO: 2407026 - RNA, 19 nt, Artificial Sequence
  Description of Artificial Sequence: Synthetic oligonucleotide
  Sense strand starting at position 545 of SEQ ID NO: 1886400
uggcauugccaggaguaac

SEQ ID NO: 2407027 - RNA, 19 nt, Artificial Sequence
  Description of Artificial Sequence: Synthetic oligonucleotide
  Antisense strand to SEQ ID NO: 2407026
guuacuccuggcaaugcca

SEQ ID NO: 2407028 - RNA, 19 nt, Artificial Sequence
  Description of Artificial Sequence: Synthetic oligonucleotide
  Sense strand starting at position 708 of SEQ ID NO: 1886400
gacagaccuaggcgugauu

SEQ ID NO: 2407029 - RNA, 19 nt, Artificial Sequence
  Description of Artificial Sequence: Synthetic oligonucleotide
  Antisense strand to SEQ ID NO: 2407028
aaucacgccuaggucuguc

SEQ ID NO: 2407030 - RNA, 19 nt, Artificial Sequence
  Description of Artificial Sequence: Synthetic oligonucleotide
  Sense strand starting at position 746 of SEQ ID NO: 1886400
aguacauuucccuguguga

SEQ ID NO: 2407031 - RNA, 19 nt, Artificial Sequence
  Description of Artificial Sequence: Synthetic oligonucleotide
  Antisense strand to SEQ ID NO: 2407030
ucacacagggaaauguacu

SEQ ID NO: 2407032 - RNA, 19 nt, Artificial Sequence
  Description of Artificial Sequence: Synthetic oligonucleotide
  Sense strand starting at position 748 of SEQ ID NO: 1886400
uacauuucccugugugagu

SEQ ID NO: 2407033 - RNA, 19 nt, Artificial Sequence
  Description of Artificial Sequence: Synthetic oligonucleotide
  Antisense strand to SEQ ID NO: 2407032
acucacacagggaaaugua

SEQ ID NO: 2407034 - RNA, 19 nt, Artificial Sequence
  Description of Artificial Sequence: Synthetic oligonucleotide
  Sense strand starting at position 749 of SEQ ID NO: 1886400
acauuucccugugugaguu

SEQ ID NO: 2407035 - RNA, 19 nt, Artificial Sequence
  Description of Artificial Sequence: Synthetic oligonucleotide
  Antisense strand to SEQ ID NO: 2407034
aacucacacagggaaaugu

SEQ ID NO: 2407036 - RNA, 19 nt, Artificial Sequence
  Description of Artificial Sequence: Synthetic oligonucleotide
  Sense strand starting at position 878 of SEQ ID NO: 1886400
ccuuguugaccuuggagaa

SEQ ID NO: 2407037 - RNA, 19 nt, Artificial Sequence
  Description of Artificial Sequence: Synthetic oligonucleotide
  Antisense strand to SEQ ID NO: 2407036
uucuccaaggucaacaagg

SEQ ID NO: 2407038 - RNA, 19 nt, Artificial Sequence
  Description of Artificial Sequence: Synthetic oligonucleotide
  Sense strand starting at position 879 of SEQ ID NO: 1886400
cuuguugaccuuggagaaa

SEQ ID NO: 2407039 - RNA, 19 nt, Artificial Sequence
  Description of Artificial Sequence: Synthetic oligonucleotide
  Antisense strand to SEQ ID NO: 2407038
uuucuccaaggucaacaag

SEQ ID NO: 2407040 - RNA, 19 nt, Artificial Sequence
  Description of Artificial Sequence: Synthetic oligonucleotide
  Sense strand starting at position 1201 of SEQ ID NO: 1886400
uccuguugagaacaugagu

SEQ ID NO: 2407041 - RNA, 19 nt, Artificial Sequence
  Description of Artificial Sequence: Synthetic oligonucleotide
  Antisense strand to SEQ ID NO: 2407040
acucauguucucaacagga

SEQ ID NO: 2407042 - RNA, 19 nt, Artificial Sequence
  Description of Artificial Sequence: Synthetic oligonucleotide
  Sense strand starting at position 1362 of SEQ ID NO: 1886400
ccaagagugcuuuagaaac

SEQ ID NO: 2407043 - RNA, 19 nt, Artificial Sequence
  Description of Artificial Sequence: Synthetic oligonucleotide
  Antisense strand to SEQ ID NO: 2407042
guuucuaaagcacucuugg

SEQ ID NO: 2407044 - RNA, 19 nt, Artificial Sequence
  Description of Artificial Sequence: Synthetic oligonucleotide
  Sense strand starting at position 1570 of SEQ ID NO: 1886400
agccgcuauccguuaucga

SEQ ID NO: 2407045 - RNA, 19 nt, Artificial Sequence
  Description of Artificial Sequence: Synthetic oligonucleotide
  Antisense strand to SEQ ID NO: 2407044
ucgauaacggauagcggcu

SEQ ID NO: 2407046 - RNA, 19 nt, Artificial Sequence
  Description of Artificial Sequence: Synthetic oligonucleotide
  Sense strand starting at position 1587 of SEQ ID NO: 1886400
gagccauaacgggacgaau

SEQ ID NO: 2407047 - RNA, 19 nt, Artificial Sequence
  Description of Artificial Sequence: Synthetic oligonucleotide
  Antisense strand to SEQ ID NO: 2407046
auucgucccguuauggcuc

SEQ ID NO: 2407048 - RNA, 19 nt, Artificial Sequence
  Description of Artificial Sequence: Synthetic oligonucleotide
  Sense strand starting at position 1589 of SEQ ID NO: 1886400
gccauaacgggacgaauua

SEQ ID NO: 2407049 - RNA, 19 nt, Artificial Sequence
  Description of Artificial Sequence: Synthetic oligonucleotide
  Antisense strand to SEQ ID NO: 2407048
uaauucgucccguuauggc

SEQ ID NO: 2407050 - RNA, 19 nt, Artificial Sequence
  Description of Artificial Sequence: Synthetic oligonucleotide
  Sense strand starting at position 1627 of SEQ ID NO: 1886400
gccuaaauuucucuugugu

SEQ ID NO: 2407051 - RNA, 19 nt, Artificial Sequence
  Description of Artificial Sequence: Synthetic oligonucleotide
  Antisense strand to SEQ ID NO: 2407050
acacaagagaaauuuaggc

SEQ ID NO: 2407052 - RNA, 19 nt, Artificial Sequence
  Description of Artificial Sequence: Synthetic oligonucleotide
  Sense strand starting at position 2117 of SEQ ID NO: 1886400
cccagaucucccugggcuu

SEQ ID NO: 2407053 - RNA, 19 nt, Artificial Sequence
  Description of Artificial Sequence: Synthetic oligonucleotide
  Antisense strand to SEQ ID NO: 2407052
aagcccagggagaucuggg

SEQ ID NO: 2407054 - RNA, 19 nt, Artificial Sequence
  Description of Artificial Sequence: Synthetic oligonucleotide
  Sense strand starting at position 2264 of SEQ ID NO: 1886400
gcaggacucuaaccuuagu

SEQ ID NO: 2407055 - RNA, 19 nt, Artificial Sequence
  Description of Artificial Sequence: Synthetic oligonucleotide
  Antisense strand to SEQ ID NO: 2407054
acuaagguuagaguccugc

SEQ ID NO: 2407056 - RNA, 19 nt, Artificial Sequence
  Description of Artificial Sequence: Synthetic oligonucleotide
  Sense strand starting at position 2400 of SEQ ID NO: 1886400
agcucagcuggguaaguua

SEQ ID NO: 2407057 - RNA, 19 nt, Artificial Sequence
  Description of Artificial Sequence: Synthetic oligonucleotide
  Antisense strand to SEQ ID NO: 2407056
uaacuuacccagcugagcu

SEQ ID NO: 2407058 - RNA, 19 nt, Artificial Sequence
  Description of Artificial Sequence: Synthetic oligonucleotide
  Sense strand starting at position 2419 of SEQ ID NO: 1886400
ggacauaucucagcuccca

SEQ ID NO: 2407059 - RNA, 19 nt, Artificial Sequence
  Description of Artificial Sequence: Synthetic oligonucleotide
  Antisense strand to SEQ ID NO: 2407058
ugggagcugagauaugucc

SEQ ID NO: 2407060 - RNA, 19 nt, Artificial Sequence
  Description of Artificial Sequence: Synthetic oligonucleotide
  Sense strand starting at position 2642 of SEQ ID NO: 1886400
agcuccuggcuuuaaucau

SEQ ID NO: 2407061 - RNA, 19 nt, Artificial Sequence
  Description of Artificial Sequence: Synthetic oligonucleotide
  Antisense strand to SEQ ID NO: 2407060
augauuaaagccaggagcu

SEQ ID NO: 2407062 - RNA, 19 nt, Artificial Sequence
  Description of Artificial Sequence: Synthetic oligonucleotide
  Sense strand starting at position 2821 of SEQ ID NO: 1886400
augucaaggcaaugugaaa

SEQ ID NO: 2407063 - RNA, 19 nt, Artificial Sequence
  Description of Artificial Sequence: Synthetic oligonucleotide
  Antisense strand to SEQ ID NO: 2407062
uuucacauugccuugacau

SEQ ID NO: 2407064 - RNA, 19 nt, Artificial Sequence
  Description of Artificial Sequence: Synthetic oligonucleotide
  Sense strand starting at position 3167 of SEQ ID NO: 1886400
cuccuaggugucuaccgaa

SEQ ID NO: 2407065 - RNA, 19 nt, Artificial Sequence
  Description of Artificial Sequence: Synthetic oligonucleotide
  Antisense strand to SEQ ID NO: 2407064
uucgguagacaccuaggag

SEQ ID NO: 2407066 - RNA, 19 nt, Artificial Sequence
  Description of Artificial Sequence: Synthetic oligonucleotide
  Sense strand starting at position 3191 of SEQ ID NO: 1886400
cugaaagcauguccauaaa

SEQ ID NO: 2407067 - RNA, 19 nt, Artificial Sequence
  Description of Artificial Sequence: Synthetic oligonucleotide
  Antisense strand to SEQ ID NO: 2407066
uuuauggacaugcuuucag

SEQ ID NO: 2407068 - RNA, 19 nt, Artificial Sequence
  Description of Artificial Sequence: Synthetic oligonucleotide
  Sense strand starting at position 3219 of SEQ ID NO: 1886400
cacaaagagcagugucauu

SEQ ID NO: 2407069 - RNA, 19 nt, Artificial Sequence
  Description of Artificial Sequence: Synthetic oligonucleotide
  Antisense strand to SEQ ID NO: 2407068
aaugacacugcucuuugug

SEQ ID NO: 2407070 - RNA, 19 nt, Artificial Sequence
  Description of Artificial Sequence: Synthetic oligonucleotide
  Sense strand starting at position 3275 of SEQ ID NO: 1886400
ugaccugaugaauguguaa

SEQ ID NO: 2407071 - RNA, 19 nt, Artificial Sequence
  Description of Artificial Sequence: Synthetic oligonucleotide
  Antisense strand to SEQ ID NO: 2407070
uuacacauucaucagguca

SEQ ID NO: 2407072 - RNA, 19 nt, Artificial Sequence
  Description of Artificial Sequence: Synthetic oligonucleotide
  Sense strand starting at position 3278 of SEQ ID NO: 1886400
ccugaugaauguguaaaua

SEQ ID NO: 2407073 - RNA, 19 nt, Artificial Sequence
  Description of Artificial Sequence: Synthetic oligonucleotide
  Antisense strand to SEQ ID NO: 2407072
uauuuacacauucaucagg

SEQ ID NO: 2407074 - RNA, 19 nt, Artificial Sequence
  Description of Artificial Sequence: Synthetic oligonucleotide
  Sense strand starting at position 3365 of SEQ ID NO: 1886400
gcuggaaaucauuauggua

SEQ ID NO: 2407075 - RNA, 19 nt, Artificial Sequence
  Description of Artificial Sequence: Synthetic oligonucleotide
  Antisense strand to SEQ ID NO: 2407074
uaccauaaugauuuccagc

SEQ ID NO: 2407076 - RNA, 19 nt, Artificial Sequence
  Description of Artificial Sequence: Synthetic oligonucleotide
  Sense strand starting at position 3432 of SEQ ID NO: 1886400
auguguaauuuccagaaua

SEQ ID NO: 2407077 - RNA, 19 nt, Artificial Sequence
  Description of Artificial Sequence: Synthetic oligonucleotide
  Antisense strand to SEQ ID NO: 2407076
uauucuggaaauuacacau

SEQ ID NO: 2407078 - RNA, 19 nt, Artificial Sequence
  Description of Artificial Sequence: Synthetic oligonucleotide
  Sense strand starting at position 3462 of SEQ ID NO: 1886400
ggagacagaaaguguuuga

SEQ ID NO: 2407079 - RNA, 19 nt, Artificial Sequence
  Description of Artificial Sequence: Synthetic oligonucleotide
  Antisense strand to SEQ ID NO: 2407078
ucaaacacuuucugucucc

SEQ ID NO: 2407080 - RNA, 19 nt, Artificial Sequence
  Description of Artificial Sequence: Synthetic oligonucleotide
  Sense strand starting at position 3465 of SEQ ID NO: 1886400
gacagaaaguguuugacag

SEQ ID NO: 2407081 - RNA, 19 nt, Artificial Sequence
  Description of Artificial Sequence: Synthetic oligonucleotide
  Antisense strand to SEQ ID NO: 2407080
cugucaaacacuuucuguc

SEQ ID NO: 2407082 - RNA, 19 nt, Artificial Sequence
  Description of Artificial Sequence: Synthetic oligonucleotide
  Sense strand starting at position 3729 of SEQ ID NO: 1886400
guaguaacauaugucuuua

SEQ ID NO: 2407083 - RNA, 19 nt, Artificial Sequence
  Description of Artificial Sequence: Synthetic oligonucleotide
  Antisense strand to SEQ ID NO: 2407082
uaaagacauauguuacuac

SEQ ID NO: 2407084 - RNA, 19 nt, Artificial Sequence
  Description of Artificial Sequence: Synthetic oligonucleotide
  Sense strand starting at position 3796 of SEQ ID NO: 1886400
cagccauuuccuggcugua

SEQ ID NO: 2407085 - RNA, 19 nt, Artificial Sequence
  Description of Artificial Sequence: Synthetic oligonucleotide
  Antisense strand to SEQ ID NO: 2407084
uacagccaggaaauggcug

SEQ ID NO: 2407086 - RNA, 19 nt, Artificial Sequence
  Description of Artificial Sequence: Synthetic oligonucleotide
  Sense strand starting at position 3798 of SEQ ID NO: 1886400
gccauuuccuggcuguaau

SEQ ID NO: 2407087 - RNA, 19 nt, Artificial Sequence
  Description of Artificial Sequence: Synthetic oligonucleotide
  Antisense strand to SEQ ID NO: 2407086
auuacagccaggaaauggc

SEQ ID NO: 2407088 - RNA, 19 nt, Artificial Sequence
  Description of Artificial Sequence: Synthetic oligonucleotide
  Sense strand starting at position 3799 of SEQ ID NO: 1886400
ccauuuccuggcuguaauc

SEQ ID NO: 2407089 - RNA, 19 nt, Artificial Sequence
  Description of Artificial Sequence: Synthetic oligonucleotide
  Antisense strand to SEQ ID NO: 2407088
gauuacagccaggaaaugg

SEQ ID NO: 2407090 - RNA, 19 nt, Artificial Sequence
  Description of Artificial Sequence: Synthetic oligonucleotide
  Sense strand starting at position 3906 of SEQ ID NO: 1886400
aaacacuaugccgagaguu

SEQ ID NO: 2407091 - RNA, 19 nt, Artificial Sequence
  Description of Artificial Sequence: Synthetic oligonucleotide
  Antisense strand to SEQ ID NO: 2407090
aacucucggcauaguguuu

SEQ ID NO: 2407092 - RNA, 19 nt, Artificial Sequence
  Description of Artificial Sequence: Synthetic oligonucleotide
  Sense strand starting at position 5 of SEQ ID NO: 1886401
ggagaaguguaguuggaau

SEQ ID NO: 2407093 - RNA, 19 nt, Artificial Sequence
  Description of Artificial Sequence: Synthetic oligonucleotide
  Antisense strand to SEQ ID NO: 2407092
auuccaacuacacuucucc

SEQ ID NO: 2407094 - RNA, 19 nt, Artificial Sequence
  Description of Artificial Sequence: Synthetic oligonucleotide
  Sense strand starting at position 7 of SEQ ID NO: 1886401
agaaguguaguuggaauau

SEQ ID NO: 2407095 - RNA, 19 nt, Artificial Sequence
  Description of Artificial Sequence: Synthetic oligonucleotide
  Antisense strand to SEQ ID NO: 2407094
auauuccaacuacacuucu

SEQ ID NO: 2407096 - RNA, 19 nt, Artificial Sequence
  Description of Artificial Sequence: Synthetic oligonucleotide
  Sense strand starting at position 73 of SEQ ID NO: 1886401
ugucauuucugggaacuua

SEQ ID NO: 2407097 - RNA, 19 nt, Artificial Sequence
  Description of Artificial Sequence: Synthetic oligonucleotide
  Antisense strand to SEQ ID NO: 2407096
uaaguucccagaaaugaca

SEQ ID NO: 2407098 - RNA, 19 nt, Artificial Sequence
  Description of Artificial Sequence: Synthetic oligonucleotide
  Sense strand starting at position 274 of SEQ ID NO: 1886401
auagaaugaugcucaugau

SEQ ID NO: 2407099 - RNA, 19 nt, Artificial Sequence
  Description of Artificial Sequence: Synthetic oligonucleotide
  Antisense strand to SEQ ID NO: 2407098
aucaugagcaucauucuau

SEQ ID NO: 2407100 - RNA, 19 nt, Artificial Sequence
  Description of Artificial Sequence: Synthetic oligonucleotide
  Sense strand starting at position 813 of SEQ ID NO: 1886401
augggauccuuccuucuga

SEQ ID NO: 2407101 - RNA, 19 nt, Artificial Sequence
  Description of Artificial Sequence: Synthetic oligonucleotide
  Antisense strand to SEQ ID NO: 2407100
ucagaaggaaggaucccau

SEQ ID NO: 2407102 - RNA, 19 nt, Artificial Sequence
  Description of Artificial Sequence: Synthetic oligonucleotide
  Sense strand starting at position 814 of SEQ ID NO: 1886401
ugggauccuuccuucugau

SEQ ID NO: 2407103 - RNA, 19 nt, Artificial Sequence
  Description of Artificial Sequence: Synthetic oligonucleotide
  Antisense strand to SEQ ID NO: 2407102
aucagaaggaaggauccca

SEQ ID NO: 2407104 - RNA, 19 nt, Artificial Sequence
  Description of Artificial Sequence: Synthetic oligonucleotide
  Sense strand starting at position 891 of SEQ ID NO: 1886401
ucacaugauccauggagua

SEQ ID NO: 2407105 - RNA, 19 nt, Artificial Sequence
  Description of Artificial Sequence: Synthetic oligonucleotide
  Antisense strand to SEQ ID NO: 2407104
uacuccauggaucauguga

SEQ ID NO: 2407106 - RNA, 19 nt, Artificial Sequence
  Description of Artificial Sequence: Synthetic oligonucleotide
  Sense strand starting at position 905 of SEQ ID NO: 1886401
gaguaauuugcauguucuu

SEQ ID NO: 2407107 - RNA, 19 nt, Artificial Sequence
  Description of Artificial Sequence: Synthetic oligonucleotide
  Antisense strand to SEQ ID NO: 2407106
aagaacaugcaaauuacuc

SEQ ID NO: 2407108 - RNA, 19 nt, Artificial Sequence
  Description of Artificial Sequence: Synthetic oligonucleotide
  Sense strand starting at position 957 of SEQ ID NO: 1886401
cgugaaucuagggaccuuu

SEQ ID NO: 2407109 - RNA, 19 nt, Artificial Sequence
  Description of Artificial Sequence: Synthetic oligonucleotide
  Antisense strand to SEQ ID NO: 2407108
aaaggucccuagauucacg

SEQ ID NO: 2407110 - RNA, 19 nt, Artificial Sequence
  Description of Artificial Sequence: Synthetic oligonucleotide
  Sense strand starting at position 1169 of SEQ ID NO: 1886401
aucacuuugaggcgaacau

SEQ ID NO: 2407111 - RNA, 19 nt, Artificial Sequence
  Description of Artificial Sequence: Synthetic oligonucleotide
  Antisense strand to SEQ ID NO: 2407110
auguucgccucaaagugau

SEQ ID NO: 2407112 - RNA, 19 nt, Artificial Sequence
  Description of Artificial Sequence: Synthetic oligonucleotide
  Sense strand starting at position 1304 of SEQ ID NO: 1886401
caguuugcucagcagauau

SEQ ID NO: 2407113 - RNA, 19 nt, Artificial Sequence
  Description of Artificial Sequence: Synthetic oligonucleotide
  Antisense strand to SEQ ID NO: 2407112
auaucugcugagcaaacug

SEQ ID NO: 2407114 - RNA, 19 nt, Artificial Sequence
  Description of Artificial Sequence: Synthetic oligonucleotide
  Sense strand starting at position 1462 of SEQ ID NO: 1886401
gucugaauccacuggguga

SEQ ID NO: 2407115 - RNA, 19 nt, Artificial Sequence
  Description of Artificial Sequence: Synthetic oligonucleotide
  Antisense strand to SEQ ID NO: 2407114
ucacccaguggauucagac

SEQ ID NO: 2407116 - RNA, 19 nt, Artificial Sequence
  Description of Artificial Sequence: Synthetic oligonucleotide
  Sense strand starting at position 1774 of SEQ ID NO: 1886401
gcaagaccucuauaaccug

SEQ ID NO: 2407117 - RNA, 19 nt, Artificial Sequence
  Description of Artificial Sequence: Synthetic oligonucleotide
  Antisense strand to SEQ ID NO: 2407116
cagguuauagaggucuugc

SEQ ID NO: 2407118 - RNA, 19 nt, Artificial Sequence
  Description of Artificial Sequence: Synthetic oligonucleotide
  Sense strand starting at position 2113 of SEQ ID NO: 1886401
ugggcagaaauuggauuau

SEQ ID NO: 2407119 - RNA, 19 nt, Artificial Sequence
  Description of Artificial Sequence: Synthetic oligonucleotide
  Antisense strand to SEQ ID NO: 2407118
auaauccaauuucugccca

SEQ ID NO: 2407120 - RNA, 19 nt, Artificial Sequence
  Description of Artificial Sequence: Synthetic oligonucleotide
  Sense strand starting at position 2217 of SEQ ID NO: 1886401
aggacugacuggucagagu

SEQ ID NO: 2407121 - RNA, 19 nt, Artificial Sequence
  Description of Artificial Sequence: Synthetic oligonucleotide
  Antisense strand to SEQ ID NO: 2407120
acucugaccagucaguccu

SEQ ID NO: 2407122 - RNA, 19 nt, Artificial Sequence
  Description of Artificial Sequence: Synthetic oligonucleotide
  Sense strand starting at position 2328 of SEQ ID NO: 1886401
ugaugauugggccauguac

SEQ ID NO: 2407123 - RNA, 19 nt, Artificial Sequence
  Description of Artificial Sequence: Synthetic oligonucleotide
  Antisense strand to SEQ ID NO: 2407122
guacauggcccaaucauca

SEQ ID NO: 2407124 - RNA, 19 nt, Artificial Sequence
  Description of Artificial Sequence: Synthetic oligonucleotide
  Sense strand starting at position 2330 of SEQ ID NO: 1886401
augauugggccauguacau

SEQ ID NO: 2407125 - RNA, 19 nt, Artificial Sequence
  Description of Artificial Sequence: Synthetic oligonucleotide
  Antisense strand to SEQ ID NO: 2407124
auguacauggcccaaucau

SEQ ID NO: 2407126 - RNA, 19 nt, Artificial Sequence
  Description of Artificial Sequence: Synthetic oligonucleotide
  Sense strand starting at position 2414 of SEQ ID NO: 1886401
agcaauuaggcccagaauu

SEQ ID NO: 2407127 - RNA, 19 nt, Artificial Sequence
  Description of Artificial Sequence: Synthetic oligonucleotide
  Antisense strand to SEQ ID NO: 2407126
aauucugggccuaauugcu

SEQ ID NO: 2407128 - RNA, 19 nt, Artificial Sequence
  Description of Artificial Sequence: Synthetic oligonucleotide
  Sense strand starting at position 2458 of SEQ ID NO: 1886401
aaagaaguagaguguuguu

SEQ ID NO: 2407129 - RNA, 19 nt, Artificial Sequence
  Description of Artificial Sequence: Synthetic oligonucleotide
  Antisense strand to SEQ ID NO: 2407128
aacaacacucuacuucuuu

SEQ ID NO: 2407130 - RNA, 19 nt, Artificial Sequence
  Description of Artificial Sequence: Synthetic oligonucleotide
  Sense strand starting at position 2510 of SEQ ID NO: 1886401
gucacucagugauccaaau

SEQ ID NO: 2407131 - RNA, 19 nt, Artificial Sequence
  Description of Artificial Sequence: Synthetic oligonucleotide
  Antisense strand to SEQ ID NO: 2407130
auuuggaucacugagugac

SEQ ID NO: 2407132 - RNA, 19 nt, Artificial Sequence
  Description of Artificial Sequence: Synthetic oligonucleotide
  Sense strand starting at position 2527 of SEQ ID NO: 1886401
auuagaguaucagcaaacu

SEQ ID NO: 2407133 - RNA, 19 nt, Artificial Sequence
  Description of Artificial Sequence: Synthetic oligonucleotide
  Antisense strand to SEQ ID NO: 2407132
aguuugcugauacucuaau

SEQ ID NO: 2407134 - RNA, 19 nt, Artificial Sequence
  Description of Artificial Sequence: Synthetic oligonucleotide
  Sense strand starting at position 2931 of SEQ ID NO: 1886401
ugcuuaggauugcuaugau

SEQ ID NO: 2407135 - RNA, 19 nt, Artificial Sequence
  Description of Artificial Sequence: Synthetic oligonucleotide
  Antisense strand to SEQ ID NO: 2407134
aucauagcaauccuaagca

SEQ ID NO: 2407136 - RNA, 19 nt, Artificial Sequence
  Description of Artificial Sequence: Synthetic oligonucleotide
  Sense strand starting at position 2934 of SEQ ID NO: 1886401
uuaggauugcuaugaugau

SEQ ID NO: 2407137 - RNA, 19 nt, Artificial Sequence
  Description of Artificial Sequence: Synthetic oligonucleotide
  Antisense strand to SEQ ID NO: 2407136
aucaucauagcaauccuaa

SEQ ID NO: 2407138 - RNA, 19 nt, Artificial Sequence
  Description of Artificial Sequence: Synthetic oligonucleotide
  Sense strand starting at position 3005 of SEQ ID NO: 1886401
gaagaauuggugcagguag

SEQ ID NO: 2407139 - RNA, 19 nt, Artificial Sequence
  Description of Artificial Sequence: Synthetic oligonucleotide
  Antisense strand to SEQ ID NO: 2407138
cuaccugcaccaauucuuc

SEQ ID NO: 2407140 - RNA, 19 nt, Artificial Sequence
  Description of Artificial Sequence: Synthetic oligonucleotide
  Sense strand starting at position 3045 of SEQ ID NO: 1886401
ucuguaaauugcuuuagga

SEQ ID NO: 2407141 - RNA, 19 nt, Artificial Sequence
  Description of Artificial Sequence: Synthetic oligonucleotide
  Antisense strand to SEQ ID NO: 2407140
uccuaaagcaauuuacaga

SEQ ID NO: 2407142 - RNA, 19 nt, Artificial Sequence
  Description of Artificial Sequence: Synthetic oligonucleotide
  Sense strand starting at position 3047 of SEQ ID NO: 1886401
uguaaauugcuuuaggaag

SEQ ID NO: 2407143 - RNA, 19 nt, Artificial Sequence
  Description of Artificial Sequence: Synthetic oligonucleotide
  Antisense strand to SEQ ID NO: 2407142
cuuccuaaagcaauuuaca

SEQ ID NO: 2407144 - RNA, 19 nt, Artificial Sequence
  Description of Artificial Sequence: Synthetic oligonucleotide
  Sense strand starting at position 3228 of SEQ ID NO: 1886401
gguuguugcaaaugggauu

SEQ ID NO: 2407145 - RNA, 19 nt, Artificial Sequence
  Description of Artificial Sequence: Synthetic oligonucleotide
  Antisense strand to SEQ ID NO: 2407144
aaucccauuugcaacaacc

SEQ ID NO: 2407146 - RNA, 19 nt, Artificial Sequence
  Description of Artificial Sequence: Synthetic oligonucleotide
  Sense strand starting at position 3260 of SEQ ID NO: 1886401
gacucucagccugaguguu

SEQ ID NO: 2407147 - RNA, 19 nt, Artificial Sequence
  Description of Artificial Sequence: Synthetic oligonucleotide
  Antisense strand to SEQ ID NO: 2407146
aacacucaggcugagaguc

SEQ ID NO: 2407148 - RNA, 19 nt, Artificial Sequence
  Description of Artificial Sequence: Synthetic oligonucleotide
  Sense strand starting at position 3270 of SEQ ID NO: 1886401
cugaguguuauugauguau

SEQ ID NO: 2407149 - RNA, 19 nt, Artificial Sequence
  Description of Artificial Sequence: Synthetic oligonucleotide
  Antisense strand to SEQ ID NO: 2407148
auacaucaauaacacucag

SEQ ID NO: 2407150 - RNA, 19 nt, Artificial Sequence
  Description of Artificial Sequence: Synthetic oligonucleotide
  Sense strand starting at position 3376 of SEQ ID NO: 1886401
ucuuuaggguucucuaagu

SEQ ID NO: 2407151 - RNA, 19 nt, Artificial Sequence
  Description of Artificial Sequence: Synthetic oligonucleotide
  Antisense strand to SEQ ID NO: 2407150
acuuagagaacccuaaaga

SEQ ID NO: 2407152 - RNA, 19 nt, Artificial Sequence
  Description of Artificial Sequence: Synthetic oligonucleotide
  Sense strand starting at position 3381 of SEQ ID NO: 1886401
aggguucucuaaguauaga

SEQ ID NO: 2407153 - RNA, 19 nt, Artificial Sequence
  Description of Artificial Sequence: Synthetic oligonucleotide
  Antisense strand to SEQ ID NO: 2407152
ucuauacuuagagaacccu

SEQ ID NO: 2407154 - RNA, 19 nt, Artificial Sequence
  Description of Artificial Sequence: Synthetic oligonucleotide
  Sense strand starting at position 3384 of SEQ ID NO: 1886401
guucucuaaguauagaauu

SEQ ID NO: 2407155 - RNA, 19 nt, Artificial Sequence
  Description of Artificial Sequence: Synthetic oligonucleotide
  Antisense strand to SEQ ID NO: 2407154
aauucuauacuuagagaac

SEQ ID NO: 2407156 - RNA, 19 nt, Artificial Sequence
  Description of Artificial Sequence: Synthetic oligonucleotide
  Sense strand starting at position 3410 of SEQ ID NO: 1886401
cagugaagauaguuugacu

SEQ ID NO: 2407157 - RNA, 19 nt, Artificial Sequence
  Description of Artificial Sequence: Synthetic oligonucleotide
  Antisense strand to SEQ ID NO: 2407156
agucaaacuaucuucacug

SEQ ID NO: 2407158 - RNA, 19 nt, Artificial Sequence
  Description of Artificial Sequence: Synthetic oligonucleotide
  Sense strand starting at position 3484 of SEQ ID NO: 1886401
uuaggacuuccagggcuau

SEQ ID NO: 2407159 - RNA, 19 nt, Artificial Sequence
  Description of Artificial Sequence: Synthetic oligonucleotide
  Antisense strand to SEQ ID NO: 2407158
auagcccuggaaguccuaa

SEQ ID NO: 2407160 - RNA, 19 nt, Artificial Sequence
  Description of Artificial Sequence: Synthetic oligonucleotide
  Sense strand starting at position 3534 of SEQ ID NO: 1886401
ugucuuguuccauaucuca

SEQ ID NO: 2407161 - RNA, 19 nt, Artificial Sequence
  Description of Artificial Sequence: Synthetic oligonucleotide
  Antisense strand to SEQ ID NO: 2407160
ugagauauggaacaagaca

SEQ ID NO: 2407162 - RNA, 19 nt, Artificial Sequence
  Description of Artificial Sequence: Synthetic oligonucleotide
  Sense strand starting at position 3819 of SEQ ID NO: 1886401
acuugaucaucguuuauua

SEQ ID NO: 2407163 - RNA, 19 nt, Artificial Sequence
  Description of Artificial Sequence: Synthetic oligonucleotide
  Antisense strand to SEQ ID NO: 2407162
uaauaaacgaugaucaagu

SEQ ID NO: 2407164 - RNA, 19 nt, Artificial Sequence
  Description of Artificial Sequence: Synthetic oligonucleotide
  Sense strand starting at position 3821 of SEQ ID NO: 1886401
uugaucaucguuuauuaac

SEQ ID NO: 2407165 - RNA, 19 nt, Artificial Sequence
  Description of Artificial Sequence: Synthetic oligonucleotide
  Antisense strand to SEQ ID NO: 2407164
guuaauaaacgaugaucaa

SEQ ID NO: 2407166 - RNA, 19 nt, Artificial Sequence
  Description of Artificial Sequence: Synthetic oligonucleotide
  Sense strand starting at position 3855 of SEQ ID NO: 1886401
ugcauuugguuuccuggua

SEQ ID NO: 2407167 - RNA, 19 nt, Artificial Sequence
  Description of Artificial Sequence: Synthetic oligonucleotide
  Antisense strand to SEQ ID NO: 2407166
uaccaggaaaccaaaugca

SEQ ID NO: 2407168 - RNA, 19 nt, Artificial Sequence
  Description of Artificial Sequence: Synthetic oligonucleotide
  Sense strand starting at position 3856 of SEQ ID NO: 1886401
gcauuugguuuccugguau

SEQ ID NO: 2407169 - RNA, 19 nt, Artificial Sequence
  Description of Artificial Sequence: Synthetic oligonucleotide
  Antisense strand to SEQ ID NO: 2407168
auaccaggaaaccaaaugc

SEQ ID NO: 2407170 - RNA, 19 nt, Artificial Sequence
  Description of Artificial Sequence: Synthetic oligonucleotide
  Sense strand starting at position 3908 of SEQ ID NO: 1886401
ggauauuagccagaaguuu

SEQ ID NO: 2407171 - RNA, 19 nt, Artificial Sequence
  Description of Artificial Sequence: Synthetic oligonucleotide
  Antisense strand to SEQ ID NO: 2407170
aaacuucuggcuaauaucc

SEQ ID NO: 2407172 - RNA, 19 nt, Artificial Sequence
  Description of Artificial Sequence: Synthetic oligonucleotide
  Sense strand starting at position 118 of SEQ ID NO: 1886402
cuccgagucucacuauguu

SEQ ID NO: 2407173 - RNA, 19 nt, Artificial Sequence
  Description of Artificial Sequence: Synthetic oligonucleotide
  Antisense strand to SEQ ID NO: 2407172
aacauagugagacucggag

SEQ ID NO: 2407174 - RNA, 19 nt, Artificial Sequence
  Description of Artificial Sequence: Synthetic oligonucleotide
  Sense strand starting at position 188 of SEQ ID NO: 1886402
ucuaaaguggugggauuaa

SEQ ID NO: 2407175 - RNA, 19 nt, Artificial Sequence
  Description of Artificial Sequence: Synthetic oligonucleotide
  Antisense strand to SEQ ID NO: 2407174
uuaaucccaccacuuuaga

SEQ ID NO: 2407176 - RNA, 19 nt, Artificial Sequence
  Description of Artificial Sequence: Synthetic oligonucleotide
  Sense strand starting at position 421 of SEQ ID NO: 1886402
ccacaaucauaagagggaa

SEQ ID NO: 2407177 - RNA, 19 nt, Artificial Sequence
  Description of Artificial Sequence: Synthetic oligonucleotide
  Antisense strand to SEQ ID NO: 2407176
uucccucuuaugauugugg

SEQ ID NO: 2407178 - RNA, 19 nt, Artificial Sequence
  Description of Artificial Sequence: Synthetic oligonucleotide
  Sense strand starting at position 2095 of SEQ ID NO: 1886402
uggugguuccgcgauggua

SEQ ID NO: 2407179 - RNA, 19 nt, Artificial Sequence
  Description of Artificial Sequence: Synthetic oligonucleotide
  Antisense strand to SEQ ID NO: 2407178
uaccaucgcggaaccacca

SEQ ID NO: 2407180 - RNA, 19 nt, Artificial Sequence
  Description of Artificial Sequence: Synthetic oligonucleotide
  Sense strand starting at position 2236 of SEQ ID NO: 1886402
acgcgagaucuucgauauc

SEQ ID NO: 2407181 - RNA, 19 nt, Artificial Sequence
  Description of Artificial Sequence: Synthetic oligonucleotide
  Antisense strand to SEQ ID NO: 2407180
gauaucgaagaucucgcgu

SEQ ID NO: 2407182 - RNA, 19 nt, Artificial Sequence
  Description of Artificial Sequence: Synthetic oligonucleotide
  Sense strand starting at position 2355 of SEQ ID NO: 1886402
gaggguucuaagugggcaa

SEQ ID NO: 2407183 - RNA, 19 nt, Artificial Sequence
  Description of Artificial Sequence: Synthetic oligonucleotide
  Antisense strand to SEQ ID NO: 2407182
uugcccacuuagaacccuc

SEQ ID NO: 2407184 - RNA, 19 nt, Artificial Sequence
  Description of Artificial Sequence: Synthetic oligonucleotide
  Sense strand starting at position 2419 of SEQ ID NO: 1886402
caucaaugacccggagcau

SEQ ID NO: 2407185 - RNA, 19 nt, Artificial Sequence
  Description of Artificial Sequence: Synthetic oligonucleotide
  Antisense strand to SEQ ID NO: 2407184
augcuccgggucauugaug

SEQ ID NO: 2407186 - RNA, 19 nt, Artificial Sequence
  Description of Artificial Sequence: Synthetic oligonucleotide
  Sense strand starting at position 2446 of SEQ ID NO: 1886402
gcuagaggaguugaacgua

SEQ ID NO: 2407187 - RNA, 19 nt, Artificial Sequence
  Description of Artificial Sequence: Synthetic oligonucleotide
  Antisense strand to SEQ ID NO: 2407186
uacguucaacuccucuagc

SEQ ID NO: 2407188 - RNA, 19 nt, Artificial Sequence
  Description of Artificial Sequence: Synthetic oligonucleotide
  Sense strand starting at position 2449 of SEQ ID NO: 1886402
agaggaguugaacguagua

SEQ ID NO: 2407189 - RNA, 19 nt, Artificial Sequence
  Description of Artificial Sequence: Synthetic oligonucleotide
  Antisense strand to SEQ ID NO: 2407188
uacuacguucaacuccucu

SEQ ID NO: 2407190 - RNA, 19 nt, Artificial Sequence
  Description of Artificial Sequence: Synthetic oligonucleotide
  Sense strand starting at position 2451 of SEQ ID NO: 1886402
aggaguugaacguaguaga

SEQ ID NO: 2407191 - RNA, 19 nt, Artificial Sequence
  Description of Artificial Sequence: Synthetic oligonucleotide
  Antisense strand to SEQ ID NO: 2407190
ucuacuacguucaacuccu

SEQ ID NO: 2407192 - RNA, 19 nt, Artificial Sequence
  Description of Artificial Sequence: Synthetic oligonucleotide
  Sense strand starting at position 2502 of SEQ ID NO: 1886402
gggagcgaguuguuccaga

SEQ ID NO: 2407193 - RNA, 19 nt, Artificial Sequence
  Description of Artificial Sequence: Synthetic oligonucleotide
  Antisense strand to SEQ ID NO: 2407192
ucuggaacaacucgcuccc

SEQ ID NO: 2407194 - RNA, 19 nt, Artificial Sequence
  Description of Artificial Sequence: Synthetic oligonucleotide
  Sense strand starting at position 2506 of SEQ ID NO: 1886402
gcgaguuguuccagagagu

SEQ ID NO: 2407195 - RNA, 19 nt, Artificial Sequence
  Description of Artificial Sequence: Synthetic oligonucleotide
  Antisense strand to SEQ ID NO: 2407194
acucucuggaacaacucgc

SEQ ID NO: 2407196 - RNA, 19 nt, Artificial Sequence
  Description of Artificial Sequence: Synthetic oligonucleotide
  Sense strand starting at position 2507 of SEQ ID NO: 1886402
cgaguuguuccagagaguc

SEQ ID NO: 2407197 - RNA, 19 nt, Artificial Sequence
  Description of Artificial Sequence: Synthetic oligonucleotide
  Antisense strand to SEQ ID NO: 2407196
gacucucuggaacaacucg

SEQ ID NO: 2407198 - RNA, 19 nt, Artificial Sequence
  Description of Artificial Sequence: Synthetic oligonucleotide
  Sense strand starting at position 2524 of SEQ ID NO: 1886402
ucagaaagguuucugugca

SEQ ID NO: 2407199 - RNA, 19 nt, Artificial Sequence
  Description of Artificial Sequence: Synthetic oligonucleotide
  Antisense strand to SEQ ID NO: 2407198
ugcacagaaaccuuucuga

SEQ ID NO: 2407200 - RNA, 19 nt, Artificial Sequence
  Description of Artificial Sequence: Synthetic oligonucleotide
  Sense strand starting at position 2554 of SEQ ID NO: 1886402
cgugcucuaugcucacgaa

SEQ ID NO: 2407201 - RNA, 19 nt, Artificial Sequence
  Description of Artificial Sequence: Synthetic oligonucleotide
  Antisense strand to SEQ ID NO: 2407200
uucgugagcauagagcacg

SEQ ID NO: 2407202 - RNA, 19 nt, Artificial Sequence
  Description of Artificial Sequence: Synthetic oligonucleotide
  Sense strand starting at position 2596 of SEQ ID NO: 1886402
ggagauuguugugccuauu

SEQ ID NO: 2407203 - RNA, 19 nt, Artificial Sequence
  Description of Artificial Sequence: Synthetic oligonucleotide
  Antisense strand to SEQ ID NO: 2407202
aauaggcacaacaaucucc

SEQ ID NO: 2407204 - RNA, 19 nt, Artificial Sequence
  Description of Artificial Sequence: Synthetic oligonucleotide
  Sense strand starting at position 2635 of SEQ ID NO: 1886402
gcccauagaaguuggauga

SEQ ID NO: 2407205 - RNA, 19 nt, Artificial Sequence
  Description of Artificial Sequence: Synthetic oligonucleotide
  Antisense strand to SEQ ID NO: 2407204
ucauccaacuucuaugggc

SEQ ID NO: 2407206 - RNA, 19 nt, Artificial Sequence
  Description of Artificial Sequence: Synthetic oligonucleotide
  Sense strand starting at position 2636 of SEQ ID NO: 1886402
cccauagaaguuggaugau

SEQ ID NO: 2407207 - RNA, 19 nt, Artificial Sequence
  Description of Artificial Sequence: Synthetic oligonucleotide
  Antisense strand to SEQ ID NO: 2407206
aucauccaacuucuauggg

SEQ ID NO: 2407208 - RNA, 19 nt, Artificial Sequence
  Description of Artificial Sequence: Synthetic oligonucleotide
  Sense strand starting at position 2800 of SEQ ID NO: 1886402
cccuuauuggucuguccau

SEQ ID NO: 2407209 - RNA, 19 nt, Artificial Sequence
  Description of Artificial Sequence: Synthetic oligonucleotide
  Antisense strand to SEQ ID NO: 2407208
auggacagaccaauaaggg

SEQ ID NO: 2407210 - RNA, 19 nt, Artificial Sequence
  Description of Artificial Sequence: Synthetic oligonucleotide
  Sense strand starting at position 2996 of SEQ ID NO: 1886402
ggaggaagcuuuccaaguc

SEQ ID NO: 2407211 - RNA, 19 nt, Artificial Sequence
  Description of Artificial Sequence: Synthetic oligonucleotide
  Antisense strand to SEQ ID NO: 2407210
gacuuggaaagcuuccucc

SEQ ID NO: 2407212 - RNA, 19 nt, Artificial Sequence
  Description of Artificial Sequence: Synthetic oligonucleotide
  Sense strand starting at position 3005 of SEQ ID NO: 1886402
uuuccaagucgaugugaca

SEQ ID NO: 2407213 - RNA, 19 nt, Artificial Sequence
  Description of Artificial Sequence: Synthetic oligonucleotide
  Antisense strand to SEQ ID NO: 2407212
ugucacaucgacuuggaaa

SEQ ID NO: 2407214 - RNA, 19 nt, Artificial Sequence
  Description of Artificial Sequence: Synthetic oligonucleotide
  Sense strand starting at position 3008 of SEQ ID NO: 1886402
ccaagucgaugugacaaga

SEQ ID NO: 2407215 - RNA, 19 nt, Artificial Sequence
  Description of Artificial Sequence: Synthetic oligonucleotide
  Antisense strand to SEQ ID NO: 2407214
ucuugucacaucgacuugg

SEQ ID NO: 2407216 - RNA, 19 nt, Artificial Sequence
  Description of Artificial Sequence: Synthetic oligonucleotide
  Sense strand starting at position 3030 of SEQ ID NO: 1886402
aagaucugagcuggaaagu

SEQ ID NO: 2407217 - RNA, 19 nt, Artificial Sequence
  Description of Artificial Sequence: Synthetic oligonucleotide
  Antisense strand to SEQ ID NO: 2407216
acuuuccagcucagaucuu

SEQ ID NO: 2407218 - RNA, 19 nt, Artificial Sequence
  Description of Artificial Sequence: Synthetic oligonucleotide
  Sense strand starting at position 3131 of SEQ ID NO: 1886402
ccuuuaaaucaacaguagu

SEQ ID NO: 2407219 - RNA, 19 nt, Artificial Sequence
  Description of Artificial Sequence: Synthetic oligonucleotide
  Antisense strand to SEQ ID NO: 2407218
acuacuguugauuuaaagg

SEQ ID NO: 2407220 - RNA, 19 nt, Artificial Sequence
  Description of Artificial Sequence: Synthetic oligonucleotide
  Sense strand starting at position 3149 of SEQ ID NO: 1886402
ugggccaguucuuuggaua

SEQ ID NO: 2407221 - RNA, 19 nt, Artificial Sequence
  Description of Artificial Sequence: Synthetic oligonucleotide
  Antisense strand to SEQ ID NO: 2407220
uauccaaagaacuggccca

SEQ ID NO: 2407222 - RNA, 19 nt, Artificial Sequence
  Description of Artificial Sequence: Synthetic oligonucleotide
  Sense strand starting at position 3150 of SEQ ID NO: 1886402
gggccaguucuuuggauag

SEQ ID NO: 2407223 - RNA, 19 nt, Artificial Sequence
  Description of Artificial Sequence: Synthetic oligonucleotide
  Antisense strand to SEQ ID NO: 2407222
cuauccaaagaacuggccc

SEQ ID NO: 2407224 - RNA, 19 nt, Artificial Sequence
  Description of Artificial Sequence: Synthetic oligonucleotide
  Sense strand starting at position 3152 of SEQ ID NO: 1886402
gccaguucuuuggauagaa

SEQ ID NO: 2407225 - RNA, 19 nt, Artificial Sequence
  Description of Artificial Sequence: Synthetic oligonucleotide
  Antisense strand to SEQ ID NO: 2407224
uucuauccaaagaacuggc

SEQ ID NO: 2407226 - RNA, 19 nt, Artificial Sequence
  Description of Artificial Sequence: Synthetic oligonucleotide
  Sense strand starting at position 3533 of SEQ ID NO: 1886402
aaggcaugauuaggaggaa

SEQ ID NO: 2407227 - RNA, 19 nt, Artificial Sequence
  Description of Artificial Sequence: Synthetic oligonucleotide
  Antisense strand to SEQ ID NO: 2407226
uuccuccuaaucaugccuu

SEQ ID NO: 2407228 - RNA, 19 nt, Artificial Sequence
  Description of Artificial Sequence: Synthetic oligonucleotide
  Sense strand starting at position 3617 of SEQ ID NO: 1886402
guguucaggcccugguuau

SEQ ID NO: 2407229 - RNA, 19 nt, Artificial Sequence
  Description of Artificial Sequence: Synthetic oligonucleotide
  Antisense strand to SEQ ID NO: 2407228
auaaccagggccugaacac

SEQ ID NO: 2407230 - RNA, 19 nt, Artificial Sequence
  Description of Artificial Sequence: Synthetic oligonucleotide
  Sense strand starting at position 3765 of SEQ ID NO: 1886402
ggagucuaugggcaagacu

SEQ ID NO: 2407231 - RNA, 19 nt, Artificial Sequence
  Description of Artificial Sequence: Synthetic oligonucleotide
  Antisense strand to SEQ ID NO: 2407230
agucuugcccauagacucc

SEQ ID NO: 2407232 - RNA, 19 nt, Artificial Sequence
  Description of Artificial Sequence: Synthetic oligonucleotide
  Sense strand starting at position 3792 of SEQ ID NO: 1886402
guaacugugugagugaaau

SEQ ID NO: 2407233 - RNA, 19 nt, Artificial Sequence
  Description of Artificial Sequence: Synthetic oligonucleotide
  Antisense strand to SEQ ID NO: 2407232
auuucacucacacaguuac

SEQ ID NO: 2407234 - RNA, 19 nt, Artificial Sequence
  Description of Artificial Sequence: Synthetic oligonucleotide
  Sense strand starting at position 3794 of SEQ ID NO: 1886402
aacugugugagugaaauug

SEQ ID NO: 2407235 - RNA, 19 nt, Artificial Sequence
  Description of Artificial Sequence: Synthetic oligonucleotide
  Antisense strand to SEQ ID NO: 2407234
caauuucacucacacaguu

SEQ ID NO: 2407236 - RNA, 19 nt, Artificial Sequence
  Description of Artificial Sequence: Synthetic oligonucleotide
  Sense strand starting at position 3802 of SEQ ID NO: 1886402
gagugaaauugccagagac

SEQ ID NO: 2407237 - RNA, 19 nt, Artificial Sequence
  Description of Artificial Sequence: Synthetic oligonucleotide
  Antisense strand to SEQ ID NO: 2407236
gucucuggcaauuucacuc

SEQ ID NO: 2407238 - RNA, 19 nt, Artificial Sequence
  Description of Artificial Sequence: Synthetic oligonucleotide
  Sense strand starting at position 3804 of SEQ ID NO: 1886402
gugaaauugccagagacuc

SEQ ID NO: 2407239 - RNA, 19 nt, Artificial Sequence
  Description of Artificial Sequence: Synthetic oligonucleotide
  Antisense strand to SEQ ID NO: 2407238
gagucucuggcaauuucac

SEQ ID NO: 2407240 - RNA, 19 nt, Artificial Sequence
  Description of Artificial Sequence: Synthetic oligonucleotide
  Sense strand starting at position 3812 of SEQ ID NO: 1886402
gccagagacuccucaguau

SEQ ID NO: 2407241 - RNA, 19 nt, Artificial Sequence
  Description of Artificial Sequence: Synthetic oligonucleotide
  Antisense strand to SEQ ID NO: 2407240
auacugaggagucucuggc

SEQ ID NO: 2407242 - RNA, 19 nt, Artificial Sequence
  Description of Artificial Sequence: Synthetic oligonucleotide
  Sense strand starting at position 3818 of SEQ ID NO: 1886402
gacuccucaguauggguua

SEQ ID NO: 2407243 - RNA, 19 nt, Artificial Sequence
  Description of Artificial Sequence: Synthetic oligonucleotide
  Antisense strand to SEQ ID NO: 2407242
uaacccauacugaggaguc

SEQ ID NO: 2407244 - RNA, 19 nt, Artificial Sequence
  Description of Artificial Sequence: Synthetic oligonucleotide
  Sense strand starting at position 3832 of SEQ ID NO: 1886402
gguuauagccuagaccgaa

SEQ ID NO: 2407245 - RNA, 19 nt, Artificial Sequence
  Description of Artificial Sequence: Synthetic oligonucleotide
  Antisense strand to SEQ ID NO: 2407244
uucggucuaggcuauaacc

SEQ ID NO: 2407246 - RNA, 19 nt, Artificial Sequence
  Description of Artificial Sequence: Synthetic oligonucleotide
  Sense strand starting at position 3847 of SEQ ID NO: 1886402
cgaagcuggccugagaaga

SEQ ID NO: 2407247 - RNA, 19 nt, Artificial Sequence
  Description of Artificial Sequence: Synthetic oligonucleotide
  Antisense strand to SEQ ID NO: 2407246
ucuucucaggccagcuucg

SEQ ID NO: 2407248 - RNA, 19 nt, Artificial Sequence
  Description of Artificial Sequence: Synthetic oligonucleotide
  Sense strand starting at position 3860 of SEQ ID NO: 1886402
agaagacucuccuuugcuu

SEQ ID NO: 2407249 - RNA, 19 nt, Artificial Sequence
  Description of Artificial Sequence: Synthetic oligonucleotide
  Antisense strand to SEQ ID NO: 2407248
aagcaaaggagagucuucu

SEQ ID NO: 2407250 - RNA, 19 nt, Artificial Sequence
  Description of Artificial Sequence: Synthetic oligonucleotide
  Sense strand starting at position 3967 of SEQ ID NO: 1886402
gagggauccuaagaaggca

SEQ ID NO: 2407251 - RNA, 19 nt, Artificial Sequence
  Description of Artificial Sequence: Synthetic oligonucleotide
  Antisense strand to SEQ ID NO: 2407250
ugccuucuuaggaucccuc

SEQ ID NO: 2407252 - RNA, 19 nt, Artificial Sequence
  Description of Artificial Sequence: Synthetic oligonucleotide
  Sense strand starting at position 249 of SEQ ID NO: 1886403
gcgggagguagauguuauc

SEQ ID NO: 2407253 - RNA, 19 nt, Artificial Sequence
  Description of Artificial Sequence: Synthetic oligonucleotide
  Antisense strand to SEQ ID NO: 2407252
gauaacaucuaccucccgc

SEQ ID NO: 2407254 - RNA, 19 nt, Artificial Sequence
  Description of Artificial Sequence: Synthetic oligonucleotide
  Sense strand starting at position 252 of SEQ ID NO: 1886403
ggagguagauguuaucuuu

SEQ ID NO: 2407255 - RNA, 19 nt, Artificial Sequence
  Description of Artificial Sequence: Synthetic oligonucleotide
  Antisense strand to SEQ ID NO: 2407254
aaagauaacaucuaccucc

SEQ ID NO: 2407256 - RNA, 19 nt, Artificial Sequence
  Description of Artificial Sequence: Synthetic oligonucleotide
  Sense strand starting at position 725 of SEQ ID NO: 1886403
uugccagauucuuccuguu

SEQ ID NO: 2407257 - RNA, 19 nt, Artificial Sequence
  Description of Artificial Sequence: Synthetic oligonucleotide
  Antisense strand to SEQ ID NO: 2407256
aacaggaagaaucuggcaa

SEQ ID NO: 2407258 - RNA, 19 nt, Artificial Sequence
  Description of Artificial Sequence: Synthetic oligonucleotide
  Sense strand starting at position 727 of SEQ ID NO: 1886403
gccagauucuuccuguucu

SEQ ID NO: 2407259 - RNA, 19 nt, Artificial Sequence
  Description of Artificial Sequence: Synthetic oligonucleotide
  Antisense strand to SEQ ID NO: 2407258
agaacaggaagaaucuggc

SEQ ID NO: 2407260 - RNA, 19 nt, Artificial Sequence
  Description of Artificial Sequence: Synthetic oligonucleotide
  Sense strand starting at position 728 of SEQ ID NO: 1886403
ccagauucuuccuguucuu

SEQ ID NO: 2407261 - RNA, 19 nt, Artificial Sequence
  Description of Artificial Sequence: Synthetic oligonucleotide
  Antisense strand to SEQ ID NO: 2407260
aagaacaggaagaaucugg

SEQ ID NO: 2407262 - RNA, 19 nt, Artificial Sequence
  Description of Artificial Sequence: Synthetic oligonucleotide
  Sense strand starting at position 745 of SEQ ID NO: 1886403
uuugguaucccugagcaca

SEQ ID NO: 2407263 - RNA, 19 nt, Artificial Sequence
  Description of Artificial Sequence: Synthetic oligonucleotide
  Antisense strand to SEQ ID NO: 2407262
ugugcucagggauaccaaa

SEQ ID NO: 2407264 - RNA, 19 nt, Artificial Sequence
  Description of Artificial Sequence: Synthetic oligonucleotide
  Sense strand starting at position 909 of SEQ ID NO: 1886403
gggagcgcuuucugucuga

SEQ ID NO: 2407265 - RNA, 19 nt, Artificial Sequence
  Description of Artificial Sequence: Synthetic oligonucleotide
  Antisense strand to SEQ ID NO: 2407264
ucagacagaaagcgcuccc

SEQ ID NO: 2407266 - RNA, 19 nt, Artificial Sequence
  Description of Artificial Sequence: Synthetic oligonucleotide
  Sense strand starting at position 911 of SEQ ID NO: 1886403
gagcgcuuucugucugagu

SEQ ID NO: 2407267 - RNA, 19 nt, Artificial Sequence
  Description of Artificial Sequence: Synthetic oligonucleotide
  Antisense strand to SEQ ID NO: 2407266
acucagacagaaagcgcuc

SEQ ID NO: 2407268 - RNA, 19 nt, Artificial Sequence
  Description of Artificial Sequence: Synthetic oligonucleotide
  Sense strand starting at position 920 of SEQ ID NO: 1886403
cugucugaguccuucugau

SEQ ID NO: 2407269 - RNA, 19 nt, Artificial Sequence
  Description of Artificial Sequence: Synthetic oligonucleotide
  Antisense strand to SEQ ID NO: 2407268
aucagaaggacucagacag

SEQ ID NO: 2407270 - RNA, 19 nt, Artificial Sequence
  Description of Artificial Sequence: Synthetic oligonucleotide
  Sense strand starting at position 930 of SEQ ID NO: 1886403
ccuucugauuugcagugau

SEQ ID NO: 2407271 - RNA, 19 nt, Artificial Sequence
  Description of Artificial Sequence: Synthetic oligonucleotide
  Antisense strand to SEQ ID NO: 2407270
aucacugcaaaucagaagg

SEQ ID NO: 2407272 - RNA, 19 nt, Artificial Sequence
  Description of Artificial Sequence: Synthetic oligonucleotide
  Sense strand starting at position 933 of SEQ ID NO: 1886403
ucugauuugcagugaugcu

SEQ ID NO: 2407273 - RNA, 19 nt, Artificial Sequence
  Description of Artificial Sequence: Synthetic oligonucleotide
  Antisense strand to SEQ ID NO: 2407272
agcaucacugcaaaucaga

SEQ ID NO: 2407274 - RNA, 19 nt, Artificial Sequence
  Description of Artificial Sequence: Synthetic oligonucleotide
  Sense strand starting at position 1212 of SEQ ID NO: 1886403
ggcauaccggguugagauu

SEQ ID NO: 2407275 - RNA, 19 nt, Artificial Sequence
  Description of Artificial Sequence: Synthetic oligonucleotide
  Antisense strand to SEQ ID NO: 2407274
aaucucaacccgguaugcc

SEQ ID NO: 2407276 - RNA, 19 nt, Artificial Sequence
  Description of Artificial Sequence: Synthetic oligonucleotide
  Sense strand starting at position 1941 of SEQ ID NO: 1886403
acgggaugcucucgcgaga

SEQ ID NO: 2407277 - RNA, 19 nt, Artificial Sequence
  Description of Artificial Sequence: Synthetic oligonucleotide
  Antisense strand to SEQ ID NO: 2407276
ucucgcgagagcaucccgu

SEQ ID NO: 2407278 - RNA, 19 nt, Artificial Sequence
  Description of Artificial Sequence: Synthetic oligonucleotide
  Sense strand starting at position 1944 of SEQ ID NO: 1886403
ggaugcucucgcgagagga

SEQ ID NO: 2407279 - RNA, 19 nt, Artificial Sequence
  Description of Artificial Sequence: Synthetic oligonucleotide
  Antisense strand to SEQ ID NO: 2407278
uccucucgcgagagcaucc

SEQ ID NO: 2407280 - RNA, 19 nt, Artificial Sequence
  Description of Artificial Sequence: Synthetic oligonucleotide
  Sense strand starting at position 2621 of SEQ ID NO: 1886403
gcagcuucgcuggaaggua

SEQ ID NO: 2407281 - RNA, 19 nt, Artificial Sequence
  Description of Artificial Sequence: Synthetic oligonucleotide
  Antisense strand to SEQ ID NO: 2407280
uaccuuccagcgaagcugc

SEQ ID NO: 2407282 - RNA, 19 nt, Artificial Sequence
  Description of Artificial Sequence: Synthetic oligonucleotide
  Sense strand starting at position 2694 of SEQ ID NO: 1886403
gggugaggagccuacugua

SEQ ID NO: 2407283 - RNA, 19 nt, Artificial Sequence
  Description of Artificial Sequence: Synthetic oligonucleotide
  Antisense strand to SEQ ID NO: 2407282
uacaguaggcuccucaccc

SEQ ID NO: 2407284 - RNA, 19 nt, Artificial Sequence
  Description of Artificial Sequence: Synthetic oligonucleotide
  Sense strand starting at position 2697 of SEQ ID NO: 1886403
ugaggagccuacuguaaga

SEQ ID NO: 2407285 - RNA, 19 nt, Artificial Sequence
  Description of Artificial Sequence: Synthetic oligonucleotide
  Antisense strand to SEQ ID NO: 2407284
ucuuacaguaggcuccuca

SEQ ID NO: 2407286 - RNA, 19 nt, Artificial Sequence
  Description of Artificial Sequence: Synthetic oligonucleotide
  Sense strand starting at position 2755 of SEQ ID NO: 1886403
agaugaaacugguuuguuu

SEQ ID NO: 2407287 - RNA, 19 nt, Artificial Sequence
  Description of Artificial Sequence: Synthetic oligonucleotide
  Antisense strand to SEQ ID NO: 2407286
aaacaaaccaguuucaucu

SEQ ID NO: 2407288 - RNA, 19 nt, Artificial Sequence
  Description of Artificial Sequence: Synthetic oligonucleotide
  Sense strand starting at position 2773 of SEQ ID NO: 1886403
uugggaacuuuauguagga

SEQ ID NO: 2407289 - RNA, 19 nt, Artificial Sequence
  Description of Artificial Sequence: Synthetic oligonucleotide
  Antisense strand to SEQ ID NO: 2407288
uccuacauaaaguucccaa

SEQ ID NO: 2407290 - RNA, 19 nt, Artificial Sequence
  Description of Artificial Sequence: Synthetic oligonucleotide
  Sense strand starting at position 2777 of SEQ ID NO: 1886403
gaacuuuauguaggaggua

SEQ ID NO: 2407291 - RNA, 19 nt, Artificial Sequence
  Description of Artificial Sequence: Synthetic oligonucleotide
  Antisense strand to SEQ ID NO: 2407290
uaccuccuacauaaaguuc

SEQ ID NO: 2407292 - RNA, 19 nt, Artificial Sequence
  Description of Artificial Sequence: Synthetic oligonucleotide
  Sense strand starting at position 2778 of SEQ ID NO: 1886403
aacuuuauguaggagguaa

SEQ ID NO: 2407293 - RNA, 19 nt, Artificial Sequence
  Description of Artificial Sequence: Synthetic oligonucleotide
  Antisense strand to SEQ ID NO: 2407292
uuaccuccuacauaaaguu

SEQ ID NO: 2407294 - RNA, 19 nt, Artificial Sequence
  Description of Artificial Sequence: Synthetic oligonucleotide
  Sense strand starting at position 2840 of SEQ ID NO: 1886403
uaggucaguucccgaguga

SEQ ID NO: 2407295 - RNA, 19 nt, Artificial Sequence
  Description of Artificial Sequence: Synthetic oligonucleotide
  Antisense strand to SEQ ID NO: 2407294
ucacucgggaacugaccua

SEQ ID NO: 2407296 - RNA, 19 nt, Artificial Sequence
  Description of Artificial Sequence: Synthetic oligonucleotide
  Sense strand starting at position 2841 of SEQ ID NO: 1886403
aggucaguucccgagugau

SEQ ID NO: 2407297 - RNA, 19 nt, Artificial Sequence
  Description of Artificial Sequence: Synthetic oligonucleotide
  Antisense strand to SEQ ID NO: 2407296
aucacucgggaacugaccu

SEQ ID NO: 2407298 - RNA, 19 nt, Artificial Sequence
  Description of Artificial Sequence: Synthetic oligonucleotide
  Sense strand starting at position 2844 of SEQ ID NO: 1886403
ucaguucccgagugauaag

SEQ ID NO: 2407299 - RNA, 19 nt, Artificial Sequence
  Description of Artificial Sequence: Synthetic oligonucleotide
  Antisense strand to SEQ ID NO: 2407298
cuuaucacucgggaacuga

SEQ ID NO: 2407300 - RNA, 19 nt, Artificial Sequence
  Description of Artificial Sequence: Synthetic oligonucleotide
  Sense strand starting at position 2845 of SEQ ID NO: 1886403
caguucccgagugauaagu

SEQ ID NO: 2407301 - RNA, 19 nt, Artificial Sequence
  Description of Artificial Sequence: Synthetic oligonucleotide
  Antisense strand to SEQ ID NO: 2407300
acuuaucacucgggaacug

SEQ ID NO: 2407302 - RNA, 19 nt, Artificial Sequence
  Description of Artificial Sequence: Synthetic oligonucleotide
  Sense strand starting at position 2853 of SEQ ID NO: 1886403
gagugauaagugcguacca

SEQ ID NO: 2407303 - RNA, 19 nt, Artificial Sequence
  Description of Artificial Sequence: Synthetic oligonucleotide
  Antisense strand to SEQ ID NO: 2407302
ugguacgcacuuaucacuc

SEQ ID NO: 2407304 - RNA, 19 nt, Artificial Sequence
  Description of Artificial Sequence: Synthetic oligonucleotide
  Sense strand starting at position 2899 of SEQ ID NO: 1886403
gugugucucaccugagguu

SEQ ID NO: 2407305 - RNA, 19 nt, Artificial Sequence
  Description of Artificial Sequence: Synthetic oligonucleotide
  Antisense strand to SEQ ID NO: 2407304
aaccucaggugagacacac

SEQ ID NO: 2407306 - RNA, 19 nt, Artificial Sequence
  Description of Artificial Sequence: Synthetic oligonucleotide
  Sense strand starting at position 2930 of SEQ ID NO: 1886403
uggguaucuuggugccacu

SEQ ID NO: 2407307 - RNA, 19 nt, Artificial Sequence
  Description of Artificial Sequence: Synthetic oligonucleotide
  Antisense strand to SEQ ID NO: 2407306
aguggcaccaagauaccca

SEQ ID NO: 2407308 - RNA, 19 nt, Artificial Sequence
  Description of Artificial Sequence: Synthetic oligonucleotide
  Sense strand starting at position 3073 of SEQ ID NO: 1886403
gugcgacaaaggugucuuu

SEQ ID NO: 2407309 - RNA, 19 nt, Artificial Sequence
  Description of Artificial Sequence: Synthetic oligonucleotide
  Antisense strand to SEQ ID NO: 2407308
aaagacaccuuugucgcac

SEQ ID NO: 2407310 - RNA, 19 nt, Artificial Sequence
  Description of Artificial Sequence: Synthetic oligonucleotide
  Sense strand starting at position 3196 of SEQ ID NO: 1886403
uggagcuggaagcguuaaa

SEQ ID NO: 2407311 - RNA, 19 nt, Artificial Sequence
  Description of Artificial Sequence: Synthetic oligonucleotide
  Antisense strand to SEQ ID NO: 2407310
uuuaacgcuuccagcucca

SEQ ID NO: 2407312 - RNA, 19 nt, Artificial Sequence
  Description of Artificial Sequence: Synthetic oligonucleotide
  Sense strand starting at position 3267 of SEQ ID NO: 1886403
caguuauuuggccgaggca

SEQ ID NO: 2407313 - RNA, 19 nt, Artificial Sequence
  Description of Artificial Sequence: Synthetic oligonucleotide
  Antisense strand to SEQ ID NO: 2407312
ugccucggccaaauaacug

SEQ ID NO: 2407314 - RNA, 19 nt, Artificial Sequence
  Description of Artificial Sequence: Synthetic oligonucleotide
  Sense strand starting at position 3392 of SEQ ID NO: 1886403
ugaggucugugccuaccaa

SEQ ID NO: 2407315 - RNA, 19 nt, Artificial Sequence
  Description of Artificial Sequence: Synthetic oligonucleotide
  Antisense strand to SEQ ID NO: 2407314
uugguaggcacagaccuca

SEQ ID NO: 2407316 - RNA, 19 nt, Artificial Sequence
  Description of Artificial Sequence: Synthetic oligonucleotide
  Sense strand starting at position 3481 of SEQ ID NO: 1886403
aaggccuugcaguaggaau

SEQ ID NO: 2407317 - RNA, 19 nt, Artificial Sequence
  Description of Artificial Sequence: Synthetic oligonucleotide
  Antisense strand to SEQ ID NO: 2407316
auuccuacugcaaggccuu

SEQ ID NO: 2407318 - RNA, 19 nt, Artificial Sequence
  Description of Artificial Sequence: Synthetic oligonucleotide
  Sense strand starting at position 3488 of SEQ ID NO: 1886403
ugcaguaggaauugcagaa

SEQ ID NO: 2407319 - RNA, 19 nt, Artificial Sequence
  Description of Artificial Sequence: Synthetic oligonucleotide
  Antisense strand to SEQ ID NO: 2407318
uucugcaauuccuacugca

SEQ ID NO: 2407320 - RNA, 19 nt, Artificial Sequence
  Description of Artificial Sequence: Synthetic oligonucleotide
  Sense strand starting at position 3492 of SEQ ID NO: 1886403
guaggaauugcagaagggu

SEQ ID NO: 2407321 - RNA, 19 nt, Artificial Sequence
  Description of Artificial Sequence: Synthetic oligonucleotide
  Antisense strand to SEQ ID NO: 2407320
acccuucugcaauuccuac

SEQ ID NO: 2407322 - RNA, 19 nt, Artificial Sequence
  Description of Artificial Sequence: Synthetic oligonucleotide
  Sense strand starting at position 44 of SEQ ID NO: 1886404
uguugcaagaacgaguaau

SEQ ID NO: 2407323 - RNA, 19 nt, Artificial Sequence
  Description of Artificial Sequence: Synthetic oligonucleotide
  Antisense strand to SEQ ID NO: 2407322
auuacucguucuugcaaca

SEQ ID NO: 2407324 - RNA, 19 nt, Artificial Sequence
  Description of Artificial Sequence: Synthetic oligonucleotide
  Sense strand starting at position 54 of SEQ ID NO: 1886404
acgaguaaugaauguaaag

SEQ ID NO: 2407325 - RNA, 19 nt, Artificial Sequence
  Description of Artificial Sequence: Synthetic oligonucleotide
  Antisense strand to SEQ ID NO: 2407324
cuuuacauucauuacucgu

SEQ ID NO: 2407326 - RNA, 19 nt, Artificial Sequence
  Description of Artificial Sequence: Synthetic oligonucleotide
  Sense strand starting at position 84 of SEQ ID NO: 1886404
uugucugacacaugguaag

SEQ ID NO: 2407327 - RNA, 19 nt, Artificial Sequence
  Description of Artificial Sequence: Synthetic oligonucleotide
  Antisense strand to SEQ ID NO: 2407326
cuuaccaugugucagacaa

SEQ ID NO: 2407328 - RNA, 19 nt, Artificial Sequence
  Description of Artificial Sequence: Synthetic oligonucleotide
  Sense strand starting at position 232 of SEQ ID NO: 1886404
gcagcaggucaucagaaua

SEQ ID NO: 2407329 - RNA, 19 nt, Artificial Sequence
  Description of Artificial Sequence: Synthetic oligonucleotide
  Antisense strand to SEQ ID NO: 2407328
uauucugaugaccugcugc

SEQ ID NO: 2407330 - RNA, 19 nt, Artificial Sequence
  Description of Artificial Sequence: Synthetic oligonucleotide
  Sense strand starting at position 318 of SEQ ID NO: 1886404
uaaguucuggaagguaauu

SEQ ID NO: 2407331 - RNA, 19 nt, Artificial Sequence
  Description of Artificial Sequence: Synthetic oligonucleotide
  Antisense strand to SEQ ID NO: 2407330
aauuaccuuccagaacuua

SEQ ID NO: 2407332 - RNA, 19 nt, Artificial Sequence
  Description of Artificial Sequence: Synthetic oligonucleotide
  Sense strand starting at position 344 of SEQ ID NO: 1886404
auaugaugacuaugucucu

SEQ ID NO: 2407333 - RNA, 19 nt, Artificial Sequence
  Description of Artificial Sequence: Synthetic oligonucleotide
  Antisense strand to SEQ ID NO: 2407332
agagacauagucaucauau

SEQ ID NO: 2407334 - RNA, 19 nt, Artificial Sequence
  Description of Artificial Sequence: Synthetic oligonucleotide
  Sense strand starting at position 431 of SEQ ID NO: 1886404
uguaguguuaucgugguuu

SEQ ID NO: 2407335 - RNA, 19 nt, Artificial Sequence
  Description of Artificial Sequence: Synthetic oligonucleotide
  Antisense strand to SEQ ID NO: 2407334
aaaccacgauaacacuaca

SEQ ID NO: 2407336 - RNA, 19 nt, Artificial Sequence
  Description of Artificial Sequence: Synthetic oligonucleotide
  Sense strand starting at position 484 of SEQ ID NO: 1886404
gggaucuugucucuugaaa

SEQ ID NO: 2407337 - RNA, 19 nt, Artificial Sequence
  Description of Artificial Sequence: Synthetic oligonucleotide
  Antisense strand to SEQ ID NO: 2407336
uuucaagagacaagauccc

SEQ ID NO: 2407338 - RNA, 19 nt, Artificial Sequence
  Description of Artificial Sequence: Synthetic oligonucleotide
  Sense strand starting at position 495 of SEQ ID NO: 1886404
ucuugaaaggcuuauguua

SEQ ID NO: 2407339 - RNA, 19 nt, Artificial Sequence
  Description of Artificial Sequence: Synthetic oligonucleotide
  Antisense strand to SEQ ID NO: 2407338
uaacauaagccuuucaaga

SEQ ID NO: 2407340 - RNA, 19 nt, Artificial Sequence
  Description of Artificial Sequence: Synthetic oligonucleotide
  Sense strand starting at position 645 of SEQ ID NO: 1886404
augcauacacgugauacuu

SEQ ID NO: 2407341 - RNA, 19 nt, Artificial Sequence
  Description of Artificial Sequence: Synthetic oligonucleotide
  Antisense strand to SEQ ID NO: 2407340
aaguaucacguguaugcau

SEQ ID NO: 2407342 - RNA, 19 nt, Artificial Sequence
  Description of Artificial Sequence: Synthetic oligonucleotide
  Sense strand starting at position 694 of SEQ ID NO: 1886404
gggaaucaauuacugguau

SEQ ID NO: 2407343 - RNA, 19 nt, Artificial Sequence
  Description of Artificial Sequence: Synthetic oligonucleotide
  Antisense strand to SEQ ID NO: 2407342
auaccaguaauugauuccc

SEQ ID NO: 2407344 - RNA, 19 nt, Artificial Sequence
  Description of Artificial Sequence: Synthetic oligonucleotide
  Sense strand starting at position 1335 of SEQ ID NO: 1886404
uuacaaauguuaccuggaa

SEQ ID NO: 2407345 - RNA, 19 nt, Artificial Sequence
  Description of Artificial Sequence: Synthetic oligonucleotide
  Antisense strand to SEQ ID NO: 2407344
uuccagguaacauuuguaa

SEQ ID NO: 2407346 - RNA, 19 nt, Artificial Sequence
  Description of Artificial Sequence: Synthetic oligonucleotide
  Sense strand starting at position 2324 of SEQ ID NO: 1886404
guuccuaaccuugaagcua

SEQ ID NO: 2407347 - RNA, 19 nt, Artificial Sequence
  Description of Artificial Sequence: Synthetic oligonucleotide
  Antisense strand to SEQ ID NO: 2407346
uagcuucaagguuaggaac

SEQ ID NO: 2407348 - RNA, 19 nt, Artificial Sequence
  Description of Artificial Sequence: Synthetic oligonucleotide
  Sense strand starting at position 2519 of SEQ ID NO: 1886404
cugucacuaccucaguuua

SEQ ID NO: 2407349 - RNA, 19 nt, Artificial Sequence
  Description of Artificial Sequence: Synthetic oligonucleotide
  Antisense strand to SEQ ID NO: 2407348
uaaacugagguagugacag

SEQ ID NO: 2407350 - RNA, 19 nt, Artificial Sequence
  Description of Artificial Sequence: Synthetic oligonucleotide
  Sense strand starting at position 2571 of SEQ ID NO: 1886404
aggagagaugcuugcuaaa

SEQ ID NO: 2407351 - RNA, 19 nt, Artificial Sequence
  Description of Artificial Sequence: Synthetic oligonucleotide
  Antisense strand to SEQ ID NO: 2407350
uuuagcaagcaucucuccu

SEQ ID NO: 2407352 - RNA, 19 nt, Artificial Sequence
  Description of Artificial Sequence: Synthetic oligonucleotide
  Sense strand starting at position 2694 of SEQ ID NO: 1886404
uuugaagauugaguaauuc

SEQ ID NO: 2407353 - RNA, 19 nt, Artificial Sequence
  Description of Artificial Sequence: Synthetic oligonucleotide
  Antisense strand to SEQ ID NO: 2407352
gaauuacucaaucuucaaa

SEQ ID NO: 2407354 - RNA, 19 nt, Artificial Sequence
  Description of Artificial Sequence: Synthetic oligonucleotide
  Sense strand starting at position 2698 of SEQ ID NO: 1886404
aagauugaguaauucuugu

SEQ ID NO: 2407355 - RNA, 19 nt, Artificial Sequence
  Description of Artificial Sequence: Synthetic oligonucleotide
  Antisense strand to SEQ ID NO: 2407354
acaagaauuacucaaucuu

SEQ ID NO: 2407356 - RNA, 19 nt, Artificial Sequence
  Description of Artificial Sequence: Synthetic oligonucleotide
  Sense strand starting at position 2777 of SEQ ID NO: 1886404
cagccagaacagugauauu

SEQ ID NO: 2407357 - RNA, 19 nt, Artificial Sequence
  Description of Artificial Sequence: Synthetic oligonucleotide
  Antisense strand to SEQ ID NO: 2407356
aauaucacuguucuggcug

SEQ ID NO: 2407358 - RNA, 19 nt, Artificial Sequence
  Description of Artificial Sequence: Synthetic oligonucleotide
  Sense strand starting at position 2803 of SEQ ID NO: 1886404
ugaauacuauaugugacau

SEQ ID NO: 2407359 - RNA, 19 nt, Artificial Sequence
  Description of Artificial Sequence: Synthetic oligonucleotide
  Antisense strand to SEQ ID NO: 2407358
augucacauauaguauuca

SEQ ID NO: 2407360 - RNA, 19 nt, Artificial Sequence
  Description of Artificial Sequence: Synthetic oligonucleotide
  Sense strand starting at position 2814 of SEQ ID NO: 1886404
ugugacauacugcaguuaa

SEQ ID NO: 2407361 - RNA, 19 nt, Artificial Sequence
  Description of Artificial Sequence: Synthetic oligonucleotide
  Antisense strand to SEQ ID NO: 2407360
uuaacugcaguaugucaca

SEQ ID NO: 2407362 - RNA, 19 nt, Artificial Sequence
  Description of Artificial Sequence: Synthetic oligonucleotide
  Sense strand starting at position 3109 of SEQ ID NO: 1886404
caaacugauugagugacuu

SEQ ID NO: 2407363 - RNA, 19 nt, Artificial Sequence
  Description of Artificial Sequence: Synthetic oligonucleotide
  Antisense strand to SEQ ID NO: 2407362
aagucacucaaucaguuug

SEQ ID NO: 2407364 - RNA, 19 nt, Artificial Sequence
  Description of Artificial Sequence: Synthetic oligonucleotide
  Sense strand starting at position 3113 of SEQ ID NO: 1886404
cugauugagugacuuccua

SEQ ID NO: 2407365 - RNA, 19 nt, Artificial Sequence
  Description of Artificial Sequence: Synthetic oligonucleotide
  Antisense strand to SEQ ID NO: 2407364
uaggaagucacucaaucag

SEQ ID NO: 2407366 - RNA, 19 nt, Artificial Sequence
  Description of Artificial Sequence: Synthetic oligonucleotide
  Sense strand starting at position 3137 of SEQ ID NO: 1886404
ucugaaguugcuuagaacu

SEQ ID NO: 2407367 - RNA, 19 nt, Artificial Sequence
  Description of Artificial Sequence: Synthetic oligonucleotide
  Antisense strand to SEQ ID NO: 2407366
aguucuaagcaacuucaga

SEQ ID NO: 2407368 - RNA, 19 nt, Artificial Sequence
  Description of Artificial Sequence: Synthetic oligonucleotide
  Sense strand starting at position 3204 of SEQ ID NO: 1886404
cuguguaauguugauuaga

SEQ ID NO: 2407369 - RNA, 19 nt, Artificial Sequence
  Description of Artificial Sequence: Synthetic oligonucleotide
  Antisense strand to SEQ ID NO: 2407368
ucuaaucaacauuacacag

SEQ ID NO: 2407370 - RNA, 19 nt, Artificial Sequence
  Description of Artificial Sequence: Synthetic oligonucleotide
  Sense strand starting at position 3206 of SEQ ID NO: 1886404
guguaauguugauuagaag

SEQ ID NO: 2407371 - RNA, 19 nt, Artificial Sequence
  Description of Artificial Sequence: Synthetic oligonucleotide
  Antisense strand to SEQ ID NO: 2407370
cuucuaaucaacauuacac

SEQ ID NO: 2407372 - RNA, 19 nt, Artificial Sequence
  Description of Artificial Sequence: Synthetic oligonucleotide
  Sense strand starting at position 3213 of SEQ ID NO: 1886404
guugauuagaaggguccua

SEQ ID NO: 2407373 - RNA, 19 nt, Artificial Sequence
  Description of Artificial Sequence: Synthetic oligonucleotide
  Antisense strand to SEQ ID NO: 2407372
uaggacccuucuaaucaac

SEQ ID NO: 2407374 - RNA, 19 nt, Artificial Sequence
  Description of Artificial Sequence: Synthetic oligonucleotide
  Sense strand starting at position 3224 of SEQ ID NO: 1886404
ggguccuaccuagaaaugu

SEQ ID NO: 2407375 - RNA, 19 nt, Artificial Sequence
  Description of Artificial Sequence: Synthetic oligonucleotide
  Antisense strand to SEQ ID NO: 2407374
acauuucuagguaggaccc

SEQ ID NO: 2407376 - RNA, 19 nt, Artificial Sequence
  Description of Artificial Sequence: Synthetic oligonucleotide
  Sense strand starting at position 3300 of SEQ ID NO: 1886404
agggaaauuguugguauau

SEQ ID NO: 2407377 - RNA, 19 nt, Artificial Sequence
  Description of Artificial Sequence: Synthetic oligonucleotide
  Antisense strand to SEQ ID NO: 2407376
auauaccaacaauuucccu

SEQ ID NO: 2407378 - RNA, 19 nt, Artificial Sequence
  Description of Artificial Sequence: Synthetic oligonucleotide
  Sense strand starting at position 3301 of SEQ ID NO: 1886404
gggaaauuguugguauauc

SEQ ID NO: 2407379 - RNA, 19 nt, Artificial Sequence
  Description of Artificial Sequence: Synthetic oligonucleotide
  Antisense strand to SEQ ID NO: 2407378
gauauaccaacaauuuccc

SEQ ID NO: 2407380 - RNA, 19 nt, Artificial Sequence
  Description of Artificial Sequence: Synthetic oligonucleotide
  Sense strand starting at position 3430 of SEQ ID NO: 1886404
uuuggugaugugggaagau

SEQ ID NO: 2407381 - RNA, 19 nt, Artificial Sequence
  Description of Artificial Sequence: Synthetic oligonucleotide
  Antisense strand to SEQ ID NO: 2407380
aucuucccacaucaccaaa

SEQ ID NO: 2407382 - RNA, 19 nt, Artificial Sequence
  Description of Artificial Sequence: Synthetic oligonucleotide
  Sense strand starting at position 3481 of SEQ ID NO: 1886404
agaccuacaugucuacauu

SEQ ID NO: 2407383 - RNA, 19 nt, Artificial Sequence
  Description of Artificial Sequence: Synthetic oligonucleotide
  Antisense strand to SEQ ID NO: 2407382
aauguagacauguaggucu

SEQ ID NO: 2407384 - RNA, 19 nt, Artificial Sequence
  Description of Artificial Sequence: Synthetic oligonucleotide
  Sense strand starting at position 3545 of SEQ ID NO: 1886404
uaugcagaggucuauuagu

SEQ ID NO: 2407385 - RNA, 19 nt, Artificial Sequence
  Description of Artificial Sequence: Synthetic oligonucleotide
  Antisense strand to SEQ ID NO: 2407384
acuaauagaccucugcaua

SEQ ID NO: 2407386 - RNA, 19 nt, Artificial Sequence
  Description of Artificial Sequence: Synthetic oligonucleotide
  Sense strand starting at position 3627 of SEQ ID NO: 1886404
cauguugaaugacuguuau

SEQ ID NO: 2407387 - RNA, 19 nt, Artificial Sequence
  Description of Artificial Sequence: Synthetic oligonucleotide
  Antisense strand to SEQ ID NO: 2407386
auaacagucauucaacaug

SEQ ID NO: 2407388 - RNA, 19 nt, Artificial Sequence
  Description of Artificial Sequence: Synthetic oligonucleotide
  Sense strand starting at position 3652 of SEQ ID NO: 1886404
ggugcugugauauaaauga

SEQ ID NO: 2407389 - RNA, 19 nt, Artificial Sequence
  Description of Artificial Sequence: Synthetic oligonucleotide
  Antisense strand to SEQ ID NO: 2407388
ucauuuauaucacagcacc

SEQ ID NO: 2407390 - RNA, 19 nt, Artificial Sequence
  Description of Artificial Sequence: Synthetic oligonucleotide
  Sense strand starting at position 3656 of SEQ ID NO: 1886404
cugugauauaaaugaguag

SEQ ID NO: 2407391 - RNA, 19 nt, Artificial Sequence
  Description of Artificial Sequence: Synthetic oligonucleotide
  Antisense strand to SEQ ID NO: 2407390
cuacucauuuauaucacag

SEQ ID NO: 2407392 - RNA, 19 nt, Artificial Sequence
  Description of Artificial Sequence: Synthetic oligonucleotide
  Sense strand starting at position 3737 of SEQ ID NO: 1886404
auguuucucggugaaugag

SEQ ID NO: 2407393 - RNA, 19 nt, Artificial Sequence
  Description of Artificial Sequence: Synthetic oligonucleotide
  Antisense strand to SEQ ID NO: 2407392
cucauucaccgagaaacau

SEQ ID NO: 2407394 - RNA, 19 nt, Artificial Sequence
  Description of Artificial Sequence: Synthetic oligonucleotide
  Sense strand starting at position 3757 of SEQ ID NO: 1886404
ggcaaauacugggcacuaa

SEQ ID NO: 2407395 - RNA, 19 nt, Artificial Sequence
  Description of Artificial Sequence: Synthetic oligonucleotide
  Antisense strand to SEQ ID NO: 2407394
uuagugcccaguauuugcc

SEQ ID NO: 2407396 - RNA, 19 nt, Artificial Sequence
  Description of Artificial Sequence: Synthetic oligonucleotide
  Sense strand starting at position 3924 of SEQ ID NO: 1886404
agaauugccuucccugaga

SEQ ID NO: 2407397 - RNA, 19 nt, Artificial Sequence
  Description of Artificial Sequence: Synthetic oligonucleotide
  Antisense strand to SEQ ID NO: 2407396
ucucagggaaggcaauucu

SEQ ID NO: 2407398 - RNA, 19 nt, Artificial Sequence
  Description of Artificial Sequence: Synthetic oligonucleotide
  Sense strand starting at position 3940 of SEQ ID NO: 1886404
agagguggguuuaggaaau

SEQ ID NO: 2407399 - RNA, 19 nt, Artificial Sequence
  Description of Artificial Sequence: Synthetic oligonucleotide
  Antisense strand to SEQ ID NO: 2407398
auuuccuaaacccaccucu

SEQ ID NO: 2407400 - RNA, 19 nt, Artificial Sequence
  Description of Artificial Sequence: Synthetic oligonucleotide
  Sense strand starting at position 3946 of SEQ ID NO: 1886404
ggguuuaggaaauguggaa

SEQ ID NO: 2407401 - RNA, 19 nt, Artificial Sequence
  Description of Artificial Sequence: Synthetic oligonucleotide
  Antisense strand to SEQ ID NO: 2407400
uuccacauuuccuaaaccc

SEQ ID NO: 2407402 - RNA, 19 nt, Artificial Sequence
  Description of Artificial Sequence: Synthetic oligonucleotide
  Sense strand starting at position 137 of SEQ ID NO: 1886405
aggagacuuuggucaccua

SEQ ID NO: 2407403 - RNA, 19 nt, Artificial Sequence
  Description of Artificial Sequence: Synthetic oligonucleotide
  Antisense strand to SEQ ID NO: 2407402
uaggugaccaaagucuccu

SEQ ID NO: 2407404 - RNA, 19 nt, Artificial Sequence
  Description of Artificial Sequence: Synthetic oligonucleotide
  Sense strand starting at position 354 of SEQ ID NO: 1886405
caccacgugcuuuaucaga

SEQ ID NO: 2407405 - RNA, 19 nt, Artificial Sequence
  Description of Artificial Sequence: Synthetic oligonucleotide
  Antisense strand to SEQ ID NO: 2407404
ucugauaaagcacguggug

SEQ ID NO: 2407406 - RNA, 19 nt, Artificial Sequence
  Description of Artificial Sequence: Synthetic oligonucleotide
  Sense strand starting at position 356 of SEQ ID NO: 1886405
ccacgugcuuuaucagaag

SEQ ID NO: 2407407 - RNA, 19 nt, Artificial Sequence
  Description of Artificial Sequence: Synthetic oligonucleotide
  Antisense strand to SEQ ID NO: 2407406
cuucugauaaagcacgugg

SEQ ID NO: 2407408 - RNA, 19 nt, Artificial Sequence
  Description of Artificial Sequence: Synthetic oligonucleotide
  Sense strand starting at position 498 of SEQ ID NO: 1886405
uugggcaagugaucugcaa

SEQ ID NO: 2407409 - RNA, 19 nt, Artificial Sequence
  Description of Artificial Sequence: Synthetic oligonucleotide
  Antisense strand to SEQ ID NO: 2407408
uugcagaucacuugcccaa

SEQ ID NO: 2407410 - RNA, 19 nt, Artificial Sequence
  Description of Artificial Sequence: Synthetic oligonucleotide
  Sense strand starting at position 500 of SEQ ID NO: 1886405
gggcaagugaucugcaagu

SEQ ID NO: 2407411 - RNA, 19 nt, Artificial Sequence
  Description of Artificial Sequence: Synthetic oligonucleotide
  Antisense strand to SEQ ID NO: 2407410
acuugcagaucacuugccc

SEQ ID NO: 2407412 - RNA, 19 nt, Artificial Sequence
  Description of Artificial Sequence: Synthetic oligonucleotide
  Sense strand starting at position 555 of SEQ ID NO: 1886405
ggucucuguuucucuccaa

SEQ ID NO: 2407413 - RNA, 19 nt, Artificial Sequence
  Description of Artificial Sequence: Synthetic oligonucleotide
  Antisense strand to SEQ ID NO: 2407412
uuggagagaaacagagacc

SEQ ID NO: 2407414 - RNA, 19 nt, Artificial Sequence
  Description of Artificial Sequence: Synthetic oligonucleotide
  Sense strand starting at position 575 of SEQ ID NO: 1886405
ucaguccaaccgugaaagu

SEQ ID NO: 2407415 - RNA, 19 nt, Artificial Sequence
  Description of Artificial Sequence: Synthetic oligonucleotide
  Antisense strand to SEQ ID NO: 2407414
acuuucacgguuggacuga

SEQ ID NO: 2407416 - RNA, 19 nt, Artificial Sequence
  Description of Artificial Sequence: Synthetic oligonucleotide
  Sense strand starting at position 714 of SEQ ID NO: 1886405
cuguguuaccaugaccaca

SEQ ID NO: 2407417 - RNA, 19 nt, Artificial Sequence
  Description of Artificial Sequence: Synthetic oligonucleotide
  Antisense strand to SEQ ID NO: 2407416
uguggucaugguaacacag

SEQ ID NO: 2407418 - RNA, 19 nt, Artificial Sequence
  Description of Artificial Sequence: Synthetic oligonucleotide
  Sense strand starting at position 1558 of SEQ ID NO: 1886405
ccgaaagucugacuucuag

SEQ ID NO: 2407419 - RNA, 19 nt, Artificial Sequence
  Description of Artificial Sequence: Synthetic oligonucleotide
  Antisense strand to SEQ ID NO: 2407418
cuagaagucagacuuucgg

SEQ ID NO: 2407420 - RNA, 19 nt, Artificial Sequence
  Description of Artificial Sequence: Synthetic oligonucleotide
  Sense strand starting at position 1564 of SEQ ID NO: 1886405
gucugacuucuagaaccuu

SEQ ID NO: 2407421 - RNA, 19 nt, Artificial Sequence
  Description of Artificial Sequence: Synthetic oligonucleotide
  Antisense strand to SEQ ID NO: 2407420
aagguucuagaagucagac

SEQ ID NO: 2407422 - RNA, 19 nt, Artificial Sequence
  Description of Artificial Sequence: Synthetic oligonucleotide
  Sense strand starting at position 1575 of SEQ ID NO: 1886405
agaaccuuucggugcugau

SEQ ID NO: 2407423 - RNA, 19 nt, Artificial Sequence
  Description of Artificial Sequence: Synthetic oligonucleotide
  Antisense strand to SEQ ID NO: 2407422
aucagcaccgaaagguucu

SEQ ID NO: 2407424 - RNA, 19 nt, Artificial Sequence
  Description of Artificial Sequence: Synthetic oligonucleotide
  Sense strand starting at position 1733 of SEQ ID NO: 1886405
ucagaaugguuucucuguu

SEQ ID NO: 2407425 - RNA, 19 nt, Artificial Sequence
  Description of Artificial Sequence: Synthetic oligonucleotide
  Antisense strand to SEQ ID NO: 2407424
aacagagaaaccauucuga

SEQ ID NO: 2407426 - RNA, 19 nt, Artificial Sequence
  Description of Artificial Sequence: Synthetic oligonucleotide
  Sense strand starting at position 1734 of SEQ ID NO: 1886405
cagaaugguuucucuguuu

SEQ ID NO: 2407427 - RNA, 19 nt, Artificial Sequence
  Description of Artificial Sequence: Synthetic oligonucleotide
  Antisense strand to SEQ ID NO: 2407426
aaacagagaaaccauucug

SEQ ID NO: 2407428 - RNA, 19 nt, Artificial Sequence
  Description of Artificial Sequence: Synthetic oligonucleotide
  Sense strand starting at position 1743 of SEQ ID NO: 1886405
uucucuguuuaucuggaau

SEQ ID NO: 2407429 - RNA, 19 nt, Artificial Sequence
  Description of Artificial Sequence: Synthetic oligonucleotide
  Antisense strand to SEQ ID NO: 2407428
auuccagauaaacagagaa

SEQ ID NO: 2407430 - RNA, 19 nt, Artificial Sequence
  Description of Artificial Sequence: Synthetic oligonucleotide
  Sense strand starting at position 1775 of SEQ ID NO: 1886405
gagacugcacgcuaaauua

SEQ ID NO: 2407431 - RNA, 19 nt, Artificial Sequence
  Description of Artificial Sequence: Synthetic oligonucleotide
  Antisense strand to SEQ ID NO: 2407430
uaauuuagcgugcagucuc

SEQ ID NO: 2407432 - RNA, 19 nt, Artificial Sequence
  Description of Artificial Sequence: Synthetic oligonucleotide
  Sense strand starting at position 2189 of SEQ ID NO: 1886405
gacugaauuuggugaagac

SEQ ID NO: 2407433 - RNA, 19 nt, Artificial Sequence
  Description of Artificial Sequence: Synthetic oligonucleotide
  Antisense strand to SEQ ID NO: 2407432
gucuucaccaaauucaguc

SEQ ID NO: 2407434 - RNA, 19 nt, Artificial Sequence
  Description of Artificial Sequence: Synthetic oligonucleotide
  Sense strand starting at position 2205 of SEQ ID NO: 1886405
gacagaaaguugcacagaa

SEQ ID NO: 2407435 - RNA, 19 nt, Artificial Sequence
  Description of Artificial Sequence: Synthetic oligonucleotide
  Antisense strand to SEQ ID NO: 2407434
uucugugcaacuuucuguc

SEQ ID NO: 2407436 - RNA, 19 nt, Artificial Sequence
  Description of Artificial Sequence: Synthetic oligonucleotide
  Sense strand starting at position 2439 of SEQ ID NO: 1886405
cugaauuucucuggagauc

SEQ ID NO: 2407437 - RNA, 19 nt, Artificial Sequence
  Description of Artificial Sequence: Synthetic oligonucleotide
  Antisense strand to SEQ ID NO: 2407436
gaucuccagagaaauucag

SEQ ID NO: 2407438 - RNA, 19 nt, Artificial Sequence
  Description of Artificial Sequence: Synthetic oligonucleotide
  Sense strand starting at position 2540 of SEQ ID NO: 1886405
guacccuuguagucagaug

SEQ ID NO: 2407439 - RNA, 19 nt, Artificial Sequence
  Description of Artificial Sequence: Synthetic oligonucleotide
  Antisense strand to SEQ ID NO: 2407438
caucugacuacaaggguac

SEQ ID NO: 2407440 - RNA, 19 nt, Artificial Sequence
  Description of Artificial Sequence: Synthetic oligonucleotide
  Sense strand starting at position 2545 of SEQ ID NO: 1886405
cuuguagucagaugguuug

SEQ ID NO: 2407441 - RNA, 19 nt, Artificial Sequence
  Description of Artificial Sequence: Synthetic oligonucleotide
  Antisense strand to SEQ ID NO: 2407440
caaaccaucugacuacaag

SEQ ID NO: 2407442 - RNA, 19 nt, Artificial Sequence
  Description of Artificial Sequence: Synthetic oligonucleotide
  Sense strand starting at position 2607 of SEQ ID NO: 1886405
gggagaaaguuagugucuu

SEQ ID NO: 2407443 - RNA, 19 nt, Artificial Sequence
  Description of Artificial Sequence: Synthetic oligonucleotide
  Antisense strand to SEQ ID NO: 2407442
aagacacuaacuuucuccc

SEQ ID NO: 2407444 - RNA, 19 nt, Artificial Sequence
  Description of Artificial Sequence: Synthetic oligonucleotide
  Sense strand starting at position 2661 of SEQ ID NO: 1886405
gaggaagucucagcuuggu

SEQ ID NO: 2407445 - RNA, 19 nt, Artificial Sequence
  Description of Artificial Sequence: Synthetic oligonucleotide
  Antisense strand to SEQ ID NO: 2407444
accaagcugagacuuccuc

SEQ ID NO: 2407446 - RNA, 19 nt, Artificial Sequence
  Description of Artificial Sequence: Synthetic oligonucleotide
  Sense strand starting at position 2666 of SEQ ID NO: 1886405
agucucagcuuggugugaa

SEQ ID NO: 2407447 - RNA, 19 nt, Artificial Sequence
  Description of Artificial Sequence: Synthetic oligonucleotide
  Antisense strand to SEQ ID NO: 2407446
uucacaccaagcugagacu

SEQ ID NO: 2407448 - RNA, 19 nt, Artificial Sequence
  Description of Artificial Sequence: Synthetic oligonucleotide
  Sense strand starting at position 2669 of SEQ ID NO: 1886405
cucagcuuggugugaacau

SEQ ID NO: 2407449 - RNA, 19 nt, Artificial Sequence
  Description of Artificial Sequence: Synthetic oligonucleotide
  Antisense strand to SEQ ID NO: 2407448
auguucacaccaagcugag

SEQ ID NO: 2407450 - RNA, 19 nt, Artificial Sequence
  Description of Artificial Sequence: Synthetic oligonucleotide
  Sense strand starting at position 2678 of SEQ ID NO: 1886405
gugugaacaugucuuuaac

SEQ ID NO: 2407451 - RNA, 19 nt, Artificial Sequence
  Description of Artificial Sequence: Synthetic oligonucleotide
  Antisense strand to SEQ ID NO: 2407450
guuaaagacauguucacac

SEQ ID NO: 2407452 - RNA, 19 nt, Artificial Sequence
  Description of Artificial Sequence: Synthetic oligonucleotide
  Sense strand starting at position 2680 of SEQ ID NO: 1886405
gugaacaugucuuuaacac

SEQ ID NO: 2407453 - RNA, 19 nt, Artificial Sequence
  Description of Artificial Sequence: Synthetic oligonucleotide
  Antisense strand to SEQ ID NO: 2407452
guguuaaagacauguucac

SEQ ID NO: 2407454 - RNA, 19 nt, Artificial Sequence
  Description of Artificial Sequence: Synthetic oligonucleotide
  Sense strand starting at position 2791 of SEQ ID NO: 1886405
ucacucugcuuucuuguua

SEQ ID NO: 2407455 - RNA, 19 nt, Artificial Sequence
  Description of Artificial Sequence: Synthetic oligonucleotide
  Antisense strand to SEQ ID NO: 2407454
uaacaagaaagcagaguga

SEQ ID NO: 2407456 - RNA, 19 nt, Artificial Sequence
  Description of Artificial Sequence: Synthetic oligonucleotide
  Sense strand starting at position 2795 of SEQ ID NO: 1886405
ucugcuuucuuguuaaaug

SEQ ID NO: 2407457 - RNA, 19 nt, Artificial Sequence
  Description of Artificial Sequence: Synthetic oligonucleotide
  Antisense strand to SEQ ID NO: 2407456
cauuuaacaagaaagcaga

SEQ ID NO: 2407458 - RNA, 19 nt, Artificial Sequence
  Description of Artificial Sequence: Synthetic oligonucleotide
  Sense strand starting at position 2840 of SEQ ID NO: 1886405
cccuuuauaaugggacgua

SEQ ID NO: 2407459 - RNA, 19 nt, Artificial Sequence
  Description of Artificial Sequence: Synthetic oligonucleotide
  Antisense strand to SEQ ID NO: 2407458
uacgucccauuauaaaggg

SEQ ID NO: 2407460 - RNA, 19 nt, Artificial Sequence
  Description of Artificial Sequence: Synthetic oligonucleotide
  Sense strand starting at position 2843 of SEQ ID NO: 1886405
uuuauaaugggacguaaag

SEQ ID NO: 2407461 - RNA, 19 nt, Artificial Sequence
  Description of Artificial Sequence: Synthetic oligonucleotide
  Antisense strand to SEQ ID NO: 2407460
cuuuacgucccauuauaaa

SEQ ID NO: 2407462 - RNA, 19 nt, Artificial Sequence
  Description of Artificial Sequence: Synthetic oligonucleotide
  Sense strand starting at position 3424 of SEQ ID NO: 1886405
ucgagugugcccaggaguu

SEQ ID NO: 2407463 - RNA, 19 nt, Artificial Sequence
  Description of Artificial Sequence: Synthetic oligonucleotide
  Antisense strand to SEQ ID NO: 2407462
aacuccugggcacacucga

SEQ ID NO: 2407464 - RNA, 19 nt, Artificial Sequence
  Description of Artificial Sequence: Synthetic oligonucleotide
  Sense strand starting at position 3626 of SEQ ID NO: 1886405
aaaugaagguuuggaaaca

SEQ ID NO: 2407465 - RNA, 19 nt, Artificial Sequence
  Description of Artificial Sequence: Synthetic oligonucleotide
  Antisense strand to SEQ ID NO: 2407464
uguuuccaaaccuucauuu

SEQ ID NO: 2407466 - RNA, 19 nt, Artificial Sequence
  Description of Artificial Sequence: Synthetic oligonucleotide
  Sense strand starting at position 3627 of SEQ ID NO: 1886405
aaugaagguuuggaaacau

SEQ ID NO: 2407467 - RNA, 19 nt, Artificial Sequence
  Description of Artificial Sequence: Synthetic oligonucleotide
  Antisense strand to SEQ ID NO: 2407466
auguuuccaaaccuucauu

SEQ ID NO: 2407468 - RNA, 19 nt, Artificial Sequence
  Description of Artificial Sequence: Synthetic oligonucleotide
  Sense strand starting at position 3642 of SEQ ID NO: 1886405
acaugacuugugugccuca

SEQ ID NO: 2407469 - RNA, 19 nt, Artificial Sequence
  Description of Artificial Sequence: Synthetic oligonucleotide
  Antisense strand to SEQ ID NO: 2407468
ugaggcacacaagucaugu

SEQ ID NO: 2407470 - RNA, 19 nt, Artificial Sequence
  Description of Artificial Sequence: Synthetic oligonucleotide
  Sense strand starting at position 3647 of SEQ ID NO: 1886405
acuugugugccucaugcau

SEQ ID NO: 2407471 - RNA, 19 nt, Artificial Sequence
  Description of Artificial Sequence: Synthetic oligonucleotide
  Antisense strand to SEQ ID NO: 2407470
augcaugaggcacacaagu

SEQ ID NO: 2407472 - RNA, 19 nt, Artificial Sequence
  Description of Artificial Sequence: Synthetic oligonucleotide
  Sense strand starting at position 3753 of SEQ ID NO: 1886405
ccaugugugaaaugaggau

SEQ ID NO: 2407473 - RNA, 19 nt, Artificial Sequence
  Description of Artificial Sequence: Synthetic oligonucleotide
  Antisense strand to SEQ ID NO: 2407472
auccucauuucacacaugg

SEQ ID NO: 2407474 - RNA, 19 nt, Artificial Sequence
  Description of Artificial Sequence: Synthetic oligonucleotide
  Sense strand starting at position 3782 of SEQ ID NO: 1886405
uuuguaaggugauuacuuu

SEQ ID NO: 2407475 - RNA, 19 nt, Artificial Sequence
  Description of Artificial Sequence: Synthetic oligonucleotide
  Antisense strand to SEQ ID NO: 2407474
aaaguaaucaccuuacaaa

SEQ ID NO: 2407476 - RNA, 19 nt, Artificial Sequence
  Description of Artificial Sequence: Synthetic oligonucleotide
  Sense strand starting at position 3786 of SEQ ID NO: 1886405
uaaggugauuacuuugaag

SEQ ID NO: 2407477 - RNA, 19 nt, Artificial Sequence
  Description of Artificial Sequence: Synthetic oligonucleotide
  Antisense strand to SEQ ID NO: 2407476
cuucaaaguaaucaccuua

SEQ ID NO: 2407478 - RNA, 19 nt, Artificial Sequence
  Description of Artificial Sequence: Synthetic oligonucleotide
  Sense strand starting at position 3842 of SEQ ID NO: 1886405
gguagaaauugacaaauaa

SEQ ID NO: 2407479 - RNA, 19 nt, Artificial Sequence
  Description of Artificial Sequence: Synthetic oligonucleotide
  Antisense strand to SEQ ID NO: 2407478
uuauuugucaauuucuacc

SEQ ID NO: 2407480 - RNA, 19 nt, Artificial Sequence
  Description of Artificial Sequence: Synthetic oligonucleotide
  Sense strand starting at position 3910 of SEQ ID NO: 1886405
ggauauggugaaugucaga

SEQ ID NO: 2407481 - RNA, 19 nt, Artificial Sequence
  Description of Artificial Sequence: Synthetic oligonucleotide
  Antisense strand to SEQ ID NO: 2407480
ucugacauucaccauaucc

SEQ ID NO: 2407482 - RNA, 19 nt, Artificial Sequence
  Description of Artificial Sequence: Synthetic oligonucleotide
  Sense strand starting at position 194 of SEQ ID NO: 1886406
uuggaacccuucuaagaag

SEQ ID NO: 2407483 - RNA, 19 nt, Artificial Sequence
  Description of Artificial Sequence: Synthetic oligonucleotide
  Antisense strand to SEQ ID NO: 2407482
cuucuuagaaggguuccaa

SEQ ID NO: 2407484 - RNA, 19 nt, Artificial Sequence
  Description of Artificial Sequence: Synthetic oligonucleotide
  Sense strand starting at position 720 of SEQ ID NO: 1886406
ggugaaagugucuacaggu

SEQ ID NO: 2407485 - RNA, 19 nt, Artificial Sequence
  Description of Artificial Sequence: Synthetic oligonucleotide
  Antisense strand to SEQ ID NO: 2407484
accuguagacacuuucacc

SEQ ID NO: 2407486 - RNA, 19 nt, Artificial Sequence
  Description of Artificial Sequence: Synthetic oligonucleotide
  Sense strand starting at position 726 of SEQ ID NO: 1886406
agugucuacagguagacua

SEQ ID NO: 2407487 - RNA, 19 nt, Artificial Sequence
  Description of Artificial Sequence: Synthetic oligonucleotide
  Antisense strand to SEQ ID NO: 2407486
uagucuaccuguagacacu

SEQ ID NO: 2407488 - RNA, 19 nt, Artificial Sequence
  Description of Artificial Sequence: Synthetic oligonucleotide
  Sense strand starting at position 736 of SEQ ID NO: 1886406
gguagacuauugcugccua

SEQ ID NO: 2407489 - RNA, 19 nt, Artificial Sequence
  Description of Artificial Sequence: Synthetic oligonucleotide
  Antisense strand to SEQ ID NO: 2407488
uaggcagcaauagucuacc

SEQ ID NO: 2407490 - RNA, 19 nt, Artificial Sequence
  Description of Artificial Sequence: Synthetic oligonucleotide
  Sense strand starting at position 970 of SEQ ID NO: 1886406
aguugauaacguugugaau

SEQ ID NO: 2407491 - RNA, 19 nt, Artificial Sequence
  Description of Artificial Sequence: Synthetic oligonucleotide
  Antisense strand to SEQ ID NO: 2407490
auucacaacguuaucaacu

SEQ ID NO: 2407492 - RNA, 19 nt, Artificial Sequence
  Description of Artificial Sequence: Synthetic oligonucleotide
  Sense strand starting at position 1048 of SEQ ID NO: 1886406
cugaaagccuuagaagaau

SEQ ID NO: 2407493 - RNA, 19 nt, Artificial Sequence
  Description of Artificial Sequence: Synthetic oligonucleotide
  Antisense strand to SEQ ID NO: 2407492
auucuucuaaggcuuucag

SEQ ID NO: 2407494 - RNA, 19 nt, Artificial Sequence
  Description of Artificial Sequence: Synthetic oligonucleotide
  Sense strand starting at position 1202 of SEQ ID NO: 1886406
cuggguuucuaccuaagaa

SEQ ID NO: 2407495 - RNA, 19 nt, Artificial Sequence
  Description of Artificial Sequence: Synthetic oligonucleotide
  Antisense strand to SEQ ID NO: 2407494
uucuuagguagaaacccag

SEQ ID NO: 2407496 - RNA, 19 nt, Artificial Sequence
  Description of Artificial Sequence: Synthetic oligonucleotide
  Sense strand starting at position 1310 of SEQ ID NO: 1886406
auuacauaaucagggaauu

SEQ ID NO: 2407497 - RNA, 19 nt, Artificial Sequence
  Description of Artificial Sequence: Synthetic oligonucleotide
  Antisense strand to SEQ ID NO: 2407496
aauucccugauuauguaau

SEQ ID NO: 2407498 - RNA, 19 nt, Artificial Sequence
  Description of Artificial Sequence: Synthetic oligonucleotide
  Sense strand starting at position 1324 of SEQ ID NO: 1886406
gaauuuccgccuggacagu

SEQ ID NO: 2407499 - RNA, 19 nt, Artificial Sequence
  Description of Artificial Sequence: Synthetic oligonucleotide
  Antisense strand to SEQ ID NO: 2407498
acuguccaggcggaaauuc

SEQ ID NO: 2407500 - RNA, 19 nt, Artificial Sequence
  Description of Artificial Sequence: Synthetic oligonucleotide
  Sense strand starting at position 1358 of SEQ ID NO: 1886406
acguaauuguagccaauca

SEQ ID NO: 2407501 - RNA, 19 nt, Artificial Sequence
  Description of Artificial Sequence: Synthetic oligonucleotide
  Antisense strand to SEQ ID NO: 2407500
ugauuggcuacaauuacgu

SEQ ID NO: 2407502 - RNA, 19 nt, Artificial Sequence
  Description of Artificial Sequence: Synthetic oligonucleotide
  Sense strand starting at position 1484 of SEQ ID NO: 1886406
ggucguuauuugcucagau

SEQ ID NO: 2407503 - RNA, 19 nt, Artificial Sequence
  Description of Artificial Sequence: Synthetic oligonucleotide
  Antisense strand to SEQ ID NO: 2407502
aucugagcaaauaacgacc

SEQ ID NO: 2407504 - RNA, 19 nt, Artificial Sequence
  Description of Artificial Sequence: Synthetic oligonucleotide
  Sense strand starting at position 1485 of SEQ ID NO: 1886406
gucguuauuugcucagaua

SEQ ID NO: 2407505 - RNA, 19 nt, Artificial Sequence
  Description of Artificial Sequence: Synthetic oligonucleotide
  Antisense strand to SEQ ID NO: 2407504
uaucugagcaaauaacgac

SEQ ID NO: 2407506 - RNA, 19 nt, Artificial Sequence
  Description of Artificial Sequence: Synthetic oligonucleotide
  Sense strand starting at position 2165 of SEQ ID NO: 1886406
cugaaugaggccugaauga

SEQ ID NO: 2407507 - RNA, 19 nt, Artificial Sequence
  Description of Artificial Sequence: Synthetic oligonucleotide
  Antisense strand to SEQ ID NO: 2407506
ucauucaggccucauucag

SEQ ID NO: 2407508 - RNA, 19 nt, Artificial Sequence
  Description of Artificial Sequence: Synthetic oligonucleotide
  Sense strand starting at position 2244 of SEQ ID NO: 1886406
uccggacauugguauuuaa

SEQ ID NO: 2407509 - RNA, 19 nt, Artificial Sequence
  Description of Artificial Sequence: Synthetic oligonucleotide
  Antisense strand to SEQ ID NO: 2407508
uuaaauaccaauguccgga

SEQ ID NO: 2407510 - RNA, 19 nt, Artificial Sequence
  Description of Artificial Sequence: Synthetic oligonucleotide
  Sense strand starting at position 2254 of SEQ ID NO: 1886406
gguauuuaacuuugcucau

SEQ ID NO: 2407511 - RNA, 19 nt, Artificial Sequence
  Description of Artificial Sequence: Synthetic oligonucleotide
  Antisense strand to SEQ ID NO: 2407510
augagcaaaguuaaauacc

SEQ ID NO: 2407512 - RNA, 19 nt, Artificial Sequence
  Description of Artificial Sequence: Synthetic oligonucleotide
  Sense strand starting at position 2411 of SEQ ID NO: 1886406
gagggaguccucuaaguca

SEQ ID NO: 2407513 - RNA, 19 nt, Artificial Sequence
  Description of Artificial Sequence: Synthetic oligonucleotide
  Antisense strand to SEQ ID NO: 2407512
ugacuuagaggacucccuc

SEQ ID NO: 2407514 - RNA, 19 nt, Artificial Sequence
  Description of Artificial Sequence: Synthetic oligonucleotide
  Sense strand starting at position 2414 of SEQ ID NO: 1886406
ggaguccucuaagucagaa

SEQ ID NO: 2407515 - RNA, 19 nt, Artificial Sequence
  Description of Artificial Sequence: Synthetic oligonucleotide
  Antisense strand to SEQ ID NO: 2407514
uucugacuuagaggacucc

SEQ ID NO: 2407516 - RNA, 19 nt, Artificial Sequence
  Description of Artificial Sequence: Synthetic oligonucleotide
  Sense strand starting at position 2457 of SEQ ID NO: 1886406
ccgcaugugucauuuacag

SEQ ID NO: 2407517 - RNA, 19 nt, Artificial Sequence
  Description of Artificial Sequence: Synthetic oligonucleotide
  Antisense strand to SEQ ID NO: 2407516
cuguaaaugacacaugcgg

SEQ ID NO: 2407518 - RNA, 19 nt, Artificial Sequence
  Description of Artificial Sequence: Synthetic oligonucleotide
  Sense strand starting at position 2518 of SEQ ID NO: 1886406
guaauaccuuaacccgaua

SEQ ID NO: 2407519 - RNA, 19 nt, Artificial Sequence
  Description of Artificial Sequence: Synthetic oligonucleotide
  Antisense strand to SEQ ID NO: 2407518
uaucggguuaagguauuac

SEQ ID NO: 2407520 - RNA, 19 nt, Artificial Sequence
  Description of Artificial Sequence: Synthetic oligonucleotide
  Sense strand starting at position 2555 of SEQ ID NO: 1886406
ucaaauaugugagcaauau

SEQ ID NO: 2407521 - RNA, 19 nt, Artificial Sequence
  Description of Artificial Sequence: Synthetic oligonucleotide
  Antisense strand to SEQ ID NO: 2407520
auauugcucacauauuuga

SEQ ID NO: 2407522 - RNA, 19 nt, Artificial Sequence
  Description of Artificial Sequence: Synthetic oligonucleotide
  Sense strand starting at position 2593 of SEQ ID NO: 1886406
accagagaaugcuucuuaa

SEQ ID NO: 2407523 - RNA, 19 nt, Artificial Sequence
  Description of Artificial Sequence: Synthetic oligonucleotide
  Antisense strand to SEQ ID NO: 2407522
uuaagaagcauucucuggu

SEQ ID NO: 2407524 - RNA, 19 nt, Artificial Sequence
  Description of Artificial Sequence: Synthetic oligonucleotide
  Sense strand starting at position 2596 of SEQ ID NO: 1886406
agagaaugcuucuuaaguu

SEQ ID NO: 2407525 - RNA, 19 nt, Artificial Sequence
  Description of Artificial Sequence: Synthetic oligonucleotide
  Antisense strand to SEQ ID NO: 2407524
aacuuaagaagcauucucu

SEQ ID NO: 2407526 - RNA, 19 nt, Artificial Sequence
  Description of Artificial Sequence: Synthetic oligonucleotide
  Sense strand starting at position 2628 of SEQ ID NO: 1886406
cuuguaaagucacucugua

SEQ ID NO: 2407527 - RNA, 19 nt, Artificial Sequence
  Description of Artificial Sequence: Synthetic oligonucleotide
  Antisense strand to SEQ ID NO: 2407526
uacagagugacuuuacaag

SEQ ID NO: 2407528 - RNA, 19 nt, Artificial Sequence
  Description of Artificial Sequence: Synthetic oligonucleotide
  Sense strand starting at position 2756 of SEQ ID NO: 1886406
gucuaaccucagggaaauc

SEQ ID NO: 2407529 - RNA, 19 nt, Artificial Sequence
  Description of Artificial Sequence: Synthetic oligonucleotide
  Antisense strand to SEQ ID NO: 2407528
gauuucccugagguuagac

SEQ ID NO: 2407530 - RNA, 19 nt, Artificial Sequence
  Description of Artificial Sequence: Synthetic oligonucleotide
  Sense strand starting at position 2859 of SEQ ID NO: 1886406
ggcagugcccagugagaga

SEQ ID NO: 2407531 - RNA, 19 nt, Artificial Sequence
  Description of Artificial Sequence: Synthetic oligonucleotide
  Antisense strand to SEQ ID NO: 2407530
ucucucacugggcacugcc

SEQ ID NO: 2407532 - RNA, 19 nt, Artificial Sequence
  Description of Artificial Sequence: Synthetic oligonucleotide
  Sense strand starting at position 3141 of SEQ ID NO: 1886406
gggacugugugaguuuaag

SEQ ID NO: 2407533 - RNA, 19 nt, Artificial Sequence
  Description of Artificial Sequence: Synthetic oligonucleotide
  Antisense strand to SEQ ID NO: 2407532
cuuaaacucacacaguccc

SEQ ID NO: 2407534 - RNA, 19 nt, Artificial Sequence
  Description of Artificial Sequence: Synthetic oligonucleotide
  Sense strand starting at position 3151 of SEQ ID NO: 1886406
gaguuuaagcaccaagcau

SEQ ID NO: 2407535 - RNA, 19 nt, Artificial Sequence
  Description of Artificial Sequence: Synthetic oligonucleotide
  Antisense strand to SEQ ID NO: 2407534
augcuuggugcuuaaacuc

SEQ ID NO: 2407536 - RNA, 19 nt, Artificial Sequence
  Description of Artificial Sequence: Synthetic oligonucleotide
  Sense strand starting at position 3262 of SEQ ID NO: 1886406
uucuguuugccagguaaca

SEQ ID NO: 2407537 - RNA, 19 nt, Artificial Sequence
  Description of Artificial Sequence: Synthetic oligonucleotide
  Antisense strand to SEQ ID NO: 2407536
uguuaccuggcaaacagaa

SEQ ID NO: 2407538 - RNA, 19 nt, Artificial Sequence
  Description of Artificial Sequence: Synthetic oligonucleotide
  Sense strand starting at position 3289 of SEQ ID NO: 1886406
ugaccaaccugucauuuga

SEQ ID NO: 2407539 - RNA, 19 nt, Artificial Sequence
  Description of Artificial Sequence: Synthetic oligonucleotide
  Antisense strand to SEQ ID NO: 2407538
ucaaaugacagguugguca

SEQ ID NO: 2407540 - RNA, 19 nt, Artificial Sequence
  Description of Artificial Sequence: Synthetic oligonucleotide
  Sense strand starting at position 3300 of SEQ ID NO: 1886406
ucauuugaauccuggcaac

SEQ ID NO: 2407541 - RNA, 19 nt, Artificial Sequence
  Description of Artificial Sequence: Synthetic oligonucleotide
  Antisense strand to SEQ ID NO: 2407540
guugccaggauucaaauga

SEQ ID NO: 2407542 - RNA, 19 nt, Artificial Sequence
  Description of Artificial Sequence: Synthetic oligonucleotide
  Sense strand starting at position 3565 of SEQ ID NO: 1886406
augugcuuguucucaugga

SEQ ID NO: 2407543 - RNA, 19 nt, Artificial Sequence
  Description of Artificial Sequence: Synthetic oligonucleotide
  Antisense strand to SEQ ID NO: 2407542
uccaugagaacaagcacau

SEQ ID NO: 2407544 - RNA, 19 nt, Artificial Sequence
  Description of Artificial Sequence: Synthetic oligonucleotide
  Sense strand starting at position 3580 of SEQ ID NO: 1886406
uggagauggcaggguucua

SEQ ID NO: 2407545 - RNA, 19 nt, Artificial Sequence
  Description of Artificial Sequence: Synthetic oligonucleotide
  Antisense strand to SEQ ID NO: 2407544
uagaacccugccaucucca

SEQ ID NO: 2407546 - RNA, 19 nt, Artificial Sequence
  Description of Artificial Sequence: Synthetic oligonucleotide
  Sense strand starting at position 3648 of SEQ ID NO: 1886406
gucacauugccauauugau

SEQ ID NO: 2407547 - RNA, 19 nt, Artificial Sequence
  Description of Artificial Sequence: Synthetic oligonucleotide
  Antisense strand to SEQ ID NO: 2407546
aucaauauggcaaugugac

SEQ ID NO: 2407548 - RNA, 19 nt, Artificial Sequence
  Description of Artificial Sequence: Synthetic oligonucleotide
  Sense strand starting at position 3669 of SEQ ID NO: 1886406
cuuucuauugcccagagca

SEQ ID NO: 2407549 - RNA, 19 nt, Artificial Sequence
  Description of Artificial Sequence: Synthetic oligonucleotide
  Antisense strand to SEQ ID NO: 2407548
ugcucugggcaauagaaag

SEQ ID NO: 2407550 - RNA, 19 nt, Artificial Sequence
  Description of Artificial Sequence: Synthetic oligonucleotide
  Sense strand starting at position 3671 of SEQ ID NO: 1886406
uucuauugcccagagcaaa

SEQ ID NO: 2407551 - RNA, 19 nt, Artificial Sequence
  Description of Artificial Sequence: Synthetic oligonucleotide
  Antisense strand to SEQ ID NO: 2407550
uuugcucugggcaauagaa

SEQ ID NO: 2407552 - RNA, 19 nt, Artificial Sequence
  Description of Artificial Sequence: Synthetic oligonucleotide
  Sense strand starting at position 3702 of SEQ ID NO: 1886406
agauccaagcgucaggaaa

SEQ ID NO: 2407553 - RNA, 19 nt, Artificial Sequence
  Description of Artificial Sequence: Synthetic oligonucleotide
  Antisense strand to SEQ ID NO: 2407552
uuuccugacgcuuggaucu

SEQ ID NO: 2407554 - RNA, 19 nt, Artificial Sequence
  Description of Artificial Sequence: Synthetic oligonucleotide
  Sense strand starting at position 3813 of SEQ ID NO: 1886406
uucuuacagcaagguuuau

SEQ ID NO: 2407555 - RNA, 19 nt, Artificial Sequence
  Description of Artificial Sequence: Synthetic oligonucleotide
  Antisense strand to SEQ ID NO: 2407554
auaaaccuugcuguaagaa

SEQ ID NO: 2407556 - RNA, 19 nt, Artificial Sequence
  Description of Artificial Sequence: Synthetic oligonucleotide
  Sense strand starting at position 3828 of SEQ ID NO: 1886406
uuauauaacuguuccaagu

SEQ ID NO: 2407557 - RNA, 19 nt, Artificial Sequence
  Description of Artificial Sequence: Synthetic oligonucleotide
  Antisense strand to SEQ ID NO: 2407556
acuuggaacaguuauauaa

SEQ ID NO: 2407558 - RNA, 19 nt, Artificial Sequence
  Description of Artificial Sequence: Synthetic oligonucleotide
  Sense strand starting at position 3899 of SEQ ID NO: 1886406
ggaucaacuuugccugacu

SEQ ID NO: 2407559 - RNA, 19 nt, Artificial Sequence
  Description of Artificial Sequence: Synthetic oligonucleotide
  Antisense strand to SEQ ID NO: 2407558
agucaggcaaaguugaucc

SEQ ID NO: 2407560 - RNA, 19 nt, Artificial Sequence
  Description of Artificial Sequence: Synthetic oligonucleotide
  Sense strand starting at position 3961 of SEQ ID NO: 1886406
ucccuaggccuuugagauc

SEQ ID NO: 2407561 - RNA, 19 nt, Artificial Sequence
  Description of Artificial Sequence: Synthetic oligonucleotide
  Antisense strand to SEQ ID NO: 2407560
gaucucaaaggccuaggga

SEQ ID NO: 2407562 - RNA, 19 nt, Artificial Sequence
  Description of Artificial Sequence: Synthetic oligonucleotide
  Sense strand starting at position 304 of SEQ ID NO: 1886407
agcgcucucaucuguaaag

SEQ ID NO: 2407563 - RNA, 19 nt, Artificial Sequence
  Description of Artificial Sequence: Synthetic oligonucleotide
  Antisense strand to SEQ ID NO: 2407562
cuuuacagaugagagcgcu

SEQ ID NO: 2407564 - RNA, 19 nt, Artificial Sequence
  Description of Artificial Sequence: Synthetic oligonucleotide
  Sense strand starting at position 305 of SEQ ID NO: 1886407
gcgcucucaucuguaaagu

SEQ ID NO: 2407565 - RNA, 19 nt, Artificial Sequence
  Description of Artificial Sequence: Synthetic oligonucleotide
  Antisense strand to SEQ ID NO: 2407564
acuuuacagaugagagcgc

SEQ ID NO: 2407566 - RNA, 19 nt, Artificial Sequence
  Description of Artificial Sequence: Synthetic oligonucleotide
  Sense strand starting at position 306 of SEQ ID NO: 1886407
cgcucucaucuguaaagug

SEQ ID NO: 2407567 - RNA, 19 nt, Artificial Sequence
  Description of Artificial Sequence: Synthetic oligonucleotide
  Antisense strand to SEQ ID NO: 2407566
cacuuuacagaugagagcg

SEQ ID NO: 2407568 - RNA, 19 nt, Artificial Sequence
  Description of Artificial Sequence: Synthetic oligonucleotide
  Sense strand starting at position 344 of SEQ ID NO: 1886407
ccaaguuccugggaucuaa

SEQ ID NO: 2407569 - RNA, 19 nt, Artificial Sequence
  Description of Artificial Sequence: Synthetic oligonucleotide
  Antisense strand to SEQ ID NO: 2407568
uuagaucccaggaacuugg

SEQ ID NO: 2407570 - RNA, 19 nt, Artificial Sequence
  Description of Artificial Sequence: Synthetic oligonucleotide
  Sense strand starting at position 348 of SEQ ID NO: 1886407
guuccugggaucuaagcaa

SEQ ID NO: 2407571 - RNA, 19 nt, Artificial Sequence
  Description of Artificial Sequence: Synthetic oligonucleotide
  Antisense strand to SEQ ID NO: 2407570
uugcuuagaucccaggaac

SEQ ID NO: 2407572 - RNA, 19 nt, Artificial Sequence
  Description of Artificial Sequence: Synthetic oligonucleotide
  Sense strand starting at position 2035 of SEQ ID NO: 1886407
ucuggaguucagcgugauc

SEQ ID NO: 2407573 - RNA, 19 nt, Artificial Sequence
  Description of Artificial Sequence: Synthetic oligonucleotide
  Antisense strand to SEQ ID NO: 2407572
gaucacgcugaacuccaga

SEQ ID NO: 2407574 - RNA, 19 nt, Artificial Sequence
  Description of Artificial Sequence: Synthetic oligonucleotide
  Sense strand starting at position 2037 of SEQ ID NO: 1886407
uggaguucagcgugaucaa

SEQ ID NO: 2407575 - RNA, 19 nt, Artificial Sequence
  Description of Artificial Sequence: Synthetic oligonucleotide
  Antisense strand to SEQ ID NO: 2407574
uugaucacgcugaacucca

SEQ ID NO: 2407576 - RNA, 19 nt, Artificial Sequence
  Description of Artificial Sequence: Synthetic oligonucleotide
  Sense strand starting at position 2038 of SEQ ID NO: 1886407
ggaguucagcgugaucaag

SEQ ID NO: 2407577 - RNA, 19 nt, Artificial Sequence
  Description of Artificial Sequence: Synthetic oligonucleotide
  Antisense strand to SEQ ID NO: 2407576
cuugaucacgcugaacucc

SEQ ID NO: 2407578 - RNA, 19 nt, Artificial Sequence
  Description of Artificial Sequence: Synthetic oligonucleotide
  Sense strand starting at position 2267 of SEQ ID NO: 1886407
cugugauggugucuuuaag

SEQ ID NO: 2407579 - RNA, 19 nt, Artificial Sequence
  Description of Artificial Sequence: Synthetic oligonucleotide
  Antisense strand to SEQ ID NO: 2407578
cuuaaagacaccaucacag

SEQ ID NO: 2407580 - RNA, 19 nt, Artificial Sequence
  Description of Artificial Sequence: Synthetic oligonucleotide
  Sense strand starting at position 2281 of SEQ ID NO: 1886407
uuaagaggcccuuagguuu

SEQ ID NO: 2407581 - RNA, 19 nt, Artificial Sequence
  Description of Artificial Sequence: Synthetic oligonucleotide
  Antisense strand to SEQ ID NO: 2407580
aaaccuaagggccucuuaa

SEQ ID NO: 2407582 - RNA, 19 nt, Artificial Sequence
  Description of Artificial Sequence: Synthetic oligonucleotide
  Sense strand starting at position 2319 of SEQ ID NO: 1886407
gagagcuuauggcacagua

SEQ ID NO: 2407583 - RNA, 19 nt, Artificial Sequence
  Description of Artificial Sequence: Synthetic oligonucleotide
  Antisense strand to SEQ ID NO: 2407582
uacugugccauaagcucuc

SEQ ID NO: 2407584 - RNA, 19 nt, Artificial Sequence
  Description of Artificial Sequence: Synthetic oligonucleotide
  Sense strand starting at position 2321 of SEQ ID NO: 1886407
gagcuuauggcacaguacu

SEQ ID NO: 2407585 - RNA, 19 nt, Artificial Sequence
  Description of Artificial Sequence: Synthetic oligonucleotide
  Antisense strand to SEQ ID NO: 2407584
aguacugugccauaagcuc

SEQ ID NO: 2407586 - RNA, 19 nt, Artificial Sequence
  Description of Artificial Sequence: Synthetic oligonucleotide
  Sense strand starting at position 2396 of SEQ ID NO: 1886407
uagggugcuuugccaacaa

SEQ ID NO: 2407587 - RNA, 19 nt, Artificial Sequence
  Description of Artificial Sequence: Synthetic oligonucleotide
  Antisense strand to SEQ ID NO: 2407586
uuguuggcaaagcacccua

SEQ ID NO: 2407588 - RNA, 19 nt, Artificial Sequence
  Description of Artificial Sequence: Synthetic oligonucleotide
  Sense strand starting at position 2591 of SEQ ID NO: 1886407
guggcaccgugccuauaau

SEQ ID NO: 2407589 - RNA, 19 nt, Artificial Sequence
  Description of Artificial Sequence: Synthetic oligonucleotide
  Antisense strand to SEQ ID NO: 2407588
auuauaggcacggugccac

SEQ ID NO: 2407590 - RNA, 19 nt, Artificial Sequence
  Description of Artificial Sequence: Synthetic oligonucleotide
  Sense strand starting at position 2816 of SEQ ID NO: 1886407
agcacucugugacuacaaa

SEQ ID NO: 2407591 - RNA, 19 nt, Artificial Sequence
  Description of Artificial Sequence: Synthetic oligonucleotide
  Antisense strand to SEQ ID NO: 2407590
uuuguagucacagagugcu

SEQ ID NO: 2407592 - RNA, 19 nt, Artificial Sequence
  Description of Artificial Sequence: Synthetic oligonucleotide
  Sense strand starting at position 2915 of SEQ ID NO: 1886407
ccucaaagacucugcaaga

SEQ ID NO: 2407593 - RNA, 19 nt, Artificial Sequence
  Description of Artificial Sequence: Synthetic oligonucleotide
  Antisense strand to SEQ ID NO: 2407592
ucuugcagagucuuugagg

SEQ ID NO: 2407594 - RNA, 19 nt, Artificial Sequence
  Description of Artificial Sequence: Synthetic oligonucleotide
  Sense strand starting at position 3040 of SEQ ID NO: 1886407
uuuguuguggaauguuuau

SEQ ID NO: 2407595 - RNA, 19 nt, Artificial Sequence
  Description of Artificial Sequence: Synthetic oligonucleotide
  Antisense strand to SEQ ID NO: 2407594
auaaacauuccacaacaaa

SEQ ID NO: 2407596 - RNA, 19 nt, Artificial Sequence
  Description of Artificial Sequence: Synthetic oligonucleotide
  Sense strand starting at position 3046 of SEQ ID NO: 1886407
guggaauguuuauaacauu

SEQ ID NO: 2407597 - RNA, 19 nt, Artificial Sequence
  Description of Artificial Sequence: Synthetic oligonucleotide
  Antisense strand to SEQ ID NO: 2407596
aauguuauaaacauuccac

SEQ ID NO: 2407598 - RNA, 19 nt, Artificial Sequence
  Description of Artificial Sequence: Synthetic oligonucleotide
  Sense strand starting at position 3060 of SEQ ID NO: 1886407
acauuuacauguggauuaa

SEQ ID NO: 2407599 - RNA, 19 nt, Artificial Sequence
  Description of Artificial Sequence: Synthetic oligonucleotide
  Antisense strand to SEQ ID NO: 2407598
uuaauccacauguaaaugu

SEQ ID NO: 2407600 - RNA, 19 nt, Artificial Sequence
  Description of Artificial Sequence: Synthetic oligonucleotide
  Sense strand starting at position 3070 of SEQ ID NO: 1886407
guggauuaaguauacuauu

SEQ ID NO: 2407601 - RNA, 19 nt, Artificial Sequence
  Description of Artificial Sequence: Synthetic oligonucleotide
  Antisense strand to SEQ ID NO: 2407600
aauaguauacuuaauccac

SEQ ID NO: 2407602 - RNA, 19 nt, Artificial Sequence
  Description of Artificial Sequence: Synthetic oligonucleotide
  Sense strand starting at position 3136 of SEQ ID NO: 1886407
ugugcucacuacugaguga

SEQ ID NO: 2407603 - RNA, 19 nt, Artificial Sequence
  Description of Artificial Sequence: Synthetic oligonucleotide
  Antisense strand to SEQ ID NO: 2407602
ucacucaguagugagcaca

SEQ ID NO: 2407604 - RNA, 19 nt, Artificial Sequence
  Description of Artificial Sequence: Synthetic oligonucleotide
  Sense strand starting at position 3137 of SEQ ID NO: 1886407
gugcucacuacugagugaa

SEQ ID NO: 2407605 - RNA, 19 nt, Artificial Sequence
  Description of Artificial Sequence: Synthetic oligonucleotide
  Antisense strand to SEQ ID NO: 2407604
uucacucaguagugagcac

SEQ ID NO: 2407606 - RNA, 19 nt, Artificial Sequence
  Description of Artificial Sequence: Synthetic oligonucleotide
  Sense strand starting at position 3467 of SEQ ID NO: 1886407
gagacucuguaugaaagaa

SEQ ID NO: 2407607 - RNA, 19 nt, Artificial Sequence
  Description of Artificial Sequence: Synthetic oligonucleotide
  Antisense strand to SEQ ID NO: 2407606
uucuuucauacagagucuc

SEQ ID NO: 2407608 - RNA, 19 nt, Artificial Sequence
  Description of Artificial Sequence: Synthetic oligonucleotide
  Sense strand starting at position 3509 of SEQ ID NO: 1886407
caaauuggcuccuugggau

SEQ ID NO: 2407609 - RNA, 19 nt, Artificial Sequence
  Description of Artificial Sequence: Synthetic oligonucleotide
  Antisense strand to SEQ ID NO: 2407608
aucccaaggagccaauuug

SEQ ID NO: 2407610 - RNA, 19 nt, Artificial Sequence
  Description of Artificial Sequence: Synthetic oligonucleotide
  Sense strand starting at position 3522 of SEQ ID NO: 1886407
ugggauagcuuguggcuuu

SEQ ID NO: 2407611 - RNA, 19 nt, Artificial Sequence
  Description of Artificial Sequence: Synthetic oligonucleotide
  Antisense strand to SEQ ID NO: 2407610
aaagccacaagcuauccca

SEQ ID NO: 2407612 - RNA, 19 nt, Artificial Sequence
  Description of Artificial Sequence: Synthetic oligonucleotide
  Sense strand starting at position 3556 of SEQ ID NO: 1886407
uuggguauagggugaauaa

SEQ ID NO: 2407613 - RNA, 19 nt, Artificial Sequence
  Description of Artificial Sequence: Synthetic oligonucleotide
  Antisense strand to SEQ ID NO: 2407612
uuauucacccuauacccaa

SEQ ID NO: 2407614 - RNA, 19 nt, Artificial Sequence
  Description of Artificial Sequence: Synthetic oligonucleotide
  Sense strand starting at position 3960 of SEQ ID NO: 1886407
accagucauugaucacuuu

SEQ ID NO: 2407615 - RNA, 19 nt, Artificial Sequence
  Description of Artificial Sequence: Synthetic oligonucleotide
  Antisense strand to SEQ ID NO: 2407614
aaagugaucaaugacuggu

SEQ ID NO: 2407616 - RNA, 19 nt, Artificial Sequence
  Description of Artificial Sequence: Synthetic oligonucleotide
  Sense strand starting at position 22 of SEQ ID NO: 1886408
cagguagaguucuuaagca

SEQ ID NO: 2407617 - RNA, 19 nt, Artificial Sequence
  Description of Artificial Sequence: Synthetic oligonucleotide
  Antisense strand to SEQ ID NO: 2407616
ugcuuaagaacucuaccug

SEQ ID NO: 2407618 - RNA, 19 nt, Artificial Sequence
  Description of Artificial Sequence: Synthetic oligonucleotide
  Sense strand starting at position 91 of SEQ ID NO: 1886408
uguggcugcguuugaacau

SEQ ID NO: 2407619 - RNA, 19 nt, Artificial Sequence
  Description of Artificial Sequence: Synthetic oligonucleotide
  Antisense strand to SEQ ID NO: 2407618
auguucaaacgcagccaca

SEQ ID NO: 2407620 - RNA, 19 nt, Artificial Sequence
  Description of Artificial Sequence: Synthetic oligonucleotide
  Sense strand starting at position 97 of SEQ ID NO: 1886408
ugcguuugaacaugucuau

SEQ ID NO: 2407621 - RNA, 19 nt, Artificial Sequence
  Description of Artificial Sequence: Synthetic oligonucleotide
  Antisense strand to SEQ ID NO: 2407620
auagacauguucaaacgca

SEQ ID NO: 2407622 - RNA, 19 nt, Artificial Sequence
  Description of Artificial Sequence: Synthetic oligonucleotide
  Sense strand starting at position 103 of SEQ ID NO: 1886408
ugaacaugucuauggcuga

SEQ ID NO: 2407623 - RNA, 19 nt, Artificial Sequence
  Description of Artificial Sequence: Synthetic oligonucleotide
  Antisense strand to SEQ ID NO: 2407622
ucagccauagacauguuca

SEQ ID NO: 2407624 - RNA, 19 nt, Artificial Sequence
  Description of Artificial Sequence: Synthetic oligonucleotide
  Sense strand starting at position 106 of SEQ ID NO: 1886408
acaugucuauggcugagua

SEQ ID NO: 2407625 - RNA, 19 nt, Artificial Sequence
  Description of Artificial Sequence: Synthetic oligonucleotide
  Antisense strand to SEQ ID NO: 2407624
uacucagccauagacaugu

SEQ ID NO: 2407626 - RNA, 19 nt, Artificial Sequence
  Description of Artificial Sequence: Synthetic oligonucleotide
  Sense strand starting at position 108 of SEQ ID NO: 1886408
augucuauggcugaguagu

SEQ ID NO: 2407627 - RNA, 19 nt, Artificial Sequence
  Description of Artificial Sequence: Synthetic oligonucleotide
  Antisense strand to SEQ ID NO: 2407626
acuacucagccauagacau

SEQ ID NO: 2407628 - RNA, 19 nt, Artificial Sequence
  Description of Artificial Sequence: Synthetic oligonucleotide
  Sense strand starting at position 110 of SEQ ID NO: 1886408
gucuauggcugaguaguuu

SEQ ID NO: 2407629 - RNA, 19 nt, Artificial Sequence
  Description of Artificial Sequence: Synthetic oligonucleotide
  Antisense strand to SEQ ID NO: 2407628
aaacuacucagccauagac

SEQ ID NO: 2407630 - RNA, 19 nt, Artificial Sequence
  Description of Artificial Sequence: Synthetic oligonucleotide
  Sense strand starting at position 119 of SEQ ID NO: 1886408
ugaguaguuucuagugggu

SEQ ID NO: 2407631 - RNA, 19 nt, Artificial Sequence
  Description of Artificial Sequence: Synthetic oligonucleotide
  Antisense strand to SEQ ID NO: 2407630
acccacuagaaacuacuca

SEQ ID NO: 2407632 - RNA, 19 nt, Artificial Sequence
  Description of Artificial Sequence: Synthetic oligonucleotide
  Sense strand starting at position 607 of SEQ ID NO: 1886408
ugaccuggauuccugacau

SEQ ID NO: 2407633 - RNA, 19 nt, Artificial Sequence
  Description of Artificial Sequence: Synthetic oligonucleotide
  Antisense strand to SEQ ID NO: 2407632
augucaggaauccagguca

SEQ ID NO: 2407634 - RNA, 19 nt, Artificial Sequence
  Description of Artificial Sequence: Synthetic oligonucleotide
  Sense strand starting at position 673 of SEQ ID NO: 1886408
ccucuuaugagguggucuu

SEQ ID NO: 2407635 - RNA, 19 nt, Artificial Sequence
  Description of Artificial Sequence: Synthetic oligonucleotide
  Antisense strand to SEQ ID NO: 2407634
aagaccaccucauaagagg

SEQ ID NO: 2407636 - RNA, 19 nt, Artificial Sequence
  Description of Artificial Sequence: Synthetic oligonucleotide
  Sense strand starting at position 1003 of SEQ ID NO: 1886408
agcgcucucaucuguaaag

SEQ ID NO: 2407637 - RNA, 19 nt, Artificial Sequence
  Description of Artificial Sequence: Synthetic oligonucleotide
  Antisense strand to SEQ ID NO: 2407636
cuuuacagaugagagcgcu

SEQ ID NO: 2407638 - RNA, 19 nt, Artificial Sequence
  Description of Artificial Sequence: Synthetic oligonucleotide
  Sense strand starting at position 1004 of SEQ ID NO: 1886408
gcgcucucaucuguaaagu

SEQ ID NO: 2407639 - RNA, 19 nt, Artificial Sequence
  Description of Artificial Sequence: Synthetic oligonucleotide
  Antisense strand to SEQ ID NO: 2407638
acuuuacagaugagagcgc

SEQ ID NO: 2407640 - RNA, 19 nt, Artificial Sequence
  Description of Artificial Sequence: Synthetic oligonucleotide
  Sense strand starting at position 1005 of SEQ ID NO: 1886408
cgcucucaucuguaaagug

SEQ ID NO: 2407641 - RNA, 19 nt, Artificial Sequence
  Description of Artificial Sequence: Synthetic oligonucleotide
  Antisense strand to SEQ ID NO: 2407640
cacuuuacagaugagagcg

SEQ ID NO: 2407642 - RNA, 19 nt, Artificial Sequence
  Description of Artificial Sequence: Synthetic oligonucleotide
  Sense strand starting at position 1043 of SEQ ID NO: 1886408
ccaaguuccugggaucuaa

SEQ ID NO: 2407643 - RNA, 19 nt, Artificial Sequence
  Description of Artificial Sequence: Synthetic oligonucleotide
  Antisense strand to SEQ ID NO: 2407642
uuagaucccaggaacuugg

SEQ ID NO: 2407644 - RNA, 19 nt, Artificial Sequence
  Description of Artificial Sequence: Synthetic oligonucleotide
  Sense strand starting at position 1047 of SEQ ID NO: 1886408
guuccugggaucuaagcaa

SEQ ID NO: 2407645 - RNA, 19 nt, Artificial Sequence
  Description of Artificial Sequence: Synthetic oligonucleotide
  Antisense strand to SEQ ID NO: 2407644
uugcuuagaucccaggaac

SEQ ID NO: 2407646 - RNA, 19 nt, Artificial Sequence
  Description of Artificial Sequence: Synthetic oligonucleotide
  Sense strand starting at position 2734 of SEQ ID NO: 1886408
ucuggaguucagcgugauc

SEQ ID NO: 2407647 - RNA, 19 nt, Artificial Sequence
  Description of Artificial Sequence: Synthetic oligonucleotide
  Antisense strand to SEQ ID NO: 2407646
gaucacgcugaacuccaga

SEQ ID NO: 2407648 - RNA, 19 nt, Artificial Sequence
  Description of Artificial Sequence: Synthetic oligonucleotide
  Sense strand starting at position 2736 of SEQ ID NO: 1886408
uggaguucagcgugaucaa

SEQ ID NO: 2407649 - RNA, 19 nt, Artificial Sequence
  Description of Artificial Sequence: Synthetic oligonucleotide
  Antisense strand to SEQ ID NO: 2407648
uugaucacgcugaacucca

SEQ ID NO: 2407650 - RNA, 19 nt, Artificial Sequence
  Description of Artificial Sequence: Synthetic oligonucleotide
  Sense strand starting at position 2737 of SEQ ID NO: 1886408
ggaguucagcgugaucaag

SEQ ID NO: 2407651 - RNA, 19 nt, Artificial Sequence
  Description of Artificial Sequence: Synthetic oligonucleotide
  Antisense strand to SEQ ID NO: 2407650
cuugaucacgcugaacucc

SEQ ID NO: 2407652 - RNA, 19 nt, Artificial Sequence
  Description of Artificial Sequence: Synthetic oligonucleotide
  Sense strand starting at position 2966 of SEQ ID NO: 1886408
cugugauggugucuuuaag

SEQ ID NO: 2407653 - RNA, 19 nt, Artificial Sequence
  Description of Artificial Sequence: Synthetic oligonucleotide
  Antisense strand to SEQ ID NO: 2407652
cuuaaagacaccaucacag

SEQ ID NO: 2407654 - RNA, 19 nt, Artificial Sequence
  Description of Artificial Sequence: Synthetic oligonucleotide
  Sense strand starting at position 2980 of SEQ ID NO: 1886408
uuaagaggcccuuagguuu

SEQ ID NO: 2407655 - RNA, 19 nt, Artificial Sequence
  Description of Artificial Sequence: Synthetic oligonucleotide
  Antisense strand to SEQ ID NO: 2407654
aaaccuaagggccucuuaa

SEQ ID NO: 2407656 - RNA, 19 nt, Artificial Sequence
  Description of Artificial Sequence: Synthetic oligonucleotide
  Sense strand starting at position 3018 of SEQ ID NO: 1886408
gagagcuuauggcacagua

SEQ ID NO: 2407657 - RNA, 19 nt, Artificial Sequence
  Description of Artificial Sequence: Synthetic oligonucleotide
  Antisense strand to SEQ ID NO: 2407656
uacugugccauaagcucuc

SEQ ID NO: 2407658 - RNA, 19 nt, Artificial Sequence
  Description of Artificial Sequence: Synthetic oligonucleotide
  Sense strand starting at position 3020 of SEQ ID NO: 1886408
gagcuuauggcacaguacu

SEQ ID NO: 2407659 - RNA, 19 nt, Artificial Sequence
  Description of Artificial Sequence: Synthetic oligonucleotide
  Antisense strand to SEQ ID NO: 2407658
aguacugugccauaagcuc

SEQ ID NO: 2407660 - RNA, 19 nt, Artificial Sequence
  Description of Artificial Sequence: Synthetic oligonucleotide
  Sense strand starting at position 3095 of SEQ ID NO: 1886408
uagggugcuuugccaacaa

SEQ ID NO: 2407661 - RNA, 19 nt, Artificial Sequence
  Description of Artificial Sequence: Synthetic oligonucleotide
  Antisense strand to SEQ ID NO: 2407660
uuguuggcaaagcacccua

SEQ ID NO: 2407662 - RNA, 19 nt, Artificial Sequence
  Description of Artificial Sequence: Synthetic oligonucleotide
  Sense strand starting at position 3290 of SEQ ID NO: 1886408
guggcaccgugccuauaau

SEQ ID NO: 2407663 - RNA, 19 nt, Artificial Sequence
  Description of Artificial Sequence: Synthetic oligonucleotide
  Antisense strand to SEQ ID NO: 2407662
auuauaggcacggugccac

SEQ ID NO: 2407664 - RNA, 19 nt, Artificial Sequence
  Description of Artificial Sequence: Synthetic oligonucleotide
  Sense strand starting at position 3515 of SEQ ID NO: 1886408
agcacucugugacuacaaa

SEQ ID NO: 2407665 - RNA, 19 nt, Artificial Sequence
  Description of Artificial Sequence: Synthetic oligonucleotide
  Antisense strand to SEQ ID NO: 2407664
uuuguagucacagagugcu

SEQ ID NO: 2407666 - RNA, 19 nt, Artificial Sequence
  Description of Artificial Sequence: Synthetic oligonucleotide
  Sense strand starting at position 3614 of SEQ ID NO: 1886408
ccucaaagacucugcaaga

SEQ ID NO: 2407667 - RNA, 19 nt, Artificial Sequence
  Description of Artificial Sequence: Synthetic oligonucleotide
  Antisense strand to SEQ ID NO: 2407666
ucuugcagagucuuugagg

SEQ ID NO: 2407668 - RNA, 19 nt, Artificial Sequence
  Description of Artificial Sequence: Synthetic oligonucleotide
  Sense strand starting at position 3739 of SEQ ID NO: 1886408
uuuguuguggaauguuuau

SEQ ID NO: 2407669 - RNA, 19 nt, Artificial Sequence
  Description of Artificial Sequence: Synthetic oligonucleotide
  Antisense strand to SEQ ID NO: 2407668
auaaacauuccacaacaaa

SEQ ID NO: 2407670 - RNA, 19 nt, Artificial Sequence
  Description of Artificial Sequence: Synthetic oligonucleotide
  Sense strand starting at position 3745 of SEQ ID NO: 1886408
guggaauguuuauaacauu

SEQ ID NO: 2407671 - RNA, 19 nt, Artificial Sequence
  Description of Artificial Sequence: Synthetic oligonucleotide
  Antisense strand to SEQ ID NO: 2407670
aauguuauaaacauuccac

SEQ ID NO: 2407672 - RNA, 19 nt, Artificial Sequence
  Description of Artificial Sequence: Synthetic oligonucleotide
  Sense strand starting at position 3759 of SEQ ID NO: 1886408
acauuuacauguggauuaa

SEQ ID NO: 2407673 - RNA, 19 nt, Artificial Sequence
  Description of Artificial Sequence: Synthetic oligonucleotide
  Antisense strand to SEQ ID NO: 2407672
uuaauccacauguaaaugu

SEQ ID NO: 2407674 - RNA, 19 nt, Artificial Sequence
  Description of Artificial Sequence: Synthetic oligonucleotide
  Sense strand starting at position 3769 of SEQ ID NO: 1886408
guggauuaaguauacuauu

SEQ ID NO: 2407675 - RNA, 19 nt, Artificial Sequence
  Description of Artificial Sequence: Synthetic oligonucleotide
  Antisense strand to SEQ ID NO: 2407674
aauaguauacuuaauccac

SEQ ID NO: 2407676 - RNA, 19 nt, Artificial Sequence
  Description of Artificial Sequence: Synthetic oligonucleotide
  Sense strand starting at position 3835 of SEQ ID NO: 1886408
ugugcucacuacugaguga

SEQ ID NO: 2407677 - RNA, 19 nt, Artificial Sequence
  Description of Artificial Sequence: Synthetic oligonucleotide
  Antisense strand to SEQ ID NO: 2407676
ucacucaguagugagcaca

SEQ ID NO: 2407678 - RNA, 19 nt, Artificial Sequence
  Description of Artificial Sequence: Synthetic oligonucleotide
  Sense strand starting at position 3836 of SEQ ID NO: 1886408
gugcucacuacugagugaa

SEQ ID NO: 2407679 - RNA, 19 nt, Artificial Sequence
  Description of Artificial Sequence: Synthetic oligonucleotide
  Antisense strand to SEQ ID NO: 2407678
uucacucaguagugagcac

SEQ ID NO: 2407680 - RNA, 19 nt, Artificial Sequence
  Description of Artificial Sequence: Synthetic oligonucleotide
  Sense strand starting at position 53 of SEQ ID NO: 1886409
ugggauuauaugcgugacu

SEQ ID NO: 2407681 - RNA, 19 nt, Artificial Sequence
  Description of Artificial Sequence: Synthetic oligonucleotide
  Antisense strand to SEQ ID NO: 2407680
agucacgcauauaauccca

SEQ ID NO: 2407682 - RNA, 19 nt, Artificial Sequence
  Description of Artificial Sequence: Synthetic oligonucleotide
  Sense strand starting at position 54 of SEQ ID NO: 1886409
gggauuauaugcgugacuc

SEQ ID NO: 2407683 - RNA, 19 nt, Artificial Sequence
  Description of Artificial Sequence: Synthetic oligonucleotide
  Antisense strand to SEQ ID NO: 2407682
gagucacgcauauaauccc

SEQ ID NO: 2407684 - RNA, 19 nt, Artificial Sequence
  Description of Artificial Sequence: Synthetic oligonucleotide
  Sense strand starting at position 55 of SEQ ID NO: 1886409
ggauuauaugcgugacuca

SEQ ID NO: 2407685 - RNA, 19 nt, Artificial Sequence
  Description of Artificial Sequence: Synthetic oligonucleotide
  Antisense strand to SEQ ID NO: 2407684
ugagucacgcauauaaucc

SEQ ID NO: 2407686 - RNA, 19 nt, Artificial Sequence
  Description of Artificial Sequence: Synthetic oligonucleotide
  Sense strand starting at position 56 of SEQ ID NO: 1886409
gauuauaugcgugacucac

SEQ ID NO: 2407687 - RNA, 19 nt, Artificial Sequence
  Description of Artificial Sequence: Synthetic oligonucleotide
  Antisense strand to SEQ ID NO: 2407686
gugagucacgcauauaauc

SEQ ID NO: 2407688 - RNA, 19 nt, Artificial Sequence
  Description of Artificial Sequence: Synthetic oligonucleotide
  Sense strand starting at position 553 of SEQ ID NO: 1886409
cacgaaauagacuguucuu

SEQ ID NO: 2407689 - RNA, 19 nt, Artificial Sequence
  Description of Artificial Sequence: Synthetic oligonucleotide
  Antisense strand to SEQ ID NO: 2407688
aagaacagucuauuucgug

SEQ ID NO: 2407690 - RNA, 19 nt, Artificial Sequence
  Description of Artificial Sequence: Synthetic oligonucleotide
  Sense strand starting at position 618 of SEQ ID NO: 1886409
aggcauugucuacaauguu

SEQ ID NO: 2407691 - RNA, 19 nt, Artificial Sequence
  Description of Artificial Sequence: Synthetic oligonucleotide
  Antisense strand to SEQ ID NO: 2407690
aacauuguagacaaugccu

SEQ ID NO: 2407692 - RNA, 19 nt, Artificial Sequence
  Description of Artificial Sequence: Synthetic oligonucleotide
  Sense strand starting at position 801 of SEQ ID NO: 1886409
agccuugagaucuagguau

SEQ ID NO: 2407693 - RNA, 19 nt, Artificial Sequence
  Description of Artificial Sequence: Synthetic oligonucleotide
  Antisense strand to SEQ ID NO: 2407692
auaccuagaucucaaggcu

SEQ ID NO: 2407694 - RNA, 19 nt, Artificial Sequence
  Description of Artificial Sequence: Synthetic oligonucleotide
  Sense strand starting at position 803 of SEQ ID NO: 1886409
ccuugagaucuagguauaa

SEQ ID NO: 2407695 - RNA, 19 nt, Artificial Sequence
  Description of Artificial Sequence: Synthetic oligonucleotide
  Antisense strand to SEQ ID NO: 2407694
uuauaccuagaucucaagg

SEQ ID NO: 2407696 - RNA, 19 nt, Artificial Sequence
  Description of Artificial Sequence: Synthetic oligonucleotide
  Sense strand starting at position 846 of SEQ ID NO: 1886409
cucuuacucgucugacgaa

SEQ ID NO: 2407697 - RNA, 19 nt, Artificial Sequence
  Description of Artificial Sequence: Synthetic oligonucleotide
  Antisense strand to SEQ ID NO: 2407696
uucgucagacgaguaagag

SEQ ID NO: 2407698 - RNA, 19 nt, Artificial Sequence
  Description of Artificial Sequence: Synthetic oligonucleotide
  Sense strand starting at position 859 of SEQ ID NO: 1886409
gacgaaaugucagaguauu

SEQ ID NO: 2407699 - RNA, 19 nt, Artificial Sequence
  Description of Artificial Sequence: Synthetic oligonucleotide
  Antisense strand to SEQ ID NO: 2407698
aauacucugacauuucguc

SEQ ID NO: 2407700 - RNA, 19 nt, Artificial Sequence
  Description of Artificial Sequence: Synthetic oligonucleotide
  Sense strand starting at position 893 of SEQ ID NO: 1886409
cgacaugugagauacucuu

SEQ ID NO: 2407701 - RNA, 19 nt, Artificial Sequence
  Description of Artificial Sequence: Synthetic oligonucleotide
  Antisense strand to SEQ ID NO: 2407700
aagaguaucucacaugucg

SEQ ID NO: 2407702 - RNA, 19 nt, Artificial Sequence
  Description of Artificial Sequence: Synthetic oligonucleotide
  Sense strand starting at position 899 of SEQ ID NO: 1886409
gugagauacucuuaacugc

SEQ ID NO: 2407703 - RNA, 19 nt, Artificial Sequence
  Description of Artificial Sequence: Synthetic oligonucleotide
  Antisense strand to SEQ ID NO: 2407702
gcaguuaagaguaucucac

SEQ ID NO: 2407704 - RNA, 19 nt, Artificial Sequence
  Description of Artificial Sequence: Synthetic oligonucleotide
  Sense strand starting at position 944 of SEQ ID NO: 1886409
guaucacugcacuguuuau

SEQ ID NO: 2407705 - RNA, 19 nt, Artificial Sequence
  Description of Artificial Sequence: Synthetic oligonucleotide
  Antisense strand to SEQ ID NO: 2407704
auaaacagugcagugauac

SEQ ID NO: 2407706 - RNA, 19 nt, Artificial Sequence
  Description of Artificial Sequence: Synthetic oligonucleotide
  Sense strand starting at position 1005 of SEQ ID NO: 1886409
agggcucuuuaauuccaau

SEQ ID NO: 2407707 - RNA, 19 nt, Artificial Sequence
  Description of Artificial Sequence: Synthetic oligonucleotide
  Antisense strand to SEQ ID NO: 2407706
auuggaauuaaagagcccu

SEQ ID NO: 2407708 - RNA, 19 nt, Artificial Sequence
  Description of Artificial Sequence: Synthetic oligonucleotide
  Sense strand starting at position 1065 of SEQ ID NO: 1886409
cauaaaugguauugggaga

SEQ ID NO: 2407709 - RNA, 19 nt, Artificial Sequence
  Description of Artificial Sequence: Synthetic oligonucleotide
  Antisense strand to SEQ ID NO: 2407708
ucucccaauaccauuuaug

SEQ ID NO: 2407710 - RNA, 19 nt, Artificial Sequence
  Description of Artificial Sequence: Synthetic oligonucleotide
  Sense strand starting at position 1160 of SEQ ID NO: 1886409
uuagcucucugggaaccaa

SEQ ID NO: 2407711 - RNA, 19 nt, Artificial Sequence
  Description of Artificial Sequence: Synthetic oligonucleotide
  Antisense strand to SEQ ID NO: 2407710
uugguucccagagagcuaa

SEQ ID NO: 2407712 - RNA, 19 nt, Artificial Sequence
  Description of Artificial Sequence: Synthetic oligonucleotide
  Sense strand starting at position 1224 of SEQ ID NO: 1886409
aggucuaccugacugcaau

SEQ ID NO: 2407713 - RNA, 19 nt, Artificial Sequence
  Description of Artificial Sequence: Synthetic oligonucleotide
  Antisense strand to SEQ ID NO: 2407712
auugcagucagguagaccu

SEQ ID NO: 2407714 - RNA, 19 nt, Artificial Sequence
  Description of Artificial Sequence: Synthetic oligonucleotide
  Sense strand starting at position 1225 of SEQ ID NO: 1886409
ggucuaccugacugcaauu

SEQ ID NO: 2407715 - RNA, 19 nt, Artificial Sequence
  Description of Artificial Sequence: Synthetic oligonucleotide
  Antisense strand to SEQ ID NO: 2407714
aauugcagucagguagacc

SEQ ID NO: 2407716 - RNA, 19 nt, Artificial Sequence
  Description of Artificial Sequence: Synthetic oligonucleotide
  Sense strand starting at position 1255 of SEQ ID NO: 1886409
guuuccagcucuuauauuu

SEQ ID NO: 2407717 - RNA, 19 nt, Artificial Sequence
  Description of Artificial Sequence: Synthetic oligonucleotide
  Antisense strand to SEQ ID NO: 2407716
aaauauaagagcuggaaac

SEQ ID NO: 2407718 - RNA, 19 nt, Artificial Sequence
  Description of Artificial Sequence: Synthetic oligonucleotide
  Sense strand starting at position 1287 of SEQ ID NO: 1886409
gccgucuggccuuacuaga

SEQ ID NO: 2407719 - RNA, 19 nt, Artificial Sequence
  Description of Artificial Sequence: Synthetic oligonucleotide
  Antisense strand to SEQ ID NO: 2407718
ucuaguaaggccagacggc

SEQ ID NO: 2407720 - RNA, 19 nt, Artificial Sequence
  Description of Artificial Sequence: Synthetic oligonucleotide
  Sense strand starting at position 1368 of SEQ ID NO: 1886409
acaggugaucuucguggca

SEQ ID NO: 2407721 - RNA, 19 nt, Artificial Sequence
  Description of Artificial Sequence: Synthetic oligonucleotide
  Antisense strand to SEQ ID NO: 2407720
ugccacgaagaucaccugu

SEQ ID NO: 2407722 - RNA, 19 nt, Artificial Sequence
  Description of Artificial Sequence: Synthetic oligonucleotide
  Sense strand starting at position 1396 of SEQ ID NO: 1886409
cgccuaguucuagaagaca

SEQ ID NO: 2407723 - RNA, 19 nt, Artificial Sequence
  Description of Artificial Sequence: Synthetic oligonucleotide
  Antisense strand to SEQ ID NO: 2407722
ugucuucuagaacuaggcg

SEQ ID NO: 2407724 - RNA, 19 nt, Artificial Sequence
  Description of Artificial Sequence: Synthetic oligonucleotide
  Sense strand starting at position 1458 of SEQ ID NO: 1886409
cgcaguggugugcuuuaaa

SEQ ID NO: 2407725 - RNA, 19 nt, Artificial Sequence
  Description of Artificial Sequence: Synthetic oligonucleotide
  Antisense strand to SEQ ID NO: 2407724
uuuaaagcacaccacugcg

SEQ ID NO: 2407726 - RNA, 19 nt, Artificial Sequence
  Description of Artificial Sequence: Synthetic oligonucleotide
  Sense strand starting at position 1461 of SEQ ID NO: 1886409
aguggugugcuuuaaacuu

SEQ ID NO: 2407727 - RNA, 19 nt, Artificial Sequence
  Description of Artificial Sequence: Synthetic oligonucleotide
  Antisense strand to SEQ ID NO: 2407726
aaguuuaaagcacaccacu

SEQ ID NO: 2407728 - RNA, 19 nt, Artificial Sequence
  Description of Artificial Sequence: Synthetic oligonucleotide
  Sense strand starting at position 1498 of SEQ ID NO: 1886409
uuccuaaccuuggcaguua

SEQ ID NO: 2407729 - RNA, 19 nt, Artificial Sequence
  Description of Artificial Sequence: Synthetic oligonucleotide
  Antisense strand to SEQ ID NO: 2407728
uaacugccaagguuaggaa

SEQ ID NO: 2407730 - RNA, 19 nt, Artificial Sequence
  Description of Artificial Sequence: Synthetic oligonucleotide
  Sense strand starting at position 2030 of SEQ ID NO: 1886409
ccgcuacgcucauuggauu

SEQ ID NO: 2407731 - RNA, 19 nt, Artificial Sequence
  Description of Artificial Sequence: Synthetic oligonucleotide
  Antisense strand to SEQ ID NO: 2407730
aauccaaugagcguagcgg

SEQ ID NO: 2407732 - RNA, 19 nt, Artificial Sequence
  Description of Artificial Sequence: Synthetic oligonucleotide
  Sense strand starting at position 2301 of SEQ ID NO: 1886409
gcauuauucuggucgcuag

SEQ ID NO: 2407733 - RNA, 19 nt, Artificial Sequence
  Description of Artificial Sequence: Synthetic oligonucleotide
  Antisense strand to SEQ ID NO: 2407732
cuagcgaccagaauaaugc

SEQ ID NO: 2407734 - RNA, 19 nt, Artificial Sequence
  Description of Artificial Sequence: Synthetic oligonucleotide
  Sense strand starting at position 2344 of SEQ ID NO: 1886409
ugguucuguccucaaggau

SEQ ID NO: 2407735 - RNA, 19 nt, Artificial Sequence
  Description of Artificial Sequence: Synthetic oligonucleotide
  Antisense strand to SEQ ID NO: 2407734
auccuugaggacagaacca

SEQ ID NO: 2407736 - RNA, 19 nt, Artificial Sequence
  Description of Artificial Sequence: Synthetic oligonucleotide
  Sense strand starting at position 2470 of SEQ ID NO: 1886409
ugguuacuuuccucucaca

SEQ ID NO: 2407737 - RNA, 19 nt, Artificial Sequence
  Description of Artificial Sequence: Synthetic oligonucleotide
  Antisense strand to SEQ ID NO: 2407736
ugugagaggaaaguaacca

SEQ ID NO: 2407738 - RNA, 19 nt, Artificial Sequence
  Description of Artificial Sequence: Synthetic oligonucleotide
  Sense strand starting at position 2538 of SEQ ID NO: 1886409
ccuauaacuuaagaagaga

SEQ ID NO: 2407739 - RNA, 19 nt, Artificial Sequence
  Description of Artificial Sequence: Synthetic oligonucleotide
  Antisense strand to SEQ ID NO: 2407738
ucucuucuuaaguuauagg

SEQ ID NO: 2407740 - RNA, 19 nt, Artificial Sequence
  Description of Artificial Sequence: Synthetic oligonucleotide
  Sense strand starting at position 2664 of SEQ ID NO: 1886409
uguauugauacgcguguga

SEQ ID NO: 2407741 - RNA, 19 nt, Artificial Sequence
  Description of Artificial Sequence: Synthetic oligonucleotide
  Antisense strand to SEQ ID NO: 2407740
ucacacgcguaucaauaca

SEQ ID NO: 2407742 - RNA, 19 nt, Artificial Sequence
  Description of Artificial Sequence: Synthetic oligonucleotide
  Sense strand starting at position 2693 of SEQ ID NO: 1886409
caggauuccugcccgcaaa

SEQ ID NO: 2407743 - RNA, 19 nt, Artificial Sequence
  Description of Artificial Sequence: Synthetic oligonucleotide
  Antisense strand to SEQ ID NO: 2407742
uuugcgggcaggaauccug

SEQ ID NO: 2407744 - RNA, 19 nt, Artificial Sequence
  Description of Artificial Sequence: Synthetic oligonucleotide
  Sense strand starting at position 3088 of SEQ ID NO: 1886409
aucuaagacugaugggcua

SEQ ID NO: 2407745 - RNA, 19 nt, Artificial Sequence
  Description of Artificial Sequence: Synthetic oligonucleotide
  Antisense strand to SEQ ID NO: 2407744
uagcccaucagucuuagau

SEQ ID NO: 2407746 - RNA, 19 nt, Artificial Sequence
  Description of Artificial Sequence: Synthetic oligonucleotide
  Sense strand starting at position 3285 of SEQ ID NO: 1886409
aguaccagucacugacuaa

SEQ ID NO: 2407747 - RNA, 19 nt, Artificial Sequence
  Description of Artificial Sequence: Synthetic oligonucleotide
  Antisense strand to SEQ ID NO: 2407746
uuagucagugacugguacu

SEQ ID NO: 2407748 - RNA, 19 nt, Artificial Sequence
  Description of Artificial Sequence: Synthetic oligonucleotide
  Sense strand starting at position 3437 of SEQ ID NO: 1886409
gccuuuauguucucugcuu

SEQ ID NO: 2407749 - RNA, 19 nt, Artificial Sequence
  Description of Artificial Sequence: Synthetic oligonucleotide
  Antisense strand to SEQ ID NO: 2407748
aagcagagaacauaaaggc

SEQ ID NO: 2407750 - RNA, 19 nt, Artificial Sequence
  Description of Artificial Sequence: Synthetic oligonucleotide
  Sense strand starting at position 3465 of SEQ ID NO: 1886409
acguaaagggucuaacugu

SEQ ID NO: 2407751 - RNA, 19 nt, Artificial Sequence
  Description of Artificial Sequence: Synthetic oligonucleotide
  Antisense strand to SEQ ID NO: 2407750
acaguuagacccuuuacgu

SEQ ID NO: 2407752 - RNA, 19 nt, Artificial Sequence
  Description of Artificial Sequence: Synthetic oligonucleotide
  Sense strand starting at position 3471 of SEQ ID NO: 1886409
agggucuaacuguaaugca

SEQ ID NO: 2407753 - RNA, 19 nt, Artificial Sequence
  Description of Artificial Sequence: Synthetic oligonucleotide
  Antisense strand to SEQ ID NO: 2407752
ugcauuacaguuagacccu

SEQ ID NO: 2407754 - RNA, 19 nt, Artificial Sequence
  Description of Artificial Sequence: Synthetic oligonucleotide
  Sense strand starting at position 3474 of SEQ ID NO: 1886409
gucuaacuguaaugcauuu

SEQ ID NO: 2407755 - RNA, 19 nt, Artificial Sequence
  Description of Artificial Sequence: Synthetic oligonucleotide
  Antisense strand to SEQ ID NO: 2407754
aaaugcauuacaguuagac

SEQ ID NO: 2407756 - RNA, 19 nt, Artificial Sequence
  Description of Artificial Sequence: Synthetic oligonucleotide
  Sense strand starting at position 3520 of SEQ ID NO: 1886409
acaugugacccauguaaca

SEQ ID NO: 2407757 - RNA, 19 nt, Artificial Sequence
  Description of Artificial Sequence: Synthetic oligonucleotide
  Antisense strand to SEQ ID NO: 2407756
uguuacaugggucacaugu

SEQ ID NO: 2407758 - RNA, 19 nt, Artificial Sequence
  Description of Artificial Sequence: Synthetic oligonucleotide
  Sense strand starting at position 3531 of SEQ ID NO: 1886409
auguaacaugcaugauugu

SEQ ID NO: 2407759 - RNA, 19 nt, Artificial Sequence
  Description of Artificial Sequence: Synthetic oligonucleotide
  Antisense strand to SEQ ID NO: 2407758
acaaucaugcauguuacau

SEQ ID NO: 2407760 - RNA, 19 nt, Artificial Sequence
  Description of Artificial Sequence: Synthetic oligonucleotide
  Sense strand starting at position 232 of SEQ ID NO: 1886410
gcgcccagucgauucuaga

SEQ ID NO: 2407761 - RNA, 19 nt, Artificial Sequence
  Description of Artificial Sequence: Synthetic oligonucleotide
  Antisense strand to SEQ ID NO: 2407760
ucuagaaucgacugggcgc

SEQ ID NO: 2407762 - RNA, 19 nt, Artificial Sequence
  Description of Artificial Sequence: Synthetic oligonucleotide
  Sense strand starting at position 439 of SEQ ID NO: 1886410
guuaccacaugucuucuua

SEQ ID NO: 2407763 - RNA, 19 nt, Artificial Sequence
  Description of Artificial Sequence: Synthetic oligonucleotide
  Antisense strand to SEQ ID NO: 2407762
uaagaagacaugugguaac

SEQ ID NO: 2407764 - RNA, 19 nt, Artificial Sequence
  Description of Artificial Sequence: Synthetic oligonucleotide
  Sense strand starting at position 742 of SEQ ID NO: 1886410
aggcuaucgaauuguagag

SEQ ID NO: 2407765 - RNA, 19 nt, Artificial Sequence
  Description of Artificial Sequence: Synthetic oligonucleotide
  Antisense strand to SEQ ID NO: 2407764
cucuacaauucgauagccu

SEQ ID NO: 2407766 - RNA, 19 nt, Artificial Sequence
  Description of Artificial Sequence: Synthetic oligonucleotide
  Sense strand starting at position 756 of SEQ ID NO: 1886410
uagagaaaucggcagggua

SEQ ID NO: 2407767 - RNA, 19 nt, Artificial Sequence
  Description of Artificial Sequence: Synthetic oligonucleotide
  Antisense strand to SEQ ID NO: 2407766
uacccugccgauuucucua

SEQ ID NO: 2407768 - RNA, 19 nt, Artificial Sequence
  Description of Artificial Sequence: Synthetic oligonucleotide
  Sense strand starting at position 773 of SEQ ID NO: 1886410
uagguuaagcauuguuacu

SEQ ID NO: 2407769 - RNA, 19 nt, Artificial Sequence
  Description of Artificial Sequence: Synthetic oligonucleotide
  Antisense strand to SEQ ID NO: 2407768
aguaacaaugcuuaaccua

SEQ ID NO: 2407770 - RNA, 19 nt, Artificial Sequence
  Description of Artificial Sequence: Synthetic oligonucleotide
  Sense strand starting at position 775 of SEQ ID NO: 1886410
gguuaagcauuguuacuca

SEQ ID NO: 2407771 - RNA, 19 nt, Artificial Sequence
  Description of Artificial Sequence: Synthetic oligonucleotide
  Antisense strand to SEQ ID NO: 2407770
ugaguaacaaugcuuaacc

SEQ ID NO: 2407772 - RNA, 19 nt, Artificial Sequence
  Description of Artificial Sequence: Synthetic oligonucleotide
  Sense strand starting at position 828 of SEQ ID NO: 1886410
uaagaaaugugacauuuga

SEQ ID NO: 2407773 - RNA, 19 nt, Artificial Sequence
  Description of Artificial Sequence: Synthetic oligonucleotide
  Antisense strand to SEQ ID NO: 2407772
ucaaaugucacauuucuua

SEQ ID NO: 2407774 - RNA, 19 nt, Artificial Sequence
  Description of Artificial Sequence: Synthetic oligonucleotide
  Sense strand starting at position 951 of SEQ ID NO: 1886410
gggaguuaguaucugugag

SEQ ID NO: 2407775 - RNA, 19 nt, Artificial Sequence
  Description of Artificial Sequence: Synthetic oligonucleotide
  Antisense strand to SEQ ID NO: 2407774
cucacagauacuaacuccc

SEQ ID NO: 2407776 - RNA, 19 nt, Artificial Sequence
  Description of Artificial Sequence: Synthetic oligonucleotide
  Sense strand starting at position 952 of SEQ ID NO: 1886410
ggaguuaguaucugugagc

SEQ ID NO: 2407777 - RNA, 19 nt, Artificial Sequence
  Description of Artificial Sequence: Synthetic oligonucleotide
  Antisense strand to SEQ ID NO: 2407776
gcucacagauacuaacucc

SEQ ID NO: 2407778 - RNA, 19 nt, Artificial Sequence
  Description of Artificial Sequence: Synthetic oligonucleotide
  Sense strand starting at position 967 of SEQ ID NO: 1886410
gagcccucuugggugaauu

SEQ ID NO: 2407779 - RNA, 19 nt, Artificial Sequence
  Description of Artificial Sequence: Synthetic oligonucleotide
  Antisense strand to SEQ ID NO: 2407778
aauucacccaagagggcuc

SEQ ID NO: 2407780 - RNA, 19 nt, Artificial Sequence
  Description of Artificial Sequence: Synthetic oligonucleotide
  Sense strand starting at position 1019 of SEQ ID NO: 1886410
uguguuuggccuuaaguac

SEQ ID NO: 2407781 - RNA, 19 nt, Artificial Sequence
  Description of Artificial Sequence: Synthetic oligonucleotide
  Antisense strand to SEQ ID NO: 2407780
guacuuaaggccaaacaca

SEQ ID NO: 2407782 - RNA, 19 nt, Artificial Sequence
  Description of Artificial Sequence: Synthetic oligonucleotide
  Sense strand starting at position 1716 of SEQ ID NO: 1886410
ucccuagagcuccgggaaa

SEQ ID NO: 2407783 - RNA, 19 nt, Artificial Sequence
  Description of Artificial Sequence: Synthetic oligonucleotide
  Antisense strand to SEQ ID NO: 2407782
uuucccggagcucuaggga

SEQ ID NO: 2407784 - RNA, 19 nt, Artificial Sequence
  Description of Artificial Sequence: Synthetic oligonucleotide
  Sense strand starting at position 1783 of SEQ ID NO: 1886410
ucgcguucccaagcugaca

SEQ ID NO: 2407785 - RNA, 19 nt, Artificial Sequence
  Description of Artificial Sequence: Synthetic oligonucleotide
  Antisense strand to SEQ ID NO: 2407784
ugucagcuugggaacgcga

SEQ ID NO: 2407786 - RNA, 19 nt, Artificial Sequence
  Description of Artificial Sequence: Synthetic oligonucleotide
  Sense strand starting at position 1916 of SEQ ID NO: 1886410
cgguuaacuccgcuuguuu

SEQ ID NO: 2407787 - RNA, 19 nt, Artificial Sequence
  Description of Artificial Sequence: Synthetic oligonucleotide
  Antisense strand to SEQ ID NO: 2407786
aaacaagcggaguuaaccg

SEQ ID NO: 2407788 - RNA, 19 nt, Artificial Sequence
  Description of Artificial Sequence: Synthetic oligonucleotide
  Sense strand starting at position 2124 of SEQ ID NO: 1886410
ugcagaagucgaggaagaa

SEQ ID NO: 2407789 - RNA, 19 nt, Artificial Sequence
  Description of Artificial Sequence: Synthetic oligonucleotide
  Antisense strand to SEQ ID NO: 2407788
uucuuccucgacuucugca

SEQ ID NO: 2407790 - RNA, 19 nt, Artificial Sequence
  Description of Artificial Sequence: Synthetic oligonucleotide
  Sense strand starting at position 2344 of SEQ ID NO: 1886410
uggcauugccuuugaggaa

SEQ ID NO: 2407791 - RNA, 19 nt, Artificial Sequence
  Description of Artificial Sequence: Synthetic oligonucleotide
  Antisense strand to SEQ ID NO: 2407790
uuccucaaaggcaaugcca

SEQ ID NO: 2407792 - RNA, 19 nt, Artificial Sequence
  Description of Artificial Sequence: Synthetic oligonucleotide
  Sense strand starting at position 2406 of SEQ ID NO: 1886410
cgggaacuacuuugaauua

SEQ ID NO: 2407793 - RNA, 19 nt, Artificial Sequence
  Description of Artificial Sequence: Synthetic oligonucleotide
  Antisense strand to SEQ ID NO: 2407792
uaauucaaaguaguucccg

SEQ ID NO: 2407794 - RNA, 19 nt, Artificial Sequence
  Description of Artificial Sequence: Synthetic oligonucleotide
  Sense strand starting at position 2407 of SEQ ID NO: 1886410
gggaacuacuuugaauuac

SEQ ID NO: 2407795 - RNA, 19 nt, Artificial Sequence
  Description of Artificial Sequence: Synthetic oligonucleotide
  Antisense strand to SEQ ID NO: 2407794
guaauucaaaguaguuccc

SEQ ID NO: 2407796 - RNA, 19 nt, Artificial Sequence
  Description of Artificial Sequence: Synthetic oligonucleotide
  Sense strand starting at position 2557 of SEQ ID NO: 1886410
ccagguugugacuagaguu

SEQ ID NO: 2407797 - RNA, 19 nt, Artificial Sequence
  Description of Artificial Sequence: Synthetic oligonucleotide
  Antisense strand to SEQ ID NO: 2407796
aacucuagucacaaccugg

SEQ ID NO: 2407798 - RNA, 19 nt, Artificial Sequence
  Description of Artificial Sequence: Synthetic oligonucleotide
  Sense strand starting at position 2579 of SEQ ID NO: 1886410
gcgcuuugcauccugggau

SEQ ID NO: 2407799 - RNA, 19 nt, Artificial Sequence
  Description of Artificial Sequence: Synthetic oligonucleotide
  Antisense strand to SEQ ID NO: 2407798
aucccaggaugcaaagcgc

SEQ ID NO: 2407800 - RNA, 19 nt, Artificial Sequence
  Description of Artificial Sequence: Synthetic oligonucleotide
  Sense strand starting at position 2621 of SEQ ID NO: 1886410
guucccaucgcagaaguaa

SEQ ID NO: 2407801 - RNA, 19 nt, Artificial Sequence
  Description of Artificial Sequence: Synthetic oligonucleotide
  Antisense strand to SEQ ID NO: 2407800
uuacuucugcgaugggaac

SEQ ID NO: 2407802 - RNA, 19 nt, Artificial Sequence
  Description of Artificial Sequence: Synthetic oligonucleotide
  Sense strand starting at position 2632 of SEQ ID NO: 1886410
agaaguaaugcgucuucgu

SEQ ID NO: 2407803 - RNA, 19 nt, Artificial Sequence
  Description of Artificial Sequence: Synthetic oligonucleotide
  Antisense strand to SEQ ID NO: 2407802
acgaagacgcauuacuucu

SEQ ID NO: 2407804 - RNA, 19 nt, Artificial Sequence
  Description of Artificial Sequence: Synthetic oligonucleotide
  Sense strand starting at position 2633 of SEQ ID NO: 1886410
gaaguaaugcgucuucguu

SEQ ID NO: 2407805 - RNA, 19 nt, Artificial Sequence
  Description of Artificial Sequence: Synthetic oligonucleotide
  Antisense strand to SEQ ID NO: 2407804
aacgaagacgcauuacuuc

SEQ ID NO: 2407806 - RNA, 19 nt, Artificial Sequence
  Description of Artificial Sequence: Synthetic oligonucleotide
  Sense strand starting at position 2634 of SEQ ID NO: 1886410
aaguaaugcgucuucguuc

SEQ ID NO: 2407807 - RNA, 19 nt, Artificial Sequence
  Description of Artificial Sequence: Synthetic oligonucleotide
  Antisense strand to SEQ ID NO: 2407806
gaacgaagacgcauuacuu

SEQ ID NO: 2407808 - RNA, 19 nt, Artificial Sequence
  Description of Artificial Sequence: Synthetic oligonucleotide
  Sense strand starting at position 2721 of SEQ ID NO: 1886410
gcuugcuucgcuuugguca

SEQ ID NO: 2407809 - RNA, 19 nt, Artificial Sequence
  Description of Artificial Sequence: Synthetic oligonucleotide
  Antisense strand to SEQ ID NO: 2407808
ugaccaaagcgaagcaagc

SEQ ID NO: 2407810 - RNA, 19 nt, Artificial Sequence
  Description of Artificial Sequence: Synthetic oligonucleotide
  Sense strand starting at position 2726 of SEQ ID NO: 1886410
cuucgcuuuggucaaggga

SEQ ID NO: 2407811 - RNA, 19 nt, Artificial Sequence
  Description of Artificial Sequence: Synthetic oligonucleotide
  Antisense strand to SEQ ID NO: 2407810
ucccuugaccaaagcgaag

SEQ ID NO: 2407812 - RNA, 19 nt, Artificial Sequence
  Description of Artificial Sequence: Synthetic oligonucleotide
  Sense strand starting at position 2729 of SEQ ID NO: 1886410
cgcuuuggucaagggaacu

SEQ ID NO: 2407813 - RNA, 19 nt, Artificial Sequence
  Description of Artificial Sequence: Synthetic oligonucleotide
  Antisense strand to SEQ ID NO: 2407812
aguucccuugaccaaagcg

SEQ ID NO: 2407814 - RNA, 19 nt, Artificial Sequence
  Description of Artificial Sequence: Synthetic oligonucleotide
  Sense strand starting at position 2819 of SEQ ID NO: 1886410
aguucucuuccuggcuuaa

SEQ ID NO: 2407815 - RNA, 19 nt, Artificial Sequence
  Description of Artificial Sequence: Synthetic oligonucleotide
  Antisense strand to SEQ ID NO: 2407814
uuaagccaggaagagaacu

SEQ ID NO: 2407816 - RNA, 19 nt, Artificial Sequence
  Description of Artificial Sequence: Synthetic oligonucleotide
  Sense strand starting at position 2837 of SEQ ID NO: 1886410
aguccuagaagccgucuaa

SEQ ID NO: 2407817 - RNA, 19 nt, Artificial Sequence
  Description of Artificial Sequence: Synthetic oligonucleotide
  Antisense strand to SEQ ID NO: 2407816
uuagacggcuucuaggacu

SEQ ID NO: 2407818 - RNA, 19 nt, Artificial Sequence
  Description of Artificial Sequence: Synthetic oligonucleotide
  Sense strand starting at position 2841 of SEQ ID NO: 1886410
cuagaagccgucuaagaaa

SEQ ID NO: 2407819 - RNA, 19 nt, Artificial Sequence
  Description of Artificial Sequence: Synthetic oligonucleotide
  Antisense strand to SEQ ID NO: 2407818
uuucuuagacggcuucuag

SEQ ID NO: 2407820 - RNA, 19 nt, Artificial Sequence
  Description of Artificial Sequence: Synthetic oligonucleotide
  Sense strand starting at position 2912 of SEQ ID NO: 1886410
uaugguuuguuuguuaacu

SEQ ID NO: 2407821 - RNA, 19 nt, Artificial Sequence
  Description of Artificial Sequence: Synthetic oligonucleotide
  Antisense strand to SEQ ID NO: 2407820
aguuaacaaacaaaccaua

SEQ ID NO: 2407822 - RNA, 19 nt, Artificial Sequence
  Description of Artificial Sequence: Synthetic oligonucleotide
  Sense strand starting at position 2913 of SEQ ID NO: 1886410
augguuuguuuguuaacua

SEQ ID NO: 2407823 - RNA, 19 nt, Artificial Sequence
  Description of Artificial Sequence: Synthetic oligonucleotide
  Antisense strand to SEQ ID NO: 2407822
uaguuaacaaacaaaccau

SEQ ID NO: 2407824 - RNA, 19 nt, Artificial Sequence
  Description of Artificial Sequence: Synthetic oligonucleotide
  Sense strand starting at position 2920 of SEQ ID NO: 1886410
guuuguuaacuaugauagu

SEQ ID NO: 2407825 - RNA, 19 nt, Artificial Sequence
  Description of Artificial Sequence: Synthetic oligonucleotide
  Antisense strand to SEQ ID NO: 2407824
acuaucauaguuaacaaac

SEQ ID NO: 2407826 - RNA, 19 nt, Artificial Sequence
  Description of Artificial Sequence: Synthetic oligonucleotide
  Sense strand starting at position 2929 of SEQ ID NO: 1886410
cuaugauaguugguaagau

SEQ ID NO: 2407827 - RNA, 19 nt, Artificial Sequence
  Description of Artificial Sequence: Synthetic oligonucleotide
  Antisense strand to SEQ ID NO: 2407826
aucuuaccaacuaucauag

SEQ ID NO: 2407828 - RNA, 19 nt, Artificial Sequence
  Description of Artificial Sequence: Synthetic oligonucleotide
  Sense strand starting at position 3341 of SEQ ID NO: 1886410
ugcggaucacgccugcaau

SEQ ID NO: 2407829 - RNA, 19 nt, Artificial Sequence
  Description of Artificial Sequence: Synthetic oligonucleotide
  Antisense strand to SEQ ID NO: 2407828
auugcaggcgugauccgca

SEQ ID NO: 2407830 - RNA, 19 nt, Artificial Sequence
  Description of Artificial Sequence: Synthetic oligonucleotide
  Sense strand starting at position 3797 of SEQ ID NO: 1886410
uguagaauacaguaguguu

SEQ ID NO: 2407831 - RNA, 19 nt, Artificial Sequence
  Description of Artificial Sequence: Synthetic oligonucleotide
  Antisense strand to SEQ ID NO: 2407830
aacacuacuguauucuaca

SEQ ID NO: 2407832 - RNA, 19 nt, Artificial Sequence
  Description of Artificial Sequence: Synthetic oligonucleotide
  Sense strand starting at position 3877 of SEQ ID NO: 1886410
cuacaucuguuguuuaaca

SEQ ID NO: 2407833 - RNA, 19 nt, Artificial Sequence
  Description of Artificial Sequence: Synthetic oligonucleotide
  Antisense strand to SEQ ID NO: 2407832
uguuaaacaacagauguag

SEQ ID NO: 2407834 - RNA, 19 nt, Artificial Sequence
  Description of Artificial Sequence: Synthetic oligonucleotide
  Sense strand starting at position 3941 of SEQ ID NO: 1886410
cuuuauguuccugaguuug

SEQ ID NO: 2407835 - RNA, 19 nt, Artificial Sequence
  Description of Artificial Sequence: Synthetic oligonucleotide
  Antisense strand to SEQ ID NO: 2407834
caaacucaggaacauaaag

SEQ ID NO: 2407836 - RNA, 19 nt, Artificial Sequence
  Description of Artificial Sequence: Synthetic oligonucleotide
  Sense strand starting at position 3943 of SEQ ID NO: 1886410
uuauguuccugaguuugau

SEQ ID NO: 2407837 - RNA, 19 nt, Artificial Sequence
  Description of Artificial Sequence: Synthetic oligonucleotide
  Antisense strand to SEQ ID NO: 2407836
aucaaacucaggaacauaa

SEQ ID NO: 2407838 - RNA, 19 nt, Artificial Sequence
  Description of Artificial Sequence: Synthetic oligonucleotide
  Sense strand starting at position 3949 of SEQ ID NO: 1886410
uccugaguuugauuacuuu

SEQ ID NO: 2407839 - RNA, 19 nt, Artificial Sequence
  Description of Artificial Sequence: Synthetic oligonucleotide
  Antisense strand to SEQ ID NO: 2407838
aaaguaaucaaacucagga

SEQ ID NO: 2407840 - RNA, 19 nt, Artificial Sequence
  Description of Artificial Sequence: Synthetic oligonucleotide
  Sense strand starting at position 100 of SEQ ID NO: 1886412
ugucaacauucucuggcaa

SEQ ID NO: 2407841 - RNA, 19 nt, Artificial Sequence
  Description of Artificial Sequence: Synthetic oligonucleotide
  Antisense strand to SEQ ID NO: 2407840
uugccagagaauguugaca

SEQ ID NO: 2407842 - RNA, 19 nt, Artificial Sequence
  Description of Artificial Sequence: Synthetic oligonucleotide
  Sense strand starting at position 115 of SEQ ID NO: 1886412
gcaagacagccuuaucaau

SEQ ID NO: 2407843 - RNA, 19 nt, Artificial Sequence
  Description of Artificial Sequence: Synthetic oligonucleotide
  Antisense strand to SEQ ID NO: 2407842
auugauaaggcugucuugc

SEQ ID NO: 2407844 - RNA, 19 nt, Artificial Sequence
  Description of Artificial Sequence: Synthetic oligonucleotide
  Sense strand starting at position 159 of SEQ ID NO: 1886412
acagcaaagcgauaugaca

SEQ ID NO: 2407845 - RNA, 19 nt, Artificial Sequence
  Description of Artificial Sequence: Synthetic oligonucleotide
  Antisense strand to SEQ ID NO: 2407844
ugucauaucgcuuugcugu

SEQ ID NO: 2407846 - RNA, 19 nt, Artificial Sequence
  Description of Artificial Sequence: Synthetic oligonucleotide
  Sense strand starting at position 166 of SEQ ID NO: 1886412
agcgauaugacagaagcaa

SEQ ID NO: 2407847 - RNA, 19 nt, Artificial Sequence
  Description of Artificial Sequence: Synthetic oligonucleotide
  Antisense strand to SEQ ID NO: 2407846
uugcuucugucauaucgcu

SEQ ID NO: 2407848 - RNA, 19 nt, Artificial Sequence
  Description of Artificial Sequence: Synthetic oligonucleotide
  Sense strand starting at position 212 of SEQ ID NO: 1886412
gugucucucccacaagaau

SEQ ID NO: 2407849 - RNA, 19 nt, Artificial Sequence
  Description of Artificial Sequence: Synthetic oligonucleotide
  Antisense strand to SEQ ID NO: 2407848
auucuugugggagagacac

SEQ ID NO: 2407850 - RNA, 19 nt, Artificial Sequence
  Description of Artificial Sequence: Synthetic oligonucleotide
  Sense strand starting at position 257 of SEQ ID NO: 1886412
cuacuucuaugagucuuua

SEQ ID NO: 2407851 - RNA, 19 nt, Artificial Sequence
  Description of Artificial Sequence: Synthetic oligonucleotide
  Antisense strand to SEQ ID NO: 2407850
uaaagacucauagaaguag

SEQ ID NO: 2407852 - RNA, 19 nt, Artificial Sequence
  Description of Artificial Sequence: Synthetic oligonucleotide
  Sense strand starting at position 261 of SEQ ID NO: 1886412
uucuaugagucuuuaaagu

SEQ ID NO: 2407853 - RNA, 19 nt, Artificial Sequence
  Description of Artificial Sequence: Synthetic oligonucleotide
  Antisense strand to SEQ ID NO: 2407852
acuuuaaagacucauagaa

SEQ ID NO: 2407854 - RNA, 19 nt, Artificial Sequence
  Description of Artificial Sequence: Synthetic oligonucleotide
  Sense strand starting at position 327 of SEQ ID NO: 1886412
uuugcacuugacugaaaca

SEQ ID NO: 2407855 - RNA, 19 nt, Artificial Sequence
  Description of Artificial Sequence: Synthetic oligonucleotide
  Antisense strand to SEQ ID NO: 2407854
uguuucagucaagugcaaa

SEQ ID NO: 2407856 - RNA, 19 nt, Artificial Sequence
  Description of Artificial Sequence: Synthetic oligonucleotide
  Sense strand starting at position 385 of SEQ ID NO: 1886412
gggccaugucuugacaaua

SEQ ID NO: 2407857 - RNA, 19 nt, Artificial Sequence
  Description of Artificial Sequence: Synthetic oligonucleotide
  Antisense strand to SEQ ID NO: 2407856
uauugucaagacauggccc

SEQ ID NO: 2407858 - RNA, 19 nt, Artificial Sequence
  Description of Artificial Sequence: Synthetic oligonucleotide
  Sense strand starting at position 436 of SEQ ID NO: 1886412
uuaagaguuaugcgaaacu

SEQ ID NO: 2407859 - RNA, 19 nt, Artificial Sequence
  Description of Artificial Sequence: Synthetic oligonucleotide
  Antisense strand to SEQ ID NO: 2407858
aguuucgcauaacucuuaa

SEQ ID NO: 2407860 - RNA, 19 nt, Artificial Sequence
  Description of Artificial Sequence: Synthetic oligonucleotide
  Sense strand starting at position 452 of SEQ ID NO: 1886412
acuggaucggugcagacau

SEQ ID NO: 2407861 - RNA, 19 nt, Artificial Sequence
  Description of Artificial Sequence: Synthetic oligonucleotide
  Antisense strand to SEQ ID NO: 2407860
augucugcaccgauccagu

SEQ ID NO: 2407862 - RNA, 19 nt, Artificial Sequence
  Description of Artificial Sequence: Synthetic oligonucleotide
  Sense strand starting at position 513 of SEQ ID NO: 1886412
uuaauaguccuacgucaaa

SEQ ID NO: 2407863 - RNA, 19 nt, Artificial Sequence
  Description of Artificial Sequence: Synthetic oligonucleotide
  Antisense strand to SEQ ID NO: 2407862
uuugacguaggacuauuaa

SEQ ID NO: 2407864 - RNA, 19 nt, Artificial Sequence
  Description of Artificial Sequence: Synthetic oligonucleotide
  Sense strand starting at position 551 of SEQ ID NO: 1886412
ucccuaguguaaguuuaaa

SEQ ID NO: 2407865 - RNA, 19 nt, Artificial Sequence
  Description of Artificial Sequence: Synthetic oligonucleotide
  Antisense strand to SEQ ID NO: 2407864
uuuaaacuuacacuaggga

SEQ ID NO: 2407866 - RNA, 19 nt, Artificial Sequence
  Description of Artificial Sequence: Synthetic oligonucleotide
  Sense strand starting at position 562 of SEQ ID NO: 1886412
aguuuaaauguugggaaag

SEQ ID NO: 2407867 - RNA, 19 nt, Artificial Sequence
  Description of Artificial Sequence: Synthetic oligonucleotide
  Antisense strand to SEQ ID NO: 2407866
cuuucccaacauuuaaacu

SEQ ID NO: 2407868 - RNA, 19 nt, Artificial Sequence
  Description of Artificial Sequence: Synthetic oligonucleotide
  Sense strand starting at position 730 of SEQ ID NO: 1886412
agcuaaugaauaggaagua

SEQ ID NO: 2407869 - RNA, 19 nt, Artificial Sequence
  Description of Artificial Sequence: Synthetic oligonucleotide
  Antisense strand to SEQ ID NO: 2407868
uacuuccuauucauuagcu

SEQ ID NO: 2407870 - RNA, 19 nt, Artificial Sequence
  Description of Artificial Sequence: Synthetic oligonucleotide
  Sense strand starting at position 877 of SEQ ID NO: 1886412
gccgucugccugcuaauca

SEQ ID NO: 2407871 - RNA, 19 nt, Artificial Sequence
  Description of Artificial Sequence: Synthetic oligonucleotide
  Antisense strand to SEQ ID NO: 2407870
ugauuagcaggcagacggc

SEQ ID NO: 2407872 - RNA, 19 nt, Artificial Sequence
  Description of Artificial Sequence: Synthetic oligonucleotide
  Sense strand starting at position 972 of SEQ ID NO: 1886412
agccaucaaugugcaaaua

SEQ ID NO: 2407873 - RNA, 19 nt, Artificial Sequence
  Description of Artificial Sequence: Synthetic oligonucleotide
  Antisense strand to SEQ ID NO: 2407872
uauuugcacauugauggcu

SEQ ID NO: 2407874 - RNA, 19 nt, Artificial Sequence
  Description of Artificial Sequence: Synthetic oligonucleotide
  Sense strand starting at position 973 of SEQ ID NO: 1886412
gccaucaaugugcaaauaa

SEQ ID NO: 2407875 - RNA, 19 nt, Artificial Sequence
  Description of Artificial Sequence: Synthetic oligonucleotide
  Antisense strand to SEQ ID NO: 2407874
uuauuugcacauugauggc

SEQ ID NO: 2407876 - RNA, 19 nt, Artificial Sequence
  Description of Artificial Sequence: Synthetic oligonucleotide
  Sense strand starting at position 1004 of SEQ ID NO: 1886412
agacauccuuaagaaauga

SEQ ID NO: 2407877 - RNA, 19 nt, Artificial Sequence
  Description of Artificial Sequence: Synthetic oligonucleotide
  Antisense strand to SEQ ID NO: 2407876
ucauuucuuaaggaugucu

SEQ ID NO: 2407878 - RNA, 19 nt, Artificial Sequence
  Description of Artificial Sequence: Synthetic oligonucleotide
  Sense strand starting at position 1021 of SEQ ID NO: 1886412
gagucuuaaauuuggcgua

SEQ ID NO: 2407879 - RNA, 19 nt, Artificial Sequence
  Description of Artificial Sequence: Synthetic oligonucleotide
  Antisense strand to SEQ ID NO: 2407878
uacgccaaauuuaagacuc

SEQ ID NO: 2407880 - RNA, 19 nt, Artificial Sequence
  Description of Artificial Sequence: Synthetic oligonucleotide
  Sense strand starting at position 1023 of SEQ ID NO: 1886412
gucuuaaauuuggcguaga

SEQ ID NO: 2407881 - RNA, 19 nt, Artificial Sequence
  Description of Artificial Sequence: Synthetic oligonucleotide
  Antisense strand to SEQ ID NO: 2407880
ucuacgccaaauuuaagac

SEQ ID NO: 2407882 - RNA, 19 nt, Artificial Sequence
  Description of Artificial Sequence: Synthetic oligonucleotide
  Sense strand starting at position 1088 of SEQ ID NO: 1886412
caauaucuugcaggagucu

SEQ ID NO: 2407883 - RNA, 19 nt, Artificial Sequence
  Description of Artificial Sequence: Synthetic oligonucleotide
  Antisense strand to SEQ ID NO: 2407882
agacuccugcaagauauug

SEQ ID NO: 2407884 - RNA, 19 nt, Artificial Sequence
  Description of Artificial Sequence: Synthetic oligonucleotide
  Sense strand starting at position 1253 of SEQ ID NO: 1886412
ugauguaaugaggaugucu

SEQ ID NO: 2407885 - RNA, 19 nt, Artificial Sequence
  Description of Artificial Sequence: Synthetic oligonucleotide
  Antisense strand to SEQ ID NO: 2407884
agacauccucauuacauca

SEQ ID NO: 2407886 - RNA, 19 nt, Artificial Sequence
  Description of Artificial Sequence: Synthetic oligonucleotide
  Sense strand starting at position 1255 of SEQ ID NO: 1886412
auguaaugaggaugucugu

SEQ ID NO: 2407887 - RNA, 19 nt, Artificial Sequence
  Description of Artificial Sequence: Synthetic oligonucleotide
  Antisense strand to SEQ ID NO: 2407886
acagacauccucauuacau

SEQ ID NO: 2407888 - RNA, 19 nt, Artificial Sequence
  Description of Artificial Sequence: Synthetic oligonucleotide
  Sense strand starting at position 1261 of SEQ ID NO: 1886412
ugaggaugucugugugaca

SEQ ID NO: 2407889 - RNA, 19 nt, Artificial Sequence
  Description of Artificial Sequence: Synthetic oligonucleotide
  Antisense strand to SEQ ID NO: 2407888
ugucacacagacauccuca

SEQ ID NO: 2407890 - RNA, 19 nt, Artificial Sequence
  Description of Artificial Sequence: Synthetic oligonucleotide
  Sense strand starting at position 1262 of SEQ ID NO: 1886412
gaggaugucugugugacag

SEQ ID NO: 2407891 - RNA, 19 nt, Artificial Sequence
  Description of Artificial Sequence: Synthetic oligonucleotide
  Antisense strand to SEQ ID NO: 2407890
cugucacacagacauccuc

SEQ ID NO: 2407892 - RNA, 19 nt, Artificial Sequence
  Description of Artificial Sequence: Synthetic oligonucleotide
  Sense strand starting at position 1966 of SEQ ID NO: 1886412
ucccgucuccaugacaaua

SEQ ID NO: 2407893 - RNA, 19 nt, Artificial Sequence
  Description of Artificial Sequence: Synthetic oligonucleotide
  Antisense strand to SEQ ID NO: 2407892
uauugucauggagacggga

SEQ ID NO: 2407894 - RNA, 19 nt, Artificial Sequence
  Description of Artificial Sequence: Synthetic oligonucleotide
  Sense strand starting at position 2081 of SEQ ID NO: 1886412
cgcccaaucauaggugaag

SEQ ID NO: 2407895 - RNA, 19 nt, Artificial Sequence
  Description of Artificial Sequence: Synthetic oligonucleotide
  Antisense strand to SEQ ID NO: 2407894
cuucaccuaugauugggcg

SEQ ID NO: 2407896 - RNA, 19 nt, Artificial Sequence
  Description of Artificial Sequence: Synthetic oligonucleotide
  Sense strand starting at position 2139 of SEQ ID NO: 1886412
cggagaauguagucugaac

SEQ ID NO: 2407897 - RNA, 19 nt, Artificial Sequence
  Description of Artificial Sequence: Synthetic oligonucleotide
  Antisense strand to SEQ ID NO: 2407896
guucagacuacauucuccg

SEQ ID NO: 2407898 - RNA, 19 nt, Artificial Sequence
  Description of Artificial Sequence: Synthetic oligonucleotide
  Sense strand starting at position 2272 of SEQ ID NO: 1886412
gugugagaucgcgaaauaa

SEQ ID NO: 2407899 - RNA, 19 nt, Artificial Sequence
  Description of Artificial Sequence: Synthetic oligonucleotide
  Antisense strand to SEQ ID NO: 2407898
uuauuucgcgaucucacac

SEQ ID NO: 2407900 - RNA, 19 nt, Artificial Sequence
  Description of Artificial Sequence: Synthetic oligonucleotide
  Sense strand starting at position 2276 of SEQ ID NO: 1886412
gagaucgcgaaauaaagua

SEQ ID NO: 2407901 - RNA, 19 nt, Artificial Sequence
  Description of Artificial Sequence: Synthetic oligonucleotide
  Antisense strand to SEQ ID NO: 2407900
uacuuuauuucgcgaucuc

SEQ ID NO: 2407902 - RNA, 19 nt, Artificial Sequence
  Description of Artificial Sequence: Synthetic oligonucleotide
  Sense strand starting at position 2309 of SEQ ID NO: 1886412
aagucaaugcgagaaacuu

SEQ ID NO: 2407903 - RNA, 19 nt, Artificial Sequence
  Description of Artificial Sequence: Synthetic oligonucleotide
  Antisense strand to SEQ ID NO: 2407902
aaguuucucgcauugacuu

SEQ ID NO: 2407904 - RNA, 19 nt, Artificial Sequence
  Description of Artificial Sequence: Synthetic oligonucleotide
  Sense strand starting at position 2317 of SEQ ID NO: 1886412
gcgagaaacuuuguauaua

SEQ ID NO: 2407905 - RNA, 19 nt, Artificial Sequence
  Description of Artificial Sequence: Synthetic oligonucleotide
  Antisense strand to SEQ ID NO: 2407904
uauauacaaaguuucucgc

SEQ ID NO: 2407906 - RNA, 19 nt, Artificial Sequence
  Description of Artificial Sequence: Synthetic oligonucleotide
  Sense strand starting at position 2332 of SEQ ID NO: 1886412
uauaguuaugcuucggcuu

SEQ ID NO: 2407907 - RNA, 19 nt, Artificial Sequence
  Description of Artificial Sequence: Synthetic oligonucleotide
  Antisense strand to SEQ ID NO: 2407906
aagccgaagcauaacuaua

SEQ ID NO: 2407908 - RNA, 19 nt, Artificial Sequence
  Description of Artificial Sequence: Synthetic oligonucleotide
  Sense strand starting at position 2686 of SEQ ID NO: 1886412
aggcgacuuaguuaaacaa

SEQ ID NO: 2407909 - RNA, 19 nt, Artificial Sequence
  Description of Artificial Sequence: Synthetic oligonucleotide
  Antisense strand to SEQ ID NO: 2407908
uuguuuaacuaagucgccu

SEQ ID NO: 2407910 - RNA, 19 nt, Artificial Sequence
  Description of Artificial Sequence: Synthetic oligonucleotide
  Sense strand starting at position 3069 of SEQ ID NO: 1886412
ucggcucucccagagacuu

SEQ ID NO: 2407911 - RNA, 19 nt, Artificial Sequence
  Description of Artificial Sequence: Synthetic oligonucleotide
  Antisense strand to SEQ ID NO: 2407910
aagucucugggagagccga

SEQ ID NO: 2407912 - RNA, 19 nt, Artificial Sequence
  Description of Artificial Sequence: Synthetic oligonucleotide
  Sense strand starting at position 3206 of SEQ ID NO: 1886412
ccgcgaucuacuguggcua

SEQ ID NO: 2407913 - RNA, 19 nt, Artificial Sequence
  Description of Artificial Sequence: Synthetic oligonucleotide
  Antisense strand to SEQ ID NO: 2407912
uagccacaguagaucgcgg

SEQ ID NO: 2407914 - RNA, 19 nt, Artificial Sequence
  Description of Artificial Sequence: Synthetic oligonucleotide
  Sense strand starting at position 3348 of SEQ ID NO: 1886412
cugggaugugauugucauc

SEQ ID NO: 2407915 - RNA, 19 nt, Artificial Sequence
  Description of Artificial Sequence: Synthetic oligonucleotide
  Antisense strand to SEQ ID NO: 2407914
gaugacaaucacaucccag

SEQ ID NO: 2407916 - RNA, 19 nt, Artificial Sequence
  Description of Artificial Sequence: Synthetic oligonucleotide
  Sense strand starting at position 3641 of SEQ ID NO: 1886412
gcgcacaaggcgucagaau

SEQ ID NO: 2407917 - RNA, 19 nt, Artificial Sequence
  Description of Artificial Sequence: Synthetic oligonucleotide
  Antisense strand to SEQ ID NO: 2407916
auucugacgccuugugcgc

SEQ ID NO: 2407918 - RNA, 19 nt, Artificial Sequence
  Description of Artificial Sequence: Synthetic oligonucleotide
  Sense strand starting at position 3650 of SEQ ID NO: 1886412
gcgucagaauccucaauuu

SEQ ID NO: 2407919 - RNA, 19 nt, Artificial Sequence
  Description of Artificial Sequence: Synthetic oligonucleotide
  Antisense strand to SEQ ID NO: 2407918
aaauugaggauucugacgc

SEQ ID NO: 2407920 - RNA, 19 nt, Artificial Sequence
  Description of Artificial Sequence: Synthetic oligonucleotide
  Sense strand starting at position 169 of SEQ ID NO: 1886411
acaaguguuugcuuaauaa

SEQ ID NO: 2407921 - RNA, 19 nt, Artificial Sequence
  Description of Artificial Sequence: Synthetic oligonucleotide
  Antisense strand to SEQ ID NO: 2407920
uuauuaagcaaacacuugu

SEQ ID NO: 2407922 - RNA, 19 nt, Artificial Sequence
  Description of Artificial Sequence: Synthetic oligonucleotide
  Sense strand starting at position 290 of SEQ ID NO: 1886411
guaguauuaguacaugcca

SEQ ID NO: 2407923 - RNA, 19 nt, Artificial Sequence
  Description of Artificial Sequence: Synthetic oligonucleotide
  Antisense strand to SEQ ID NO: 2407922
uggcauguacuaauacuac

SEQ ID NO: 2407924 - RNA, 19 nt, Artificial Sequence
  Description of Artificial Sequence: Synthetic oligonucleotide
  Sense strand starting at position 511 of SEQ ID NO: 1886411
ugucaacauucucuggcaa

SEQ ID NO: 2407925 - RNA, 19 nt, Artificial Sequence
  Description of Artificial Sequence: Synthetic oligonucleotide
  Antisense strand to SEQ ID NO: 2407924
uugccagagaauguugaca

SEQ ID NO: 2407926 - RNA, 19 nt, Artificial Sequence
  Description of Artificial Sequence: Synthetic oligonucleotide
  Sense strand starting at position 526 of SEQ ID NO: 1886411
gcaagacagccuuaucaau

SEQ ID NO: 2407927 - RNA, 19 nt, Artificial Sequence
  Description of Artificial Sequence: Synthetic oligonucleotide
  Antisense strand to SEQ ID NO: 2407926
auugauaaggcugucuugc

SEQ ID NO: 2407928 - RNA, 19 nt, Artificial Sequence
  Description of Artificial Sequence: Synthetic oligonucleotide
  Sense strand starting at position 570 of SEQ ID NO: 1886411
acagcaaagcgauaugaca

SEQ ID NO: 2407929 - RNA, 19 nt, Artificial Sequence
  Description of Artificial Sequence: Synthetic oligonucleotide
  Antisense strand to SEQ ID NO: 2407928
ugucauaucgcuuugcugu

SEQ ID NO: 2407930 - RNA, 19 nt, Artificial Sequence
  Description of Artificial Sequence: Synthetic oligonucleotide
  Sense strand starting at position 577 of SEQ ID NO: 1886411
agcgauaugacagaagcaa

SEQ ID NO: 2407931 - RNA, 19 nt, Artificial Sequence
  Description of Artificial Sequence: Synthetic oligonucleotide
  Antisense strand to SEQ ID NO: 2407930
uugcuucugucauaucgcu

SEQ ID NO: 2407932 - RNA, 19 nt, Artificial Sequence
  Description of Artificial Sequence: Synthetic oligonucleotide
  Sense strand starting at position 623 of SEQ ID NO: 1886411
gugucucucccacaagaau

SEQ ID NO: 2407933 - RNA, 19 nt, Artificial Sequence
  Description of Artificial Sequence: Synthetic oligonucleotide
  Antisense strand to SEQ ID NO: 2407932
auucuugugggagagacac

SEQ ID NO: 2407934 - RNA, 19 nt, Artificial Sequence
  Description of Artificial Sequence: Synthetic oligonucleotide
  Sense strand starting at position 668 of SEQ ID NO: 1886411
cuacuucuaugagucuuua

SEQ ID NO: 2407935 - RNA, 19 nt, Artificial Sequence
  Description of Artificial Sequence: Synthetic oligonucleotide
  Antisense strand to SEQ ID NO: 2407934
uaaagacucauagaaguag

SEQ ID NO: 2407936 - RNA, 19 nt, Artificial Sequence
  Description of Artificial Sequence: Synthetic oligonucleotide
  Sense strand starting at position 672 of SEQ ID NO: 1886411
uucuaugagucuuuaaagu

SEQ ID NO: 2407937 - RNA, 19 nt, Artificial Sequence
  Description of Artificial Sequence: Synthetic oligonucleotide
  Antisense strand to SEQ ID NO: 2407936
acuuuaaagacucauagaa

SEQ ID NO: 2407938 - RNA, 19 nt, Artificial Sequence
  Description of Artificial Sequence: Synthetic oligonucleotide
  Sense strand starting at position 738 of SEQ ID NO: 1886411
uuugcacuugacugaaaca

SEQ ID NO: 2407939 - RNA, 19 nt, Artificial Sequence
  Description of Artificial Sequence: Synthetic oligonucleotide
  Antisense strand to SEQ ID NO: 2407938
uguuucagucaagugcaaa

SEQ ID NO: 2407940 - RNA, 19 nt, Artificial Sequence
  Description of Artificial Sequence: Synthetic oligonucleotide
  Sense strand starting at position 796 of SEQ ID NO: 1886411
gggccaugucuugacaaua

SEQ ID NO: 2407941 - RNA, 19 nt, Artificial Sequence
  Description of Artificial Sequence: Synthetic oligonucleotide
  Antisense strand to SEQ ID NO: 2407940
uauugucaagacauggccc

SEQ ID NO: 2407942 - RNA, 19 nt, Artificial Sequence
  Description of Artificial Sequence: Synthetic oligonucleotide
  Sense strand starting at position 847 of SEQ ID NO: 1886411
uuaagaguuaugcgaaacu

SEQ ID NO: 2407943 - RNA, 19 nt, Artificial Sequence
  Description of Artificial Sequence: Synthetic oligonucleotide
  Antisense strand to SEQ ID NO: 2407942
aguuucgcauaacucuuaa

SEQ ID NO: 2407944 - RNA, 19 nt, Artificial Sequence
  Description of Artificial Sequence: Synthetic oligonucleotide
  Sense strand starting at position 863 of SEQ ID NO: 1886411
acuggaucggugcagacau

SEQ ID NO: 2407945 - RNA, 19 nt, Artificial Sequence
  Description of Artificial Sequence: Synthetic oligonucleotide
  Antisense strand to SEQ ID NO: 2407944
augucugcaccgauccagu

SEQ ID NO: 2407946 - RNA, 19 nt, Artificial Sequence
  Description of Artificial Sequence: Synthetic oligonucleotide
  Sense strand starting at position 924 of SEQ ID NO: 1886411
uuaauaguccuacgucaaa

SEQ ID NO: 2407947 - RNA, 19 nt, Artificial Sequence
  Description of Artificial Sequence: Synthetic oligonucleotide
  Antisense strand to SEQ ID NO: 2407946
uuugacguaggacuauuaa

SEQ ID NO: 2407948 - RNA, 19 nt, Artificial Sequence
  Description of Artificial Sequence: Synthetic oligonucleotide
  Sense strand starting at position 962 of SEQ ID NO: 1886411
ucccuaguguaaguuuaaa

SEQ ID NO: 2407949 - RNA, 19 nt, Artificial Sequence
  Description of Artificial Sequence: Synthetic oligonucleotide
  Antisense strand to SEQ ID NO: 2407948
uuuaaacuuacacuaggga

SEQ ID NO: 2407950 - RNA, 19 nt, Artificial Sequence
  Description of Artificial Sequence: Synthetic oligonucleotide
  Sense strand starting at position 973 of SEQ ID NO: 1886411
aguuuaaauguugggaaag

SEQ ID NO: 2407951 - RNA, 19 nt, Artificial Sequence
  Description of Artificial Sequence: Synthetic oligonucleotide
  Antisense strand to SEQ ID NO: 2407950
cuuucccaacauuuaaacu

SEQ ID NO: 2407952 - RNA, 19 nt, Artificial Sequence
  Description of Artificial Sequence: Synthetic oligonucleotide
  Sense strand starting at position 1141 of SEQ ID NO: 1886411
agcuaaugaauaggaagua

SEQ ID NO: 2407953 - RNA, 19 nt, Artificial Sequence
  Description of Artificial Sequence: Synthetic oligonucleotide
  Antisense strand to SEQ ID NO: 2407952
uacuuccuauucauuagcu

SEQ ID NO: 2407954 - RNA, 19 nt, Artificial Sequence
  Description of Artificial Sequence: Synthetic oligonucleotide
  Sense strand starting at position 1288 of SEQ ID NO: 1886411
gccgucugccugcuaauca

SEQ ID NO: 2407955 - RNA, 19 nt, Artificial Sequence
  Description of Artificial Sequence: Synthetic oligonucleotide
  Antisense strand to SEQ ID NO: 2407954
ugauuagcaggcagacggc

SEQ ID NO: 2407956 - RNA, 19 nt, Artificial Sequence
  Description of Artificial Sequence: Synthetic oligonucleotide
  Sense strand starting at position 1383 of SEQ ID NO: 1886411
agccaucaaugugcaaaua

SEQ ID NO: 2407957 - RNA, 19 nt, Artificial Sequence
  Description of Artificial Sequence: Synthetic oligonucleotide
  Antisense strand to SEQ ID NO: 2407956
uauuugcacauugauggcu

SEQ ID NO: 2407958 - RNA, 19 nt, Artificial Sequence
  Description of Artificial Sequence: Synthetic oligonucleotide
  Sense strand starting at position 1384 of SEQ ID NO: 1886411
gccaucaaugugcaaauaa

SEQ ID NO: 2407959 - RNA, 19 nt, Artificial Sequence
  Description of Artificial Sequence: Synthetic oligonucleotide
  Antisense strand to SEQ ID NO: 2407958
uuauuugcacauugauggc

SEQ ID NO: 2407960 - RNA, 19 nt, Artificial Sequence
  Description of Artificial Sequence: Synthetic oligonucleotide
  Sense strand starting at position 1415 of SEQ ID NO: 1886411
agacauccuuaagaaauga

SEQ ID NO: 2407961 - RNA, 19 nt, Artificial Sequence
  Description of Artificial Sequence: Synthetic oligonucleotide
  Antisense strand to SEQ ID NO: 2407960
ucauuucuuaaggaugucu

SEQ ID NO: 2407962 - RNA, 19 nt, Artificial Sequence
  Description of Artificial Sequence: Synthetic oligonucleotide
  Sense strand starting at position 1432 of SEQ ID NO: 1886411
gagucuuaaauuuggcgua

SEQ ID NO: 2407963 - RNA, 19 nt, Artificial Sequence
  Description of Artificial Sequence: Synthetic oligonucleotide
  Antisense strand to SEQ ID NO: 2407962
uacgccaaauuuaagacuc

SEQ ID NO: 2407964 - RNA, 19 nt, Artificial Sequence
  Description of Artificial Sequence: Synthetic oligonucleotide
  Sense strand starting at position 1434 of SEQ ID NO: 1886411
gucuuaaauuuggcguaga

SEQ ID NO: 2407965 - RNA, 19 nt, Artificial Sequence
  Description of Artificial Sequence: Synthetic oligonucleotide
  Antisense strand to SEQ ID NO: 2407964
ucuacgccaaauuuaagac

SEQ ID NO: 2407966 - RNA, 19 nt, Artificial Sequence
  Description of Artificial Sequence: Synthetic oligonucleotide
  Sense strand starting at position 1499 of SEQ ID NO: 1886411
caauaucuugcaggagucu

SEQ ID NO: 2407967 - RNA, 19 nt, Artificial Sequence
  Description of Artificial Sequence: Synthetic oligonucleotide
  Antisense strand to SEQ ID NO: 2407966
agacuccugcaagauauug

SEQ ID NO: 2407968 - RNA, 19 nt, Artificial Sequence
  Description of Artificial Sequence: Synthetic oligonucleotide
  Sense strand starting at position 1664 of SEQ ID NO: 1886411
ugauguaaugaggaugucu

SEQ ID NO: 2407969 - RNA, 19 nt, Artificial Sequence
  Description of Artificial Sequence: Synthetic oligonucleotide
  Antisense strand to SEQ ID NO: 2407968
agacauccucauuacauca

SEQ ID NO: 2407970 - RNA, 19 nt, Artificial Sequence
  Description of Artificial Sequence: Synthetic oligonucleotide
  Sense strand starting at position 1666 of SEQ ID NO: 1886411
auguaaugaggaugucugu

SEQ ID NO: 2407971 - RNA, 19 nt, Artificial Sequence
  Description of Artificial Sequence: Synthetic oligonucleotide
  Antisense strand to SEQ ID NO: 2407970
acagacauccucauuacau

SEQ ID NO: 2407972 - RNA, 19 nt, Artificial Sequence
  Description of Artificial Sequence: Synthetic oligonucleotide
  Sense strand starting at position 1672 of SEQ ID NO: 1886411
ugaggaugucugugugaca

SEQ ID NO: 2407973 - RNA, 19 nt, Artificial Sequence
  Description of Artificial Sequence: Synthetic oligonucleotide
  Antisense strand to SEQ ID NO: 2407972
ugucacacagacauccuca

SEQ ID NO: 2407974 - RNA, 19 nt, Artificial Sequence
  Description of Artificial Sequence: Synthetic oligonucleotide
  Sense strand starting at position 1673 of SEQ ID NO: 1886411
gaggaugucugugugacag

SEQ ID NO: 2407975 - RNA, 19 nt, Artificial Sequence
  Description of Artificial Sequence: Synthetic oligonucleotide
  Antisense strand to SEQ ID NO: 2407974
cugucacacagacauccuc

SEQ ID NO: 2407976 - RNA, 19 nt, Artificial Sequence
  Description of Artificial Sequence: Synthetic oligonucleotide
  Sense strand starting at position 2377 of SEQ ID NO: 1886411
ucccgucuccaugacaaua

SEQ ID NO: 2407977 - RNA, 19 nt, Artificial Sequence
  Description of Artificial Sequence: Synthetic oligonucleotide
  Antisense strand to SEQ ID NO: 2407976
uauugucauggagacggga

SEQ ID NO: 2407978 - RNA, 19 nt, Artificial Sequence
  Description of Artificial Sequence: Synthetic oligonucleotide
  Sense strand starting at position 2492 of SEQ ID NO: 1886411
cgcccaaucauaggugaag

SEQ ID NO: 2407979 - RNA, 19 nt, Artificial Sequence
  Description of Artificial Sequence: Synthetic oligonucleotide
  Antisense strand to SEQ ID NO: 2407978
cuucaccuaugauugggcg

SEQ ID NO: 2407980 - RNA, 19 nt, Artificial Sequence
  Description of Artificial Sequence: Synthetic oligonucleotide
  Sense strand starting at position 2550 of SEQ ID NO: 1886411
cggagaauguagucugaac

SEQ ID NO: 2407981 - RNA, 19 nt, Artificial Sequence
  Description of Artificial Sequence: Synthetic oligonucleotide
  Antisense strand to SEQ ID NO: 2407980
guucagacuacauucuccg

SEQ ID NO: 2407982 - RNA, 19 nt, Artificial Sequence
  Description of Artificial Sequence: Synthetic oligonucleotide
  Sense strand starting at position 2683 of SEQ ID NO: 1886411
gugugagaucgcgaaauaa

SEQ ID NO: 2407983 - RNA, 19 nt, Artificial Sequence
  Description of Artificial Sequence: Synthetic oligonucleotide
  Antisense strand to SEQ ID NO: 2407982
uuauuucgcgaucucacac

SEQ ID NO: 2407984 - RNA, 19 nt, Artificial Sequence
  Description of Artificial Sequence: Synthetic oligonucleotide
  Sense strand starting at position 2687 of SEQ ID NO: 1886411
gagaucgcgaaauaaagua

SEQ ID NO: 2407985 - RNA, 19 nt, Artificial Sequence
  Description of Artificial Sequence: Synthetic oligonucleotide
  Antisense strand to SEQ ID NO: 2407984
uacuuuauuucgcgaucuc

SEQ ID NO: 2407986 - RNA, 19 nt, Artificial Sequence
  Description of Artificial Sequence: Synthetic oligonucleotide
  Sense strand starting at position 2720 of SEQ ID NO: 1886411
aagucaaugcgagaaacuu

SEQ ID NO: 2407987 - RNA, 19 nt, Artificial Sequence
  Description of Artificial Sequence: Synthetic oligonucleotide
  Antisense strand to SEQ ID NO: 2407986
aaguuucucgcauugacuu

SEQ ID NO: 2407988 - RNA, 19 nt, Artificial Sequence
  Description of Artificial Sequence: Synthetic oligonucleotide
  Sense strand starting at position 2728 of SEQ ID NO: 1886411
gcgagaaacuuuguauaua

SEQ ID NO: 2407989 - RNA, 19 nt, Artificial Sequence
  Description of Artificial Sequence: Synthetic oligonucleotide
  Antisense strand to SEQ ID NO: 2407988
uauauacaaaguuucucgc

SEQ ID NO: 2407990 - RNA, 19 nt, Artificial Sequence
  Description of Artificial Sequence: Synthetic oligonucleotide
  Sense strand starting at position 2743 of SEQ ID NO: 1886411
uauaguuaugcuucggcuu

SEQ ID NO: 2407991 - RNA, 19 nt, Artificial Sequence
  Description of Artificial Sequence: Synthetic oligonucleotide
  Antisense strand to SEQ ID NO: 2407990
aagccgaagcauaacuaua

SEQ ID NO: 2407992 - RNA, 19 nt, Artificial Sequence
  Description of Artificial Sequence: Synthetic oligonucleotide
  Sense strand starting at position 3097 of SEQ ID NO: 1886411
aggcgacuuaguuaaacaa

SEQ ID NO: 2407993 - RNA, 19 nt, Artificial Sequence
  Description of Artificial Sequence: Synthetic oligonucleotide
  Antisense strand to SEQ ID NO: 2407992
uuguuuaacuaagucgccu

SEQ ID NO: 2407994 - RNA, 19 nt, Artificial Sequence
  Description of Artificial Sequence: Synthetic oligonucleotide
  Sense strand starting at position 3480 of SEQ ID NO: 1886411
ucggcucucccagagacuu

SEQ ID NO: 2407995 - RNA, 19 nt, Artificial Sequence
  Description of Artificial Sequence: Synthetic oligonucleotide
  Antisense strand to SEQ ID NO: 2407994
aagucucugggagagccga

SEQ ID NO: 2407996 - RNA, 19 nt, Artificial Sequence
  Description of Artificial Sequence: Synthetic oligonucleotide
  Sense strand starting at position 3617 of SEQ ID NO: 1886411
ccgcgaucuacuguggcua

SEQ ID NO: 2407997 - RNA, 19 nt, Artificial Sequence
  Description of Artificial Sequence: Synthetic oligonucleotide
  Antisense strand to SEQ ID NO: 2407996
uagccacaguagaucgcgg

SEQ ID NO: 2407998 - RNA, 19 nt, Artificial Sequence
  Description of Artificial Sequence: Synthetic oligonucleotide
  Sense strand starting at position 3759 of SEQ ID NO: 1886411
cugggaugugauugucauc

SEQ ID NO: 2407999 - RNA, 19 nt, Artificial Sequence
  Description of Artificial Sequence: Synthetic oligonucleotide
  Antisense strand to SEQ ID NO: 2407998
gaugacaaucacaucccag

SEQ ID NO: 2408000 - RNA, 19 nt, Artificial Sequence
  Description of Artificial Sequence: Synthetic oligonucleotide
  Sense strand starting at position 2 of SEQ ID NO: 1886413
uugagauaucuguaacucu

SEQ ID NO: 2408001 - RNA, 19 nt, Artificial Sequence
  Description of Artificial Sequence: Synthetic oligonucleotide
  Antisense strand to SEQ ID NO: 2408000
agaguuacagauaucucaa

SEQ ID NO: 2408002 - RNA, 19 nt, Artificial Sequence
  Description of Artificial Sequence: Synthetic oligonucleotide
  Sense strand starting at position 53 of SEQ ID NO: 1886413
gaaucaucuuugucaagga

SEQ ID NO: 2408003 - RNA, 19 nt, Artificial Sequence
  Description of Artificial Sequence: Synthetic oligonucleotide
  Antisense strand to SEQ ID NO: 2408002
uccuugacaaagaugauuc

SEQ ID NO: 2408004 - RNA, 19 nt, Artificial Sequence
  Description of Artificial Sequence: Synthetic oligonucleotide
  Sense strand starting at position 186 of SEQ ID NO: 1886413
uggccuaaucacggaggaa

SEQ ID NO: 2408005 - RNA, 19 nt, Artificial Sequence
  Description of Artificial Sequence: Synthetic oligonucleotide
  Antisense strand to SEQ ID NO: 2408004
uuccuccgugauuaggcca

SEQ ID NO: 2408006 - RNA, 19 nt, Artificial Sequence
  Description of Artificial Sequence: Synthetic oligonucleotide
  Sense strand starting at position 304 of SEQ ID NO: 1886413
ucagcagaguuaguuuaga

SEQ ID NO: 2408007 - RNA, 19 nt, Artificial Sequence
  Description of Artificial Sequence: Synthetic oligonucleotide
  Antisense strand to SEQ ID NO: 2408006
ucuaaacuaacucugcuga

SEQ ID NO: 2408008 - RNA, 19 nt, Artificial Sequence
  Description of Artificial Sequence: Synthetic oligonucleotide
  Sense strand starting at position 333 of SEQ ID NO: 1886413
gucucucuucccuaggaca

SEQ ID NO: 2408009 - RNA, 19 nt, Artificial Sequence
  Description of Artificial Sequence: Synthetic oligonucleotide
  Antisense strand to SEQ ID NO: 2408008
uguccuagggaagagagac

SEQ ID NO: 2408010 - RNA, 19 nt, Artificial Sequence
  Description of Artificial Sequence: Synthetic oligonucleotide
  Sense strand starting at position 347 of SEQ ID NO: 1886413
ggacaacagcuuugcauaa

SEQ ID NO: 2408011 - RNA, 19 nt, Artificial Sequence
  Description of Artificial Sequence: Synthetic oligonucleotide
  Antisense strand to SEQ ID NO: 2408010
uuaugcaaagcuguugucc

SEQ ID NO: 2408012 - RNA, 19 nt, Artificial Sequence
  Description of Artificial Sequence: Synthetic oligonucleotide
  Sense strand starting at position 522 of SEQ ID NO: 1886413
gcccucugaguuggauaca

SEQ ID NO: 2408013 - RNA, 19 nt, Artificial Sequence
  Description of Artificial Sequence: Synthetic oligonucleotide
  Antisense strand to SEQ ID NO: 2408012
uguauccaacucagagggc

SEQ ID NO: 2408014 - RNA, 19 nt, Artificial Sequence
  Description of Artificial Sequence: Synthetic oligonucleotide
  Sense strand starting at position 729 of SEQ ID NO: 1886413
gugcuucuauuugauuuga

SEQ ID NO: 2408015 - RNA, 19 nt, Artificial Sequence
  Description of Artificial Sequence: Synthetic oligonucleotide
  Antisense strand to SEQ ID NO: 2408014
ucaaaucaaauagaagcac

SEQ ID NO: 2408016 - RNA, 19 nt, Artificial Sequence
  Description of Artificial Sequence: Synthetic oligonucleotide
  Sense strand starting at position 740 of SEQ ID NO: 1886413
ugauuugauuguguguaug

SEQ ID NO: 2408017 - RNA, 19 nt, Artificial Sequence
  Description of Artificial Sequence: Synthetic oligonucleotide
  Antisense strand to SEQ ID NO: 2408016
cauacacacaaucaaauca

SEQ ID NO: 2408018 - RNA, 19 nt, Artificial Sequence
  Description of Artificial Sequence: Synthetic oligonucleotide
  Sense strand starting at position 806 of SEQ ID NO: 1886413
aggauuuauaugcgugagu

SEQ ID NO: 2408019 - RNA, 19 nt, Artificial Sequence
  Description of Artificial Sequence: Synthetic oligonucleotide
  Antisense strand to SEQ ID NO: 2408018
acucacgcauauaaauccu

SEQ ID NO: 2408020 - RNA, 19 nt, Artificial Sequence
  Description of Artificial Sequence: Synthetic oligonucleotide
  Sense strand starting at position 807 of SEQ ID NO: 1886413
ggauuuauaugcgugaguu

SEQ ID NO: 2408021 - RNA, 19 nt, Artificial Sequence
  Description of Artificial Sequence: Synthetic oligonucleotide
  Antisense strand to SEQ ID NO: 2408020
aacucacgcauauaaaucc

SEQ ID NO: 2408022 - RNA, 19 nt, Artificial Sequence
  Description of Artificial Sequence: Synthetic oligonucleotide
  Sense strand starting at position 808 of SEQ ID NO: 1886413
gauuuauaugcgugaguuu

SEQ ID NO: 2408023 - RNA, 19 nt, Artificial Sequence
  Description of Artificial Sequence: Synthetic oligonucleotide
  Antisense strand to SEQ ID NO: 2408022
aaacucacgcauauaaauc

SEQ ID NO: 2408024 - RNA, 19 nt, Artificial Sequence
  Description of Artificial Sequence: Synthetic oligonucleotide
  Sense strand starting at position 2012 of SEQ ID NO: 1886413
uggcuuccuguuuagaauc

SEQ ID NO: 2408025 - RNA, 19 nt, Artificial Sequence
  Description of Artificial Sequence: Synthetic oligonucleotide
  Antisense strand to SEQ ID NO: 2408024
gauucuaaacaggaagcca

SEQ ID NO: 2408026 - RNA, 19 nt, Artificial Sequence
  Description of Artificial Sequence: Synthetic oligonucleotide
  Sense strand starting at position 2031 of SEQ ID NO: 1886413
gcagcuucugauuggauca

SEQ ID NO: 2408027 - RNA, 19 nt, Artificial Sequence
  Description of Artificial Sequence: Synthetic oligonucleotide
  Antisense strand to SEQ ID NO: 2408026
ugauccaaucagaagcugc

SEQ ID NO: 2408028 - RNA, 19 nt, Artificial Sequence
  Description of Artificial Sequence: Synthetic oligonucleotide
  Sense strand starting at position 2103 of SEQ ID NO: 1886413
aaguuaagcuuugucagga

SEQ ID NO: 2408029 - RNA, 19 nt, Artificial Sequence
  Description of Artificial Sequence: Synthetic oligonucleotide
  Antisense strand to SEQ ID NO: 2408028
uccugacaaagcuuaacuu

SEQ ID NO: 2408030 - RNA, 19 nt, Artificial Sequence
  Description of Artificial Sequence: Synthetic oligonucleotide
  Sense strand starting at position 2403 of SEQ ID NO: 1886413
caggaagacuuguuccagu

SEQ ID NO: 2408031 - RNA, 19 nt, Artificial Sequence
  Description of Artificial Sequence: Synthetic oligonucleotide
  Antisense strand to SEQ ID NO: 2408030
acuggaacaagucuuccug

SEQ ID NO: 2408032 - RNA, 19 nt, Artificial Sequence
  Description of Artificial Sequence: Synthetic oligonucleotide
  Sense strand starting at position 2414 of SEQ ID NO: 1886413
guuccagugugaucugaca

SEQ ID NO: 2408033 - RNA, 19 nt, Artificial Sequence
  Description of Artificial Sequence: Synthetic oligonucleotide
  Antisense strand to SEQ ID NO: 2408032
ugucagaucacacuggaac

SEQ ID NO: 2408034 - RNA, 19 nt, Artificial Sequence
  Description of Artificial Sequence: Synthetic oligonucleotide
  Sense strand starting at position 2416 of SEQ ID NO: 1886413
uccagugugaucugacaga

SEQ ID NO: 2408035 - RNA, 19 nt, Artificial Sequence
  Description of Artificial Sequence: Synthetic oligonucleotide
  Antisense strand to SEQ ID NO: 2408034
ucugucagaucacacugga

SEQ ID NO: 2408036 - RNA, 19 nt, Artificial Sequence
  Description of Artificial Sequence: Synthetic oligonucleotide
  Sense strand starting at position 2677 of SEQ ID NO: 1886413
auggacuaauagucggauu

SEQ ID NO: 2408037 - RNA, 19 nt, Artificial Sequence
  Description of Artificial Sequence: Synthetic oligonucleotide
  Antisense strand to SEQ ID NO: 2408036
aauccgacuauuaguccau

SEQ ID NO: 2408038 - RNA, 19 nt, Artificial Sequence
  Description of Artificial Sequence: Synthetic oligonucleotide
  Sense strand starting at position 2680 of SEQ ID NO: 1886413
gacuaauagucggauuuag

SEQ ID NO: 2408039 - RNA, 19 nt, Artificial Sequence
  Description of Artificial Sequence: Synthetic oligonucleotide
  Antisense strand to SEQ ID NO: 2408038
cuaaauccgacuauuaguc

SEQ ID NO: 2408040 - RNA, 19 nt, Artificial Sequence
  Description of Artificial Sequence: Synthetic oligonucleotide
  Sense strand starting at position 2730 of SEQ ID NO: 1886413
guguuuggaaaguaaccua

SEQ ID NO: 2408041 - RNA, 19 nt, Artificial Sequence
  Description of Artificial Sequence: Synthetic oligonucleotide
  Antisense strand to SEQ ID NO: 2408040
uagguuacuuuccaaacac

SEQ ID NO: 2408042 - RNA, 19 nt, Artificial Sequence
  Description of Artificial Sequence: Synthetic oligonucleotide
  Sense strand starting at position 2852 of SEQ ID NO: 1886413
gggcaagauuucuaccauc

SEQ ID NO: 2408043 - RNA, 19 nt, Artificial Sequence
  Description of Artificial Sequence: Synthetic oligonucleotide
  Antisense strand to SEQ ID NO: 2408042
gaugguagaaaucuugccc

SEQ ID NO: 2408044 - RNA, 19 nt, Artificial Sequence
  Description of Artificial Sequence: Synthetic oligonucleotide
  Sense strand starting at position 2902 of SEQ ID NO: 1886413
aguuaaggaucccuugguu

SEQ ID NO: 2408045 - RNA, 19 nt, Artificial Sequence
  Description of Artificial Sequence: Synthetic oligonucleotide
  Antisense strand to SEQ ID NO: 2408044
aaccaagggauccuuaacu

SEQ ID NO: 2408046 - RNA, 19 nt, Artificial Sequence
  Description of Artificial Sequence: Synthetic oligonucleotide
  Sense strand starting at position 2905 of SEQ ID NO: 1886413
uaaggaucccuugguucuu

SEQ ID NO: 2408047 - RNA, 19 nt, Artificial Sequence
  Description of Artificial Sequence: Synthetic oligonucleotide
  Antisense strand to SEQ ID NO: 2408046
aagaaccaagggauccuua

SEQ ID NO: 2408048 - RNA, 19 nt, Artificial Sequence
  Description of Artificial Sequence: Synthetic oligonucleotide
  Sense strand starting at position 2949 of SEQ ID NO: 1886413
ggauaauaggaccggugaa

SEQ ID NO: 2408049 - RNA, 19 nt, Artificial Sequence
  Description of Artificial Sequence: Synthetic oligonucleotide
  Antisense strand to SEQ ID NO: 2408048
uucaccgguccuauuaucc

SEQ ID NO: 2408050 - RNA, 19 nt, Artificial Sequence
  Description of Artificial Sequence: Synthetic oligonucleotide
  Sense strand starting at position 2950 of SEQ ID NO: 1886413
gauaauaggaccggugaau

SEQ ID NO: 2408051 - RNA, 19 nt, Artificial Sequence
  Description of Artificial Sequence: Synthetic oligonucleotide
  Antisense strand to SEQ ID NO: 2408050
auucaccgguccuauuauc

SEQ ID NO: 2408052 - RNA, 19 nt, Artificial Sequence
  Description of Artificial Sequence: Synthetic oligonucleotide
  Sense strand starting at position 2959 of SEQ ID NO: 1886413
accggugaauaaucuuaca

SEQ ID NO: 2408053 - RNA, 19 nt, Artificial Sequence
  Description of Artificial Sequence: Synthetic oligonucleotide
  Antisense strand to SEQ ID NO: 2408052
uguaagauuauucaccggu

SEQ ID NO: 2408054 - RNA, 19 nt, Artificial Sequence
  Description of Artificial Sequence: Synthetic oligonucleotide
  Sense strand starting at position 3036 of SEQ ID NO: 1886413
guggauagaggagguuaau

SEQ ID NO: 2408055 - RNA, 19 nt, Artificial Sequence
  Description of Artificial Sequence: Synthetic oligonucleotide
  Antisense strand to SEQ ID NO: 2408054
auuaaccuccucuauccac

SEQ ID NO: 2408056 - RNA, 19 nt, Artificial Sequence
  Description of Artificial Sequence: Synthetic oligonucleotide
  Sense strand starting at position 3084 of SEQ ID NO: 1886413
ucucuuugguauccaugau

SEQ ID NO: 2408057 - RNA, 19 nt, Artificial Sequence
  Description of Artificial Sequence: Synthetic oligonucleotide
  Antisense strand to SEQ ID NO: 2408056
aucauggauaccaaagaga

SEQ ID NO: 2408058 - RNA, 19 nt, Artificial Sequence
  Description of Artificial Sequence: Synthetic oligonucleotide
  Sense strand starting at position 3136 of SEQ ID NO: 1886413
gaacuagucuuauuaugug

SEQ ID NO: 2408059 - RNA, 19 nt, Artificial Sequence
  Description of Artificial Sequence: Synthetic oligonucleotide
  Antisense strand to SEQ ID NO: 2408058
cacauaauaagacuaguuc

SEQ ID NO: 2408060 - RNA, 19 nt, Artificial Sequence
  Description of Artificial Sequence: Synthetic oligonucleotide
  Sense strand starting at position 3140 of SEQ ID NO: 1886413
uagucuuauuauguggagu

SEQ ID NO: 2408061 - RNA, 19 nt, Artificial Sequence
  Description of Artificial Sequence: Synthetic oligonucleotide
  Antisense strand to SEQ ID NO: 2408060
acuccacauaauaagacua

SEQ ID NO: 2408062 - RNA, 19 nt, Artificial Sequence
  Description of Artificial Sequence: Synthetic oligonucleotide
  Sense strand starting at position 3573 of SEQ ID NO: 1886413
acgagacuuuauuccuaaa

SEQ ID NO: 2408063 - RNA, 19 nt, Artificial Sequence
  Description of Artificial Sequence: Synthetic oligonucleotide
  Antisense strand to SEQ ID NO: 2408062
uuuaggaauaaagucucgu

SEQ ID NO: 2408064 - RNA, 19 nt, Artificial Sequence
  Description of Artificial Sequence: Synthetic oligonucleotide
  Sense strand starting at position 3603 of SEQ ID NO: 1886413
gaaucugaaccaggauguu

SEQ ID NO: 2408065 - RNA, 19 nt, Artificial Sequence
  Description of Artificial Sequence: Synthetic oligonucleotide
  Antisense strand to SEQ ID NO: 2408064
aacauccugguucagauuc

SEQ ID NO: 2408066 - RNA, 19 nt, Artificial Sequence
  Description of Artificial Sequence: Synthetic oligonucleotide
  Sense strand starting at position 3740 of SEQ ID NO: 1886413
uaagaauagccucacgugu

SEQ ID NO: 2408067 - RNA, 19 nt, Artificial Sequence
  Description of Artificial Sequence: Synthetic oligonucleotide
  Antisense strand to SEQ ID NO: 2408066
acacgugaggcuauucuua

SEQ ID NO: 2408068 - RNA, 19 nt, Artificial Sequence
  Description of Artificial Sequence: Synthetic oligonucleotide
  Sense strand starting at position 3800 of SEQ ID NO: 1886413
uguucuaguuucuuauaca

SEQ ID NO: 2408069 - RNA, 19 nt, Artificial Sequence
  Description of Artificial Sequence: Synthetic oligonucleotide
  Antisense strand to SEQ ID NO: 2408068
uguauaagaaacuagaaca

SEQ ID NO: 2408070 - RNA, 19 nt, Artificial Sequence
  Description of Artificial Sequence: Synthetic oligonucleotide
  Sense strand starting at position 3807 of SEQ ID NO: 1886413
guuucuuauacaggugagu

SEQ ID NO: 2408071 - RNA, 19 nt, Artificial Sequence
  Description of Artificial Sequence: Synthetic oligonucleotide
  Antisense strand to SEQ ID NO: 2408070
acucaccuguauaagaaac

SEQ ID NO: 2408072 - RNA, 19 nt, Artificial Sequence
  Description of Artificial Sequence: Synthetic oligonucleotide
  Sense strand starting at position 3810 of SEQ ID NO: 1886413
ucuuauacaggugaguaau

SEQ ID NO: 2408073 - RNA, 19 nt, Artificial Sequence
  Description of Artificial Sequence: Synthetic oligonucleotide
  Antisense strand to SEQ ID NO: 2408072
auuacucaccuguauaaga

SEQ ID NO: 2408074 - RNA, 19 nt, Artificial Sequence
  Description of Artificial Sequence: Synthetic oligonucleotide
  Sense strand starting at position 3821 of SEQ ID NO: 1886413
ugaguaaugauccacuggu

SEQ ID NO: 2408075 - RNA, 19 nt, Artificial Sequence
  Description of Artificial Sequence: Synthetic oligonucleotide
  Antisense strand to SEQ ID NO: 2408074
accaguggaucauuacuca

SEQ ID NO: 2408076 - RNA, 19 nt, Artificial Sequence
  Description of Artificial Sequence: Synthetic oligonucleotide
  Sense strand starting at position 3859 of SEQ ID NO: 1886413
uggugucuauuccuaauuu

SEQ ID NO: 2408077 - RNA, 19 nt, Artificial Sequence
  Description of Artificial Sequence: Synthetic oligonucleotide
  Antisense strand to SEQ ID NO: 2408076
aaauuaggaauagacacca

SEQ ID NO: 2408078 - RNA, 19 nt, Artificial Sequence
  Description of Artificial Sequence: Synthetic oligonucleotide
  Sense strand starting at position 3971 of SEQ ID NO: 1886413
uuuguaacagugugggauu

SEQ ID NO: 2408079 - RNA, 19 nt, Artificial Sequence
  Description of Artificial Sequence: Synthetic oligonucleotide
  Antisense strand to SEQ ID NO: 2408078
aaucccacacuguuacaaa

SEQ ID NO: 2408080 - RNA, 19 nt, Artificial Sequence
  Description of Artificial Sequence: Synthetic oligonucleotide
  Sense strand starting at position 275 of SEQ ID NO: 1886414
cccugcuguggugacaauu

SEQ ID NO: 2408081 - RNA, 19 nt, Artificial Sequence
  Description of Artificial Sequence: Synthetic oligonucleotide
  Antisense strand to SEQ ID NO: 2408080
aauugucaccacagcaggg

SEQ ID NO: 2408082 - RNA, 19 nt, Artificial Sequence
  Description of Artificial Sequence: Synthetic oligonucleotide
  Sense strand starting at position 281 of SEQ ID NO: 1886414
uguggugacaauuagcaga

SEQ ID NO: 2408083 - RNA, 19 nt, Artificial Sequence
  Description of Artificial Sequence: Synthetic oligonucleotide
  Antisense strand to SEQ ID NO: 2408082
ucugcuaauugucaccaca

SEQ ID NO: 2408084 - RNA, 19 nt, Artificial Sequence
  Description of Artificial Sequence: Synthetic oligonucleotide
  Sense strand starting at position 286 of SEQ ID NO: 1886414
ugacaauuagcagaacgca

SEQ ID NO: 2408085 - RNA, 19 nt, Artificial Sequence
  Description of Artificial Sequence: Synthetic oligonucleotide
  Antisense strand to SEQ ID NO: 2408084
ugcguucugcuaauuguca

SEQ ID NO: 2408086 - RNA, 19 nt, Artificial Sequence
  Description of Artificial Sequence: Synthetic oligonucleotide
  Sense strand starting at position 340 of SEQ ID NO: 1886414
uuaccuugccauugagaac

SEQ ID NO: 2408087 - RNA, 19 nt, Artificial Sequence
  Description of Artificial Sequence: Synthetic oligonucleotide
  Antisense strand to SEQ ID NO: 2408086
guucucaauggcaagguaa

SEQ ID NO: 2408088 - RNA, 19 nt, Artificial Sequence
  Description of Artificial Sequence: Synthetic oligonucleotide
  Sense strand starting at position 470 of SEQ ID NO: 1886414
gguuuccaucaagaaagcu

SEQ ID NO: 2408089 - RNA, 19 nt, Artificial Sequence
  Description of Artificial Sequence: Synthetic oligonucleotide
  Antisense strand to SEQ ID NO: 2408088
agcuuucuugauggaaacc

SEQ ID NO: 2408090 - RNA, 19 nt, Artificial Sequence
  Description of Artificial Sequence: Synthetic oligonucleotide
  Sense strand starting at position 517 of SEQ ID NO: 1886414
gggugcuguccacaaugga

SEQ ID NO: 2408091 - RNA, 19 nt, Artificial Sequence
  Description of Artificial Sequence: Synthetic oligonucleotide
  Antisense strand to SEQ ID NO: 2408090
uccauuguggacagcaccc

SEQ ID NO: 2408092 - RNA, 19 nt, Artificial Sequence
  Description of Artificial Sequence: Synthetic oligonucleotide
  Sense strand starting at position 571 of SEQ ID NO: 1886414
aggaaacuauggcugagua

SEQ ID NO: 2408093 - RNA, 19 nt, Artificial Sequence
  Description of Artificial Sequence: Synthetic oligonucleotide
  Antisense strand to SEQ ID NO: 2408092
uacucagccauaguuuccu

SEQ ID NO: 2408094 - RNA, 19 nt, Artificial Sequence
  Description of Artificial Sequence: Synthetic oligonucleotide
  Sense strand starting at position 572 of SEQ ID NO: 1886414
ggaaacuauggcugaguau

SEQ ID NO: 2408095 - RNA, 19 nt, Artificial Sequence
  Description of Artificial Sequence: Synthetic oligonucleotide
  Antisense strand to SEQ ID NO: 2408094
auacucagccauaguuucc

SEQ ID NO: 2408096 - RNA, 19 nt, Artificial Sequence
  Description of Artificial Sequence: Synthetic oligonucleotide
  Sense strand starting at position 902 of SEQ ID NO: 1886414
ggaauaaacucauaauuug

SEQ ID NO: 2408097 - RNA, 19 nt, Artificial Sequence
  Description of Artificial Sequence: Synthetic oligonucleotide
  Antisense strand to SEQ ID NO: 2408096
caaauuaugaguuuauucc

SEQ ID NO: 2408098 - RNA, 19 nt, Artificial Sequence
  Description of Artificial Sequence: Synthetic oligonucleotide
  Sense strand starting at position 1002 of SEQ ID NO: 1886414
gauaaugacuaugaguauc

SEQ ID NO: 2408099 - RNA, 19 nt, Artificial Sequence
  Description of Artificial Sequence: Synthetic oligonucleotide
  Antisense strand to SEQ ID NO: 2408098
gauacucauagucauuauc

SEQ ID NO: 2408100 - RNA, 19 nt, Artificial Sequence
  Description of Artificial Sequence: Synthetic oligonucleotide
  Sense strand starting at position 1014 of SEQ ID NO: 1886414
gaguaucagaguugugaga

SEQ ID NO: 2408101 - RNA, 19 nt, Artificial Sequence
  Description of Artificial Sequence: Synthetic oligonucleotide
  Antisense strand to SEQ ID NO: 2408100
ucucacaacucugauacuc

SEQ ID NO: 2408102 - RNA, 19 nt, Artificial Sequence
  Description of Artificial Sequence: Synthetic oligonucleotide
  Sense strand starting at position 1109 of SEQ ID NO: 1886414
auguacugaucauaaagaa

SEQ ID NO: 2408103 - RNA, 19 nt, Artificial Sequence
  Description of Artificial Sequence: Synthetic oligonucleotide
  Antisense strand to SEQ ID NO: 2408102
uucuuuaugaucaguacau

SEQ ID NO: 2408104 - RNA, 19 nt, Artificial Sequence
  Description of Artificial Sequence: Synthetic oligonucleotide
  Sense strand starting at position 1491 of SEQ ID NO: 1886414
gcccgaaguccgagcugua

SEQ ID NO: 2408105 - RNA, 19 nt, Artificial Sequence
  Description of Artificial Sequence: Synthetic oligonucleotide
  Antisense strand to SEQ ID NO: 2408104
uacagcucggacuucgggc

SEQ ID NO: 2408106 - RNA, 19 nt, Artificial Sequence
  Description of Artificial Sequence: Synthetic oligonucleotide
  Sense strand starting at position 1501 of SEQ ID NO: 1886414
cgagcuguaauucguauga

SEQ ID NO: 2408107 - RNA, 19 nt, Artificial Sequence
  Description of Artificial Sequence: Synthetic oligonucleotide
  Antisense strand to SEQ ID NO: 2408106
ucauacgaauuacagcucg

SEQ ID NO: 2408108 - RNA, 19 nt, Artificial Sequence
  Description of Artificial Sequence: Synthetic oligonucleotide
  Sense strand starting at position 1505 of SEQ ID NO: 1886414
cuguaauucguaugaacag

SEQ ID NO: 2408109 - RNA, 19 nt, Artificial Sequence
  Description of Artificial Sequence: Synthetic oligonucleotide
  Antisense strand to SEQ ID NO: 2408108
cuguucauacgaauuacag

SEQ ID NO: 2408110 - RNA, 19 nt, Artificial Sequence
  Description of Artificial Sequence: Synthetic oligonucleotide
  Sense strand starting at position 1649 of SEQ ID NO: 1886414
cuagauaauccgggacuaa

SEQ ID NO: 2408111 - RNA, 19 nt, Artificial Sequence
  Description of Artificial Sequence: Synthetic oligonucleotide
  Antisense strand to SEQ ID NO: 2408110
uuagucccggauuaucuag

SEQ ID NO: 2408112 - RNA, 19 nt, Artificial Sequence
  Description of Artificial Sequence: Synthetic oligonucleotide
  Sense strand starting at position 2025 of SEQ ID NO: 1886414
gauuuaauuggccggaguu

SEQ ID NO: 2408113 - RNA, 19 nt, Artificial Sequence
  Description of Artificial Sequence: Synthetic oligonucleotide
  Antisense strand to SEQ ID NO: 2408112
aacuccggccaauuaaauc

SEQ ID NO: 2408114 - RNA, 19 nt, Artificial Sequence
  Description of Artificial Sequence: Synthetic oligonucleotide
  Sense strand starting at position 2026 of SEQ ID NO: 1886414
auuuaauuggccggaguuu

SEQ ID NO: 2408115 - RNA, 19 nt, Artificial Sequence
  Description of Artificial Sequence: Synthetic oligonucleotide
  Antisense strand to SEQ ID NO: 2408114
aaacuccggccaauuaaau

SEQ ID NO: 2408116 - RNA, 19 nt, Artificial Sequence
  Description of Artificial Sequence: Synthetic oligonucleotide
  Sense strand starting at position 2027 of SEQ ID NO: 1886414
uuuaauuggccggaguuua

SEQ ID NO: 2408117 - RNA, 19 nt, Artificial Sequence
  Description of Artificial Sequence: Synthetic oligonucleotide
  Antisense strand to SEQ ID NO: 2408116
uaaacuccggccaauuaaa

SEQ ID NO: 2408118 - RNA, 19 nt, Artificial Sequence
  Description of Artificial Sequence: Synthetic oligonucleotide
  Sense strand starting at position 2427 of SEQ ID NO: 1886414
ucacgugguggcguuuaaa

SEQ ID NO: 2408119 - RNA, 19 nt, Artificial Sequence
  Description of Artificial Sequence: Synthetic oligonucleotide
  Antisense strand to SEQ ID NO: 2408118
uuuaaacgccaccacguga

SEQ ID NO: 2408120 - RNA, 19 nt, Artificial Sequence
  Description of Artificial Sequence: Synthetic oligonucleotide
  Sense strand starting at position 2430 of SEQ ID NO: 1886414
cgugguggcguuuaaagaa

SEQ ID NO: 2408121 - RNA, 19 nt, Artificial Sequence
  Description of Artificial Sequence: Synthetic oligonucleotide
  Antisense strand to SEQ ID NO: 2408120
uucuuuaaacgccaccacg

SEQ ID NO: 2408122 - RNA, 19 nt, Artificial Sequence
  Description of Artificial Sequence: Synthetic oligonucleotide
  Sense strand starting at position 2460 of SEQ ID NO: 1886414
acaguagcagcgcauuaau

SEQ ID NO: 2408123 - RNA, 19 nt, Artificial Sequence
  Description of Artificial Sequence: Synthetic oligonucleotide
  Antisense strand to SEQ ID NO: 2408122
auuaaugcgcugcuacugu

SEQ ID NO: 2408124 - RNA, 19 nt, Artificial Sequence
  Description of Artificial Sequence: Synthetic oligonucleotide
  Sense strand starting at position 2463 of SEQ ID NO: 1886414
guagcagcgcauuaauaca

SEQ ID NO: 2408125 - RNA, 19 nt, Artificial Sequence
  Description of Artificial Sequence: Synthetic oligonucleotide
  Antisense strand to SEQ ID NO: 2408124
uguauuaaugcgcugcuac

SEQ ID NO: 2408126 - RNA, 19 nt, Artificial Sequence
  Description of Artificial Sequence: Synthetic oligonucleotide
  Sense strand starting at position 2471 of SEQ ID NO: 1886414
gcauuaauacaauguguaa

SEQ ID NO: 2408127 - RNA, 19 nt, Artificial Sequence
  Description of Artificial Sequence: Synthetic oligonucleotide
  Antisense strand to SEQ ID NO: 2408126
uuacacauuguauuaaugc

SEQ ID NO: 2408128 - RNA, 19 nt, Artificial Sequence
  Description of Artificial Sequence: Synthetic oligonucleotide
  Sense strand starting at position 2483 of SEQ ID NO: 1886414
uguguaacaguuuguagau

SEQ ID NO: 2408129 - RNA, 19 nt, Artificial Sequence
  Description of Artificial Sequence: Synthetic oligonucleotide
  Antisense strand to SEQ ID NO: 2408128
aucuacaaacuguuacaca

SEQ ID NO: 2408130 - RNA, 19 nt, Artificial Sequence
  Description of Artificial Sequence: Synthetic oligonucleotide
  Sense strand starting at position 2484 of SEQ ID NO: 1886414
guguaacaguuuguagaua

SEQ ID NO: 2408131 - RNA, 19 nt, Artificial Sequence
  Description of Artificial Sequence: Synthetic oligonucleotide
  Antisense strand to SEQ ID NO: 2408130
uaucuacaaacuguuacac

SEQ ID NO: 2408132 - RNA, 19 nt, Artificial Sequence
  Description of Artificial Sequence: Synthetic oligonucleotide
  Sense strand starting at position 2497 of SEQ ID NO: 1886414
uagauaaagcuguaucgac

SEQ ID NO: 2408133 - RNA, 19 nt, Artificial Sequence
  Description of Artificial Sequence: Synthetic oligonucleotide
  Antisense strand to SEQ ID NO: 2408132
gucgauacagcuuuaucua

SEQ ID NO: 2408134 - RNA, 19 nt, Artificial Sequence
  Description of Artificial Sequence: Synthetic oligonucleotide
  Sense strand starting at position 2606 of SEQ ID NO: 1886414
uccuuucguguguuaaugu

SEQ ID NO: 2408135 - RNA, 19 nt, Artificial Sequence
  Description of Artificial Sequence: Synthetic oligonucleotide
  Antisense strand to SEQ ID NO: 2408134
acauuaacacacgaaagga

SEQ ID NO: 2408136 - RNA, 19 nt, Artificial Sequence
  Description of Artificial Sequence: Synthetic oligonucleotide
  Sense strand starting at position 2699 of SEQ ID NO: 1886414
cauaaaugguaugaucuga

SEQ ID NO: 2408137 - RNA, 19 nt, Artificial Sequence
  Description of Artificial Sequence: Synthetic oligonucleotide
  Antisense strand to SEQ ID NO: 2408136
ucagaucauaccauuuaug

SEQ ID NO: 2408138 - RNA, 19 nt, Artificial Sequence
  Description of Artificial Sequence: Synthetic oligonucleotide
  Sense strand starting at position 2707 of SEQ ID NO: 1886414
guaugaucugaaugguucu

SEQ ID NO: 2408139 - RNA, 19 nt, Artificial Sequence
  Description of Artificial Sequence: Synthetic oligonucleotide
  Antisense strand to SEQ ID NO: 2408138
agaaccauucagaucauac

SEQ ID NO: 2408140 - RNA, 19 nt, Artificial Sequence
  Description of Artificial Sequence: Synthetic oligonucleotide
  Sense strand starting at position 2714 of SEQ ID NO: 1886414
cugaaugguucugcagguu

SEQ ID NO: 2408141 - RNA, 19 nt, Artificial Sequence
  Description of Artificial Sequence: Synthetic oligonucleotide
  Antisense strand to SEQ ID NO: 2408140
aaccugcagaaccauucag

SEQ ID NO: 2408142 - RNA, 19 nt, Artificial Sequence
  Description of Artificial Sequence: Synthetic oligonucleotide
  Sense strand starting at position 2751 of SEQ ID NO: 1886414
aggacauguuuaucuaccu

SEQ ID NO: 2408143 - RNA, 19 nt, Artificial Sequence
  Description of Artificial Sequence: Synthetic oligonucleotide
  Antisense strand to SEQ ID NO: 2408142
agguagauaaacauguccu

SEQ ID NO: 2408144 - RNA, 19 nt, Artificial Sequence
  Description of Artificial Sequence: Synthetic oligonucleotide
  Sense strand starting at position 2752 of SEQ ID NO: 1886414
ggacauguuuaucuaccuu

SEQ ID NO: 2408145 - RNA, 19 nt, Artificial Sequence
  Description of Artificial Sequence: Synthetic oligonucleotide
  Antisense strand to SEQ ID NO: 2408144
aagguagauaaacaugucc

SEQ ID NO: 2408146 - RNA, 19 nt, Artificial Sequence
  Description of Artificial Sequence: Synthetic oligonucleotide
  Sense strand starting at position 3019 of SEQ ID NO: 1886414
gcccuugcuucuuuagacu

SEQ ID NO: 2408147 - RNA, 19 nt, Artificial Sequence
  Description of Artificial Sequence: Synthetic oligonucleotide
  Antisense strand to SEQ ID NO: 2408146
agucuaaagaagcaagggc

SEQ ID NO: 2408148 - RNA, 19 nt, Artificial Sequence
  Description of Artificial Sequence: Synthetic oligonucleotide
  Sense strand starting at position 3025 of SEQ ID NO: 1886414
gcuucuuuagacuguacuu

SEQ ID NO: 2408149 - RNA, 19 nt, Artificial Sequence
  Description of Artificial Sequence: Synthetic oligonucleotide
  Antisense strand to SEQ ID NO: 2408148
aaguacagucuaaagaagc

SEQ ID NO: 2408150 - RNA, 19 nt, Artificial Sequence
  Description of Artificial Sequence: Synthetic oligonucleotide
  Sense strand starting at position 3027 of SEQ ID NO: 1886414
uucuuuagacuguacuuua

SEQ ID NO: 2408151 - RNA, 19 nt, Artificial Sequence
  Description of Artificial Sequence: Synthetic oligonucleotide
  Antisense strand to SEQ ID NO: 2408150
uaaaguacagucuaaagaa

SEQ ID NO: 2408152 - RNA, 19 nt, Artificial Sequence
  Description of Artificial Sequence: Synthetic oligonucleotide
  Sense strand starting at position 3068 of SEQ ID NO: 1886414
ccagcuugugcugauguua

SEQ ID NO: 2408153 - RNA, 19 nt, Artificial Sequence
  Description of Artificial Sequence: Synthetic oligonucleotide
  Antisense strand to SEQ ID NO: 2408152
uaacaucagcacaagcugg

SEQ ID NO: 2408154 - RNA, 19 nt, Artificial Sequence
  Description of Artificial Sequence: Synthetic oligonucleotide
  Sense strand starting at position 3076 of SEQ ID NO: 1886414
ugcugauguuauucuuauc

SEQ ID NO: 2408155 - RNA, 19 nt, Artificial Sequence
  Description of Artificial Sequence: Synthetic oligonucleotide
  Antisense strand to SEQ ID NO: 2408154
gauaagaauaacaucagca

SEQ ID NO: 2408156 - RNA, 19 nt, Artificial Sequence
  Description of Artificial Sequence: Synthetic oligonucleotide
  Sense strand starting at position 3491 of SEQ ID NO: 1886414
guuggcaacuugucuagua

SEQ ID NO: 2408157 - RNA, 19 nt, Artificial Sequence
  Description of Artificial Sequence: Synthetic oligonucleotide
  Antisense strand to SEQ ID NO: 2408156
uacuagacaaguugccaac

SEQ ID NO: 2408158 - RNA, 19 nt, Artificial Sequence
  Description of Artificial Sequence: Synthetic oligonucleotide
  Sense strand starting at position 3549 of SEQ ID NO: 1886414
gacagacucuccgcucuau

SEQ ID NO: 2408159 - RNA, 19 nt, Artificial Sequence
  Description of Artificial Sequence: Synthetic oligonucleotide
  Antisense strand to SEQ ID NO: 2408158
auagagcggagagucuguc

SEQ ID NO: 2408160 - RNA, 19 nt, Artificial Sequence
  Description of Artificial Sequence: Synthetic oligonucleotide
  Sense strand starting at position 2037 of SEQ ID NO: 1886415
guggcaaucucguuuaaac

SEQ ID NO: 2408161 - RNA, 19 nt, Artificial Sequence
  Description of Artificial Sequence: Synthetic oligonucleotide
  Antisense strand to SEQ ID NO: 2408160
guuuaaacgagauugccac

SEQ ID NO: 2408162 - RNA, 19 nt, Artificial Sequence
  Description of Artificial Sequence: Synthetic oligonucleotide
  Sense strand starting at position 2283 of SEQ ID NO: 1886415
acaguauaauucugauggu

SEQ ID NO: 2408163 - RNA, 19 nt, Artificial Sequence
  Description of Artificial Sequence: Synthetic oligonucleotide
  Antisense strand to SEQ ID NO: 2408162
accaucagaauuauacugu

SEQ ID NO: 2408164 - RNA, 19 nt, Artificial Sequence
  Description of Artificial Sequence: Synthetic oligonucleotide
  Sense strand starting at position 2284 of SEQ ID NO: 1886415
caguauaauucugauggua

SEQ ID NO: 2408165 - RNA, 19 nt, Artificial Sequence
  Description of Artificial Sequence: Synthetic oligonucleotide
  Antisense strand to SEQ ID NO: 2408164
uaccaucagaauuauacug

SEQ ID NO: 2408166 - RNA, 19 nt, Artificial Sequence
  Description of Artificial Sequence: Synthetic oligonucleotide
  Sense strand starting at position 2286 of SEQ ID NO: 1886415
guauaauucugaugguaau

SEQ ID NO: 2408167 - RNA, 19 nt, Artificial Sequence
  Description of Artificial Sequence: Synthetic oligonucleotide
  Antisense strand to SEQ ID NO: 2408166
auuaccaucagaauuauac

SEQ ID NO: 2408168 - RNA, 19 nt, Artificial Sequence
  Description of Artificial Sequence: Synthetic oligonucleotide
  Sense strand starting at position 2476 of SEQ ID NO: 1886415
gccacuacacuuugagcaa

SEQ ID NO: 2408169 - RNA, 19 nt, Artificial Sequence
  Description of Artificial Sequence: Synthetic oligonucleotide
  Antisense strand to SEQ ID NO: 2408168
uugcucaaaguguaguggc

SEQ ID NO: 2408170 - RNA, 19 nt, Artificial Sequence
  Description of Artificial Sequence: Synthetic oligonucleotide
  Sense strand starting at position 2771 of SEQ ID NO: 1886415
ugaguuucugcgcgugcaa

SEQ ID NO: 2408171 - RNA, 19 nt, Artificial Sequence
  Description of Artificial Sequence: Synthetic oligonucleotide
  Antisense strand to SEQ ID NO: 2408170
uugcacgcgcagaaacuca

SEQ ID NO: 2408172 - RNA, 19 nt, Artificial Sequence
  Description of Artificial Sequence: Synthetic oligonucleotide
  Sense strand starting at position 3048 of SEQ ID NO: 1886415
cugcguucuccuuugcaca

SEQ ID NO: 2408173 - RNA, 19 nt, Artificial Sequence
  Description of Artificial Sequence: Synthetic oligonucleotide
  Antisense strand to SEQ ID NO: 2408172
ugugcaaaggagaacgcag

SEQ ID NO: 2408174 - RNA, 19 nt, Artificial Sequence
  Description of Artificial Sequence: Synthetic oligonucleotide
  Sense strand starting at position 3050 of SEQ ID NO: 1886415
gcguucuccuuugcacaga

SEQ ID NO: 2408175 - RNA, 19 nt, Artificial Sequence
  Description of Artificial Sequence: Synthetic oligonucleotide
  Antisense strand to SEQ ID NO: 2408174
ucugugcaaaggagaacgc

SEQ ID NO: 2408176 - RNA, 19 nt, Artificial Sequence
  Description of Artificial Sequence: Synthetic oligonucleotide
  Sense strand starting at position 3051 of SEQ ID NO: 1886415
cguucuccuuugcacagau

SEQ ID NO: 2408177 - RNA, 19 nt, Artificial Sequence
  Description of Artificial Sequence: Synthetic oligonucleotide
  Antisense strand to SEQ ID NO: 2408176
aucugugcaaaggagaacg

SEQ ID NO: 2408178 - RNA, 19 nt, Artificial Sequence
  Description of Artificial Sequence: Synthetic oligonucleotide
  Sense strand starting at position 3094 of SEQ ID NO: 1886415
cagaguucugcucagguca

SEQ ID NO: 2408179 - RNA, 19 nt, Artificial Sequence
  Description of Artificial Sequence: Synthetic oligonucleotide
  Antisense strand to SEQ ID NO: 2408178
ugaccugagcagaacucug

SEQ ID NO: 2408180 - RNA, 19 nt, Artificial Sequence
  Description of Artificial Sequence: Synthetic oligonucleotide
  Sense strand starting at position 3096 of SEQ ID NO: 1886415
gaguucugcucaggucaga

SEQ ID NO: 2408181 - RNA, 19 nt, Artificial Sequence
  Description of Artificial Sequence: Synthetic oligonucleotide
  Antisense strand to SEQ ID NO: 2408180
ucugaccugagcagaacuc

SEQ ID NO: 2408182 - RNA, 19 nt, Artificial Sequence
  Description of Artificial Sequence: Synthetic oligonucleotide
  Sense strand starting at position 3197 of SEQ ID NO: 1886415
gcagcauucugcuaagcac

SEQ ID NO: 2408183 - RNA, 19 nt, Artificial Sequence
  Description of Artificial Sequence: Synthetic oligonucleotide
  Antisense strand to SEQ ID NO: 2408182
gugcuuagcagaaugcugc

SEQ ID NO: 2408184 - RNA, 19 nt, Artificial Sequence
  Description of Artificial Sequence: Synthetic oligonucleotide
  Sense strand starting at position 3200 of SEQ ID NO: 1886415
gcauucugcuaagcacaga

SEQ ID NO: 2408185 - RNA, 19 nt, Artificial Sequence
  Description of Artificial Sequence: Synthetic oligonucleotide
  Antisense strand to SEQ ID NO: 2408184
ucugugcuuagcagaaugc

SEQ ID NO: 2408186 - RNA, 19 nt, Artificial Sequence
  Description of Artificial Sequence: Synthetic oligonucleotide
  Sense strand starting at position 3255 of SEQ ID NO: 1886415
gcgcauugacagugaauaa

SEQ ID NO: 2408187 - RNA, 19 nt, Artificial Sequence
  Description of Artificial Sequence: Synthetic oligonucleotide
  Antisense strand to SEQ ID NO: 2408186
uuauucacugucaaugcgc

SEQ ID NO: 2408188 - RNA, 19 nt, Artificial Sequence
  Description of Artificial Sequence: Synthetic oligonucleotide
  Sense strand starting at position 3256 of SEQ ID NO: 1886415
cgcauugacagugaauaaa

SEQ ID NO: 2408189 - RNA, 19 nt, Artificial Sequence
  Description of Artificial Sequence: Synthetic oligonucleotide
  Antisense strand to SEQ ID NO: 2408188
uuuauucacugucaaugcg

SEQ ID NO: 2408190 - RNA, 19 nt, Artificial Sequence
  Description of Artificial Sequence: Synthetic oligonucleotide
  Sense strand starting at position 3294 of SEQ ID NO: 1886415
gugaauaaucaaggucaga

SEQ ID NO: 2408191 - RNA, 19 nt, Artificial Sequence
  Description of Artificial Sequence: Synthetic oligonucleotide
  Antisense strand to SEQ ID NO: 2408190
ucugaccuugauuauucac

SEQ ID NO: 2408192 - RNA, 19 nt, Artificial Sequence
  Description of Artificial Sequence: Synthetic oligonucleotide
  Sense strand starting at position 321 of SEQ ID NO: 1886416
gcgccuguaguuguaugaa

SEQ ID NO: 2408193 - RNA, 19 nt, Artificial Sequence
  Description of Artificial Sequence: Synthetic oligonucleotide
  Antisense strand to SEQ ID NO: 2408192
uucauacaacuacaggcgc

SEQ ID NO: 2408194 - RNA, 19 nt, Artificial Sequence
  Description of Artificial Sequence: Synthetic oligonucleotide
  Sense strand starting at position 350 of SEQ ID NO: 1886416
cgccauauugaucagaaca

SEQ ID NO: 2408195 - RNA, 19 nt, Artificial Sequence
  Description of Artificial Sequence: Synthetic oligonucleotide
  Antisense strand to SEQ ID NO: 2408194
uguucugaucaauauggcg

SEQ ID NO: 2408196 - RNA, 19 nt, Artificial Sequence
  Description of Artificial Sequence: Synthetic oligonucleotide
  Sense strand starting at position 371 of SEQ ID NO: 1886416
acacuauuggcaugauuau

SEQ ID NO: 2408197 - RNA, 19 nt, Artificial Sequence
  Description of Artificial Sequence: Synthetic oligonucleotide
  Antisense strand to SEQ ID NO: 2408196
auaaucaugccaauagugu

SEQ ID NO: 2408198 - RNA, 19 nt, Artificial Sequence
  Description of Artificial Sequence: Synthetic oligonucleotide
  Sense strand starting at position 372 of SEQ ID NO: 1886416
cacuauuggcaugauuaug

SEQ ID NO: 2408199 - RNA, 19 nt, Artificial Sequence
  Description of Artificial Sequence: Synthetic oligonucleotide
  Antisense strand to SEQ ID NO: 2408198
cauaaucaugccaauagug

SEQ ID NO: 2408200 - RNA, 19 nt, Artificial Sequence
  Description of Artificial Sequence: Synthetic oligonucleotide
  Sense strand starting at position 380 of SEQ ID NO: 1886416
gcaugauuaugaucauuac

SEQ ID NO: 2408201 - RNA, 19 nt, Artificial Sequence
  Description of Artificial Sequence: Synthetic oligonucleotide
  Antisense strand to SEQ ID NO: 2408200
guaaugaucauaaucaugc

SEQ ID NO: 2408202 - RNA, 19 nt, Artificial Sequence
  Description of Artificial Sequence: Synthetic oligonucleotide
  Sense strand starting at position 625 of SEQ ID NO: 1886416
augcguuuggugcugaauu

SEQ ID NO: 2408203 - RNA, 19 nt, Artificial Sequence
  Description of Artificial Sequence: Synthetic oligonucleotide
  Antisense strand to SEQ ID NO: 2408202
aauucagcaccaaacgcau

SEQ ID NO: 2408204 - RNA, 19 nt, Artificial Sequence
  Description of Artificial Sequence: Synthetic oligonucleotide
  Sense strand starting at position 905 of SEQ ID NO: 1886416
ggccuuuaucaguguauuu

SEQ ID NO: 2408205 - RNA, 19 nt, Artificial Sequence
  Description of Artificial Sequence: Synthetic oligonucleotide
  Antisense strand to SEQ ID NO: 2408204
aaauacacugauaaaggcc

SEQ ID NO: 2408206 - RNA, 19 nt, Artificial Sequence
  Description of Artificial Sequence: Synthetic oligonucleotide
  Sense strand starting at position 1076 of SEQ ID NO: 1886416
augggauauuccuucccuu

SEQ ID NO: 2408207 - RNA, 19 nt, Artificial Sequence
  Description of Artificial Sequence: Synthetic oligonucleotide
  Antisense strand to SEQ ID NO: 2408206
aagggaaggaauaucccau

SEQ ID NO: 2408208 - RNA, 19 nt, Artificial Sequence
  Description of Artificial Sequence: Synthetic oligonucleotide
  Sense strand starting at position 1285 of SEQ ID NO: 1886416
cguuuagaccguuuagcga

SEQ ID NO: 2408209 - RNA, 19 nt, Artificial Sequence
  Description of Artificial Sequence: Synthetic oligonucleotide
  Antisense strand to SEQ ID NO: 2408208
ucgcuaaacggucuaaacg

SEQ ID NO: 2408210 - RNA, 19 nt, Artificial Sequence
  Description of Artificial Sequence: Synthetic oligonucleotide
  Sense strand starting at position 1301 of SEQ ID NO: 1886416
cgaagauuccacgucgcuu

SEQ ID NO: 2408211 - RNA, 19 nt, Artificial Sequence
  Description of Artificial Sequence: Synthetic oligonucleotide
  Antisense strand to SEQ ID NO: 2408210
aagcgacguggaaucuucg

SEQ ID NO: 2408212 - RNA, 19 nt, Artificial Sequence
  Description of Artificial Sequence: Synthetic oligonucleotide
  Sense strand starting at position 1417 of SEQ ID NO: 1886416
auugcaucgcguagggaaa

SEQ ID NO: 2408213 - RNA, 19 nt, Artificial Sequence
  Description of Artificial Sequence: Synthetic oligonucleotide
  Antisense strand to SEQ ID NO: 2408212
uuucccuacgcgaugcaau

SEQ ID NO: 2408214 - RNA, 19 nt, Artificial Sequence
  Description of Artificial Sequence: Synthetic oligonucleotide
  Sense strand starting at position 1486 of SEQ ID NO: 1886416
gcaugcuugcgguuucaga

SEQ ID NO: 2408215 - RNA, 19 nt, Artificial Sequence
  Description of Artificial Sequence: Synthetic oligonucleotide
  Antisense strand to SEQ ID NO: 2408214
ucugaaaccgcaagcaugc

SEQ ID NO: 2408216 - RNA, 19 nt, Artificial Sequence
  Description of Artificial Sequence: Synthetic oligonucleotide
  Sense strand starting at position 1525 of SEQ ID NO: 1886416
ggauguguaacaggcauga

SEQ ID NO: 2408217 - RNA, 19 nt, Artificial Sequence
  Description of Artificial Sequence: Synthetic oligonucleotide
  Antisense strand to SEQ ID NO: 2408216
ucaugccuguuacacaucc

SEQ ID NO: 2408218 - RNA, 19 nt, Artificial Sequence
  Description of Artificial Sequence: Synthetic oligonucleotide
  Sense strand starting at position 1527 of SEQ ID NO: 1886416
auguguaacaggcaugaca

SEQ ID NO: 2408219 - RNA, 19 nt, Artificial Sequence
  Description of Artificial Sequence: Synthetic oligonucleotide
  Antisense strand to SEQ ID NO: 2408218
ugucaugccuguuacacau

SEQ ID NO: 2408220 - RNA, 19 nt, Artificial Sequence
  Description of Artificial Sequence: Synthetic oligonucleotide
  Sense strand starting at position 1580 of SEQ ID NO: 1886416
uagcgacucggagacaauu

SEQ ID NO: 2408221 - RNA, 19 nt, Artificial Sequence
  Description of Artificial Sequence: Synthetic oligonucleotide
  Antisense strand to SEQ ID NO: 2408220
aauugucuccgagucgcua

SEQ ID NO: 2408222 - RNA, 19 nt, Artificial Sequence
  Description of Artificial Sequence: Synthetic oligonucleotide
  Sense strand starting at position 2241 of SEQ ID NO: 1886416
cccauaaauuagguugauu

SEQ ID NO: 2408223 - RNA, 19 nt, Artificial Sequence
  Description of Artificial Sequence: Synthetic oligonucleotide
  Antisense strand to SEQ ID NO: 2408222
aaucaaccuaauuuauggg

SEQ ID NO: 2408224 - RNA, 19 nt, Artificial Sequence
  Description of Artificial Sequence: Synthetic oligonucleotide
  Sense strand starting at position 2436 of SEQ ID NO: 1886416
guccucugugucuuguauu

SEQ ID NO: 2408225 - RNA, 19 nt, Artificial Sequence
  Description of Artificial Sequence: Synthetic oligonucleotide
  Antisense strand to SEQ ID NO: 2408224
aauacaagacacagaggac

SEQ ID NO: 2408226 - RNA, 19 nt, Artificial Sequence
  Description of Artificial Sequence: Synthetic oligonucleotide
  Sense strand starting at position 2442 of SEQ ID NO: 1886416
ugugucuuguauuugguua

SEQ ID NO: 2408227 - RNA, 19 nt, Artificial Sequence
  Description of Artificial Sequence: Synthetic oligonucleotide
  Antisense strand to SEQ ID NO: 2408226
uaaccaaauacaagacaca

SEQ ID NO: 2408228 - RNA, 19 nt, Artificial Sequence
  Description of Artificial Sequence: Synthetic oligonucleotide
  Sense strand starting at position 2477 of SEQ ID NO: 1886416
aaaugaagugagugauguu

SEQ ID NO: 2408229 - RNA, 19 nt, Artificial Sequence
  Description of Artificial Sequence: Synthetic oligonucleotide
  Antisense strand to SEQ ID NO: 2408228
aacaucacucacuucauuu

SEQ ID NO: 2408230 - RNA, 19 nt, Artificial Sequence
  Description of Artificial Sequence: Synthetic oligonucleotide
  Sense strand starting at position 2478 of SEQ ID NO: 1886416
aaugaagugagugauguuu

SEQ ID NO: 2408231 - RNA, 19 nt, Artificial Sequence
  Description of Artificial Sequence: Synthetic oligonucleotide
  Antisense strand to SEQ ID NO: 2408230
aaacaucacucacuucauu

SEQ ID NO: 2408232 - RNA, 19 nt, Artificial Sequence
  Description of Artificial Sequence: Synthetic oligonucleotide
  Sense strand starting at position 2490 of SEQ ID NO: 1886416
gauguuugagauuguuaaa

SEQ ID NO: 2408233 - RNA, 19 nt, Artificial Sequence
  Description of Artificial Sequence: Synthetic oligonucleotide
  Antisense strand to SEQ ID NO: 2408232
uuuaacaaucucaaacauc

SEQ ID NO: 2408234 - RNA, 19 nt, Artificial Sequence
  Description of Artificial Sequence: Synthetic oligonucleotide
  Sense strand starting at position 2718 of SEQ ID NO: 1886416
ccugguuugccacaaggga

SEQ ID NO: 2408235 - RNA, 19 nt, Artificial Sequence
  Description of Artificial Sequence: Synthetic oligonucleotide
  Antisense strand to SEQ ID NO: 2408234
ucccuuguggcaaaccagg

SEQ ID NO: 2408236 - RNA, 19 nt, Artificial Sequence
  Description of Artificial Sequence: Synthetic oligonucleotide
  Sense strand starting at position 2959 of SEQ ID NO: 1886416
gucacuuugagucaggaga

SEQ ID NO: 2408237 - RNA, 19 nt, Artificial Sequence
  Description of Artificial Sequence: Synthetic oligonucleotide
  Antisense strand to SEQ ID NO: 2408236
ucuccugacucaaagugac

SEQ ID NO: 2408238 - RNA, 19 nt, Artificial Sequence
  Description of Artificial Sequence: Synthetic oligonucleotide
  Sense strand starting at position 3076 of SEQ ID NO: 1886416
aggccauauguacagguua

SEQ ID NO: 2408239 - RNA, 19 nt, Artificial Sequence
  Description of Artificial Sequence: Synthetic oligonucleotide
  Antisense strand to SEQ ID NO: 2408238
uaaccuguacauauggccu

SEQ ID NO: 2408240 - RNA, 19 nt, Artificial Sequence
  Description of Artificial Sequence: Synthetic oligonucleotide
  Sense strand starting at position 3139 of SEQ ID NO: 1886416
gaaagcccucuuuagguua

SEQ ID NO: 2408241 - RNA, 19 nt, Artificial Sequence
  Description of Artificial Sequence: Synthetic oligonucleotide
  Antisense strand to SEQ ID NO: 2408240
uaaccuaaagagggcuuuc

SEQ ID NO: 2408242 - RNA, 19 nt, Artificial Sequence
  Description of Artificial Sequence: Synthetic oligonucleotide
  Sense strand starting at position 3153 of SEQ ID NO: 1886416
gguuacacccugugauaac

SEQ ID NO: 2408243 - RNA, 19 nt, Artificial Sequence
  Description of Artificial Sequence: Synthetic oligonucleotide
  Antisense strand to SEQ ID NO: 2408242
guuaucacaggguguaacc

SEQ ID NO: 2408244 - RNA, 19 nt, Artificial Sequence
  Description of Artificial Sequence: Synthetic oligonucleotide
  Sense strand starting at position 3198 of SEQ ID NO: 1886416
agucuaauagcucagcaca

SEQ ID NO: 2408245 - RNA, 19 nt, Artificial Sequence
  Description of Artificial Sequence: Synthetic oligonucleotide
  Antisense strand to SEQ ID NO: 2408244
ugugcugagcuauuagacu

SEQ ID NO: 2408246 - RNA, 19 nt, Artificial Sequence
  Description of Artificial Sequence: Synthetic oligonucleotide
  Sense strand starting at position 3290 of SEQ ID NO: 1886416
agcaaagagucauuccauu

SEQ ID NO: 2408247 - RNA, 19 nt, Artificial Sequence
  Description of Artificial Sequence: Synthetic oligonucleotide
  Antisense strand to SEQ ID NO: 2408246
aauggaaugacucuuugcu

SEQ ID NO: 2408248 - RNA, 19 nt, Artificial Sequence
  Description of Artificial Sequence: Synthetic oligonucleotide
  Sense strand starting at position 3325 of SEQ ID NO: 1886416
ccuuguuguggugugcuaa

SEQ ID NO: 2408249 - RNA, 19 nt, Artificial Sequence
  Description of Artificial Sequence: Synthetic oligonucleotide
  Antisense strand to SEQ ID NO: 2408248
uuagcacaccacaacaagg

SEQ ID NO: 2408250 - RNA, 19 nt, Artificial Sequence
  Description of Artificial Sequence: Synthetic oligonucleotide
  Sense strand starting at position 3346 of SEQ ID NO: 1886416
ugaagaaacuggcuuccau

SEQ ID NO: 2408251 - RNA, 19 nt, Artificial Sequence
  Description of Artificial Sequence: Synthetic oligonucleotide
  Antisense strand to SEQ ID NO: 2408250
auggaagccaguuucuuca

SEQ ID NO: 2408252 - RNA, 19 nt, Artificial Sequence
  Description of Artificial Sequence: Synthetic oligonucleotide
  Sense strand starting at position 3408 of SEQ ID NO: 1886416
gcaauugcuguuuagaaca

SEQ ID NO: 2408253 - RNA, 19 nt, Artificial Sequence
  Description of Artificial Sequence: Synthetic oligonucleotide
  Antisense strand to SEQ ID NO: 2408252
uguucuaaacagcaauugc

SEQ ID NO: 2408254 - RNA, 19 nt, Artificial Sequence
  Description of Artificial Sequence: Synthetic oligonucleotide
  Sense strand starting at position 3558 of SEQ ID NO: 1886416
ccugauucucaguacuuau

SEQ ID NO: 2408255 - RNA, 19 nt, Artificial Sequence
  Description of Artificial Sequence: Synthetic oligonucleotide
  Antisense strand to SEQ ID NO: 2408254
auaaguacugagaaucagg

SEQ ID NO: 2408256 - RNA, 19 nt, Artificial Sequence
  Description of Artificial Sequence: Synthetic oligonucleotide
  Sense strand starting at position 3627 of SEQ ID NO: 1886416
gugugauugugaauucgug

SEQ ID NO: 2408257 - RNA, 19 nt, Artificial Sequence
  Description of Artificial Sequence: Synthetic oligonucleotide
  Antisense strand to SEQ ID NO: 2408256
cacgaauucacaaucacac

SEQ ID NO: 2408258 - RNA, 19 nt, Artificial Sequence
  Description of Artificial Sequence: Synthetic oligonucleotide
  Sense strand starting at position 3729 of SEQ ID NO: 1886416
uuauacauaccauguguga

SEQ ID NO: 2408259 - RNA, 19 nt, Artificial Sequence
  Description of Artificial Sequence: Synthetic oligonucleotide
  Antisense strand to SEQ ID NO: 2408258
ucacacaugguauguauaa

SEQ ID NO: 2408260 - RNA, 19 nt, Artificial Sequence
  Description of Artificial Sequence: Synthetic oligonucleotide
  Sense strand starting at position 3733 of SEQ ID NO: 1886416
acauaccaugugugaguaa

SEQ ID NO: 2408261 - RNA, 19 nt, Artificial Sequence
  Description of Artificial Sequence: Synthetic oligonucleotide
  Antisense strand to SEQ ID NO: 2408260
uuacucacacaugguaugu

SEQ ID NO: 2408262 - RNA, 19 nt, Artificial Sequence
  Description of Artificial Sequence: Synthetic oligonucleotide
  Sense strand starting at position 3807 of SEQ ID NO: 1886416
ugaccucaccugugauaca

SEQ ID NO: 2408263 - RNA, 19 nt, Artificial Sequence
  Description of Artificial Sequence: Synthetic oligonucleotide
  Antisense strand to SEQ ID NO: 2408262
uguaucacaggugagguca

SEQ ID NO: 2408264 - RNA, 19 nt, Artificial Sequence
  Description of Artificial Sequence: Synthetic oligonucleotide
  Sense strand starting at position 3818 of SEQ ID NO: 1886416
gugauacagccucaucauu

SEQ ID NO: 2408265 - RNA, 19 nt, Artificial Sequence
  Description of Artificial Sequence: Synthetic oligonucleotide
  Antisense strand to SEQ ID NO: 2408264
aaugaugaggcuguaucac

SEQ ID NO: 2408266 - RNA, 19 nt, Artificial Sequence
  Description of Artificial Sequence: Synthetic oligonucleotide
  Sense strand starting at position 3839 of SEQ ID NO: 1886416
guagucagucaauaagacu

SEQ ID NO: 2408267 - RNA, 19 nt, Artificial Sequence
  Description of Artificial Sequence: Synthetic oligonucleotide
  Antisense strand to SEQ ID NO: 2408266
agucuuauugacugacuac

SEQ ID NO: 2408268 - RNA, 19 nt, Artificial Sequence
  Description of Artificial Sequence: Synthetic oligonucleotide
  Sense strand starting at position 3847 of SEQ ID NO: 1886416
ucaauaagacucugaguua

SEQ ID NO: 2408269 - RNA, 19 nt, Artificial Sequence
  Description of Artificial Sequence: Synthetic oligonucleotide
  Antisense strand to SEQ ID NO: 2408268
uaacucagagucuuauuga

SEQ ID NO: 2408270 - RNA, 19 nt, Artificial Sequence
  Description of Artificial Sequence: Synthetic oligonucleotide
  Sense strand starting at position 3850 of SEQ ID NO: 1886416
auaagacucugaguuauuc

SEQ ID NO: 2408271 - RNA, 19 nt, Artificial Sequence
  Description of Artificial Sequence: Synthetic oligonucleotide
  Antisense strand to SEQ ID NO: 2408270
gaauaacucagagucuuau

SEQ ID NO: 2408272 - RNA, 19 nt, Artificial Sequence
  Description of Artificial Sequence: Synthetic oligonucleotide
  Sense strand starting at position 15 of SEQ ID NO: 1886417
agcuuauuggccugggaug

SEQ ID NO: 2408273 - RNA, 19 nt, Artificial Sequence
  Description of Artificial Sequence: Synthetic oligonucleotide
  Antisense strand to SEQ ID NO: 2408272
caucccaggccaauaagcu

SEQ ID NO: 2408274 - RNA, 19 nt, Artificial Sequence
  Description of Artificial Sequence: Synthetic oligonucleotide
  Sense strand starting at position 16 of SEQ ID NO: 1886417
gcuuauuggccugggaugu

SEQ ID NO: 2408275 - RNA, 19 nt, Artificial Sequence
  Description of Artificial Sequence: Synthetic oligonucleotide
  Antisense strand to SEQ ID NO: 2408274
acaucccaggccaauaagc

SEQ ID NO: 2408276 - RNA, 19 nt, Artificial Sequence
  Description of Artificial Sequence: Synthetic oligonucleotide
  Sense strand starting at position 38 of SEQ ID NO: 1886417
gaugaaagguucucaauac

SEQ ID NO: 2408277 - RNA, 19 nt, Artificial Sequence
  Description of Artificial Sequence: Synthetic oligonucleotide
  Antisense strand to SEQ ID NO: 2408276
guauugagaaccuuucauc

SEQ ID NO: 2408278 - RNA, 19 nt, Artificial Sequence
  Description of Artificial Sequence: Synthetic oligonucleotide
  Sense strand starting at position 107 of SEQ ID NO: 1886417
agaggaggcuguuaccuua

SEQ ID NO: 2408279 - RNA, 19 nt, Artificial Sequence
  Description of Artificial Sequence: Synthetic oligonucleotide
  Antisense strand to SEQ ID NO: 2408278
uaagguaacagccuccucu

SEQ ID NO: 2408280 - RNA, 19 nt, Artificial Sequence
  Description of Artificial Sequence: Synthetic oligonucleotide
  Sense strand starting at position 163 of SEQ ID NO: 1886417
cggcgaggccauugaaauc

SEQ ID NO: 2408281 - RNA, 19 nt, Artificial Sequence
  Description of Artificial Sequence: Synthetic oligonucleotide
  Antisense strand to SEQ ID NO: 2408280
gauuucaauggccucgccg

SEQ ID NO: 2408282 - RNA, 19 nt, Artificial Sequence
  Description of Artificial Sequence: Synthetic oligonucleotide
  Sense strand starting at position 174 of SEQ ID NO: 1886417
uugaaauccaugggcuuga

SEQ ID NO: 2408283 - RNA, 19 nt, Artificial Sequence
  Description of Artificial Sequence: Synthetic oligonucleotide
  Antisense strand to SEQ ID NO: 2408282
ucaagcccauggauuucaa

SEQ ID NO: 2408284 - RNA, 19 nt, Artificial Sequence
  Description of Artificial Sequence: Synthetic oligonucleotide
  Sense strand starting at position 439 of SEQ ID NO: 1886417
ggucguagagaaggucaaa

SEQ ID NO: 2408285 - RNA, 19 nt, Artificial Sequence
  Description of Artificial Sequence: Synthetic oligonucleotide
  Antisense strand to SEQ ID NO: 2408284
uuugaccuucucuacgacc

SEQ ID NO: 2408286 - RNA, 19 nt, Artificial Sequence
  Description of Artificial Sequence: Synthetic oligonucleotide
  Sense strand starting at position 666 of SEQ ID NO: 1886417
gguggagugucucagcaga

SEQ ID NO: 2408287 - RNA, 19 nt, Artificial Sequence
  Description of Artificial Sequence: Synthetic oligonucleotide
  Antisense strand to SEQ ID NO: 2408286
ucugcugagacacuccacc

SEQ ID NO: 2408288 - RNA, 19 nt, Artificial Sequence
  Description of Artificial Sequence: Synthetic oligonucleotide
  Sense strand starting at position 668 of SEQ ID NO: 1886417
uggagugucucagcagaaa

SEQ ID NO: 2408289 - RNA, 19 nt, Artificial Sequence
  Description of Artificial Sequence: Synthetic oligonucleotide
  Antisense strand to SEQ ID NO: 2408288
uuucugcugagacacucca

SEQ ID NO: 2408290 - RNA, 19 nt, Artificial Sequence
  Description of Artificial Sequence: Synthetic oligonucleotide
  Sense strand starting at position 671 of SEQ ID NO: 1886417
agugucucagcagaaauac

SEQ ID NO: 2408291 - RNA, 19 nt, Artificial Sequence
  Description of Artificial Sequence: Synthetic oligonucleotide
  Antisense strand to SEQ ID NO: 2408290
guauuucugcugagacacu

SEQ ID NO: 2408292 - RNA, 19 nt, Artificial Sequence
  Description of Artificial Sequence: Synthetic oligonucleotide
  Sense strand starting at position 880 of SEQ ID NO: 1886417
cuggcaucauccgagucau

SEQ ID NO: 2408293 - RNA, 19 nt, Artificial Sequence
  Description of Artificial Sequence: Synthetic oligonucleotide
  Antisense strand to SEQ ID NO: 2408292
augacucggaugaugccag

SEQ ID NO: 2408294 - RNA, 19 nt, Artificial Sequence
  Description of Artificial Sequence: Synthetic oligonucleotide
  Sense strand starting at position 1100 of SEQ ID NO: 1886417
ccuggauguugauggucau

SEQ ID NO: 2408295 - RNA, 19 nt, Artificial Sequence
  Description of Artificial Sequence: Synthetic oligonucleotide
  Antisense strand to SEQ ID NO: 2408294
augaccaucaacauccagg

SEQ ID NO: 2408296 - RNA, 19 nt, Artificial Sequence
  Description of Artificial Sequence: Synthetic oligonucleotide
  Sense strand starting at position 1106 of SEQ ID NO: 1886417
uguugauggucaugcgauc

SEQ ID NO: 2408297 - RNA, 19 nt, Artificial Sequence
  Description of Artificial Sequence: Synthetic oligonucleotide
  Antisense strand to SEQ ID NO: 2408296
gaucgcaugaccaucaaca

SEQ ID NO: 2408298 - RNA, 19 nt, Artificial Sequence
  Description of Artificial Sequence: Synthetic oligonucleotide
  Sense strand starting at position 1414 of SEQ ID NO: 1886417
cuagguugucccuguauca

SEQ ID NO: 2408299 - RNA, 19 nt, Artificial Sequence
  Description of Artificial Sequence: Synthetic oligonucleotide
  Antisense strand to SEQ ID NO: 2408298
ugauacagggacaaccuag

SEQ ID NO: 2408300 - RNA, 19 nt, Artificial Sequence
  Description of Artificial Sequence: Synthetic oligonucleotide
  Sense strand starting at position 1557 of SEQ ID NO: 1886417
uggucuagucaggguguca

SEQ ID NO: 2408301 - RNA, 19 nt, Artificial Sequence
  Description of Artificial Sequence: Synthetic oligonucleotide
  Antisense strand to SEQ ID NO: 2408300
ugacacccugacuagacca

SEQ ID NO: 2408302 - RNA, 19 nt, Artificial Sequence
  Description of Artificial Sequence: Synthetic oligonucleotide
  Sense strand starting at position 2239 of SEQ ID NO: 1886417
ggcacacuuacccggagaa

SEQ ID NO: 2408303 - RNA, 19 nt, Artificial Sequence
  Description of Artificial Sequence: Synthetic oligonucleotide
  Antisense strand to SEQ ID NO: 2408302
uucuccggguaagugugcc

SEQ ID NO: 2408304 - RNA, 19 nt, Artificial Sequence
  Description of Artificial Sequence: Synthetic oligonucleotide
  Sense strand starting at position 2316 of SEQ ID NO: 1886417
gccagaaucgccggguguu

SEQ ID NO: 2408305 - RNA, 19 nt, Artificial Sequence
  Description of Artificial Sequence: Synthetic oligonucleotide
  Antisense strand to SEQ ID NO: 2408304
aacacccggcgauucuggc

SEQ ID NO: 2408306 - RNA, 19 nt, Artificial Sequence
  Description of Artificial Sequence: Synthetic oligonucleotide
  Sense strand starting at position 2336 of SEQ ID NO: 1886417
cccaacuacuccugggaga

SEQ ID NO: 2408307 - RNA, 19 nt, Artificial Sequence
  Description of Artificial Sequence: Synthetic oligonucleotide
  Antisense strand to SEQ ID NO: 2408306
ucucccaggaguaguuggg

SEQ ID NO: 2408308 - RNA, 19 nt, Artificial Sequence
  Description of Artificial Sequence: Synthetic oligonucleotide
  Sense strand starting at position 2747 of SEQ ID NO: 1886417
cagggaugguaucuccuuu

SEQ ID NO: 2408309 - RNA, 19 nt, Artificial Sequence
  Description of Artificial Sequence: Synthetic oligonucleotide
  Antisense strand to SEQ ID NO: 2408308
aaaggagauaccaucccug

SEQ ID NO: 2408310 - RNA, 19 nt, Artificial Sequence
  Description of Artificial Sequence: Synthetic oligonucleotide
  Sense strand starting at position 2751 of SEQ ID NO: 1886417
gaugguaucuccuuuggga

SEQ ID NO: 2408311 - RNA, 19 nt, Artificial Sequence
  Description of Artificial Sequence: Synthetic oligonucleotide
  Antisense strand to SEQ ID NO: 2408310
ucccaaaggagauaccauc

SEQ ID NO: 2408312 - RNA, 19 nt, Artificial Sequence
  Description of Artificial Sequence: Synthetic oligonucleotide
  Sense strand starting at position 2753 of SEQ ID NO: 1886417
ugguaucuccuuugggaac

SEQ ID NO: 2408313 - RNA, 19 nt, Artificial Sequence
  Description of Artificial Sequence: Synthetic oligonucleotide
  Antisense strand to SEQ ID NO: 2408312
guucccaaaggagauacca

SEQ ID NO: 2408314 - RNA, 19 nt, Artificial Sequence
  Description of Artificial Sequence: Synthetic oligonucleotide
  Sense strand starting at position 3094 of SEQ ID NO: 1886417
uagggaucuuggcucacau

SEQ ID NO: 2408315 - RNA, 19 nt, Artificial Sequence
  Description of Artificial Sequence: Synthetic oligonucleotide
  Antisense strand to SEQ ID NO: 2408314
augugagccaagaucccua

SEQ ID NO: 2408316 - RNA, 19 nt, Artificial Sequence
  Description of Artificial Sequence: Synthetic oligonucleotide
  Sense strand starting at position 3281 of SEQ ID NO: 1886417
gcggcugauucaucuggga

SEQ ID NO: 2408317 - RNA, 19 nt, Artificial Sequence
  Description of Artificial Sequence: Synthetic oligonucleotide
  Antisense strand to SEQ ID NO: 2408316
ucccagaugaaucagccgc

SEQ ID NO: 2408318 - RNA, 19 nt, Artificial Sequence
  Description of Artificial Sequence: Synthetic oligonucleotide
  Sense strand starting at position 3284 of SEQ ID NO: 1886417
gcugauucaucugggaguc

SEQ ID NO: 2408319 - RNA, 19 nt, Artificial Sequence
  Description of Artificial Sequence: Synthetic oligonucleotide
  Antisense strand to SEQ ID NO: 2408318
gacucccagaugaaucagc

SEQ ID NO: 2408320 - RNA, 19 nt, Artificial Sequence
  Description of Artificial Sequence: Synthetic oligonucleotide
  Sense strand starting at position 3339 of SEQ ID NO: 1886417
aucucuaagugcuguuauu

SEQ ID NO: 2408321 - RNA, 19 nt, Artificial Sequence
  Description of Artificial Sequence: Synthetic oligonucleotide
  Antisense strand to SEQ ID NO: 2408320
aauaacagcacuuagagau

SEQ ID NO: 2408322 - RNA, 19 nt, Artificial Sequence
  Description of Artificial Sequence: Synthetic oligonucleotide
  Sense strand starting at position 3431 of SEQ ID NO: 1886417
gaugguacauuucgauaug

SEQ ID NO: 2408323 - RNA, 19 nt, Artificial Sequence
  Description of Artificial Sequence: Synthetic oligonucleotide
  Antisense strand to SEQ ID NO: 2408322
cauaucgaaauguaccauc

SEQ ID NO: 2408324 - RNA, 19 nt, Artificial Sequence
  Description of Artificial Sequence: Synthetic oligonucleotide
  Sense strand starting at position 3434 of SEQ ID NO: 1886417
gguacauuucgauaugcgu

SEQ ID NO: 2408325 - RNA, 19 nt, Artificial Sequence
  Description of Artificial Sequence: Synthetic oligonucleotide
  Antisense strand to SEQ ID NO: 2408324
acgcauaucgaaauguacc

SEQ ID NO: 2408326 - RNA, 19 nt, Artificial Sequence
  Description of Artificial Sequence: Synthetic oligonucleotide
  Sense strand starting at position 3437 of SEQ ID NO: 1886417
acauuucgauaugcguauu

SEQ ID NO: 2408327 - RNA, 19 nt, Artificial Sequence
  Description of Artificial Sequence: Synthetic oligonucleotide
  Antisense strand to SEQ ID NO: 2408326
aauacgcauaucgaaaugu

SEQ ID NO: 2408328 - RNA, 19 nt, Artificial Sequence
  Description of Artificial Sequence: Synthetic oligonucleotide
  Sense strand starting at position 3447 of SEQ ID NO: 1886417
augcguauuucacggcaau

SEQ ID NO: 2408329 - RNA, 19 nt, Artificial Sequence
  Description of Artificial Sequence: Synthetic oligonucleotide
  Antisense strand to SEQ ID NO: 2408328
auugccgugaaauacgcau

SEQ ID NO: 2408330 - RNA, 19 nt, Artificial Sequence
  Description of Artificial Sequence: Synthetic oligonucleotide
  Sense strand starting at position 3448 of SEQ ID NO: 1886417
ugcguauuucacggcaauu

SEQ ID NO: 2408331 - RNA, 19 nt, Artificial Sequence
  Description of Artificial Sequence: Synthetic oligonucleotide
  Antisense strand to SEQ ID NO: 2408330
aauugccgugaaauacgca

SEQ ID NO: 2408332 - RNA, 19 nt, Artificial Sequence
  Description of Artificial Sequence: Synthetic oligonucleotide
  Sense strand starting at position 3547 of SEQ ID NO: 1886417
agaggaucgcuugagugaa

SEQ ID NO: 2408333 - RNA, 19 nt, Artificial Sequence
  Description of Artificial Sequence: Synthetic oligonucleotide
  Antisense strand to SEQ ID NO: 2408332
uucacucaagcgauccucu

SEQ ID NO: 2408334 - RNA, 19 nt, Artificial Sequence
  Description of Artificial Sequence: Synthetic oligonucleotide
  Sense strand starting at position 3789 of SEQ ID NO: 1886417
ggugguaugugucuuggga

SEQ ID NO: 2408335 - RNA, 19 nt, Artificial Sequence
  Description of Artificial Sequence: Synthetic oligonucleotide
  Antisense strand to SEQ ID NO: 2408334
ucccaagacacauaccacc

SEQ ID NO: 2408336 - RNA, 19 nt, Artificial Sequence
  Description of Artificial Sequence: Synthetic oligonucleotide
  Sense strand starting at position 3793 of SEQ ID NO: 1886417
guaugugucuugggaggcu

SEQ ID NO: 2408337 - RNA, 19 nt, Artificial Sequence
  Description of Artificial Sequence: Synthetic oligonucleotide
  Antisense strand to SEQ ID NO: 2408336
agccucccaagacacauac

SEQ ID NO: 2408338 - RNA, 19 nt, Artificial Sequence
  Description of Artificial Sequence: Synthetic oligonucleotide
  Sense strand starting at position 204 of SEQ ID NO: 1886418
uuuggcauucuacauaagu

SEQ ID NO: 2408339 - RNA, 19 nt, Artificial Sequence
  Description of Artificial Sequence: Synthetic oligonucleotide
  Antisense strand to SEQ ID NO: 2408338
acuuauguagaaugccaaa

SEQ ID NO: 2408340 - RNA, 19 nt, Artificial Sequence
  Description of Artificial Sequence: Synthetic oligonucleotide
  Sense strand starting at position 287 of SEQ ID NO: 1886418
uacagaaacugagaguaaa

SEQ ID NO: 2408341 - RNA, 19 nt, Artificial Sequence
  Description of Artificial Sequence: Synthetic oligonucleotide
  Antisense strand to SEQ ID NO: 2408340
uuuacucucaguuucugua

SEQ ID NO: 2408342 - RNA, 19 nt, Artificial Sequence
  Description of Artificial Sequence: Synthetic oligonucleotide
  Sense strand starting at position 503 of SEQ ID NO: 1886418
ccauauuggccaggcgaaa

SEQ ID NO: 2408343 - RNA, 19 nt, Artificial Sequence
  Description of Artificial Sequence: Synthetic oligonucleotide
  Antisense strand to SEQ ID NO: 2408342
uuucgccuggccaauaugg

SEQ ID NO: 2408344 - RNA, 19 nt, Artificial Sequence
  Description of Artificial Sequence: Synthetic oligonucleotide
  Sense strand starting at position 529 of SEQ ID NO: 1886418
agcaaucuggcagaaugau

SEQ ID NO: 2408345 - RNA, 19 nt, Artificial Sequence
  Description of Artificial Sequence: Synthetic oligonucleotide
  Antisense strand to SEQ ID NO: 2408344
aucauucugccagauugcu

SEQ ID NO: 2408346 - RNA, 19 nt, Artificial Sequence
  Description of Artificial Sequence: Synthetic oligonucleotide
  Sense strand starting at position 570 of SEQ ID NO: 1886418
aaaugagauugguuuguau

SEQ ID NO: 2408347 - RNA, 19 nt, Artificial Sequence
  Description of Artificial Sequence: Synthetic oligonucleotide
  Antisense strand to SEQ ID NO: 2408346
auacaaaccaaucucauuu

SEQ ID NO: 2408348 - RNA, 19 nt, Artificial Sequence
  Description of Artificial Sequence: Synthetic oligonucleotide
  Sense strand starting at position 741 of SEQ ID NO: 1886418
ugucauguauagcugggau

SEQ ID NO: 2408349 - RNA, 19 nt, Artificial Sequence
  Description of Artificial Sequence: Synthetic oligonucleotide
  Antisense strand to SEQ ID NO: 2408348
aucccagcuauacaugaca

SEQ ID NO: 2408350 - RNA, 19 nt, Artificial Sequence
  Description of Artificial Sequence: Synthetic oligonucleotide
  Sense strand starting at position 764 of SEQ ID NO: 1886418
cuacaaagaucuuuguaug

SEQ ID NO: 2408351 - RNA, 19 nt, Artificial Sequence
  Description of Artificial Sequence: Synthetic oligonucleotide
  Antisense strand to SEQ ID NO: 2408350
cauacaaagaucuuuguag

SEQ ID NO: 2408352 - RNA, 19 nt, Artificial Sequence
  Description of Artificial Sequence: Synthetic oligonucleotide
  Sense strand starting at position 805 of SEQ ID NO: 1886418
gaggcauacuccguguaga

SEQ ID NO: 2408353 - RNA, 19 nt, Artificial Sequence
  Description of Artificial Sequence: Synthetic oligonucleotide
  Antisense strand to SEQ ID NO: 2408352
ucuacacggaguaugccuc

SEQ ID NO: 2408354 - RNA, 19 nt, Artificial Sequence
  Description of Artificial Sequence: Synthetic oligonucleotide
  Sense strand starting at position 808 of SEQ ID NO: 1886418
gcauacuccguguagagaa

SEQ ID NO: 2408355 - RNA, 19 nt, Artificial Sequence
  Description of Artificial Sequence: Synthetic oligonucleotide
  Antisense strand to SEQ ID NO: 2408354
uucucuacacggaguaugc

SEQ ID NO: 2408356 - RNA, 19 nt, Artificial Sequence
  Description of Artificial Sequence: Synthetic oligonucleotide
  Sense strand starting at position 868 of SEQ ID NO: 1886418
cgagaucuccaacaggcua

SEQ ID NO: 2408357 - RNA, 19 nt, Artificial Sequence
  Description of Artificial Sequence: Synthetic oligonucleotide
  Antisense strand to SEQ ID NO: 2408356
uagccuguuggagaucucg

SEQ ID NO: 2408358 - RNA, 19 nt, Artificial Sequence
  Description of Artificial Sequence: Synthetic oligonucleotide
  Sense strand starting at position 969 of SEQ ID NO: 1886418
cccagaagguuccuucuuu

SEQ ID NO: 2408359 - RNA, 19 nt, Artificial Sequence
  Description of Artificial Sequence: Synthetic oligonucleotide
  Antisense strand to SEQ ID NO: 2408358
aaagaaggaaccuucuggg

SEQ ID NO: 2408360 - RNA, 19 nt, Artificial Sequence
  Description of Artificial Sequence: Synthetic oligonucleotide
  Sense strand starting at position 1193 of SEQ ID NO: 1886418
gcucucaagugauccacuu

SEQ ID NO: 2408361 - RNA, 19 nt, Artificial Sequence
  Description of Artificial Sequence: Synthetic oligonucleotide
  Antisense strand to SEQ ID NO: 2408360
aaguggaucacuugagagc

SEQ ID NO: 2408362 - RNA, 19 nt, Artificial Sequence
  Description of Artificial Sequence: Synthetic oligonucleotide
  Sense strand starting at position 1205 of SEQ ID NO: 1886418
uccacuugaccucaaguga

SEQ ID NO: 2408363 - RNA, 19 nt, Artificial Sequence
  Description of Artificial Sequence: Synthetic oligonucleotide
  Antisense strand to SEQ ID NO: 2408362
ucacuugaggucaagugga

SEQ ID NO: 2408364 - RNA, 19 nt, Artificial Sequence
  Description of Artificial Sequence: Synthetic oligonucleotide
  Sense strand starting at position 1284 of SEQ ID NO: 1886418
uccagaagguuccuucuau

SEQ ID NO: 2408365 - RNA, 19 nt, Artificial Sequence
  Description of Artificial Sequence: Synthetic oligonucleotide
  Antisense strand to SEQ ID NO: 2408364
auagaaggaaccuucugga

SEQ ID NO: 2408366 - RNA, 19 nt, Artificial Sequence
  Description of Artificial Sequence: Synthetic oligonucleotide
  Sense strand starting at position 1285 of SEQ ID NO: 1886418
ccagaagguuccuucuaua

SEQ ID NO: 2408367 - RNA, 19 nt, Artificial Sequence
  Description of Artificial Sequence: Synthetic oligonucleotide
  Antisense strand to SEQ ID NO: 2408366
uauagaaggaaccuucugg

SEQ ID NO: 2408368 - RNA, 19 nt, Artificial Sequence
  Description of Artificial Sequence: Synthetic oligonucleotide
  Sense strand starting at position 1350 of SEQ ID NO: 1886418
auguuaccugcucaguaaa

SEQ ID NO: 2408369 - RNA, 19 nt, Artificial Sequence
  Description of Artificial Sequence: Synthetic oligonucleotide
  Antisense strand to SEQ ID NO: 2408368
uuuacugagcagguaacau

SEQ ID NO: 2408370 - RNA, 19 nt, Artificial Sequence
  Description of Artificial Sequence: Synthetic oligonucleotide
  Sense strand starting at position 1425 of SEQ ID NO: 1886418
uggcacaugugacucuaaa

SEQ ID NO: 2408371 - RNA, 19 nt, Artificial Sequence
  Description of Artificial Sequence: Synthetic oligonucleotide
  Antisense strand to SEQ ID NO: 2408370
uuuagagucacaugugcca

SEQ ID NO: 2408372 - RNA, 19 nt, Artificial Sequence
  Description of Artificial Sequence: Synthetic oligonucleotide
  Sense strand starting at position 1556 of SEQ ID NO: 1886418
uuacacagguugucaucaa

SEQ ID NO: 2408373 - RNA, 19 nt, Artificial Sequence
  Description of Artificial Sequence: Synthetic oligonucleotide
  Antisense strand to SEQ ID NO: 2408372
uugaugacaaccuguguaa

SEQ ID NO: 2408374 - RNA, 19 nt, Artificial Sequence
  Description of Artificial Sequence: Synthetic oligonucleotide
  Sense strand starting at position 1560 of SEQ ID NO: 1886418
acagguugucaucaaugca

SEQ ID NO: 2408375 - RNA, 19 nt, Artificial Sequence
  Description of Artificial Sequence: Synthetic oligonucleotide
  Antisense strand to SEQ ID NO: 2408374
ugcauugaugacaaccugu

SEQ ID NO: 2408376 - RNA, 19 nt, Artificial Sequence
  Description of Artificial Sequence: Synthetic oligonucleotide
  Sense strand starting at position 1563 of SEQ ID NO: 1886418
gguugucaucaaugcacau

SEQ ID NO: 2408377 - RNA, 19 nt, Artificial Sequence
  Description of Artificial Sequence: Synthetic oligonucleotide
  Antisense strand to SEQ ID NO: 2408376
augugcauugaugacaacc

SEQ ID NO: 2408378 - RNA, 19 nt, Artificial Sequence
  Description of Artificial Sequence: Synthetic oligonucleotide
  Sense strand starting at position 1567 of SEQ ID NO: 1886418
gucaucaaugcacauguau

SEQ ID NO: 2408379 - RNA, 19 nt, Artificial Sequence
  Description of Artificial Sequence: Synthetic oligonucleotide
  Antisense strand to SEQ ID NO: 2408378
auacaugugcauugaugac

SEQ ID NO: 2408380 - RNA, 19 nt, Artificial Sequence
  Description of Artificial Sequence: Synthetic oligonucleotide
  Sense strand starting at position 1578 of SEQ ID NO: 1886418
acauguauggaaugcauga

SEQ ID NO: 2408381 - RNA, 19 nt, Artificial Sequence
  Description of Artificial Sequence: Synthetic oligonucleotide
  Antisense strand to SEQ ID NO: 2408380
ucaugcauuccauacaugu

SEQ ID NO: 2408382 - RNA, 19 nt, Artificial Sequence
  Description of Artificial Sequence: Synthetic oligonucleotide
  Sense strand starting at position 1963 of SEQ ID NO: 1886418
cgccaugugggauggaaua

SEQ ID NO: 2408383 - RNA, 19 nt, Artificial Sequence
  Description of Artificial Sequence: Synthetic oligonucleotide
  Antisense strand to SEQ ID NO: 2408382
uauuccaucccacauggcg

SEQ ID NO: 2408384 - RNA, 19 nt, Artificial Sequence
  Description of Artificial Sequence: Synthetic oligonucleotide
  Sense strand starting at position 3017 of SEQ ID NO: 1886418
cagucuucugaaggauacu

SEQ ID NO: 2408385 - RNA, 19 nt, Artificial Sequence
  Description of Artificial Sequence: Synthetic oligonucleotide
  Antisense strand to SEQ ID NO: 2408384
aguauccuucagaagacug

SEQ ID NO: 2408386 - RNA, 19 nt, Artificial Sequence
  Description of Artificial Sequence: Synthetic oligonucleotide
  Sense strand starting at position 3071 of SEQ ID NO: 1886418
aguuuauagagcuaguaag

SEQ ID NO: 2408387 - RNA, 19 nt, Artificial Sequence
  Description of Artificial Sequence: Synthetic oligonucleotide
  Antisense strand to SEQ ID NO: 2408386
cuuacuagcucuauaaacu

SEQ ID NO: 2408388 - RNA, 19 nt, Artificial Sequence
  Description of Artificial Sequence: Synthetic oligonucleotide
  Sense strand starting at position 3089 of SEQ ID NO: 1886418
guugcagagcugggauuaa

SEQ ID NO: 2408389 - RNA, 19 nt, Artificial Sequence
  Description of Artificial Sequence: Synthetic oligonucleotide
  Antisense strand to SEQ ID NO: 2408388
uuaaucccagcucugcaac

SEQ ID NO: 2408390 - RNA, 19 nt, Artificial Sequence
  Description of Artificial Sequence: Synthetic oligonucleotide
  Sense strand starting at position 3130 of SEQ ID NO: 1886418
cccaguuucucauugaugu

SEQ ID NO: 2408391 - RNA, 19 nt, Artificial Sequence
  Description of Artificial Sequence: Synthetic oligonucleotide
  Antisense strand to SEQ ID NO: 2408390
acaucaaugagaaacuggg

SEQ ID NO: 2408392 - RNA, 19 nt, Artificial Sequence
  Description of Artificial Sequence: Synthetic oligonucleotide
  Sense strand starting at position 3131 of SEQ ID NO: 1886418
ccaguuucucauugauguu

SEQ ID NO: 2408393 - RNA, 19 nt, Artificial Sequence
  Description of Artificial Sequence: Synthetic oligonucleotide
  Antisense strand to SEQ ID NO: 2408392
aacaucaaugagaaacugg

SEQ ID NO: 2408394 - RNA, 19 nt, Artificial Sequence
  Description of Artificial Sequence: Synthetic oligonucleotide
  Sense strand starting at position 3204 of SEQ ID NO: 1886418
ggcccuuucccaggagauu

SEQ ID NO: 2408395 - RNA, 19 nt, Artificial Sequence
  Description of Artificial Sequence: Synthetic oligonucleotide
  Antisense strand to SEQ ID NO: 2408394
aaucuccugggaaagggcc

SEQ ID NO: 2408396 - RNA, 19 nt, Artificial Sequence
  Description of Artificial Sequence: Synthetic oligonucleotide
  Sense strand starting at position 3237 of SEQ ID NO: 1886418
cugggauguagccaggaau

SEQ ID NO: 2408397 - RNA, 19 nt, Artificial Sequence
  Description of Artificial Sequence: Synthetic oligonucleotide
  Antisense strand to SEQ ID NO: 2408396
auuccuggcuacaucccag

SEQ ID NO: 2408398 - RNA, 19 nt, Artificial Sequence
  Description of Artificial Sequence: Synthetic oligonucleotide
  Sense strand starting at position 3274 of SEQ ID NO: 1886418
uuagguaauucuucuaagu

SEQ ID NO: 2408399 - RNA, 19 nt, Artificial Sequence
  Description of Artificial Sequence: Synthetic oligonucleotide
  Antisense strand to SEQ ID NO: 2408398
acuuagaagaauuaccuaa

SEQ ID NO: 2408400 - RNA, 19 nt, Artificial Sequence
  Description of Artificial Sequence: Synthetic oligonucleotide
  Sense strand starting at position 3341 of SEQ ID NO: 1886418
cgauucuguuucuuaauuu

SEQ ID NO: 2408401 - RNA, 19 nt, Artificial Sequence
  Description of Artificial Sequence: Synthetic oligonucleotide
  Antisense strand to SEQ ID NO: 2408400
aaauuaagaaacagaaucg

SEQ ID NO: 2408402 - RNA, 19 nt, Artificial Sequence
  Description of Artificial Sequence: Synthetic oligonucleotide
  Sense strand starting at position 3743 of SEQ ID NO: 1886418
gccuguggauucucacuua

SEQ ID NO: 2408403 - RNA, 19 nt, Artificial Sequence
  Description of Artificial Sequence: Synthetic oligonucleotide
  Antisense strand to SEQ ID NO: 2408402
uaagugagaauccacaggc

SEQ ID NO: 2408404 - RNA, 19 nt, Artificial Sequence
  Description of Artificial Sequence: Synthetic oligonucleotide
  Sense strand starting at position 3746 of SEQ ID NO: 1886418
uguggauucucacuuaaua

SEQ ID NO: 2408405 - RNA, 19 nt, Artificial Sequence
  Description of Artificial Sequence: Synthetic oligonucleotide
  Antisense strand to SEQ ID NO: 2408404
uauuaagugagaauccaca

SEQ ID NO: 2408406 - RNA, 19 nt, Artificial Sequence
  Description of Artificial Sequence: Synthetic oligonucleotide
  Sense strand starting at position 3766 of SEQ ID NO: 1886418
gugaaugauuuagaugacu

SEQ ID NO: 2408407 - RNA, 19 nt, Artificial Sequence
  Description of Artificial Sequence: Synthetic oligonucleotide
  Antisense strand to SEQ ID NO: 2408406
agucaucuaaaucauucac

SEQ ID NO: 2408408 - RNA, 19 nt, Artificial Sequence
  Description of Artificial Sequence: Synthetic oligonucleotide
  Sense strand starting at position 3806 of SEQ ID NO: 1886418
gagagcuaguacuuacuga

SEQ ID NO: 2408409 - RNA, 19 nt, Artificial Sequence
  Description of Artificial Sequence: Synthetic oligonucleotide
  Antisense strand to SEQ ID NO: 2408408
ucaguaaguacuagcucuc

SEQ ID NO: 2408410 - RNA, 19 nt, Artificial Sequence
  Description of Artificial Sequence: Synthetic oligonucleotide
  Sense strand starting at position 3881 of SEQ ID NO: 1886418
ugaaacaggucuguacaga

SEQ ID NO: 2408411 - RNA, 19 nt, Artificial Sequence
  Description of Artificial Sequence: Synthetic oligonucleotide
  Antisense strand to SEQ ID NO: 2408410
ucuguacagaccuguuuca

SEQ ID NO: 2408412 - RNA, 19 nt, Artificial Sequence
  Description of Artificial Sequence: Synthetic oligonucleotide
  Sense strand starting at position 3926 of SEQ ID NO: 1886418
aguucuagaaacugagguu

SEQ ID NO: 2408413 - RNA, 19 nt, Artificial Sequence
  Description of Artificial Sequence: Synthetic oligonucleotide
  Antisense strand to SEQ ID NO: 2408412
aaccucaguuucuagaacu

SEQ ID NO: 2408414 - RNA, 19 nt, Artificial Sequence
  Description of Artificial Sequence: Synthetic oligonucleotide
  Sense strand starting at position 3940 of SEQ ID NO: 1886418
agguucagagguuguaaau

SEQ ID NO: 2408415 - RNA, 19 nt, Artificial Sequence
  Description of Artificial Sequence: Synthetic oligonucleotide
  Antisense strand to SEQ ID NO: 2408414
auuuacaaccucugaaccu

SEQ ID NO: 2408416 - RNA, 19 nt, Artificial Sequence
  Description of Artificial Sequence: Synthetic oligonucleotide
  Sense strand starting at position 3949 of SEQ ID NO: 1886418
gguuguaaaucucccaagu

SEQ ID NO: 2408417 - RNA, 19 nt, Artificial Sequence
  Description of Artificial Sequence: Synthetic oligonucleotide
  Antisense strand to SEQ ID NO: 2408416
acuugggagauuuacaacc

SEQ ID NO: 2408418 - RNA, 19 nt, Artificial Sequence
  Description of Artificial Sequence: Synthetic oligonucleotide
  Sense strand starting at position 32 of SEQ ID NO: 1886419
cccuaaaguccagaugcaa

SEQ ID NO: 2408419 - RNA, 19 nt, Artificial Sequence
  Description of Artificial Sequence: Synthetic oligonucleotide
  Antisense strand to SEQ ID NO: 2408418
uugcaucuggacuuuaggg

SEQ ID NO: 2408420 - RNA, 19 nt, Artificial Sequence
  Description of Artificial Sequence: Synthetic oligonucleotide
  Sense strand starting at position 53 of SEQ ID NO: 1886419
ccacuugaacccugaagau

SEQ ID NO: 2408421 - RNA, 19 nt, Artificial Sequence
  Description of Artificial Sequence: Synthetic oligonucleotide
  Antisense strand to SEQ ID NO: 2408420
aucuucaggguucaagugg

SEQ ID NO: 2408422 - RNA, 19 nt, Artificial Sequence
  Description of Artificial Sequence: Synthetic oligonucleotide
  Sense strand starting at position 132 of SEQ ID NO: 1886419
cacggcauguucucacaua

SEQ ID NO: 2408423 - RNA, 19 nt, Artificial Sequence
  Description of Artificial Sequence: Synthetic oligonucleotide
  Antisense strand to SEQ ID NO: 2408422
uaugugagaacaugccgug

SEQ ID NO: 2408424 - RNA, 19 nt, Artificial Sequence
  Description of Artificial Sequence: Synthetic oligonucleotide
  Sense strand starting at position 188 of SEQ ID NO: 1886419
acgcuuguucgugacacuu

SEQ ID NO: 2408425 - RNA, 19 nt, Artificial Sequence
  Description of Artificial Sequence: Synthetic oligonucleotide
  Antisense strand to SEQ ID NO: 2408424
aagugucacgaacaagcgu

SEQ ID NO: 2408426 - RNA, 19 nt, Artificial Sequence
  Description of Artificial Sequence: Synthetic oligonucleotide
  Sense strand starting at position 327 of SEQ ID NO: 1886419
cugccaaggccaugagaaa

SEQ ID NO: 2408427 - RNA, 19 nt, Artificial Sequence
  Description of Artificial Sequence: Synthetic oligonucleotide
  Antisense strand to SEQ ID NO: 2408426
uuucucauggccuuggcag

SEQ ID NO: 2408428 - RNA, 19 nt, Artificial Sequence
  Description of Artificial Sequence: Synthetic oligonucleotide
  Sense strand starting at position 355 of SEQ ID NO: 1886419
uuccucuucccguggauga

SEQ ID NO: 2408429 - RNA, 19 nt, Artificial Sequence
  Description of Artificial Sequence: Synthetic oligonucleotide
  Antisense strand to SEQ ID NO: 2408428
ucauccacgggaagaggaa

SEQ ID NO: 2408430 - RNA, 19 nt, Artificial Sequence
  Description of Artificial Sequence: Synthetic oligonucleotide
  Sense strand starting at position 414 of SEQ ID NO: 1886419
gcgaguuaaccucacaaac

SEQ ID NO: 2408431 - RNA, 19 nt, Artificial Sequence
  Description of Artificial Sequence: Synthetic oligonucleotide
  Antisense strand to SEQ ID NO: 2408430
guuugugagguuaacucgc

SEQ ID NO: 2408432 - RNA, 19 nt, Artificial Sequence
  Description of Artificial Sequence: Synthetic oligonucleotide
  Sense strand starting at position 428 of SEQ ID NO: 1886419
caaacuucgccaugacugu

SEQ ID NO: 2408433 - RNA, 19 nt, Artificial Sequence
  Description of Artificial Sequence: Synthetic oligonucleotide
  Antisense strand to SEQ ID NO: 2408432
acagucauggcgaaguuug

SEQ ID NO: 2408434 - RNA, 19 nt, Artificial Sequence
  Description of Artificial Sequence: Synthetic oligonucleotide
  Sense strand starting at position 634 of SEQ ID NO: 1886419
uccuuaacacuucggauua

SEQ ID NO: 2408435 - RNA, 19 nt, Artificial Sequence
  Description of Artificial Sequence: Synthetic oligonucleotide
  Antisense strand to SEQ ID NO: 2408434
uaauccgaaguguuaagga

SEQ ID NO: 2408436 - RNA, 19 nt, Artificial Sequence
  Description of Artificial Sequence: Synthetic oligonucleotide
  Sense strand starting at position 646 of SEQ ID NO: 1886419
cggauuauuacgcaucucu

SEQ ID NO: 2408437 - RNA, 19 nt, Artificial Sequence
  Description of Artificial Sequence: Synthetic oligonucleotide
  Antisense strand to SEQ ID NO: 2408436
agagaugcguaauaauccg

SEQ ID NO: 2408438 - RNA, 19 nt, Artificial Sequence
  Description of Artificial Sequence: Synthetic oligonucleotide
  Sense strand starting at position 663 of SEQ ID NO: 1886419
cuacaaacuccacgaguga

SEQ ID NO: 2408439 - RNA, 19 nt, Artificial Sequence
  Description of Artificial Sequence: Synthetic oligonucleotide
  Antisense strand to SEQ ID NO: 2408438
ucacucguggaguuuguag

SEQ ID NO: 2408440 - RNA, 19 nt, Artificial Sequence
  Description of Artificial Sequence: Synthetic oligonucleotide
  Sense strand starting at position 672 of SEQ ID NO: 1886419
ccacgagugagcugcagaa

SEQ ID NO: 2408441 - RNA, 19 nt, Artificial Sequence
  Description of Artificial Sequence: Synthetic oligonucleotide
  Antisense strand to SEQ ID NO: 2408440
uucugcagcucacucgugg

SEQ ID NO: 2408442 - RNA, 19 nt, Artificial Sequence
  Description of Artificial Sequence: Synthetic oligonucleotide
  Sense strand starting at position 676 of SEQ ID NO: 1886419
gagugagcugcagaagguu

SEQ ID NO: 2408443 - RNA, 19 nt, Artificial Sequence
  Description of Artificial Sequence: Synthetic oligonucleotide
  Antisense strand to SEQ ID NO: 2408442
aaccuucugcagcucacuc

SEQ ID NO: 2408444 - RNA, 19 nt, Artificial Sequence
  Description of Artificial Sequence: Synthetic oligonucleotide
  Sense strand starting at position 964 of SEQ ID NO: 1886419
agucgcauccuggaagaua

SEQ ID NO: 2408445 - RNA, 19 nt, Artificial Sequence
  Description of Artificial Sequence: Synthetic oligonucleotide
  Antisense strand to SEQ ID NO: 2408444
uaucuuccaggaugcgacu

SEQ ID NO: 2408446 - RNA, 19 nt, Artificial Sequence
  Description of Artificial Sequence: Synthetic oligonucleotide
  Sense strand starting at position 989 of SEQ ID NO: 1886419
caaguaaacuucuuggguu

SEQ ID NO: 2408447 - RNA, 19 nt, Artificial Sequence
  Description of Artificial Sequence: Synthetic oligonucleotide
  Antisense strand to SEQ ID NO: 2408446
aacccaagaaguuuacuug

SEQ ID NO: 2408448 - RNA, 19 nt, Artificial Sequence
  Description of Artificial Sequence: Synthetic oligonucleotide
  Sense strand starting at position 1054 of SEQ ID NO: 1886419
uguagacguucuuccauca

SEQ ID NO: 2408449 - RNA, 19 nt, Artificial Sequence
  Description of Artificial Sequence: Synthetic oligonucleotide
  Antisense strand to SEQ ID NO: 2408448
ugauggaagaacgucuaca

SEQ ID NO: 2408450 - RNA, 19 nt, Artificial Sequence
  Description of Artificial Sequence: Synthetic oligonucleotide
  Sense strand starting at position 1401 of SEQ ID NO: 1886419
cgaccaaugucaucaagaa

SEQ ID NO: 2408451 - RNA, 19 nt, Artificial Sequence
  Description of Artificial Sequence: Synthetic oligonucleotide
  Antisense strand to SEQ ID NO: 2408450
uucuugaugacauuggucg

SEQ ID NO: 2408452 - RNA, 19 nt, Artificial Sequence
  Description of Artificial Sequence: Synthetic oligonucleotide
  Sense strand starting at position 2318 of SEQ ID NO: 1886419
aggucacgcccgagguaau

SEQ ID NO: 2408453 - RNA, 19 nt, Artificial Sequence
  Description of Artificial Sequence: Synthetic oligonucleotide
  Antisense strand to SEQ ID NO: 2408452
auuaccucgggcgugaccu

SEQ ID NO: 2408454 - RNA, 19 nt, Artificial Sequence
  Description of Artificial Sequence: Synthetic oligonucleotide
  Sense strand starting at position 2319 of SEQ ID NO: 1886419
ggucacgcccgagguaaua

SEQ ID NO: 2408455 - RNA, 19 nt, Artificial Sequence
  Description of Artificial Sequence: Synthetic oligonucleotide
  Antisense strand to SEQ ID NO: 2408454
uauuaccucgggcgugacc

SEQ ID NO: 2408456 - RNA, 19 nt, Artificial Sequence
  Description of Artificial Sequence: Synthetic oligonucleotide
  Sense strand starting at position 2442 of SEQ ID NO: 1886419
aaaucugggcuauaaguca

SEQ ID NO: 2408457 - RNA, 19 nt, Artificial Sequence
  Description of Artificial Sequence: Synthetic oligonucleotide
  Antisense strand to SEQ ID NO: 2408456
ugacuuauagcccagauuu

SEQ ID NO: 2408458 - RNA, 19 nt, Artificial Sequence
  Description of Artificial Sequence: Synthetic oligonucleotide
  Sense strand starting at position 2496 of SEQ ID NO: 1886419
guccauaguccuggaggca

SEQ ID NO: 2408459 - RNA, 19 nt, Artificial Sequence
  Description of Artificial Sequence: Synthetic oligonucleotide
  Antisense strand to SEQ ID NO: 2408458
ugccuccaggacuauggac

SEQ ID NO: 2408460 - RNA, 19 nt, Artificial Sequence
  Description of Artificial Sequence: Synthetic oligonucleotide
  Sense strand starting at position 2813 of SEQ ID NO: 1886419
gcauuagaggcgugaggua

SEQ ID NO: 2408461 - RNA, 19 nt, Artificial Sequence
  Description of Artificial Sequence: Synthetic oligonucleotide
  Antisense strand to SEQ ID NO: 2408460
uaccucacgccucuaaugc

SEQ ID NO: 2408462 - RNA, 19 nt, Artificial Sequence
  Description of Artificial Sequence: Synthetic oligonucleotide
  Sense strand starting at position 2899 of SEQ ID NO: 1886419
gcuggagucaauggcaauu

SEQ ID NO: 2408463 - RNA, 19 nt, Artificial Sequence
  Description of Artificial Sequence: Synthetic oligonucleotide
  Antisense strand to SEQ ID NO: 2408462
aauugccauugacuccagc

SEQ ID NO: 2408464 - RNA, 19 nt, Artificial Sequence
  Description of Artificial Sequence: Synthetic oligonucleotide
  Sense strand starting at position 3174 of SEQ ID NO: 1886419
caugcagaucuugaguaau

SEQ ID NO: 2408465 - RNA, 19 nt, Artificial Sequence
  Description of Artificial Sequence: Synthetic oligonucleotide
  Antisense strand to SEQ ID NO: 2408464
auuacucaagaucugcaug

SEQ ID NO: 2408466 - RNA, 19 nt, Artificial Sequence
  Description of Artificial Sequence: Synthetic oligonucleotide
  Sense strand starting at position 3176 of SEQ ID NO: 1886419
ugcagaucuugaguaauga

SEQ ID NO: 2408467 - RNA, 19 nt, Artificial Sequence
  Description of Artificial Sequence: Synthetic oligonucleotide
  Antisense strand to SEQ ID NO: 2408466
ucauuacucaagaucugca

SEQ ID NO: 2408468 - RNA, 19 nt, Artificial Sequence
  Description of Artificial Sequence: Synthetic oligonucleotide
  Sense strand starting at position 3180 of SEQ ID NO: 1886419
gaucuugaguaaugaacag

SEQ ID NO: 2408469 - RNA, 19 nt, Artificial Sequence
  Description of Artificial Sequence: Synthetic oligonucleotide
  Antisense strand to SEQ ID NO: 2408468
cuguucauuacucaagauc

SEQ ID NO: 2408470 - RNA, 19 nt, Artificial Sequence
  Description of Artificial Sequence: Synthetic oligonucleotide
  Sense strand starting at position 3233 of SEQ ID NO: 1886419
ggaaauuguacacggugaa

SEQ ID NO: 2408471 - RNA, 19 nt, Artificial Sequence
  Description of Artificial Sequence: Synthetic oligonucleotide
  Antisense strand to SEQ ID NO: 2408470
uucaccguguacaauuucc

SEQ ID NO: 2408472 - RNA, 19 nt, Artificial Sequence
  Description of Artificial Sequence: Synthetic oligonucleotide
  Sense strand starting at position 3234 of SEQ ID NO: 1886419
gaaauuguacacggugaac

SEQ ID NO: 2408473 - RNA, 19 nt, Artificial Sequence
  Description of Artificial Sequence: Synthetic oligonucleotide
  Antisense strand to SEQ ID NO: 2408472
guucaccguguacaauuuc

SEQ ID NO: 2408474 - RNA, 19 nt, Artificial Sequence
  Description of Artificial Sequence: Synthetic oligonucleotide
  Sense strand starting at position 3236 of SEQ ID NO: 1886419
aauuguacacggugaacuu

SEQ ID NO: 2408475 - RNA, 19 nt, Artificial Sequence
  Description of Artificial Sequence: Synthetic oligonucleotide
  Antisense strand to SEQ ID NO: 2408474
aaguucaccguguacaauu

SEQ ID NO: 2408476 - RNA, 19 nt, Artificial Sequence
  Description of Artificial Sequence: Synthetic oligonucleotide
  Sense strand starting at position 3245 of SEQ ID NO: 1886419
cggugaacuuuagaacaca

SEQ ID NO: 2408477 - RNA, 19 nt, Artificial Sequence
  Description of Artificial Sequence: Synthetic oligonucleotide
  Antisense strand to SEQ ID NO: 2408476
uguguucuaaaguucaccg

SEQ ID NO: 2408478 - RNA, 19 nt, Artificial Sequence
  Description of Artificial Sequence: Synthetic oligonucleotide
  Sense strand starting at position 3310 of SEQ ID NO: 1886419
aaggcuguccugugaagaa

SEQ ID NO: 2408479 - RNA, 19 nt, Artificial Sequence
  Description of Artificial Sequence: Synthetic oligonucleotide
  Antisense strand to SEQ ID NO: 2408478
uucuucacaggacagccuu

SEQ ID NO: 2408480 - RNA, 19 nt, Artificial Sequence
  Description of Artificial Sequence: Synthetic oligonucleotide
  Sense strand starting at position 3425 of SEQ ID NO: 1886419
gccagaaugcuuggccaag

SEQ ID NO: 2408481 - RNA, 19 nt, Artificial Sequence
  Description of Artificial Sequence: Synthetic oligonucleotide
  Antisense strand to SEQ ID NO: 2408480
cuuggccaagcauucuggc

SEQ ID NO: 2408482 - RNA, 19 nt, Artificial Sequence
  Description of Artificial Sequence: Synthetic oligonucleotide
  Sense strand starting at position 3646 of SEQ ID NO: 1886419
guccaugaccaauggauga

SEQ ID NO: 2408483 - RNA, 19 nt, Artificial Sequence
  Description of Artificial Sequence: Synthetic oligonucleotide
  Antisense strand to SEQ ID NO: 2408482
ucauccauuggucauggac

SEQ ID NO: 2408484 - RNA, 19 nt, Artificial Sequence
  Description of Artificial Sequence: Synthetic oligonucleotide
  Sense strand starting at position 3679 of SEQ ID NO: 1886419
ugcaauaacuuggccugau

SEQ ID NO: 2408485 - RNA, 19 nt, Artificial Sequence
  Description of Artificial Sequence: Synthetic oligonucleotide
  Antisense strand to SEQ ID NO: 2408484
aucaggccaaguuauugca

SEQ ID NO: 2408486 - RNA, 19 nt, Artificial Sequence
  Description of Artificial Sequence: Synthetic oligonucleotide
  Sense strand starting at position 3680 of SEQ ID NO: 1886419
gcaauaacuuggccugaug

SEQ ID NO: 2408487 - RNA, 19 nt, Artificial Sequence
  Description of Artificial Sequence: Synthetic oligonucleotide
  Antisense strand to SEQ ID NO: 2408486
caucaggccaaguuauugc

SEQ ID NO: 2408488 - RNA, 19 nt, Artificial Sequence
  Description of Artificial Sequence: Synthetic oligonucleotide
  Sense strand starting at position 3682 of SEQ ID NO: 1886419
aauaacuuggccugauguu

SEQ ID NO: 2408489 - RNA, 19 nt, Artificial Sequence
  Description of Artificial Sequence: Synthetic oligonucleotide
  Antisense strand to SEQ ID NO: 2408488
aacaucaggccaaguuauu

SEQ ID NO: 2408490 - RNA, 19 nt, Artificial Sequence
  Description of Artificial Sequence: Synthetic oligonucleotide
  Sense strand starting at position 3699 of SEQ ID NO: 1886419
uugugaagucacgguccau

SEQ ID NO: 2408491 - RNA, 19 nt, Artificial Sequence
  Description of Artificial Sequence: Synthetic oligonucleotide
  Antisense strand to SEQ ID NO: 2408490
auggaccgugacuucacaa

SEQ ID NO: 2408492 - RNA, 19 nt, Artificial Sequence
  Description of Artificial Sequence: Synthetic oligonucleotide
  Sense strand starting at position 3888 of SEQ ID NO: 1886419
gcugguguauuaguaaucu

SEQ ID NO: 2408493 - RNA, 19 nt, Artificial Sequence
  Description of Artificial Sequence: Synthetic oligonucleotide
  Antisense strand to SEQ ID NO: 2408492
agauuacuaauacaccagc

SEQ ID NO: 2408494 - RNA, 19 nt, Artificial Sequence
  Description of Artificial Sequence: Synthetic oligonucleotide
  Sense strand starting at position 3892 of SEQ ID NO: 1886419
guguauuaguaaucuacug

SEQ ID NO: 2408495 - RNA, 19 nt, Artificial Sequence
  Description of Artificial Sequence: Synthetic oligonucleotide
  Antisense strand to SEQ ID NO: 2408494
caguagauuacuaauacac

SEQ ID NO: 2408496 - RNA, 19 nt, Artificial Sequence
  Description of Artificial Sequence: Synthetic oligonucleotide
  Sense strand starting at position 3955 of SEQ ID NO: 1886419
agacgucuaacucaugguu

SEQ ID NO: 2408497 - RNA, 19 nt, Artificial Sequence
  Description of Artificial Sequence: Synthetic oligonucleotide
  Antisense strand to SEQ ID NO: 2408496
aaccaugaguuagacgucu

SEQ ID NO: 2408498 - RNA, 19 nt, Artificial Sequence
  Description of Artificial Sequence: Synthetic oligonucleotide
  Sense strand starting at position 116 of SEQ ID NO: 1886420
agguacaugcaugguugaa

SEQ ID NO: 2408499 - RNA, 19 nt, Artificial Sequence
  Description of Artificial Sequence: Synthetic oligonucleotide
  Antisense strand to SEQ ID NO: 2408498
uucaaccaugcauguaccu

SEQ ID NO: 2408500 - RNA, 19 nt, Artificial Sequence
  Description of Artificial Sequence: Synthetic oligonucleotide
  Sense strand starting at position 118 of SEQ ID NO: 1886420
guacaugcaugguugaaau

SEQ ID NO: 2408501 - RNA, 19 nt, Artificial Sequence
  Description of Artificial Sequence: Synthetic oligonucleotide
  Antisense strand to SEQ ID NO: 2408500
auuucaaccaugcauguac

SEQ ID NO: 2408502 - RNA, 19 nt, Artificial Sequence
  Description of Artificial Sequence: Synthetic oligonucleotide
  Sense strand starting at position 267 of SEQ ID NO: 1886420
gggcauucaucagcaggga

SEQ ID NO: 2408503 - RNA, 19 nt, Artificial Sequence
  Description of Artificial Sequence: Synthetic oligonucleotide
  Antisense strand to SEQ ID NO: 2408502
ucccugcugaugaaugccc

SEQ ID NO: 2408504 - RNA, 19 nt, Artificial Sequence
  Description of Artificial Sequence: Synthetic oligonucleotide
  Sense strand starting at position 471 of SEQ ID NO: 1886420
acccucagguccuagugaa

SEQ ID NO: 2408505 - RNA, 19 nt, Artificial Sequence
  Description of Artificial Sequence: Synthetic oligonucleotide
  Antisense strand to SEQ ID NO: 2408504
uucacuaggaccugagggu

SEQ ID NO: 2408506 - RNA, 19 nt, Artificial Sequence
  Description of Artificial Sequence: Synthetic oligonucleotide
  Sense strand starting at position 577 of SEQ ID NO: 1886420
acagaugucuucugagacc

SEQ ID NO: 2408507 - RNA, 19 nt, Artificial Sequence
  Description of Artificial Sequence: Synthetic oligonucleotide
  Antisense strand to SEQ ID NO: 2408506
ggucucagaagacaucugu

SEQ ID NO: 2408508 - RNA, 19 nt, Artificial Sequence
  Description of Artificial Sequence: Synthetic oligonucleotide
  Sense strand starting at position 583 of SEQ ID NO: 1886420
gucuucugagaccagcaau

SEQ ID NO: 2408509 - RNA, 19 nt, Artificial Sequence
  Description of Artificial Sequence: Synthetic oligonucleotide
  Antisense strand to SEQ ID NO: 2408508
auugcuggucucagaagac

SEQ ID NO: 2408510 - RNA, 19 nt, Artificial Sequence
  Description of Artificial Sequence: Synthetic oligonucleotide
  Sense strand starting at position 586 of SEQ ID NO: 1886420
uucugagaccagcaauacu

SEQ ID NO: 2408511 - RNA, 19 nt, Artificial Sequence
  Description of Artificial Sequence: Synthetic oligonucleotide
  Antisense strand to SEQ ID NO: 2408510
aguauugcuggucucagaa

SEQ ID NO: 2408512 - RNA, 19 nt, Artificial Sequence
  Description of Artificial Sequence: Synthetic oligonucleotide
  Sense strand starting at position 785 of SEQ ID NO: 1886420
uggacaucgccuggcuauu

SEQ ID NO: 2408513 - RNA, 19 nt, Artificial Sequence
  Description of Artificial Sequence: Synthetic oligonucleotide
  Antisense strand to SEQ ID NO: 2408512
aauagccaggcgaugucca

SEQ ID NO: 2408514 - RNA, 19 nt, Artificial Sequence
  Description of Artificial Sequence: Synthetic oligonucleotide
  Sense strand starting at position 787 of SEQ ID NO: 1886420
gacaucgccuggcuauuaa

SEQ ID NO: 2408515 - RNA, 19 nt, Artificial Sequence
  Description of Artificial Sequence: Synthetic oligonucleotide
  Antisense strand to SEQ ID NO: 2408514
uuaauagccaggcgauguc

SEQ ID NO: 2408516 - RNA, 19 nt, Artificial Sequence
  Description of Artificial Sequence: Synthetic oligonucleotide
  Sense strand starting at position 1146 of SEQ ID NO: 1886420
cccagaguaguuuaaaguu

SEQ ID NO: 2408517 - RNA, 19 nt, Artificial Sequence
  Description of Artificial Sequence: Synthetic oligonucleotide
  Antisense strand to SEQ ID NO: 2408516
aacuuuaaacuacucuggg

SEQ ID NO: 2408518 - RNA, 19 nt, Artificial Sequence
  Description of Artificial Sequence: Synthetic oligonucleotide
  Sense strand starting at position 1979 of SEQ ID NO: 1886420
cgccgccaguucuuguaaa

SEQ ID NO: 2408519 - RNA, 19 nt, Artificial Sequence
  Description of Artificial Sequence: Synthetic oligonucleotide
  Antisense strand to SEQ ID NO: 2408518
uuuacaagaacuggcggcg

SEQ ID NO: 2408520 - RNA, 19 nt, Artificial Sequence
  Description of Artificial Sequence: Synthetic oligonucleotide
  Sense strand starting at position 2285 of SEQ ID NO: 1886420
guggacuuauucugugugu

SEQ ID NO: 2408521 - RNA, 19 nt, Artificial Sequence
  Description of Artificial Sequence: Synthetic oligonucleotide
  Antisense strand to SEQ ID NO: 2408520
acacacagaauaaguccac

SEQ ID NO: 2408522 - RNA, 19 nt, Artificial Sequence
  Description of Artificial Sequence: Synthetic oligonucleotide
  Sense strand starting at position 2286 of SEQ ID NO: 1886420
uggacuuauucuguguguu

SEQ ID NO: 2408523 - RNA, 19 nt, Artificial Sequence
  Description of Artificial Sequence: Synthetic oligonucleotide
  Antisense strand to SEQ ID NO: 2408522
aacacacagaauaagucca

SEQ ID NO: 2408524 - RNA, 19 nt, Artificial Sequence
  Description of Artificial Sequence: Synthetic oligonucleotide
  Sense strand starting at position 2287 of SEQ ID NO: 1886420
ggacuuauucuguguguuu

SEQ ID NO: 2408525 - RNA, 19 nt, Artificial Sequence
  Description of Artificial Sequence: Synthetic oligonucleotide
  Antisense strand to SEQ ID NO: 2408524
aaacacacagaauaagucc

SEQ ID NO: 2408526 - RNA, 19 nt, Artificial Sequence
  Description of Artificial Sequence: Synthetic oligonucleotide
  Sense strand starting at position 2288 of SEQ ID NO: 1886420
gacuuauucuguguguuuc

SEQ ID NO: 2408527 - RNA, 19 nt, Artificial Sequence
  Description of Artificial Sequence: Synthetic oligonucleotide
  Antisense strand to SEQ ID NO: 2408526
gaaacacacagaauaaguc

SEQ ID NO: 2408528 - RNA, 19 nt, Artificial Sequence
  Description of Artificial Sequence: Synthetic oligonucleotide
  Sense strand starting at position 2289 of SEQ ID NO: 1886420
acuuauucuguguguuucu

SEQ ID NO: 2408529 - RNA, 19 nt, Artificial Sequence
  Description of Artificial Sequence: Synthetic oligonucleotide
  Antisense strand to SEQ ID NO: 2408528
agaaacacacagaauaagu

SEQ ID NO: 2408530 - RNA, 19 nt, Artificial Sequence
  Description of Artificial Sequence: Synthetic oligonucleotide
  Sense strand starting at position 2697 of SEQ ID NO: 1886420
agcuuaagggcuuaugaca

SEQ ID NO: 2408531 - RNA, 19 nt, Artificial Sequence
  Description of Artificial Sequence: Synthetic oligonucleotide
  Antisense strand to SEQ ID NO: 2408530
ugucauaagcccuuaagcu

SEQ ID NO: 2408532 - RNA, 19 nt, Artificial Sequence
  Description of Artificial Sequence: Synthetic oligonucleotide
  Sense strand starting at position 3086 of SEQ ID NO: 1886420
cucugauguagcugaaugu

SEQ ID NO: 2408533 - RNA, 19 nt, Artificial Sequence
  Description of Artificial Sequence: Synthetic oligonucleotide
  Antisense strand to SEQ ID NO: 2408532
acauucagcuacaucagag

SEQ ID NO: 2408534 - RNA, 19 nt, Artificial Sequence
  Description of Artificial Sequence: Synthetic oligonucleotide
  Sense strand starting at position 3858 of SEQ ID NO: 1886420
ugagguagugcacaaacau

SEQ ID NO: 2408535 - RNA, 19 nt, Artificial Sequence
  Description of Artificial Sequence: Synthetic oligonucleotide
  Antisense strand to SEQ ID NO: 2408534
auguuugugcacuaccuca

SEQ ID NO: 2408536 - RNA, 19 nt, Artificial Sequence
  Description of Artificial Sequence: Synthetic oligonucleotide
  Sense strand starting at position 3932 of SEQ ID NO: 1886420
ucuugaauccguggcugaa

SEQ ID NO: 2408537 - RNA, 19 nt, Artificial Sequence
  Description of Artificial Sequence: Synthetic oligonucleotide
  Antisense strand to SEQ ID NO: 2408536
uucagccacggauucaaga

SEQ ID NO: 2408538 - RNA, 19 nt, Artificial Sequence
  Description of Artificial Sequence: Synthetic oligonucleotide
  Sense strand starting at position 3934 of SEQ ID NO: 1886420
uugaauccguggcugaaga

SEQ ID NO: 2408539 - RNA, 19 nt, Artificial Sequence
  Description of Artificial Sequence: Synthetic oligonucleotide
  Antisense strand to SEQ ID NO: 2408538
ucuucagccacggauucaa

SEQ ID NO: 2408540 - RNA, 19 nt, Artificial Sequence
  Description of Artificial Sequence: Synthetic oligonucleotide
  Sense strand starting at position 3944 of SEQ ID NO: 1886420
ggcugaagaccuugacuuu

SEQ ID NO: 2408541 - RNA, 19 nt, Artificial Sequence
  Description of Artificial Sequence: Synthetic oligonucleotide
  Antisense strand to SEQ ID NO: 2408540
aaagucaaggucuucagcc

SEQ ID NO: 2408542 - RNA, 19 nt, Artificial Sequence
  Description of Artificial Sequence: Synthetic oligonucleotide
  Sense strand starting at position 19 of SEQ ID NO: 1886421
ccacauauugaucaggcua

SEQ ID NO: 2408543 - RNA, 19 nt, Artificial Sequence
  Description of Artificial Sequence: Synthetic oligonucleotide
  Antisense strand to SEQ ID NO: 2408542
uagccugaucaauaugugg

SEQ ID NO: 2408544 - RNA, 19 nt, Artificial Sequence
  Description of Artificial Sequence: Synthetic oligonucleotide
  Sense strand starting at position 21 of SEQ ID NO: 1886421
acauauugaucaggcuacu

SEQ ID NO: 2408545 - RNA, 19 nt, Artificial Sequence
  Description of Artificial Sequence: Synthetic oligonucleotide
  Antisense strand to SEQ ID NO: 2408544
aguagccugaucaauaugu

SEQ ID NO: 2408546 - RNA, 19 nt, Artificial Sequence
  Description of Artificial Sequence: Synthetic oligonucleotide
  Sense strand starting at position 117 of SEQ ID NO: 1886421
acacucugguccuguauau

SEQ ID NO: 2408547 - RNA, 19 nt, Artificial Sequence
  Description of Artificial Sequence: Synthetic oligonucleotide
  Antisense strand to SEQ ID NO: 2408546
auauacaggaccagagugu

SEQ ID NO: 2408548 - RNA, 19 nt, Artificial Sequence
  Description of Artificial Sequence: Synthetic oligonucleotide
  Sense strand starting at position 124 of SEQ ID NO: 1886421
gguccuguauauuugguga

SEQ ID NO: 2408549 - RNA, 19 nt, Artificial Sequence
  Description of Artificial Sequence: Synthetic oligonucleotide
  Antisense strand to SEQ ID NO: 2408548
ucaccaaauauacaggacc

SEQ ID NO: 2408550 - RNA, 19 nt, Artificial Sequence
  Description of Artificial Sequence: Synthetic oligonucleotide
  Sense strand starting at position 126 of SEQ ID NO: 1886421
uccuguauauuuggugaga

SEQ ID NO: 2408551 - RNA, 19 nt, Artificial Sequence
  Description of Artificial Sequence: Synthetic oligonucleotide
  Antisense strand to SEQ ID NO: 2408550
ucucaccaaauauacagga

SEQ ID NO: 2408552 - RNA, 19 nt, Artificial Sequence
  Description of Artificial Sequence: Synthetic oligonucleotide
  Sense strand starting at position 128 of SEQ ID NO: 1886421
cuguauauuuggugagagg

SEQ ID NO: 2408553 - RNA, 19 nt, Artificial Sequence
  Description of Artificial Sequence: Synthetic oligonucleotide
  Antisense strand to SEQ ID NO: 2408552
ccucucaccaaauauacag

SEQ ID NO: 2408554 - RNA, 19 nt, Artificial Sequence
  Description of Artificial Sequence: Synthetic oligonucleotide
  Sense strand starting at position 223 of SEQ ID NO: 1886421
ugaggagucucuggcaauu

SEQ ID NO: 2408555 - RNA, 19 nt, Artificial Sequence
  Description of Artificial Sequence: Synthetic oligonucleotide
  Antisense strand to SEQ ID NO: 2408554
aauugccagagacuccuca

SEQ ID NO: 2408556 - RNA, 19 nt, Artificial Sequence
  Description of Artificial Sequence: Synthetic oligonucleotide
  Sense strand starting at position 273 of SEQ ID NO: 1886421
cccauagacuccugugcaa

SEQ ID NO: 2408557 - RNA, 19 nt, Artificial Sequence
  Description of Artificial Sequence: Synthetic oligonucleotide
  Antisense strand to SEQ ID NO: 2408556
uugcacaggagucuauggg

SEQ ID NO: 2408558 - RNA, 19 nt, Artificial Sequence
  Description of Artificial Sequence: Synthetic oligonucleotide
  Sense strand starting at position 356 of SEQ ID NO: 1886421
ccugcaugcucugaggcau

SEQ ID NO: 2408559 - RNA, 19 nt, Artificial Sequence
  Description of Artificial Sequence: Synthetic oligonucleotide
  Antisense strand to SEQ ID NO: 2408558
augccucagagcaugcagg

SEQ ID NO: 2408560 - RNA, 19 nt, Artificial Sequence
  Description of Artificial Sequence: Synthetic oligonucleotide
  Sense strand starting at position 384 of SEQ ID NO: 1886421
gaguaaugugcacguccau

SEQ ID NO: 2408561 - RNA, 19 nt, Artificial Sequence
  Description of Artificial Sequence: Synthetic oligonucleotide
  Antisense strand to SEQ ID NO: 2408560
auggacgugcacauuacuc

SEQ ID NO: 2408562 - RNA, 19 nt, Artificial Sequence
  Description of Artificial Sequence: Synthetic oligonucleotide
  Sense strand starting at position 502 of SEQ ID NO: 1886421
uccuaaucaugccuuugga

SEQ ID NO: 2408563 - RNA, 19 nt, Artificial Sequence
  Description of Artificial Sequence: Synthetic oligonucleotide
  Antisense strand to SEQ ID NO: 2408562
uccaaaggcaugauuagga

SEQ ID NO: 2408564 - RNA, 19 nt, Artificial Sequence
  Description of Artificial Sequence: Synthetic oligonucleotide
  Sense strand starting at position 862 of SEQ ID NO: 1886421
ggcccuagcuauuccaauu

SEQ ID NO: 2408565 - RNA, 19 nt, Artificial Sequence
  Description of Artificial Sequence: Synthetic oligonucleotide
  Antisense strand to SEQ ID NO: 2408564
aauuggaauagcuagggcc

SEQ ID NO: 2408566 - RNA, 19 nt, Artificial Sequence
  Description of Artificial Sequence: Synthetic oligonucleotide
  Sense strand starting at position 896 of SEQ ID NO: 1886421
gcccacuacuguugauuua

SEQ ID NO: 2408567 - RNA, 19 nt, Artificial Sequence
  Description of Artificial Sequence: Synthetic oligonucleotide
  Antisense strand to SEQ ID NO: 2408566
uaaaucaacaguagugggc

SEQ ID NO: 2408568 - RNA, 19 nt, Artificial Sequence
  Description of Artificial Sequence: Synthetic oligonucleotide
  Sense strand starting at position 1010 of SEQ ID NO: 1886421
cucagaucuuuauucuugu

SEQ ID NO: 2408569 - RNA, 19 nt, Artificial Sequence
  Description of Artificial Sequence: Synthetic oligonucleotide
  Antisense strand to SEQ ID NO: 2408568
acaagaauaaagaucugag

SEQ ID NO: 2408570 - RNA, 19 nt, Artificial Sequence
  Description of Artificial Sequence: Synthetic oligonucleotide
  Sense strand starting at position 1027 of SEQ ID NO: 1886421
gucacaucgacuuggaaag

SEQ ID NO: 2408571 - RNA, 19 nt, Artificial Sequence
  Description of Artificial Sequence: Synthetic oligonucleotide
  Antisense strand to SEQ ID NO: 2408570
cuuuccaagucgaugugac

SEQ ID NO: 2408572 - RNA, 19 nt, Artificial Sequence
  Description of Artificial Sequence: Synthetic oligonucleotide
  Sense strand starting at position 1039 of SEQ ID NO: 1886421
uggaaagcuuccucccagu

SEQ ID NO: 2408573 - RNA, 19 nt, Artificial Sequence
  Description of Artificial Sequence: Synthetic oligonucleotide
  Antisense strand to SEQ ID NO: 2408572
acugggaggaagcuuucca

SEQ ID NO: 2408574 - RNA, 19 nt, Artificial Sequence
  Description of Artificial Sequence: Synthetic oligonucleotide
  Sense strand starting at position 1214 of SEQ ID NO: 1886421
gcagaagcuugaccuugau

SEQ ID NO: 2408575 - RNA, 19 nt, Artificial Sequence
  Description of Artificial Sequence: Synthetic oligonucleotide
  Antisense strand to SEQ ID NO: 2408574
aucaaggucaagcuucugc

SEQ ID NO: 2408576 - RNA, 19 nt, Artificial Sequence
  Description of Artificial Sequence: Synthetic oligonucleotide
  Sense strand starting at position 1217 of SEQ ID NO: 1886421
gaagcuugaccuugaugga

SEQ ID NO: 2408577 - RNA, 19 nt, Artificial Sequence
  Description of Artificial Sequence: Synthetic oligonucleotide
  Antisense strand to SEQ ID NO: 2408576
uccaucaaggucaagcuuc

SEQ ID NO: 2408578 - RNA, 19 nt, Artificial Sequence
  Description of Artificial Sequence: Synthetic oligonucleotide
  Sense strand starting at position 1265 of SEQ ID NO: 1886421
gcggaaugguuggugugaa

SEQ ID NO: 2408579 - RNA, 19 nt, Artificial Sequence
  Description of Artificial Sequence: Synthetic oligonucleotide
  Antisense strand to SEQ ID NO: 2408578
uucacaccaaccauuccgc

SEQ ID NO: 2408580 - RNA, 19 nt, Artificial Sequence
  Description of Artificial Sequence: Synthetic oligonucleotide
  Sense strand starting at position 1266 of SEQ ID NO: 1886421
cggaaugguuggugugaaa

SEQ ID NO: 2408581 - RNA, 19 nt, Artificial Sequence
  Description of Artificial Sequence: Synthetic oligonucleotide
  Antisense strand to SEQ ID NO: 2408580
uuucacaccaaccauuccg

SEQ ID NO: 2408582 - RNA, 19 nt, Artificial Sequence
  Description of Artificial Sequence: Synthetic oligonucleotide
  Sense strand starting at position 1316 of SEQ ID NO: 1886421
ccugguuguggaggagaga

SEQ ID NO: 2408583 - RNA, 19 nt, Artificial Sequence
  Description of Artificial Sequence: Synthetic oligonucleotide
  Antisense strand to SEQ ID NO: 2408582
ucucuccuccacaaccagg

SEQ ID NO: 2408584 - RNA, 19 nt, Artificial Sequence
  Description of Artificial Sequence: Synthetic oligonucleotide
  Sense strand starting at position 1460 of SEQ ID NO: 1886421
aaagauacccuucgguguu

SEQ ID NO: 2408585 - RNA, 19 nt, Artificial Sequence
  Description of Artificial Sequence: Synthetic oligonucleotide
  Antisense strand to SEQ ID NO: 2408584
aacaccgaaggguaucuuu

SEQ ID NO: 2408586 - RNA, 19 nt, Artificial Sequence
  Description of Artificial Sequence: Synthetic oligonucleotide
  Sense strand starting at position 1470 of SEQ ID NO: 1886421
uucgguguucgugagcaua

SEQ ID NO: 2408587 - RNA, 19 nt, Artificial Sequence
  Description of Artificial Sequence: Synthetic oligonucleotide
  Antisense strand to SEQ ID NO: 2408586
uaugcucacgaacaccgaa

SEQ ID NO: 2408588 - RNA, 19 nt, Artificial Sequence
  Description of Artificial Sequence: Synthetic oligonucleotide
  Sense strand starting at position 1472 of SEQ ID NO: 1886421
cgguguucgugagcauaga

SEQ ID NO: 2408589 - RNA, 19 nt, Artificial Sequence
  Description of Artificial Sequence: Synthetic oligonucleotide
  Antisense strand to SEQ ID NO: 2408588
ucuaugcucacgaacaccg

SEQ ID NO: 2408590 - RNA, 19 nt, Artificial Sequence
  Description of Artificial Sequence: Synthetic oligonucleotide
  Sense strand starting at position 1520 of SEQ ID NO: 1886421
uucugacucucuggaacaa

SEQ ID NO: 2408591 - RNA, 19 nt, Artificial Sequence
  Description of Artificial Sequence: Synthetic oligonucleotide
  Antisense strand to SEQ ID NO: 2408590
uuguuccagagagucagaa

SEQ ID NO: 2408592 - RNA, 19 nt, Artificial Sequence
  Description of Artificial Sequence: Synthetic oligonucleotide
  Sense strand starting at position 1551 of SEQ ID NO: 1886421
ggaagugacucaccugaac

SEQ ID NO: 2408593 - RNA, 19 nt, Artificial Sequence
  Description of Artificial Sequence: Synthetic oligonucleotide
  Antisense strand to SEQ ID NO: 2408592
guucaggugagucacuucc

SEQ ID NO: 2408594 - RNA, 19 nt, Artificial Sequence
  Description of Artificial Sequence: Synthetic oligonucleotide
  Sense strand starting at position 1607 of SEQ ID NO: 1886421
aguggaugcuccgggucau

SEQ ID NO: 2408595 - RNA, 19 nt, Artificial Sequence
  Description of Artificial Sequence: Synthetic oligonucleotide
  Antisense strand to SEQ ID NO: 2408594
augacccggagcauccacu

SEQ ID NO: 2408596 - RNA, 19 nt, Artificial Sequence
  Description of Artificial Sequence: Synthetic oligonucleotide
  Sense strand starting at position 1608 of SEQ ID NO: 1886421
guggaugcuccgggucauu

SEQ ID NO: 2408597 - RNA, 19 nt, Artificial Sequence
  Description of Artificial Sequence: Synthetic oligonucleotide
  Antisense strand to SEQ ID NO: 2408596
aaugacccggagcauccac

SEQ ID NO: 2408598 - RNA, 19 nt, Artificial Sequence
  Description of Artificial Sequence: Synthetic oligonucleotide
  Sense strand starting at position 1611 of SEQ ID NO: 1886421
gaugcuccgggucauugau

SEQ ID NO: 2408599 - RNA, 19 nt, Artificial Sequence
  Description of Artificial Sequence: Synthetic oligonucleotide
  Antisense strand to SEQ ID NO: 2408598
aucaaugacccggagcauc

SEQ ID NO: 2408600 - RNA, 19 nt, Artificial Sequence
  Description of Artificial Sequence: Synthetic oligonucleotide
  Sense strand starting at position 1619 of SEQ ID NO: 1886421
gggucauugauggagcgaa

SEQ ID NO: 2408601 - RNA, 19 nt, Artificial Sequence
  Description of Artificial Sequence: Synthetic oligonucleotide
  Antisense strand to SEQ ID NO: 2408600
uucgcuccaucaaugaccc

SEQ ID NO: 2408602 - RNA, 19 nt, Artificial Sequence
  Description of Artificial Sequence: Synthetic oligonucleotide
  Sense strand starting at position 1631 of SEQ ID NO: 1886421
gagcgaaucagauguggga

SEQ ID NO: 2408603 - RNA, 19 nt, Artificial Sequence
  Description of Artificial Sequence: Synthetic oligonucleotide
  Antisense strand to SEQ ID NO: 2408602
ucccacaucugauucgcuc

SEQ ID NO: 2408604 - RNA, 19 nt, Artificial Sequence
  Description of Artificial Sequence: Synthetic oligonucleotide
  Sense strand starting at position 1727 of SEQ ID NO: 1886421
ccagcugcucgauaucacu

SEQ ID NO: 2408605 - RNA, 19 nt, Artificial Sequence
  Description of Artificial Sequence: Synthetic oligonucleotide
  Antisense strand to SEQ ID NO: 2408604
agugauaucgagcagcugg

SEQ ID NO: 2408606 - RNA, 19 nt, Artificial Sequence
  Description of Artificial Sequence: Synthetic oligonucleotide
  Sense strand starting at position 1814 of SEQ ID NO: 1886421
gcgucgaugcugucgggaa

SEQ ID NO: 2408607 - RNA, 19 nt, Artificial Sequence
  Description of Artificial Sequence: Synthetic oligonucleotide
  Antisense strand to SEQ ID NO: 2408606
uucccgacagcaucgacgc

SEQ ID NO: 2408608 - RNA, 19 nt, Artificial Sequence
  Description of Artificial Sequence: Synthetic oligonucleotide
  Sense strand starting at position 3615 of SEQ ID NO: 1886421
ucuuaugauuguggcugua

SEQ ID NO: 2408609 - RNA, 19 nt, Artificial Sequence
  Description of Artificial Sequence: Synthetic oligonucleotide
  Antisense strand to SEQ ID NO: 2408608
uacagccacaaucauaaga

SEQ ID NO: 2408610 - RNA, 19 nt, Artificial Sequence
  Description of Artificial Sequence: Synthetic oligonucleotide
  Sense strand starting at position 3917 of SEQ ID NO: 1886421
uagugagacucggagugua

SEQ ID NO: 2408611 - RNA, 19 nt, Artificial Sequence
  Description of Artificial Sequence: Synthetic oligonucleotide
  Antisense strand to SEQ ID NO: 2408610
uacacuccgagucucacua

SEQ ID NO: 2408612 - RNA, 19 nt, Artificial Sequence
  Description of Artificial Sequence: Synthetic oligonucleotide
  Sense strand starting at position 109 of SEQ ID NO: 1886422
uagcgagacuucgucugaa

SEQ ID NO: 2408613 - RNA, 19 nt, Artificial Sequence
  Description of Artificial Sequence: Synthetic oligonucleotide
  Antisense strand to SEQ ID NO: 2408612
uucagacgaagucucgcua

SEQ ID NO: 2408614 - RNA, 19 nt, Artificial Sequence
  Description of Artificial Sequence: Synthetic oligonucleotide
  Sense strand starting at position 112 of SEQ ID NO: 1886422
cgagacuucgucugaacaa

SEQ ID NO: 2408615 - RNA, 19 nt, Artificial Sequence
  Description of Artificial Sequence: Synthetic oligonucleotide
  Antisense strand to SEQ ID NO: 2408614
uuguucagacgaagucucg

SEQ ID NO: 2408616 - RNA, 19 nt, Artificial Sequence
  Description of Artificial Sequence: Synthetic oligonucleotide
  Sense strand starting at position 175 of SEQ ID NO: 1886422
ccugaagucccagguauuc

SEQ ID NO: 2408617 - RNA, 19 nt, Artificial Sequence
  Description of Artificial Sequence: Synthetic oligonucleotide
  Antisense strand to SEQ ID NO: 2408616
gaauaccugggacuucagg

SEQ ID NO: 2408618 - RNA, 19 nt, Artificial Sequence
  Description of Artificial Sequence: Synthetic oligonucleotide
  Sense strand starting at position 451 of SEQ ID NO: 1886422
ugcggaaaucguguuugua

SEQ ID NO: 2408619 - RNA, 19 nt, Artificial Sequence
  Description of Artificial Sequence: Synthetic oligonucleotide
  Antisense strand to SEQ ID NO: 2408618
uacaaacacgauuuccgca

SEQ ID NO: 2408620 - RNA, 19 nt, Artificial Sequence
  Description of Artificial Sequence: Synthetic oligonucleotide
  Sense strand starting at position 452 of SEQ ID NO: 1886422
gcggaaaucguguuuguag

SEQ ID NO: 2408621 - RNA, 19 nt, Artificial Sequence
  Description of Artificial Sequence: Synthetic oligonucleotide
  Antisense strand to SEQ ID NO: 2408620
cuacaaacacgauuuccgc

SEQ ID NO: 2408622 - RNA, 19 nt, Artificial Sequence
  Description of Artificial Sequence: Synthetic oligonucleotide
  Sense strand starting at position 454 of SEQ ID NO: 1886422
ggaaaucguguuuguagua

SEQ ID NO: 2408623 - RNA, 19 nt, Artificial Sequence
  Description of Artificial Sequence: Synthetic oligonucleotide
  Antisense strand to SEQ ID NO: 2408622
uacuacaaacacgauuucc

SEQ ID NO: 2408624 - RNA, 19 nt, Artificial Sequence
  Description of Artificial Sequence: Synthetic oligonucleotide
  Sense strand starting at position 466 of SEQ ID NO: 1886422
uguaguaccucagucgaau

SEQ ID NO: 2408625 - RNA, 19 nt, Artificial Sequence
  Description of Artificial Sequence: Synthetic oligonucleotide
  Antisense strand to SEQ ID NO: 2408624
auucgacugagguacuaca

SEQ ID NO: 2408626 - RNA, 19 nt, Artificial Sequence
  Description of Artificial Sequence: Synthetic oligonucleotide
  Sense strand starting at position 472 of SEQ ID NO: 1886422
accucagucgaauggagau

SEQ ID NO: 2408627 - RNA, 19 nt, Artificial Sequence
  Description of Artificial Sequence: Synthetic oligonucleotide
  Antisense strand to SEQ ID NO: 2408626
aucuccauucgacugaggu

SEQ ID NO: 2408628 - RNA, 19 nt, Artificial Sequence
  Description of Artificial Sequence: Synthetic oligonucleotide
  Sense strand starting at position 504 of SEQ ID NO: 1886422
ggagcagugcucgguaaca

SEQ ID NO: 2408629 - RNA, 19 nt, Artificial Sequence
  Description of Artificial Sequence: Synthetic oligonucleotide
  Antisense strand to SEQ ID NO: 2408628
uguuaccgagcacugcucc

SEQ ID NO: 2408630 - RNA, 19 nt, Artificial Sequence
  Description of Artificial Sequence: Synthetic oligonucleotide
  Sense strand starting at position 506 of SEQ ID NO: 1886422
agcagugcucgguaacaga

SEQ ID NO: 2408631 - RNA, 19 nt, Artificial Sequence
  Description of Artificial Sequence: Synthetic oligonucleotide
  Antisense strand to SEQ ID NO: 2408630
ucuguuaccgagcacugcu

SEQ ID NO: 2408632 - RNA, 19 nt, Artificial Sequence
  Description of Artificial Sequence: Synthetic oligonucleotide
  Sense strand starting at position 706 of SEQ ID NO: 1886422
gggcacuuuggugacaaga

SEQ ID NO: 2408633 - RNA, 19 nt, Artificial Sequence
  Description of Artificial Sequence: Synthetic oligonucleotide
  Antisense strand to SEQ ID NO: 2408632
ucuugucaccaaagugccc

SEQ ID NO: 2408634 - RNA, 19 nt, Artificial Sequence
  Description of Artificial Sequence: Synthetic oligonucleotide
  Sense strand starting at position 722 of SEQ ID NO: 1886422
agaacauuggcuuguuuaa

SEQ ID NO: 2408635 - RNA, 19 nt, Artificial Sequence
  Description of Artificial Sequence: Synthetic oligonucleotide
  Antisense strand to SEQ ID NO: 2408634
uuaaacaagccaauguucu

SEQ ID NO: 2408636 - RNA, 19 nt, Artificial Sequence
  Description of Artificial Sequence: Synthetic oligonucleotide
  Sense strand starting at position 881 of SEQ ID NO: 1886422
cgucuuguaagacacugau

SEQ ID NO: 2408637 - RNA, 19 nt, Artificial Sequence
  Description of Artificial Sequence: Synthetic oligonucleotide
  Antisense strand to SEQ ID NO: 2408636
aucagugucuuacaagacg

SEQ ID NO: 2408638 - RNA, 19 nt, Artificial Sequence
  Description of Artificial Sequence: Synthetic oligonucleotide
  Sense strand starting at position 893 of SEQ ID NO: 1886422
cacugauucccggaggucu

SEQ ID NO: 2408639 - RNA, 19 nt, Artificial Sequence
  Description of Artificial Sequence: Synthetic oligonucleotide
  Antisense strand to SEQ ID NO: 2408638
agaccuccgggaaucagug

SEQ ID NO: 2408640 - RNA, 19 nt, Artificial Sequence
  Description of Artificial Sequence: Synthetic oligonucleotide
  Sense strand starting at position 939 of SEQ ID NO: 1886422
ccaggcuuucuagggaaca

SEQ ID NO: 2408641 - RNA, 19 nt, Artificial Sequence
  Description of Artificial Sequence: Synthetic oligonucleotide
  Antisense strand to SEQ ID NO: 2408640
uguucccuagaaagccugg

SEQ ID NO: 2408642 - RNA, 19 nt, Artificial Sequence
  Description of Artificial Sequence: Synthetic oligonucleotide
  Sense strand starting at position 965 of SEQ ID NO: 1886422
gaaugcacucucgacgaga

SEQ ID NO: 2408643 - RNA, 19 nt, Artificial Sequence
  Description of Artificial Sequence: Synthetic oligonucleotide
  Antisense strand to SEQ ID NO: 2408642
ucucgucgagagugcauuc

SEQ ID NO: 2408644 - RNA, 19 nt, Artificial Sequence
  Description of Artificial Sequence: Synthetic oligonucleotide
  Sense strand starting at position 994 of SEQ ID NO: 1886422
ccuguucgacaagacugau

SEQ ID NO: 2408645 - RNA, 19 nt, Artificial Sequence
  Description of Artificial Sequence: Synthetic oligonucleotide
  Antisense strand to SEQ ID NO: 2408644
aucagucuugucgaacagg

SEQ ID NO: 2408646 - RNA, 19 nt, Artificial Sequence
  Description of Artificial Sequence: Synthetic oligonucleotide
  Sense strand starting at position 1165 of SEQ ID NO: 1886422
gagugaaagcuugggacua

SEQ ID NO: 2408647 - RNA, 19 nt, Artificial Sequence
  Description of Artificial Sequence: Synthetic oligonucleotide
  Antisense strand to SEQ ID NO: 2408646
uagucccaagcuuucacuc

SEQ ID NO: 2408648 - RNA, 19 nt, Artificial Sequence
  Description of Artificial Sequence: Synthetic oligonucleotide
  Sense strand starting at position 1231 of SEQ ID NO: 1886422
agagucuuuccguuuccgu

SEQ ID NO: 2408649 - RNA, 19 nt, Artificial Sequence
  Description of Artificial Sequence: Synthetic oligonucleotide
  Antisense strand to SEQ ID NO: 2408648
acggaaacggaaagacucu

SEQ ID NO: 2408650 - RNA, 19 nt, Artificial Sequence
  Description of Artificial Sequence: Synthetic oligonucleotide
  Sense strand starting at position 1385 of SEQ ID NO: 1886422
guaguccucucccucauuu

SEQ ID NO: 2408651 - RNA, 19 nt, Artificial Sequence
  Description of Artificial Sequence: Synthetic oligonucleotide
  Antisense strand to SEQ ID NO: 2408650
aaaugagggagaggacuac

SEQ ID NO: 2408652 - RNA, 19 nt, Artificial Sequence
  Description of Artificial Sequence: Synthetic oligonucleotide
  Sense strand starting at position 1502 of SEQ ID NO: 1886422
uuccauugucucgacuuga

SEQ ID NO: 2408653 - RNA, 19 nt, Artificial Sequence
  Description of Artificial Sequence: Synthetic oligonucleotide
  Antisense strand to SEQ ID NO: 2408652
ucaagucgagacaauggaa

SEQ ID NO: 2408654 - RNA, 19 nt, Artificial Sequence
  Description of Artificial Sequence: Synthetic oligonucleotide
  Sense strand starting at position 1506 of SEQ ID NO: 1886422
auugucucgacuugagaug

SEQ ID NO: 2408655 - RNA, 19 nt, Artificial Sequence
  Description of Artificial Sequence: Synthetic oligonucleotide
  Antisense strand to SEQ ID NO: 2408654
caucucaagucgagacaau

SEQ ID NO: 2408656 - RNA, 19 nt, Artificial Sequence
  Description of Artificial Sequence: Synthetic oligonucleotide
  Sense strand starting at position 1507 of SEQ ID NO: 1886422
uugucucgacuugagauga

SEQ ID NO: 2408657 - RNA, 19 nt, Artificial Sequence
  Description of Artificial Sequence: Synthetic oligonucleotide
  Antisense strand to SEQ ID NO: 2408656
ucaucucaagucgagacaa

SEQ ID NO: 2408658 - RNA, 19 nt, Artificial Sequence
  Description of Artificial Sequence: Synthetic oligonucleotide
  Sense strand starting at position 1511 of SEQ ID NO: 1886422
cucgacuugagaugauaga

SEQ ID NO: 2408659 - RNA, 19 nt, Artificial Sequence
  Description of Artificial Sequence: Synthetic oligonucleotide
  Antisense strand to SEQ ID NO: 2408658
ucuaucaucucaagucgag

SEQ ID NO: 2408660 - RNA, 19 nt, Artificial Sequence
  Description of Artificial Sequence: Synthetic oligonucleotide
  Sense strand starting at position 1741 of SEQ ID NO: 1886422
ccucguaagaucgacuacu

SEQ ID NO: 2408661 - RNA, 19 nt, Artificial Sequence
  Description of Artificial Sequence: Synthetic oligonucleotide
  Antisense strand to SEQ ID NO: 2408660
aguagucgaucuuacgagg

SEQ ID NO: 2408662 - RNA, 19 nt, Artificial Sequence
  Description of Artificial Sequence: Synthetic oligonucleotide
  Sense strand starting at position 1755 of SEQ ID NO: 1886422
cuacuagucagguguaugu

SEQ ID NO: 2408663 - RNA, 19 nt, Artificial Sequence
  Description of Artificial Sequence: Synthetic oligonucleotide
  Antisense strand to SEQ ID NO: 2408662
acauacaccugacuaguag

SEQ ID NO: 2408664 - RNA, 19 nt, Artificial Sequence
  Description of Artificial Sequence: Synthetic oligonucleotide
  Sense strand starting at position 1868 of SEQ ID NO: 1886422
cugcgacucccgucaggua

SEQ ID NO: 2408665 - RNA, 19 nt, Artificial Sequence
  Description of Artificial Sequence: Synthetic oligonucleotide
  Antisense strand to SEQ ID NO: 2408664
uaccugacgggagucgcag

SEQ ID NO: 2408666 - RNA, 19 nt, Artificial Sequence
  Description of Artificial Sequence: Synthetic oligonucleotide
  Sense strand starting at position 2165 of SEQ ID NO: 1886422
gcgugcguucguccuggaa

SEQ ID NO: 2408667 - RNA, 19 nt, Artificial Sequence
  Description of Artificial Sequence: Synthetic oligonucleotide
  Antisense strand to SEQ ID NO: 2408666
uuccaggacgaacgcacgc

SEQ ID NO: 2408668 - RNA, 19 nt, Artificial Sequence
  Description of Artificial Sequence: Synthetic oligonucleotide
  Sense strand starting at position 2166 of SEQ ID NO: 1886422
cgugcguucguccuggaaa

SEQ ID NO: 2408669 - RNA, 19 nt, Artificial Sequence
  Description of Artificial Sequence: Synthetic oligonucleotide
  Antisense strand to SEQ ID NO: 2408668
uuuccaggacgaacgcacg

SEQ ID NO: 2408670 - RNA, 19 nt, Artificial Sequence
  Description of Artificial Sequence: Synthetic oligonucleotide
  Sense strand starting at position 3592 of SEQ ID NO: 1886422
ucuagaugauuagggauga

SEQ ID NO: 2408671 - RNA, 19 nt, Artificial Sequence
  Description of Artificial Sequence: Synthetic oligonucleotide
  Antisense strand to SEQ ID NO: 2408670
ucaucccuaaucaucuaga

SEQ ID NO: 2408672 - RNA, 19 nt, Artificial Sequence
  Description of Artificial Sequence: Synthetic oligonucleotide
  Sense strand starting at position 3593 of SEQ ID NO: 1886422
cuagaugauuagggaugaa

SEQ ID NO: 2408673 - RNA, 19 nt, Artificial Sequence
  Description of Artificial Sequence: Synthetic oligonucleotide
  Antisense strand to SEQ ID NO: 2408672
uucaucccuaaucaucuag

SEQ ID NO: 2408674 - RNA, 19 nt, Artificial Sequence
  Description of Artificial Sequence: Synthetic oligonucleotide
  Sense strand starting at position 3650 of SEQ ID NO: 1886422
uccucaguucugggaagau

SEQ ID NO: 2408675 - RNA, 19 nt, Artificial Sequence
  Description of Artificial Sequence: Synthetic oligonucleotide
  Antisense strand to SEQ ID NO: 2408674
aucuucccagaacugagga

SEQ ID NO: 2408676 - RNA, 19 nt, Artificial Sequence
  Description of Artificial Sequence: Synthetic oligonucleotide
  Sense strand starting at position 3666 of SEQ ID NO: 1886422
gaugucaggcuggauucua

SEQ ID NO: 2408677 - RNA, 19 nt, Artificial Sequence
  Description of Artificial Sequence: Synthetic oligonucleotide
  Antisense strand to SEQ ID NO: 2408676
uagaauccagccugacauc

SEQ ID NO: 2408678 - RNA, 19 nt, Artificial Sequence
  Description of Artificial Sequence: Synthetic oligonucleotide
  Sense strand starting at position 3679 of SEQ ID NO: 1886422
auucuagaaucccaaggaa

SEQ ID NO: 2408679 - RNA, 19 nt, Artificial Sequence
  Description of Artificial Sequence: Synthetic oligonucleotide
  Antisense strand to SEQ ID NO: 2408678
uuccuugggauucuagaau

SEQ ID NO: 2408680 - RNA, 19 nt, Artificial Sequence
  Description of Artificial Sequence: Synthetic oligonucleotide
  Sense strand starting at position 3778 of SEQ ID NO: 1886422
ggcugagaucuugggcuga

SEQ ID NO: 2408681 - RNA, 19 nt, Artificial Sequence
  Description of Artificial Sequence: Synthetic oligonucleotide
  Antisense strand to SEQ ID NO: 2408680
ucagcccaagaucucagcc

SEQ ID NO: 2408682 - RNA, 19 nt, Artificial Sequence
  Description of Artificial Sequence: Synthetic oligonucleotide
  Sense strand starting at position 3780 of SEQ ID NO: 1886422
cugagaucuugggcugaga

SEQ ID NO: 2408683 - RNA, 19 nt, Artificial Sequence
  Description of Artificial Sequence: Synthetic oligonucleotide
  Antisense strand to SEQ ID NO: 2408682
ucucagcccaagaucucag

SEQ ID NO: 2408684 - RNA, 19 nt, Artificial Sequence
  Description of Artificial Sequence: Synthetic oligonucleotide
  Sense strand starting at position 3841 of SEQ ID NO: 1886422
ggaguuagugggcagagga

SEQ ID NO: 2408685 - RNA, 19 nt, Artificial Sequence
  Description of Artificial Sequence: Synthetic oligonucleotide
  Antisense strand to SEQ ID NO: 2408684
uccucugcccacuaacucc

SEQ ID NO: 2408686 - RNA, 19 nt, Artificial Sequence
  Description of Artificial Sequence: Synthetic oligonucleotide
  Sense strand starting at position 3880 of SEQ ID NO: 1886422
caaggaucucgcuggaucu

SEQ ID NO: 2408687 - RNA, 19 nt, Artificial Sequence
  Description of Artificial Sequence: Synthetic oligonucleotide
  Antisense strand to SEQ ID NO: 2408686
agauccagcgagauccuug

SEQ ID NO: 2408688 - RNA, 19 nt, Artificial Sequence
  Description of Artificial Sequence: Synthetic oligonucleotide
  Sense strand starting at position 3890 of SEQ ID NO: 1886422
gcuggaucuggugaggaua

SEQ ID NO: 2408689 - RNA, 19 nt, Artificial Sequence
  Description of Artificial Sequence: Synthetic oligonucleotide
  Antisense strand to SEQ ID NO: 2408688
uauccucaccagauccagc

SEQ ID NO: 2408690 - RNA, 19 nt, Artificial Sequence
  Description of Artificial Sequence: Synthetic oligonucleotide
  Sense strand starting at position 3935 of SEQ ID NO: 1886422
auggcugcuguggaugaaa

SEQ ID NO: 2408691 - RNA, 19 nt, Artificial Sequence
  Description of Artificial Sequence: Synthetic oligonucleotide
  Antisense strand to SEQ ID NO: 2408690
uuucauccacagcagccau

SEQ ID NO: 2408692 - RNA, 19 nt, Artificial Sequence
  Description of Artificial Sequence: Synthetic oligonucleotide
  Sense strand starting at position 83 of SEQ ID NO: 1886423
agugaaacgccaggaaauu

SEQ ID NO: 2408693 - RNA, 19 nt, Artificial Sequence
  Description of Artificial Sequence: Synthetic oligonucleotide
  Antisense strand to SEQ ID NO: 2408692
aauuuccuggcguuucacu

SEQ ID NO: 2408694 - RNA, 19 nt, Artificial Sequence
  Description of Artificial Sequence: Synthetic oligonucleotide
  Sense strand starting at position 218 of SEQ ID NO: 1886423
ggagaccucucagggacau

SEQ ID NO: 2408695 - RNA, 19 nt, Artificial Sequence
  Description of Artificial Sequence: Synthetic oligonucleotide
  Antisense strand to SEQ ID NO: 2408694
augucccugagaggucucc

SEQ ID NO: 2408696 - RNA, 19 nt, Artificial Sequence
  Description of Artificial Sequence: Synthetic oligonucleotide
  Sense strand starting at position 230 of SEQ ID NO: 1886423
gggacauuguaagagcuga

SEQ ID NO: 2408697 - RNA, 19 nt, Artificial Sequence
  Description of Artificial Sequence: Synthetic oligonucleotide
  Antisense strand to SEQ ID NO: 2408696
ucagcucuuacaauguccc

SEQ ID NO: 2408698 - RNA, 19 nt, Artificial Sequence
  Description of Artificial Sequence: Synthetic oligonucleotide
  Sense strand starting at position 249 of SEQ ID NO: 1886423
gaaugaagucucugagcau

SEQ ID NO: 2408699 - RNA, 19 nt, Artificial Sequence
  Description of Artificial Sequence: Synthetic oligonucleotide
  Antisense strand to SEQ ID NO: 2408698
augcucagagacuucauuc

SEQ ID NO: 2408700 - RNA, 19 nt, Artificial Sequence
  Description of Artificial Sequence: Synthetic oligonucleotide
  Sense strand starting at position 250 of SEQ ID NO: 1886423
aaugaagucucugagcaug

SEQ ID NO: 2408701 - RNA, 19 nt, Artificial Sequence
  Description of Artificial Sequence: Synthetic oligonucleotide
  Antisense strand to SEQ ID NO: 2408700
caugcucagagacuucauu

SEQ ID NO: 2408702 - RNA, 19 nt, Artificial Sequence
  Description of Artificial Sequence: Synthetic oligonucleotide
  Sense strand starting at position 252 of SEQ ID NO: 1886423
ugaagucucugagcaugaa

SEQ ID NO: 2408703 - RNA, 19 nt, Artificial Sequence
  Description of Artificial Sequence: Synthetic oligonucleotide
  Antisense strand to SEQ ID NO: 2408702
uucaugcucagagacuuca

SEQ ID NO: 2408704 - RNA, 19 nt, Artificial Sequence
  Description of Artificial Sequence: Synthetic oligonucleotide
  Sense strand starting at position 478 of SEQ ID NO: 1886423
gugacuggcuguucuguaa

SEQ ID NO: 2408705 - RNA, 19 nt, Artificial Sequence
  Description of Artificial Sequence: Synthetic oligonucleotide
  Antisense strand to SEQ ID NO: 2408704
uuacagaacagccagucac

SEQ ID NO: 2408706 - RNA, 19 nt, Artificial Sequence
  Description of Artificial Sequence: Synthetic oligonucleotide
  Sense strand starting at position 507 of SEQ ID NO: 1886423
gcuaucagagccggugaaa

SEQ ID NO: 2408707 - RNA, 19 nt, Artificial Sequence
  Description of Artificial Sequence: Synthetic oligonucleotide
  Antisense strand to SEQ ID NO: 2408706
uuucaccggcucugauagc

SEQ ID NO: 2408708 - RNA, 19 nt, Artificial Sequence
  Description of Artificial Sequence: Synthetic oligonucleotide
  Sense strand starting at position 820 of SEQ ID NO: 1886423
ccagaugugcucuggcagu

SEQ ID NO: 2408709 - RNA, 19 nt, Artificial Sequence
  Description of Artificial Sequence: Synthetic oligonucleotide
  Antisense strand to SEQ ID NO: 2408708
acugccagagcacaucugg

SEQ ID NO: 2408710 - RNA, 19 nt, Artificial Sequence
  Description of Artificial Sequence: Synthetic oligonucleotide
  Sense strand starting at position 946 of SEQ ID NO: 1886423
augugagaaugcuuguguu

SEQ ID NO: 2408711 - RNA, 19 nt, Artificial Sequence
  Description of Artificial Sequence: Synthetic oligonucleotide
  Antisense strand to SEQ ID NO: 2408710
aacacaagcauucucacau

SEQ ID NO: 2408712 - RNA, 19 nt, Artificial Sequence
  Description of Artificial Sequence: Synthetic oligonucleotide
  Sense strand starting at position 952 of SEQ ID NO: 1886423
gaaugcuuguguucgugga

SEQ ID NO: 2408713 - RNA, 19 nt, Artificial Sequence
  Description of Artificial Sequence: Synthetic oligonucleotide
  Antisense strand to SEQ ID NO: 2408712
uccacgaacacaagcauuc

SEQ ID NO: 2408714 - RNA, 19 nt, Artificial Sequence
  Description of Artificial Sequence: Synthetic oligonucleotide
  Sense strand starting at position 988 of SEQ ID NO: 1886423
agcggcgguaccuaugauu

SEQ ID NO: 2408715 - RNA, 19 nt, Artificial Sequence
  Description of Artificial Sequence: Synthetic oligonucleotide
  Antisense strand to SEQ ID NO: 2408714
aaucauagguaccgccgcu

SEQ ID NO: 2408716 - RNA, 19 nt, Artificial Sequence
  Description of Artificial Sequence: Synthetic oligonucleotide
  Sense strand starting at position 1066 of SEQ ID NO: 1886423
gcaugaagugugcacuuaa

SEQ ID NO: 2408717 - RNA, 19 nt, Artificial Sequence
  Description of Artificial Sequence: Synthetic oligonucleotide
  Antisense strand to SEQ ID NO: 2408716
uuaagugcacacuucaugc

SEQ ID NO: 2408718 - RNA, 19 nt, Artificial Sequence
  Description of Artificial Sequence: Synthetic oligonucleotide
  Sense strand starting at position 1117 of SEQ ID NO: 1886423
guguguugguccaaggguu

SEQ ID NO: 2408719 - RNA, 19 nt, Artificial Sequence
  Description of Artificial Sequence: Synthetic oligonucleotide
  Antisense strand to SEQ ID NO: 2408718
aacccuuggaccaacacac

SEQ ID NO: 2408720 - RNA, 19 nt, Artificial Sequence
  Description of Artificial Sequence: Synthetic oligonucleotide
  Sense strand starting at position 1257 of SEQ ID NO: 1886423
gagcguuuaccugcgugaa

SEQ ID NO: 2408721 - RNA, 19 nt, Artificial Sequence
  Description of Artificial Sequence: Synthetic oligonucleotide
  Antisense strand to SEQ ID NO: 2408720
uucacgcagguaaacgcuc

SEQ ID NO: 2408722 - RNA, 19 nt, Artificial Sequence
  Description of Artificial Sequence: Synthetic oligonucleotide
  Sense strand starting at position 1552 of SEQ ID NO: 1886423
ggguaguuagcgggagaca

SEQ ID NO: 2408723 - RNA, 19 nt, Artificial Sequence
  Description of Artificial Sequence: Synthetic oligonucleotide
  Antisense strand to SEQ ID NO: 2408722
ugucucccgcuaacuaccc

SEQ ID NO: 2408724 - RNA, 19 nt, Artificial Sequence
  Description of Artificial Sequence: Synthetic oligonucleotide
  Sense strand starting at position 1553 of SEQ ID NO: 1886423
gguaguuagcgggagacaa

SEQ ID NO: 2408725 - RNA, 19 nt, Artificial Sequence
  Description of Artificial Sequence: Synthetic oligonucleotide
  Antisense strand to SEQ ID NO: 2408724
uugucucccgcuaacuacc

SEQ ID NO: 2408726 - RNA, 19 nt, Artificial Sequence
  Description of Artificial Sequence: Synthetic oligonucleotide
  Sense strand starting at position 2101 of SEQ ID NO: 1886423
cgcggaauucucuauuauu

SEQ ID NO: 2408727 - RNA, 19 nt, Artificial Sequence
  Description of Artificial Sequence: Synthetic oligonucleotide
  Antisense strand to SEQ ID NO: 2408726
aauaauagagaauuccgcg

SEQ ID NO: 2408728 - RNA, 19 nt, Artificial Sequence
  Description of Artificial Sequence: Synthetic oligonucleotide
  Sense strand starting at position 2135 of SEQ ID NO: 1886423
cccagaacuuguuuacguu

SEQ ID NO: 2408729 - RNA, 19 nt, Artificial Sequence
  Description of Artificial Sequence: Synthetic oligonucleotide
  Antisense strand to SEQ ID NO: 2408728
aacguaaacaaguucuggg

SEQ ID NO: 2408730 - RNA, 19 nt, Artificial Sequence
  Description of Artificial Sequence: Synthetic oligonucleotide
  Sense strand starting at position 2136 of SEQ ID NO: 1886423
ccagaacuuguuuacguua

SEQ ID NO: 2408731 - RNA, 19 nt, Artificial Sequence
  Description of Artificial Sequence: Synthetic oligonucleotide
  Antisense strand to SEQ ID NO: 2408730
uaacguaaacaaguucugg

SEQ ID NO: 2408732 - RNA, 19 nt, Artificial Sequence
  Description of Artificial Sequence: Synthetic oligonucleotide
  Sense strand starting at position 2139 of SEQ ID NO: 1886423
gaacuuguuuacguuaaac

SEQ ID NO: 2408733 - RNA, 19 nt, Artificial Sequence
  Description of Artificial Sequence: Synthetic oligonucleotide
  Antisense strand to SEQ ID NO: 2408732
guuuaacguaaacaaguuc

SEQ ID NO: 2408734 - RNA, 19 nt, Artificial Sequence
  Description of Artificial Sequence: Synthetic oligonucleotide
  Sense strand starting at position 2150 of SEQ ID NO: 1886423
cguuaaacccuguaaacuu

SEQ ID NO: 2408735 - RNA, 19 nt, Artificial Sequence
  Description of Artificial Sequence: Synthetic oligonucleotide
  Antisense strand to SEQ ID NO: 2408734
aaguuuacaggguuuaacg

SEQ ID NO: 2408736 - RNA, 19 nt, Artificial Sequence
  Description of Artificial Sequence: Synthetic oligonucleotide
  Sense strand starting at position 2182 of SEQ ID NO: 1886423
uugccaucucucgggaaau

SEQ ID NO: 2408737 - RNA, 19 nt, Artificial Sequence
  Description of Artificial Sequence: Synthetic oligonucleotide
  Antisense strand to SEQ ID NO: 2408736
auuucccgagagauggcaa

SEQ ID NO: 2408738 - RNA, 19 nt, Artificial Sequence
  Description of Artificial Sequence: Synthetic oligonucleotide
  Sense strand starting at position 2278 of SEQ ID NO: 1886423
aacugaacuacgugugagu

SEQ ID NO: 2408739 - RNA, 19 nt, Artificial Sequence
  Description of Artificial Sequence: Synthetic oligonucleotide
  Antisense strand to SEQ ID NO: 2408738
acucacacguaguucaguu

SEQ ID NO: 2408740 - RNA, 19 nt, Artificial Sequence
  Description of Artificial Sequence: Synthetic oligonucleotide
  Sense strand starting at position 2361 of SEQ ID NO: 1886423
ccuuaagcuuccgugucaa

SEQ ID NO: 2408741 - RNA, 19 nt, Artificial Sequence
  Description of Artificial Sequence: Synthetic oligonucleotide
  Antisense strand to SEQ ID NO: 2408740
uugacacggaagcuuaagg

SEQ ID NO: 2408742 - RNA, 19 nt, Artificial Sequence
  Description of Artificial Sequence: Synthetic oligonucleotide
  Sense strand starting at position 2371 of SEQ ID NO: 1886423
ccgugucaacgagugcauu

SEQ ID NO: 2408743 - RNA, 19 nt, Artificial Sequence
  Description of Artificial Sequence: Synthetic oligonucleotide
  Antisense strand to SEQ ID NO: 2408742
aaugcacucguugacacgg

SEQ ID NO: 2408744 - RNA, 19 nt, Artificial Sequence
  Description of Artificial Sequence: Synthetic oligonucleotide
  Sense strand starting at position 2372 of SEQ ID NO: 1886423
cgugucaacgagugcauua

SEQ ID NO: 2408745 - RNA, 19 nt, Artificial Sequence
  Description of Artificial Sequence: Synthetic oligonucleotide
  Antisense strand to SEQ ID NO: 2408744
uaaugcacucguugacacg

SEQ ID NO: 2408746 - RNA, 19 nt, Artificial Sequence
  Description of Artificial Sequence: Synthetic oligonucleotide
  Sense strand starting at position 2411 of SEQ ID NO: 1886423
gcgcccucugcauaugagu

SEQ ID NO: 2408747 - RNA, 19 nt, Artificial Sequence
  Description of Artificial Sequence: Synthetic oligonucleotide
  Antisense strand to SEQ ID NO: 2408746
acucauaugcagagggcgc

SEQ ID NO: 2408748 - RNA, 19 nt, Artificial Sequence
  Description of Artificial Sequence: Synthetic oligonucleotide
  Sense strand starting at position 2420 of SEQ ID NO: 1886423
gcauaugagugugcacaca

SEQ ID NO: 2408749 - RNA, 19 nt, Artificial Sequence
  Description of Artificial Sequence: Synthetic oligonucleotide
  Antisense strand to SEQ ID NO: 2408748
ugugugcacacucauaugc

SEQ ID NO: 2408750 - RNA, 19 nt, Artificial Sequence
  Description of Artificial Sequence: Synthetic oligonucleotide
  Sense strand starting at position 2438 of SEQ ID NO: 1886423
acgcauggguguguuuaca

SEQ ID NO: 2408751 - RNA, 19 nt, Artificial Sequence
  Description of Artificial Sequence: Synthetic oligonucleotide
  Antisense strand to SEQ ID NO: 2408750
uguaaacacacccaugcgu

SEQ ID NO: 2408752 - RNA, 19 nt, Artificial Sequence
  Description of Artificial Sequence: Synthetic oligonucleotide
  Sense strand starting at position 2446 of SEQ ID NO: 1886423
guguguuuacacgucuguu

SEQ ID NO: 2408753 - RNA, 19 nt, Artificial Sequence
  Description of Artificial Sequence: Synthetic oligonucleotide
  Antisense strand to SEQ ID NO: 2408752
aacagacguguaaacacac

SEQ ID NO: 2408754 - RNA, 19 nt, Artificial Sequence
  Description of Artificial Sequence: Synthetic oligonucleotide
  Sense strand starting at position 2447 of SEQ ID NO: 1886423
uguguuuacacgucuguuu

SEQ ID NO: 2408755 - RNA, 19 nt, Artificial Sequence
  Description of Artificial Sequence: Synthetic oligonucleotide
  Antisense strand to SEQ ID NO: 2408754
aaacagacguguaaacaca

SEQ ID NO: 2408756 - RNA, 19 nt, Artificial Sequence
  Description of Artificial Sequence: Synthetic oligonucleotide
  Sense strand starting at position 2456 of SEQ ID NO: 1886423
acgucuguuugcguaauuu

SEQ ID NO: 2408757 - RNA, 19 nt, Artificial Sequence
  Description of Artificial Sequence: Synthetic oligonucleotide
  Antisense strand to SEQ ID NO: 2408756
aaauuacgcaaacagacgu

SEQ ID NO: 2408758 - RNA, 19 nt, Artificial Sequence
  Description of Artificial Sequence: Synthetic oligonucleotide
  Sense strand starting at position 2466 of SEQ ID NO: 1886423
gcguaauuuaccggguuug

SEQ ID NO: 2408759 - RNA, 19 nt, Artificial Sequence
  Description of Artificial Sequence: Synthetic oligonucleotide
  Antisense strand to SEQ ID NO: 2408758
caaacccgguaaauuacgc

SEQ ID NO: 2408760 - RNA, 19 nt, Artificial Sequence
  Description of Artificial Sequence: Synthetic oligonucleotide
  Sense strand starting at position 2478 of SEQ ID NO: 1886423
ggguuugcaugugcaucaa

SEQ ID NO: 2408761 - RNA, 19 nt, Artificial Sequence
  Description of Artificial Sequence: Synthetic oligonucleotide
  Antisense strand to SEQ ID NO: 2408760
uugaugcacaugcaaaccc

SEQ ID NO: 2408762 - RNA, 19 nt, Artificial Sequence
  Description of Artificial Sequence: Synthetic oligonucleotide
  Sense strand starting at position 2482 of SEQ ID NO: 1886423
uugcaugugcaucaagaca

SEQ ID NO: 2408763 - RNA, 19 nt, Artificial Sequence
  Description of Artificial Sequence: Synthetic oligonucleotide
  Antisense strand to SEQ ID NO: 2408762
ugucuugaugcacaugcaa

SEQ ID NO: 2408764 - RNA, 19 nt, Artificial Sequence
  Description of Artificial Sequence: Synthetic oligonucleotide
  Sense strand starting at position 2509 of SEQ ID NO: 1886423
ugugcuaauguguggacaa

SEQ ID NO: 2408765 - RNA, 19 nt, Artificial Sequence
  Description of Artificial Sequence: Synthetic oligonucleotide
  Antisense strand to SEQ ID NO: 2408764
uuguccacacauuagcaca

SEQ ID NO: 2408766 - RNA, 19 nt, Artificial Sequence
  Description of Artificial Sequence: Synthetic oligonucleotide
  Sense strand starting at position 2511 of SEQ ID NO: 1886423
ugcuaauguguggacaaga

SEQ ID NO: 2408767 - RNA, 19 nt, Artificial Sequence
  Description of Artificial Sequence: Synthetic oligonucleotide
  Antisense strand to SEQ ID NO: 2408766
ucuuguccacacauuagca

SEQ ID NO: 2408768 - RNA, 19 nt, Artificial Sequence
  Description of Artificial Sequence: Synthetic oligonucleotide
  Sense strand starting at position 2886 of SEQ ID NO: 1886423
gcacuugcgauuugcuaca

SEQ ID NO: 2408769 - RNA, 19 nt, Artificial Sequence
  Description of Artificial Sequence: Synthetic oligonucleotide
  Antisense strand to SEQ ID NO: 2408768
uguagcaaaucgcaagugc

SEQ ID NO: 2408770 - RNA, 19 nt, Artificial Sequence
  Description of Artificial Sequence: Synthetic oligonucleotide
  Sense strand starting at position 3376 of SEQ ID NO: 1886423
ggcuccuuuccuuguggga

SEQ ID NO: 2408771 - RNA, 19 nt, Artificial Sequence
  Description of Artificial Sequence: Synthetic oligonucleotide
  Antisense strand to SEQ ID NO: 2408770
ucccacaaggaaaggagcc

SEQ ID NO: 2408772 - RNA, 19 nt, Artificial Sequence
  Description of Artificial Sequence: Synthetic oligonucleotide
  Sense strand starting at position 184 of SEQ ID NO: 1886424
gaguuuaaggcccaggauu

SEQ ID NO: 2408773 - RNA, 19 nt, Artificial Sequence
  Description of Artificial Sequence: Synthetic oligonucleotide
  Antisense strand to SEQ ID NO: 2408772
aauccugggccuuaaacuc

SEQ ID NO: 2408774 - RNA, 19 nt, Artificial Sequence
  Description of Artificial Sequence: Synthetic oligonucleotide
  Sense strand starting at position 292 of SEQ ID NO: 1886424
agguuaagagguuguccaa

SEQ ID NO: 2408775 - RNA, 19 nt, Artificial Sequence
  Description of Artificial Sequence: Synthetic oligonucleotide
  Antisense strand to SEQ ID NO: 2408774
uuggacaaccucuuaaccu

SEQ ID NO: 2408776 - RNA, 19 nt, Artificial Sequence
  Description of Artificial Sequence: Synthetic oligonucleotide
  Sense strand starting at position 295 of SEQ ID NO: 1886424
uuaagagguuguccaagau

SEQ ID NO: 2408777 - RNA, 19 nt, Artificial Sequence
  Description of Artificial Sequence: Synthetic oligonucleotide
  Antisense strand to SEQ ID NO: 2408776
aucuuggacaaccucuuaa

SEQ ID NO: 2408778 - RNA, 19 nt, Artificial Sequence
  Description of Artificial Sequence: Synthetic oligonucleotide
  Sense strand starting at position 362 of SEQ ID NO: 1886424
gacagauauuugcagguac

SEQ ID NO: 2408779 - RNA, 19 nt, Artificial Sequence
  Description of Artificial Sequence: Synthetic oligonucleotide
  Antisense strand to SEQ ID NO: 2408778
guaccugcaaauaucuguc

SEQ ID NO: 2408780 - RNA, 19 nt, Artificial Sequence
  Description of Artificial Sequence: Synthetic oligonucleotide
  Sense strand starting at position 375 of SEQ ID NO: 1886424
agguacugcuguucuauau

SEQ ID NO: 2408781 - RNA, 19 nt, Artificial Sequence
  Description of Artificial Sequence: Synthetic oligonucleotide
  Antisense strand to SEQ ID NO: 2408780
auauagaacagcaguaccu

SEQ ID NO: 2408782 - RNA, 19 nt, Artificial Sequence
  Description of Artificial Sequence: Synthetic oligonucleotide
  Sense strand starting at position 379 of SEQ ID NO: 1886424
acugcuguucuauauuagu

SEQ ID NO: 2408783 - RNA, 19 nt, Artificial Sequence
  Description of Artificial Sequence: Synthetic oligonucleotide
  Antisense strand to SEQ ID NO: 2408782
acuaauauagaacagcagu

SEQ ID NO: 2408784 - RNA, 19 nt, Artificial Sequence
  Description of Artificial Sequence: Synthetic oligonucleotide
  Sense strand starting at position 388 of SEQ ID NO: 1886424
cuauauuaguuaccuguuu

SEQ ID NO: 2408785 - RNA, 19 nt, Artificial Sequence
  Description of Artificial Sequence: Synthetic oligonucleotide
  Antisense strand to SEQ ID NO: 2408784
aaacagguaacuaauauag

SEQ ID NO: 2408786 - RNA, 19 nt, Artificial Sequence
  Description of Artificial Sequence: Synthetic oligonucleotide
  Sense strand starting at position 527 of SEQ ID NO: 1886424
ucacaaucccuagguaaga

SEQ ID NO: 2408787 - RNA, 19 nt, Artificial Sequence
  Description of Artificial Sequence: Synthetic oligonucleotide
  Antisense strand to SEQ ID NO: 2408786
ucuuaccuagggauuguga

SEQ ID NO: 2408788 - RNA, 19 nt, Artificial Sequence
  Description of Artificial Sequence: Synthetic oligonucleotide
  Sense strand starting at position 563 of SEQ ID NO: 1886424
ucagcacucccaugugaca

SEQ ID NO: 2408789 - RNA, 19 nt, Artificial Sequence
  Description of Artificial Sequence: Synthetic oligonucleotide
  Antisense strand to SEQ ID NO: 2408788
ugucacaugggagugcuga

SEQ ID NO: 2408790 - RNA, 19 nt, Artificial Sequence
  Description of Artificial Sequence: Synthetic oligonucleotide
  Sense strand starting at position 602 of SEQ ID NO: 1886424
gcaccugauauagguguua

SEQ ID NO: 2408791 - RNA, 19 nt, Artificial Sequence
  Description of Artificial Sequence: Synthetic oligonucleotide
  Antisense strand to SEQ ID NO: 2408790
uaacaccuauaucaggugc

SEQ ID NO: 2408792 - RNA, 19 nt, Artificial Sequence
  Description of Artificial Sequence: Synthetic oligonucleotide
  Sense strand starting at position 615 of SEQ ID NO: 1886424
guguuauuaucucuuguaa

SEQ ID NO: 2408793 - RNA, 19 nt, Artificial Sequence
  Description of Artificial Sequence: Synthetic oligonucleotide
  Antisense strand to SEQ ID NO: 2408792
uuacaagagauaauaacac

SEQ ID NO: 2408794 - RNA, 19 nt, Artificial Sequence
  Description of Artificial Sequence: Synthetic oligonucleotide
  Sense strand starting at position 1353 of SEQ ID NO: 1886424
ccggaagugcgucacucaa

SEQ ID NO: 2408795 - RNA, 19 nt, Artificial Sequence
  Description of Artificial Sequence: Synthetic oligonucleotide
  Antisense strand to SEQ ID NO: 2408794
uugagugacgcacuuccgg

SEQ ID NO: 2408796 - RNA, 19 nt, Artificial Sequence
  Description of Artificial Sequence: Synthetic oligonucleotide
  Sense strand starting at position 1950 of SEQ ID NO: 1886424
ggaguuucuuacuuuguac

SEQ ID NO: 2408797 - RNA, 19 nt, Artificial Sequence
  Description of Artificial Sequence: Synthetic oligonucleotide
  Antisense strand to SEQ ID NO: 2408796
guacaaaguaagaaacucc

SEQ ID NO: 2408798 - RNA, 19 nt, Artificial Sequence
  Description of Artificial Sequence: Synthetic oligonucleotide
  Sense strand starting at position 1952 of SEQ ID NO: 1886424
aguuucuuacuuuguacaa

SEQ ID NO: 2408799 - RNA, 19 nt, Artificial Sequence
  Description of Artificial Sequence: Synthetic oligonucleotide
  Antisense strand to SEQ ID NO: 2408798
uuguacaaaguaagaaacu

SEQ ID NO: 2408800 - RNA, 19 nt, Artificial Sequence
  Description of Artificial Sequence: Synthetic oligonucleotide
  Sense strand starting at position 1998 of SEQ ID NO: 1886424
gaggccagaugcguuuaaa

SEQ ID NO: 2408801 - RNA, 19 nt, Artificial Sequence
  Description of Artificial Sequence: Synthetic oligonucleotide
  Antisense strand to SEQ ID NO: 2408800
uuuaaacgcaucuggccuc

SEQ ID NO: 2408802 - RNA, 19 nt, Artificial Sequence
  Description of Artificial Sequence: Synthetic oligonucleotide
  Sense strand starting at position 2028 of SEQ ID NO: 1886424
cucggaguuuggaaaggua

SEQ ID NO: 2408803 - RNA, 19 nt, Artificial Sequence
  Description of Artificial Sequence: Synthetic oligonucleotide
  Antisense strand to SEQ ID NO: 2408802
uaccuuuccaaacuccgag

SEQ ID NO: 2408804 - RNA, 19 nt, Artificial Sequence
  Description of Artificial Sequence: Synthetic oligonucleotide
  Sense strand starting at position 2041 of SEQ ID NO: 1886424
aagguaaagucccuauguu

SEQ ID NO: 2408805 - RNA, 19 nt, Artificial Sequence
  Description of Artificial Sequence: Synthetic oligonucleotide
  Antisense strand to SEQ ID NO: 2408804
aacauagggacuuuaccuu

SEQ ID NO: 2408806 - RNA, 19 nt, Artificial Sequence
  Description of Artificial Sequence: Synthetic oligonucleotide
  Sense strand starting at position 2042 of SEQ ID NO: 1886424
agguaaagucccuauguuc

SEQ ID NO: 2408807 - RNA, 19 nt, Artificial Sequence
  Description of Artificial Sequence: Synthetic oligonucleotide
  Antisense strand to SEQ ID NO: 2408806
gaacauagggacuuuaccu

SEQ ID NO: 2408808 - RNA, 19 nt, Artificial Sequence
  Description of Artificial Sequence: Synthetic oligonucleotide
  Sense strand starting at position 2095 of SEQ ID NO: 1886424
agcggcuuguaaucaaaua

SEQ ID NO: 2408809 - RNA, 19 nt, Artificial Sequence
  Description of Artificial Sequence: Synthetic oligonucleotide
  Antisense strand to SEQ ID NO: 2408808
uauuugauuacaagccgcu

SEQ ID NO: 2408810 - RNA, 19 nt, Artificial Sequence
  Description of Artificial Sequence: Synthetic oligonucleotide
  Sense strand starting at position 2096 of SEQ ID NO: 1886424
gcggcuuguaaucaaauac

SEQ ID NO: 2408811 - RNA, 19 nt, Artificial Sequence
  Description of Artificial Sequence: Synthetic oligonucleotide
  Antisense strand to SEQ ID NO: 2408810
guauuugauuacaagccgc

SEQ ID NO: 2408812 - RNA, 19 nt, Artificial Sequence
  Description of Artificial Sequence: Synthetic oligonucleotide
  Sense strand starting at position 2116 of SEQ ID NO: 1886424
cgacccuuuccacagcuaa

SEQ ID NO: 2408813 - RNA, 19 nt, Artificial Sequence
  Description of Artificial Sequence: Synthetic oligonucleotide
  Antisense strand to SEQ ID NO: 2408812
uuagcuguggaaagggucg

SEQ ID NO: 2408814 - RNA, 19 nt, Artificial Sequence
  Description of Artificial Sequence: Synthetic oligonucleotide
  Sense strand starting at position 2137 of SEQ ID NO: 1886424
uuaugaagauacgcauaua

SEQ ID NO: 2408815 - RNA, 19 nt, Artificial Sequence
  Description of Artificial Sequence: Synthetic oligonucleotide
  Antisense strand to SEQ ID NO: 2408814
uauaugcguaucuucauaa

SEQ ID NO: 2408816 - RNA, 19 nt, Artificial Sequence
  Description of Artificial Sequence: Synthetic oligonucleotide
  Sense strand starting at position 2140 of SEQ ID NO: 1886424
ugaagauacgcauauauua

SEQ ID NO: 2408817 - RNA, 19 nt, Artificial Sequence
  Description of Artificial Sequence: Synthetic oligonucleotide
  Antisense strand to SEQ ID NO: 2408816
uaauauaugcguaucuuca

SEQ ID NO: 2408818 - RNA, 19 nt, Artificial Sequence
  Description of Artificial Sequence: Synthetic oligonucleotide
  Sense strand starting at position 2478 of SEQ ID NO: 1886424
uauuuacacuguugggaua

SEQ ID NO: 2408819 - RNA, 19 nt, Artificial Sequence
  Description of Artificial Sequence: Synthetic oligonucleotide
  Antisense strand to SEQ ID NO: 2408818
uaucccaacaguguaaaua

SEQ ID NO: 2408820 - RNA, 19 nt, Artificial Sequence
  Description of Artificial Sequence: Synthetic oligonucleotide
  Sense strand starting at position 2590 of SEQ ID NO: 1886424
ccgaucauccacuaguauu

SEQ ID NO: 2408821 - RNA, 19 nt, Artificial Sequence
  Description of Artificial Sequence: Synthetic oligonucleotide
  Antisense strand to SEQ ID NO: 2408820
aauacuaguggaugaucgg

SEQ ID NO: 2408822 - RNA, 19 nt, Artificial Sequence
  Description of Artificial Sequence: Synthetic oligonucleotide
  Sense strand starting at position 2676 of SEQ ID NO: 1886424
uucucacucucgcuggaua

SEQ ID NO: 2408823 - RNA, 19 nt, Artificial Sequence
  Description of Artificial Sequence: Synthetic oligonucleotide
  Antisense strand to SEQ ID NO: 2408822
uauccagcgagagugagaa

SEQ ID NO: 2408824 - RNA, 19 nt, Artificial Sequence
  Description of Artificial Sequence: Synthetic oligonucleotide
  Sense strand starting at position 2678 of SEQ ID NO: 1886424
cucacucucgcuggauaga

SEQ ID NO: 2408825 - RNA, 19 nt, Artificial Sequence
  Description of Artificial Sequence: Synthetic oligonucleotide
  Antisense strand to SEQ ID NO: 2408824
ucuauccagcgagagugag

SEQ ID NO: 2408826 - RNA, 19 nt, Artificial Sequence
  Description of Artificial Sequence: Synthetic oligonucleotide
  Sense strand starting at position 2691 of SEQ ID NO: 1886424
gauagagaguguccuugaa

SEQ ID NO: 2408827 - RNA, 19 nt, Artificial Sequence
  Description of Artificial Sequence: Synthetic oligonucleotide
  Antisense strand to SEQ ID NO: 2408826
uucaaggacacucucuauc

SEQ ID NO: 2408828 - RNA, 19 nt, Artificial Sequence
  Description of Artificial Sequence: Synthetic oligonucleotide
  Sense strand starting at position 2840 of SEQ ID NO: 1886424
ucugguuuggguuaaauga

SEQ ID NO: 2408829 - RNA, 19 nt, Artificial Sequence
  Description of Artificial Sequence: Synthetic oligonucleotide
  Antisense strand to SEQ ID NO: 2408828
ucauuuaacccaaaccaga

SEQ ID NO: 2408830 - RNA, 19 nt, Artificial Sequence
  Description of Artificial Sequence: Synthetic oligonucleotide
  Sense strand starting at position 2850 of SEQ ID NO: 1886424
guuaaaugaggucgggcau

SEQ ID NO: 2408831 - RNA, 19 nt, Artificial Sequence
  Description of Artificial Sequence: Synthetic oligonucleotide
  Antisense strand to SEQ ID NO: 2408830
augcccgaccucauuuaac

SEQ ID NO: 2408832 - RNA, 19 nt, Artificial Sequence
  Description of Artificial Sequence: Synthetic oligonucleotide
  Sense strand starting at position 2897 of SEQ ID NO: 1886424
gcacgaaugguaugacuga

SEQ ID NO: 2408833 - RNA, 19 nt, Artificial Sequence
  Description of Artificial Sequence: Synthetic oligonucleotide
  Antisense strand to SEQ ID NO: 2408832
ucagucauaccauucgugc

SEQ ID NO: 2408834 - RNA, 19 nt, Artificial Sequence
  Description of Artificial Sequence: Synthetic oligonucleotide
  Sense strand starting at position 2904 of SEQ ID NO: 1886424
ugguaugacugagauuuac

SEQ ID NO: 2408835 - RNA, 19 nt, Artificial Sequence
  Description of Artificial Sequence: Synthetic oligonucleotide
  Antisense strand to SEQ ID NO: 2408834
guaaaucucagucauacca

SEQ ID NO: 2408836 - RNA, 19 nt, Artificial Sequence
  Description of Artificial Sequence: Synthetic oligonucleotide
  Sense strand starting at position 3102 of SEQ ID NO: 1886424
gguuuaucuguauauauga

SEQ ID NO: 2408837 - RNA, 19 nt, Artificial Sequence
  Description of Artificial Sequence: Synthetic oligonucleotide
  Antisense strand to SEQ ID NO: 2408836
ucauauauacagauaaacc

SEQ ID NO: 2408838 - RNA, 19 nt, Artificial Sequence
  Description of Artificial Sequence: Synthetic oligonucleotide
  Sense strand starting at position 3164 of SEQ ID NO: 1886424
guugcagagagauaauucu

SEQ ID NO: 2408839 - RNA, 19 nt, Artificial Sequence
  Description of Artificial Sequence: Synthetic oligonucleotide
  Antisense strand to SEQ ID NO: 2408838
agaauuaucucucugcaac

SEQ ID NO: 2408840 - RNA, 19 nt, Artificial Sequence
  Description of Artificial Sequence: Synthetic oligonucleotide
  Sense strand starting at position 3171 of SEQ ID NO: 1886424
agagauaauucugccuuaa

SEQ ID NO: 2408841 - RNA, 19 nt, Artificial Sequence
  Description of Artificial Sequence: Synthetic oligonucleotide
  Antisense strand to SEQ ID NO: 2408840
uuaaggcagaauuaucucu

SEQ ID NO: 2408842 - RNA, 19 nt, Artificial Sequence
  Description of Artificial Sequence: Synthetic oligonucleotide
  Sense strand starting at position 3353 of SEQ ID NO: 1886424
cauugaauuuagggaguuu

SEQ ID NO: 2408843 - RNA, 19 nt, Artificial Sequence
  Description of Artificial Sequence: Synthetic oligonucleotide
  Antisense strand to SEQ ID NO: 2408842
aaacucccuaaauucaaug

SEQ ID NO: 2408844 - RNA, 19 nt, Artificial Sequence
  Description of Artificial Sequence: Synthetic oligonucleotide
  Sense strand starting at position 3407 of SEQ ID NO: 1886424
aaaucuguuuauccgggaa

SEQ ID NO: 2408845 - RNA, 19 nt, Artificial Sequence
  Description of Artificial Sequence: Synthetic oligonucleotide
  Antisense strand to SEQ ID NO: 2408844
uucccggauaaacagauuu

SEQ ID NO: 2408846 - RNA, 19 nt, Artificial Sequence
  Description of Artificial Sequence: Synthetic oligonucleotide
  Sense strand starting at position 3765 of SEQ ID NO: 1886424
guagguaauacaugucuau

SEQ ID NO: 2408847 - RNA, 19 nt, Artificial Sequence
  Description of Artificial Sequence: Synthetic oligonucleotide
  Antisense strand to SEQ ID NO: 2408846
auagacauguauuaccuac

SEQ ID NO: 2408848 - RNA, 19 nt, Artificial Sequence
  Description of Artificial Sequence: Synthetic oligonucleotide
  Sense strand starting at position 3768 of SEQ ID NO: 1886424
gguaauacaugucuaugcu

SEQ ID NO: 2408849 - RNA, 19 nt, Artificial Sequence
  Description of Artificial Sequence: Synthetic oligonucleotide
  Antisense strand to SEQ ID NO: 2408848
agcauagacauguauuacc

SEQ ID NO: 2408850 - RNA, 19 nt, Artificial Sequence
  Description of Artificial Sequence: Synthetic oligonucleotide
  Sense strand starting at position 3769 of SEQ ID NO: 1886424
guaauacaugucuaugcua

SEQ ID NO: 2408851 - RNA, 19 nt, Artificial Sequence
  Description of Artificial Sequence: Synthetic oligonucleotide
  Antisense strand to SEQ ID NO: 2408850
uagcauagacauguauuac

SEQ ID NO: 2408852 - RNA, 19 nt, Artificial Sequence
  Description of Artificial Sequence: Synthetic oligonucleotide
  Sense strand starting at position 111 of SEQ ID NO: 1886425
gaagcauugugacuaguag

SEQ ID NO: 2408853 - RNA, 19 nt, Artificial Sequence
  Description of Artificial Sequence: Synthetic oligonucleotide
  Antisense strand to SEQ ID NO: 2408852
cuacuagucacaaugcuuc

SEQ ID NO: 2408854 - RNA, 19 nt, Artificial Sequence
  Description of Artificial Sequence: Synthetic oligonucleotide
  Sense strand starting at position 364 of SEQ ID NO: 1886425
ugggaagcauugugacaag

SEQ ID NO: 2408855 - RNA, 19 nt, Artificial Sequence
  Description of Artificial Sequence: Synthetic oligonucleotide
  Antisense strand to SEQ ID NO: 2408854
cuugucacaaugcuuccca

SEQ ID NO: 2408856 - RNA, 19 nt, Artificial Sequence
  Description of Artificial Sequence: Synthetic oligonucleotide
  Sense strand starting at position 367 of SEQ ID NO: 1886425
gaagcauugugacaaguga

SEQ ID NO: 2408857 - RNA, 19 nt, Artificial Sequence
  Description of Artificial Sequence: Synthetic oligonucleotide
  Antisense strand to SEQ ID NO: 2408856
ucacuugucacaaugcuuc

SEQ ID NO: 2408858 - RNA, 19 nt, Artificial Sequence
  Description of Artificial Sequence: Synthetic oligonucleotide
  Sense strand starting at position 618 of SEQ ID NO: 1886425
guugggaaguguugggaca

SEQ ID NO: 2408859 - RNA, 19 nt, Artificial Sequence
  Description of Artificial Sequence: Synthetic oligonucleotide
  Antisense strand to SEQ ID NO: 2408858
ugucccaacacuucccaac

SEQ ID NO: 2408860 - RNA, 19 nt, Artificial Sequence
  Description of Artificial Sequence: Synthetic oligonucleotide
  Sense strand starting at position 619 of SEQ ID NO: 1886425
uugggaaguguugggacaa

SEQ ID NO: 2408861 - RNA, 19 nt, Artificial Sequence
  Description of Artificial Sequence: Synthetic oligonucleotide
  Antisense strand to SEQ ID NO: 2408860
uugucccaacacuucccaa

SEQ ID NO: 2408862 - RNA, 19 nt, Artificial Sequence
  Description of Artificial Sequence: Synthetic oligonucleotide
  Sense strand starting at position 620 of SEQ ID NO: 1886425
ugggaaguguugggacaag

SEQ ID NO: 2408863 - RNA, 19 nt, Artificial Sequence
  Description of Artificial Sequence: Synthetic oligonucleotide
  Antisense strand to SEQ ID NO: 2408862
cuugucccaacacuuccca

SEQ ID NO: 2408864 - RNA, 19 nt, Artificial Sequence
  Description of Artificial Sequence: Synthetic oligonucleotide
  Sense strand starting at position 868 of SEQ ID NO: 1886425
gcaguuaggaagcauuaga

SEQ ID NO: 2408865 - RNA, 19 nt, Artificial Sequence
  Description of Artificial Sequence: Synthetic oligonucleotide
  Antisense strand to SEQ ID NO: 2408864
ucuaaugcuuccuaacugc

SEQ ID NO: 2408866 - RNA, 19 nt, Artificial Sequence
  Description of Artificial Sequence: Synthetic oligonucleotide
  Sense strand starting at position 993 of SEQ ID NO: 1886425
gggcguccucagucagcua

SEQ ID NO: 2408867 - RNA, 19 nt, Artificial Sequence
  Description of Artificial Sequence: Synthetic oligonucleotide
  Antisense strand to SEQ ID NO: 2408866
uagcugacugaggacgccc

SEQ ID NO: 2408868 - RNA, 19 nt, Artificial Sequence
  Description of Artificial Sequence: Synthetic oligonucleotide
  Sense strand starting at position 2404 of SEQ ID NO: 1886425
ugggaagccuugcgauaag

SEQ ID NO: 2408869 - RNA, 19 nt, Artificial Sequence
  Description of Artificial Sequence: Synthetic oligonucleotide
  Antisense strand to SEQ ID NO: 2408868
cuuaucgcaaggcuuccca

SEQ ID NO: 2408870 - RNA, 19 nt, Artificial Sequence
  Description of Artificial Sequence: Synthetic oligonucleotide
  Sense strand starting at position 2413 of SEQ ID NO: 1886425
uugcgauaagcgggagaaa

SEQ ID NO: 2408871 - RNA, 19 nt, Artificial Sequence
  Description of Artificial Sequence: Synthetic oligonucleotide
  Antisense strand to SEQ ID NO: 2408870
uuucucccgcuuaucgcaa

SEQ ID NO: 2408872 - RNA, 19 nt, Artificial Sequence
  Description of Artificial Sequence: Synthetic oligonucleotide
  Sense strand starting at position 2508 of SEQ ID NO: 1886425
accugauccugcuuagcuu

SEQ ID NO: 2408873 - RNA, 19 nt, Artificial Sequence
  Description of Artificial Sequence: Synthetic oligonucleotide
  Antisense strand to SEQ ID NO: 2408872
aagcuaagcaggaucaggu

SEQ ID NO: 2408874 - RNA, 19 nt, Artificial Sequence
  Description of Artificial Sequence: Synthetic oligonucleotide
  Sense strand starting at position 2655 of SEQ ID NO: 1886425
uugggaaccuuugugacaa

SEQ ID NO: 2408875 - RNA, 19 nt, Artificial Sequence
  Description of Artificial Sequence: Synthetic oligonucleotide
  Antisense strand to SEQ ID NO: 2408874
uugucacaaagguucccaa

SEQ ID NO: 2408876 - RNA, 19 nt, Artificial Sequence
  Description of Artificial Sequence: Synthetic oligonucleotide
  Sense strand starting at position 2656 of SEQ ID NO: 1886425
ugggaaccuuugugacaag

SEQ ID NO: 2408877 - RNA, 19 nt, Artificial Sequence
  Description of Artificial Sequence: Synthetic oligonucleotide
  Antisense strand to SEQ ID NO: 2408876
cuugucacaaagguuccca

SEQ ID NO: 2408878 - RNA, 19 nt, Artificial Sequence
  Description of Artificial Sequence: Synthetic oligonucleotide
  Sense strand starting at position 2760 of SEQ ID NO: 1886425
gccaaacccuguuuagcuu

SEQ ID NO: 2408879 - RNA, 19 nt, Artificial Sequence
  Description of Artificial Sequence: Synthetic oligonucleotide
  Antisense strand to SEQ ID NO: 2408878
aagcuaaacaggguuuggc

SEQ ID NO: 2408880 - RNA, 19 nt, Artificial Sequence
  Description of Artificial Sequence: Synthetic oligonucleotide
  Sense strand starting at position 2864 of SEQ ID NO: 1886425
ccaagaagucugggucaac

SEQ ID NO: 2408881 - RNA, 19 nt, Artificial Sequence
  Description of Artificial Sequence: Synthetic oligonucleotide
  Antisense strand to SEQ ID NO: 2408880
guugacccagacuucuugg

SEQ ID NO: 2408882 - RNA, 19 nt, Artificial Sequence
  Description of Artificial Sequence: Synthetic oligonucleotide
  Sense strand starting at position 2945 of SEQ ID NO: 1886425
ccauuacaccauugugacu

SEQ ID NO: 2408883 - RNA, 19 nt, Artificial Sequence
  Description of Artificial Sequence: Synthetic oligonucleotide
  Antisense strand to SEQ ID NO: 2408882
agucacaaugguguaaugg

SEQ ID NO: 2408884 - RNA, 19 nt, Artificial Sequence
  Description of Artificial Sequence: Synthetic oligonucleotide
  Sense strand starting at position 2999 of SEQ ID NO: 1886425
guaacauucuuauucugga

SEQ ID NO: 2408885 - RNA, 19 nt, Artificial Sequence
  Description of Artificial Sequence: Synthetic oligonucleotide
  Antisense strand to SEQ ID NO: 2408884
uccagaauaagaauguuac

SEQ ID NO: 2408886 - RNA, 19 nt, Artificial Sequence
  Description of Artificial Sequence: Synthetic oligonucleotide
  Sense strand starting at position 3060 of SEQ ID NO: 1886425
guccucugcuaacaauaga

SEQ ID NO: 2408887 - RNA, 19 nt, Artificial Sequence
  Description of Artificial Sequence: Synthetic oligonucleotide
  Antisense strand to SEQ ID NO: 2408886
ucuauuguuagcagaggac

SEQ ID NO: 2408888 - RNA, 19 nt, Artificial Sequence
  Description of Artificial Sequence: Synthetic oligonucleotide
  Sense strand starting at position 3198 of SEQ ID NO: 1886425
agccuuguugcucaacaaa

SEQ ID NO: 2408889 - RNA, 19 nt, Artificial Sequence
  Description of Artificial Sequence: Synthetic oligonucleotide
  Antisense strand to SEQ ID NO: 2408888
uuuguugagcaacaaggcu

SEQ ID NO: 2408890 - RNA, 19 nt, Artificial Sequence
  Description of Artificial Sequence: Synthetic oligonucleotide
  Sense strand starting at position 3250 of SEQ ID NO: 1886425
gacguuuggagccaugaau

SEQ ID NO: 2408891 - RNA, 19 nt, Artificial Sequence
  Description of Artificial Sequence: Synthetic oligonucleotide
  Antisense strand to SEQ ID NO: 2408890
auucauggcuccaaacguc

SEQ ID NO: 2408892 - RNA, 19 nt, Artificial Sequence
  Description of Artificial Sequence: Synthetic oligonucleotide
  Sense strand starting at position 3277 of SEQ ID NO: 1886425
gggaccucccucggaagau

SEQ ID NO: 2408893 - RNA, 19 nt, Artificial Sequence
  Description of Artificial Sequence: Synthetic oligonucleotide
  Antisense strand to SEQ ID NO: 2408892
aucuuccgagggagguccc

SEQ ID NO: 2408894 - RNA, 19 nt, Artificial Sequence
  Description of Artificial Sequence: Synthetic oligonucleotide
  Sense strand starting at position 3601 of SEQ ID NO: 1886425
gugucuagucacugcagga

SEQ ID NO: 2408895 - RNA, 19 nt, Artificial Sequence
  Description of Artificial Sequence: Synthetic oligonucleotide
  Antisense strand to SEQ ID NO: 2408894
uccugcagugacuagacac

SEQ ID NO: 2408896 - RNA, 19 nt, Artificial Sequence
  Description of Artificial Sequence: Synthetic oligonucleotide
  Sense strand starting at position 3651 of SEQ ID NO: 1886425
guucgaucacugcggguau

SEQ ID NO: 2408897 - RNA, 19 nt, Artificial Sequence
  Description of Artificial Sequence: Synthetic oligonucleotide
  Antisense strand to SEQ ID NO: 2408896
auacccgcagugaucgaac

SEQ ID NO: 2408898 - RNA, 19 nt, Artificial Sequence
  Description of Artificial Sequence: Synthetic oligonucleotide
  Sense strand starting at position 3663 of SEQ ID NO: 1886425
cggguaugcgugccuugau

SEQ ID NO: 2408899 - RNA, 19 nt, Artificial Sequence
  Description of Artificial Sequence: Synthetic oligonucleotide
  Antisense strand to SEQ ID NO: 2408898
aucaaggcacgcauacccg

SEQ ID NO: 2408900 - RNA, 19 nt, Artificial Sequence
  Description of Artificial Sequence: Synthetic oligonucleotide
  Sense strand starting at position 3664 of SEQ ID NO: 1886425
ggguaugcgugccuugauc

SEQ ID NO: 2408901 - RNA, 19 nt, Artificial Sequence
  Description of Artificial Sequence: Synthetic oligonucleotide
  Antisense strand to SEQ ID NO: 2408900
gaucaaggcacgcauaccc

SEQ ID NO: 2408902 - RNA, 19 nt, Artificial Sequence
  Description of Artificial Sequence: Synthetic oligonucleotide
  Sense strand starting at position 3794 of SEQ ID NO: 1886425
cccuuagccuuuguucuua

SEQ ID NO: 2408903 - RNA, 19 nt, Artificial Sequence
  Description of Artificial Sequence: Synthetic oligonucleotide
  Antisense strand to SEQ ID NO: 2408902
uaagaacaaaggcuaaggg

SEQ ID NO: 2408904 - RNA, 19 nt, Artificial Sequence
  Description of Artificial Sequence: Synthetic oligonucleotide
  Sense strand starting at position 3901 of SEQ ID NO: 1886425
ugauaauggcucuaaaugu

SEQ ID NO: 2408905 - RNA, 19 nt, Artificial Sequence
  Description of Artificial Sequence: Synthetic oligonucleotide
  Antisense strand to SEQ ID NO: 2408904
acauuuagagccauuauca

SEQ ID NO: 2408906 - RNA, 19 nt, Artificial Sequence
  Description of Artificial Sequence: Synthetic oligonucleotide
  Sense strand starting at position 2338 of SEQ ID NO: 1886426
cgagaaagaugucaggaaa

SEQ ID NO: 2408907 - RNA, 19 nt, Artificial Sequence
  Description of Artificial Sequence: Synthetic oligonucleotide
  Antisense strand to SEQ ID NO: 2408906
uuuccugacaucuuucucg

SEQ ID NO: 2408908 - RNA, 19 nt, Artificial Sequence
  Description of Artificial Sequence: Synthetic oligonucleotide
  Sense strand starting at position 2489 of SEQ ID NO: 1886426
ucgcuuaacuacuguuaag

SEQ ID NO: 2408909 - RNA, 19 nt, Artificial Sequence
  Description of Artificial Sequence: Synthetic oligonucleotide
  Antisense strand to SEQ ID NO: 2408908
cuuaacaguaguuaagcga

SEQ ID NO: 2408910 - RNA, 19 nt, Artificial Sequence
  Description of Artificial Sequence: Synthetic oligonucleotide
  Sense strand starting at position 2500 of SEQ ID NO: 1886426
cuguuaagcgguuucagca

SEQ ID NO: 2408911 - RNA, 19 nt, Artificial Sequence
  Description of Artificial Sequence: Synthetic oligonucleotide
  Antisense strand to SEQ ID NO: 2408910
ugcugaaaccgcuuaacag

SEQ ID NO: 2408912 - RNA, 19 nt, Artificial Sequence
  Description of Artificial Sequence: Synthetic oligonucleotide
  Sense strand starting at position 2501 of SEQ ID NO: 1886426
uguuaagcgguuucagcau

SEQ ID NO: 2408913 - RNA, 19 nt, Artificial Sequence
  Description of Artificial Sequence: Synthetic oligonucleotide
  Antisense strand to SEQ ID NO: 2408912
augcugaaaccgcuuaaca

SEQ ID NO: 2408914 - RNA, 19 nt, Artificial Sequence
  Description of Artificial Sequence: Synthetic oligonucleotide
  Sense strand starting at position 2514 of SEQ ID NO: 1886426
cagcaugggcucuggaauu

SEQ ID NO: 2408915 - RNA, 19 nt, Artificial Sequence
  Description of Artificial Sequence: Synthetic oligonucleotide
  Antisense strand to SEQ ID NO: 2408914
aauuccagagcccaugcug

SEQ ID NO: 2408916 - RNA, 19 nt, Artificial Sequence
  Description of Artificial Sequence: Synthetic oligonucleotide
  Sense strand starting at position 2525 of SEQ ID NO: 1886426
cuggaauuccuuuguaugu

SEQ ID NO: 2408917 - RNA, 19 nt, Artificial Sequence
  Description of Artificial Sequence: Synthetic oligonucleotide
  Antisense strand to SEQ ID NO: 2408916
acauacaaaggaauuccag

SEQ ID NO: 2408918 - RNA, 19 nt, Artificial Sequence
  Description of Artificial Sequence: Synthetic oligonucleotide
  Sense strand starting at position 2526 of SEQ ID NO: 1886426
uggaauuccuuuguauguu

SEQ ID NO: 2408919 - RNA, 19 nt, Artificial Sequence
  Description of Artificial Sequence: Synthetic oligonucleotide
  Antisense strand to SEQ ID NO: 2408918
aacauacaaaggaauucca

SEQ ID NO: 2408920 - RNA, 19 nt, Artificial Sequence
  Description of Artificial Sequence: Synthetic oligonucleotide
  Sense strand starting at position 2527 of SEQ ID NO: 1886426
ggaauuccuuuguauguua

SEQ ID NO: 2408921 - RNA, 19 nt, Artificial Sequence
  Description of Artificial Sequence: Synthetic oligonucleotide
  Antisense strand to SEQ ID NO: 2408920
uaacauacaaaggaauucc

SEQ ID NO: 2408922 - RNA, 19 nt, Artificial Sequence
  Description of Artificial Sequence: Synthetic oligonucleotide
  Sense strand starting at position 2532 of SEQ ID NO: 1886426
uccuuuguauguuauuaag

SEQ ID NO: 2408923 - RNA, 19 nt, Artificial Sequence
  Description of Artificial Sequence: Synthetic oligonucleotide
  Antisense strand to SEQ ID NO: 2408922
cuuaauaacauacaaagga

SEQ ID NO: 2408924 - RNA, 19 nt, Artificial Sequence
  Description of Artificial Sequence: Synthetic oligonucleotide
  Sense strand starting at position 2534 of SEQ ID NO: 1886426
cuuuguauguuauuaagug

SEQ ID NO: 2408925 - RNA, 19 nt, Artificial Sequence
  Description of Artificial Sequence: Synthetic oligonucleotide
  Antisense strand to SEQ ID NO: 2408924
cacuuaauaacauacaaag

SEQ ID NO: 2408926 - RNA, 19 nt, Artificial Sequence
  Description of Artificial Sequence: Synthetic oligonucleotide
  Sense strand starting at position 2538 of SEQ ID NO: 1886426
guauguuauuaagugggaa

SEQ ID NO: 2408927 - RNA, 19 nt, Artificial Sequence
  Description of Artificial Sequence: Synthetic oligonucleotide
  Antisense strand to SEQ ID NO: 2408926
uucccacuuaauaacauac

SEQ ID NO: 2408928 - RNA, 19 nt, Artificial Sequence
  Description of Artificial Sequence: Synthetic oligonucleotide
  Sense strand starting at position 2540 of SEQ ID NO: 1886426
auguuauuaagugggaauc

SEQ ID NO: 2408929 - RNA, 19 nt, Artificial Sequence
  Description of Artificial Sequence: Synthetic oligonucleotide
  Antisense strand to SEQ ID NO: 2408928
gauucccacuuaauaacau

SEQ ID NO: 2408930 - RNA, 19 nt, Artificial Sequence
  Description of Artificial Sequence: Synthetic oligonucleotide
  Sense strand starting at position 2541 of SEQ ID NO: 1886426
uguuauuaagugggaaucu

SEQ ID NO: 2408931 - RNA, 19 nt, Artificial Sequence
  Description of Artificial Sequence: Synthetic oligonucleotide
  Antisense strand to SEQ ID NO: 2408930
agauucccacuuaauaaca

SEQ ID NO: 2408932 - RNA, 19 nt, Artificial Sequence
  Description of Artificial Sequence: Synthetic oligonucleotide
  Sense strand starting at position 2542 of SEQ ID NO: 1886426
guuauuaagugggaaucuu

SEQ ID NO: 2408933 - RNA, 19 nt, Artificial Sequence
  Description of Artificial Sequence: Synthetic oligonucleotide
  Antisense strand to SEQ ID NO: 2408932
aagauucccacuuaauaac

SEQ ID NO: 2408934 - RNA, 19 nt, Artificial Sequence
  Description of Artificial Sequence: Synthetic oligonucleotide
  Sense strand starting at position 2565 of SEQ ID NO: 1886426
ugcaguaggugucuccaaa

SEQ ID NO: 2408935 - RNA, 19 nt, Artificial Sequence
  Description of Artificial Sequence: Synthetic oligonucleotide
  Antisense strand to SEQ ID NO: 2408934
uuuggagacaccuacugca

SEQ ID NO: 2408936 - RNA, 19 nt, Artificial Sequence
  Description of Artificial Sequence: Synthetic oligonucleotide
  Sense strand starting at position 2583 of SEQ ID NO: 1886426
acaggacauacgugaacaa

SEQ ID NO: 2408937 - RNA, 19 nt, Artificial Sequence
  Description of Artificial Sequence: Synthetic oligonucleotide
  Antisense strand to SEQ ID NO: 2408936
uuguucacguauguccugu

SEQ ID NO: 2408938 - RNA, 19 nt, Artificial Sequence
  Description of Artificial Sequence: Synthetic oligonucleotide
  Sense strand starting at position 2669 of SEQ ID NO: 1886426
acuuuaagguacugacaua

SEQ ID NO: 2408939 - RNA, 19 nt, Artificial Sequence
  Description of Artificial Sequence: Synthetic oligonucleotide
  Antisense strand to SEQ ID NO: 2408938
uaugucaguaccuuaaagu

SEQ ID NO: 2408940 - RNA, 19 nt, Artificial Sequence
  Description of Artificial Sequence: Synthetic oligonucleotide
  Sense strand starting at position 2680 of SEQ ID NO: 1886426
cugacauauuucuggaguc

SEQ ID NO: 2408941 - RNA, 19 nt, Artificial Sequence
  Description of Artificial Sequence: Synthetic oligonucleotide
  Antisense strand to SEQ ID NO: 2408940
gacuccagaaauaugucag

SEQ ID NO: 2408942 - RNA, 19 nt, Artificial Sequence
  Description of Artificial Sequence: Synthetic oligonucleotide
  Sense strand starting at position 2759 of SEQ ID NO: 1886426
cgucaugguggaugagaau

SEQ ID NO: 2408943 - RNA, 19 nt, Artificial Sequence
  Description of Artificial Sequence: Synthetic oligonucleotide
  Antisense strand to SEQ ID NO: 2408942
auucucauccaccaugacg

SEQ ID NO: 2408944 - RNA, 19 nt, Artificial Sequence
  Description of Artificial Sequence: Synthetic oligonucleotide
  Sense strand starting at position 2771 of SEQ ID NO: 1886426
ugagaauguggcgagcagu

SEQ ID NO: 2408945 - RNA, 19 nt, Artificial Sequence
  Description of Artificial Sequence: Synthetic oligonucleotide
  Antisense strand to SEQ ID NO: 2408944
acugcucgccacauucuca

SEQ ID NO: 2408946 - RNA, 19 nt, Artificial Sequence
  Description of Artificial Sequence: Synthetic oligonucleotide
  Sense strand starting at position 2789 of SEQ ID NO: 1886426
ugagcaguggugugaaauc

SEQ ID NO: 2408947 - RNA, 19 nt, Artificial Sequence
  Description of Artificial Sequence: Synthetic oligonucleotide
  Antisense strand to SEQ ID NO: 2408946
gauuucacaccacugcuca

SEQ ID NO: 2408948 - RNA, 19 nt, Artificial Sequence
  Description of Artificial Sequence: Synthetic oligonucleotide
  Sense strand starting at position 2893 of SEQ ID NO: 1886426
uuugguugucucuagguga

SEQ ID NO: 2408949 - RNA, 19 nt, Artificial Sequence
  Description of Artificial Sequence: Synthetic oligonucleotide
  Antisense strand to SEQ ID NO: 2408948
ucaccuagagacaaccaaa

SEQ ID NO: 2408950 - RNA, 19 nt, Artificial Sequence
  Description of Artificial Sequence: Synthetic oligonucleotide
  Sense strand starting at position 2897 of SEQ ID NO: 1886426
guugucucuaggugagguu

SEQ ID NO: 2408951 - RNA, 19 nt, Artificial Sequence
  Description of Artificial Sequence: Synthetic oligonucleotide
  Antisense strand to SEQ ID NO: 2408950
aaccucaccuagagacaac

SEQ ID NO: 2408952 - RNA, 19 nt, Artificial Sequence
  Description of Artificial Sequence: Synthetic oligonucleotide
  Sense strand starting at position 2906 of SEQ ID NO: 1886426
aggugagguuguguccaga

SEQ ID NO: 2408953 - RNA, 19 nt, Artificial Sequence
  Description of Artificial Sequence: Synthetic oligonucleotide
  Antisense strand to SEQ ID NO: 2408952
ucuggacacaaccucaccu

SEQ ID NO: 2408954 - RNA, 19 nt, Artificial Sequence
  Description of Artificial Sequence: Synthetic oligonucleotide
  Sense strand starting at position 3095 of SEQ ID NO: 1886426
gaccuuagcagagaguguu

SEQ ID NO: 2408955 - RNA, 19 nt, Artificial Sequence
  Description of Artificial Sequence: Synthetic oligonucleotide
  Antisense strand to SEQ ID NO: 2408954
aacacucucugcuaagguc

SEQ ID NO: 2408956 - RNA, 19 nt, Artificial Sequence
  Description of Artificial Sequence: Synthetic oligonucleotide
  Sense strand starting at position 2024 of SEQ ID NO: 1886427
gcagcugauccagaagcuu

SEQ ID NO: 2408957 - RNA, 19 nt, Artificial Sequence
  Description of Artificial Sequence: Synthetic oligonucleotide
  Antisense strand to SEQ ID NO: 2408956
aagcuucuggaucagcugc

SEQ ID NO: 2408958 - RNA, 19 nt, Artificial Sequence
  Description of Artificial Sequence: Synthetic oligonucleotide
  Sense strand starting at position 2032 of SEQ ID NO: 1886427
uccagaagcuucuggaaac

SEQ ID NO: 2408959 - RNA, 19 nt, Artificial Sequence
  Description of Artificial Sequence: Synthetic oligonucleotide
  Antisense strand to SEQ ID NO: 2408958
guuuccagaagcuucugga

SEQ ID NO: 2408960 - RNA, 19 nt, Artificial Sequence
  Description of Artificial Sequence: Synthetic oligonucleotide
  Sense strand starting at position 2033 of SEQ ID NO: 1886427
ccagaagcuucuggaaaca

SEQ ID NO: 2408961 - RNA, 19 nt, Artificial Sequence
  Description of Artificial Sequence: Synthetic oligonucleotide
  Antisense strand to SEQ ID NO: 2408960
uguuuccagaagcuucugg

SEQ ID NO: 2408962 - RNA, 19 nt, Artificial Sequence
  Description of Artificial Sequence: Synthetic oligonucleotide
  Sense strand starting at position 2114 of SEQ ID NO: 1886427
agcucuacuugucaguaca

SEQ ID NO: 2408963 - RNA, 19 nt, Artificial Sequence
  Description of Artificial Sequence: Synthetic oligonucleotide
  Antisense strand to SEQ ID NO: 2408962
uguacugacaaguagagcu

SEQ ID NO: 2408964 - RNA, 19 nt, Artificial Sequence
  Description of Artificial Sequence: Synthetic oligonucleotide
  Sense strand starting at position 2117 of SEQ ID NO: 1886427
ucuacuugucaguacaaga

SEQ ID NO: 2408965 - RNA, 19 nt, Artificial Sequence
  Description of Artificial Sequence: Synthetic oligonucleotide
  Antisense strand to SEQ ID NO: 2408964
ucuuguacugacaaguaga

SEQ ID NO: 2408966 - RNA, 19 nt, Artificial Sequence
  Description of Artificial Sequence: Synthetic oligonucleotide
  Sense strand starting at position 2215 of SEQ ID NO: 1886427
caguguccugguuauuaca

SEQ ID NO: 2408967 - RNA, 19 nt, Artificial Sequence
  Description of Artificial Sequence: Synthetic oligonucleotide
  Antisense strand to SEQ ID NO: 2408966
uguaauaaccaggacacug

SEQ ID NO: 2408968 - RNA, 19 nt, Artificial Sequence
  Description of Artificial Sequence: Synthetic oligonucleotide
  Sense strand starting at position 2217 of SEQ ID NO: 1886427
guguccugguuauuacauu

SEQ ID NO: 2408969 - RNA, 19 nt, Artificial Sequence
  Description of Artificial Sequence: Synthetic oligonucleotide
  Antisense strand to SEQ ID NO: 2408968
aauguaauaaccaggacac

SEQ ID NO: 2408970 - RNA, 19 nt, Artificial Sequence
  Description of Artificial Sequence: Synthetic oligonucleotide
  Sense strand starting at position 2223 of SEQ ID NO: 1886427
ugguuauuacauugugugu

SEQ ID NO: 2408971 - RNA, 19 nt, Artificial Sequence
  Description of Artificial Sequence: Synthetic oligonucleotide
  Antisense strand to SEQ ID NO: 2408970
acacacaauguaauaacca

SEQ ID NO: 2408972 - RNA, 19 nt, Artificial Sequence
  Description of Artificial Sequence: Synthetic oligonucleotide
  Sense strand starting at position 2272 of SEQ ID NO: 1886427
uuguccuggcucgagaacu

SEQ ID NO: 2408973 - RNA, 19 nt, Artificial Sequence
  Description of Artificial Sequence: Synthetic oligonucleotide
  Antisense strand to SEQ ID NO: 2408972
aguucucgagccaggacaa

SEQ ID NO: 2408974 - RNA, 19 nt, Artificial Sequence
  Description of Artificial Sequence: Synthetic oligonucleotide
  Sense strand starting at position 2303 of SEQ ID NO: 1886427
agaauaugcgagugaguau

SEQ ID NO: 2408975 - RNA, 19 nt, Artificial Sequence
  Description of Artificial Sequence: Synthetic oligonucleotide
  Antisense strand to SEQ ID NO: 2408974
auacucacucgcauauucu

SEQ ID NO: 2408976 - RNA, 19 nt, Artificial Sequence
  Description of Artificial Sequence: Synthetic oligonucleotide
  Sense strand starting at position 2390 of SEQ ID NO: 1886427
gccgguguuucugugcuga

SEQ ID NO: 2408977 - RNA, 19 nt, Artificial Sequence
  Description of Artificial Sequence: Synthetic oligonucleotide
  Antisense strand to SEQ ID NO: 2408976
ucagcacagaaacaccggc

SEQ ID NO: 2408978 - RNA, 19 nt, Artificial Sequence
  Description of Artificial Sequence: Synthetic oligonucleotide
  Sense strand starting at position 2392 of SEQ ID NO: 1886427
cgguguuucugugcugauu

SEQ ID NO: 2408979 - RNA, 19 nt, Artificial Sequence
  Description of Artificial Sequence: Synthetic oligonucleotide
  Antisense strand to SEQ ID NO: 2408978
aaucagcacagaaacaccg

SEQ ID NO: 2408980 - RNA, 19 nt, Artificial Sequence
  Description of Artificial Sequence: Synthetic oligonucleotide
  Sense strand starting at position 2394 of SEQ ID NO: 1886427
guguuucugugcugauuuc

SEQ ID NO: 2408981 - RNA, 19 nt, Artificial Sequence
  Description of Artificial Sequence: Synthetic oligonucleotide
  Antisense strand to SEQ ID NO: 2408980
gaaaucagcacagaaacac

SEQ ID NO: 2408982 - RNA, 19 nt, Artificial Sequence
  Description of Artificial Sequence: Synthetic oligonucleotide
  Sense strand starting at position 2421 of SEQ ID NO: 1886427
ggacacuguuggcuuuaga

SEQ ID NO: 2408983 - RNA, 19 nt, Artificial Sequence
  Description of Artificial Sequence: Synthetic oligonucleotide
  Antisense strand to SEQ ID NO: 2408982
ucuaaagccaacagugucc

SEQ ID NO: 2408984 - RNA, 19 nt, Artificial Sequence
  Description of Artificial Sequence: Synthetic oligonucleotide
  Sense strand starting at position 2424 of SEQ ID NO: 1886427
cacuguuggcuuuagagac

SEQ ID NO: 2408985 - RNA, 19 nt, Artificial Sequence
  Description of Artificial Sequence: Synthetic oligonucleotide
  Antisense strand to SEQ ID NO: 2408984
gucucuaaagccaacagug

SEQ ID NO: 2408986 - RNA, 19 nt, Artificial Sequence
  Description of Artificial Sequence: Synthetic oligonucleotide
  Sense strand starting at position 2445 of SEQ ID NO: 1886427
ccaggcuguuguguacaau

SEQ ID NO: 2408987 - RNA, 19 nt, Artificial Sequence
  Description of Artificial Sequence: Synthetic oligonucleotide
  Antisense strand to SEQ ID NO: 2408986
auuguacacaacagccugg

SEQ ID NO: 2408988 - RNA, 19 nt, Artificial Sequence
  Description of Artificial Sequence: Synthetic oligonucleotide
  Sense strand starting at position 2448 of SEQ ID NO: 1886427
ggcuguuguguacaauguu

SEQ ID NO: 2408989 - RNA, 19 nt, Artificial Sequence
  Description of Artificial Sequence: Synthetic oligonucleotide
  Antisense strand to SEQ ID NO: 2408988
aacauuguacacaacagcc

SEQ ID NO: 2408990 - RNA, 19 nt, Artificial Sequence
  Description of Artificial Sequence: Synthetic oligonucleotide
  Sense strand starting at position 2451 of SEQ ID NO: 1886427
uguuguguacaauguuuga

SEQ ID NO: 2408991 - RNA, 19 nt, Artificial Sequence
  Description of Artificial Sequence: Synthetic oligonucleotide
  Antisense strand to SEQ ID NO: 2408990
ucaaacauuguacacaaca

SEQ ID NO: 2408992 - RNA, 19 nt, Artificial Sequence
  Description of Artificial Sequence: Synthetic oligonucleotide
  Sense strand starting at position 2454 of SEQ ID NO: 1886427
uguguacaauguuugaaag

SEQ ID NO: 2408993 - RNA, 19 nt, Artificial Sequence
  Description of Artificial Sequence: Synthetic oligonucleotide
  Antisense strand to SEQ ID NO: 2408992
cuuucaaacauuguacaca

SEQ ID NO: 2408994 - RNA, 19 nt, Artificial Sequence
  Description of Artificial Sequence: Synthetic oligonucleotide
  Sense strand starting at position 2455 of SEQ ID NO: 1886427
guguacaauguuugaaaga

SEQ ID NO: 2408995 - RNA, 19 nt, Artificial Sequence
  Description of Artificial Sequence: Synthetic oligonucleotide
  Antisense strand to SEQ ID NO: 2408994
ucuuucaaacauuguacac

SEQ ID NO: 2408996 - RNA, 19 nt, Artificial Sequence
  Description of Artificial Sequence: Synthetic oligonucleotide
  Sense strand starting at position 2456 of SEQ ID NO: 1886427
uguacaauguuugaaagac

SEQ ID NO: 2408997 - RNA, 19 nt, Artificial Sequence
  Description of Artificial Sequence: Synthetic oligonucleotide
  Antisense strand to SEQ ID NO: 2408996
gucuuucaaacauuguaca

SEQ ID NO: 2408998 - RNA, 19 nt, Artificial Sequence
  Description of Artificial Sequence: Synthetic oligonucleotide
  Sense strand starting at position 2485 of SEQ ID NO: 1886427
accaguuaccuuugugagu

SEQ ID NO: 2408999 - RNA, 19 nt, Artificial Sequence
  Description of Artificial Sequence: Synthetic oligonucleotide
  Antisense strand to SEQ ID NO: 2408998
acucacaaagguaacuggu

SEQ ID NO: 2409000 - RNA, 19 nt, Artificial Sequence
  Description of Artificial Sequence: Synthetic oligonucleotide
  Sense strand starting at position 2488 of SEQ ID NO: 1886427
aguuaccuuugugagucau

SEQ ID NO: 2409001 - RNA, 19 nt, Artificial Sequence
  Description of Artificial Sequence: Synthetic oligonucleotide
  Antisense strand to SEQ ID NO: 2409000
augacucacaaagguaacu

SEQ ID NO: 2409002 - RNA, 19 nt, Artificial Sequence
  Description of Artificial Sequence: Synthetic oligonucleotide
  Sense strand starting at position 2490 of SEQ ID NO: 1886427
uuaccuuugugagucaugu

SEQ ID NO: 2409003 - RNA, 19 nt, Artificial Sequence
  Description of Artificial Sequence: Synthetic oligonucleotide
  Antisense strand to SEQ ID NO: 2409002
acaugacucacaaagguaa

SEQ ID NO: 2409004 - RNA, 19 nt, Artificial Sequence
  Description of Artificial Sequence: Synthetic oligonucleotide
  Sense strand starting at position 2492 of SEQ ID NO: 1886427
accuuugugagucaugucu

SEQ ID NO: 2409005 - RNA, 19 nt, Artificial Sequence
  Description of Artificial Sequence: Synthetic oligonucleotide
  Antisense strand to SEQ ID NO: 2409004
agacaugacucacaaaggu

SEQ ID NO: 2409006 - RNA, 19 nt, Artificial Sequence
  Description of Artificial Sequence: Synthetic oligonucleotide
  Sense strand starting at position 2499 of SEQ ID NO: 1886427
ugagucaugucuuuagugu

SEQ ID NO: 2409007 - RNA, 19 nt, Artificial Sequence
  Description of Artificial Sequence: Synthetic oligonucleotide
  Antisense strand to SEQ ID NO: 2409006
acacuaaagacaugacuca

SEQ ID NO: 2409008 - RNA, 19 nt, Artificial Sequence
  Description of Artificial Sequence: Synthetic oligonucleotide
  Sense strand starting at position 2520 of SEQ ID NO: 1886427
uuuguuguuucugauagua

SEQ ID NO: 2409009 - RNA, 19 nt, Artificial Sequence
  Description of Artificial Sequence: Synthetic oligonucleotide
  Antisense strand to SEQ ID NO: 2409008
uacuaucagaaacaacaaa

SEQ ID NO: 2409010 - RNA, 19 nt, Artificial Sequence
  Description of Artificial Sequence: Synthetic oligonucleotide
  Sense strand starting at position 2522 of SEQ ID NO: 1886427
uguuguuucugauaguaac

SEQ ID NO: 2409011 - RNA, 19 nt, Artificial Sequence
  Description of Artificial Sequence: Synthetic oligonucleotide
  Antisense strand to SEQ ID NO: 2409010
guuacuaucagaaacaaca

SEQ ID NO: 2409012 - RNA, 19 nt, Artificial Sequence
  Description of Artificial Sequence: Synthetic oligonucleotide
  Sense strand starting at position 2525 of SEQ ID NO: 1886427
uguuucugauaguaacuca

SEQ ID NO: 2409013 - RNA, 19 nt, Artificial Sequence
  Description of Artificial Sequence: Synthetic oligonucleotide
  Antisense strand to SEQ ID NO: 2409012
ugaguuacuaucagaaaca

SEQ ID NO: 2409014 - RNA, 19 nt, Artificial Sequence
  Description of Artificial Sequence: Synthetic oligonucleotide
  Sense strand starting at position 2629 of SEQ ID NO: 1886427
ugucaugucgcgccuggau

SEQ ID NO: 2409015 - RNA, 19 nt, Artificial Sequence
  Description of Artificial Sequence: Synthetic oligonucleotide
  Antisense strand to SEQ ID NO: 2409014
auccaggcgcgacaugaca

SEQ ID NO: 2409016 - RNA, 19 nt, Artificial Sequence
  Description of Artificial Sequence: Synthetic oligonucleotide
  Sense strand starting at position 2688 of SEQ ID NO: 1886427
acgagaagcuguguauccu

SEQ ID NO: 2409017 - RNA, 19 nt, Artificial Sequence
  Description of Artificial Sequence: Synthetic oligonucleotide
  Antisense strand to SEQ ID NO: 2409016
aggauacacagcuucucgu

SEQ ID NO: 2409018 - RNA, 19 nt, Artificial Sequence
  Description of Artificial Sequence: Synthetic oligonucleotide
  Sense strand starting at position 2689 of SEQ ID NO: 1886427
cgagaagcuguguauccuu

SEQ ID NO: 2409019 - RNA, 19 nt, Artificial Sequence
  Description of Artificial Sequence: Synthetic oligonucleotide
  Antisense strand to SEQ ID NO: 2409018
aaggauacacagcuucucg

SEQ ID NO: 2409020 - RNA, 19 nt, Artificial Sequence
  Description of Artificial Sequence: Synthetic oligonucleotide
  Sense strand starting at position 2878 of SEQ ID NO: 1886427
gacguuaccucccggagaa

SEQ ID NO: 2409021 - RNA, 19 nt, Artificial Sequence
  Description of Artificial Sequence: Synthetic oligonucleotide
  Antisense strand to SEQ ID NO: 2409020
uucuccgggagguaacguc

SEQ ID NO: 2409022 - RNA, 19 nt, Artificial Sequence
  Description of Artificial Sequence: Synthetic oligonucleotide
  Sense strand starting at position 2982 of SEQ ID NO: 1886427
guuauuaaaccuuggcuca

SEQ ID NO: 2409023 - RNA, 19 nt, Artificial Sequence
  Description of Artificial Sequence: Synthetic oligonucleotide
  Antisense strand to SEQ ID NO: 2409022
ugagccaagguuuaauaac

SEQ ID NO: 2409024 - RNA, 19 nt, Artificial Sequence
  Description of Artificial Sequence: Synthetic oligonucleotide
  Sense strand starting at position 2998 of SEQ ID NO: 1886427
ucaggaaucugggaggcaa

SEQ ID NO: 2409025 - RNA, 19 nt, Artificial Sequence
  Description of Artificial Sequence: Synthetic oligonucleotide
  Antisense strand to SEQ ID NO: 2409024
uugccucccagauuccuga

SEQ ID NO: 2409026 - RNA, 19 nt, Artificial Sequence
  Description of Artificial Sequence: Synthetic oligonucleotide
  Sense strand starting at position 3250 of SEQ ID NO: 1886427
ccggcucuucuguguuaga

SEQ ID NO: 2409027 - RNA, 19 nt, Artificial Sequence
  Description of Artificial Sequence: Synthetic oligonucleotide
  Antisense strand to SEQ ID NO: 2409026
ucuaacacagaagagccgg

SEQ ID NO: 2409028 - RNA, 19 nt, Artificial Sequence
  Description of Artificial Sequence: Synthetic oligonucleotide
  Sense strand starting at position 3260 of SEQ ID NO: 1886427
uguguuagagcuucguucu

SEQ ID NO: 2409029 - RNA, 19 nt, Artificial Sequence
  Description of Artificial Sequence: Synthetic oligonucleotide
  Antisense strand to SEQ ID NO: 2409028
agaacgaagcucuaacaca

SEQ ID NO: 2409030 - RNA, 19 nt, Artificial Sequence
  Description of Artificial Sequence: Synthetic oligonucleotide
  Sense strand starting at position 3261 of SEQ ID NO: 1886427
guguuagagcuucguucug

SEQ ID NO: 2409031 - RNA, 19 nt, Artificial Sequence
  Description of Artificial Sequence: Synthetic oligonucleotide
  Antisense strand to SEQ ID NO: 2409030
cagaacgaagcucuaacac

SEQ ID NO: 2409032 - RNA, 19 nt, Artificial Sequence
  Description of Artificial Sequence: Synthetic oligonucleotide
  Sense strand starting at position 3460 of SEQ ID NO: 1886427
acugacgauccgugucaga

SEQ ID NO: 2409033 - RNA, 19 nt, Artificial Sequence
  Description of Artificial Sequence: Synthetic oligonucleotide
  Antisense strand to SEQ ID NO: 2409032
ucugacacggaucgucagu

SEQ ID NO: 2409034 - RNA, 19 nt, Artificial Sequence
  Description of Artificial Sequence: Synthetic oligonucleotide
  Sense strand starting at position 3732 of SEQ ID NO: 1886427
guggucgaggucugaugaa

SEQ ID NO: 2409035 - RNA, 19 nt, Artificial Sequence
  Description of Artificial Sequence: Synthetic oligonucleotide
  Antisense strand to SEQ ID NO: 2409034
uucaucagaccucgaccac

SEQ ID NO: 2409036 - RNA, 19 nt, Artificial Sequence
  Description of Artificial Sequence: Synthetic oligonucleotide
  Sense strand starting at position 238 of SEQ ID NO: 1886428
agacgaguuucgaagcuga

SEQ ID NO: 2409037 - RNA, 19 nt, Artificial Sequence
  Description of Artificial Sequence: Synthetic oligonucleotide
  Antisense strand to SEQ ID NO: 2409036
ucagcuucgaaacucgucu

SEQ ID NO: 2409038 - RNA, 19 nt, Artificial Sequence
  Description of Artificial Sequence: Synthetic oligonucleotide
  Sense strand starting at position 242 of SEQ ID NO: 1886428
gaguuucgaagcugaaguu

SEQ ID NO: 2409039 - RNA, 19 nt, Artificial Sequence
  Description of Artificial Sequence: Synthetic oligonucleotide
  Antisense strand to SEQ ID NO: 2409038
aacuucagcuucgaaacuc

SEQ ID NO: 2409040 - RNA, 19 nt, Artificial Sequence
  Description of Artificial Sequence: Synthetic oligonucleotide
  Sense strand starting at position 378 of SEQ ID NO: 1886428
cgcgaauucggaggauuaa

SEQ ID NO: 2409041 - RNA, 19 nt, Artificial Sequence
  Description of Artificial Sequence: Synthetic oligonucleotide
  Antisense strand to SEQ ID NO: 2409040
uuaauccuccgaauucgcg

SEQ ID NO: 2409042 - RNA, 19 nt, Artificial Sequence
  Description of Artificial Sequence: Synthetic oligonucleotide
  Sense strand starting at position 379 of SEQ ID NO: 1886428
gcgaauucggaggauuaag

SEQ ID NO: 2409043 - RNA, 19 nt, Artificial Sequence
  Description of Artificial Sequence: Synthetic oligonucleotide
  Antisense strand to SEQ ID NO: 2409042
cuuaauccuccgaauucgc

SEQ ID NO: 2409044 - RNA, 19 nt, Artificial Sequence
  Description of Artificial Sequence: Synthetic oligonucleotide
  Sense strand starting at position 387 of SEQ ID NO: 1886428
ggaggauuaaguugucagu

SEQ ID NO: 2409045 - RNA, 19 nt, Artificial Sequence
  Description of Artificial Sequence: Synthetic oligonucleotide
  Antisense strand to SEQ ID NO: 2409044
acugacaacuuaauccucc

SEQ ID NO: 2409046 - RNA, 19 nt, Artificial Sequence
  Description of Artificial Sequence: Synthetic oligonucleotide
  Sense strand starting at position 389 of SEQ ID NO: 1886428
aggauuaaguugucaguca

SEQ ID NO: 2409047 - RNA, 19 nt, Artificial Sequence
  Description of Artificial Sequence: Synthetic oligonucleotide
  Antisense strand to SEQ ID NO: 2409046
ugacugacaacuuaauccu

SEQ ID NO: 2409048 - RNA, 19 nt, Artificial Sequence
  Description of Artificial Sequence: Synthetic oligonucleotide
  Sense strand starting at position 464 of SEQ ID NO: 1886428
gagggaaacucaguuugua

SEQ ID NO: 2409049 - RNA, 19 nt, Artificial Sequence
  Description of Artificial Sequence: Synthetic oligonucleotide
  Antisense strand to SEQ ID NO: 2409048
uacaaacugaguuucccuc

SEQ ID NO: 2409050 - RNA, 19 nt, Artificial Sequence
  Description of Artificial Sequence: Synthetic oligonucleotide
  Sense strand starting at position 500 of SEQ ID NO: 1886428
cucgauagguuauccuuga

SEQ ID NO: 2409051 - RNA, 19 nt, Artificial Sequence
  Description of Artificial Sequence: Synthetic oligonucleotide
  Antisense strand to SEQ ID NO: 2409050
ucaaggauaaccuaucgag

SEQ ID NO: 2409052 - RNA, 19 nt, Artificial Sequence
  Description of Artificial Sequence: Synthetic oligonucleotide
  Sense strand starting at position 504 of SEQ ID NO: 1886428
auagguuauccuugacgac

SEQ ID NO: 2409053 - RNA, 19 nt, Artificial Sequence
  Description of Artificial Sequence: Synthetic oligonucleotide
  Antisense strand to SEQ ID NO: 2409052
gucgucaaggauaaccuau

SEQ ID NO: 2409054 - RNA, 19 nt, Artificial Sequence
  Description of Artificial Sequence: Synthetic oligonucleotide
  Sense strand starting at position 529 of SEQ ID NO: 1886428
ccuggaaacucccuguuga

SEQ ID NO: 2409055 - RNA, 19 nt, Artificial Sequence
  Description of Artificial Sequence: Synthetic oligonucleotide
  Antisense strand to SEQ ID NO: 2409054
ucaacagggaguuuccagg

SEQ ID NO: 2409056 - RNA, 19 nt, Artificial Sequence
  Description of Artificial Sequence: Synthetic oligonucleotide
  Sense strand starting at position 530 of SEQ ID NO: 1886428
cuggaaacucccuguugau

SEQ ID NO: 2409057 - RNA, 19 nt, Artificial Sequence
  Description of Artificial Sequence: Synthetic oligonucleotide
  Antisense strand to SEQ ID NO: 2409056
aucaacagggaguuuccag

SEQ ID NO: 2409058 - RNA, 19 nt, Artificial Sequence
  Description of Artificial Sequence: Synthetic oligonucleotide
  Sense strand starting at position 537 of SEQ ID NO: 1886428
cucccuguugaugauuaau

SEQ ID NO: 2409059 - RNA, 19 nt, Artificial Sequence
  Description of Artificial Sequence: Synthetic oligonucleotide
  Antisense strand to SEQ ID NO: 2409058
auuaaucaucaacagggag

SEQ ID NO: 2409060 - RNA, 19 nt, Artificial Sequence
  Description of Artificial Sequence: Synthetic oligonucleotide
  Sense strand starting at position 539 of SEQ ID NO: 1886428
cccuguugaugauuaauua

SEQ ID NO: 2409061 - RNA, 19 nt, Artificial Sequence
  Description of Artificial Sequence: Synthetic oligonucleotide
  Antisense strand to SEQ ID NO: 2409060
uaauuaaucaucaacaggg

SEQ ID NO: 2409062 - RNA, 19 nt, Artificial Sequence
  Description of Artificial Sequence: Synthetic oligonucleotide
  Sense strand starting at position 540 of SEQ ID NO: 1886428
ccuguugaugauuaauuau

SEQ ID NO: 2409063 - RNA, 19 nt, Artificial Sequence
  Description of Artificial Sequence: Synthetic oligonucleotide
  Antisense strand to SEQ ID NO: 2409062
auaauuaaucaucaacagg

SEQ ID NO: 2409064 - RNA, 19 nt, Artificial Sequence
  Description of Artificial Sequence: Synthetic oligonucleotide
  Sense strand starting at position 697 of SEQ ID NO: 1886428
ccaggaucauugcuacuua

SEQ ID NO: 2409065 - RNA, 19 nt, Artificial Sequence
  Description of Artificial Sequence: Synthetic oligonucleotide
  Antisense strand to SEQ ID NO: 2409064
uaaguagcaaugauccugg

SEQ ID NO: 2409066 - RNA, 19 nt, Artificial Sequence
  Description of Artificial Sequence: Synthetic oligonucleotide
  Sense strand starting at position 713 of SEQ ID NO: 1886428
uuacaaggucuuugggaga

SEQ ID NO: 2409067 - RNA, 19 nt, Artificial Sequence
  Description of Artificial Sequence: Synthetic oligonucleotide
  Antisense strand to SEQ ID NO: 2409066
ucucccaaagaccuuguaa

SEQ ID NO: 2409068 - RNA, 19 nt, Artificial Sequence
  Description of Artificial Sequence: Synthetic oligonucleotide
  Sense strand starting at position 716 of SEQ ID NO: 1886428
caaggucuuugggagagau

SEQ ID NO: 2409069 - RNA, 19 nt, Artificial Sequence
  Description of Artificial Sequence: Synthetic oligonucleotide
  Antisense strand to SEQ ID NO: 2409068
aucucucccaaagaccuug

SEQ ID NO: 2409070 - RNA, 19 nt, Artificial Sequence
  Description of Artificial Sequence: Synthetic oligonucleotide
  Sense strand starting at position 788 of SEQ ID NO: 1886428
agaggaaaguggcuaucuu

SEQ ID NO: 2409071 - RNA, 19 nt, Artificial Sequence
  Description of Artificial Sequence: Synthetic oligonucleotide
  Antisense strand to SEQ ID NO: 2409070
aagauagccacuuuccucu

SEQ ID NO: 2409072 - RNA, 19 nt, Artificial Sequence
  Description of Artificial Sequence: Synthetic oligonucleotide
  Sense strand starting at position 789 of SEQ ID NO: 1886428
gaggaaaguggcuaucuuu

SEQ ID NO: 2409073 - RNA, 19 nt, Artificial Sequence
  Description of Artificial Sequence: Synthetic oligonucleotide
  Antisense strand to SEQ ID NO: 2409072
aaagauagccacuuuccuc

SEQ ID NO: 2409074 - RNA, 19 nt, Artificial Sequence
  Description of Artificial Sequence: Synthetic oligonucleotide
  Sense strand starting at position 928 of SEQ ID NO: 1886428
ggucuuagagccgacggau

SEQ ID NO: 2409075 - RNA, 19 nt, Artificial Sequence
  Description of Artificial Sequence: Synthetic oligonucleotide
  Antisense strand to SEQ ID NO: 2409074
auccgucggcucuaagacc

SEQ ID NO: 2409076 - RNA, 19 nt, Artificial Sequence
  Description of Artificial Sequence: Synthetic oligonucleotide
  Sense strand starting at position 992 of SEQ ID NO: 1886428
gggugauuggcucaaaguu

SEQ ID NO: 2409077 - RNA, 19 nt, Artificial Sequence
  Description of Artificial Sequence: Synthetic oligonucleotide
  Antisense strand to SEQ ID NO: 2409076
aacuuugagccaaucaccc

SEQ ID NO: 2409078 - RNA, 19 nt, Artificial Sequence
  Description of Artificial Sequence: Synthetic oligonucleotide
  Sense strand starting at position 3399 of SEQ ID NO: 1886428
aaguuaaguuauggaccaa

SEQ ID NO: 2409079 - RNA, 19 nt, Artificial Sequence
  Description of Artificial Sequence: Synthetic oligonucleotide
  Antisense strand to SEQ ID NO: 2409078
uugguccauaacuuaacuu

SEQ ID NO: 2409080 - RNA, 19 nt, Artificial Sequence
  Description of Artificial Sequence: Synthetic oligonucleotide
  Sense strand starting at position 3488 of SEQ ID NO: 1886428
auaugugcuguguguaauu

SEQ ID NO: 2409081 - RNA, 19 nt, Artificial Sequence
  Description of Artificial Sequence: Synthetic oligonucleotide
  Antisense strand to SEQ ID NO: 2409080
aauuacacacagcacauau

SEQ ID NO: 2409082 - RNA, 19 nt, Artificial Sequence
  Description of Artificial Sequence: Synthetic oligonucleotide
  Sense strand starting at position 3517 of SEQ ID NO: 1886428
ccaaccgugcuguacaaau

SEQ ID NO: 2409083 - RNA, 19 nt, Artificial Sequence
  Description of Artificial Sequence: Synthetic oligonucleotide
  Antisense strand to SEQ ID NO: 2409082
auuuguacagcacgguugg

SEQ ID NO: 2409084 - RNA, 19 nt, Artificial Sequence
  Description of Artificial Sequence: Synthetic oligonucleotide
  Sense strand starting at position 3525 of SEQ ID NO: 1886428
gcuguacaaauguguggau

SEQ ID NO: 2409085 - RNA, 19 nt, Artificial Sequence
  Description of Artificial Sequence: Synthetic oligonucleotide
  Antisense strand to SEQ ID NO: 2409084
auccacacauuuguacagc

SEQ ID NO: 2409086 - RNA, 19 nt, Artificial Sequence
  Description of Artificial Sequence: Synthetic oligonucleotide
  Sense strand starting at position 3528 of SEQ ID NO: 1886428
guacaaauguguggauuug

SEQ ID NO: 2409087 - RNA, 19 nt, Artificial Sequence
  Description of Artificial Sequence: Synthetic oligonucleotide
  Antisense strand to SEQ ID NO: 2409086
caaauccacacauuuguac

SEQ ID NO: 2409088 - RNA, 19 nt, Artificial Sequence
  Description of Artificial Sequence: Synthetic oligonucleotide
  Sense strand starting at position 3665 of SEQ ID NO: 1886428
ucaagaaaccgaugugggu

SEQ ID NO: 2409089 - RNA, 19 nt, Artificial Sequence
  Description of Artificial Sequence: Synthetic oligonucleotide
  Antisense strand to SEQ ID NO: 2409088
acccacaucgguuucuuga

SEQ ID NO: 2409090 - RNA, 19 nt, Artificial Sequence
  Description of Artificial Sequence: Synthetic oligonucleotide
  Sense strand starting at position 3685 of SEQ ID NO: 1886428
uuguuuccuguacaauuau

SEQ ID NO: 2409091 - RNA, 19 nt, Artificial Sequence
  Description of Artificial Sequence: Synthetic oligonucleotide
  Antisense strand to SEQ ID NO: 2409090
auaauuguacaggaaacaa

SEQ ID NO: 2409092 - RNA, 19 nt, Artificial Sequence
  Description of Artificial Sequence: Synthetic oligonucleotide
  Sense strand starting at position 3691 of SEQ ID NO: 1886428
ccuguacaauuaugagaua

SEQ ID NO: 2409093 - RNA, 19 nt, Artificial Sequence
  Description of Artificial Sequence: Synthetic oligonucleotide
  Antisense strand to SEQ ID NO: 2409092
uaucucauaauuguacagg

SEQ ID NO: 2409094 - RNA, 19 nt, Artificial Sequence
  Description of Artificial Sequence: Synthetic oligonucleotide
  Sense strand starting at position 3692 of SEQ ID NO: 1886428
cuguacaauuaugagauau

SEQ ID NO: 2409095 - RNA, 19 nt, Artificial Sequence
  Description of Artificial Sequence: Synthetic oligonucleotide
  Antisense strand to SEQ ID NO: 2409094
auaucucauaauuguacag

SEQ ID NO: 2409096 - RNA, 19 nt, Artificial Sequence
  Description of Artificial Sequence: Synthetic oligonucleotide
  Sense strand starting at position 3831 of SEQ ID NO: 1886428
uagguuccacccugaguau

SEQ ID NO: 2409097 - RNA, 19 nt, Artificial Sequence
  Description of Artificial Sequence: Synthetic oligonucleotide
  Antisense strand to SEQ ID NO: 2409096
auacucaggguggaaccua

SEQ ID NO: 2409098 - RNA, 19 nt, Artificial Sequence
  Description of Artificial Sequence: Synthetic oligonucleotide
  Sense strand starting at position 3832 of SEQ ID NO: 1886428
agguuccacccugaguauu

SEQ ID NO: 2409099 - RNA, 19 nt, Artificial Sequence
  Description of Artificial Sequence: Synthetic oligonucleotide
  Antisense strand to SEQ ID NO: 2409098
aauacucaggguggaaccu

SEQ ID NO: 2409100 - RNA, 19 nt, Artificial Sequence
  Description of Artificial Sequence: Synthetic oligonucleotide
  Sense strand starting at position 3899 of SEQ ID NO: 1886428
guuugucuuacguggucuu

SEQ ID NO: 2409101 - RNA, 19 nt, Artificial Sequence
  Description of Artificial Sequence: Synthetic oligonucleotide
  Antisense strand to SEQ ID NO: 2409100
aagaccacguaagacaaac

SEQ ID NO: 2409102 - RNA, 19 nt, Artificial Sequence
  Description of Artificial Sequence: Synthetic oligonucleotide
  Sense strand starting at position 3900 of SEQ ID NO: 1886428
uuugucuuacguggucuua

SEQ ID NO: 2409103 - RNA, 19 nt, Artificial Sequence
  Description of Artificial Sequence: Synthetic oligonucleotide
  Antisense strand to SEQ ID NO: 2409102
uaagaccacguaagacaaa

SEQ ID NO: 2409104 - RNA, 19 nt, Artificial Sequence
  Description of Artificial Sequence: Synthetic oligonucleotide
  Sense strand starting at position 3902 of SEQ ID NO: 1886428
ugucuuacguggucuuaau

SEQ ID NO: 2409105 - RNA, 19 nt, Artificial Sequence
  Description of Artificial Sequence: Synthetic oligonucleotide
  Antisense strand to SEQ ID NO: 2409104
auuaagaccacguaagaca

SEQ ID NO: 2409106 - RNA, 19 nt, Artificial Sequence
  Description of Artificial Sequence: Synthetic oligonucleotide
  Sense strand starting at position 3909 of SEQ ID NO: 1886428
cguggucuuaaucguugua

SEQ ID NO: 2409107 - RNA, 19 nt, Artificial Sequence
  Description of Artificial Sequence: Synthetic oligonucleotide
  Antisense strand to SEQ ID NO: 2409106
uacaacgauuaagaccacg

SEQ ID NO: 2409108 - RNA, 19 nt, Artificial Sequence
  Description of Artificial Sequence: Synthetic oligonucleotide
  Sense strand starting at position 3911 of SEQ ID NO: 1886428
uggucuuaaucguuguacu

SEQ ID NO: 2409109 - RNA, 19 nt, Artificial Sequence
  Description of Artificial Sequence: Synthetic oligonucleotide
  Antisense strand to SEQ ID NO: 2409108
aguacaacgauuaagacca

SEQ ID NO: 2409110 - RNA, 19 nt, Artificial Sequence
  Description of Artificial Sequence: Synthetic oligonucleotide
  Sense strand starting at position 3912 of SEQ ID NO: 1886428
ggucuuaaucguuguacuu

SEQ ID NO: 2409111 - RNA, 19 nt, Artificial Sequence
  Description of Artificial Sequence: Synthetic oligonucleotide
  Antisense strand to SEQ ID NO: 2409110
aaguacaacgauuaagacc

SEQ ID NO: 2409112 - RNA, 19 nt, Artificial Sequence
  Description of Artificial Sequence: Synthetic oligonucleotide
  Sense strand starting at position 3971 of SEQ ID NO: 1886428
uggacaguguguuuguguu

SEQ ID NO: 2409113 - RNA, 19 nt, Artificial Sequence
  Description of Artificial Sequence: Synthetic oligonucleotide
  Antisense strand to SEQ ID NO: 2409112
aacacaaacacacugucca

SEQ ID NO: 2409114 - RNA, 19 nt, Artificial Sequence
  Description of Artificial Sequence: Synthetic oligonucleotide
  Sense strand starting at position 3978 of SEQ ID NO: 1886428
uguguuuguguuguugcau

SEQ ID NO: 2409115 - RNA, 19 nt, Artificial Sequence
  Description of Artificial Sequence: Synthetic oligonucleotide
  Antisense strand to SEQ ID NO: 2409114
augcaacaacacaaacaca

SEQ ID NO: 2409116 - RNA, 19 nt, Artificial Sequence
  Description of Artificial Sequence: Synthetic oligonucleotide
  Sense strand starting at position 89 of SEQ ID NO: 1886429
gacucugguucuguugaua

SEQ ID NO: 2409117 - RNA, 19 nt, Artificial Sequence
  Description of Artificial Sequence: Synthetic oligonucleotide
  Antisense strand to SEQ ID NO: 2409116
uaucaacagaaccagaguc

SEQ ID NO: 2409118 - RNA, 19 nt, Artificial Sequence
  Description of Artificial Sequence: Synthetic oligonucleotide
  Sense strand starting at position 108 of SEQ ID NO: 1886429
aaauaagaguuugaguaag

SEQ ID NO: 2409119 - RNA, 19 nt, Artificial Sequence
  Description of Artificial Sequence: Synthetic oligonucleotide
  Antisense strand to SEQ ID NO: 2409118
cuuacucaaacucuuauuu

SEQ ID NO: 2409120 - RNA, 19 nt, Artificial Sequence
  Description of Artificial Sequence: Synthetic oligonucleotide
  Sense strand starting at position 110 of SEQ ID NO: 1886429
auaagaguuugaguaagug

SEQ ID NO: 2409121 - RNA, 19 nt, Artificial Sequence
  Description of Artificial Sequence: Synthetic oligonucleotide
  Antisense strand to SEQ ID NO: 2409120
cacuuacucaaacucuuau

SEQ ID NO: 2409122 - RNA, 19 nt, Artificial Sequence
  Description of Artificial Sequence: Synthetic oligonucleotide
  Sense strand starting at position 120 of SEQ ID NO: 1886429
gaguaagugucuccaacca

SEQ ID NO: 2409123 - RNA, 19 nt, Artificial Sequence
  Description of Artificial Sequence: Synthetic oligonucleotide
  Antisense strand to SEQ ID NO: 2409122
ugguuggagacacuuacuc

SEQ ID NO: 2409124 - RNA, 19 nt, Artificial Sequence
  Description of Artificial Sequence: Synthetic oligonucleotide
  Sense strand starting at position 468 of SEQ ID NO: 1886429
gacaaauauuuguggauca

SEQ ID NO: 2409125 - RNA, 19 nt, Artificial Sequence
  Description of Artificial Sequence: Synthetic oligonucleotide
  Antisense strand to SEQ ID NO: 2409124
ugauccacaaauauuuguc

SEQ ID NO: 2409126 - RNA, 19 nt, Artificial Sequence
  Description of Artificial Sequence: Synthetic oligonucleotide
  Sense strand starting at position 479 of SEQ ID NO: 1886429
guggaucaguccuuuaagu

SEQ ID NO: 2409127 - RNA, 19 nt, Artificial Sequence
  Description of Artificial Sequence: Synthetic oligonucleotide
  Antisense strand to SEQ ID NO: 2409126
acuuaaaggacugauccac

SEQ ID NO: 2409128 - RNA, 19 nt, Artificial Sequence
  Description of Artificial Sequence: Synthetic oligonucleotide
  Sense strand starting at position 481 of SEQ ID NO: 1886429
ggaucaguccuuuaaguga

SEQ ID NO: 2409129 - RNA, 19 nt, Artificial Sequence
  Description of Artificial Sequence: Synthetic oligonucleotide
  Antisense strand to SEQ ID NO: 2409128
ucacuuaaaggacugaucc

SEQ ID NO: 2409130 - RNA, 19 nt, Artificial Sequence
  Description of Artificial Sequence: Synthetic oligonucleotide
  Sense strand starting at position 502 of SEQ ID NO: 1886429
cucuucugccagugucaua

SEQ ID NO: 2409131 - RNA, 19 nt, Artificial Sequence
  Description of Artificial Sequence: Synthetic oligonucleotide
  Antisense strand to SEQ ID NO: 2409130
uaugacacuggcagaagag

SEQ ID NO: 2409132 - RNA, 19 nt, Artificial Sequence
  Description of Artificial Sequence: Synthetic oligonucleotide
  Sense strand starting at position 515 of SEQ ID NO: 1886429
gucauaagugaagauguuu

SEQ ID NO: 2409133 - RNA, 19 nt, Artificial Sequence
  Description of Artificial Sequence: Synthetic oligonucleotide
  Antisense strand to SEQ ID NO: 2409132
aaacaucuucacuuaugac

SEQ ID NO: 2409134 - RNA, 19 nt, Artificial Sequence
  Description of Artificial Sequence: Synthetic oligonucleotide
  Sense strand starting at position 520 of SEQ ID NO: 1886429
aagugaagauguuucucaa

SEQ ID NO: 2409135 - RNA, 19 nt, Artificial Sequence
  Description of Artificial Sequence: Synthetic oligonucleotide
  Antisense strand to SEQ ID NO: 2409134
uugagaaacaucuucacuu

SEQ ID NO: 2409136 - RNA, 19 nt, Artificial Sequence
  Description of Artificial Sequence: Synthetic oligonucleotide
  Sense strand starting at position 523 of SEQ ID NO: 1886429
ugaagauguuucucaaagu

SEQ ID NO: 2409137 - RNA, 19 nt, Artificial Sequence
  Description of Artificial Sequence: Synthetic oligonucleotide
  Antisense strand to SEQ ID NO: 2409136
acuuugagaaacaucuuca

SEQ ID NO: 2409138 - RNA, 19 nt, Artificial Sequence
  Description of Artificial Sequence: Synthetic oligonucleotide
  Sense strand starting at position 680 of SEQ ID NO: 1886429
cugugcuucucacuggaau

SEQ ID NO: 2409139 - RNA, 19 nt, Artificial Sequence
  Description of Artificial Sequence: Synthetic oligonucleotide
  Antisense strand to SEQ ID NO: 2409138
auuccagugagaagcacag

SEQ ID NO: 2409140 - RNA, 19 nt, Artificial Sequence
  Description of Artificial Sequence: Synthetic oligonucleotide
  Sense strand starting at position 845 of SEQ ID NO: 1886429
cuuguuuaagcucaaguga

SEQ ID NO: 2409141 - RNA, 19 nt, Artificial Sequence
  Description of Artificial Sequence: Synthetic oligonucleotide
  Antisense strand to SEQ ID NO: 2409140
ucacuugagcuuaaacaag

SEQ ID NO: 2409142 - RNA, 19 nt, Artificial Sequence
  Description of Artificial Sequence: Synthetic oligonucleotide
  Sense strand starting at position 1164 of SEQ ID NO: 1886429
ccaauuccaccuggaagua

SEQ ID NO: 2409143 - RNA, 19 nt, Artificial Sequence
  Description of Artificial Sequence: Synthetic oligonucleotide
  Antisense strand to SEQ ID NO: 2409142
uacuuccagguggaauugg

SEQ ID NO: 2409144 - RNA, 19 nt, Artificial Sequence
  Description of Artificial Sequence: Synthetic oligonucleotide
  Sense strand starting at position 1176 of SEQ ID NO: 1886429
ggaaguauuuaugauacug

SEQ ID NO: 2409145 - RNA, 19 nt, Artificial Sequence
  Description of Artificial Sequence: Synthetic oligonucleotide
  Antisense strand to SEQ ID NO: 2409144
caguaucauaaauacuucc

SEQ ID NO: 2409146 - RNA, 19 nt, Artificial Sequence
  Description of Artificial Sequence: Synthetic oligonucleotide
  Sense strand starting at position 1232 of SEQ ID NO: 1886429
ugaaaugugucauacauuu

SEQ ID NO: 2409147 - RNA, 19 nt, Artificial Sequence
  Description of Artificial Sequence: Synthetic oligonucleotide
  Antisense strand to SEQ ID NO: 2409146
aaauguaugacacauuuca

SEQ ID NO: 2409148 - RNA, 19 nt, Artificial Sequence
  Description of Artificial Sequence: Synthetic oligonucleotide
  Sense strand starting at position 1241 of SEQ ID NO: 1886429
ucauacauuuggcaaagga

SEQ ID NO: 2409149 - RNA, 19 nt, Artificial Sequence
  Description of Artificial Sequence: Synthetic oligonucleotide
  Antisense strand to SEQ ID NO: 2409148
uccuuugccaaauguauga

SEQ ID NO: 2409150 - RNA, 19 nt, Artificial Sequence
  Description of Artificial Sequence: Synthetic oligonucleotide
  Sense strand starting at position 1484 of SEQ ID NO: 1886429
uuaauuagagcagaugcua

SEQ ID NO: 2409151 - RNA, 19 nt, Artificial Sequence
  Description of Artificial Sequence: Synthetic oligonucleotide
  Antisense strand to SEQ ID NO: 2409150
uagcaucugcucuaauuaa

SEQ ID NO: 2409152 - RNA, 19 nt, Artificial Sequence
  Description of Artificial Sequence: Synthetic oligonucleotide
  Sense strand starting at position 1492 of SEQ ID NO: 1886429
agcagaugcuaacuuaauc

SEQ ID NO: 2409153 - RNA, 19 nt, Artificial Sequence
  Description of Artificial Sequence: Synthetic oligonucleotide
  Antisense strand to SEQ ID NO: 2409152
gauuaaguuagcaucugcu

SEQ ID NO: 2409154 - RNA, 19 nt, Artificial Sequence
  Description of Artificial Sequence: Synthetic oligonucleotide
  Sense strand starting at position 1742 of SEQ ID NO: 1886429
caucaaagccugugaaguu

SEQ ID NO: 2409155 - RNA, 19 nt, Artificial Sequence
  Description of Artificial Sequence: Synthetic oligonucleotide
  Antisense strand to SEQ ID NO: 2409154
aacuucacaggcuuugaug

SEQ ID NO: 2409156 - RNA, 19 nt, Artificial Sequence
  Description of Artificial Sequence: Synthetic oligonucleotide
  Sense strand starting at position 1751 of SEQ ID NO: 1886429
cugugaaguuucccuacau

SEQ ID NO: 2409157 - RNA, 19 nt, Artificial Sequence
  Description of Artificial Sequence: Synthetic oligonucleotide
  Antisense strand to SEQ ID NO: 2409156
auguagggaaacuucacag

SEQ ID NO: 2409158 - RNA, 19 nt, Artificial Sequence
  Description of Artificial Sequence: Synthetic oligonucleotide
  Sense strand starting at position 1752 of SEQ ID NO: 1886429
ugugaaguuucccuacauc

SEQ ID NO: 2409159 - RNA, 19 nt, Artificial Sequence
  Description of Artificial Sequence: Synthetic oligonucleotide
  Antisense strand to SEQ ID NO: 2409158
gauguagggaaacuucaca

SEQ ID NO: 2409160 - RNA, 19 nt, Artificial Sequence
  Description of Artificial Sequence: Synthetic oligonucleotide
  Sense strand starting at position 1997 of SEQ ID NO: 1886429
ugagaccuucuauguuaga

SEQ ID NO: 2409161 - RNA, 19 nt, Artificial Sequence
  Description of Artificial Sequence: Synthetic oligonucleotide
  Antisense strand to SEQ ID NO: 2409160
ucuaacauagaaggucuca

SEQ ID NO: 2409162 - RNA, 19 nt, Artificial Sequence
  Description of Artificial Sequence: Synthetic oligonucleotide
  Sense strand starting at position 2035 of SEQ ID NO: 1886429
ucaauugacuugguugacu

SEQ ID NO: 2409163 - RNA, 19 nt, Artificial Sequence
  Description of Artificial Sequence: Synthetic oligonucleotide
  Antisense strand to SEQ ID NO: 2409162
agucaaccaagucaauuga

SEQ ID NO: 2409164 - RNA, 19 nt, Artificial Sequence
  Description of Artificial Sequence: Synthetic oligonucleotide
  Sense strand starting at position 2037 of SEQ ID NO: 1886429
aauugacuugguugacuga

SEQ ID NO: 2409165 - RNA, 19 nt, Artificial Sequence
  Description of Artificial Sequence: Synthetic oligonucleotide
  Antisense strand to SEQ ID NO: 2409164
ucagucaaccaagucaauu

SEQ ID NO: 2409166 - RNA, 19 nt, Artificial Sequence
  Description of Artificial Sequence: Synthetic oligonucleotide
  Sense strand starting at position 2076 of SEQ ID NO: 1886429
gggauagauucagggaaga

SEQ ID NO: 2409167 - RNA, 19 nt, Artificial Sequence
  Description of Artificial Sequence: Synthetic oligonucleotide
  Antisense strand to SEQ ID NO: 2409166
ucuucccugaaucuauccc

SEQ ID NO: 2409168 - RNA, 19 nt, Artificial Sequence
  Description of Artificial Sequence: Synthetic oligonucleotide
  Sense strand starting at position 2101 of SEQ ID NO: 1886429
gcugaaugagucuguguuu

SEQ ID NO: 2409169 - RNA, 19 nt, Artificial Sequence
  Description of Artificial Sequence: Synthetic oligonucleotide
  Antisense strand to SEQ ID NO: 2409168
aaacacagacucauucagc

SEQ ID NO: 2409170 - RNA, 19 nt, Artificial Sequence
  Description of Artificial Sequence: Synthetic oligonucleotide
  Sense strand starting at position 2314 of SEQ ID NO: 1886429
agcaguugugcacacaaua

SEQ ID NO: 2409171 - RNA, 19 nt, Artificial Sequence
  Description of Artificial Sequence: Synthetic oligonucleotide
  Antisense strand to SEQ ID NO: 2409170
uauugugugcacaacugcu

SEQ ID NO: 2409172 - RNA, 19 nt, Artificial Sequence
  Description of Artificial Sequence: Synthetic oligonucleotide
  Sense strand starting at position 2334 of SEQ ID NO: 1886429
cagauaauauucuccgguu

SEQ ID NO: 2409173 - RNA, 19 nt, Artificial Sequence
  Description of Artificial Sequence: Synthetic oligonucleotide
  Antisense strand to SEQ ID NO: 2409172
aaccggagaauauuaucug

SEQ ID NO: 2409174 - RNA, 19 nt, Artificial Sequence
  Description of Artificial Sequence: Synthetic oligonucleotide
  Sense strand starting at position 2492 of SEQ ID NO: 1886429
gaauuaugaugucauaaug

SEQ ID NO: 2409175 - RNA, 19 nt, Artificial Sequence
  Description of Artificial Sequence: Synthetic oligonucleotide
  Antisense strand to SEQ ID NO: 2409174
cauuaugacaucauaauuc

SEQ ID NO: 2409176 - RNA, 19 nt, Artificial Sequence
  Description of Artificial Sequence: Synthetic oligonucleotide
  Sense strand starting at position 2585 of SEQ ID NO: 1886429
gugugacaucaugaugcau

SEQ ID NO: 2409177 - RNA, 19 nt, Artificial Sequence
  Description of Artificial Sequence: Synthetic oligonucleotide
  Antisense strand to SEQ ID NO: 2409176
augcaucaugaugucacac

SEQ ID NO: 2409178 - RNA, 19 nt, Artificial Sequence
  Description of Artificial Sequence: Synthetic oligonucleotide
  Sense strand starting at position 2591 of SEQ ID NO: 1886429
caucaugaugcaugugaau

SEQ ID NO: 2409179 - RNA, 19 nt, Artificial Sequence
  Description of Artificial Sequence: Synthetic oligonucleotide
  Antisense strand to SEQ ID NO: 2409178
auucacaugcaucaugaug

SEQ ID NO: 2409180 - RNA, 19 nt, Artificial Sequence
  Description of Artificial Sequence: Synthetic oligonucleotide
  Sense strand starting at position 2598 of SEQ ID NO: 1886429
augcaugugaauuaugaug

SEQ ID NO: 2409181 - RNA, 19 nt, Artificial Sequence
  Description of Artificial Sequence: Synthetic oligonucleotide
  Antisense strand to SEQ ID NO: 2409180
caucauaauucacaugcau

SEQ ID NO: 2409182 - RNA, 19 nt, Artificial Sequence
  Description of Artificial Sequence: Synthetic oligonucleotide
  Sense strand starting at position 3106 of SEQ ID NO: 1886429
auggcuaaaugauugcauu

SEQ ID NO: 2409183 - RNA, 19 nt, Artificial Sequence
  Description of Artificial Sequence: Synthetic oligonucleotide
  Antisense strand to SEQ ID NO: 2409182
aaugcaaucauuuagccau

SEQ ID NO: 2409184 - RNA, 19 nt, Artificial Sequence
  Description of Artificial Sequence: Synthetic oligonucleotide
  Sense strand starting at position 3351 of SEQ ID NO: 1886429
uucguuaaauuccuuguua

SEQ ID NO: 2409185 - RNA, 19 nt, Artificial Sequence
  Description of Artificial Sequence: Synthetic oligonucleotide
  Antisense strand to SEQ ID NO: 2409184
uaacaaggaauuuaacgaa

SEQ ID NO: 2409186 - RNA, 19 nt, Artificial Sequence
  Description of Artificial Sequence: Synthetic oligonucleotide
  Sense strand starting at position 3352 of SEQ ID NO: 1886429
ucguuaaauuccuuguuau

SEQ ID NO: 2409187 - RNA, 19 nt, Artificial Sequence
  Description of Artificial Sequence: Synthetic oligonucleotide
  Antisense strand to SEQ ID NO: 2409186
auaacaaggaauuuaacga

SEQ ID NO: 2409188 - RNA, 19 nt, Artificial Sequence
  Description of Artificial Sequence: Synthetic oligonucleotide
  Sense strand starting at position 3353 of SEQ ID NO: 1886429
cguuaaauuccuuguuauu

SEQ ID NO: 2409189 - RNA, 19 nt, Artificial Sequence
  Description of Artificial Sequence: Synthetic oligonucleotide
  Antisense strand to SEQ ID NO: 2409188
aauaacaaggaauuuaacg

SEQ ID NO: 2409190 - RNA, 19 nt, Artificial Sequence
  Description of Artificial Sequence: Synthetic oligonucleotide
  Sense strand starting at position 3364 of SEQ ID NO: 1886429
uuguuauugugugucauaa

SEQ ID NO: 2409191 - RNA, 19 nt, Artificial Sequence
  Description of Artificial Sequence: Synthetic oligonucleotide
  Antisense strand to SEQ ID NO: 2409190
uuaugacacacaauaacaa

SEQ ID NO: 2409192 - RNA, 19 nt, Artificial Sequence
  Description of Artificial Sequence: Synthetic oligonucleotide
  Sense strand starting at position 3690 of SEQ ID NO: 1886429
gggagcaaauaguuaucua

SEQ ID NO: 2409193 - RNA, 19 nt, Artificial Sequence
  Description of Artificial Sequence: Synthetic oligonucleotide
  Antisense strand to SEQ ID NO: 2409192
uagauaacuauuugcuccc

SEQ ID NO: 2409194 - RNA, 19 nt, Artificial Sequence
  Description of Artificial Sequence: Synthetic oligonucleotide
  Sense strand starting at position 3956 of SEQ ID NO: 1886429
cugggcccuucuucuaaau

SEQ ID NO: 2409195 - RNA, 19 nt, Artificial Sequence
  Description of Artificial Sequence: Synthetic oligonucleotide
  Antisense strand to SEQ ID NO: 2409194
auuuagaagaagggcccag

SEQ ID NO: 2409196 - RNA, 19 nt, Artificial Sequence
  Description of Artificial Sequence: Synthetic oligonucleotide
  Sense strand starting at position 194 of SEQ ID NO: 1886430
gaggaacugugacucaguu

SEQ ID NO: 2409197 - RNA, 19 nt, Artificial Sequence
  Description of Artificial Sequence: Synthetic oligonucleotide
  Antisense strand to SEQ ID NO: 2409196
aacugagucacaguuccuc

SEQ ID NO: 2409198 - RNA, 19 nt, Artificial Sequence
  Description of Artificial Sequence: Synthetic oligonucleotide
  Sense strand starting at position 287 of SEQ ID NO: 1886430
augauucuucugugauaaa

SEQ ID NO: 2409199 - RNA, 19 nt, Artificial Sequence
  Description of Artificial Sequence: Synthetic oligonucleotide
  Antisense strand to SEQ ID NO: 2409198
uuuaucacagaagaaucau

SEQ ID NO: 2409200 - RNA, 19 nt, Artificial Sequence
  Description of Artificial Sequence: Synthetic oligonucleotide
  Sense strand starting at position 361 of SEQ ID NO: 1886430
ggagaauagugcuuuaaca

SEQ ID NO: 2409201 - RNA, 19 nt, Artificial Sequence
  Description of Artificial Sequence: Synthetic oligonucleotide
  Antisense strand to SEQ ID NO: 2409200
uguuaaagcacuauucucc

SEQ ID NO: 2409202 - RNA, 19 nt, Artificial Sequence
  Description of Artificial Sequence: Synthetic oligonucleotide
  Sense strand starting at position 363 of SEQ ID NO: 1886430
agaauagugcuuuaacauu

SEQ ID NO: 2409203 - RNA, 19 nt, Artificial Sequence
  Description of Artificial Sequence: Synthetic oligonucleotide
  Antisense strand to SEQ ID NO: 2409202
aauguuaaagcacuauucu

SEQ ID NO: 2409204 - RNA, 19 nt, Artificial Sequence
  Description of Artificial Sequence: Synthetic oligonucleotide
  Sense strand starting at position 423 of SEQ ID NO: 1886430
cuguacacucaauguggaa

SEQ ID NO: 2409205 - RNA, 19 nt, Artificial Sequence
  Description of Artificial Sequence: Synthetic oligonucleotide
  Antisense strand to SEQ ID NO: 2409204
uuccacauugaguguacag

SEQ ID NO: 2409206 - RNA, 19 nt, Artificial Sequence
  Description of Artificial Sequence: Synthetic oligonucleotide
  Sense strand starting at position 425 of SEQ ID NO: 1886430
guacacucaauguggaaga

SEQ ID NO: 2409207 - RNA, 19 nt, Artificial Sequence
  Description of Artificial Sequence: Synthetic oligonucleotide
  Antisense strand to SEQ ID NO: 2409206
ucuuccacauugaguguac

SEQ ID NO: 2409208 - RNA, 19 nt, Artificial Sequence
  Description of Artificial Sequence: Synthetic oligonucleotide
  Sense strand starting at position 560 of SEQ ID NO: 1886430
auucucugugcuuggaaua

SEQ ID NO: 2409209 - RNA, 19 nt, Artificial Sequence
  Description of Artificial Sequence: Synthetic oligonucleotide
  Antisense strand to SEQ ID NO: 2409208
uauuccaagcacagagaau

SEQ ID NO: 2409210 - RNA, 19 nt, Artificial Sequence
  Description of Artificial Sequence: Synthetic oligonucleotide
  Sense strand starting at position 561 of SEQ ID NO: 1886430
uucucugugcuuggaauaa

SEQ ID NO: 2409211 - RNA, 19 nt, Artificial Sequence
  Description of Artificial Sequence: Synthetic oligonucleotide
  Antisense strand to SEQ ID NO: 2409210
uuauuccaagcacagagaa

SEQ ID NO: 2409212 - RNA, 19 nt, Artificial Sequence
  Description of Artificial Sequence: Synthetic oligonucleotide
  Sense strand starting at position 617 of SEQ ID NO: 1886430
ugacuauucucaucucgca

SEQ ID NO: 2409213 - RNA, 19 nt, Artificial Sequence
  Description of Artificial Sequence: Synthetic oligonucleotide
  Antisense strand to SEQ ID NO: 2409212
ugcgagaugagaauaguca

SEQ ID NO: 2409214 - RNA, 19 nt, Artificial Sequence
  Description of Artificial Sequence: Synthetic oligonucleotide
  Sense strand starting at position 655 of SEQ ID NO: 1886430
cuguuucuccacgacauua

SEQ ID NO: 2409215 - RNA, 19 nt, Artificial Sequence
  Description of Artificial Sequence: Synthetic oligonucleotide
  Antisense strand to SEQ ID NO: 2409214
uaaugucguggagaaacag

SEQ ID NO: 2409216 - RNA, 19 nt, Artificial Sequence
  Description of Artificial Sequence: Synthetic oligonucleotide
  Sense strand starting at position 699 of SEQ ID NO: 1886430
gcacuuaaccguuugcuuu

SEQ ID NO: 2409217 - RNA, 19 nt, Artificial Sequence
  Description of Artificial Sequence: Synthetic oligonucleotide
  Antisense strand to SEQ ID NO: 2409216
aaagcaaacgguuaagugc

SEQ ID NO: 2409218 - RNA, 19 nt, Artificial Sequence
  Description of Artificial Sequence: Synthetic oligonucleotide
  Sense strand starting at position 793 of SEQ ID NO: 1886430
agagaagccucccugaucu

SEQ ID NO: 2409219 - RNA, 19 nt, Artificial Sequence
  Description of Artificial Sequence: Synthetic oligonucleotide
  Antisense strand to SEQ ID NO: 2409218
agaucagggaggcuucucu

SEQ ID NO: 2409220 - RNA, 19 nt, Artificial Sequence
  Description of Artificial Sequence: Synthetic oligonucleotide
  Sense strand starting at position 857 of SEQ ID NO: 1886430
cugaaauugucuucuaugu

SEQ ID NO: 2409221 - RNA, 19 nt, Artificial Sequence
  Description of Artificial Sequence: Synthetic oligonucleotide
  Antisense strand to SEQ ID NO: 2409220
acauagaagacaauuucag

SEQ ID NO: 2409222 - RNA, 19 nt, Artificial Sequence
  Description of Artificial Sequence: Synthetic oligonucleotide
  Sense strand starting at position 949 of SEQ ID NO: 1886430
agauuucucuaugugcuua

SEQ ID NO: 2409223 - RNA, 19 nt, Artificial Sequence
  Description of Artificial Sequence: Synthetic oligonucleotide
  Antisense strand to SEQ ID NO: 2409222
uaagcacauagagaaaucu

SEQ ID NO: 2409224 - RNA, 19 nt, Artificial Sequence
  Description of Artificial Sequence: Synthetic oligonucleotide
  Sense strand starting at position 991 of SEQ ID NO: 1886430
ucaaauaaucuguguguug

SEQ ID NO: 2409225 - RNA, 19 nt, Artificial Sequence
  Description of Artificial Sequence: Synthetic oligonucleotide
  Antisense strand to SEQ ID NO: 2409224
caacacacagauuauuuga

SEQ ID NO: 2409226 - RNA, 19 nt, Artificial Sequence
  Description of Artificial Sequence: Synthetic oligonucleotide
  Sense strand starting at position 992 of SEQ ID NO: 1886430
caaauaaucuguguguuga

SEQ ID NO: 2409227 - RNA, 19 nt, Artificial Sequence
  Description of Artificial Sequence: Synthetic oligonucleotide
  Antisense strand to SEQ ID NO: 2409226
ucaacacacagauuauuug

SEQ ID NO: 2409228 - RNA, 19 nt, Artificial Sequence
  Description of Artificial Sequence: Synthetic oligonucleotide
  Sense strand starting at position 993 of SEQ ID NO: 1886430
aaauaaucuguguguugau

SEQ ID NO: 2409229 - RNA, 19 nt, Artificial Sequence
  Description of Artificial Sequence: Synthetic oligonucleotide
  Antisense strand to SEQ ID NO: 2409228
aucaacacacagauuauuu

SEQ ID NO: 2409230 - RNA, 19 nt, Artificial Sequence
  Description of Artificial Sequence: Synthetic oligonucleotide
  Sense strand starting at position 994 of SEQ ID NO: 1886430
aauaaucuguguguugauu

SEQ ID NO: 2409231 - RNA, 19 nt, Artificial Sequence
  Description of Artificial Sequence: Synthetic oligonucleotide
  Antisense strand to SEQ ID NO: 2409230
aaucaacacacagauuauu

SEQ ID NO: 2409232 - RNA, 19 nt, Artificial Sequence
  Description of Artificial Sequence: Synthetic oligonucleotide
  Sense strand starting at position 1918 of SEQ ID NO: 1886430
ggacuuaaaugcuugauaa

SEQ ID NO: 2409233 - RNA, 19 nt, Artificial Sequence
  Description of Artificial Sequence: Synthetic oligonucleotide
  Antisense strand to SEQ ID NO: 2409232
uuaucaagcauuuaagucc

SEQ ID NO: 2409234 - RNA, 19 nt, Artificial Sequence
  Description of Artificial Sequence: Synthetic oligonucleotide
  Sense strand starting at position 2155 of SEQ ID NO: 1886430
ucugcuagaugcucuagaa

SEQ ID NO: 2409235 - RNA, 19 nt, Artificial Sequence
  Description of Artificial Sequence: Synthetic oligonucleotide
  Antisense strand to SEQ ID NO: 2409234
uucuagagcaucuagcaga

SEQ ID NO: 2409236 - RNA, 19 nt, Artificial Sequence
  Description of Artificial Sequence: Synthetic oligonucleotide
  Sense strand starting at position 2205 of SEQ ID NO: 1886430
cugggaguuaaugguuuga

SEQ ID NO: 2409237 - RNA, 19 nt, Artificial Sequence
  Description of Artificial Sequence: Synthetic oligonucleotide
  Antisense strand to SEQ ID NO: 2409236
ucaaaccauuaacucccag

SEQ ID NO: 2409238 - RNA, 19 nt, Artificial Sequence
  Description of Artificial Sequence: Synthetic oligonucleotide
  Sense strand starting at position 2207 of SEQ ID NO: 1886430
gggaguuaaugguuugaag

SEQ ID NO: 2409239 - RNA, 19 nt, Artificial Sequence
  Description of Artificial Sequence: Synthetic oligonucleotide
  Antisense strand to SEQ ID NO: 2409238
cuucaaaccauuaacuccc

SEQ ID NO: 2409240 - RNA, 19 nt, Artificial Sequence
  Description of Artificial Sequence: Synthetic oligonucleotide
  Sense strand starting at position 2209 of SEQ ID NO: 1886430
gaguuaaugguuugaagac

SEQ ID NO: 2409241 - RNA, 19 nt, Artificial Sequence
  Description of Artificial Sequence: Synthetic oligonucleotide
  Antisense strand to SEQ ID NO: 2409240
gucuucaaaccauuaacuc

SEQ ID NO: 2409242 - RNA, 19 nt, Artificial Sequence
  Description of Artificial Sequence: Synthetic oligonucleotide
  Sense strand starting at position 2747 of SEQ ID NO: 1886430
ucauuacugcaaggacagu

SEQ ID NO: 2409243 - RNA, 19 nt, Artificial Sequence
  Description of Artificial Sequence: Synthetic oligonucleotide
  Antisense strand to SEQ ID NO: 2409242
acuguccuugcaguaauga

SEQ ID NO: 2409244 - RNA, 19 nt, Artificial Sequence
  Description of Artificial Sequence: Synthetic oligonucleotide
  Sense strand starting at position 2885 of SEQ ID NO: 1886430
gcagaugguaucugagaca

SEQ ID NO: 2409245 - RNA, 19 nt, Artificial Sequence
  Description of Artificial Sequence: Synthetic oligonucleotide
  Antisense strand to SEQ ID NO: 2409244
ugucucagauaccaucugc

SEQ ID NO: 2409246 - RNA, 19 nt, Artificial Sequence
  Description of Artificial Sequence: Synthetic oligonucleotide
  Sense strand starting at position 2915 of SEQ ID NO: 1886430
cccagcuuuggccaucaga

SEQ ID NO: 2409247 - RNA, 19 nt, Artificial Sequence
  Description of Artificial Sequence: Synthetic oligonucleotide
  Antisense strand to SEQ ID NO: 2409246
ucugauggccaaagcuggg

SEQ ID NO: 2409248 - RNA, 19 nt, Artificial Sequence
  Description of Artificial Sequence: Synthetic oligonucleotide
  Sense strand starting at position 3152 of SEQ ID NO: 1886430
ccuagagucugacucuacu

SEQ ID NO: 2409249 - RNA, 19 nt, Artificial Sequence
  Description of Artificial Sequence: Synthetic oligonucleotide
  Antisense strand to SEQ ID NO: 2409248
aguagagucagacucuagg

SEQ ID NO: 2409250 - RNA, 19 nt, Artificial Sequence
  Description of Artificial Sequence: Synthetic oligonucleotide
  Sense strand starting at position 3155 of SEQ ID NO: 1886430
agagucugacucuacucau

SEQ ID NO: 2409251 - RNA, 19 nt, Artificial Sequence
  Description of Artificial Sequence: Synthetic oligonucleotide
  Antisense strand to SEQ ID NO: 2409250
augaguagagucagacucu

SEQ ID NO: 2409252 - RNA, 19 nt, Artificial Sequence
  Description of Artificial Sequence: Synthetic oligonucleotide
  Sense strand starting at position 3227 of SEQ ID NO: 1886430
gggccaagucucuacuaag

SEQ ID NO: 2409253 - RNA, 19 nt, Artificial Sequence
  Description of Artificial Sequence: Synthetic oligonucleotide
  Antisense strand to SEQ ID NO: 2409252
cuuaguagagacuuggccc

SEQ ID NO: 2409254 - RNA, 19 nt, Artificial Sequence
  Description of Artificial Sequence: Synthetic oligonucleotide
  Sense strand starting at position 3402 of SEQ ID NO: 1886430
guagcucuaagaugagaag

SEQ ID NO: 2409255 - RNA, 19 nt, Artificial Sequence
  Description of Artificial Sequence: Synthetic oligonucleotide
  Antisense strand to SEQ ID NO: 2409254
cuucucaucuuagagcuac

SEQ ID NO: 2409256 - RNA, 19 nt, Artificial Sequence
  Description of Artificial Sequence: Synthetic oligonucleotide
  Sense strand starting at position 3416 of SEQ ID NO: 1886430
agaaguaguguagggugua

SEQ ID NO: 2409257 - RNA, 19 nt, Artificial Sequence
  Description of Artificial Sequence: Synthetic oligonucleotide
  Antisense strand to SEQ ID NO: 2409256
uacacccuacacuacuucu

SEQ ID NO: 2409258 - RNA, 19 nt, Artificial Sequence
  Description of Artificial Sequence: Synthetic oligonucleotide
  Sense strand starting at position 3419 of SEQ ID NO: 1886430
aguaguguaggguguauuu

SEQ ID NO: 2409259 - RNA, 19 nt, Artificial Sequence
  Description of Artificial Sequence: Synthetic oligonucleotide
  Antisense strand to SEQ ID NO: 2409258
aaauacacccuacacuacu

SEQ ID NO: 2409260 - RNA, 19 nt, Artificial Sequence
  Description of Artificial Sequence: Synthetic oligonucleotide
  Sense strand starting at position 3529 of SEQ ID NO: 1886430
acaagccuaguugauauau

SEQ ID NO: 2409261 - RNA, 19 nt, Artificial Sequence
  Description of Artificial Sequence: Synthetic oligonucleotide
  Antisense strand to SEQ ID NO: 2409260
auauaucaacuaggcuugu

SEQ ID NO: 2409262 - RNA, 19 nt, Artificial Sequence
  Description of Artificial Sequence: Synthetic oligonucleotide
  Sense strand starting at position 3537 of SEQ ID NO: 1886430
aguugauauaugcauacgu

SEQ ID NO: 2409263 - RNA, 19 nt, Artificial Sequence
  Description of Artificial Sequence: Synthetic oligonucleotide
  Antisense strand to SEQ ID NO: 2409262
acguaugcauauaucaacu

SEQ ID NO: 2409264 - RNA, 19 nt, Artificial Sequence
  Description of Artificial Sequence: Synthetic oligonucleotide
  Sense strand starting at position 3539 of SEQ ID NO: 1886430
uugauauaugcauacguaa

SEQ ID NO: 2409265 - RNA, 19 nt, Artificial Sequence
  Description of Artificial Sequence: Synthetic oligonucleotide
  Antisense strand to SEQ ID NO: 2409264
uuacguaugcauauaucaa

SEQ ID NO: 2409266 - RNA, 19 nt, Artificial Sequence
  Description of Artificial Sequence: Synthetic oligonucleotide
  Sense strand starting at position 3631 of SEQ ID NO: 1886430
ugcauuucuccauguuucu

SEQ ID NO: 2409267 - RNA, 19 nt, Artificial Sequence
  Description of Artificial Sequence: Synthetic oligonucleotide
  Antisense strand to SEQ ID NO: 2409266
agaaacauggagaaaugca

SEQ ID NO: 2409268 - RNA, 19 nt, Artificial Sequence
  Description of Artificial Sequence: Synthetic oligonucleotide
  Sense strand starting at position 3714 of SEQ ID NO: 1886430
ccuauuaaaugagagacua

SEQ ID NO: 2409269 - RNA, 19 nt, Artificial Sequence
  Description of Artificial Sequence: Synthetic oligonucleotide
  Antisense strand to SEQ ID NO: 2409268
uagucucucauuuaauagg

SEQ ID NO: 2409270 - RNA, 19 nt, Artificial Sequence
  Description of Artificial Sequence: Synthetic oligonucleotide
  Sense strand starting at position 3755 of SEQ ID NO: 1886430
gaaacacgucuaggcaaua

SEQ ID NO: 2409271 - RNA, 19 nt, Artificial Sequence
  Description of Artificial Sequence: Synthetic oligonucleotide
  Antisense strand to SEQ ID NO: 2409270
uauugccuagacguguuuc

SEQ ID NO: 2409272 - RNA, 19 nt, Artificial Sequence
  Description of Artificial Sequence: Synthetic oligonucleotide
  Sense strand starting at position 3760 of SEQ ID NO: 1886430
acgucuaggcaauaggaaa

SEQ ID NO: 2409273 - RNA, 19 nt, Artificial Sequence
  Description of Artificial Sequence: Synthetic oligonucleotide
  Antisense strand to SEQ ID NO: 2409272
uuuccuauugccuagacgu

SEQ ID NO: 2409274 - RNA, 19 nt, Artificial Sequence
  Description of Artificial Sequence: Synthetic oligonucleotide
  Sense strand starting at position 3950 of SEQ ID NO: 1886430
gguagaguugggugaacuu

SEQ ID NO: 2409275 - RNA, 19 nt, Artificial Sequence
  Description of Artificial Sequence: Synthetic oligonucleotide
  Antisense strand to SEQ ID NO: 2409274
aaguucacccaacucuacc

SEQ ID NO: 2409276 - RNA, 19 nt, Artificial Sequence
  Description of Artificial Sequence: Synthetic oligonucleotide
  Sense strand starting at position 176 of SEQ ID NO: 1886431
ggcguuaucagccaagugu

SEQ ID NO: 2409277 - RNA, 19 nt, Artificial Sequence
  Description of Artificial Sequence: Synthetic oligonucleotide
  Antisense strand to SEQ ID NO: 2409276
acacuuggcugauaacgcc

SEQ ID NO: 2409278 - RNA, 19 nt, Artificial Sequence
  Description of Artificial Sequence: Synthetic oligonucleotide
  Sense strand starting at position 183 of SEQ ID NO: 1886431
ucagccaaguguucuuaca

SEQ ID NO: 2409279 - RNA, 19 nt, Artificial Sequence
  Description of Artificial Sequence: Synthetic oligonucleotide
  Antisense strand to SEQ ID NO: 2409278
uguaagaacacuuggcuga

SEQ ID NO: 2409280 - RNA, 19 nt, Artificial Sequence
  Description of Artificial Sequence: Synthetic oligonucleotide
  Sense strand starting at position 185 of SEQ ID NO: 1886431
agccaaguguucuuacaau

SEQ ID NO: 2409281 - RNA, 19 nt, Artificial Sequence
  Description of Artificial Sequence: Synthetic oligonucleotide
  Antisense strand to SEQ ID NO: 2409280
auuguaagaacacuuggcu

SEQ ID NO: 2409282 - RNA, 19 nt, Artificial Sequence
  Description of Artificial Sequence: Synthetic oligonucleotide
  Sense strand starting at position 310 of SEQ ID NO: 1886431
caugucagugauugcucua

SEQ ID NO: 2409283 - RNA, 19 nt, Artificial Sequence
  Description of Artificial Sequence: Synthetic oligonucleotide
  Antisense strand to SEQ ID NO: 2409282
uagagcaaucacugacaug

SEQ ID NO: 2409284 - RNA, 19 nt, Artificial Sequence
  Description of Artificial Sequence: Synthetic oligonucleotide
  Sense strand starting at position 335 of SEQ ID NO: 1886431
cgcgcauucguuucaucca

SEQ ID NO: 2409285 - RNA, 19 nt, Artificial Sequence
  Description of Artificial Sequence: Synthetic oligonucleotide
  Antisense strand to SEQ ID NO: 2409284
uggaugaaacgaaugcgcg

SEQ ID NO: 2409286 - RNA, 19 nt, Artificial Sequence
  Description of Artificial Sequence: Synthetic oligonucleotide
  Sense strand starting at position 365 of SEQ ID NO: 1886431
agccauuaucgccaggagu

SEQ ID NO: 2409287 - RNA, 19 nt, Artificial Sequence
  Description of Artificial Sequence: Synthetic oligonucleotide
  Antisense strand to SEQ ID NO: 2409286
acuccuggcgauaauggcu

SEQ ID NO: 2409288 - RNA, 19 nt, Artificial Sequence
  Description of Artificial Sequence: Synthetic oligonucleotide
  Sense strand starting at position 367 of SEQ ID NO: 1886431
ccauuaucgccaggaguca

SEQ ID NO: 2409289 - RNA, 19 nt, Artificial Sequence
  Description of Artificial Sequence: Synthetic oligonucleotide
  Antisense strand to SEQ ID NO: 2409288
ugacuccuggcgauaaugg

SEQ ID NO: 2409290 - RNA, 19 nt, Artificial Sequence
  Description of Artificial Sequence: Synthetic oligonucleotide
  Sense strand starting at position 368 of SEQ ID NO: 1886431
cauuaucgccaggagucaa

SEQ ID NO: 2409291 - RNA, 19 nt, Artificial Sequence
  Description of Artificial Sequence: Synthetic oligonucleotide
  Antisense strand to SEQ ID NO: 2409290
uugacuccuggcgauaaug

SEQ ID NO: 2409292 - RNA, 19 nt, Artificial Sequence
  Description of Artificial Sequence: Synthetic oligonucleotide
  Sense strand starting at position 432 of SEQ ID NO: 1886431
uuugaauucgaacaguguu

SEQ ID NO: 2409293 - RNA, 19 nt, Artificial Sequence
  Description of Artificial Sequence: Synthetic oligonucleotide
  Antisense strand to SEQ ID NO: 2409292
aacacuguucgaauucaaa

SEQ ID NO: 2409294 - RNA, 19 nt, Artificial Sequence
  Description of Artificial Sequence: Synthetic oligonucleotide
  Sense strand starting at position 1166 of SEQ ID NO: 1886431
ggaagaccgugucuccaaa

SEQ ID NO: 2409295 - RNA, 19 nt, Artificial Sequence
  Description of Artificial Sequence: Synthetic oligonucleotide
  Antisense strand to SEQ ID NO: 2409294
uuuggagacacggucuucc

SEQ ID NO: 2409296 - RNA, 19 nt, Artificial Sequence
  Description of Artificial Sequence: Synthetic oligonucleotide
  Sense strand starting at position 1260 of SEQ ID NO: 1886431
ccgccaaaccguuaagcua

SEQ ID NO: 2409297 - RNA, 19 nt, Artificial Sequence
  Description of Artificial Sequence: Synthetic oligonucleotide
  Antisense strand to SEQ ID NO: 2409296
uagcuuaacgguuuggcgg

SEQ ID NO: 2409298 - RNA, 19 nt, Artificial Sequence
  Description of Artificial Sequence: Synthetic oligonucleotide
  Sense strand starting at position 1401 of SEQ ID NO: 1886431
cgagucuuccgcgaagggu

SEQ ID NO: 2409299 - RNA, 19 nt, Artificial Sequence
  Description of Artificial Sequence: Synthetic oligonucleotide
  Antisense strand to SEQ ID NO: 2409298
acccuucgcggaagacucg

SEQ ID NO: 2409300 - RNA, 19 nt, Artificial Sequence
  Description of Artificial Sequence: Synthetic oligonucleotide
  Sense strand starting at position 1984 of SEQ ID NO: 1886431
cugcgucgaagcuuaagua

SEQ ID NO: 2409301 - RNA, 19 nt, Artificial Sequence
  Description of Artificial Sequence: Synthetic oligonucleotide
  Antisense strand to SEQ ID NO: 2409300
uacuuaagcuucgacgcag

SEQ ID NO: 2409302 - RNA, 19 nt, Artificial Sequence
  Description of Artificial Sequence: Synthetic oligonucleotide
  Sense strand starting at position 2194 of SEQ ID NO: 1886431
ggacuagcccacgaucuau

SEQ ID NO: 2409303 - RNA, 19 nt, Artificial Sequence
  Description of Artificial Sequence: Synthetic oligonucleotide
  Antisense strand to SEQ ID NO: 2409302
auagaucgugggcuagucc

SEQ ID NO: 2409304 - RNA, 19 nt, Artificial Sequence
  Description of Artificial Sequence: Synthetic oligonucleotide
  Sense strand starting at position 2551 of SEQ ID NO: 1886431
uaugacguuugaccugaaa

SEQ ID NO: 2409305 - RNA, 19 nt, Artificial Sequence
  Description of Artificial Sequence: Synthetic oligonucleotide
  Antisense strand to SEQ ID NO: 2409304
uuucaggucaaacgucaua

SEQ ID NO: 2409306 - RNA, 19 nt, Artificial Sequence
  Description of Artificial Sequence: Synthetic oligonucleotide
  Sense strand starting at position 2553 of SEQ ID NO: 1886431
ugacguuugaccugaaaga

SEQ ID NO: 2409307 - RNA, 19 nt, Artificial Sequence
  Description of Artificial Sequence: Synthetic oligonucleotide
  Antisense strand to SEQ ID NO: 2409306
ucuuucaggucaaacguca

SEQ ID NO: 2409308 - RNA, 19 nt, Artificial Sequence
  Description of Artificial Sequence: Synthetic oligonucleotide
  Sense strand starting at position 2700 of SEQ ID NO: 1886431
gaggguugaccucagaugu

SEQ ID NO: 2409309 - RNA, 19 nt, Artificial Sequence
  Description of Artificial Sequence: Synthetic oligonucleotide
  Antisense strand to SEQ ID NO: 2409308
acaucugaggucaacccuc

SEQ ID NO: 2409310 - RNA, 19 nt, Artificial Sequence
  Description of Artificial Sequence: Synthetic oligonucleotide
  Sense strand starting at position 2845 of SEQ ID NO: 1886431
cagucuuacgaaggaagua

SEQ ID NO: 2409311 - RNA, 19 nt, Artificial Sequence
  Description of Artificial Sequence: Synthetic oligonucleotide
  Antisense strand to SEQ ID NO: 2409310
uacuuccuucguaagacug

SEQ ID NO: 2409312 - RNA, 19 nt, Artificial Sequence
  Description of Artificial Sequence: Synthetic oligonucleotide
  Sense strand starting at position 2908 of SEQ ID NO: 1886431
ccaaguaauugugccugau

SEQ ID NO: 2409313 - RNA, 19 nt, Artificial Sequence
  Description of Artificial Sequence: Synthetic oligonucleotide
  Antisense strand to SEQ ID NO: 2409312
aucaggcacaauuacuugg

SEQ ID NO: 2409314 - RNA, 19 nt, Artificial Sequence
  Description of Artificial Sequence: Synthetic oligonucleotide
  Sense strand starting at position 2910 of SEQ ID NO: 1886431
aaguaauugugccugauua

SEQ ID NO: 2409315 - RNA, 19 nt, Artificial Sequence
  Description of Artificial Sequence: Synthetic oligonucleotide
  Antisense strand to SEQ ID NO: 2409314
uaaucaggcacaauuacuu

SEQ ID NO: 2409316 - RNA, 19 nt, Artificial Sequence
  Description of Artificial Sequence: Synthetic oligonucleotide
  Sense strand starting at position 2911 of SEQ ID NO: 1886431
aguaauugugccugauuac

SEQ ID NO: 2409317 - RNA, 19 nt, Artificial Sequence
  Description of Artificial Sequence: Synthetic oligonucleotide
  Antisense strand to SEQ ID NO: 2409316
guaaucaggcacaauuacu

SEQ ID NO: 2409318 - RNA, 19 nt, Artificial Sequence
  Description of Artificial Sequence: Synthetic oligonucleotide
  Sense strand starting at position 2912 of SEQ ID NO: 1886431
guaauugugccugauuaca

SEQ ID NO: 2409319 - RNA, 19 nt, Artificial Sequence
  Description of Artificial Sequence: Synthetic oligonucleotide
  Antisense strand to SEQ ID NO: 2409318
uguaaucaggcacaauuac

SEQ ID NO: 2409320 - RNA, 19 nt, Artificial Sequence
  Description of Artificial Sequence: Synthetic oligonucleotide
  Sense strand starting at position 2961 of SEQ ID NO: 1886431
caggucuuguaacugcaaa

SEQ ID NO: 2409321 - RNA, 19 nt, Artificial Sequence
  Description of Artificial Sequence: Synthetic oligonucleotide
  Antisense strand to SEQ ID NO: 2409320
uuugcaguuacaagaccug

SEQ ID NO: 2409322 - RNA, 19 nt, Artificial Sequence
  Description of Artificial Sequence: Synthetic oligonucleotide
  Sense strand starting at position 2998 of SEQ ID NO: 1886431
gcaugaaugcuagaguguu

SEQ ID NO: 2409323 - RNA, 19 nt, Artificial Sequence
  Description of Artificial Sequence: Synthetic oligonucleotide
  Antisense strand to SEQ ID NO: 2409322
aacacucuagcauucaugc

SEQ ID NO: 2409324 - RNA, 19 nt, Artificial Sequence
  Description of Artificial Sequence: Synthetic oligonucleotide
  Sense strand starting at position 3143 of SEQ ID NO: 1886431
agacguuaauuccugauac

SEQ ID NO: 2409325 - RNA, 19 nt, Artificial Sequence
  Description of Artificial Sequence: Synthetic oligonucleotide
  Antisense strand to SEQ ID NO: 2409324
guaucaggaauuaacgucu

SEQ ID NO: 2409326 - RNA, 19 nt, Artificial Sequence
  Description of Artificial Sequence: Synthetic oligonucleotide
  Sense strand starting at position 3145 of SEQ ID NO: 1886431
acguuaauuccugauacau

SEQ ID NO: 2409327 - RNA, 19 nt, Artificial Sequence
  Description of Artificial Sequence: Synthetic oligonucleotide
  Antisense strand to SEQ ID NO: 2409326
auguaucaggaauuaacgu

SEQ ID NO: 2409328 - RNA, 19 nt, Artificial Sequence
  Description of Artificial Sequence: Synthetic oligonucleotide
  Sense strand starting at position 3147 of SEQ ID NO: 1886431
guuaauuccugauacauag

SEQ ID NO: 2409329 - RNA, 19 nt, Artificial Sequence
  Description of Artificial Sequence: Synthetic oligonucleotide
  Antisense strand to SEQ ID NO: 2409328
cuauguaucaggaauuaac

SEQ ID NO: 2409330 - RNA, 19 nt, Artificial Sequence
  Description of Artificial Sequence: Synthetic oligonucleotide
  Sense strand starting at position 3222 of SEQ ID NO: 1886431
gaggguuggacacgucuuu

SEQ ID NO: 2409331 - RNA, 19 nt, Artificial Sequence
  Description of Artificial Sequence: Synthetic oligonucleotide
  Antisense strand to SEQ ID NO: 2409330
aaagacguguccaacccuc

SEQ ID NO: 2409332 - RNA, 19 nt, Artificial Sequence
  Description of Artificial Sequence: Synthetic oligonucleotide
  Sense strand starting at position 3227 of SEQ ID NO: 1886431
uuggacacgucuuucuaga

SEQ ID NO: 2409333 - RNA, 19 nt, Artificial Sequence
  Description of Artificial Sequence: Synthetic oligonucleotide
  Antisense strand to SEQ ID NO: 2409332
ucuagaaagacguguccaa

SEQ ID NO: 2409334 - RNA, 19 nt, Artificial Sequence
  Description of Artificial Sequence: Synthetic oligonucleotide
  Sense strand starting at position 3229 of SEQ ID NO: 1886431
ggacacgucuuucuagaga

SEQ ID NO: 2409335 - RNA, 19 nt, Artificial Sequence
  Description of Artificial Sequence: Synthetic oligonucleotide
  Antisense strand to SEQ ID NO: 2409334
ucucuagaaagacgugucc

SEQ ID NO: 2409336 - RNA, 19 nt, Artificial Sequence
  Description of Artificial Sequence: Synthetic oligonucleotide
  Sense strand starting at position 3232 of SEQ ID NO: 1886431
cacgucuuucuagagaaac

SEQ ID NO: 2409337 - RNA, 19 nt, Artificial Sequence
  Description of Artificial Sequence: Synthetic oligonucleotide
  Antisense strand to SEQ ID NO: 2409336
guuucucuagaaagacgug

SEQ ID NO: 2409338 - RNA, 19 nt, Artificial Sequence
  Description of Artificial Sequence: Synthetic oligonucleotide
  Sense strand starting at position 3311 of SEQ ID NO: 1886431
cccuaaaggcccugaauau

SEQ ID NO: 2409339 - RNA, 19 nt, Artificial Sequence
  Description of Artificial Sequence: Synthetic oligonucleotide
  Antisense strand to SEQ ID NO: 2409338
auauucagggccuuuaggg

SEQ ID NO: 2409340 - RNA, 19 nt, Artificial Sequence
  Description of Artificial Sequence: Synthetic oligonucleotide
  Sense strand starting at position 3318 of SEQ ID NO: 1886431
ggcccugaauaugccaaua

SEQ ID NO: 2409341 - RNA, 19 nt, Artificial Sequence
  Description of Artificial Sequence: Synthetic oligonucleotide
  Antisense strand to SEQ ID NO: 2409340
uauuggcauauucagggcc

SEQ ID NO: 2409342 - RNA, 19 nt, Artificial Sequence
  Description of Artificial Sequence: Synthetic oligonucleotide
  Sense strand starting at position 3472 of SEQ ID NO: 1886431
ggguaugcauucguguaca

SEQ ID NO: 2409343 - RNA, 19 nt, Artificial Sequence
  Description of Artificial Sequence: Synthetic oligonucleotide
  Antisense strand to SEQ ID NO: 2409342
uguacacgaaugcauaccc

SEQ ID NO: 2409344 - RNA, 19 nt, Artificial Sequence
  Description of Artificial Sequence: Synthetic oligonucleotide
  Sense strand starting at position 3475 of SEQ ID NO: 1886431
uaugcauucguguacaaag

SEQ ID NO: 2409345 - RNA, 19 nt, Artificial Sequence
  Description of Artificial Sequence: Synthetic oligonucleotide
  Antisense strand to SEQ ID NO: 2409344
cuuuguacacgaaugcaua

SEQ ID NO: 2409346 - RNA, 19 nt, Artificial Sequence
  Description of Artificial Sequence: Synthetic oligonucleotide
  Sense strand starting at position 3821 of SEQ ID NO: 1886431
gcugacauuuaauaaugau

SEQ ID NO: 2409347 - RNA, 19 nt, Artificial Sequence
  Description of Artificial Sequence: Synthetic oligonucleotide
  Antisense strand to SEQ ID NO: 2409346
aucauuauuaaaugucagc

SEQ ID NO: 2409348 - RNA, 19 nt, Artificial Sequence
  Description of Artificial Sequence: Synthetic oligonucleotide
  Sense strand starting at position 3840 of SEQ ID NO: 1886431
auacauugugcucaucuau

SEQ ID NO: 2409349 - RNA, 19 nt, Artificial Sequence
  Description of Artificial Sequence: Synthetic oligonucleotide
  Antisense strand to SEQ ID NO: 2409348
auagaugagcacaauguau

SEQ ID NO: 2409350 - RNA, 19 nt, Artificial Sequence
  Description of Artificial Sequence: Synthetic oligonucleotide
  Sense strand starting at position 3846 of SEQ ID NO: 1886431
ugugcucaucuauaauaug

SEQ ID NO: 2409351 - RNA, 19 nt, Artificial Sequence
  Description of Artificial Sequence: Synthetic oligonucleotide
  Antisense strand to SEQ ID NO: 2409350
cauauuauagaugagcaca

SEQ ID NO: 2409352 - RNA, 19 nt, Artificial Sequence
  Description of Artificial Sequence: Synthetic oligonucleotide
  Sense strand starting at position 3900 of SEQ ID NO: 1886431
cccuguucugacugaguaa

SEQ ID NO: 2409353 - RNA, 19 nt, Artificial Sequence
  Description of Artificial Sequence: Synthetic oligonucleotide
  Antisense strand to SEQ ID NO: 2409352
uuacucagucagaacaggg

SEQ ID NO: 2409354 - RNA, 19 nt, Artificial Sequence
  Description of Artificial Sequence: Synthetic oligonucleotide
  Sense strand starting at position 3903 of SEQ ID NO: 1886431
uguucugacugaguaaacu

SEQ ID NO: 2409355 - RNA, 19 nt, Artificial Sequence
  Description of Artificial Sequence: Synthetic oligonucleotide
  Antisense strand to SEQ ID NO: 2409354
aguuuacucagucagaaca

SEQ ID NO: 2409356 - RNA, 19 nt, Artificial Sequence
  Description of Artificial Sequence: Synthetic oligonucleotide
  Sense strand starting at position 21 of SEQ ID NO: 1886432
gugaaagagcuuuguaaca

SEQ ID NO: 2409357 - RNA, 19 nt, Artificial Sequence
  Description of Artificial Sequence: Synthetic oligonucleotide
  Antisense strand to SEQ ID NO: 2409356
uguuacaaagcucuuucac

SEQ ID NO: 2409358 - RNA, 19 nt, Artificial Sequence
  Description of Artificial Sequence: Synthetic oligonucleotide
  Sense strand starting at position 88 of SEQ ID NO: 1886432
uuuaauuucguguauucuc

SEQ ID NO: 2409359 - RNA, 19 nt, Artificial Sequence
  Description of Artificial Sequence: Synthetic oligonucleotide
  Antisense strand to SEQ ID NO: 2409358
gagaauacacgaaauuaaa

SEQ ID NO: 2409360 - RNA, 19 nt, Artificial Sequence
  Description of Artificial Sequence: Synthetic oligonucleotide
  Sense strand starting at position 128 of SEQ ID NO: 1886432
gcaccugauguguauagac

SEQ ID NO: 2409361 - RNA, 19 nt, Artificial Sequence
  Description of Artificial Sequence: Synthetic oligonucleotide
  Antisense strand to SEQ ID NO: 2409360
gucuauacacaucaggugc

SEQ ID NO: 2409362 - RNA, 19 nt, Artificial Sequence
  Description of Artificial Sequence: Synthetic oligonucleotide
  Sense strand starting at position 130 of SEQ ID NO: 1886432
accugauguguauagacuu

SEQ ID NO: 2409363 - RNA, 19 nt, Artificial Sequence
  Description of Artificial Sequence: Synthetic oligonucleotide
  Antisense strand to SEQ ID NO: 2409362
aagucuauacacaucaggu

SEQ ID NO: 2409364 - RNA, 19 nt, Artificial Sequence
  Description of Artificial Sequence: Synthetic oligonucleotide
  Sense strand starting at position 136 of SEQ ID NO: 1886432
uguguauagacuuaucgua

SEQ ID NO: 2409365 - RNA, 19 nt, Artificial Sequence
  Description of Artificial Sequence: Synthetic oligonucleotide
  Antisense strand to SEQ ID NO: 2409364
uacgauaagucuauacaca

SEQ ID NO: 2409366 - RNA, 19 nt, Artificial Sequence
  Description of Artificial Sequence: Synthetic oligonucleotide
  Sense strand starting at position 138 of SEQ ID NO: 1886432
uguauagacuuaucguaga

SEQ ID NO: 2409367 - RNA, 19 nt, Artificial Sequence
  Description of Artificial Sequence: Synthetic oligonucleotide
  Antisense strand to SEQ ID NO: 2409366
ucuacgauaagucuauaca

SEQ ID NO: 2409368 - RNA, 19 nt, Artificial Sequence
  Description of Artificial Sequence: Synthetic oligonucleotide
  Sense strand starting at position 165 of SEQ ID NO: 1886432
guagcauucuccuuuauuu

SEQ ID NO: 2409369 - RNA, 19 nt, Artificial Sequence
  Description of Artificial Sequence: Synthetic oligonucleotide
  Antisense strand to SEQ ID NO: 2409368
aaauaaaggagaaugcuac

SEQ ID NO: 2409370 - RNA, 19 nt, Artificial Sequence
  Description of Artificial Sequence: Synthetic oligonucleotide
  Sense strand starting at position 251 of SEQ ID NO: 1886432
ucugaaucugauuaaucgu

SEQ ID NO: 2409371 - RNA, 19 nt, Artificial Sequence
  Description of Artificial Sequence: Synthetic oligonucleotide
  Antisense strand to SEQ ID NO: 2409370
acgauuaaucagauucaga

SEQ ID NO: 2409372 - RNA, 19 nt, Artificial Sequence
  Description of Artificial Sequence: Synthetic oligonucleotide
  Sense strand starting at position 683 of SEQ ID NO: 1886432
uauaguuucuuuguaggag

SEQ ID NO: 2409373 - RNA, 19 nt, Artificial Sequence
  Description of Artificial Sequence: Synthetic oligonucleotide
  Antisense strand to SEQ ID NO: 2409372
cuccuacaaagaaacuaua

SEQ ID NO: 2409374 - RNA, 19 nt, Artificial Sequence
  Description of Artificial Sequence: Synthetic oligonucleotide
  Sense strand starting at position 691 of SEQ ID NO: 1886432
cuuuguaggaguuaguuua

SEQ ID NO: 2409375 - RNA, 19 nt, Artificial Sequence
  Description of Artificial Sequence: Synthetic oligonucleotide
  Antisense strand to SEQ ID NO: 2409374
uaaacuaacuccuacaaag

SEQ ID NO: 2409376 - RNA, 19 nt, Artificial Sequence
  Description of Artificial Sequence: Synthetic oligonucleotide
  Sense strand starting at position 730 of SEQ ID NO: 1886432
guaguuaagggcuacagaa

SEQ ID NO: 2409377 - RNA, 19 nt, Artificial Sequence
  Description of Artificial Sequence: Synthetic oligonucleotide
  Antisense strand to SEQ ID NO: 2409376
uucuguagcccuuaacuac

SEQ ID NO: 2409378 - RNA, 19 nt, Artificial Sequence
  Description of Artificial Sequence: Synthetic oligonucleotide
  Sense strand starting at position 869 of SEQ ID NO: 1886432
acaugagggcugugucaac

SEQ ID NO: 2409379 - RNA, 19 nt, Artificial Sequence
  Description of Artificial Sequence: Synthetic oligonucleotide
  Antisense strand to SEQ ID NO: 2409378
guugacacagcccucaugu

SEQ ID NO: 2409380 - RNA, 19 nt, Artificial Sequence
  Description of Artificial Sequence: Synthetic oligonucleotide
  Sense strand starting at position 990 of SEQ ID NO: 1886432
ggcagagguccuugaacaa

SEQ ID NO: 2409381 - RNA, 19 nt, Artificial Sequence
  Description of Artificial Sequence: Synthetic oligonucleotide
  Antisense strand to SEQ ID NO: 2409380
uuguucaaggaccucugcc

SEQ ID NO: 2409382 - RNA, 19 nt, Artificial Sequence
  Description of Artificial Sequence: Synthetic oligonucleotide
  Sense strand starting at position 997 of SEQ ID NO: 1886432
guccuugaacaaugguaaa

SEQ ID NO: 2409383 - RNA, 19 nt, Artificial Sequence
  Description of Artificial Sequence: Synthetic oligonucleotide
  Antisense strand to SEQ ID NO: 2409382
uuuaccauuguucaaggac

SEQ ID NO: 2409384 - RNA, 19 nt, Artificial Sequence
  Description of Artificial Sequence: Synthetic oligonucleotide
  Sense strand starting at position 1008 of SEQ ID NO: 1886432
augguaaagaauggcuuua

SEQ ID NO: 2409385 - RNA, 19 nt, Artificial Sequence
  Description of Artificial Sequence: Synthetic oligonucleotide
  Antisense strand to SEQ ID NO: 2409384
uaaagccauucuuuaccau

SEQ ID NO: 2409386 - RNA, 19 nt, Artificial Sequence
  Description of Artificial Sequence: Synthetic oligonucleotide
  Sense strand starting at position 1010 of SEQ ID NO: 1886432
gguaaagaauggcuuuauu

SEQ ID NO: 2409387 - RNA, 19 nt, Artificial Sequence
  Description of Artificial Sequence: Synthetic oligonucleotide
  Antisense strand to SEQ ID NO: 2409386
aauaaagccauucuuuacc

SEQ ID NO: 2409388 - RNA, 19 nt, Artificial Sequence
  Description of Artificial Sequence: Synthetic oligonucleotide
  Sense strand starting at position 1102 of SEQ ID NO: 1886432
uggaaagaugucuggagcu

SEQ ID NO: 2409389 - RNA, 19 nt, Artificial Sequence
  Description of Artificial Sequence: Synthetic oligonucleotide
  Antisense strand to SEQ ID NO: 2409388
agcuccagacaucuuucca

SEQ ID NO: 2409390 - RNA, 19 nt, Artificial Sequence
  Description of Artificial Sequence: Synthetic oligonucleotide
  Sense strand starting at position 1640 of SEQ ID NO: 1886432
cgugaagacauuugucguu

SEQ ID NO: 2409391 - RNA, 19 nt, Artificial Sequence
  Description of Artificial Sequence: Synthetic oligonucleotide
  Antisense strand to SEQ ID NO: 2409390
aacgacaaaugucuucacg

SEQ ID NO: 2409392 - RNA, 19 nt, Artificial Sequence
  Description of Artificial Sequence: Synthetic oligonucleotide
  Sense strand starting at position 1642 of SEQ ID NO: 1886432
ugaagacauuugucguugu

SEQ ID NO: 2409393 - RNA, 19 nt, Artificial Sequence
  Description of Artificial Sequence: Synthetic oligonucleotide
  Antisense strand to SEQ ID NO: 2409392
acaacgacaaaugucuuca

SEQ ID NO: 2409394 - RNA, 19 nt, Artificial Sequence
  Description of Artificial Sequence: Synthetic oligonucleotide
  Sense strand starting at position 1775 of SEQ ID NO: 1886432
ugaggugagaaauguguuu

SEQ ID NO: 2409395 - RNA, 19 nt, Artificial Sequence
  Description of Artificial Sequence: Synthetic oligonucleotide
  Antisense strand to SEQ ID NO: 2409394
aaacacauuucucaccuca

SEQ ID NO: 2409396 - RNA, 19 nt, Artificial Sequence
  Description of Artificial Sequence: Synthetic oligonucleotide
  Sense strand starting at position 1867 of SEQ ID NO: 1886432
acugauucugacggaaucu

SEQ ID NO: 2409397 - RNA, 19 nt, Artificial Sequence
  Description of Artificial Sequence: Synthetic oligonucleotide
  Antisense strand to SEQ ID NO: 2409396
agauuccgucagaaucagu

SEQ ID NO: 2409398 - RNA, 19 nt, Artificial Sequence
  Description of Artificial Sequence: Synthetic oligonucleotide
  Sense strand starting at position 2152 of SEQ ID NO: 1886432
ggcaguaacugauucuuaa

SEQ ID NO: 2409399 - RNA, 19 nt, Artificial Sequence
  Description of Artificial Sequence: Synthetic oligonucleotide
  Antisense strand to SEQ ID NO: 2409398
uuaagaaucaguuacugcc

SEQ ID NO: 2409400 - RNA, 19 nt, Artificial Sequence
  Description of Artificial Sequence: Synthetic oligonucleotide
  Sense strand starting at position 2329 of SEQ ID NO: 1886432
gcauuaugauaugaauuug

SEQ ID NO: 2409401 - RNA, 19 nt, Artificial Sequence
  Description of Artificial Sequence: Synthetic oligonucleotide
  Antisense strand to SEQ ID NO: 2409400
caaauucauaucauaaugc

SEQ ID NO: 2409402 - RNA, 19 nt, Artificial Sequence
  Description of Artificial Sequence: Synthetic oligonucleotide
  Sense strand starting at position 2355 of SEQ ID NO: 1886432
gcugcuacaucauuugcau

SEQ ID NO: 2409403 - RNA, 19 nt, Artificial Sequence
  Description of Artificial Sequence: Synthetic oligonucleotide
  Antisense strand to SEQ ID NO: 2409402
augcaaaugauguagcagc

SEQ ID NO: 2409404 - RNA, 19 nt, Artificial Sequence
  Description of Artificial Sequence: Synthetic oligonucleotide
  Sense strand starting at position 2390 of SEQ ID NO: 1886432
ugugauauuucuccuaguu

SEQ ID NO: 2409405 - RNA, 19 nt, Artificial Sequence
  Description of Artificial Sequence: Synthetic oligonucleotide
  Antisense strand to SEQ ID NO: 2409404
aacuaggagaaauaucaca

SEQ ID NO: 2409406 - RNA, 19 nt, Artificial Sequence
  Description of Artificial Sequence: Synthetic oligonucleotide
  Sense strand starting at position 2864 of SEQ ID NO: 1886432
ugccaucaugccuaguuaa

SEQ ID NO: 2409407 - RNA, 19 nt, Artificial Sequence
  Description of Artificial Sequence: Synthetic oligonucleotide
  Antisense strand to SEQ ID NO: 2409406
uuaacuaggcaugauggca

SEQ ID NO: 2409408 - RNA, 19 nt, Artificial Sequence
  Description of Artificial Sequence: Synthetic oligonucleotide
  Sense strand starting at position 3012 of SEQ ID NO: 1886432
ucgcuuauuucccuguuua

SEQ ID NO: 2409409 - RNA, 19 nt, Artificial Sequence
  Description of Artificial Sequence: Synthetic oligonucleotide
  Antisense strand to SEQ ID NO: 2409408
uaaacagggaaauaagcga

SEQ ID NO: 2409410 - RNA, 19 nt, Artificial Sequence
  Description of Artificial Sequence: Synthetic oligonucleotide
  Sense strand starting at position 3013 of SEQ ID NO: 1886432
cgcuuauuucccuguuuaa

SEQ ID NO: 2409411 - RNA, 19 nt, Artificial Sequence
  Description of Artificial Sequence: Synthetic oligonucleotide
  Antisense strand to SEQ ID NO: 2409410
uuaaacagggaaauaagcg

SEQ ID NO: 2409412 - RNA, 19 nt, Artificial Sequence
  Description of Artificial Sequence: Synthetic oligonucleotide
  Sense strand starting at position 3072 of SEQ ID NO: 1886432
guaauaaugguguggguaa

SEQ ID NO: 2409413 - RNA, 19 nt, Artificial Sequence
  Description of Artificial Sequence: Synthetic oligonucleotide
  Antisense strand to SEQ ID NO: 2409412
uuacccacaccauuauuac

SEQ ID NO: 2409414 - RNA, 19 nt, Artificial Sequence
  Description of Artificial Sequence: Synthetic oligonucleotide
  Sense strand starting at position 3074 of SEQ ID NO: 1886432
aauaaugguguggguaaua

SEQ ID NO: 2409415 - RNA, 19 nt, Artificial Sequence
  Description of Artificial Sequence: Synthetic oligonucleotide
  Antisense strand to SEQ ID NO: 2409414
uauuacccacaccauuauu

SEQ ID NO: 2409416 - RNA, 19 nt, Artificial Sequence
  Description of Artificial Sequence: Synthetic oligonucleotide
  Sense strand starting at position 3084 of SEQ ID NO: 1886432
uggguaauaucuuugagca

SEQ ID NO: 2409417 - RNA, 19 nt, Artificial Sequence
  Description of Artificial Sequence: Synthetic oligonucleotide
  Antisense strand to SEQ ID NO: 2409416
ugcucaaagauauuaccca

SEQ ID NO: 2409418 - RNA, 19 nt, Artificial Sequence
  Description of Artificial Sequence: Synthetic oligonucleotide
  Sense strand starting at position 3085 of SEQ ID NO: 1886432
ggguaauaucuuugagcaa

SEQ ID NO: 2409419 - RNA, 19 nt, Artificial Sequence
  Description of Artificial Sequence: Synthetic oligonucleotide
  Antisense strand to SEQ ID NO: 2409418
uugcucaaagauauuaccc

SEQ ID NO: 2409420 - RNA, 19 nt, Artificial Sequence
  Description of Artificial Sequence: Synthetic oligonucleotide
  Sense strand starting at position 3097 of SEQ ID NO: 1886432
ugagcaagaugcucuuaua

SEQ ID NO: 2409421 - RNA, 19 nt, Artificial Sequence
  Description of Artificial Sequence: Synthetic oligonucleotide
  Antisense strand to SEQ ID NO: 2409420
uauaagagcaucuugcuca

SEQ ID NO: 2409422 - RNA, 19 nt, Artificial Sequence
  Description of Artificial Sequence: Synthetic oligonucleotide
  Sense strand starting at position 3136 of SEQ ID NO: 1886432
aggcaucaauucucaggaa

SEQ ID NO: 2409423 - RNA, 19 nt, Artificial Sequence
  Description of Artificial Sequence: Synthetic oligonucleotide
  Antisense strand to SEQ ID NO: 2409422
uuccugagaauugaugccu

SEQ ID NO: 2409424 - RNA, 19 nt, Artificial Sequence
  Description of Artificial Sequence: Synthetic oligonucleotide
  Sense strand starting at position 3177 of SEQ ID NO: 1886432
uuaugauuauuggccaaau

SEQ ID NO: 2409425 - RNA, 19 nt, Artificial Sequence
  Description of Artificial Sequence: Synthetic oligonucleotide
  Antisense strand to SEQ ID NO: 2409424
auuuggccaauaaucauaa

SEQ ID NO: 2409426 - RNA, 19 nt, Artificial Sequence
  Description of Artificial Sequence: Synthetic oligonucleotide
  Sense strand starting at position 3583 of SEQ ID NO: 1886432
gguggagaucaaggugagu

SEQ ID NO: 2409427 - RNA, 19 nt, Artificial Sequence
  Description of Artificial Sequence: Synthetic oligonucleotide
  Antisense strand to SEQ ID NO: 2409426
acucaccuugaucuccacc

SEQ ID NO: 2409428 - RNA, 19 nt, Artificial Sequence
  Description of Artificial Sequence: Synthetic oligonucleotide
  Sense strand starting at position 3700 of SEQ ID NO: 1886432
gagucacagccuuaaaggu

SEQ ID NO: 2409429 - RNA, 19 nt, Artificial Sequence
  Description of Artificial Sequence: Synthetic oligonucleotide
  Antisense strand to SEQ ID NO: 2409428
accuuuaaggcugugacuc

SEQ ID NO: 2409430 - RNA, 19 nt, Artificial Sequence
  Description of Artificial Sequence: Synthetic oligonucleotide
  Sense strand starting at position 3914 of SEQ ID NO: 1886432
cagguuugcauaggugaac

SEQ ID NO: 2409431 - RNA, 19 nt, Artificial Sequence
  Description of Artificial Sequence: Synthetic oligonucleotide
  Antisense strand to SEQ ID NO: 2409430
guucaccuaugcaaaccug

SEQ ID NO: 2409432 - RNA, 19 nt, Artificial Sequence
  Description of Artificial Sequence: Synthetic oligonucleotide
  Sense strand starting at position 3915 of SEQ ID NO: 1886432
agguuugcauaggugaaca

SEQ ID NO: 2409433 - RNA, 19 nt, Artificial Sequence
  Description of Artificial Sequence: Synthetic oligonucleotide
  Antisense strand to SEQ ID NO: 2409432
uguucaccuaugcaaaccu

SEQ ID NO: 2409434 - RNA, 19 nt, Artificial Sequence
  Description of Artificial Sequence: Synthetic oligonucleotide
  Sense strand starting at position 3935 of SEQ ID NO: 1886432
gcauguguagcuguguaaa

SEQ ID NO: 2409435 - RNA, 19 nt, Artificial Sequence
  Description of Artificial Sequence: Synthetic oligonucleotide
  Antisense strand to SEQ ID NO: 2409434
uuuacacagcuacacaugc

SEQ ID NO: 2409436 - RNA, 19 nt, Artificial Sequence
  Description of Artificial Sequence: Synthetic oligonucleotide
  Sense strand starting at position 1 of SEQ ID NO: 1886433
ugcucuugucguccagcua

SEQ ID NO: 2409437 - RNA, 19 nt, Artificial Sequence
  Description of Artificial Sequence: Synthetic oligonucleotide
  Antisense strand to SEQ ID NO: 2409436
uagcuggacgacaagagca

SEQ ID NO: 2409438 - RNA, 19 nt, Artificial Sequence
  Description of Artificial Sequence: Synthetic oligonucleotide
  Sense strand starting at position 187 of SEQ ID NO: 1886433
ugagaaaugcuuuaccuuu

SEQ ID NO: 2409439 - RNA, 19 nt, Artificial Sequence
  Description of Artificial Sequence: Synthetic oligonucleotide
  Antisense strand to SEQ ID NO: 2409438
aaagguaaagcauuucuca

SEQ ID NO: 2409440 - RNA, 19 nt, Artificial Sequence
  Description of Artificial Sequence: Synthetic oligonucleotide
  Sense strand starting at position 225 of SEQ ID NO: 1886433
agggaucccuaucagaaac

SEQ ID NO: 2409441 - RNA, 19 nt, Artificial Sequence
  Description of Artificial Sequence: Synthetic oligonucleotide
  Antisense strand to SEQ ID NO: 2409440
guuucugauagggaucccu

SEQ ID NO: 2409442 - RNA, 19 nt, Artificial Sequence
  Description of Artificial Sequence: Synthetic oligonucleotide
  Sense strand starting at position 395 of SEQ ID NO: 1886433
aggagcagucaguguauca

SEQ ID NO: 2409443 - RNA, 19 nt, Artificial Sequence
  Description of Artificial Sequence: Synthetic oligonucleotide
  Antisense strand to SEQ ID NO: 2409442
ugauacacugacugcuccu

SEQ ID NO: 2409444 - RNA, 19 nt, Artificial Sequence
  Description of Artificial Sequence: Synthetic oligonucleotide
  Sense strand starting at position 780 of SEQ ID NO: 1886433
gcacaaauggccgaaacau

SEQ ID NO: 2409445 - RNA, 19 nt, Artificial Sequence
  Description of Artificial Sequence: Synthetic oligonucleotide
  Antisense strand to SEQ ID NO: 2409444
auguuucggccauuugugc

SEQ ID NO: 2409446 - RNA, 19 nt, Artificial Sequence
  Description of Artificial Sequence: Synthetic oligonucleotide
  Sense strand starting at position 802 of SEQ ID NO: 1886433
ugggcagguuucccaguua

SEQ ID NO: 2409447 - RNA, 19 nt, Artificial Sequence
  Description of Artificial Sequence: Synthetic oligonucleotide
  Antisense strand to SEQ ID NO: 2409446
uaacugggaaaccugccca

SEQ ID NO: 2409448 - RNA, 19 nt, Artificial Sequence
  Description of Artificial Sequence: Synthetic oligonucleotide
  Sense strand starting at position 888 of SEQ ID NO: 1886433
agcagaacuucuguugagu

SEQ ID NO: 2409449 - RNA, 19 nt, Artificial Sequence
  Description of Artificial Sequence: Synthetic oligonucleotide
  Antisense strand to SEQ ID NO: 2409448
acucaacagaaguucugcu

SEQ ID NO: 2409450 - RNA, 19 nt, Artificial Sequence
  Description of Artificial Sequence: Synthetic oligonucleotide
  Sense strand starting at position 896 of SEQ ID NO: 1886433
uucuguugaguccagaaga

SEQ ID NO: 2409451 - RNA, 19 nt, Artificial Sequence
  Description of Artificial Sequence: Synthetic oligonucleotide
  Antisense strand to SEQ ID NO: 2409450
ucuucuggacucaacagaa

SEQ ID NO: 2409452 - RNA, 19 nt, Artificial Sequence
  Description of Artificial Sequence: Synthetic oligonucleotide
  Sense strand starting at position 1323 of SEQ ID NO: 1886433
cggaguucucaguaacggu

SEQ ID NO: 2409453 - RNA, 19 nt, Artificial Sequence
  Description of Artificial Sequence: Synthetic oligonucleotide
  Antisense strand to SEQ ID NO: 2409452
accguuacugagaacuccg

SEQ ID NO: 2409454 - RNA, 19 nt, Artificial Sequence
  Description of Artificial Sequence: Synthetic oligonucleotide
  Sense strand starting at position 1529 of SEQ ID NO: 1886433
augcaaucccuagggcaaa

SEQ ID NO: 2409455 - RNA, 19 nt, Artificial Sequence
  Description of Artificial Sequence: Synthetic oligonucleotide
  Antisense strand to SEQ ID NO: 2409454
uuugcccuagggauugcau

SEQ ID NO: 2409456 - RNA, 19 nt, Artificial Sequence
  Description of Artificial Sequence: Synthetic oligonucleotide
  Sense strand starting at position 1558 of SEQ ID NO: 1886433
ggguccucccgcuacuuaa

SEQ ID NO: 2409457 - RNA, 19 nt, Artificial Sequence
  Description of Artificial Sequence: Synthetic oligonucleotide
  Antisense strand to SEQ ID NO: 2409456
uuaaguagcgggaggaccc

SEQ ID NO: 2409458 - RNA, 19 nt, Artificial Sequence
  Description of Artificial Sequence: Synthetic oligonucleotide
  Sense strand starting at position 2295 of SEQ ID NO: 1886433
gguuccuuuccacaugugu

SEQ ID NO: 2409459 - RNA, 19 nt, Artificial Sequence
  Description of Artificial Sequence: Synthetic oligonucleotide
  Antisense strand to SEQ ID NO: 2409458
acacauguggaaaggaacc

SEQ ID NO: 2409460 - RNA, 19 nt, Artificial Sequence
  Description of Artificial Sequence: Synthetic oligonucleotide
  Sense strand starting at position 2386 of SEQ ID NO: 1886433
ucggaaagucgugaaagua

SEQ ID NO: 2409461 - RNA, 19 nt, Artificial Sequence
  Description of Artificial Sequence: Synthetic oligonucleotide
  Antisense strand to SEQ ID NO: 2409460
uacuuucacgacuuuccga

SEQ ID NO: 2409462 - RNA, 19 nt, Artificial Sequence
  Description of Artificial Sequence: Synthetic oligonucleotide
  Sense strand starting at position 2395 of SEQ ID NO: 1886433
cgugaaaguacagagguuu

SEQ ID NO: 2409463 - RNA, 19 nt, Artificial Sequence
  Description of Artificial Sequence: Synthetic oligonucleotide
  Antisense strand to SEQ ID NO: 2409462
aaaccucuguacuuucacg

SEQ ID NO: 2409464 - RNA, 19 nt, Artificial Sequence
  Description of Artificial Sequence: Synthetic oligonucleotide
  Sense strand starting at position 2403 of SEQ ID NO: 1886433
uacagagguuuacugcaaa

SEQ ID NO: 2409465 - RNA, 19 nt, Artificial Sequence
  Description of Artificial Sequence: Synthetic oligonucleotide
  Antisense strand to SEQ ID NO: 2409464
uuugcaguaaaccucugua

SEQ ID NO: 2409466 - RNA, 19 nt, Artificial Sequence
  Description of Artificial Sequence: Synthetic oligonucleotide
  Sense strand starting at position 2406 of SEQ ID NO: 1886433
agagguuuacugcaaagua

SEQ ID NO: 2409467 - RNA, 19 nt, Artificial Sequence
  Description of Artificial Sequence: Synthetic oligonucleotide
  Antisense strand to SEQ ID NO: 2409466
uacuuugcaguaaaccucu

SEQ ID NO: 2409468 - RNA, 19 nt, Artificial Sequence
  Description of Artificial Sequence: Synthetic oligonucleotide
  Sense strand starting at position 2514 of SEQ ID NO: 1886433
acacaaagguuucuggaau

SEQ ID NO: 2409469 - RNA, 19 nt, Artificial Sequence
  Description of Artificial Sequence: Synthetic oligonucleotide
  Antisense strand to SEQ ID NO: 2409468
auuccagaaaccuuugugu

SEQ ID NO: 2409470 - RNA, 19 nt, Artificial Sequence
  Description of Artificial Sequence: Synthetic oligonucleotide
  Sense strand starting at position 2535 of SEQ ID NO: 1886433
gguggagacuugucagaac

SEQ ID NO: 2409471 - RNA, 19 nt, Artificial Sequence
  Description of Artificial Sequence: Synthetic oligonucleotide
  Antisense strand to SEQ ID NO: 2409470
guucugacaagucuccacc

SEQ ID NO: 2409472 - RNA, 19 nt, Artificial Sequence
  Description of Artificial Sequence: Synthetic oligonucleotide
  Sense strand starting at position 2582 of SEQ ID NO: 1886433
auggguguucccggaauug

SEQ ID NO: 2409473 - RNA, 19 nt, Artificial Sequence
  Description of Artificial Sequence: Synthetic oligonucleotide
  Antisense strand to SEQ ID NO: 2409472
caauuccgggaacacccau

SEQ ID NO: 2409474 - RNA, 19 nt, Artificial Sequence
  Description of Artificial Sequence: Synthetic oligonucleotide
  Sense strand starting at position 2614 of SEQ ID NO: 1886433
gggugugugacuuaguaug

SEQ ID NO: 2409475 - RNA, 19 nt, Artificial Sequence
  Description of Artificial Sequence: Synthetic oligonucleotide
  Antisense strand to SEQ ID NO: 2409474
cauacuaagucacacaccc

SEQ ID NO: 2409476 - RNA, 19 nt, Artificial Sequence
  Description of Artificial Sequence: Synthetic oligonucleotide
  Sense strand starting at position 2619 of SEQ ID NO: 1886433
ugugacuuaguauguuaau

SEQ ID NO: 2409477 - RNA, 19 nt, Artificial Sequence
  Description of Artificial Sequence: Synthetic oligonucleotide
  Antisense strand to SEQ ID NO: 2409476
auuaacauacuaagucaca

SEQ ID NO: 2409478 - RNA, 19 nt, Artificial Sequence
  Description of Artificial Sequence: Synthetic oligonucleotide
  Sense strand starting at position 2620 of SEQ ID NO: 1886433
gugacuuaguauguuaaug

SEQ ID NO: 2409479 - RNA, 19 nt, Artificial Sequence
  Description of Artificial Sequence: Synthetic oligonucleotide
  Antisense strand to SEQ ID NO: 2409478
cauuaacauacuaagucac

SEQ ID NO: 2409480 - RNA, 19 nt, Artificial Sequence
  Description of Artificial Sequence: Synthetic oligonucleotide
  Sense strand starting at position 2634 of SEQ ID NO: 1886433
uaaugaguccuaggugaag

SEQ ID NO: 2409481 - RNA, 19 nt, Artificial Sequence
  Description of Artificial Sequence: Synthetic oligonucleotide
  Antisense strand to SEQ ID NO: 2409480
cuucaccuaggacucauua

SEQ ID NO: 2409482 - RNA, 19 nt, Artificial Sequence
  Description of Artificial Sequence: Synthetic oligonucleotide
  Sense strand starting at position 2645 of SEQ ID NO: 1886433
aggugaagccuaggucaaa

SEQ ID NO: 2409483 - RNA, 19 nt, Artificial Sequence
  Description of Artificial Sequence: Synthetic oligonucleotide
  Antisense strand to SEQ ID NO: 2409482
uuugaccuaggcuucaccu

SEQ ID NO: 2409484 - RNA, 19 nt, Artificial Sequence
  Description of Artificial Sequence: Synthetic oligonucleotide
  Sense strand starting at position 2789 of SEQ ID NO: 1886433
ggaaguuucuauucuccuu

SEQ ID NO: 2409485 - RNA, 19 nt, Artificial Sequence
  Description of Artificial Sequence: Synthetic oligonucleotide
  Antisense strand to SEQ ID NO: 2409484
aaggagaauagaaacuucc

SEQ ID NO: 2409486 - RNA, 19 nt, Artificial Sequence
  Description of Artificial Sequence: Synthetic oligonucleotide
  Sense strand starting at position 2819 of SEQ ID NO: 1886433
uaacguuccugucucaaag

SEQ ID NO: 2409487 - RNA, 19 nt, Artificial Sequence
  Description of Artificial Sequence: Synthetic oligonucleotide
  Antisense strand to SEQ ID NO: 2409486
cuuugagacaggaacguua

SEQ ID NO: 2409488 - RNA, 19 nt, Artificial Sequence
  Description of Artificial Sequence: Synthetic oligonucleotide
  Sense strand starting at position 2897 of SEQ ID NO: 1886433
agacuuguccaagggucau

SEQ ID NO: 2409489 - RNA, 19 nt, Artificial Sequence
  Description of Artificial Sequence: Synthetic oligonucleotide
  Antisense strand to SEQ ID NO: 2409488
augacccuuggacaagucu

SEQ ID NO: 2409490 - RNA, 19 nt, Artificial Sequence
  Description of Artificial Sequence: Synthetic oligonucleotide
  Sense strand starting at position 2917 of SEQ ID NO: 1886433
aguggcuucuugguggaga

SEQ ID NO: 2409491 - RNA, 19 nt, Artificial Sequence
  Description of Artificial Sequence: Synthetic oligonucleotide
  Antisense strand to SEQ ID NO: 2409490
ucuccaccaagaagccacu

SEQ ID NO: 2409492 - RNA, 19 nt, Artificial Sequence
  Description of Artificial Sequence: Synthetic oligonucleotide
  Sense strand starting at position 2950 of SEQ ID NO: 1886433
gucacuaaugcagaaauau

SEQ ID NO: 2409493 - RNA, 19 nt, Artificial Sequence
  Description of Artificial Sequence: Synthetic oligonucleotide
  Antisense strand to SEQ ID NO: 2409492
auauuucugcauuagugac

SEQ ID NO: 2409494 - RNA, 19 nt, Artificial Sequence
  Description of Artificial Sequence: Synthetic oligonucleotide
  Sense strand starting at position 3134 of SEQ ID NO: 1886433
guggccaugagucagcaaa

SEQ ID NO: 2409495 - RNA, 19 nt, Artificial Sequence
  Description of Artificial Sequence: Synthetic oligonucleotide
  Antisense strand to SEQ ID NO: 2409494
uuugcugacucauggccac

SEQ ID NO: 2409496 - RNA, 19 nt, Artificial Sequence
  Description of Artificial Sequence: Synthetic oligonucleotide
  Sense strand starting at position 3136 of SEQ ID NO: 1886433
ggccaugagucagcaaaga

SEQ ID NO: 2409497 - RNA, 19 nt, Artificial Sequence
  Description of Artificial Sequence: Synthetic oligonucleotide
  Antisense strand to SEQ ID NO: 2409496
ucuuugcugacucauggcc

SEQ ID NO: 2409498 - RNA, 19 nt, Artificial Sequence
  Description of Artificial Sequence: Synthetic oligonucleotide
  Sense strand starting at position 3292 of SEQ ID NO: 1886433
gcacguuuaauagagaagu

SEQ ID NO: 2409499 - RNA, 19 nt, Artificial Sequence
  Description of Artificial Sequence: Synthetic oligonucleotide
  Antisense strand to SEQ ID NO: 2409498
acuucucuauuaaacgugc

SEQ ID NO: 2409500 - RNA, 19 nt, Artificial Sequence
  Description of Artificial Sequence: Synthetic oligonucleotide
  Sense strand starting at position 3324 of SEQ ID NO: 1886433
aauggcuucuucguagaca

SEQ ID NO: 2409501 - RNA, 19 nt, Artificial Sequence
  Description of Artificial Sequence: Synthetic oligonucleotide
  Antisense strand to SEQ ID NO: 2409500
ugucuacgaagaagccauu

SEQ ID NO: 2409502 - RNA, 19 nt, Artificial Sequence
  Description of Artificial Sequence: Synthetic oligonucleotide
  Sense strand starting at position 3354 of SEQ ID NO: 1886433
uggcuucucgacuaagugu

SEQ ID NO: 2409503 - RNA, 19 nt, Artificial Sequence
  Description of Artificial Sequence: Synthetic oligonucleotide
  Antisense strand to SEQ ID NO: 2409502
acacuuagucgagaagcca

SEQ ID NO: 2409504 - RNA, 19 nt, Artificial Sequence
  Description of Artificial Sequence: Synthetic oligonucleotide
  Sense strand starting at position 3360 of SEQ ID NO: 1886433
cucgacuaaguguacuuau

SEQ ID NO: 2409505 - RNA, 19 nt, Artificial Sequence
  Description of Artificial Sequence: Synthetic oligonucleotide
  Antisense strand to SEQ ID NO: 2409504
auaaguacacuuagucgag

SEQ ID NO: 2409506 - RNA, 19 nt, Artificial Sequence
  Description of Artificial Sequence: Synthetic oligonucleotide
  Sense strand starting at position 3363 of SEQ ID NO: 1886433
gacuaaguguacuuauagu

SEQ ID NO: 2409507 - RNA, 19 nt, Artificial Sequence
  Description of Artificial Sequence: Synthetic oligonucleotide
  Antisense strand to SEQ ID NO: 2409506
acuauaaguacacuuaguc

SEQ ID NO: 2409508 - RNA, 19 nt, Artificial Sequence
  Description of Artificial Sequence: Synthetic oligonucleotide
  Sense strand starting at position 3487 of SEQ ID NO: 1886433
ggguaacuucucuggacgu

SEQ ID NO: 2409509 - RNA, 19 nt, Artificial Sequence
  Description of Artificial Sequence: Synthetic oligonucleotide
  Antisense strand to SEQ ID NO: 2409508
acguccagagaaguuaccc

SEQ ID NO: 2409510 - RNA, 19 nt, Artificial Sequence
  Description of Artificial Sequence: Synthetic oligonucleotide
  Sense strand starting at position 3500 of SEQ ID NO: 1886433
ggacguugccauugcauuu

SEQ ID NO: 2409511 - RNA, 19 nt, Artificial Sequence
  Description of Artificial Sequence: Synthetic oligonucleotide
  Antisense strand to SEQ ID NO: 2409510
aaaugcaauggcaacgucc

SEQ ID NO: 2409512 - RNA, 19 nt, Artificial Sequence
  Description of Artificial Sequence: Synthetic oligonucleotide
  Sense strand starting at position 3507 of SEQ ID NO: 1886433
gccauugcauuugugaacu

SEQ ID NO: 2409513 - RNA, 19 nt, Artificial Sequence
  Description of Artificial Sequence: Synthetic oligonucleotide
  Antisense strand to SEQ ID NO: 2409512
aguucacaaaugcaauggc

SEQ ID NO: 2409514 - RNA, 19 nt, Artificial Sequence
  Description of Artificial Sequence: Synthetic oligonucleotide
  Sense strand starting at position 3709 of SEQ ID NO: 1886433
ucauccugugacuaaguga

SEQ ID NO: 2409515 - RNA, 19 nt, Artificial Sequence
  Description of Artificial Sequence: Synthetic oligonucleotide
  Antisense strand to SEQ ID NO: 2409514
ucacuuagucacaggauga

SEQ ID NO: 2409516 - RNA, 19 nt, Artificial Sequence
  Description of Artificial Sequence: Synthetic oligonucleotide
  Sense strand starting at position 78 of SEQ ID NO: 1886434
guucuaguauuacuauaga

SEQ ID NO: 2409517 - RNA, 19 nt, Artificial Sequence
  Description of Artificial Sequence: Synthetic oligonucleotide
  Antisense strand to SEQ ID NO: 2409516
ucuauaguaauacuagaac

SEQ ID NO: 2409518 - RNA, 19 nt, Artificial Sequence
  Description of Artificial Sequence: Synthetic oligonucleotide
  Sense strand starting at position 409 of SEQ ID NO: 1886434
agacuccgucucgauagau

SEQ ID NO: 2409519 - RNA, 19 nt, Artificial Sequence
  Description of Artificial Sequence: Synthetic oligonucleotide
  Antisense strand to SEQ ID NO: 2409518
aucuaucgagacggagucu

SEQ ID NO: 2409520 - RNA, 19 nt, Artificial Sequence
  Description of Artificial Sequence: Synthetic oligonucleotide
  Sense strand starting at position 413 of SEQ ID NO: 1886434
uccgucucgauagauagau

SEQ ID NO: 2409521 - RNA, 19 nt, Artificial Sequence
  Description of Artificial Sequence: Synthetic oligonucleotide
  Antisense strand to SEQ ID NO: 2409520
aucuaucuaucgagacgga

SEQ ID NO: 2409522 - RNA, 19 nt, Artificial Sequence
  Description of Artificial Sequence: Synthetic oligonucleotide
  Sense strand starting at position 464 of SEQ ID NO: 1886434
augauuauuccauggcaaa

SEQ ID NO: 2409523 - RNA, 19 nt, Artificial Sequence
  Description of Artificial Sequence: Synthetic oligonucleotide
  Antisense strand to SEQ ID NO: 2409522
uuugccauggaauaaucau

SEQ ID NO: 2409524 - RNA, 19 nt, Artificial Sequence
  Description of Artificial Sequence: Synthetic oligonucleotide
  Sense strand starting at position 465 of SEQ ID NO: 1886434
ugauuauuccauggcaaag

SEQ ID NO: 2409525 - RNA, 19 nt, Artificial Sequence
  Description of Artificial Sequence: Synthetic oligonucleotide
  Antisense strand to SEQ ID NO: 2409524
cuuugccauggaauaauca

SEQ ID NO: 2409526 - RNA, 19 nt, Artificial Sequence
  Description of Artificial Sequence: Synthetic oligonucleotide
  Sense strand starting at position 553 of SEQ ID NO: 1886434
aacagaaccgucuguugaa

SEQ ID NO: 2409527 - RNA, 19 nt, Artificial Sequence
  Description of Artificial Sequence: Synthetic oligonucleotide
  Antisense strand to SEQ ID NO: 2409526
uucaacagacgguucuguu

SEQ ID NO: 2409528 - RNA, 19 nt, Artificial Sequence
  Description of Artificial Sequence: Synthetic oligonucleotide
  Sense strand starting at position 554 of SEQ ID NO: 1886434
acagaaccgucuguugaaa

SEQ ID NO: 2409529 - RNA, 19 nt, Artificial Sequence
  Description of Artificial Sequence: Synthetic oligonucleotide
  Antisense strand to SEQ ID NO: 2409528
uuucaacagacgguucugu

SEQ ID NO: 2409530 - RNA, 19 nt, Artificial Sequence
  Description of Artificial Sequence: Synthetic oligonucleotide
  Sense strand starting at position 589 of SEQ ID NO: 1886434
caggcagguucucuaaacu

SEQ ID NO: 2409531 - RNA, 19 nt, Artificial Sequence
  Description of Artificial Sequence: Synthetic oligonucleotide
  Antisense strand to SEQ ID NO: 2409530
aguuuagagaaccugccug

SEQ ID NO: 2409532 - RNA, 19 nt, Artificial Sequence
  Description of Artificial Sequence: Synthetic oligonucleotide
  Sense strand starting at position 678 of SEQ ID NO: 1886434
uaguguagcuuuccagaag

SEQ ID NO: 2409533 - RNA, 19 nt, Artificial Sequence
  Description of Artificial Sequence: Synthetic oligonucleotide
  Antisense strand to SEQ ID NO: 2409532
cuucuggaaagcuacacua

SEQ ID NO: 2409534 - RNA, 19 nt, Artificial Sequence
  Description of Artificial Sequence: Synthetic oligonucleotide
  Sense strand starting at position 696 of SEQ ID NO: 1886434
ggaaauaaguuuccuuauc

SEQ ID NO: 2409535 - RNA, 19 nt, Artificial Sequence
  Description of Artificial Sequence: Synthetic oligonucleotide
  Antisense strand to SEQ ID NO: 2409534
gauaaggaaacuuauuucc

SEQ ID NO: 2409536 - RNA, 19 nt, Artificial Sequence
  Description of Artificial Sequence: Synthetic oligonucleotide
  Sense strand starting at position 843 of SEQ ID NO: 1886434
aagggcuauuccuuuagag

SEQ ID NO: 2409537 - RNA, 19 nt, Artificial Sequence
  Description of Artificial Sequence: Synthetic oligonucleotide
  Antisense strand to SEQ ID NO: 2409536
cucuaaaggaauagcccuu

SEQ ID NO: 2409538 - RNA, 19 nt, Artificial Sequence
  Description of Artificial Sequence: Synthetic oligonucleotide
  Sense strand starting at position 934 of SEQ ID NO: 1886434
cuuucuugcccucaggaua

SEQ ID NO: 2409539 - RNA, 19 nt, Artificial Sequence
  Description of Artificial Sequence: Synthetic oligonucleotide
  Antisense strand to SEQ ID NO: 2409538
uauccugagggcaagaaag

SEQ ID NO: 2409540 - RNA, 19 nt, Artificial Sequence
  Description of Artificial Sequence: Synthetic oligonucleotide
  Sense strand starting at position 950 of SEQ ID NO: 1886434
auaacauuaugggaacaau

SEQ ID NO: 2409541 - RNA, 19 nt, Artificial Sequence
  Description of Artificial Sequence: Synthetic oligonucleotide
  Antisense strand to SEQ ID NO: 2409540
auuguucccauaauguuau

SEQ ID NO: 2409542 - RNA, 19 nt, Artificial Sequence
  Description of Artificial Sequence: Synthetic oligonucleotide
  Sense strand starting at position 1057 of SEQ ID NO: 1886434
ugcuguagucuggagggua

SEQ ID NO: 2409543 - RNA, 19 nt, Artificial Sequence
  Description of Artificial Sequence: Synthetic oligonucleotide
  Antisense strand to SEQ ID NO: 2409542
uacccuccagacuacagca

SEQ ID NO: 2409544 - RNA, 19 nt, Artificial Sequence
  Description of Artificial Sequence: Synthetic oligonucleotide
  Sense strand starting at position 1580 of SEQ ID NO: 1886434
guccuauuucugcggugga

SEQ ID NO: 2409545 - RNA, 19 nt, Artificial Sequence
  Description of Artificial Sequence: Synthetic oligonucleotide
  Antisense strand to SEQ ID NO: 2409544
uccaccgcagaaauaggac

SEQ ID NO: 2409546 - RNA, 19 nt, Artificial Sequence
  Description of Artificial Sequence: Synthetic oligonucleotide
  Sense strand starting at position 1583 of SEQ ID NO: 1886434
cuauuucugcgguggaaag

SEQ ID NO: 2409547 - RNA, 19 nt, Artificial Sequence
  Description of Artificial Sequence: Synthetic oligonucleotide
  Antisense strand to SEQ ID NO: 2409546
cuuuccaccgcagaaauag

SEQ ID NO: 2409548 - RNA, 19 nt, Artificial Sequence
  Description of Artificial Sequence: Synthetic oligonucleotide
  Sense strand starting at position 2095 of SEQ ID NO: 1886434
ggaggcucagguuauucau

SEQ ID NO: 2409549 - RNA, 19 nt, Artificial Sequence
  Description of Artificial Sequence: Synthetic oligonucleotide
  Antisense strand to SEQ ID NO: 2409548
augaauaaccugagccucc

SEQ ID NO: 2409550 - RNA, 19 nt, Artificial Sequence
  Description of Artificial Sequence: Synthetic oligonucleotide
  Sense strand starting at position 2206 of SEQ ID NO: 1886434
cucaguuguccuggaauga

SEQ ID NO: 2409551 - RNA, 19 nt, Artificial Sequence
  Description of Artificial Sequence: Synthetic oligonucleotide
  Antisense strand to SEQ ID NO: 2409550
ucauuccaggacaacugag

SEQ ID NO: 2409552 - RNA, 19 nt, Artificial Sequence
  Description of Artificial Sequence: Synthetic oligonucleotide
  Sense strand starting at position 2207 of SEQ ID NO: 1886434
ucaguuguccuggaaugaa

SEQ ID NO: 2409553 - RNA, 19 nt, Artificial Sequence
  Description of Artificial Sequence: Synthetic oligonucleotide
  Antisense strand to SEQ ID NO: 2409552
uucauuccaggacaacuga

SEQ ID NO: 2409554 - RNA, 19 nt, Artificial Sequence
  Description of Artificial Sequence: Synthetic oligonucleotide
  Sense strand starting at position 2210 of SEQ ID NO: 1886434
guuguccuggaaugaaaga

SEQ ID NO: 2409555 - RNA, 19 nt, Artificial Sequence
  Description of Artificial Sequence: Synthetic oligonucleotide
  Antisense strand to SEQ ID NO: 2409554
ucuuucauuccaggacaac

SEQ ID NO: 2409556 - RNA, 19 nt, Artificial Sequence
  Description of Artificial Sequence: Synthetic oligonucleotide
  Sense strand starting at position 2235 of SEQ ID NO: 1886434
cguguuggacaaggacaua

SEQ ID NO: 2409557 - RNA, 19 nt, Artificial Sequence
  Description of Artificial Sequence: Synthetic oligonucleotide
  Antisense strand to SEQ ID NO: 2409556
uauguccuuguccaacacg

SEQ ID NO: 2409558 - RNA, 19 nt, Artificial Sequence
  Description of Artificial Sequence: Synthetic oligonucleotide
  Sense strand starting at position 2260 of SEQ ID NO: 1886434
gaaggccaguucucucgaa

SEQ ID NO: 2409559 - RNA, 19 nt, Artificial Sequence
  Description of Artificial Sequence: Synthetic oligonucleotide
  Antisense strand to SEQ ID NO: 2409558
uucgagagaacuggccuuc

SEQ ID NO: 2409560 - RNA, 19 nt, Artificial Sequence
  Description of Artificial Sequence: Synthetic oligonucleotide
  Sense strand starting at position 2458 of SEQ ID NO: 1886434
caaacuauccgcuagagua

SEQ ID NO: 2409561 - RNA, 19 nt, Artificial Sequence
  Description of Artificial Sequence: Synthetic oligonucleotide
  Antisense strand to SEQ ID NO: 2409560
uacucuagcggauaguuug

SEQ ID NO: 2409562 - RNA, 19 nt, Artificial Sequence
  Description of Artificial Sequence: Synthetic oligonucleotide
  Sense strand starting at position 2482 of SEQ ID NO: 1886434
gccguuagaccuuagaaua

SEQ ID NO: 2409563 - RNA, 19 nt, Artificial Sequence
  Description of Artificial Sequence: Synthetic oligonucleotide
  Antisense strand to SEQ ID NO: 2409562
uauucuaaggucuaacggc

SEQ ID NO: 2409564 - RNA, 19 nt, Artificial Sequence
  Description of Artificial Sequence: Synthetic oligonucleotide
  Sense strand starting at position 2508 of SEQ ID NO: 1886434
cuguguaggaaaugugauu

SEQ ID NO: 2409565 - RNA, 19 nt, Artificial Sequence
  Description of Artificial Sequence: Synthetic oligonucleotide
  Antisense strand to SEQ ID NO: 2409564
aaucacauuuccuacacag

SEQ ID NO: 2409566 - RNA, 19 nt, Artificial Sequence
  Description of Artificial Sequence: Synthetic oligonucleotide
  Sense strand starting at position 2694 of SEQ ID NO: 1886434
gagauaugcuaacuagcag

SEQ ID NO: 2409567 - RNA, 19 nt, Artificial Sequence
  Description of Artificial Sequence: Synthetic oligonucleotide
  Antisense strand to SEQ ID NO: 2409566
cugcuaguuagcauaucuc

SEQ ID NO: 2409568 - RNA, 19 nt, Artificial Sequence
  Description of Artificial Sequence: Synthetic oligonucleotide
  Sense strand starting at position 2928 of SEQ ID NO: 1886434
cacucuucuugaguaggau

SEQ ID NO: 2409569 - RNA, 19 nt, Artificial Sequence
  Description of Artificial Sequence: Synthetic oligonucleotide
  Antisense strand to SEQ ID NO: 2409568
auccuacucaagaagagug

SEQ ID NO: 2409570 - RNA, 19 nt, Artificial Sequence
  Description of Artificial Sequence: Synthetic oligonucleotide
  Sense strand starting at position 2929 of SEQ ID NO: 1886434
acucuucuugaguaggauu

SEQ ID NO: 2409571 - RNA, 19 nt, Artificial Sequence
  Description of Artificial Sequence: Synthetic oligonucleotide
  Antisense strand to SEQ ID NO: 2409570
aauccuacucaagaagagu

SEQ ID NO: 2409572 - RNA, 19 nt, Artificial Sequence
  Description of Artificial Sequence: Synthetic oligonucleotide
  Sense strand starting at position 2981 of SEQ ID NO: 1886434
gauaauucuuuguugggca

SEQ ID NO: 2409573 - RNA, 19 nt, Artificial Sequence
  Description of Artificial Sequence: Synthetic oligonucleotide
  Antisense strand to SEQ ID NO: 2409572
ugcccaacaaagaauuauc

SEQ ID NO: 2409574 - RNA, 19 nt, Artificial Sequence
  Description of Artificial Sequence: Synthetic oligonucleotide
  Sense strand starting at position 3207 of SEQ ID NO: 1886434
ccaggacuuuaugcuuaau

SEQ ID NO: 2409575 - RNA, 19 nt, Artificial Sequence
  Description of Artificial Sequence: Synthetic oligonucleotide
  Antisense strand to SEQ ID NO: 2409574
auuaagcauaaaguccugg

SEQ ID NO: 2409576 - RNA, 19 nt, Artificial Sequence
  Description of Artificial Sequence: Synthetic oligonucleotide
  Sense strand starting at position 3209 of SEQ ID NO: 1886434
aggacuuuaugcuuaaucu

SEQ ID NO: 2409577 - RNA, 19 nt, Artificial Sequence
  Description of Artificial Sequence: Synthetic oligonucleotide
  Antisense strand to SEQ ID NO: 2409576
agauuaagcauaaaguccu

SEQ ID NO: 2409578 - RNA, 19 nt, Artificial Sequence
  Description of Artificial Sequence: Synthetic oligonucleotide
  Sense strand starting at position 3210 of SEQ ID NO: 1886434
ggacuuuaugcuuaaucua

SEQ ID NO: 2409579 - RNA, 19 nt, Artificial Sequence
  Description of Artificial Sequence: Synthetic oligonucleotide
  Antisense strand to SEQ ID NO: 2409578
uagauuaagcauaaagucc

SEQ ID NO: 2409580 - RNA, 19 nt, Artificial Sequence
  Description of Artificial Sequence: Synthetic oligonucleotide
  Sense strand starting at position 3281 of SEQ ID NO: 1886434
guaauaguccuguaagauu

SEQ ID NO: 2409581 - RNA, 19 nt, Artificial Sequence
  Description of Artificial Sequence: Synthetic oligonucleotide
  Antisense strand to SEQ ID NO: 2409580
aaucuuacaggacuauuac

SEQ ID NO: 2409582 - RNA, 19 nt, Artificial Sequence
  Description of Artificial Sequence: Synthetic oligonucleotide
  Sense strand starting at position 3296 of SEQ ID NO: 1886434
gauucugcugagugacaca

SEQ ID NO: 2409583 - RNA, 19 nt, Artificial Sequence
  Description of Artificial Sequence: Synthetic oligonucleotide
  Antisense strand to SEQ ID NO: 2409582
ugugucacucagcagaauc

SEQ ID NO: 2409584 - RNA, 19 nt, Artificial Sequence
  Description of Artificial Sequence: Synthetic oligonucleotide
  Sense strand starting at position 3307 of SEQ ID NO: 1886434
gugacacagucuguaguaa

SEQ ID NO: 2409585 - RNA, 19 nt, Artificial Sequence
  Description of Artificial Sequence: Synthetic oligonucleotide
  Antisense strand to SEQ ID NO: 2409584
uuacuacagacugugucac

SEQ ID NO: 2409586 - RNA, 19 nt, Artificial Sequence
  Description of Artificial Sequence: Synthetic oligonucleotide
  Sense strand starting at position 3319 of SEQ ID NO: 1886434
guaguaacuuaaguuugga

SEQ ID NO: 2409587 - RNA, 19 nt, Artificial Sequence
  Description of Artificial Sequence: Synthetic oligonucleotide
  Antisense strand to SEQ ID NO: 2409586
uccaaacuuaaguuacuac

SEQ ID NO: 2409588 - RNA, 19 nt, Artificial Sequence
  Description of Artificial Sequence: Synthetic oligonucleotide
  Sense strand starting at position 3322 of SEQ ID NO: 1886434
guaacuuaaguuuggaaag

SEQ ID NO: 2409589 - RNA, 19 nt, Artificial Sequence
  Description of Artificial Sequence: Synthetic oligonucleotide
  Antisense strand to SEQ ID NO: 2409588
cuuuccaaacuuaaguuac

SEQ ID NO: 2409590 - RNA, 19 nt, Artificial Sequence
  Description of Artificial Sequence: Synthetic oligonucleotide
  Sense strand starting at position 3393 of SEQ ID NO: 1886434
uggcgaucacugugaacau

SEQ ID NO: 2409591 - RNA, 19 nt, Artificial Sequence
  Description of Artificial Sequence: Synthetic oligonucleotide
  Antisense strand to SEQ ID NO: 2409590
auguucacagugaucgcca

SEQ ID NO: 2409592 - RNA, 19 nt, Artificial Sequence
  Description of Artificial Sequence: Synthetic oligonucleotide
  Sense strand starting at position 3721 of SEQ ID NO: 1886434
gcuccaauuugucuccagu

SEQ ID NO: 2409593 - RNA, 19 nt, Artificial Sequence
  Description of Artificial Sequence: Synthetic oligonucleotide
  Antisense strand to SEQ ID NO: 2409592
acuggagacaaauuggagc

SEQ ID NO: 2409594 - RNA, 19 nt, Artificial Sequence
  Description of Artificial Sequence: Synthetic oligonucleotide
  Sense strand starting at position 3844 of SEQ ID NO: 1886434
gggcauccucauggaggaa

SEQ ID NO: 2409595 - RNA, 19 nt, Artificial Sequence
  Description of Artificial Sequence: Synthetic oligonucleotide
  Antisense strand to SEQ ID NO: 2409594
uuccuccaugaggaugccc

SEQ ID NO: 2409596 - RNA, 19 nt, Artificial Sequence
  Description of Artificial Sequence: Synthetic oligonucleotide
  Sense strand starting at position 126 of SEQ ID NO: 1886435
uuuccaaauguccggaaua

SEQ ID NO: 2409597 - RNA, 19 nt, Artificial Sequence
  Description of Artificial Sequence: Synthetic oligonucleotide
  Antisense strand to SEQ ID NO: 2409596
uauuccggacauuuggaaa

SEQ ID NO: 2409598 - RNA, 19 nt, Artificial Sequence
  Description of Artificial Sequence: Synthetic oligonucleotide
  Sense strand starting at position 128 of SEQ ID NO: 1886435
uccaaauguccggaauaca

SEQ ID NO: 2409599 - RNA, 19 nt, Artificial Sequence
  Description of Artificial Sequence: Synthetic oligonucleotide
  Antisense strand to SEQ ID NO: 2409598
uguauuccggacauuugga

SEQ ID NO: 2409600 - RNA, 19 nt, Artificial Sequence
  Description of Artificial Sequence: Synthetic oligonucleotide
  Sense strand starting at position 250 of SEQ ID NO: 1886435
uuaggauccuaguuugaug

SEQ ID NO: 2409601 - RNA, 19 nt, Artificial Sequence
  Description of Artificial Sequence: Synthetic oligonucleotide
  Antisense strand to SEQ ID NO: 2409600
caucaaacuaggauccuaa

SEQ ID NO: 2409602 - RNA, 19 nt, Artificial Sequence
  Description of Artificial Sequence: Synthetic oligonucleotide
  Sense strand starting at position 252 of SEQ ID NO: 1886435
aggauccuaguuugaugaa

SEQ ID NO: 2409603 - RNA, 19 nt, Artificial Sequence
  Description of Artificial Sequence: Synthetic oligonucleotide
  Antisense strand to SEQ ID NO: 2409602
uucaucaaacuaggauccu

SEQ ID NO: 2409604 - RNA, 19 nt, Artificial Sequence
  Description of Artificial Sequence: Synthetic oligonucleotide
  Sense strand starting at position 261 of SEQ ID NO: 1886435
guuugaugaaacgacaucu

SEQ ID NO: 2409605 - RNA, 19 nt, Artificial Sequence
  Description of Artificial Sequence: Synthetic oligonucleotide
  Antisense strand to SEQ ID NO: 2409604
agaugucguuucaucaaac

SEQ ID NO: 2409606 - RNA, 19 nt, Artificial Sequence
  Description of Artificial Sequence: Synthetic oligonucleotide
  Sense strand starting at position 319 of SEQ ID NO: 1886435
guucgacagaguuaggaau

SEQ ID NO: 2409607 - RNA, 19 nt, Artificial Sequence
  Description of Artificial Sequence: Synthetic oligonucleotide
  Antisense strand to SEQ ID NO: 2409606
auuccuaacucugucgaac

SEQ ID NO: 2409608 - RNA, 19 nt, Artificial Sequence
  Description of Artificial Sequence: Synthetic oligonucleotide
  Sense strand starting at position 330 of SEQ ID NO: 1886435
uuaggaauauuagcuguau

SEQ ID NO: 2409609 - RNA, 19 nt, Artificial Sequence
  Description of Artificial Sequence: Synthetic oligonucleotide
  Antisense strand to SEQ ID NO: 2409608
auacagcuaauauuccuaa

SEQ ID NO: 2409610 - RNA, 19 nt, Artificial Sequence
  Description of Artificial Sequence: Synthetic oligonucleotide
  Sense strand starting at position 331 of SEQ ID NO: 1886435
uaggaauauuagcuguauc

SEQ ID NO: 2409611 - RNA, 19 nt, Artificial Sequence
  Description of Artificial Sequence: Synthetic oligonucleotide
  Antisense strand to SEQ ID NO: 2409610
gauacagcuaauauuccua

SEQ ID NO: 2409612 - RNA, 19 nt, Artificial Sequence
  Description of Artificial Sequence: Synthetic oligonucleotide
  Sense strand starting at position 354 of SEQ ID NO: 1886435
agaggacuaucccucuagu

SEQ ID NO: 2409613 - RNA, 19 nt, Artificial Sequence
  Description of Artificial Sequence: Synthetic oligonucleotide
  Antisense strand to SEQ ID NO: 2409612
acuagagggauaguccucu

SEQ ID NO: 2409614 - RNA, 19 nt, Artificial Sequence
  Description of Artificial Sequence: Synthetic oligonucleotide
  Sense strand starting at position 370 of SEQ ID NO: 1886435
agucguuaagcugaagaug

SEQ ID NO: 2409615 - RNA, 19 nt, Artificial Sequence
  Description of Artificial Sequence: Synthetic oligonucleotide
  Antisense strand to SEQ ID NO: 2409614
caucuucagcuuaacgacu

SEQ ID NO: 2409616 - RNA, 19 nt, Artificial Sequence
  Description of Artificial Sequence: Synthetic oligonucleotide
  Sense strand starting at position 567 of SEQ ID NO: 1886435
gcuugaacgccuuaaacaa

SEQ ID NO: 2409617 - RNA, 19 nt, Artificial Sequence
  Description of Artificial Sequence: Synthetic oligonucleotide
  Antisense strand to SEQ ID NO: 2409616
uuguuuaaggcguucaagc

SEQ ID NO: 2409618 - RNA, 19 nt, Artificial Sequence
  Description of Artificial Sequence: Synthetic oligonucleotide
  Sense strand starting at position 695 of SEQ ID NO: 1886435
cugucagauuugcucccaa

SEQ ID NO: 2409619 - RNA, 19 nt, Artificial Sequence
  Description of Artificial Sequence: Synthetic oligonucleotide
  Antisense strand to SEQ ID NO: 2409618
uugggagcaaaucugacag

SEQ ID NO: 2409620 - RNA, 19 nt, Artificial Sequence
  Description of Artificial Sequence: Synthetic oligonucleotide
  Sense strand starting at position 706 of SEQ ID NO: 1886435
gcucccaaacuuugagaau

SEQ ID NO: 2409621 - RNA, 19 nt, Artificial Sequence
  Description of Artificial Sequence: Synthetic oligonucleotide
  Antisense strand to SEQ ID NO: 2409620
auucucaaaguuugggagc

SEQ ID NO: 2409622 - RNA, 19 nt, Artificial Sequence
  Description of Artificial Sequence: Synthetic oligonucleotide
  Sense strand starting at position 715 of SEQ ID NO: 1886435
cuuugagaauugucauuau

SEQ ID NO: 2409623 - RNA, 19 nt, Artificial Sequence
  Description of Artificial Sequence: Synthetic oligonucleotide
  Antisense strand to SEQ ID NO: 2409622
auaaugacaauucucaaag

SEQ ID NO: 2409624 - RNA, 19 nt, Artificial Sequence
  Description of Artificial Sequence: Synthetic oligonucleotide
  Sense strand starting at position 718 of SEQ ID NO: 1886435
ugagaauugucauuauggu

SEQ ID NO: 2409625 - RNA, 19 nt, Artificial Sequence
  Description of Artificial Sequence: Synthetic oligonucleotide
  Antisense strand to SEQ ID NO: 2409624
accauaaugacaauucuca

SEQ ID NO: 2409626 - RNA, 19 nt, Artificial Sequence
  Description of Artificial Sequence: Synthetic oligonucleotide
  Sense strand starting at position 719 of SEQ ID NO: 1886435
gagaauugucauuaugguc

SEQ ID NO: 2409627 - RNA, 19 nt, Artificial Sequence
  Description of Artificial Sequence: Synthetic oligonucleotide
  Antisense strand to SEQ ID NO: 2409626
gaccauaaugacaauucuc

SEQ ID NO: 2409628 - RNA, 19 nt, Artificial Sequence
  Description of Artificial Sequence: Synthetic oligonucleotide
  Sense strand starting at position 1098 of SEQ ID NO: 1886435
cuaaguacgccaggcauuu

SEQ ID NO: 2409629 - RNA, 19 nt, Artificial Sequence
  Description of Artificial Sequence: Synthetic oligonucleotide
  Antisense strand to SEQ ID NO: 2409628
aaaugccuggcguacuuag

SEQ ID NO: 2409630 - RNA, 19 nt, Artificial Sequence
  Description of Artificial Sequence: Synthetic oligonucleotide
  Sense strand starting at position 1178 of SEQ ID NO: 1886435
cugaucuucggcgaggaga

SEQ ID NO: 2409631 - RNA, 19 nt, Artificial Sequence
  Description of Artificial Sequence: Synthetic oligonucleotide
  Antisense strand to SEQ ID NO: 2409630
ucuccucgccgaagaucag

SEQ ID NO: 2409632 - RNA, 19 nt, Artificial Sequence
  Description of Artificial Sequence: Synthetic oligonucleotide
  Sense strand starting at position 1191 of SEQ ID NO: 1886435
aggagacacucugcauaga

SEQ ID NO: 2409633 - RNA, 19 nt, Artificial Sequence
  Description of Artificial Sequence: Synthetic oligonucleotide
  Antisense strand to SEQ ID NO: 2409632
ucuaugcagagugucuccu

SEQ ID NO: 2409634 - RNA, 19 nt, Artificial Sequence
  Description of Artificial Sequence: Synthetic oligonucleotide
  Sense strand starting at position 1982 of SEQ ID NO: 1886435
cggcgccgcguauuuaaau

SEQ ID NO: 2409635 - RNA, 19 nt, Artificial Sequence
  Description of Artificial Sequence: Synthetic oligonucleotide
  Antisense strand to SEQ ID NO: 2409634
auuuaaauacgcggcgccg

SEQ ID NO: 2409636 - RNA, 19 nt, Artificial Sequence
  Description of Artificial Sequence: Synthetic oligonucleotide
  Sense strand starting at position 2270 of SEQ ID NO: 1886435
guagaauaugucgccgguu

SEQ ID NO: 2409637 - RNA, 19 nt, Artificial Sequence
  Description of Artificial Sequence: Synthetic oligonucleotide
  Antisense strand to SEQ ID NO: 2409636
aaccggcgacauauucuac

SEQ ID NO: 2409638 - RNA, 19 nt, Artificial Sequence
  Description of Artificial Sequence: Synthetic oligonucleotide
  Sense strand starting at position 2311 of SEQ ID NO: 1886435
uuuauauguagaggugaac

SEQ ID NO: 2409639 - RNA, 19 nt, Artificial Sequence
  Description of Artificial Sequence: Synthetic oligonucleotide
  Antisense strand to SEQ ID NO: 2409638
guucaccucuacauauaaa

SEQ ID NO: 2409640 - RNA, 19 nt, Artificial Sequence
  Description of Artificial Sequence: Synthetic oligonucleotide
  Sense strand starting at position 2320 of SEQ ID NO: 1886435
agaggugaacuuugcacaa

SEQ ID NO: 2409641 - RNA, 19 nt, Artificial Sequence
  Description of Artificial Sequence: Synthetic oligonucleotide
  Antisense strand to SEQ ID NO: 2409640
uugugcaaaguucaccucu

SEQ ID NO: 2409642 - RNA, 19 nt, Artificial Sequence
  Description of Artificial Sequence: Synthetic oligonucleotide
  Sense strand starting at position 2399 of SEQ ID NO: 1886435
uuccaucugccucagaagu

SEQ ID NO: 2409643 - RNA, 19 nt, Artificial Sequence
  Description of Artificial Sequence: Synthetic oligonucleotide
  Antisense strand to SEQ ID NO: 2409642
acuucugaggcagauggaa

SEQ ID NO: 2409644 - RNA, 19 nt, Artificial Sequence
  Description of Artificial Sequence: Synthetic oligonucleotide
  Sense strand starting at position 2450 of SEQ ID NO: 1886435
uaggguuaagagcauaagu

SEQ ID NO: 2409645 - RNA, 19 nt, Artificial Sequence
  Description of Artificial Sequence: Synthetic oligonucleotide
  Antisense strand to SEQ ID NO: 2409644
acuuaugcucuuaacccua

SEQ ID NO: 2409646 - RNA, 19 nt, Artificial Sequence
  Description of Artificial Sequence: Synthetic oligonucleotide
  Sense strand starting at position 2452 of SEQ ID NO: 1886435
ggguuaagagcauaaguuc

SEQ ID NO: 2409647 - RNA, 19 nt, Artificial Sequence
  Description of Artificial Sequence: Synthetic oligonucleotide
  Antisense strand to SEQ ID NO: 2409646
gaacuuaugcucuuaaccc

SEQ ID NO: 2409648 - RNA, 19 nt, Artificial Sequence
  Description of Artificial Sequence: Synthetic oligonucleotide
  Sense strand starting at position 2536 of SEQ ID NO: 1886435
aaaguaccauuggcaagau

SEQ ID NO: 2409649 - RNA, 19 nt, Artificial Sequence
  Description of Artificial Sequence: Synthetic oligonucleotide
  Antisense strand to SEQ ID NO: 2409648
aucuugccaaugguacuuu

SEQ ID NO: 2409650 - RNA, 19 nt, Artificial Sequence
  Description of Artificial Sequence: Synthetic oligonucleotide
  Sense strand starting at position 2713 of SEQ ID NO: 1886435
cuuugaggacucggguuaa

SEQ ID NO: 2409651 - RNA, 19 nt, Artificial Sequence
  Description of Artificial Sequence: Synthetic oligonucleotide
  Antisense strand to SEQ ID NO: 2409650
uuaacccgaguccucaaag

SEQ ID NO: 2409652 - RNA, 19 nt, Artificial Sequence
  Description of Artificial Sequence: Synthetic oligonucleotide
  Sense strand starting at position 2734 of SEQ ID NO: 1886435
cugugugucgguaacuguu

SEQ ID NO: 2409653 - RNA, 19 nt, Artificial Sequence
  Description of Artificial Sequence: Synthetic oligonucleotide
  Antisense strand to SEQ ID NO: 2409652
aacaguuaccgacacacag

SEQ ID NO: 2409654 - RNA, 19 nt, Artificial Sequence
  Description of Artificial Sequence: Synthetic oligonucleotide
  Sense strand starting at position 2799 of SEQ ID NO: 1886435
ccucccuguccuuaggaga

SEQ ID NO: 2409655 - RNA, 19 nt, Artificial Sequence
  Description of Artificial Sequence: Synthetic oligonucleotide
  Antisense strand to SEQ ID NO: 2409654
ucuccuaaggacagggagg

SEQ ID NO: 2409656 - RNA, 19 nt, Artificial Sequence
  Description of Artificial Sequence: Synthetic oligonucleotide
  Sense strand starting at position 2818 of SEQ ID NO: 1886435
gaggauauguucccaaagc

SEQ ID NO: 2409657 - RNA, 19 nt, Artificial Sequence
  Description of Artificial Sequence: Synthetic oligonucleotide
  Antisense strand to SEQ ID NO: 2409656
gcuuugggaacauauccuc

SEQ ID NO: 2409658 - RNA, 19 nt, Artificial Sequence
  Description of Artificial Sequence: Synthetic oligonucleotide
  Sense strand starting at position 3248 of SEQ ID NO: 1886435
gacugaagauauucuguga

SEQ ID NO: 2409659 - RNA, 19 nt, Artificial Sequence
  Description of Artificial Sequence: Synthetic oligonucleotide
  Antisense strand to SEQ ID NO: 2409658
ucacagaauaucuucaguc

SEQ ID NO: 2409660 - RNA, 19 nt, Artificial Sequence
  Description of Artificial Sequence: Synthetic oligonucleotide
  Sense strand starting at position 3251 of SEQ ID NO: 1886435
ugaagauauucugugagua

SEQ ID NO: 2409661 - RNA, 19 nt, Artificial Sequence
  Description of Artificial Sequence: Synthetic oligonucleotide
  Antisense strand to SEQ ID NO: 2409660
uacucacagaauaucuuca

SEQ ID NO: 2409662 - RNA, 19 nt, Artificial Sequence
  Description of Artificial Sequence: Synthetic oligonucleotide
  Sense strand starting at position 3252 of SEQ ID NO: 1886435
gaagauauucugugaguac

SEQ ID NO: 2409663 - RNA, 19 nt, Artificial Sequence
  Description of Artificial Sequence: Synthetic oligonucleotide
  Antisense strand to SEQ ID NO: 2409662
guacucacagaauaucuuc

SEQ ID NO: 2409664 - RNA, 19 nt, Artificial Sequence
  Description of Artificial Sequence: Synthetic oligonucleotide
  Sense strand starting at position 3255 of SEQ ID NO: 1886435
gauauucugugaguacaaa

SEQ ID NO: 2409665 - RNA, 19 nt, Artificial Sequence
  Description of Artificial Sequence: Synthetic oligonucleotide
  Antisense strand to SEQ ID NO: 2409664
uuuguacucacagaauauc

SEQ ID NO: 2409666 - RNA, 19 nt, Artificial Sequence
  Description of Artificial Sequence: Synthetic oligonucleotide
  Sense strand starting at position 3256 of SEQ ID NO: 1886435
auauucugugaguacaaau

SEQ ID NO: 2409667 - RNA, 19 nt, Artificial Sequence
  Description of Artificial Sequence: Synthetic oligonucleotide
  Antisense strand to SEQ ID NO: 2409666
auuuguacucacagaauau

SEQ ID NO: 2409668 - RNA, 19 nt, Artificial Sequence
  Description of Artificial Sequence: Synthetic oligonucleotide
  Sense strand starting at position 3471 of SEQ ID NO: 1886435
accagaaguccuugagaug

SEQ ID NO: 2409669 - RNA, 19 nt, Artificial Sequence
  Description of Artificial Sequence: Synthetic oligonucleotide
  Antisense strand to SEQ ID NO: 2409668
caucucaaggacuucuggu

SEQ ID NO: 2409670 - RNA, 19 nt, Artificial Sequence
  Description of Artificial Sequence: Synthetic oligonucleotide
  Sense strand starting at position 3472 of SEQ ID NO: 1886435
ccagaaguccuugagaugu

SEQ ID NO: 2409671 - RNA, 19 nt, Artificial Sequence
  Description of Artificial Sequence: Synthetic oligonucleotide
  Antisense strand to SEQ ID NO: 2409670
acaucucaaggacuucugg

SEQ ID NO: 2409672 - RNA, 19 nt, Artificial Sequence
  Description of Artificial Sequence: Synthetic oligonucleotide
  Sense strand starting at position 3566 of SEQ ID NO: 1886435
gcgugaucucugcucggag

SEQ ID NO: 2409673 - RNA, 19 nt, Artificial Sequence
  Description of Artificial Sequence: Synthetic oligonucleotide
  Antisense strand to SEQ ID NO: 2409672
cuccgagcagagaucacgc

SEQ ID NO: 2409674 - RNA, 19 nt, Artificial Sequence
  Description of Artificial Sequence: Synthetic oligonucleotide
  Sense strand starting at position 3976 of SEQ ID NO: 1886435
acacauggcuaucuugaaa

SEQ ID NO: 2409675 - RNA, 19 nt, Artificial Sequence
  Description of Artificial Sequence: Synthetic oligonucleotide
  Antisense strand to SEQ ID NO: 2409674
uuucaagauagccaugugu

SEQ ID NO: 2409676 - RNA, 19 nt, Artificial Sequence
  Description of Artificial Sequence: Synthetic oligonucleotide
  Sense strand starting at position 145 of SEQ ID NO: 1886436
ccgcuuccuucugcaaaga

SEQ ID NO: 2409677 - RNA, 19 nt, Artificial Sequence
  Description of Artificial Sequence: Synthetic oligonucleotide
  Antisense strand to SEQ ID NO: 2409676
ucuuugcagaaggaagcgg

SEQ ID NO: 2409678 - RNA, 19 nt, Artificial Sequence
  Description of Artificial Sequence: Synthetic oligonucleotide
  Sense strand starting at position 607 of SEQ ID NO: 1886436
gagagcguuucgccauguu

SEQ ID NO: 2409679 - RNA, 19 nt, Artificial Sequence
  Description of Artificial Sequence: Synthetic oligonucleotide
  Antisense strand to SEQ ID NO: 2409678
aacauggcgaaacgcucuc

SEQ ID NO: 2409680 - RNA, 19 nt, Artificial Sequence
  Description of Artificial Sequence: Synthetic oligonucleotide
  Sense strand starting at position 771 of SEQ ID NO: 1886436
guagaacuccugcacucaa

SEQ ID NO: 2409681 - RNA, 19 nt, Artificial Sequence
  Description of Artificial Sequence: Synthetic oligonucleotide
  Antisense strand to SEQ ID NO: 2409680
uugagugcaggaguucuac

SEQ ID NO: 2409682 - RNA, 19 nt, Artificial Sequence
  Description of Artificial Sequence: Synthetic oligonucleotide
  Sense strand starting at position 891 of SEQ ID NO: 1886436
ucccuauuagccuagugau

SEQ ID NO: 2409683 - RNA, 19 nt, Artificial Sequence
  Description of Artificial Sequence: Synthetic oligonucleotide
  Antisense strand to SEQ ID NO: 2409682
aucacuaggcuaauaggga

SEQ ID NO: 2409684 - RNA, 19 nt, Artificial Sequence
  Description of Artificial Sequence: Synthetic oligonucleotide
  Sense strand starting at position 894 of SEQ ID NO: 1886436
cuauuagccuagugaucuc

SEQ ID NO: 2409685 - RNA, 19 nt, Artificial Sequence
  Description of Artificial Sequence: Synthetic oligonucleotide
  Antisense strand to SEQ ID NO: 2409684
gagaucacuaggcuaauag

SEQ ID NO: 2409686 - RNA, 19 nt, Artificial Sequence
  Description of Artificial Sequence: Synthetic oligonucleotide
  Sense strand starting at position 1012 of SEQ ID NO: 1886436
acacguggucaguaccuaa

SEQ ID NO: 2409687 - RNA, 19 nt, Artificial Sequence
  Description of Artificial Sequence: Synthetic oligonucleotide
  Antisense strand to SEQ ID NO: 2409686
uuagguacugaccacgugu

SEQ ID NO: 2409688 - RNA, 19 nt, Artificial Sequence
  Description of Artificial Sequence: Synthetic oligonucleotide
  Sense strand starting at position 1078 of SEQ ID NO: 1886436
ccuggaagagacugucuuu

SEQ ID NO: 2409689 - RNA, 19 nt, Artificial Sequence
  Description of Artificial Sequence: Synthetic oligonucleotide
  Antisense strand to SEQ ID NO: 2409688
aaagacagucucuuccagg

SEQ ID NO: 2409690 - RNA, 19 nt, Artificial Sequence
  Description of Artificial Sequence: Synthetic oligonucleotide
  Sense strand starting at position 1101 of SEQ ID NO: 1886436
ggccuuaguuucccugagu

SEQ ID NO: 2409691 - RNA, 19 nt, Artificial Sequence
  Description of Artificial Sequence: Synthetic oligonucleotide
  Antisense strand to SEQ ID NO: 2409690
acucagggaaacuaaggcc

SEQ ID NO: 2409692 - RNA, 19 nt, Artificial Sequence
  Description of Artificial Sequence: Synthetic oligonucleotide
  Sense strand starting at position 1102 of SEQ ID NO: 1886436
gccuuaguuucccugagug

SEQ ID NO: 2409693 - RNA, 19 nt, Artificial Sequence
  Description of Artificial Sequence: Synthetic oligonucleotide
  Antisense strand to SEQ ID NO: 2409692
cacucagggaaacuaaggc

SEQ ID NO: 2409694 - RNA, 19 nt, Artificial Sequence
  Description of Artificial Sequence: Synthetic oligonucleotide
  Sense strand starting at position 1621 of SEQ ID NO: 1886436
ggcugagugcucgagagac

SEQ ID NO: 2409695 - RNA, 19 nt, Artificial Sequence
  Description of Artificial Sequence: Synthetic oligonucleotide
  Antisense strand to SEQ ID NO: 2409694
gucucucgagcacucagcc

SEQ ID NO: 2409696 - RNA, 19 nt, Artificial Sequence
  Description of Artificial Sequence: Synthetic oligonucleotide
  Sense strand starting at position 1966 of SEQ ID NO: 1886436
cgaggcuuucaggagagca

SEQ ID NO: 2409697 - RNA, 19 nt, Artificial Sequence
  Description of Artificial Sequence: Synthetic oligonucleotide
  Antisense strand to SEQ ID NO: 2409696
ugcucuccugaaagccucg

SEQ ID NO: 2409698 - RNA, 19 nt, Artificial Sequence
  Description of Artificial Sequence: Synthetic oligonucleotide
  Sense strand starting at position 2800 of SEQ ID NO: 1886436
uggauugcgccugugucua

SEQ ID NO: 2409699 - RNA, 19 nt, Artificial Sequence
  Description of Artificial Sequence: Synthetic oligonucleotide
  Antisense strand to SEQ ID NO: 2409698
uagacacaggcgcaaucca

SEQ ID NO: 2409700 - RNA, 19 nt, Artificial Sequence
  Description of Artificial Sequence: Synthetic oligonucleotide
  Sense strand starting at position 2802 of SEQ ID NO: 1886436
gauugcgccugugucuaaa

SEQ ID NO: 2409701 - RNA, 19 nt, Artificial Sequence
  Description of Artificial Sequence: Synthetic oligonucleotide
  Antisense strand to SEQ ID NO: 2409700
uuuagacacaggcgcaauc

SEQ ID NO: 2409702 - RNA, 19 nt, Artificial Sequence
  Description of Artificial Sequence: Synthetic oligonucleotide
  Sense strand starting at position 3388 of SEQ ID NO: 1886436
aguaguuauguccaccaug

SEQ ID NO: 2409703 - RNA, 19 nt, Artificial Sequence
  Description of Artificial Sequence: Synthetic oligonucleotide
  Antisense strand to SEQ ID NO: 2409702
caugguggacauaacuacu

SEQ ID NO: 2409704 - RNA, 19 nt, Artificial Sequence
  Description of Artificial Sequence: Synthetic oligonucleotide
  Sense strand starting at position 3410 of SEQ ID NO: 1886436
gcccuuugguauugaguaa

SEQ ID NO: 2409705 - RNA, 19 nt, Artificial Sequence
  Description of Artificial Sequence: Synthetic oligonucleotide
  Antisense strand to SEQ ID NO: 2409704
uuacucaauaccaaagggc

SEQ ID NO: 2409706 - RNA, 19 nt, Artificial Sequence
  Description of Artificial Sequence: Synthetic oligonucleotide
  Sense strand starting at position 3451 of SEQ ID NO: 1886436
gggaucucacagcgugauu

SEQ ID NO: 2409707 - RNA, 19 nt, Artificial Sequence
  Description of Artificial Sequence: Synthetic oligonucleotide
  Antisense strand to SEQ ID NO: 2409706
aaucacgcugugagauccc

SEQ ID NO: 2409708 - RNA, 19 nt, Artificial Sequence
  Description of Artificial Sequence: Synthetic oligonucleotide
  Sense strand starting at position 3453 of SEQ ID NO: 1886436
gaucucacagcgugauugu

SEQ ID NO: 2409709 - RNA, 19 nt, Artificial Sequence
  Description of Artificial Sequence: Synthetic oligonucleotide
  Antisense strand to SEQ ID NO: 2409708
acaaucacgcugugagauc

SEQ ID NO: 2409710 - RNA, 19 nt, Artificial Sequence
  Description of Artificial Sequence: Synthetic oligonucleotide
  Sense strand starting at position 3462 of SEQ ID NO: 1886436
gcgugauugugcggcaguu

SEQ ID NO: 2409711 - RNA, 19 nt, Artificial Sequence
  Description of Artificial Sequence: Synthetic oligonucleotide
  Antisense strand to SEQ ID NO: 2409710
aacugccgcacaaucacgc

SEQ ID NO: 2409712 - RNA, 19 nt, Artificial Sequence
  Description of Artificial Sequence: Synthetic oligonucleotide
  Sense strand starting at position 3463 of SEQ ID NO: 1886436
cgugauugugcggcaguua

SEQ ID NO: 2409713 - RNA, 19 nt, Artificial Sequence
  Description of Artificial Sequence: Synthetic oligonucleotide
  Antisense strand to SEQ ID NO: 2409712
uaacugccgcacaaucacg

SEQ ID NO: 2409714 - RNA, 19 nt, Artificial Sequence
  Description of Artificial Sequence: Synthetic oligonucleotide
  Sense strand starting at position 3518 of SEQ ID NO: 1886436
aaggaaaugucguguuuaa

SEQ ID NO: 2409715 - RNA, 19 nt, Artificial Sequence
  Description of Artificial Sequence: Synthetic oligonucleotide
  Antisense strand to SEQ ID NO: 2409714
uuaaacacgacauuuccuu

SEQ ID NO: 2409716 - RNA, 19 nt, Artificial Sequence
  Description of Artificial Sequence: Synthetic oligonucleotide
  Sense strand starting at position 3525 of SEQ ID NO: 1886436
ugucguguuuaaccgcgua

SEQ ID NO: 2409717 - RNA, 19 nt, Artificial Sequence
  Description of Artificial Sequence: Synthetic oligonucleotide
  Antisense strand to SEQ ID NO: 2409716
uacgcgguuaaacacgaca

SEQ ID NO: 2409718 - RNA, 19 nt, Artificial Sequence
  Description of Artificial Sequence: Synthetic oligonucleotide
  Sense strand starting at position 3528 of SEQ ID NO: 1886436
cguguuuaaccgcguagga

SEQ ID NO: 2409719 - RNA, 19 nt, Artificial Sequence
  Description of Artificial Sequence: Synthetic oligonucleotide
  Antisense strand to SEQ ID NO: 2409718
uccuacgcgguuaaacacg

SEQ ID NO: 2409720 - RNA, 19 nt, Artificial Sequence
  Description of Artificial Sequence: Synthetic oligonucleotide
  Sense strand starting at position 3530 of SEQ ID NO: 1886436
uguuuaaccgcguaggaaa

SEQ ID NO: 2409721 - RNA, 19 nt, Artificial Sequence
  Description of Artificial Sequence: Synthetic oligonucleotide
  Antisense strand to SEQ ID NO: 2409720
uuuccuacgcgguuaaaca

SEQ ID NO: 2409722 - RNA, 19 nt, Artificial Sequence
  Description of Artificial Sequence: Synthetic oligonucleotide
  Sense strand starting at position 3555 of SEQ ID NO: 1886436
cugcucugaaugugaaguu

SEQ ID NO: 2409723 - RNA, 19 nt, Artificial Sequence
  Description of Artificial Sequence: Synthetic oligonucleotide
  Antisense strand to SEQ ID NO: 2409722
aacuucacauucagagcag

SEQ ID NO: 2409724 - RNA, 19 nt, Artificial Sequence
  Description of Artificial Sequence: Synthetic oligonucleotide
  Sense strand starting at position 3556 of SEQ ID NO: 1886436
ugcucugaaugugaaguuu

SEQ ID NO: 2409725 - RNA, 19 nt, Artificial Sequence
  Description of Artificial Sequence: Synthetic oligonucleotide
  Antisense strand to SEQ ID NO: 2409724
aaacuucacauucagagca

SEQ ID NO: 2409726 - RNA, 19 nt, Artificial Sequence
  Description of Artificial Sequence: Synthetic oligonucleotide
  Sense strand starting at position 3562 of SEQ ID NO: 1886436
gaaugugaaguuuggguuu

SEQ ID NO: 2409727 - RNA, 19 nt, Artificial Sequence
  Description of Artificial Sequence: Synthetic oligonucleotide
  Antisense strand to SEQ ID NO: 2409726
aaacccaaacuucacauuc

SEQ ID NO: 2409728 - RNA, 19 nt, Artificial Sequence
  Description of Artificial Sequence: Synthetic oligonucleotide
  Sense strand starting at position 3565 of SEQ ID NO: 1886436
ugugaaguuuggguuuaga

SEQ ID NO: 2409729 - RNA, 19 nt, Artificial Sequence
  Description of Artificial Sequence: Synthetic oligonucleotide
  Antisense strand to SEQ ID NO: 2409728
ucuaaacccaaacuucaca

SEQ ID NO: 2409730 - RNA, 19 nt, Artificial Sequence
  Description of Artificial Sequence: Synthetic oligonucleotide
  Sense strand starting at position 3600 of SEQ ID NO: 1886436
guucuugggucgguggaua

SEQ ID NO: 2409731 - RNA, 19 nt, Artificial Sequence
  Description of Artificial Sequence: Synthetic oligonucleotide
  Antisense strand to SEQ ID NO: 2409730
uauccaccgacccaagaac

SEQ ID NO: 2409732 - RNA, 19 nt, Artificial Sequence
  Description of Artificial Sequence: Synthetic oligonucleotide
  Sense strand starting at position 3608 of SEQ ID NO: 1886436
gucgguggauacuguuaga

SEQ ID NO: 2409733 - RNA, 19 nt, Artificial Sequence
  Description of Artificial Sequence: Synthetic oligonucleotide
  Antisense strand to SEQ ID NO: 2409732
ucuaacaguauccaccgac

SEQ ID NO: 2409734 - RNA, 19 nt, Artificial Sequence
  Description of Artificial Sequence: Synthetic oligonucleotide
  Sense strand starting at position 3611 of SEQ ID NO: 1886436
gguggauacuguuagauca

SEQ ID NO: 2409735 - RNA, 19 nt, Artificial Sequence
  Description of Artificial Sequence: Synthetic oligonucleotide
  Antisense strand to SEQ ID NO: 2409734
ugaucuaacaguauccacc

SEQ ID NO: 2409736 - RNA, 19 nt, Artificial Sequence
  Description of Artificial Sequence: Synthetic oligonucleotide
  Sense strand starting at position 3613 of SEQ ID NO: 1886436
uggauacuguuagaucauu

SEQ ID NO: 2409737 - RNA, 19 nt, Artificial Sequence
  Description of Artificial Sequence: Synthetic oligonucleotide
  Antisense strand to SEQ ID NO: 2409736
aaugaucuaacaguaucca

SEQ ID NO: 2409738 - RNA, 19 nt, Artificial Sequence
  Description of Artificial Sequence: Synthetic oligonucleotide
  Sense strand starting at position 3622 of SEQ ID NO: 1886436
uuagaucauuugcauguga

SEQ ID NO: 2409739 - RNA, 19 nt, Artificial Sequence
  Description of Artificial Sequence: Synthetic oligonucleotide
  Antisense strand to SEQ ID NO: 2409738
ucacaugcaaaugaucuaa

SEQ ID NO: 2409740 - RNA, 19 nt, Artificial Sequence
  Description of Artificial Sequence: Synthetic oligonucleotide
  Sense strand starting at position 3627 of SEQ ID NO: 1886436
ucauuugcaugugaggaaa

SEQ ID NO: 2409741 - RNA, 19 nt, Artificial Sequence
  Description of Artificial Sequence: Synthetic oligonucleotide
  Antisense strand to SEQ ID NO: 2409740
uuuccucacaugcaaauga

SEQ ID NO: 2409742 - RNA, 19 nt, Artificial Sequence
  Description of Artificial Sequence: Synthetic oligonucleotide
  Sense strand starting at position 43 of SEQ ID NO: 1886437
agagaaggcuucuuacugu

SEQ ID NO: 2409743 - RNA, 19 nt, Artificial Sequence
  Description of Artificial Sequence: Synthetic oligonucleotide
  Antisense strand to SEQ ID NO: 2409742
acaguaagaagccuucucu

SEQ ID NO: 2409744 - RNA, 19 nt, Artificial Sequence
  Description of Artificial Sequence: Synthetic oligonucleotide
  Sense strand starting at position 83 of SEQ ID NO: 1886437
guaggaauuaauuggguga

SEQ ID NO: 2409745 - RNA, 19 nt, Artificial Sequence
  Description of Artificial Sequence: Synthetic oligonucleotide
  Antisense strand to SEQ ID NO: 2409744
ucacccaauuaauuccuac

SEQ ID NO: 2409746 - RNA, 19 nt, Artificial Sequence
  Description of Artificial Sequence: Synthetic oligonucleotide
  Sense strand starting at position 87 of SEQ ID NO: 1886437
gaauuaauugggugaacuu

SEQ ID NO: 2409747 - RNA, 19 nt, Artificial Sequence
  Description of Artificial Sequence: Synthetic oligonucleotide
  Antisense strand to SEQ ID NO: 2409746
aaguucacccaauuaauuc

SEQ ID NO: 2409748 - RNA, 19 nt, Artificial Sequence
  Description of Artificial Sequence: Synthetic oligonucleotide
  Sense strand starting at position 161 of SEQ ID NO: 1886437
aagaaugcugcuggagaaa

SEQ ID NO: 2409749 - RNA, 19 nt, Artificial Sequence
  Description of Artificial Sequence: Synthetic oligonucleotide
  Antisense strand to SEQ ID NO: 2409748
uuucuccagcagcauucuu

SEQ ID NO: 2409750 - RNA, 19 nt, Artificial Sequence
  Description of Artificial Sequence: Synthetic oligonucleotide
  Sense strand starting at position 220 of SEQ ID NO: 1886437
gccuaccugggcuauaaga

SEQ ID NO: 2409751 - RNA, 19 nt, Artificial Sequence
  Description of Artificial Sequence: Synthetic oligonucleotide
  Antisense strand to SEQ ID NO: 2409750
ucuuauagcccagguaggc

SEQ ID NO: 2409752 - RNA, 19 nt, Artificial Sequence
  Description of Artificial Sequence: Synthetic oligonucleotide
  Sense strand starting at position 1113 of SEQ ID NO: 1886437
cagguaggaccggaucauu

SEQ ID NO: 2409753 - RNA, 19 nt, Artificial Sequence
  Description of Artificial Sequence: Synthetic oligonucleotide
  Antisense strand to SEQ ID NO: 2409752
aaugauccgguccuaccug

SEQ ID NO: 2409754 - RNA, 19 nt, Artificial Sequence
  Description of Artificial Sequence: Synthetic oligonucleotide
  Sense strand starting at position 1297 of SEQ ID NO: 1886437
auguuagagagauguuuga

SEQ ID NO: 2409755 - RNA, 19 nt, Artificial Sequence
  Description of Artificial Sequence: Synthetic oligonucleotide
  Antisense strand to SEQ ID NO: 2409754
ucaaacaucucucuaacau

SEQ ID NO: 2409756 - RNA, 19 nt, Artificial Sequence
  Description of Artificial Sequence: Synthetic oligonucleotide
  Sense strand starting at position 2041 of SEQ ID NO: 1886437
gacaacuggcucuauguga

SEQ ID NO: 2409757 - RNA, 19 nt, Artificial Sequence
  Description of Artificial Sequence: Synthetic oligonucleotide
  Antisense strand to SEQ ID NO: 2409756
ucacauagagccaguuguc

SEQ ID NO: 2409758 - RNA, 19 nt, Artificial Sequence
  Description of Artificial Sequence: Synthetic oligonucleotide
  Sense strand starting at position 2135 of SEQ ID NO: 1886437
gcagaaagguggcuuauga

SEQ ID NO: 2409759 - RNA, 19 nt, Artificial Sequence
  Description of Artificial Sequence: Synthetic oligonucleotide
  Antisense strand to SEQ ID NO: 2409758
ucauaagccaccuuucugc

SEQ ID NO: 2409760 - RNA, 19 nt, Artificial Sequence
  Description of Artificial Sequence: Synthetic oligonucleotide
  Sense strand starting at position 2142 of SEQ ID NO: 1886437
gguggcuuaugaucaugau

SEQ ID NO: 2409761 - RNA, 19 nt, Artificial Sequence
  Description of Artificial Sequence: Synthetic oligonucleotide
  Antisense strand to SEQ ID NO: 2409760
aucaugaucauaagccacc

SEQ ID NO: 2409762 - RNA, 19 nt, Artificial Sequence
  Description of Artificial Sequence: Synthetic oligonucleotide
  Sense strand starting at position 2143 of SEQ ID NO: 1886437
guggcuuaugaucaugaug

SEQ ID NO: 2409763 - RNA, 19 nt, Artificial Sequence
  Description of Artificial Sequence: Synthetic oligonucleotide
  Antisense strand to SEQ ID NO: 2409762
caucaugaucauaagccac

SEQ ID NO: 2409764 - RNA, 19 nt, Artificial Sequence
  Description of Artificial Sequence: Synthetic oligonucleotide
  Sense strand starting at position 2146 of SEQ ID NO: 1886437
gcuuaugaucaugauguuu

SEQ ID NO: 2409765 - RNA, 19 nt, Artificial Sequence
  Description of Artificial Sequence: Synthetic oligonucleotide
  Antisense strand to SEQ ID NO: 2409764
aaacaucaugaucauaagc

SEQ ID NO: 2409766 - RNA, 19 nt, Artificial Sequence
  Description of Artificial Sequence: Synthetic oligonucleotide
  Sense strand starting at position 2209 of SEQ ID NO: 1886437
gcaaguuacuaagugacuu

SEQ ID NO: 2409767 - RNA, 19 nt, Artificial Sequence
  Description of Artificial Sequence: Synthetic oligonucleotide
  Antisense strand to SEQ ID NO: 2409766
aagucacuuaguaacuugc

SEQ ID NO: 2409768 - RNA, 19 nt, Artificial Sequence
  Description of Artificial Sequence: Synthetic oligonucleotide
  Sense strand starting at position 2262 of SEQ ID NO: 1886437
acacuagccugucuauaag

SEQ ID NO: 2409769 - RNA, 19 nt, Artificial Sequence
  Description of Artificial Sequence: Synthetic oligonucleotide
  Antisense strand to SEQ ID NO: 2409768
cuuauagacaggcuagugu

SEQ ID NO: 2409770 - RNA, 19 nt, Artificial Sequence
  Description of Artificial Sequence: Synthetic oligonucleotide
  Sense strand starting at position 2265 of SEQ ID NO: 1886437
cuagccugucuauaagaaa

SEQ ID NO: 2409771 - RNA, 19 nt, Artificial Sequence
  Description of Artificial Sequence: Synthetic oligonucleotide
  Antisense strand to SEQ ID NO: 2409770
uuucuuauagacaggcuag

SEQ ID NO: 2409772 - RNA, 19 nt, Artificial Sequence
  Description of Artificial Sequence: Synthetic oligonucleotide
  Sense strand starting at position 2276 of SEQ ID NO: 1886437
auaagaaaucuucgagcuc

SEQ ID NO: 2409773 - RNA, 19 nt, Artificial Sequence
  Description of Artificial Sequence: Synthetic oligonucleotide
  Antisense strand to SEQ ID NO: 2409772
gagcucgaagauuucuuau

SEQ ID NO: 2409774 - RNA, 19 nt, Artificial Sequence
  Description of Artificial Sequence: Synthetic oligonucleotide
  Sense strand starting at position 2292 of SEQ ID NO: 1886437
cucaaacauucguugauuc

SEQ ID NO: 2409775 - RNA, 19 nt, Artificial Sequence
  Description of Artificial Sequence: Synthetic oligonucleotide
  Antisense strand to SEQ ID NO: 2409774
gaaucaacgaauguuugag

SEQ ID NO: 2409776 - RNA, 19 nt, Artificial Sequence
  Description of Artificial Sequence: Synthetic oligonucleotide
  Sense strand starting at position 2293 of SEQ ID NO: 1886437
ucaaacauucguugauucu

SEQ ID NO: 2409777 - RNA, 19 nt, Artificial Sequence
  Description of Artificial Sequence: Synthetic oligonucleotide
  Antisense strand to SEQ ID NO: 2409776
agaaucaacgaauguuuga

SEQ ID NO: 2409778 - RNA, 19 nt, Artificial Sequence
  Description of Artificial Sequence: Synthetic oligonucleotide
  Sense strand starting at position 2304 of SEQ ID NO: 1886437
uugauucugugauugcaag

SEQ ID NO: 2409779 - RNA, 19 nt, Artificial Sequence
  Description of Artificial Sequence: Synthetic oligonucleotide
  Antisense strand to SEQ ID NO: 2409778
cuugcaaucacagaaucaa

SEQ ID NO: 2409780 - RNA, 19 nt, Artificial Sequence
  Description of Artificial Sequence: Synthetic oligonucleotide
  Sense strand starting at position 2305 of SEQ ID NO: 1886437
ugauucugugauugcaaga

SEQ ID NO: 2409781 - RNA, 19 nt, Artificial Sequence
  Description of Artificial Sequence: Synthetic oligonucleotide
  Antisense strand to SEQ ID NO: 2409780
ucuugcaaucacagaauca

SEQ ID NO: 2409782 - RNA, 19 nt, Artificial Sequence
  Description of Artificial Sequence: Synthetic oligonucleotide
  Sense strand starting at position 2310 of SEQ ID NO: 1886437
cugugauugcaagacacua

SEQ ID NO: 2409783 - RNA, 19 nt, Artificial Sequence
  Description of Artificial Sequence: Synthetic oligonucleotide
  Antisense strand to SEQ ID NO: 2409782
uagugucuugcaaucacag

SEQ ID NO: 2409784 - RNA, 19 nt, Artificial Sequence
  Description of Artificial Sequence: Synthetic oligonucleotide
  Sense strand starting at position 2374 of SEQ ID NO: 1886437
gcuaauauaucggcagaac

SEQ ID NO: 2409785 - RNA, 19 nt, Artificial Sequence
  Description of Artificial Sequence: Synthetic oligonucleotide
  Antisense strand to SEQ ID NO: 2409784
guucugccgauauauuagc

SEQ ID NO: 2409786 - RNA, 19 nt, Artificial Sequence
  Description of Artificial Sequence: Synthetic oligonucleotide
  Sense strand starting at position 2412 of SEQ ID NO: 1886437
aggauaugugcugaauguu

SEQ ID NO: 2409787 - RNA, 19 nt, Artificial Sequence
  Description of Artificial Sequence: Synthetic oligonucleotide
  Antisense strand to SEQ ID NO: 2409786
aacauucagcacauauccu

SEQ ID NO: 2409788 - RNA, 19 nt, Artificial Sequence
  Description of Artificial Sequence: Synthetic oligonucleotide
  Sense strand starting at position 2424 of SEQ ID NO: 1886437
gaauguucuguugaauauc

SEQ ID NO: 2409789 - RNA, 19 nt, Artificial Sequence
  Description of Artificial Sequence: Synthetic oligonucleotide
  Antisense strand to SEQ ID NO: 2409788
gauauucaacagaacauuc

SEQ ID NO: 2409790 - RNA, 19 nt, Artificial Sequence
  Description of Artificial Sequence: Synthetic oligonucleotide
  Sense strand starting at position 2430 of SEQ ID NO: 1886437
ucuguugaauauccugaau

SEQ ID NO: 2409791 - RNA, 19 nt, Artificial Sequence
  Description of Artificial Sequence: Synthetic oligonucleotide
  Antisense strand to SEQ ID NO: 2409790
auucaggauauucaacaga

SEQ ID NO: 2409792 - RNA, 19 nt, Artificial Sequence
  Description of Artificial Sequence: Synthetic oligonucleotide
  Sense strand starting at position 2485 of SEQ ID NO: 1886437
agaagagaccuaugucauc

SEQ ID NO: 2409793 - RNA, 19 nt, Artificial Sequence
  Description of Artificial Sequence: Synthetic oligonucleotide
  Antisense strand to SEQ ID NO: 2409792
gaugacauaggucucuucu

SEQ ID NO: 2409794 - RNA, 19 nt, Artificial Sequence
  Description of Artificial Sequence: Synthetic oligonucleotide
  Sense strand starting at position 2490 of SEQ ID NO: 1886437
agaccuaugucaucacauu

SEQ ID NO: 2409795 - RNA, 19 nt, Artificial Sequence
  Description of Artificial Sequence: Synthetic oligonucleotide
  Antisense strand to SEQ ID NO: 2409794
aaugugaugacauaggucu

SEQ ID NO: 2409796 - RNA, 19 nt, Artificial Sequence
  Description of Artificial Sequence: Synthetic oligonucleotide
  Sense strand starting at position 2567 of SEQ ID NO: 1886437
guggccauuggauaguauu

SEQ ID NO: 2409797 - RNA, 19 nt, Artificial Sequence
  Description of Artificial Sequence: Synthetic oligonucleotide
  Antisense strand to SEQ ID NO: 2409796
aauacuauccaauggccac

SEQ ID NO: 2409798 - RNA, 19 nt, Artificial Sequence
  Description of Artificial Sequence: Synthetic oligonucleotide
  Sense strand starting at position 2636 of SEQ ID NO: 1886437
gaagacucagcucgacaaa

SEQ ID NO: 2409799 - RNA, 19 nt, Artificial Sequence
  Description of Artificial Sequence: Synthetic oligonucleotide
  Antisense strand to SEQ ID NO: 2409798
uuugucgagcugagucuuc

SEQ ID NO: 2409800 - RNA, 19 nt, Artificial Sequence
  Description of Artificial Sequence: Synthetic oligonucleotide
  Sense strand starting at position 2751 of SEQ ID NO: 1886437
agaggaaacugacaggaua

SEQ ID NO: 2409801 - RNA, 19 nt, Artificial Sequence
  Description of Artificial Sequence: Synthetic oligonucleotide
  Antisense strand to SEQ ID NO: 2409800
uauccugucaguuuccucu

SEQ ID NO: 2409802 - RNA, 19 nt, Artificial Sequence
  Description of Artificial Sequence: Synthetic oligonucleotide
  Sense strand starting at position 2785 of SEQ ID NO: 1886437
aaggcucagucucugagau

SEQ ID NO: 2409803 - RNA, 19 nt, Artificial Sequence
  Description of Artificial Sequence: Synthetic oligonucleotide
  Antisense strand to SEQ ID NO: 2409802
aucucagagacugagccuu

SEQ ID NO: 2409804 - RNA, 19 nt, Artificial Sequence
  Description of Artificial Sequence: Synthetic oligonucleotide
  Sense strand starting at position 2897 of SEQ ID NO: 1886437
aagguaagucccuggcuga

SEQ ID NO: 2409805 - RNA, 19 nt, Artificial Sequence
  Description of Artificial Sequence: Synthetic oligonucleotide
  Antisense strand to SEQ ID NO: 2409804
ucagccagggacuuaccuu

SEQ ID NO: 2409806 - RNA, 19 nt, Artificial Sequence
  Description of Artificial Sequence: Synthetic oligonucleotide
  Sense strand starting at position 3002 of SEQ ID NO: 1886437
cuuuguugaucuccauaag

SEQ ID NO: 2409807 - RNA, 19 nt, Artificial Sequence
  Description of Artificial Sequence: Synthetic oligonucleotide
  Antisense strand to SEQ ID NO: 2409806
cuuauggagaucaacaaag

SEQ ID NO: 2409808 - RNA, 19 nt, Artificial Sequence
  Description of Artificial Sequence: Synthetic oligonucleotide
  Sense strand starting at position 3005 of SEQ ID NO: 1886437
uguugaucuccauaagguu

SEQ ID NO: 2409809 - RNA, 19 nt, Artificial Sequence
  Description of Artificial Sequence: Synthetic oligonucleotide
  Antisense strand to SEQ ID NO: 2409808
aaccuuauggagaucaaca

SEQ ID NO: 2409810 - RNA, 19 nt, Artificial Sequence
  Description of Artificial Sequence: Synthetic oligonucleotide
  Sense strand starting at position 3353 of SEQ ID NO: 1886437
ccuugugauccgcuagcca

SEQ ID NO: 2409811 - RNA, 19 nt, Artificial Sequence
  Description of Artificial Sequence: Synthetic oligonucleotide
  Antisense strand to SEQ ID NO: 2409810
uggcuagcggaucacaagg

SEQ ID NO: 2409812 - RNA, 19 nt, Artificial Sequence
  Description of Artificial Sequence: Synthetic oligonucleotide
  Sense strand starting at position 3810 of SEQ ID NO: 1886437
gagcaaauacuaugugaua

SEQ ID NO: 2409813 - RNA, 19 nt, Artificial Sequence
  Description of Artificial Sequence: Synthetic oligonucleotide
  Antisense strand to SEQ ID NO: 2409812
uaucacauaguauuugcuc

SEQ ID NO: 2409814 - RNA, 19 nt, Artificial Sequence
  Description of Artificial Sequence: Synthetic oligonucleotide
  Sense strand starting at position 3811 of SEQ ID NO: 1886437
agcaaauacuaugugauag

SEQ ID NO: 2409815 - RNA, 19 nt, Artificial Sequence
  Description of Artificial Sequence: Synthetic oligonucleotide
  Antisense strand to SEQ ID NO: 2409814
cuaucacauaguauuugcu

SEQ ID NO: 2409816 - RNA, 19 nt, Artificial Sequence
  Description of Artificial Sequence: Synthetic oligonucleotide
  Sense strand starting at position 3812 of SEQ ID NO: 1886437
gcaaauacuaugugauagg

SEQ ID NO: 2409817 - RNA, 19 nt, Artificial Sequence
  Description of Artificial Sequence: Synthetic oligonucleotide
  Antisense strand to SEQ ID NO: 2409816
ccuaucacauaguauuugc

SEQ ID NO: 2409818 - RNA, 19 nt, Artificial Sequence
  Description of Artificial Sequence: Synthetic oligonucleotide
  Sense strand starting at position 3822 of SEQ ID NO: 1886437
ugugauaggcacugugaua

SEQ ID NO: 2409819 - RNA, 19 nt, Artificial Sequence
  Description of Artificial Sequence: Synthetic oligonucleotide
  Antisense strand to SEQ ID NO: 2409818
uaucacagugccuaucaca

SEQ ID NO: 2409820 - RNA, 19 nt, Artificial Sequence
  Description of Artificial Sequence: Synthetic oligonucleotide
  Sense strand starting at position 3871 of SEQ ID NO: 1886437
ggucccugagcucagaaua

SEQ ID NO: 2409821 - RNA, 19 nt, Artificial Sequence
  Description of Artificial Sequence: Synthetic oligonucleotide
  Antisense strand to SEQ ID NO: 2409820
uauucugagcucagggacc

SEQ ID NO: 2409822 - RNA, 19 nt, Artificial Sequence
  Description of Artificial Sequence: Synthetic oligonucleotide
  Sense strand starting at position 216 of SEQ ID NO: 1886439
guggaauugcugggauggu

SEQ ID NO: 2409823 - RNA, 19 nt, Artificial Sequence
  Description of Artificial Sequence: Synthetic oligonucleotide
  Antisense strand to SEQ ID NO: 2409822
accaucccagcaauuccac

SEQ ID NO: 2409824 - RNA, 19 nt, Artificial Sequence
  Description of Artificial Sequence: Synthetic oligonucleotide
  Sense strand starting at position 1506 of SEQ ID NO: 1886439
ggucuugugccucagacaa

SEQ ID NO: 2409825 - RNA, 19 nt, Artificial Sequence
  Description of Artificial Sequence: Synthetic oligonucleotide
  Antisense strand to SEQ ID NO: 2409824
uugucugaggcacaagacc

SEQ ID NO: 2409826 - RNA, 19 nt, Artificial Sequence
  Description of Artificial Sequence: Synthetic oligonucleotide
  Sense strand starting at position 1980 of SEQ ID NO: 1886439
gucuucccuuuaucgagaa

SEQ ID NO: 2409827 - RNA, 19 nt, Artificial Sequence
  Description of Artificial Sequence: Synthetic oligonucleotide
  Antisense strand to SEQ ID NO: 2409826
uucucgauaaagggaagac

SEQ ID NO: 2409828 - RNA, 19 nt, Artificial Sequence
  Description of Artificial Sequence: Synthetic oligonucleotide
  Sense strand starting at position 1981 of SEQ ID NO: 1886439
ucuucccuuuaucgagaau

SEQ ID NO: 2409829 - RNA, 19 nt, Artificial Sequence
  Description of Artificial Sequence: Synthetic oligonucleotide
  Antisense strand to SEQ ID NO: 2409828
auucucgauaaagggaaga

SEQ ID NO: 2409830 - RNA, 19 nt, Artificial Sequence
  Description of Artificial Sequence: Synthetic oligonucleotide
  Sense strand starting at position 1984 of SEQ ID NO: 1886439
ucccuuuaucgagaauuga

SEQ ID NO: 2409831 - RNA, 19 nt, Artificial Sequence
  Description of Artificial Sequence: Synthetic oligonucleotide
  Antisense strand to SEQ ID NO: 2409830
ucaauucucgauaaaggga

SEQ ID NO: 2409832 - RNA, 19 nt, Artificial Sequence
  Description of Artificial Sequence: Synthetic oligonucleotide
  Sense strand starting at position 2021 of SEQ ID NO: 1886439
cucggcuccucuucugaga

SEQ ID NO: 2409833 - RNA, 19 nt, Artificial Sequence
  Description of Artificial Sequence: Synthetic oligonucleotide
  Antisense strand to SEQ ID NO: 2409832
ucucagaagaggagccgag

SEQ ID NO: 2409834 - RNA, 19 nt, Artificial Sequence
  Description of Artificial Sequence: Synthetic oligonucleotide
  Sense strand starting at position 2023 of SEQ ID NO: 1886439
cggcuccucuucugagaaa

SEQ ID NO: 2409835 - RNA, 19 nt, Artificial Sequence
  Description of Artificial Sequence: Synthetic oligonucleotide
  Antisense strand to SEQ ID NO: 2409834
uuucucagaagaggagccg

SEQ ID NO: 2409836 - RNA, 19 nt, Artificial Sequence
  Description of Artificial Sequence: Synthetic oligonucleotide
  Sense strand starting at position 2024 of SEQ ID NO: 1886439
ggcuccucuucugagaaau

SEQ ID NO: 2409837 - RNA, 19 nt, Artificial Sequence
  Description of Artificial Sequence: Synthetic oligonucleotide
  Antisense strand to SEQ ID NO: 2409836
auuucucagaagaggagcc

SEQ ID NO: 2409838 - RNA, 19 nt, Artificial Sequence
  Description of Artificial Sequence: Synthetic oligonucleotide
  Sense strand starting at position 2087 of SEQ ID NO: 1886439
uccguuuacucagcagaaa

SEQ ID NO: 2409839 - RNA, 19 nt, Artificial Sequence
  Description of Artificial Sequence: Synthetic oligonucleotide
  Antisense strand to SEQ ID NO: 2409838
uuucugcugaguaaacgga

SEQ ID NO: 2409840 - RNA, 19 nt, Artificial Sequence
  Description of Artificial Sequence: Synthetic oligonucleotide
  Sense strand starting at position 2243 of SEQ ID NO: 1886439
gggagaaucugucccuguu

SEQ ID NO: 2409841 - RNA, 19 nt, Artificial Sequence
  Description of Artificial Sequence: Synthetic oligonucleotide
  Antisense strand to SEQ ID NO: 2409840
aacagggacagauucuccc

SEQ ID NO: 2409842 - RNA, 19 nt, Artificial Sequence
  Description of Artificial Sequence: Synthetic oligonucleotide
  Sense strand starting at position 2245 of SEQ ID NO: 1886439
gagaaucugucccuguucu

SEQ ID NO: 2409843 - RNA, 19 nt, Artificial Sequence
  Description of Artificial Sequence: Synthetic oligonucleotide
  Antisense strand to SEQ ID NO: 2409842
agaacagggacagauucuc

SEQ ID NO: 2409844 - RNA, 19 nt, Artificial Sequence
  Description of Artificial Sequence: Synthetic oligonucleotide
  Sense strand starting at position 2344 of SEQ ID NO: 1886439
cucuuugauuccuguggua

SEQ ID NO: 2409845 - RNA, 19 nt, Artificial Sequence
  Description of Artificial Sequence: Synthetic oligonucleotide
  Antisense strand to SEQ ID NO: 2409844
uaccacaggaaucaaagag

SEQ ID NO: 2409846 - RNA, 19 nt, Artificial Sequence
  Description of Artificial Sequence: Synthetic oligonucleotide
  Sense strand starting at position 2346 of SEQ ID NO: 1886439
cuuugauuccugugguaac

SEQ ID NO: 2409847 - RNA, 19 nt, Artificial Sequence
  Description of Artificial Sequence: Synthetic oligonucleotide
  Antisense strand to SEQ ID NO: 2409846
guuaccacaggaaucaaag

SEQ ID NO: 2409848 - RNA, 19 nt, Artificial Sequence
  Description of Artificial Sequence: Synthetic oligonucleotide
  Sense strand starting at position 2527 of SEQ ID NO: 1886439
ccuggcuuucuguaggaca

SEQ ID NO: 2409849 - RNA, 19 nt, Artificial Sequence
  Description of Artificial Sequence: Synthetic oligonucleotide
  Antisense strand to SEQ ID NO: 2409848
uguccuacagaaagccagg

SEQ ID NO: 2409850 - RNA, 19 nt, Artificial Sequence
  Description of Artificial Sequence: Synthetic oligonucleotide
  Sense strand starting at position 2572 of SEQ ID NO: 1886439
uaggucacguccuggaaua

SEQ ID NO: 2409851 - RNA, 19 nt, Artificial Sequence
  Description of Artificial Sequence: Synthetic oligonucleotide
  Antisense strand to SEQ ID NO: 2409850
uauuccaggacgugaccua

SEQ ID NO: 2409852 - RNA, 19 nt, Artificial Sequence
  Description of Artificial Sequence: Synthetic oligonucleotide
  Sense strand starting at position 2574 of SEQ ID NO: 1886439
ggucacguccuggaauaca

SEQ ID NO: 2409853 - RNA, 19 nt, Artificial Sequence
  Description of Artificial Sequence: Synthetic oligonucleotide
  Antisense strand to SEQ ID NO: 2409852
uguauuccaggacgugacc

SEQ ID NO: 2409854 - RNA, 19 nt, Artificial Sequence
  Description of Artificial Sequence: Synthetic oligonucleotide
  Sense strand starting at position 2794 of SEQ ID NO: 1886439
cuaguuagcuggcugauuu

SEQ ID NO: 2409855 - RNA, 19 nt, Artificial Sequence
  Description of Artificial Sequence: Synthetic oligonucleotide
  Antisense strand to SEQ ID NO: 2409854
aaaucagccagcuaacuag

SEQ ID NO: 2409856 - RNA, 19 nt, Artificial Sequence
  Description of Artificial Sequence: Synthetic oligonucleotide
  Sense strand starting at position 2876 of SEQ ID NO: 1886439
ucuguccucucguuaggau

SEQ ID NO: 2409857 - RNA, 19 nt, Artificial Sequence
  Description of Artificial Sequence: Synthetic oligonucleotide
  Antisense strand to SEQ ID NO: 2409856
auccuaacgagaggacaga

SEQ ID NO: 2409858 - RNA, 19 nt, Artificial Sequence
  Description of Artificial Sequence: Synthetic oligonucleotide
  Sense strand starting at position 2877 of SEQ ID NO: 1886439
cuguccucucguuaggauu

SEQ ID NO: 2409859 - RNA, 19 nt, Artificial Sequence
  Description of Artificial Sequence: Synthetic oligonucleotide
  Antisense strand to SEQ ID NO: 2409858
aauccuaacgagaggacag

SEQ ID NO: 2409860 - RNA, 19 nt, Artificial Sequence
  Description of Artificial Sequence: Synthetic oligonucleotide
  Sense strand starting at position 2888 of SEQ ID NO: 1886439
uuaggauucuggugaguuu

SEQ ID NO: 2409861 - RNA, 19 nt, Artificial Sequence
  Description of Artificial Sequence: Synthetic oligonucleotide
  Antisense strand to SEQ ID NO: 2409860
aaacucaccagaauccuaa

SEQ ID NO: 2409862 - RNA, 19 nt, Artificial Sequence
  Description of Artificial Sequence: Synthetic oligonucleotide
  Sense strand starting at position 3518 of SEQ ID NO: 1886439
cggcgagaguucuuaauuu

SEQ ID NO: 2409863 - RNA, 19 nt, Artificial Sequence
  Description of Artificial Sequence: Synthetic oligonucleotide
  Antisense strand to SEQ ID NO: 2409862
aaauuaagaacucucgccg

SEQ ID NO: 2409864 - RNA, 19 nt, Artificial Sequence
  Description of Artificial Sequence: Synthetic oligonucleotide
  Sense strand starting at position 3554 of SEQ ID NO: 1886439
cuuaaauguugagguugau

SEQ ID NO: 2409865 - RNA, 19 nt, Artificial Sequence
  Description of Artificial Sequence: Synthetic oligonucleotide
  Antisense strand to SEQ ID NO: 2409864
aucaaccucaacauuuaag

SEQ ID NO: 2409866 - RNA, 19 nt, Artificial Sequence
  Description of Artificial Sequence: Synthetic oligonucleotide
  Sense strand starting at position 3563 of SEQ ID NO: 1886439
ugagguugauuccucagau

SEQ ID NO: 2409867 - RNA, 19 nt, Artificial Sequence
  Description of Artificial Sequence: Synthetic oligonucleotide
  Antisense strand to SEQ ID NO: 2409866
aucugaggaaucaaccuca

SEQ ID NO: 2409868 - RNA, 19 nt, Artificial Sequence
  Description of Artificial Sequence: Synthetic oligonucleotide
  Sense strand starting at position 3564 of SEQ ID NO: 1886439
gagguugauuccucagaua

SEQ ID NO: 2409869 - RNA, 19 nt, Artificial Sequence
  Description of Artificial Sequence: Synthetic oligonucleotide
  Antisense strand to SEQ ID NO: 2409868
uaucugaggaaucaaccuc

SEQ ID NO: 2409870 - RNA, 19 nt, Artificial Sequence
  Description of Artificial Sequence: Synthetic oligonucleotide
  Sense strand starting at position 3567 of SEQ ID NO: 1886439
guugauuccucagauacca

SEQ ID NO: 2409871 - RNA, 19 nt, Artificial Sequence
  Description of Artificial Sequence: Synthetic oligonucleotide
  Antisense strand to SEQ ID NO: 2409870
ugguaucugaggaaucaac

SEQ ID NO: 2409872 - RNA, 19 nt, Artificial Sequence
  Description of Artificial Sequence: Synthetic oligonucleotide
  Sense strand starting at position 3707 of SEQ ID NO: 1886439
ccauacuguugugguagua

SEQ ID NO: 2409873 - RNA, 19 nt, Artificial Sequence
  Description of Artificial Sequence: Synthetic oligonucleotide
  Antisense strand to SEQ ID NO: 2409872
uacuaccacaacaguaugg

SEQ ID NO: 2409874 - RNA, 19 nt, Artificial Sequence
  Description of Artificial Sequence: Synthetic oligonucleotide
  Sense strand starting at position 3719 of SEQ ID NO: 1886439
gguaguaacucucaugaga

SEQ ID NO: 2409875 - RNA, 19 nt, Artificial Sequence
  Description of Artificial Sequence: Synthetic oligonucleotide
  Antisense strand to SEQ ID NO: 2409874
ucucaugagaguuacuacc

SEQ ID NO: 2409876 - RNA, 19 nt, Artificial Sequence
  Description of Artificial Sequence: Synthetic oligonucleotide
  Sense strand starting at position 674 of SEQ ID NO: 1886440
ucaugcuccugauuugagu

SEQ ID NO: 2409877 - RNA, 19 nt, Artificial Sequence
  Description of Artificial Sequence: Synthetic oligonucleotide
  Antisense strand to SEQ ID NO: 2409876
acucaaaucaggagcauga

SEQ ID NO: 2409878 - RNA, 19 nt, Artificial Sequence
  Description of Artificial Sequence: Synthetic oligonucleotide
  Sense strand starting at position 1035 of SEQ ID NO: 1886440
gcaggagaaucugagagau

SEQ ID NO: 2409879 - RNA, 19 nt, Artificial Sequence
  Description of Artificial Sequence: Synthetic oligonucleotide
  Antisense strand to SEQ ID NO: 2409878
aucucucagauucuccugc

SEQ ID NO: 2409880 - RNA, 19 nt, Artificial Sequence
  Description of Artificial Sequence: Synthetic oligonucleotide
  Sense strand starting at position 1145 of SEQ ID NO: 1886440
augaauaggcguuguuaca

SEQ ID NO: 2409881 - RNA, 19 nt, Artificial Sequence
  Description of Artificial Sequence: Synthetic oligonucleotide
  Antisense strand to SEQ ID NO: 2409880
uguaacaacgccuauucau

SEQ ID NO: 2409882 - RNA, 19 nt, Artificial Sequence
  Description of Artificial Sequence: Synthetic oligonucleotide
  Sense strand starting at position 1270 of SEQ ID NO: 1886440
gccagaauugcugacaaga

SEQ ID NO: 2409883 - RNA, 19 nt, Artificial Sequence
  Description of Artificial Sequence: Synthetic oligonucleotide
  Antisense strand to SEQ ID NO: 2409882
ucuugucagcaauucuggc

SEQ ID NO: 2409884 - RNA, 19 nt, Artificial Sequence
  Description of Artificial Sequence: Synthetic oligonucleotide
  Sense strand starting at position 1373 of SEQ ID NO: 1886440
ggcagagucauccgucuga

SEQ ID NO: 2409885 - RNA, 19 nt, Artificial Sequence
  Description of Artificial Sequence: Synthetic oligonucleotide
  Antisense strand to SEQ ID NO: 2409884
ucagacggaugacucugcc

SEQ ID NO: 2409886 - RNA, 19 nt, Artificial Sequence
  Description of Artificial Sequence: Synthetic oligonucleotide
  Sense strand starting at position 1377 of SEQ ID NO: 1886440
gagucauccgucugacaga

SEQ ID NO: 2409887 - RNA, 19 nt, Artificial Sequence
  Description of Artificial Sequence: Synthetic oligonucleotide
  Antisense strand to SEQ ID NO: 2409886
ucugucagacggaugacuc

SEQ ID NO: 2409888 - RNA, 19 nt, Artificial Sequence
  Description of Artificial Sequence: Synthetic oligonucleotide
  Sense strand starting at position 1384 of SEQ ID NO: 1886440
ccgucugacagaugaaaug

SEQ ID NO: 2409889 - RNA, 19 nt, Artificial Sequence
  Description of Artificial Sequence: Synthetic oligonucleotide
  Antisense strand to SEQ ID NO: 2409888
cauuucaucugucagacgg

SEQ ID NO: 2409890 - RNA, 19 nt, Artificial Sequence
  Description of Artificial Sequence: Synthetic oligonucleotide
  Sense strand starting at position 1720 of SEQ ID NO: 1886440
ucucuuucugcugggauua

SEQ ID NO: 2409891 - RNA, 19 nt, Artificial Sequence
  Description of Artificial Sequence: Synthetic oligonucleotide
  Antisense strand to SEQ ID NO: 2409890
uaaucccagcagaaagaga

SEQ ID NO: 2409892 - RNA, 19 nt, Artificial Sequence
  Description of Artificial Sequence: Synthetic oligonucleotide
  Sense strand starting at position 1731 of SEQ ID NO: 1886440
ugggauuacuaagcuguaa

SEQ ID NO: 2409893 - RNA, 19 nt, Artificial Sequence
  Description of Artificial Sequence: Synthetic oligonucleotide
  Antisense strand to SEQ ID NO: 2409892
uuacagcuuaguaauccca

SEQ ID NO: 2409894 - RNA, 19 nt, Artificial Sequence
  Description of Artificial Sequence: Synthetic oligonucleotide
  Sense strand starting at position 1791 of SEQ ID NO: 1886440
agagcugagagaugguaau

SEQ ID NO: 2409895 - RNA, 19 nt, Artificial Sequence
  Description of Artificial Sequence: Synthetic oligonucleotide
  Antisense strand to SEQ ID NO: 2409894
auuaccaucucucagcucu

SEQ ID NO: 2409896 - RNA, 19 nt, Artificial Sequence
  Description of Artificial Sequence: Synthetic oligonucleotide
  Sense strand starting at position 1813 of SEQ ID NO: 1886440
ucuugagaucccggaucca

SEQ ID NO: 2409897 - RNA, 19 nt, Artificial Sequence
  Description of Artificial Sequence: Synthetic oligonucleotide
  Antisense strand to SEQ ID NO: 2409896
uggauccgggaucucaaga

SEQ ID NO: 2409898 - RNA, 19 nt, Artificial Sequence
  Description of Artificial Sequence: Synthetic oligonucleotide
  Sense strand starting at position 1860 of SEQ ID NO: 1886440
accguuuagauacaugagu

SEQ ID NO: 2409899 - RNA, 19 nt, Artificial Sequence
  Description of Artificial Sequence: Synthetic oligonucleotide
  Antisense strand to SEQ ID NO: 2409898
acucauguaucuaaacggu

SEQ ID NO: 2409900 - RNA, 19 nt, Artificial Sequence
  Description of Artificial Sequence: Synthetic oligonucleotide
  Sense strand starting at position 1862 of SEQ ID NO: 1886440
cguuuagauacaugaguau

SEQ ID NO: 2409901 - RNA, 19 nt, Artificial Sequence
  Description of Artificial Sequence: Synthetic oligonucleotide
  Antisense strand to SEQ ID NO: 2409900
auacucauguaucuaaacg

SEQ ID NO: 2409902 - RNA, 19 nt, Artificial Sequence
  Description of Artificial Sequence: Synthetic oligonucleotide
  Sense strand starting at position 1868 of SEQ ID NO: 1886440
gauacaugaguauggaagu

SEQ ID NO: 2409903 - RNA, 19 nt, Artificial Sequence
  Description of Artificial Sequence: Synthetic oligonucleotide
  Antisense strand to SEQ ID NO: 2409902
acuuccauacucauguauc

SEQ ID NO: 2409904 - RNA, 19 nt, Artificial Sequence
  Description of Artificial Sequence: Synthetic oligonucleotide
  Sense strand starting at position 1979 of SEQ ID NO: 1886440
ggcaguugugagcagaagu

SEQ ID NO: 2409905 - RNA, 19 nt, Artificial Sequence
  Description of Artificial Sequence: Synthetic oligonucleotide
  Antisense strand to SEQ ID NO: 2409904
acuucugcucacaacugcc

SEQ ID NO: 2409906 - RNA, 19 nt, Artificial Sequence
  Description of Artificial Sequence: Synthetic oligonucleotide
  Sense strand starting at position 2117 of SEQ ID NO: 1886440
guccuugagcaaggagaua

SEQ ID NO: 2409907 - RNA, 19 nt, Artificial Sequence
  Description of Artificial Sequence: Synthetic oligonucleotide
  Antisense strand to SEQ ID NO: 2409906
uaucuccuugcucaaggac

SEQ ID NO: 2409908 - RNA, 19 nt, Artificial Sequence
  Description of Artificial Sequence: Synthetic oligonucleotide
  Sense strand starting at position 2129 of SEQ ID NO: 1886440
ggagauacggacugaaguu

SEQ ID NO: 2409909 - RNA, 19 nt, Artificial Sequence
  Description of Artificial Sequence: Synthetic oligonucleotide
  Antisense strand to SEQ ID NO: 2409908
aacuucaguccguaucucc

SEQ ID NO: 2409910 - RNA, 19 nt, Artificial Sequence
  Description of Artificial Sequence: Synthetic oligonucleotide
  Sense strand starting at position 2155 of SEQ ID NO: 1886440
acuugugauagacguguau

SEQ ID NO: 2409911 - RNA, 19 nt, Artificial Sequence
  Description of Artificial Sequence: Synthetic oligonucleotide
  Antisense strand to SEQ ID NO: 2409910
auacacgucuaucacaagu

SEQ ID NO: 2409912 - RNA, 19 nt, Artificial Sequence
  Description of Artificial Sequence: Synthetic oligonucleotide
  Sense strand starting at position 2159 of SEQ ID NO: 1886440
gugauagacguguaucgug

SEQ ID NO: 2409913 - RNA, 19 nt, Artificial Sequence
  Description of Artificial Sequence: Synthetic oligonucleotide
  Antisense strand to SEQ ID NO: 2409912
cacgauacacgucuaucac

SEQ ID NO: 2409914 - RNA, 19 nt, Artificial Sequence
  Description of Artificial Sequence: Synthetic oligonucleotide
  Sense strand starting at position 2168 of SEQ ID NO: 1886440
guguaucgugagcaaggaa

SEQ ID NO: 2409915 - RNA, 19 nt, Artificial Sequence
  Description of Artificial Sequence: Synthetic oligonucleotide
  Antisense strand to SEQ ID NO: 2409914
uuccuugcucacgauacac

SEQ ID NO: 2409916 - RNA, 19 nt, Artificial Sequence
  Description of Artificial Sequence: Synthetic oligonucleotide
  Sense strand starting at position 2171 of SEQ ID NO: 1886440
uaucgugagcaaggaauca

SEQ ID NO: 2409917 - RNA, 19 nt, Artificial Sequence
  Description of Artificial Sequence: Synthetic oligonucleotide
  Antisense strand to SEQ ID NO: 2409916
ugauuccuugcucacgaua

SEQ ID NO: 2409918 - RNA, 19 nt, Artificial Sequence
  Description of Artificial Sequence: Synthetic oligonucleotide
  Sense strand starting at position 2258 of SEQ ID NO: 1886440
cugaaucaaugagcugaua

SEQ ID NO: 2409919 - RNA, 19 nt, Artificial Sequence
  Description of Artificial Sequence: Synthetic oligonucleotide
  Antisense strand to SEQ ID NO: 2409918
uaucagcucauugauucag

SEQ ID NO: 2409920 - RNA, 19 nt, Artificial Sequence
  Description of Artificial Sequence: Synthetic oligonucleotide
  Sense strand starting at position 2326 of SEQ ID NO: 1886440
agcagaaaguguucuagca

SEQ ID NO: 2409921 - RNA, 19 nt, Artificial Sequence
  Description of Artificial Sequence: Synthetic oligonucleotide
  Antisense strand to SEQ ID NO: 2409920
ugcuagaacacuuucugcu

SEQ ID NO: 2409922 - RNA, 19 nt, Artificial Sequence
  Description of Artificial Sequence: Synthetic oligonucleotide
  Sense strand starting at position 2336 of SEQ ID NO: 1886440
guucuagcauuauucugau

SEQ ID NO: 2409923 - RNA, 19 nt, Artificial Sequence
  Description of Artificial Sequence: Synthetic oligonucleotide
  Antisense strand to SEQ ID NO: 2409922
aucagaauaaugcuagaac

SEQ ID NO: 2409924 - RNA, 19 nt, Artificial Sequence
  Description of Artificial Sequence: Synthetic oligonucleotide
  Sense strand starting at position 2404 of SEQ ID NO: 1886440
auuaguccuugugucacua

SEQ ID NO: 2409925 - RNA, 19 nt, Artificial Sequence
  Description of Artificial Sequence: Synthetic oligonucleotide
  Antisense strand to SEQ ID NO: 2409924
uagugacacaaggacuaau

SEQ ID NO: 2409926 - RNA, 19 nt, Artificial Sequence
  Description of Artificial Sequence: Synthetic oligonucleotide
  Sense strand starting at position 2408 of SEQ ID NO: 1886440
guccuugugucacuauaaa

SEQ ID NO: 2409927 - RNA, 19 nt, Artificial Sequence
  Description of Artificial Sequence: Synthetic oligonucleotide
  Antisense strand to SEQ ID NO: 2409926
uuuauagugacacaaggac

SEQ ID NO: 2409928 - RNA, 19 nt, Artificial Sequence
  Description of Artificial Sequence: Synthetic oligonucleotide
  Sense strand starting at position 2444 of SEQ ID NO: 1886440
ugggaucacgccuauaauc

SEQ ID NO: 2409929 - RNA, 19 nt, Artificial Sequence
  Description of Artificial Sequence: Synthetic oligonucleotide
  Antisense strand to SEQ ID NO: 2409928
gauuauaggcgugauccca

SEQ ID NO: 2409930 - RNA, 19 nt, Artificial Sequence
  Description of Artificial Sequence: Synthetic oligonucleotide
  Sense strand starting at position 2619 of SEQ ID NO: 1886440
acacgaggaucacuugaau

SEQ ID NO: 2409931 - RNA, 19 nt, Artificial Sequence
  Description of Artificial Sequence: Synthetic oligonucleotide
  Antisense strand to SEQ ID NO: 2409930
auucaagugauccucgugu

SEQ ID NO: 2409932 - RNA, 19 nt, Artificial Sequence
  Description of Artificial Sequence: Synthetic oligonucleotide
  Sense strand starting at position 2686 of SEQ ID NO: 1886440
cgcugagcgacagaaagau

SEQ ID NO: 2409933 - RNA, 19 nt, Artificial Sequence
  Description of Artificial Sequence: Synthetic oligonucleotide
  Antisense strand to SEQ ID NO: 2409932
aucuuucugucgcucagcg

SEQ ID NO: 2409934 - RNA, 19 nt, Artificial Sequence
  Description of Artificial Sequence: Synthetic oligonucleotide
  Sense strand starting at position 3272 of SEQ ID NO: 1886440
ccagaucucccaugaagug

SEQ ID NO: 2409935 - RNA, 19 nt, Artificial Sequence
  Description of Artificial Sequence: Synthetic oligonucleotide
  Antisense strand to SEQ ID NO: 2409934
cacuucaugggagaucugg

SEQ ID NO: 2409936 - RNA, 19 nt, Artificial Sequence
  Description of Artificial Sequence: Synthetic oligonucleotide
  Sense strand starting at position 3284 of SEQ ID NO: 1886440
ugaagugacugagcgagaa

SEQ ID NO: 2409937 - RNA, 19 nt, Artificial Sequence
  Description of Artificial Sequence: Synthetic oligonucleotide
  Antisense strand to SEQ ID NO: 2409936
uucucgcucagucacuuca

SEQ ID NO: 2409938 - RNA, 19 nt, Artificial Sequence
  Description of Artificial Sequence: Synthetic oligonucleotide
  Sense strand starting at position 3378 of SEQ ID NO: 1886440
caccuccaacguugagaau

SEQ ID NO: 2409939 - RNA, 19 nt, Artificial Sequence
  Description of Artificial Sequence: Synthetic oligonucleotide
  Antisense strand to SEQ ID NO: 2409938
auucucaacguuggaggug

SEQ ID NO: 2409940 - RNA, 19 nt, Artificial Sequence
  Description of Artificial Sequence: Synthetic oligonucleotide
  Sense strand starting at position 3547 of SEQ ID NO: 1886440
cuuggcuugcuccaggaau

SEQ ID NO: 2409941 - RNA, 19 nt, Artificial Sequence
  Description of Artificial Sequence: Synthetic oligonucleotide
  Antisense strand to SEQ ID NO: 2409940
auuccuggagcaagccaag

SEQ ID NO: 2409942 - RNA, 19 nt, Artificial Sequence
  Description of Artificial Sequence: Synthetic oligonucleotide
  Sense strand starting at position 3549 of SEQ ID NO: 1886440
uggcuugcuccaggaauga

SEQ ID NO: 2409943 - RNA, 19 nt, Artificial Sequence
  Description of Artificial Sequence: Synthetic oligonucleotide
  Antisense strand to SEQ ID NO: 2409942
ucauuccuggagcaagcca

SEQ ID NO: 2409944 - RNA, 19 nt, Artificial Sequence
  Description of Artificial Sequence: Synthetic oligonucleotide
  Sense strand starting at position 3579 of SEQ ID NO: 1886440
ggagcaagcccuuauuaga

SEQ ID NO: 2409945 - RNA, 19 nt, Artificial Sequence
  Description of Artificial Sequence: Synthetic oligonucleotide
  Antisense strand to SEQ ID NO: 2409944
ucuaauaagggcuugcucc

SEQ ID NO: 2409946 - RNA, 19 nt, Artificial Sequence
  Description of Artificial Sequence: Synthetic oligonucleotide
  Sense strand starting at position 3593 of SEQ ID NO: 1886440
uuagaugucaguugucuua

SEQ ID NO: 2409947 - RNA, 19 nt, Artificial Sequence
  Description of Artificial Sequence: Synthetic oligonucleotide
  Antisense strand to SEQ ID NO: 2409946
uaagacaacugacaucuaa

SEQ ID NO: 2409948 - RNA, 19 nt, Artificial Sequence
  Description of Artificial Sequence: Synthetic oligonucleotide
  Sense strand starting at position 3595 of SEQ ID NO: 1886440
agaugucaguugucuuagu

SEQ ID NO: 2409949 - RNA, 19 nt, Artificial Sequence
  Description of Artificial Sequence: Synthetic oligonucleotide
  Antisense strand to SEQ ID NO: 2409948
acuaagacaacugacaucu

SEQ ID NO: 2409950 - RNA, 19 nt, Artificial Sequence
  Description of Artificial Sequence: Synthetic oligonucleotide
  Sense strand starting at position 3929 of SEQ ID NO: 1886440
gccagaggugcguugucuu

SEQ ID NO: 2409951 - RNA, 19 nt, Artificial Sequence
  Description of Artificial Sequence: Synthetic oligonucleotide
  Antisense strand to SEQ ID NO: 2409950
aagacaacgcaccucuggc

SEQ ID NO: 2409952 - RNA, 19 nt, Artificial Sequence
  Description of Artificial Sequence: Synthetic oligonucleotide
  Sense strand starting at position 3934 of SEQ ID NO: 1886440
aggugcguugucuuucuau

SEQ ID NO: 2409953 - RNA, 19 nt, Artificial Sequence
  Description of Artificial Sequence: Synthetic oligonucleotide
  Antisense strand to SEQ ID NO: 2409952
auagaaagacaacgcaccu

SEQ ID NO: 2409954 - RNA, 19 nt, Artificial Sequence
  Description of Artificial Sequence: Synthetic oligonucleotide
  Sense strand starting at position 3936 of SEQ ID NO: 1886440
gugcguugucuuucuauca

SEQ ID NO: 2409955 - RNA, 19 nt, Artificial Sequence
  Description of Artificial Sequence: Synthetic oligonucleotide
  Antisense strand to SEQ ID NO: 2409954
ugauagaaagacaacgcac

SEQ ID NO: 2409956 - RNA, 19 nt, Artificial Sequence
  Description of Artificial Sequence: Synthetic oligonucleotide
  Sense strand starting at position 227 of SEQ ID NO: 1886441
aagcauuuccaugguuugu

SEQ ID NO: 2409957 - RNA, 19 nt, Artificial Sequence
  Description of Artificial Sequence: Synthetic oligonucleotide
  Antisense strand to SEQ ID NO: 2409956
acaaaccauggaaaugcuu

SEQ ID NO: 2409958 - RNA, 19 nt, Artificial Sequence
  Description of Artificial Sequence: Synthetic oligonucleotide
  Sense strand starting at position 259 of SEQ ID NO: 1886441
caggaagucuucucugaug

SEQ ID NO: 2409959 - RNA, 19 nt, Artificial Sequence
  Description of Artificial Sequence: Synthetic oligonucleotide
  Antisense strand to SEQ ID NO: 2409958
caucagagaagacuuccug

SEQ ID NO: 2409960 - RNA, 19 nt, Artificial Sequence
  Description of Artificial Sequence: Synthetic oligonucleotide
  Sense strand starting at position 261 of SEQ ID NO: 1886441
ggaagucuucucugaugac

SEQ ID NO: 2409961 - RNA, 19 nt, Artificial Sequence
  Description of Artificial Sequence: Synthetic oligonucleotide
  Antisense strand to SEQ ID NO: 2409960
gucaucagagaagacuucc

SEQ ID NO: 2409962 - RNA, 19 nt, Artificial Sequence
  Description of Artificial Sequence: Synthetic oligonucleotide
  Sense strand starting at position 265 of SEQ ID NO: 1886441
gucuucucugaugacauga

SEQ ID NO: 2409963 - RNA, 19 nt, Artificial Sequence
  Description of Artificial Sequence: Synthetic oligonucleotide
  Antisense strand to SEQ ID NO: 2409962
ucaugucaucagagaagac

SEQ ID NO: 2409964 - RNA, 19 nt, Artificial Sequence
  Description of Artificial Sequence: Synthetic oligonucleotide
  Sense strand starting at position 379 of SEQ ID NO: 1886441
gucuguaaccuauacuuaa

SEQ ID NO: 2409965 - RNA, 19 nt, Artificial Sequence
  Description of Artificial Sequence: Synthetic oligonucleotide
  Antisense strand to SEQ ID NO: 2409964
uuaaguauagguuacagac

SEQ ID NO: 2409966 - RNA, 19 nt, Artificial Sequence
  Description of Artificial Sequence: Synthetic oligonucleotide
  Sense strand starting at position 727 of SEQ ID NO: 1886441
auugguucucgugugcgau

SEQ ID NO: 2409967 - RNA, 19 nt, Artificial Sequence
  Description of Artificial Sequence: Synthetic oligonucleotide
  Antisense strand to SEQ ID NO: 2409966
aucgcacacgagaaccaau

SEQ ID NO: 2409968 - RNA, 19 nt, Artificial Sequence
  Description of Artificial Sequence: Synthetic oligonucleotide
  Sense strand starting at position 733 of SEQ ID NO: 1886441
ucucgugugcgaucuuaac

SEQ ID NO: 2409969 - RNA, 19 nt, Artificial Sequence
  Description of Artificial Sequence: Synthetic oligonucleotide
  Antisense strand to SEQ ID NO: 2409968
guuaagaucgcacacgaga

SEQ ID NO: 2409970 - RNA, 19 nt, Artificial Sequence
  Description of Artificial Sequence: Synthetic oligonucleotide
  Sense strand starting at position 735 of SEQ ID NO: 1886441
ucgugugcgaucuuaacug

SEQ ID NO: 2409971 - RNA, 19 nt, Artificial Sequence
  Description of Artificial Sequence: Synthetic oligonucleotide
  Antisense strand to SEQ ID NO: 2409970
caguuaagaucgcacacga

SEQ ID NO: 2409972 - RNA, 19 nt, Artificial Sequence
  Description of Artificial Sequence: Synthetic oligonucleotide
  Sense strand starting at position 759 of SEQ ID NO: 1886441
ggugguuaccuuuaggaac

SEQ ID NO: 2409973 - RNA, 19 nt, Artificial Sequence
  Description of Artificial Sequence: Synthetic oligonucleotide
  Antisense strand to SEQ ID NO: 2409972
guuccuaaagguaaccacc

SEQ ID NO: 2409974 - RNA, 19 nt, Artificial Sequence
  Description of Artificial Sequence: Synthetic oligonucleotide
  Sense strand starting at position 825 of SEQ ID NO: 1886441
ggugaaacaccucgauauu

SEQ ID NO: 2409975 - RNA, 19 nt, Artificial Sequence
  Description of Artificial Sequence: Synthetic oligonucleotide
  Antisense strand to SEQ ID NO: 2409974
aauaucgagguguuucacc

SEQ ID NO: 2409976 - RNA, 19 nt, Artificial Sequence
  Description of Artificial Sequence: Synthetic oligonucleotide
  Sense strand starting at position 826 of SEQ ID NO: 1886441
gugaaacaccucgauauua

SEQ ID NO: 2409977 - RNA, 19 nt, Artificial Sequence
  Description of Artificial Sequence: Synthetic oligonucleotide
  Antisense strand to SEQ ID NO: 2409976
uaauaucgagguguuucac

SEQ ID NO: 2409978 - RNA, 19 nt, Artificial Sequence
  Description of Artificial Sequence: Synthetic oligonucleotide
  Sense strand starting at position 837 of SEQ ID NO: 1886441
cgauauuaauugguguuaa

SEQ ID NO: 2409979 - RNA, 19 nt, Artificial Sequence
  Description of Artificial Sequence: Synthetic oligonucleotide
  Antisense strand to SEQ ID NO: 2409978
uuaacaccaauuaauaucg

SEQ ID NO: 2409980 - RNA, 19 nt, Artificial Sequence
  Description of Artificial Sequence: Synthetic oligonucleotide
  Sense strand starting at position 979 of SEQ ID NO: 1886441
agcuacaauugguuagaca

SEQ ID NO: 2409981 - RNA, 19 nt, Artificial Sequence
  Description of Artificial Sequence: Synthetic oligonucleotide
  Antisense strand to SEQ ID NO: 2409980
ugucuaaccaauuguagcu

SEQ ID NO: 2409982 - RNA, 19 nt, Artificial Sequence
  Description of Artificial Sequence: Synthetic oligonucleotide
  Sense strand starting at position 980 of SEQ ID NO: 1886441
gcuacaauugguuagacaa

SEQ ID NO: 2409983 - RNA, 19 nt, Artificial Sequence
  Description of Artificial Sequence: Synthetic oligonucleotide
  Antisense strand to SEQ ID NO: 2409982
uugucuaaccaauuguagc

SEQ ID NO: 2409984 - RNA, 19 nt, Artificial Sequence
  Description of Artificial Sequence: Synthetic oligonucleotide
  Sense strand starting at position 1022 of SEQ ID NO: 1886441
cgcagagacaggcauaaau

SEQ ID NO: 2409985 - RNA, 19 nt, Artificial Sequence
  Description of Artificial Sequence: Synthetic oligonucleotide
  Antisense strand to SEQ ID NO: 2409984
auuuaugccugucucugcg

SEQ ID NO: 2409986 - RNA, 19 nt, Artificial Sequence
  Description of Artificial Sequence: Synthetic oligonucleotide
  Sense strand starting at position 1049 of SEQ ID NO: 1886441
augguaaggccuugaucac

SEQ ID NO: 2409987 - RNA, 19 nt, Artificial Sequence
  Description of Artificial Sequence: Synthetic oligonucleotide
  Antisense strand to SEQ ID NO: 2409986
gugaucaaggccuuaccau

SEQ ID NO: 2409988 - RNA, 19 nt, Artificial Sequence
  Description of Artificial Sequence: Synthetic oligonucleotide
  Sense strand starting at position 1234 of SEQ ID NO: 1886441
aaggucauaucagugugau

SEQ ID NO: 2409989 - RNA, 19 nt, Artificial Sequence
  Description of Artificial Sequence: Synthetic oligonucleotide
  Antisense strand to SEQ ID NO: 2409988
aucacacugauaugaccuu

SEQ ID NO: 2409990 - RNA, 19 nt, Artificial Sequence
  Description of Artificial Sequence: Synthetic oligonucleotide
  Sense strand starting at position 1235 of SEQ ID NO: 1886441
aggucauaucagugugaua

SEQ ID NO: 2409991 - RNA, 19 nt, Artificial Sequence
  Description of Artificial Sequence: Synthetic oligonucleotide
  Antisense strand to SEQ ID NO: 2409990
uaucacacugauaugaccu

SEQ ID NO: 2409992 - RNA, 19 nt, Artificial Sequence
  Description of Artificial Sequence: Synthetic oligonucleotide
  Sense strand starting at position 2081 of SEQ ID NO: 1886441
ucgcgcucccuccuuaaau

SEQ ID NO: 2409993 - RNA, 19 nt, Artificial Sequence
  Description of Artificial Sequence: Synthetic oligonucleotide
  Antisense strand to SEQ ID NO: 2409992
auuuaaggagggagcgcga

SEQ ID NO: 2409994 - RNA, 19 nt, Artificial Sequence
  Description of Artificial Sequence: Synthetic oligonucleotide
  Sense strand starting at position 2822 of SEQ ID NO: 1886441
ccgcgcaucccuuugcaaa

SEQ ID NO: 2409995 - RNA, 19 nt, Artificial Sequence
  Description of Artificial Sequence: Synthetic oligonucleotide
  Antisense strand to SEQ ID NO: 2409994
uuugcaaagggaugcgcgg

SEQ ID NO: 2409996 - RNA, 19 nt, Artificial Sequence
  Description of Artificial Sequence: Synthetic oligonucleotide
  Sense strand starting at position 2872 of SEQ ID NO: 1886441
gcucuuucuccagauguga

SEQ ID NO: 2409997 - RNA, 19 nt, Artificial Sequence
  Description of Artificial Sequence: Synthetic oligonucleotide
  Antisense strand to SEQ ID NO: 2409996
ucacaucuggagaaagagc

SEQ ID NO: 2409998 - RNA, 19 nt, Artificial Sequence
  Description of Artificial Sequence: Synthetic oligonucleotide
  Sense strand starting at position 3204 of SEQ ID NO: 1886441
uuuguuguacugggaauua

SEQ ID NO: 2409999 - RNA, 19 nt, Artificial Sequence
  Description of Artificial Sequence: Synthetic oligonucleotide
  Antisense strand to SEQ ID NO: 2409998
uaauucccaguacaacaaa

SEQ ID NO: 2410000 - RNA, 19 nt, Artificial Sequence
  Description of Artificial Sequence: Synthetic oligonucleotide
  Sense strand starting at position 3289 of SEQ ID NO: 1886441
ggugguaauuuagaugaaa

SEQ ID NO: 2410001 - RNA, 19 nt, Artificial Sequence
  Description of Artificial Sequence: Synthetic oligonucleotide
  Antisense strand to SEQ ID NO: 2410000
uuucaucuaaauuaccacc

SEQ ID NO: 2410002 - RNA, 19 nt, Artificial Sequence
  Description of Artificial Sequence: Synthetic oligonucleotide
  Sense strand starting at position 3337 of SEQ ID NO: 1886441
auacaaaguugcuccugaa

SEQ ID NO: 2410003 - RNA, 19 nt, Artificial Sequence
  Description of Artificial Sequence: Synthetic oligonucleotide
  Antisense strand to SEQ ID NO: 2410002
uucaggagcaacuuuguau

SEQ ID NO: 2410004 - RNA, 19 nt, Artificial Sequence
  Description of Artificial Sequence: Synthetic oligonucleotide
  Sense strand starting at position 3461 of SEQ ID NO: 1886441
cguguuuguaaugucguaa

SEQ ID NO: 2410005 - RNA, 19 nt, Artificial Sequence
  Description of Artificial Sequence: Synthetic oligonucleotide
  Antisense strand to SEQ ID NO: 2410004
uuacgacauuacaaacacg

SEQ ID NO: 2410006 - RNA, 19 nt, Artificial Sequence
  Description of Artificial Sequence: Synthetic oligonucleotide
  Sense strand starting at position 3462 of SEQ ID NO: 1886441
guguuuguaaugucguaac

SEQ ID NO: 2410007 - RNA, 19 nt, Artificial Sequence
  Description of Artificial Sequence: Synthetic oligonucleotide
  Antisense strand to SEQ ID NO: 2410006
guuacgacauuacaaacac

SEQ ID NO: 2410008 - RNA, 19 nt, Artificial Sequence
  Description of Artificial Sequence: Synthetic oligonucleotide
  Sense strand starting at position 3536 of SEQ ID NO: 1886441
uguauaacucagcacugua

SEQ ID NO: 2410009 - RNA, 19 nt, Artificial Sequence
  Description of Artificial Sequence: Synthetic oligonucleotide
  Antisense strand to SEQ ID NO: 2410008
uacagugcugaguuauaca

SEQ ID NO: 2410010 - RNA, 19 nt, Artificial Sequence
  Description of Artificial Sequence: Synthetic oligonucleotide
  Sense strand starting at position 3685 of SEQ ID NO: 1886441
cuaaauucguaauugagau

SEQ ID NO: 2410011 - RNA, 19 nt, Artificial Sequence
  Description of Artificial Sequence: Synthetic oligonucleotide
  Antisense strand to SEQ ID NO: 2410010
aucucaauuacgaauuuag

SEQ ID NO: 2410012 - RNA, 19 nt, Artificial Sequence
  Description of Artificial Sequence: Synthetic oligonucleotide
  Sense strand starting at position 3711 of SEQ ID NO: 1886441
auucgaaacguuuaacuac

SEQ ID NO: 2410013 - RNA, 19 nt, Artificial Sequence
  Description of Artificial Sequence: Synthetic oligonucleotide
  Antisense strand to SEQ ID NO: 2410012
guaguuaaacguuucgaau

SEQ ID NO: 2410014 - RNA, 19 nt, Artificial Sequence
  Description of Artificial Sequence: Synthetic oligonucleotide
  Sense strand starting at position 3759 of SEQ ID NO: 1886441
uaagguaaccuaggacuuu

SEQ ID NO: 2410015 - RNA, 19 nt, Artificial Sequence
  Description of Artificial Sequence: Synthetic oligonucleotide
  Antisense strand to SEQ ID NO: 2410014
aaaguccuagguuaccuua

SEQ ID NO: 2410016 - RNA, 19 nt, Artificial Sequence
  Description of Artificial Sequence: Synthetic oligonucleotide
  Sense strand starting at position 3770 of SEQ ID NO: 1886441
aggacuuucuagcugauga

SEQ ID NO: 2410017 - RNA, 19 nt, Artificial Sequence
  Description of Artificial Sequence: Synthetic oligonucleotide
  Antisense strand to SEQ ID NO: 2410016
ucaucagcuagaaaguccu

SEQ ID NO: 2410018 - RNA, 19 nt, Artificial Sequence
  Description of Artificial Sequence: Synthetic oligonucleotide
  Sense strand starting at position 3771 of SEQ ID NO: 1886441
ggacuuucuagcugaugaa

SEQ ID NO: 2410019 - RNA, 19 nt, Artificial Sequence
  Description of Artificial Sequence: Synthetic oligonucleotide
  Antisense strand to SEQ ID NO: 2410018
uucaucagcuagaaagucc

SEQ ID NO: 2410020 - RNA, 19 nt, Artificial Sequence
  Description of Artificial Sequence: Synthetic oligonucleotide
  Sense strand starting at position 3775 of SEQ ID NO: 1886441
uuucuagcugaugaauauu

SEQ ID NO: 2410021 - RNA, 19 nt, Artificial Sequence
  Description of Artificial Sequence: Synthetic oligonucleotide
  Antisense strand to SEQ ID NO: 2410020
aauauucaucagcuagaaa

SEQ ID NO: 2410022 - RNA, 19 nt, Artificial Sequence
  Description of Artificial Sequence: Synthetic oligonucleotide
  Sense strand starting at position 3810 of SEQ ID NO: 1886441
cguagugauuucuuuauua

SEQ ID NO: 2410023 - RNA, 19 nt, Artificial Sequence
  Description of Artificial Sequence: Synthetic oligonucleotide
  Antisense strand to SEQ ID NO: 2410022
uaauaaagaaaucacuacg

SEQ ID NO: 2410024 - RNA, 19 nt, Artificial Sequence
  Description of Artificial Sequence: Synthetic oligonucleotide
  Sense strand starting at position 3889 of SEQ ID NO: 1886441
acagucauuccugggaaag

SEQ ID NO: 2410025 - RNA, 19 nt, Artificial Sequence
  Description of Artificial Sequence: Synthetic oligonucleotide
  Antisense strand to SEQ ID NO: 2410024
cuuucccaggaaugacugu

SEQ ID NO: 2410026 - RNA, 19 nt, Artificial Sequence
  Description of Artificial Sequence: Synthetic oligonucleotide
  Sense strand starting at position 3890 of SEQ ID NO: 1886441
cagucauuccugggaaagg

SEQ ID NO: 2410027 - RNA, 19 nt, Artificial Sequence
  Description of Artificial Sequence: Synthetic oligonucleotide
  Antisense strand to SEQ ID NO: 2410026
ccuuucccaggaaugacug

SEQ ID NO: 2410028 - RNA, 19 nt, Artificial Sequence
  Description of Artificial Sequence: Synthetic oligonucleotide
  Sense strand starting at position 3916 of SEQ ID NO: 1886441
uuacucuuucgugauaaac

SEQ ID NO: 2410029 - RNA, 19 nt, Artificial Sequence
  Description of Artificial Sequence: Synthetic oligonucleotide
  Antisense strand to SEQ ID NO: 2410028
guuuaucacgaaagaguaa

SEQ ID NO: 2410030 - RNA, 19 nt, Artificial Sequence
  Description of Artificial Sequence: Synthetic oligonucleotide
  Sense strand starting at position 3934 of SEQ ID NO: 1886441
ccguaugcacacuaggauu

SEQ ID NO: 2410031 - RNA, 19 nt, Artificial Sequence
  Description of Artificial Sequence: Synthetic oligonucleotide
  Antisense strand to SEQ ID NO: 2410030
aauccuagugugcauacgg

SEQ ID NO: 2410032 - RNA, 19 nt, Artificial Sequence
  Description of Artificial Sequence: Synthetic oligonucleotide
  Sense strand starting at position 3946 of SEQ ID NO: 1886441
uaggauuucugaucguguu

SEQ ID NO: 2410033 - RNA, 19 nt, Artificial Sequence
  Description of Artificial Sequence: Synthetic oligonucleotide
  Antisense strand to SEQ ID NO: 2410032
aacacgaucagaaauccua

SEQ ID NO: 2410034 - RNA, 19 nt, Artificial Sequence
  Description of Artificial Sequence: Synthetic oligonucleotide
  Sense strand starting at position 3947 of SEQ ID NO: 1886441
aggauuucugaucguguug

SEQ ID NO: 2410035 - RNA, 19 nt, Artificial Sequence
  Description of Artificial Sequence: Synthetic oligonucleotide
  Antisense strand to SEQ ID NO: 2410034
caacacgaucagaaauccu

SEQ ID NO: 2410036 - RNA, 19 nt, Artificial Sequence
  Description of Artificial Sequence: Synthetic oligonucleotide
  Sense strand starting at position 489 of SEQ ID NO: 1886442
aucgcuugaacccgaguaa

SEQ ID NO: 2410037 - RNA, 19 nt, Artificial Sequence
  Description of Artificial Sequence: Synthetic oligonucleotide
  Antisense strand to SEQ ID NO: 2410036
uuacucggguucaagcgau

SEQ ID NO: 2410038 - RNA, 19 nt, Artificial Sequence
  Description of Artificial Sequence: Synthetic oligonucleotide
  Sense strand starting at position 710 of SEQ ID NO: 1886442
aucuguacccuccaguaga

SEQ ID NO: 2410039 - RNA, 19 nt, Artificial Sequence
  Description of Artificial Sequence: Synthetic oligonucleotide
  Antisense strand to SEQ ID NO: 2410038
ucuacuggaggguacagau

SEQ ID NO: 2410040 - RNA, 19 nt, Artificial Sequence
  Description of Artificial Sequence: Synthetic oligonucleotide
  Sense strand starting at position 713 of SEQ ID NO: 1886442
uguacccuccaguagaaua

SEQ ID NO: 2410041 - RNA, 19 nt, Artificial Sequence
  Description of Artificial Sequence: Synthetic oligonucleotide
  Antisense strand to SEQ ID NO: 2410040
uauucuacuggaggguaca

SEQ ID NO: 2410042 - RNA, 19 nt, Artificial Sequence
  Description of Artificial Sequence: Synthetic oligonucleotide
  Sense strand starting at position 749 of SEQ ID NO: 1886442
ggaaguucuuucguggagu

SEQ ID NO: 2410043 - RNA, 19 nt, Artificial Sequence
  Description of Artificial Sequence: Synthetic oligonucleotide
  Antisense strand to SEQ ID NO: 2410042
acuccacgaaagaacuucc

SEQ ID NO: 2410044 - RNA, 19 nt, Artificial Sequence
  Description of Artificial Sequence: Synthetic oligonucleotide
  Sense strand starting at position 750 of SEQ ID NO: 1886442
gaaguucuuucguggagua

SEQ ID NO: 2410045 - RNA, 19 nt, Artificial Sequence
  Description of Artificial Sequence: Synthetic oligonucleotide
  Antisense strand to SEQ ID NO: 2410044
uacuccacgaaagaacuuc

SEQ ID NO: 2410046 - RNA, 19 nt, Artificial Sequence
  Description of Artificial Sequence: Synthetic oligonucleotide
  Sense strand starting at position 751 of SEQ ID NO: 1886442
aaguucuuucguggaguac

SEQ ID NO: 2410047 - RNA, 19 nt, Artificial Sequence
  Description of Artificial Sequence: Synthetic oligonucleotide
  Antisense strand to SEQ ID NO: 2410046
guacuccacgaaagaacuu

SEQ ID NO: 2410048 - RNA, 19 nt, Artificial Sequence
  Description of Artificial Sequence: Synthetic oligonucleotide
  Sense strand starting at position 752 of SEQ ID NO: 1886442
aguucuuucguggaguacu

SEQ ID NO: 2410049 - RNA, 19 nt, Artificial Sequence
  Description of Artificial Sequence: Synthetic oligonucleotide
  Antisense strand to SEQ ID NO: 2410048
aguacuccacgaaagaacu

SEQ ID NO: 2410050 - RNA, 19 nt, Artificial Sequence
  Description of Artificial Sequence: Synthetic oligonucleotide
  Sense strand starting at position 755 of SEQ ID NO: 1886442
ucuuucguggaguacuaua

SEQ ID NO: 2410051 - RNA, 19 nt, Artificial Sequence
  Description of Artificial Sequence: Synthetic oligonucleotide
  Antisense strand to SEQ ID NO: 2410050
uauaguacuccacgaaaga

SEQ ID NO: 2410052 - RNA, 19 nt, Artificial Sequence
  Description of Artificial Sequence: Synthetic oligonucleotide
  Sense strand starting at position 760 of SEQ ID NO: 1886442
cguggaguacuauauccuu

SEQ ID NO: 2410053 - RNA, 19 nt, Artificial Sequence
  Description of Artificial Sequence: Synthetic oligonucleotide
  Antisense strand to SEQ ID NO: 2410052
aaggauauaguacuccacg

SEQ ID NO: 2410054 - RNA, 19 nt, Artificial Sequence
  Description of Artificial Sequence: Synthetic oligonucleotide
  Sense strand starting at position 815 of SEQ ID NO: 1886442
cggagaguauuuguugagu

SEQ ID NO: 2410055 - RNA, 19 nt, Artificial Sequence
  Description of Artificial Sequence: Synthetic oligonucleotide
  Antisense strand to SEQ ID NO: 2410054
acucaacaaauacucuccg

SEQ ID NO: 2410056 - RNA, 19 nt, Artificial Sequence
  Description of Artificial Sequence: Synthetic oligonucleotide
  Sense strand starting at position 817 of SEQ ID NO: 1886442
gagaguauuuguugaguua

SEQ ID NO: 2410057 - RNA, 19 nt, Artificial Sequence
  Description of Artificial Sequence: Synthetic oligonucleotide
  Antisense strand to SEQ ID NO: 2410056
uaacucaacaaauacucuc

SEQ ID NO: 2410058 - RNA, 19 nt, Artificial Sequence
  Description of Artificial Sequence: Synthetic oligonucleotide
  Sense strand starting at position 820 of SEQ ID NO: 1886442
aguauuuguugaguuauuc

SEQ ID NO: 2410059 - RNA, 19 nt, Artificial Sequence
  Description of Artificial Sequence: Synthetic oligonucleotide
  Antisense strand to SEQ ID NO: 2410058
gaauaacucaacaaauacu

SEQ ID NO: 2410060 - RNA, 19 nt, Artificial Sequence
  Description of Artificial Sequence: Synthetic oligonucleotide
  Sense strand starting at position 828 of SEQ ID NO: 1886442
uugaguuauucugcucuaa

SEQ ID NO: 2410061 - RNA, 19 nt, Artificial Sequence
  Description of Artificial Sequence: Synthetic oligonucleotide
  Antisense strand to SEQ ID NO: 2410060
uuagagcagaauaacucaa

SEQ ID NO: 2410062 - RNA, 19 nt, Artificial Sequence
  Description of Artificial Sequence: Synthetic oligonucleotide
  Sense strand starting at position 847 of SEQ ID NO: 1886442
uuggaugcagacugaaauu

SEQ ID NO: 2410063 - RNA, 19 nt, Artificial Sequence
  Description of Artificial Sequence: Synthetic oligonucleotide
  Antisense strand to SEQ ID NO: 2410062
aauuucagucugcauccaa

SEQ ID NO: 2410064 - RNA, 19 nt, Artificial Sequence
  Description of Artificial Sequence: Synthetic oligonucleotide
  Sense strand starting at position 875 of SEQ ID NO: 1886442
gaaguaguguaaucugaug

SEQ ID NO: 2410065 - RNA, 19 nt, Artificial Sequence
  Description of Artificial Sequence: Synthetic oligonucleotide
  Antisense strand to SEQ ID NO: 2410064
caucagauuacacuacuuc

SEQ ID NO: 2410066 - RNA, 19 nt, Artificial Sequence
  Description of Artificial Sequence: Synthetic oligonucleotide
  Sense strand starting at position 877 of SEQ ID NO: 1886442
aguaguguaaucugaugcu

SEQ ID NO: 2410067 - RNA, 19 nt, Artificial Sequence
  Description of Artificial Sequence: Synthetic oligonucleotide
  Antisense strand to SEQ ID NO: 2410066
agcaucagauuacacuacu

SEQ ID NO: 2410068 - RNA, 19 nt, Artificial Sequence
  Description of Artificial Sequence: Synthetic oligonucleotide
  Sense strand starting at position 1007 of SEQ ID NO: 1886442
auccuaucagucuguccaa

SEQ ID NO: 2410069 - RNA, 19 nt, Artificial Sequence
  Description of Artificial Sequence: Synthetic oligonucleotide
  Antisense strand to SEQ ID NO: 2410068
uuggacagacugauaggau

SEQ ID NO: 2410070 - RNA, 19 nt, Artificial Sequence
  Description of Artificial Sequence: Synthetic oligonucleotide
  Sense strand starting at position 1014 of SEQ ID NO: 1886442
cagucuguccaagggcaaa

SEQ ID NO: 2410071 - RNA, 19 nt, Artificial Sequence
  Description of Artificial Sequence: Synthetic oligonucleotide
  Antisense strand to SEQ ID NO: 2410070
uuugcccuuggacagacug

SEQ ID NO: 2410072 - RNA, 19 nt, Artificial Sequence
  Description of Artificial Sequence: Synthetic oligonucleotide
  Sense strand starting at position 1079 of SEQ ID NO: 1886442
gaacgcuaaucccaguguu

SEQ ID NO: 2410073 - RNA, 19 nt, Artificial Sequence
  Description of Artificial Sequence: Synthetic oligonucleotide
  Antisense strand to SEQ ID NO: 2410072
aacacugggauuagcguuc

SEQ ID NO: 2410074 - RNA, 19 nt, Artificial Sequence
  Description of Artificial Sequence: Synthetic oligonucleotide
  Sense strand starting at position 1246 of SEQ ID NO: 1886442
ccgugaggcuucucaucca

SEQ ID NO: 2410075 - RNA, 19 nt, Artificial Sequence
  Description of Artificial Sequence: Synthetic oligonucleotide
  Antisense strand to SEQ ID NO: 2410074
uggaugagaagccucacgg

SEQ ID NO: 2410076 - RNA, 19 nt, Artificial Sequence
  Description of Artificial Sequence: Synthetic oligonucleotide
  Sense strand starting at position 1249 of SEQ ID NO: 1886442
ugaggcuucucauccacau

SEQ ID NO: 2410077 - RNA, 19 nt, Artificial Sequence
  Description of Artificial Sequence: Synthetic oligonucleotide
  Antisense strand to SEQ ID NO: 2410076
auguggaugagaagccuca

SEQ ID NO: 2410078 - RNA, 19 nt, Artificial Sequence
  Description of Artificial Sequence: Synthetic oligonucleotide
  Sense strand starting at position 1406 of SEQ ID NO: 1886442
gcuuguucugaaugccacu

SEQ ID NO: 2410079 - RNA, 19 nt, Artificial Sequence
  Description of Artificial Sequence: Synthetic oligonucleotide
  Antisense strand to SEQ ID NO: 2410078
aguggcauucagaacaagc

SEQ ID NO: 2410080 - RNA, 19 nt, Artificial Sequence
  Description of Artificial Sequence: Synthetic oligonucleotide
  Sense strand starting at position 2077 of SEQ ID NO: 1886442
cccaguguuucuccucuuu

SEQ ID NO: 2410081 - RNA, 19 nt, Artificial Sequence
  Description of Artificial Sequence: Synthetic oligonucleotide
  Antisense strand to SEQ ID NO: 2410080
aaagaggagaaacacuggg

SEQ ID NO: 2410082 - RNA, 19 nt, Artificial Sequence
  Description of Artificial Sequence: Synthetic oligonucleotide
  Sense strand starting at position 2092 of SEQ ID NO: 1886442
cuuugaccacgaggagaau

SEQ ID NO: 2410083 - RNA, 19 nt, Artificial Sequence
  Description of Artificial Sequence: Synthetic oligonucleotide
  Antisense strand to SEQ ID NO: 2410082
auucuccucguggucaaag

SEQ ID NO: 2410084 - RNA, 19 nt, Artificial Sequence
  Description of Artificial Sequence: Synthetic oligonucleotide
  Sense strand starting at position 2676 of SEQ ID NO: 1886442
aagaguuugcggugaacug

SEQ ID NO: 2410085 - RNA, 19 nt, Artificial Sequence
  Description of Artificial Sequence: Synthetic oligonucleotide
  Antisense strand to SEQ ID NO: 2410084
caguucaccgcaaacucuu

SEQ ID NO: 2410086 - RNA, 19 nt, Artificial Sequence
  Description of Artificial Sequence: Synthetic oligonucleotide
  Sense strand starting at position 2677 of SEQ ID NO: 1886442
agaguuugcggugaacuga

SEQ ID NO: 2410087 - RNA, 19 nt, Artificial Sequence
  Description of Artificial Sequence: Synthetic oligonucleotide
  Antisense strand to SEQ ID NO: 2410086
ucaguucaccgcaaacucu

SEQ ID NO: 2410088 - RNA, 19 nt, Artificial Sequence
  Description of Artificial Sequence: Synthetic oligonucleotide
  Sense strand starting at position 2914 of SEQ ID NO: 1886442
uuuccuuucuuguagacau

SEQ ID NO: 2410089 - RNA, 19 nt, Artificial Sequence
  Description of Artificial Sequence: Synthetic oligonucleotide
  Antisense strand to SEQ ID NO: 2410088
augucuacaagaaaggaaa

SEQ ID NO: 2410090 - RNA, 19 nt, Artificial Sequence
  Description of Artificial Sequence: Synthetic oligonucleotide
  Sense strand starting at position 3037 of SEQ ID NO: 1886442
cuggcaguugucugauuuc

SEQ ID NO: 2410091 - RNA, 19 nt, Artificial Sequence
  Description of Artificial Sequence: Synthetic oligonucleotide
  Antisense strand to SEQ ID NO: 2410090
gaaaucagacaacugccag

SEQ ID NO: 2410092 - RNA, 19 nt, Artificial Sequence
  Description of Artificial Sequence: Synthetic oligonucleotide
  Sense strand starting at position 3043 of SEQ ID NO: 1886442
guugucugauuucuaguaa

SEQ ID NO: 2410093 - RNA, 19 nt, Artificial Sequence
  Description of Artificial Sequence: Synthetic oligonucleotide
  Antisense strand to SEQ ID NO: 2410092
uuacuagaaaucagacaac

SEQ ID NO: 2410094 - RNA, 19 nt, Artificial Sequence
  Description of Artificial Sequence: Synthetic oligonucleotide
  Sense strand starting at position 3044 of SEQ ID NO: 1886442
uugucugauuucuaguaac

SEQ ID NO: 2410095 - RNA, 19 nt, Artificial Sequence
  Description of Artificial Sequence: Synthetic oligonucleotide
  Antisense strand to SEQ ID NO: 2410094
guuacuagaaaucagacaa

SEQ ID NO: 2410096 - RNA, 19 nt, Artificial Sequence
  Description of Artificial Sequence: Synthetic oligonucleotide
  Sense strand starting at position 3047 of SEQ ID NO: 1886442
ucugauuucuaguaacugu

SEQ ID NO: 2410097 - RNA, 19 nt, Artificial Sequence
  Description of Artificial Sequence: Synthetic oligonucleotide
  Antisense strand to SEQ ID NO: 2410096
acaguuacuagaaaucaga

SEQ ID NO: 2410098 - RNA, 19 nt, Artificial Sequence
  Description of Artificial Sequence: Synthetic oligonucleotide
  Sense strand starting at position 3072 of SEQ ID NO: 1886442
uugguaggugcguaauuca

SEQ ID NO: 2410099 - RNA, 19 nt, Artificial Sequence
  Description of Artificial Sequence: Synthetic oligonucleotide
  Antisense strand to SEQ ID NO: 2410098
ugaauuacgcaccuaccaa

SEQ ID NO: 2410100 - RNA, 19 nt, Artificial Sequence
  Description of Artificial Sequence: Synthetic oligonucleotide
  Sense strand starting at position 3075 of SEQ ID NO: 1886442
guaggugcguaauucagau

SEQ ID NO: 2410101 - RNA, 19 nt, Artificial Sequence
  Description of Artificial Sequence: Synthetic oligonucleotide
  Antisense strand to SEQ ID NO: 2410100
aucugaauuacgcaccuac

SEQ ID NO: 2410102 - RNA, 19 nt, Artificial Sequence
  Description of Artificial Sequence: Synthetic oligonucleotide
  Sense strand starting at position 3079 of SEQ ID NO: 1886442
gugcguaauucagaugauu

SEQ ID NO: 2410103 - RNA, 19 nt, Artificial Sequence
  Description of Artificial Sequence: Synthetic oligonucleotide
  Antisense strand to SEQ ID NO: 2410102
aaucaucugaauuacgcac

SEQ ID NO: 2410104 - RNA, 19 nt, Artificial Sequence
  Description of Artificial Sequence: Synthetic oligonucleotide
  Sense strand starting at position 3505 of SEQ ID NO: 1886442
augaacagucuuuguugua

SEQ ID NO: 2410105 - RNA, 19 nt, Artificial Sequence
  Description of Artificial Sequence: Synthetic oligonucleotide
  Antisense strand to SEQ ID NO: 2410104
uacaacaaagacuguucau

SEQ ID NO: 2410106 - RNA, 19 nt, Artificial Sequence
  Description of Artificial Sequence: Synthetic oligonucleotide
  Sense strand starting at position 3506 of SEQ ID NO: 1886442
ugaacagucuuuguuguau

SEQ ID NO: 2410107 - RNA, 19 nt, Artificial Sequence
  Description of Artificial Sequence: Synthetic oligonucleotide
  Antisense strand to SEQ ID NO: 2410106
auacaacaaagacuguuca

SEQ ID NO: 2410108 - RNA, 19 nt, Artificial Sequence
  Description of Artificial Sequence: Synthetic oligonucleotide
  Sense strand starting at position 3510 of SEQ ID NO: 1886442
cagucuuuguuguauucuu

SEQ ID NO: 2410109 - RNA, 19 nt, Artificial Sequence
  Description of Artificial Sequence: Synthetic oligonucleotide
  Antisense strand to SEQ ID NO: 2410108
aagaauacaacaaagacug

SEQ ID NO: 2410110 - RNA, 19 nt, Artificial Sequence
  Description of Artificial Sequence: Synthetic oligonucleotide
  Sense strand starting at position 3515 of SEQ ID NO: 1886442
uuuguuguauucuuagagu

SEQ ID NO: 2410111 - RNA, 19 nt, Artificial Sequence
  Description of Artificial Sequence: Synthetic oligonucleotide
  Antisense strand to SEQ ID NO: 2410110
acucuaagaauacaacaaa

SEQ ID NO: 2410112 - RNA, 19 nt, Artificial Sequence
  Description of Artificial Sequence: Synthetic oligonucleotide
  Sense strand starting at position 3518 of SEQ ID NO: 1886442
guuguauucuuagaguaag

SEQ ID NO: 2410113 - RNA, 19 nt, Artificial Sequence
  Description of Artificial Sequence: Synthetic oligonucleotide
  Antisense strand to SEQ ID NO: 2410112
cuuacucuaagaauacaac

SEQ ID NO: 2410114 - RNA, 19 nt, Artificial Sequence
  Description of Artificial Sequence: Synthetic oligonucleotide
  Sense strand starting at position 3521 of SEQ ID NO: 1886442
guauucuuagaguaagucu

SEQ ID NO: 2410115 - RNA, 19 nt, Artificial Sequence
  Description of Artificial Sequence: Synthetic oligonucleotide
  Antisense strand to SEQ ID NO: 2410114
agacuuacucuaagaauac

SEQ ID NO: 2410116 - RNA, 19 nt, Artificial Sequence
  Description of Artificial Sequence: Synthetic oligonucleotide
  Sense strand starting at position 2137 of SEQ ID NO: 1886443
uugcgcucccuugaaguua

SEQ ID NO: 2410117 - RNA, 19 nt, Artificial Sequence
  Description of Artificial Sequence: Synthetic oligonucleotide
  Antisense strand to SEQ ID NO: 2410116
uaacuucaagggagcgcaa

SEQ ID NO: 2410118 - RNA, 19 nt, Artificial Sequence
  Description of Artificial Sequence: Synthetic oligonucleotide
  Sense strand starting at position 2148 of SEQ ID NO: 1886443
ugaaguuauacugggacgu

SEQ ID NO: 2410119 - RNA, 19 nt, Artificial Sequence
  Description of Artificial Sequence: Synthetic oligonucleotide
  Antisense strand to SEQ ID NO: 2410118
acgucccaguauaacuuca

SEQ ID NO: 2410120 - RNA, 19 nt, Artificial Sequence
  Description of Artificial Sequence: Synthetic oligonucleotide
  Sense strand starting at position 2149 of SEQ ID NO: 1886443
gaaguuauacugggacguu

SEQ ID NO: 2410121 - RNA, 19 nt, Artificial Sequence
  Description of Artificial Sequence: Synthetic oligonucleotide
  Antisense strand to SEQ ID NO: 2410120
aacgucccaguauaacuuc

SEQ ID NO: 2410122 - RNA, 19 nt, Artificial Sequence
  Description of Artificial Sequence: Synthetic oligonucleotide
  Sense strand starting at position 2152 of SEQ ID NO: 1886443
guuauacugggacguugaa

SEQ ID NO: 2410123 - RNA, 19 nt, Artificial Sequence
  Description of Artificial Sequence: Synthetic oligonucleotide
  Antisense strand to SEQ ID NO: 2410122
uucaacgucccaguauaac

SEQ ID NO: 2410124 - RNA, 19 nt, Artificial Sequence
  Description of Artificial Sequence: Synthetic oligonucleotide
  Sense strand starting at position 2275 of SEQ ID NO: 1886443
gccgcagucgucuguucaa

SEQ ID NO: 2410125 - RNA, 19 nt, Artificial Sequence
  Description of Artificial Sequence: Synthetic oligonucleotide
  Antisense strand to SEQ ID NO: 2410124
uugaacagacgacugcggc

SEQ ID NO: 2410126 - RNA, 19 nt, Artificial Sequence
  Description of Artificial Sequence: Synthetic oligonucleotide
  Sense strand starting at position 2277 of SEQ ID NO: 1886443
cgcagucgucuguucaaac

SEQ ID NO: 2410127 - RNA, 19 nt, Artificial Sequence
  Description of Artificial Sequence: Synthetic oligonucleotide
  Antisense strand to SEQ ID NO: 2410126
guuugaacagacgacugcg

SEQ ID NO: 2410128 - RNA, 19 nt, Artificial Sequence
  Description of Artificial Sequence: Synthetic oligonucleotide
  Sense strand starting at position 2349 of SEQ ID NO: 1886443
aaucauaguugacaagaug

SEQ ID NO: 2410129 - RNA, 19 nt, Artificial Sequence
  Description of Artificial Sequence: Synthetic oligonucleotide
  Antisense strand to SEQ ID NO: 2410128
caucuugucaacuaugauu

SEQ ID NO: 2410130 - RNA, 19 nt, Artificial Sequence
  Description of Artificial Sequence: Synthetic oligonucleotide
  Sense strand starting at position 2372 of SEQ ID NO: 1886443
agguuucuguccuucguga

SEQ ID NO: 2410131 - RNA, 19 nt, Artificial Sequence
  Description of Artificial Sequence: Synthetic oligonucleotide
  Antisense strand to SEQ ID NO: 2410130
ucacgaaggacagaaaccu

SEQ ID NO: 2410132 - RNA, 19 nt, Artificial Sequence
  Description of Artificial Sequence: Synthetic oligonucleotide
  Sense strand starting at position 2374 of SEQ ID NO: 1886443
guuucuguccuucgugaag

SEQ ID NO: 2410133 - RNA, 19 nt, Artificial Sequence
  Description of Artificial Sequence: Synthetic oligonucleotide
  Antisense strand to SEQ ID NO: 2410132
cuucacgaaggacagaaac

SEQ ID NO: 2410134 - RNA, 19 nt, Artificial Sequence
  Description of Artificial Sequence: Synthetic oligonucleotide
  Sense strand starting at position 2376 of SEQ ID NO: 1886443
uucuguccuucgugaagcu

SEQ ID NO: 2410135 - RNA, 19 nt, Artificial Sequence
  Description of Artificial Sequence: Synthetic oligonucleotide
  Antisense strand to SEQ ID NO: 2410134
agcuucacgaaggacagaa

SEQ ID NO: 2410136 - RNA, 19 nt, Artificial Sequence
  Description of Artificial Sequence: Synthetic oligonucleotide
  Sense strand starting at position 2936 of SEQ ID NO: 1886443
agaagaucgcuugagugag

SEQ ID NO: 2410137 - RNA, 19 nt, Artificial Sequence
  Description of Artificial Sequence: Synthetic oligonucleotide
  Antisense strand to SEQ ID NO: 2410136
cucacucaagcgaucuucu

SEQ ID NO: 2410138 - RNA, 19 nt, Artificial Sequence
  Description of Artificial Sequence: Synthetic oligonucleotide
  Sense strand starting at position 3018 of SEQ ID NO: 1886443
gcaagacucuugucucuga

SEQ ID NO: 2410139 - RNA, 19 nt, Artificial Sequence
  Description of Artificial Sequence: Synthetic oligonucleotide
  Antisense strand to SEQ ID NO: 2410138
ucagagacaagagucuugc

SEQ ID NO: 2410140 - RNA, 19 nt, Artificial Sequence
  Description of Artificial Sequence: Synthetic oligonucleotide
  Sense strand starting at position 3233 of SEQ ID NO: 1886443
uuccucaucugcugggaau

SEQ ID NO: 2410141 - RNA, 19 nt, Artificial Sequence
  Description of Artificial Sequence: Synthetic oligonucleotide
  Antisense strand to SEQ ID NO: 2410140
auucccagcagaugaggaa

SEQ ID NO: 2410142 - RNA, 19 nt, Artificial Sequence
  Description of Artificial Sequence: Synthetic oligonucleotide
  Sense strand starting at position 3234 of SEQ ID NO: 1886443
uccucaucugcugggaauu

SEQ ID NO: 2410143 - RNA, 19 nt, Artificial Sequence
  Description of Artificial Sequence: Synthetic oligonucleotide
  Antisense strand to SEQ ID NO: 2410142
aauucccagcagaugagga

SEQ ID NO: 2410144 - RNA, 19 nt, Artificial Sequence
  Description of Artificial Sequence: Synthetic oligonucleotide
  Sense strand starting at position 3258 of SEQ ID NO: 1886443
gguccuuugucugggucua

SEQ ID NO: 2410145 - RNA, 19 nt, Artificial Sequence
  Description of Artificial Sequence: Synthetic oligonucleotide
  Antisense strand to SEQ ID NO: 2410144
uagacccagacaaaggacc

SEQ ID NO: 2410146 - RNA, 19 nt, Artificial Sequence
  Description of Artificial Sequence: Synthetic oligonucleotide
  Sense strand starting at position 3260 of SEQ ID NO: 1886443
uccuuugucugggucuaca

SEQ ID NO: 2410147 - RNA, 19 nt, Artificial Sequence
  Description of Artificial Sequence: Synthetic oligonucleotide
  Antisense strand to SEQ ID NO: 2410146
uguagacccagacaaagga

SEQ ID NO: 2410148 - RNA, 19 nt, Artificial Sequence
  Description of Artificial Sequence: Synthetic oligonucleotide
  Sense strand starting at position 3320 of SEQ ID NO: 1886443
gggagcacuuccugaaaua

SEQ ID NO: 2410149 - RNA, 19 nt, Artificial Sequence
  Description of Artificial Sequence: Synthetic oligonucleotide
  Antisense strand to SEQ ID NO: 2410148
uauuucaggaagugcuccc

SEQ ID NO: 2410150 - RNA, 19 nt, Artificial Sequence
  Description of Artificial Sequence: Synthetic oligonucleotide
  Sense strand starting at position 3488 of SEQ ID NO: 1886443
cuggguuguucccaguaaa

SEQ ID NO: 2410151 - RNA, 19 nt, Artificial Sequence
  Description of Artificial Sequence: Synthetic oligonucleotide
  Antisense strand to SEQ ID NO: 2410150
uuuacugggaacaacccag

SEQ ID NO: 2410152 - RNA, 19 nt, Artificial Sequence
  Description of Artificial Sequence: Synthetic oligonucleotide
  Sense strand starting at position 3491 of SEQ ID NO: 1886443
gguuguucccaguaaaucc

SEQ ID NO: 2410153 - RNA, 19 nt, Artificial Sequence
  Description of Artificial Sequence: Synthetic oligonucleotide
  Antisense strand to SEQ ID NO: 2410152
ggauuuacugggaacaacc

SEQ ID NO: 2410154 - RNA, 19 nt, Artificial Sequence
  Description of Artificial Sequence: Synthetic oligonucleotide
  Sense strand starting at position 3588 of SEQ ID NO: 1886443
cagucaagauucuuagguu

SEQ ID NO: 2410155 - RNA, 19 nt, Artificial Sequence
  Description of Artificial Sequence: Synthetic oligonucleotide
  Antisense strand to SEQ ID NO: 2410154
aaccuaagaaucuugacug

SEQ ID NO: 2410156 - RNA, 19 nt, Artificial Sequence
  Description of Artificial Sequence: Synthetic oligonucleotide
  Sense strand starting at position 3589 of SEQ ID NO: 1886443
agucaagauucuuagguuu

SEQ ID NO: 2410157 - RNA, 19 nt, Artificial Sequence
  Description of Artificial Sequence: Synthetic oligonucleotide
  Antisense strand to SEQ ID NO: 2410156
aaaccuaagaaucuugacu

SEQ ID NO: 2410158 - RNA, 19 nt, Artificial Sequence
  Description of Artificial Sequence: Synthetic oligonucleotide
  Sense strand starting at position 3592 of SEQ ID NO: 1886443
caagauucuuagguuugca

SEQ ID NO: 2410159 - RNA, 19 nt, Artificial Sequence
  Description of Artificial Sequence: Synthetic oligonucleotide
  Antisense strand to SEQ ID NO: 2410158
ugcaaaccuaagaaucuug

SEQ ID NO: 2410160 - RNA, 19 nt, Artificial Sequence
  Description of Artificial Sequence: Synthetic oligonucleotide
  Sense strand starting at position 3595 of SEQ ID NO: 1886443
gauucuuagguuugcaagu

SEQ ID NO: 2410161 - RNA, 19 nt, Artificial Sequence
  Description of Artificial Sequence: Synthetic oligonucleotide
  Antisense strand to SEQ ID NO: 2410160
acuugcaaaccuaagaauc

SEQ ID NO: 2410162 - RNA, 19 nt, Artificial Sequence
  Description of Artificial Sequence: Synthetic oligonucleotide
  Sense strand starting at position 3597 of SEQ ID NO: 1886443
uucuuagguuugcaaguga

SEQ ID NO: 2410163 - RNA, 19 nt, Artificial Sequence
  Description of Artificial Sequence: Synthetic oligonucleotide
  Antisense strand to SEQ ID NO: 2410162
ucacuugcaaaccuaagaa

SEQ ID NO: 2410164 - RNA, 19 nt, Artificial Sequence
  Description of Artificial Sequence: Synthetic oligonucleotide
  Sense strand starting at position 3601 of SEQ ID NO: 1886443
uagguuugcaagugacaga

SEQ ID NO: 2410165 - RNA, 19 nt, Artificial Sequence
  Description of Artificial Sequence: Synthetic oligonucleotide
  Antisense strand to SEQ ID NO: 2410164
ucugucacuugcaaaccua

SEQ ID NO: 2410166 - RNA, 19 nt, Artificial Sequence
  Description of Artificial Sequence: Synthetic oligonucleotide
  Sense strand starting at position 3602 of SEQ ID NO: 1886443
agguuugcaagugacagaa

SEQ ID NO: 2410167 - RNA, 19 nt, Artificial Sequence
  Description of Artificial Sequence: Synthetic oligonucleotide
  Antisense strand to SEQ ID NO: 2410166
uucugucacuugcaaaccu

SEQ ID NO: 2410168 - RNA, 19 nt, Artificial Sequence
  Description of Artificial Sequence: Synthetic oligonucleotide
  Sense strand starting at position 3679 of SEQ ID NO: 1886443
auuguaucauguuaacuga

SEQ ID NO: 2410169 - RNA, 19 nt, Artificial Sequence
  Description of Artificial Sequence: Synthetic oligonucleotide
  Antisense strand to SEQ ID NO: 2410168
ucaguuaacaugauacaau

SEQ ID NO: 2410170 - RNA, 19 nt, Artificial Sequence
  Description of Artificial Sequence: Synthetic oligonucleotide
  Sense strand starting at position 3682 of SEQ ID NO: 1886443
guaucauguuaacugagau

SEQ ID NO: 2410171 - RNA, 19 nt, Artificial Sequence
  Description of Artificial Sequence: Synthetic oligonucleotide
  Antisense strand to SEQ ID NO: 2410170
aucucaguuaacaugauac

SEQ ID NO: 2410172 - RNA, 19 nt, Artificial Sequence
  Description of Artificial Sequence: Synthetic oligonucleotide
  Sense strand starting at position 3830 of SEQ ID NO: 1886443
gcugcuguagucucacauu

SEQ ID NO: 2410173 - RNA, 19 nt, Artificial Sequence
  Description of Artificial Sequence: Synthetic oligonucleotide
  Antisense strand to SEQ ID NO: 2410172
aaugugagacuacagcagc

SEQ ID NO: 2410174 - RNA, 19 nt, Artificial Sequence
  Description of Artificial Sequence: Synthetic oligonucleotide
  Sense strand starting at position 3867 of SEQ ID NO: 1886443
aagagagccuuuccuguuu

SEQ ID NO: 2410175 - RNA, 19 nt, Artificial Sequence
  Description of Artificial Sequence: Synthetic oligonucleotide
  Antisense strand to SEQ ID NO: 2410174
aaacaggaaaggcucucuu

SEQ ID NO: 2410176 - RNA, 19 nt, Artificial Sequence
  Description of Artificial Sequence: Synthetic oligonucleotide
  Sense strand starting at position 1869 of SEQ ID NO: 1886444
gcagcuuggguccaagagu

SEQ ID NO: 2410177 - RNA, 19 nt, Artificial Sequence
  Description of Artificial Sequence: Synthetic oligonucleotide
  Antisense strand to SEQ ID NO: 2410176
acucuuggacccaagcugc

SEQ ID NO: 2410178 - RNA, 19 nt, Artificial Sequence
  Description of Artificial Sequence: Synthetic oligonucleotide
  Sense strand starting at position 2155 of SEQ ID NO: 1886444
gucugauucuuggauccga

SEQ ID NO: 2410179 - RNA, 19 nt, Artificial Sequence
  Description of Artificial Sequence: Synthetic oligonucleotide
  Antisense strand to SEQ ID NO: 2410178
ucggauccaagaaucagac

SEQ ID NO: 2410180 - RNA, 19 nt, Artificial Sequence
  Description of Artificial Sequence: Synthetic oligonucleotide
  Sense strand starting at position 2246 of SEQ ID NO: 1886444
uccugaaaugcgugcggga

SEQ ID NO: 2410181 - RNA, 19 nt, Artificial Sequence
  Description of Artificial Sequence: Synthetic oligonucleotide
  Antisense strand to SEQ ID NO: 2410180
ucccgcacgcauuucagga

SEQ ID NO: 2410182 - RNA, 19 nt, Artificial Sequence
  Description of Artificial Sequence: Synthetic oligonucleotide
  Sense strand starting at position 2248 of SEQ ID NO: 1886444
cugaaaugcgugcgggaaa

SEQ ID NO: 2410183 - RNA, 19 nt, Artificial Sequence
  Description of Artificial Sequence: Synthetic oligonucleotide
  Antisense strand to SEQ ID NO: 2410182
uuucccgcacgcauuucag

SEQ ID NO: 2410184 - RNA, 19 nt, Artificial Sequence
  Description of Artificial Sequence: Synthetic oligonucleotide
  Sense strand starting at position 2378 of SEQ ID NO: 1886444
aggccuggagccugagauu

SEQ ID NO: 2410185 - RNA, 19 nt, Artificial Sequence
  Description of Artificial Sequence: Synthetic oligonucleotide
  Antisense strand to SEQ ID NO: 2410184
aaucucaggcuccaggccu

SEQ ID NO: 2410186 - RNA, 19 nt, Artificial Sequence
  Description of Artificial Sequence: Synthetic oligonucleotide
  Sense strand starting at position 2624 of SEQ ID NO: 1886444
acccacugucaaugaggaa

SEQ ID NO: 2410187 - RNA, 19 nt, Artificial Sequence
  Description of Artificial Sequence: Synthetic oligonucleotide
  Antisense strand to SEQ ID NO: 2410186
uuccucauugacagugggu

SEQ ID NO: 2410188 - RNA, 19 nt, Artificial Sequence
  Description of Artificial Sequence: Synthetic oligonucleotide
  Sense strand starting at position 2727 of SEQ ID NO: 1886444
acagaaguucucuaaaugu

SEQ ID NO: 2410189 - RNA, 19 nt, Artificial Sequence
  Description of Artificial Sequence: Synthetic oligonucleotide
  Antisense strand to SEQ ID NO: 2410188
acauuuagagaacuucugu

SEQ ID NO: 2410190 - RNA, 19 nt, Artificial Sequence
  Description of Artificial Sequence: Synthetic oligonucleotide
  Sense strand starting at position 2849 of SEQ ID NO: 1886444
cuggguuugugguucucua

SEQ ID NO: 2410191 - RNA, 19 nt, Artificial Sequence
  Description of Artificial Sequence: Synthetic oligonucleotide
  Antisense strand to SEQ ID NO: 2410190
uagagaaccacaaacccag

SEQ ID NO: 2410192 - RNA, 19 nt, Artificial Sequence
  Description of Artificial Sequence: Synthetic oligonucleotide
  Sense strand starting at position 2929 of SEQ ID NO: 1886444
ucaucuaaauggguaugaa

SEQ ID NO: 2410193 - RNA, 19 nt, Artificial Sequence
  Description of Artificial Sequence: Synthetic oligonucleotide
  Antisense strand to SEQ ID NO: 2410192
uucauacccauuuagauga

SEQ ID NO: 2410194 - RNA, 19 nt, Artificial Sequence
  Description of Artificial Sequence: Synthetic oligonucleotide
  Sense strand starting at position 2933 of SEQ ID NO: 1886444
cuaaauggguaugaaauaa

SEQ ID NO: 2410195 - RNA, 19 nt, Artificial Sequence
  Description of Artificial Sequence: Synthetic oligonucleotide
  Antisense strand to SEQ ID NO: 2410194
uuauuucauacccauuuag

SEQ ID NO: 2410196 - RNA, 19 nt, Artificial Sequence
  Description of Artificial Sequence: Synthetic oligonucleotide
  Sense strand starting at position 2948 of SEQ ID NO: 1886444
auaauaucucugggcuguu

SEQ ID NO: 2410197 - RNA, 19 nt, Artificial Sequence
  Description of Artificial Sequence: Synthetic oligonucleotide
  Antisense strand to SEQ ID NO: 2410196
aacagcccagagauauuau

SEQ ID NO: 2410198 - RNA, 19 nt, Artificial Sequence
  Description of Artificial Sequence: Synthetic oligonucleotide
  Sense strand starting at position 2949 of SEQ ID NO: 1886444
uaauaucucugggcuguuu

SEQ ID NO: 2410199 - RNA, 19 nt, Artificial Sequence
  Description of Artificial Sequence: Synthetic oligonucleotide
  Antisense strand to SEQ ID NO: 2410198
aaacagcccagagauauua

SEQ ID NO: 2410200 - RNA, 19 nt, Artificial Sequence
  Description of Artificial Sequence: Synthetic oligonucleotide
  Sense strand starting at position 2981 of SEQ ID NO: 1886444
auuucucuguuguaaaugu

SEQ ID NO: 2410201 - RNA, 19 nt, Artificial Sequence
  Description of Artificial Sequence: Synthetic oligonucleotide
  Antisense strand to SEQ ID NO: 2410200
acauuuacaacagagaaau

SEQ ID NO: 2410202 - RNA, 19 nt, Artificial Sequence
  Description of Artificial Sequence: Synthetic oligonucleotide
  Sense strand starting at position 2991 of SEQ ID NO: 1886444
uguaaaugugugggccaaa

SEQ ID NO: 2410203 - RNA, 19 nt, Artificial Sequence
  Description of Artificial Sequence: Synthetic oligonucleotide
  Antisense strand to SEQ ID NO: 2410202
uuuggcccacacauuuaca

SEQ ID NO: 2410204 - RNA, 19 nt, Artificial Sequence
  Description of Artificial Sequence: Synthetic oligonucleotide
  Sense strand starting at position 2994 of SEQ ID NO: 1886444
aaaugugugggccaaagga

SEQ ID NO: 2410205 - RNA, 19 nt, Artificial Sequence
  Description of Artificial Sequence: Synthetic oligonucleotide
  Antisense strand to SEQ ID NO: 2410204
uccuuuggcccacacauuu

SEQ ID NO: 2410206 - RNA, 19 nt, Artificial Sequence
  Description of Artificial Sequence: Synthetic oligonucleotide
  Sense strand starting at position 3016 of SEQ ID NO: 1886444
gcaccuuguccucaagaga

SEQ ID NO: 2410207 - RNA, 19 nt, Artificial Sequence
  Description of Artificial Sequence: Synthetic oligonucleotide
  Antisense strand to SEQ ID NO: 2410206
ucucuugaggacaaggugc

SEQ ID NO: 2410208 - RNA, 19 nt, Artificial Sequence
  Description of Artificial Sequence: Synthetic oligonucleotide
  Sense strand starting at position 3019 of SEQ ID NO: 1886444
ccuuguccucaagagauuc

SEQ ID NO: 2410209 - RNA, 19 nt, Artificial Sequence
  Description of Artificial Sequence: Synthetic oligonucleotide
  Antisense strand to SEQ ID NO: 2410208
gaaucucuugaggacaagg

SEQ ID NO: 2410210 - RNA, 19 nt, Artificial Sequence
  Description of Artificial Sequence: Synthetic oligonucleotide
  Sense strand starting at position 3090 of SEQ ID NO: 1886444
ccuaaugucccugagcuca

SEQ ID NO: 2410211 - RNA, 19 nt, Artificial Sequence
  Description of Artificial Sequence: Synthetic oligonucleotide
  Antisense strand to SEQ ID NO: 2410210
ugagcucagggacauuagg

SEQ ID NO: 2410212 - RNA, 19 nt, Artificial Sequence
  Description of Artificial Sequence: Synthetic oligonucleotide
  Sense strand starting at position 3147 of SEQ ID NO: 1886444
uaggguuaccgugggaauu

SEQ ID NO: 2410213 - RNA, 19 nt, Artificial Sequence
  Description of Artificial Sequence: Synthetic oligonucleotide
  Antisense strand to SEQ ID NO: 2410212
aauucccacgguaacccua

SEQ ID NO: 2410214 - RNA, 19 nt, Artificial Sequence
  Description of Artificial Sequence: Synthetic oligonucleotide
  Sense strand starting at position 3149 of SEQ ID NO: 1886444
ggguuaccgugggaauuca

SEQ ID NO: 2410215 - RNA, 19 nt, Artificial Sequence
  Description of Artificial Sequence: Synthetic oligonucleotide
  Antisense strand to SEQ ID NO: 2410214
ugaauucccacgguaaccc

SEQ ID NO: 2410216 - RNA, 19 nt, Artificial Sequence
  Description of Artificial Sequence: Synthetic oligonucleotide
  Sense strand starting at position 3188 of SEQ ID NO: 1886444
caguaagcgcucgggaagu

SEQ ID NO: 2410217 - RNA, 19 nt, Artificial Sequence
  Description of Artificial Sequence: Synthetic oligonucleotide
  Antisense strand to SEQ ID NO: 2410216
acuucccgagcgcuuacug

SEQ ID NO: 2410218 - RNA, 19 nt, Artificial Sequence
  Description of Artificial Sequence: Synthetic oligonucleotide
  Sense strand starting at position 3209 of SEQ ID NO: 1886444
gaaguaauguuauuggaag

SEQ ID NO: 2410219 - RNA, 19 nt, Artificial Sequence
  Description of Artificial Sequence: Synthetic oligonucleotide
  Antisense strand to SEQ ID NO: 2410218
cuuccaauaacauuacuuc

SEQ ID NO: 2410220 - RNA, 19 nt, Artificial Sequence
  Description of Artificial Sequence: Synthetic oligonucleotide
  Sense strand starting at position 3247 of SEQ ID NO: 1886444
cauggauuccugcauggag

SEQ ID NO: 2410221 - RNA, 19 nt, Artificial Sequence
  Description of Artificial Sequence: Synthetic oligonucleotide
  Antisense strand to SEQ ID NO: 2410220
cuccaugcaggaauccaug

SEQ ID NO: 2410222 - RNA, 19 nt, Artificial Sequence
  Description of Artificial Sequence: Synthetic oligonucleotide
  Sense strand starting at position 3249 of SEQ ID NO: 1886444
uggauuccugcauggagac

SEQ ID NO: 2410223 - RNA, 19 nt, Artificial Sequence
  Description of Artificial Sequence: Synthetic oligonucleotide
  Antisense strand to SEQ ID NO: 2410222
gucuccaugcaggaaucca

SEQ ID NO: 2410224 - RNA, 19 nt, Artificial Sequence
  Description of Artificial Sequence: Synthetic oligonucleotide
  Sense strand starting at position 3250 of SEQ ID NO: 1886444
ggauuccugcauggagaca

SEQ ID NO: 2410225 - RNA, 19 nt, Artificial Sequence
  Description of Artificial Sequence: Synthetic oligonucleotide
  Antisense strand to SEQ ID NO: 2410224
ugucuccaugcaggaaucc

SEQ ID NO: 2410226 - RNA, 19 nt, Artificial Sequence
  Description of Artificial Sequence: Synthetic oligonucleotide
  Sense strand starting at position 3271 of SEQ ID NO: 1886444
cagcccucugccuguugaa

SEQ ID NO: 2410227 - RNA, 19 nt, Artificial Sequence
  Description of Artificial Sequence: Synthetic oligonucleotide
  Antisense strand to SEQ ID NO: 2410226
uucaacaggcagagggcug

SEQ ID NO: 2410228 - RNA, 19 nt, Artificial Sequence
  Description of Artificial Sequence: Synthetic oligonucleotide
  Sense strand starting at position 3300 of SEQ ID NO: 1886444
ccaccacucguauguucua

SEQ ID NO: 2410229 - RNA, 19 nt, Artificial Sequence
  Description of Artificial Sequence: Synthetic oligonucleotide
  Antisense strand to SEQ ID NO: 2410228
uagaacauacgaguggugg

SEQ ID NO: 2410230 - RNA, 19 nt, Artificial Sequence
  Description of Artificial Sequence: Synthetic oligonucleotide
  Sense strand starting at position 3388 of SEQ ID NO: 1886444
guggauugcaacugagauc

SEQ ID NO: 2410231 - RNA, 19 nt, Artificial Sequence
  Description of Artificial Sequence: Synthetic oligonucleotide
  Antisense strand to SEQ ID NO: 2410230
gaucucaguugcaauccac

SEQ ID NO: 2410232 - RNA, 19 nt, Artificial Sequence
  Description of Artificial Sequence: Synthetic oligonucleotide
  Sense strand starting at position 3399 of SEQ ID NO: 1886444
cugagauccuauugaaaca

SEQ ID NO: 2410233 - RNA, 19 nt, Artificial Sequence
  Description of Artificial Sequence: Synthetic oligonucleotide
  Antisense strand to SEQ ID NO: 2410232
uguuucaauaggaucucag

SEQ ID NO: 2410234 - RNA, 19 nt, Artificial Sequence
  Description of Artificial Sequence: Synthetic oligonucleotide
  Sense strand starting at position 3556 of SEQ ID NO: 1886444
aggcucuagucucugaaau

SEQ ID NO: 2410235 - RNA, 19 nt, Artificial Sequence
  Description of Artificial Sequence: Synthetic oligonucleotide
  Antisense strand to SEQ ID NO: 2410234
auuucagagacuagagccu

SEQ ID NO: 2410236 - RNA, 19 nt, Artificial Sequence
  Description of Artificial Sequence: Synthetic oligonucleotide
  Sense strand starting at position 3557 of SEQ ID NO: 1886444
ggcucuagucucugaaaug

SEQ ID NO: 2410237 - RNA, 19 nt, Artificial Sequence
  Description of Artificial Sequence: Synthetic oligonucleotide
  Antisense strand to SEQ ID NO: 2410236
cauuucagagacuagagcc

SEQ ID NO: 2410238 - RNA, 19 nt, Artificial Sequence
  Description of Artificial Sequence: Synthetic oligonucleotide
  Sense strand starting at position 3587 of SEQ ID NO: 1886444
ggcauuuguucugugcaau

SEQ ID NO: 2410239 - RNA, 19 nt, Artificial Sequence
  Description of Artificial Sequence: Synthetic oligonucleotide
  Antisense strand to SEQ ID NO: 2410238
auugcacagaacaaaugcc

SEQ ID NO: 2410240 - RNA, 19 nt, Artificial Sequence
  Description of Artificial Sequence: Synthetic oligonucleotide
  Sense strand starting at position 3588 of SEQ ID NO: 1886444
gcauuuguucugugcaauu

SEQ ID NO: 2410241 - RNA, 19 nt, Artificial Sequence
  Description of Artificial Sequence: Synthetic oligonucleotide
  Antisense strand to SEQ ID NO: 2410240
aauugcacagaacaaaugc

SEQ ID NO: 2410242 - RNA, 19 nt, Artificial Sequence
  Description of Artificial Sequence: Synthetic oligonucleotide
  Sense strand starting at position 3597 of SEQ ID NO: 1886444
cugugcaauuuggaaauca

SEQ ID NO: 2410243 - RNA, 19 nt, Artificial Sequence
  Description of Artificial Sequence: Synthetic oligonucleotide
  Antisense strand to SEQ ID NO: 2410242
ugauuuccaaauugcacag

SEQ ID NO: 2410244 - RNA, 19 nt, Artificial Sequence
  Description of Artificial Sequence: Synthetic oligonucleotide
  Sense strand starting at position 3616 of SEQ ID NO: 1886444
ccgcccucccgauaaagua

SEQ ID NO: 2410245 - RNA, 19 nt, Artificial Sequence
  Description of Artificial Sequence: Synthetic oligonucleotide
  Antisense strand to SEQ ID NO: 2410244
uacuuuaucgggagggcgg

SEQ ID NO: 2410246 - RNA, 19 nt, Artificial Sequence
  Description of Artificial Sequence: Synthetic oligonucleotide
  Sense strand starting at position 3736 of SEQ ID NO: 1886444
agcuguaacccacauguga

SEQ ID NO: 2410247 - RNA, 19 nt, Artificial Sequence
  Description of Artificial Sequence: Synthetic oligonucleotide
  Antisense strand to SEQ ID NO: 2410246
ucacauguggguuacagcu

SEQ ID NO: 2410248 - RNA, 19 nt, Artificial Sequence
  Description of Artificial Sequence: Synthetic oligonucleotide
  Sense strand starting at position 3777 of SEQ ID NO: 1886444
gcacauuagucaucucaug

SEQ ID NO: 2410249 - RNA, 19 nt, Artificial Sequence
  Description of Artificial Sequence: Synthetic oligonucleotide
  Antisense strand to SEQ ID NO: 2410248
caugagaugacuaaugugc

SEQ ID NO: 2410250 - RNA, 19 nt, Artificial Sequence
  Description of Artificial Sequence: Synthetic oligonucleotide
  Sense strand starting at position 3854 of SEQ ID NO: 1886444
cguaaagugccuugccaga

SEQ ID NO: 2410251 - RNA, 19 nt, Artificial Sequence
  Description of Artificial Sequence: Synthetic oligonucleotide
  Antisense strand to SEQ ID NO: 2410250
ucuggcaaggcacuuuacg

SEQ ID NO: 2410252 - RNA, 19 nt, Artificial Sequence
  Description of Artificial Sequence: Synthetic oligonucleotide
  Sense strand starting at position 3978 of SEQ ID NO: 1886444
ugccucuucccaugacagu

SEQ ID NO: 2410253 - RNA, 19 nt, Artificial Sequence
  Description of Artificial Sequence: Synthetic oligonucleotide
  Antisense strand to SEQ ID NO: 2410252
acugucaugggaagaggca

SEQ ID NO: 2410254 - RNA, 19 nt, Artificial Sequence
  Description of Artificial Sequence: Synthetic oligonucleotide
  Sense strand starting at position 3979 of SEQ ID NO: 1886444
gccucuucccaugacagua

SEQ ID NO: 2410255 - RNA, 19 nt, Artificial Sequence
  Description of Artificial Sequence: Synthetic oligonucleotide
  Antisense strand to SEQ ID NO: 2410254
uacugucaugggaagaggc

SEQ ID NO: 2410256 - RNA, 19 nt, Artificial Sequence
  Description of Artificial Sequence: Synthetic oligonucleotide
  Sense strand starting at position 15 of SEQ ID NO: 1886445
gucucaaaccugugccaca

SEQ ID NO: 2410257 - RNA, 19 nt, Artificial Sequence
  Description of Artificial Sequence: Synthetic oligonucleotide
  Antisense strand to SEQ ID NO: 2410256
uguggcacagguuugagac

SEQ ID NO: 2410258 - RNA, 19 nt, Artificial Sequence
  Description of Artificial Sequence: Synthetic oligonucleotide
  Sense strand starting at position 63 of SEQ ID NO: 1886445
cgaguucucccuuaaguuu

SEQ ID NO: 2410259 - RNA, 19 nt, Artificial Sequence
  Description of Artificial Sequence: Synthetic oligonucleotide
  Antisense strand to SEQ ID NO: 2410258
aaacuuaagggagaacucg

SEQ ID NO: 2410260 - RNA, 19 nt, Artificial Sequence
  Description of Artificial Sequence: Synthetic oligonucleotide
  Sense strand starting at position 135 of SEQ ID NO: 1886445
aggcucucaccaugagaaa

SEQ ID NO: 2410261 - RNA, 19 nt, Artificial Sequence
  Description of Artificial Sequence: Synthetic oligonucleotide
  Antisense strand to SEQ ID NO: 2410260
uuucucauggugagagccu

SEQ ID NO: 2410262 - RNA, 19 nt, Artificial Sequence
  Description of Artificial Sequence: Synthetic oligonucleotide
  Sense strand starting at position 146 of SEQ ID NO: 1886445
augagaaaguucuugcaga

SEQ ID NO: 2410263 - RNA, 19 nt, Artificial Sequence
  Description of Artificial Sequence: Synthetic oligonucleotide
  Antisense strand to SEQ ID NO: 2410262
ucugcaagaacuuucucau

SEQ ID NO: 2410264 - RNA, 19 nt, Artificial Sequence
  Description of Artificial Sequence: Synthetic oligonucleotide
  Sense strand starting at position 193 of SEQ ID NO: 1886445
cgaaguuaauucucaccau

SEQ ID NO: 2410265 - RNA, 19 nt, Artificial Sequence
  Description of Artificial Sequence: Synthetic oligonucleotide
  Antisense strand to SEQ ID NO: 2410264
auggugagaauuaacuucg

SEQ ID NO: 2410266 - RNA, 19 nt, Artificial Sequence
  Description of Artificial Sequence: Synthetic oligonucleotide
  Sense strand starting at position 327 of SEQ ID NO: 1886445
gcaauugcauaugcauaua

SEQ ID NO: 2410267 - RNA, 19 nt, Artificial Sequence
  Description of Artificial Sequence: Synthetic oligonucleotide
  Antisense strand to SEQ ID NO: 2410266
uauaugcauaugcaauugc

SEQ ID NO: 2410268 - RNA, 19 nt, Artificial Sequence
  Description of Artificial Sequence: Synthetic oligonucleotide
  Sense strand starting at position 360 of SEQ ID NO: 1886445
gcuuauuggucuucugauc

SEQ ID NO: 2410269 - RNA, 19 nt, Artificial Sequence
  Description of Artificial Sequence: Synthetic oligonucleotide
  Antisense strand to SEQ ID NO: 2410268
gaucagaagaccaauaagc

SEQ ID NO: 2410270 - RNA, 19 nt, Artificial Sequence
  Description of Artificial Sequence: Synthetic oligonucleotide
  Sense strand starting at position 798 of SEQ ID NO: 1886445
uugauacuugaaggcagau

SEQ ID NO: 2410271 - RNA, 19 nt, Artificial Sequence
  Description of Artificial Sequence: Synthetic oligonucleotide
  Antisense strand to SEQ ID NO: 2410270
aucugccuucaaguaucaa

SEQ ID NO: 2410272 - RNA, 19 nt, Artificial Sequence
  Description of Artificial Sequence: Synthetic oligonucleotide
  Sense strand starting at position 845 of SEQ ID NO: 1886445
cucucacaguccucguuaa

SEQ ID NO: 2410273 - RNA, 19 nt, Artificial Sequence
  Description of Artificial Sequence: Synthetic oligonucleotide
  Antisense strand to SEQ ID NO: 2410272
uuaacgaggacugugagag

SEQ ID NO: 2410274 - RNA, 19 nt, Artificial Sequence
  Description of Artificial Sequence: Synthetic oligonucleotide
  Sense strand starting at position 920 of SEQ ID NO: 1886445
gcacgaaggguccauacuu

SEQ ID NO: 2410275 - RNA, 19 nt, Artificial Sequence
  Description of Artificial Sequence: Synthetic oligonucleotide
  Antisense strand to SEQ ID NO: 2410274
aaguauggacccuucgugc

SEQ ID NO: 2410276 - RNA, 19 nt, Artificial Sequence
  Description of Artificial Sequence: Synthetic oligonucleotide
  Sense strand starting at position 1048 of SEQ ID NO: 1886445
acagguggauuccuagagu

SEQ ID NO: 2410277 - RNA, 19 nt, Artificial Sequence
  Description of Artificial Sequence: Synthetic oligonucleotide
  Antisense strand to SEQ ID NO: 2410276
acucuaggaauccaccugu

SEQ ID NO: 2410278 - RNA, 19 nt, Artificial Sequence
  Description of Artificial Sequence: Synthetic oligonucleotide
  Sense strand starting at position 1051 of SEQ ID NO: 1886445
gguggauuccuagagugua

SEQ ID NO: 2410279 - RNA, 19 nt, Artificial Sequence
  Description of Artificial Sequence: Synthetic oligonucleotide
  Antisense strand to SEQ ID NO: 2410278
uacacucuaggaauccacc

SEQ ID NO: 2410280 - RNA, 19 nt, Artificial Sequence
  Description of Artificial Sequence: Synthetic oligonucleotide
  Sense strand starting at position 1591 of SEQ ID NO: 1886445
ugaacauggcuuugagcau

SEQ ID NO: 2410281 - RNA, 19 nt, Artificial Sequence
  Description of Artificial Sequence: Synthetic oligonucleotide
  Antisense strand to SEQ ID NO: 2410280
augcucaaagccauguuca

SEQ ID NO: 2410282 - RNA, 19 nt, Artificial Sequence
  Description of Artificial Sequence: Synthetic oligonucleotide
  Sense strand starting at position 2195 of SEQ ID NO: 1886445
aagucuccaccucgugauu

SEQ ID NO: 2410283 - RNA, 19 nt, Artificial Sequence
  Description of Artificial Sequence: Synthetic oligonucleotide
  Antisense strand to SEQ ID NO: 2410282
aaucacgagguggagacuu

SEQ ID NO: 2410284 - RNA, 19 nt, Artificial Sequence
  Description of Artificial Sequence: Synthetic oligonucleotide
  Sense strand starting at position 2257 of SEQ ID NO: 1886445
gacagagaggucugggcau

SEQ ID NO: 2410285 - RNA, 19 nt, Artificial Sequence
  Description of Artificial Sequence: Synthetic oligonucleotide
  Antisense strand to SEQ ID NO: 2410284
augcccagaccucucuguc

SEQ ID NO: 2410286 - RNA, 19 nt, Artificial Sequence
  Description of Artificial Sequence: Synthetic oligonucleotide
  Sense strand starting at position 2344 of SEQ ID NO: 1886445
gagggaagcucuuaaagga

SEQ ID NO: 2410287 - RNA, 19 nt, Artificial Sequence
  Description of Artificial Sequence: Synthetic oligonucleotide
  Antisense strand to SEQ ID NO: 2410286
uccuuuaagagcuucccuc

SEQ ID NO: 2410288 - RNA, 19 nt, Artificial Sequence
  Description of Artificial Sequence: Synthetic oligonucleotide
  Sense strand starting at position 2471 of SEQ ID NO: 1886445
gcaguaauccgugaucgga

SEQ ID NO: 2410289 - RNA, 19 nt, Artificial Sequence
  Description of Artificial Sequence: Synthetic oligonucleotide
  Antisense strand to SEQ ID NO: 2410288
uccgaucacggauuacugc

SEQ ID NO: 2410290 - RNA, 19 nt, Artificial Sequence
  Description of Artificial Sequence: Synthetic oligonucleotide
  Sense strand starting at position 2692 of SEQ ID NO: 1886445
acugaacuguucuccguau

SEQ ID NO: 2410291 - RNA, 19 nt, Artificial Sequence
  Description of Artificial Sequence: Synthetic oligonucleotide
  Antisense strand to SEQ ID NO: 2410290
auacggagaacaguucagu

SEQ ID NO: 2410292 - RNA, 19 nt, Artificial Sequence
  Description of Artificial Sequence: Synthetic oligonucleotide
  Sense strand starting at position 2694 of SEQ ID NO: 1886445
ugaacuguucuccguauuu

SEQ ID NO: 2410293 - RNA, 19 nt, Artificial Sequence
  Description of Artificial Sequence: Synthetic oligonucleotide
  Antisense strand to SEQ ID NO: 2410292
aaauacggagaacaguuca

SEQ ID NO: 2410294 - RNA, 19 nt, Artificial Sequence
  Description of Artificial Sequence: Synthetic oligonucleotide
  Sense strand starting at position 2773 of SEQ ID NO: 1886445
gcuaaugucgugggaccua

SEQ ID NO: 2410295 - RNA, 19 nt, Artificial Sequence
  Description of Artificial Sequence: Synthetic oligonucleotide
  Antisense strand to SEQ ID NO: 2410294
uaggucccacgacauuagc

SEQ ID NO: 2410296 - RNA, 19 nt, Artificial Sequence
  Description of Artificial Sequence: Synthetic oligonucleotide
  Sense strand starting at position 2886 of SEQ ID NO: 1886445
aguuuagaagccgauacau

SEQ ID NO: 2410297 - RNA, 19 nt, Artificial Sequence
  Description of Artificial Sequence: Synthetic oligonucleotide
  Antisense strand to SEQ ID NO: 2410296
auguaucggcuucuaaacu

SEQ ID NO: 2410298 - RNA, 19 nt, Artificial Sequence
  Description of Artificial Sequence: Synthetic oligonucleotide
  Sense strand starting at position 2888 of SEQ ID NO: 1886445
uuuagaagccgauacauca

SEQ ID NO: 2410299 - RNA, 19 nt, Artificial Sequence
  Description of Artificial Sequence: Synthetic oligonucleotide
  Antisense strand to SEQ ID NO: 2410298
ugauguaucggcuucuaaa

SEQ ID NO: 2410300 - RNA, 19 nt, Artificial Sequence
  Description of Artificial Sequence: Synthetic oligonucleotide
  Sense strand starting at position 2920 of SEQ ID NO: 1886445
cugucuuaaugucuagcaa

SEQ ID NO: 2410301 - RNA, 19 nt, Artificial Sequence
  Description of Artificial Sequence: Synthetic oligonucleotide
  Antisense strand to SEQ ID NO: 2410300
uugcuagacauuaagacag

SEQ ID NO: 2410302 - RNA, 19 nt, Artificial Sequence
  Description of Artificial Sequence: Synthetic oligonucleotide
  Sense strand starting at position 2921 of SEQ ID NO: 1886445
ugucuuaaugucuagcaag

SEQ ID NO: 2410303 - RNA, 19 nt, Artificial Sequence
  Description of Artificial Sequence: Synthetic oligonucleotide
  Antisense strand to SEQ ID NO: 2410302
cuugcuagacauuaagaca

SEQ ID NO: 2410304 - RNA, 19 nt, Artificial Sequence
  Description of Artificial Sequence: Synthetic oligonucleotide
  Sense strand starting at position 3008 of SEQ ID NO: 1886445
augcuagacgagugacuuu

SEQ ID NO: 2410305 - RNA, 19 nt, Artificial Sequence
  Description of Artificial Sequence: Synthetic oligonucleotide
  Antisense strand to SEQ ID NO: 2410304
aaagucacucgucuagcau

SEQ ID NO: 2410306 - RNA, 19 nt, Artificial Sequence
  Description of Artificial Sequence: Synthetic oligonucleotide
  Sense strand starting at position 3034 of SEQ ID NO: 1886445
gcgugguugguguaaggga

SEQ ID NO: 2410307 - RNA, 19 nt, Artificial Sequence
  Description of Artificial Sequence: Synthetic oligonucleotide
  Antisense strand to SEQ ID NO: 2410306
ucccuuacaccaaccacgc

SEQ ID NO: 2410308 - RNA, 19 nt, Artificial Sequence
  Description of Artificial Sequence: Synthetic oligonucleotide
  Sense strand starting at position 3066 of SEQ ID NO: 1886445
ggaaggucggaguguaaau

SEQ ID NO: 2410309 - RNA, 19 nt, Artificial Sequence
  Description of Artificial Sequence: Synthetic oligonucleotide
  Antisense strand to SEQ ID NO: 2410308
auuuacacuccgaccuucc

SEQ ID NO: 2410310 - RNA, 19 nt, Artificial Sequence
  Description of Artificial Sequence: Synthetic oligonucleotide
  Sense strand starting at position 3094 of SEQ ID NO: 1886445
gggccuguuacuggguaua

SEQ ID NO: 2410311 - RNA, 19 nt, Artificial Sequence
  Description of Artificial Sequence: Synthetic oligonucleotide
  Antisense strand to SEQ ID NO: 2410310
uauacccaguaacaggccc

SEQ ID NO: 2410312 - RNA, 19 nt, Artificial Sequence
  Description of Artificial Sequence: Synthetic oligonucleotide
  Sense strand starting at position 3096 of SEQ ID NO: 1886445
gccuguuacuggguauaaa

SEQ ID NO: 2410313 - RNA, 19 nt, Artificial Sequence
  Description of Artificial Sequence: Synthetic oligonucleotide
  Antisense strand to SEQ ID NO: 2410312
uuuauacccaguaacaggc

SEQ ID NO: 2410314 - RNA, 19 nt, Artificial Sequence
  Description of Artificial Sequence: Synthetic oligonucleotide
  Sense strand starting at position 3097 of SEQ ID NO: 1886445
ccuguuacuggguauaaau

SEQ ID NO: 2410315 - RNA, 19 nt, Artificial Sequence
  Description of Artificial Sequence: Synthetic oligonucleotide
  Antisense strand to SEQ ID NO: 2410314
auuuauacccaguaacagg

SEQ ID NO: 2410316 - RNA, 19 nt, Artificial Sequence
  Description of Artificial Sequence: Synthetic oligonucleotide
  Sense strand starting at position 3106 of SEQ ID NO: 1886445
ggguauaaaugggccugua

SEQ ID NO: 2410317 - RNA, 19 nt, Artificial Sequence
  Description of Artificial Sequence: Synthetic oligonucleotide
  Antisense strand to SEQ ID NO: 2410316
uacaggcccauuuauaccc

SEQ ID NO: 2410318 - RNA, 19 nt, Artificial Sequence
  Description of Artificial Sequence: Synthetic oligonucleotide
  Sense strand starting at position 3131 of SEQ ID NO: 1886445
gggagcucauguucuacca

SEQ ID NO: 2410319 - RNA, 19 nt, Artificial Sequence
  Description of Artificial Sequence: Synthetic oligonucleotide
  Antisense strand to SEQ ID NO: 2410318
ugguagaacaugagcuccc

SEQ ID NO: 2410320 - RNA, 19 nt, Artificial Sequence
  Description of Artificial Sequence: Synthetic oligonucleotide
  Sense strand starting at position 3173 of SEQ ID NO: 1886445
ucgaguguggcgguguaaa

SEQ ID NO: 2410321 - RNA, 19 nt, Artificial Sequence
  Description of Artificial Sequence: Synthetic oligonucleotide
  Antisense strand to SEQ ID NO: 2410320
uuuacaccgccacacucga

SEQ ID NO: 2410322 - RNA, 19 nt, Artificial Sequence
  Description of Artificial Sequence: Synthetic oligonucleotide
  Sense strand starting at position 3293 of SEQ ID NO: 1886445
ugguguccuguugagcaaa

SEQ ID NO: 2410323 - RNA, 19 nt, Artificial Sequence
  Description of Artificial Sequence: Synthetic oligonucleotide
  Antisense strand to SEQ ID NO: 2410322
uuugcucaacaggacacca

SEQ ID NO: 2410324 - RNA, 19 nt, Artificial Sequence
  Description of Artificial Sequence: Synthetic oligonucleotide
  Sense strand starting at position 3343 of SEQ ID NO: 1886445
cucucugacugaucuagaa

SEQ ID NO: 2410325 - RNA, 19 nt, Artificial Sequence
  Description of Artificial Sequence: Synthetic oligonucleotide
  Antisense strand to SEQ ID NO: 2410324
uucuagaucagucagagag

SEQ ID NO: 2410326 - RNA, 19 nt, Artificial Sequence
  Description of Artificial Sequence: Synthetic oligonucleotide
  Sense strand starting at position 3449 of SEQ ID NO: 1886445
gcguaaguuacugcugcuu

SEQ ID NO: 2410327 - RNA, 19 nt, Artificial Sequence
  Description of Artificial Sequence: Synthetic oligonucleotide
  Antisense strand to SEQ ID NO: 2410326
aagcagcaguaacuuacgc

SEQ ID NO: 2410328 - RNA, 19 nt, Artificial Sequence
  Description of Artificial Sequence: Synthetic oligonucleotide
  Sense strand starting at position 3549 of SEQ ID NO: 1886445
augcaaucuuggcuuacca

SEQ ID NO: 2410329 - RNA, 19 nt, Artificial Sequence
  Description of Artificial Sequence: Synthetic oligonucleotide
  Antisense strand to SEQ ID NO: 2410328
ugguaagccaagauugcau

SEQ ID NO: 2410330 - RNA, 19 nt, Artificial Sequence
  Description of Artificial Sequence: Synthetic oligonucleotide
  Sense strand starting at position 3648 of SEQ ID NO: 1886445
ccagaucauuucuguauuu

SEQ ID NO: 2410331 - RNA, 19 nt, Artificial Sequence
  Description of Artificial Sequence: Synthetic oligonucleotide
  Antisense strand to SEQ ID NO: 2410330
aaauacagaaaugaucugg

SEQ ID NO: 2410332 - RNA, 19 nt, Artificial Sequence
  Description of Artificial Sequence: Synthetic oligonucleotide
  Sense strand starting at position 3687 of SEQ ID NO: 1886445
ccaaguugcccaggugagu

SEQ ID NO: 2410333 - RNA, 19 nt, Artificial Sequence
  Description of Artificial Sequence: Synthetic oligonucleotide
  Antisense strand to SEQ ID NO: 2410332
acucaccugggcaacuugg

SEQ ID NO: 2410334 - RNA, 19 nt, Artificial Sequence
  Description of Artificial Sequence: Synthetic oligonucleotide
  Sense strand starting at position 3955 of SEQ ID NO: 1886445
guuccaauccuguaauaag

SEQ ID NO: 2410335 - RNA, 19 nt, Artificial Sequence
  Description of Artificial Sequence: Synthetic oligonucleotide
  Antisense strand to SEQ ID NO: 2410334
cuuauuacaggauuggaac

SEQ ID NO: 2410336 - RNA, 19 nt, Artificial Sequence
  Description of Artificial Sequence: Synthetic oligonucleotide
  Sense strand starting at position 33 of SEQ ID NO: 1886446
acuuucucuggcugggaua

SEQ ID NO: 2410337 - RNA, 19 nt, Artificial Sequence
  Description of Artificial Sequence: Synthetic oligonucleotide
  Antisense strand to SEQ ID NO: 2410336
uaucccagccagagaaagu

SEQ ID NO: 2410338 - RNA, 19 nt, Artificial Sequence
  Description of Artificial Sequence: Synthetic oligonucleotide
  Sense strand starting at position 202 of SEQ ID NO: 1886446
gcuggaagauggccaaauu

SEQ ID NO: 2410339 - RNA, 19 nt, Artificial Sequence
  Description of Artificial Sequence: Synthetic oligonucleotide
  Antisense strand to SEQ ID NO: 2410338
aauuuggccaucuuccagc

SEQ ID NO: 2410340 - RNA, 19 nt, Artificial Sequence
  Description of Artificial Sequence: Synthetic oligonucleotide
  Sense strand starting at position 211 of SEQ ID NO: 1886446
uggccaaauuccucugaau

SEQ ID NO: 2410341 - RNA, 19 nt, Artificial Sequence
  Description of Artificial Sequence: Synthetic oligonucleotide
  Antisense strand to SEQ ID NO: 2410340
auucagaggaauuuggcca

SEQ ID NO: 2410342 - RNA, 19 nt, Artificial Sequence
  Description of Artificial Sequence: Synthetic oligonucleotide
  Sense strand starting at position 334 of SEQ ID NO: 1886446
ggauuaacaccguauagua

SEQ ID NO: 2410343 - RNA, 19 nt, Artificial Sequence
  Description of Artificial Sequence: Synthetic oligonucleotide
  Antisense strand to SEQ ID NO: 2410342
uacuauacgguguuaaucc

SEQ ID NO: 2410344 - RNA, 19 nt, Artificial Sequence
  Description of Artificial Sequence: Synthetic oligonucleotide
  Sense strand starting at position 344 of SEQ ID NO: 1886446
cguauaguacuugcuguua

SEQ ID NO: 2410345 - RNA, 19 nt, Artificial Sequence
  Description of Artificial Sequence: Synthetic oligonucleotide
  Antisense strand to SEQ ID NO: 2410344
uaacagcaaguacuauacg

SEQ ID NO: 2410346 - RNA, 19 nt, Artificial Sequence
  Description of Artificial Sequence: Synthetic oligonucleotide
  Sense strand starting at position 420 of SEQ ID NO: 1886446
gcuugugcaauaguuugua

SEQ ID NO: 2410347 - RNA, 19 nt, Artificial Sequence
  Description of Artificial Sequence: Synthetic oligonucleotide
  Antisense strand to SEQ ID NO: 2410346
uacaaacuauugcacaagc

SEQ ID NO: 2410348 - RNA, 19 nt, Artificial Sequence
  Description of Artificial Sequence: Synthetic oligonucleotide
  Sense strand starting at position 542 of SEQ ID NO: 1886446
uucuacuguggcuaucaau

SEQ ID NO: 2410349 - RNA, 19 nt, Artificial Sequence
  Description of Artificial Sequence: Synthetic oligonucleotide
  Antisense strand to SEQ ID NO: 2410348
auugauagccacaguagaa

SEQ ID NO: 2410350 - RNA, 19 nt, Artificial Sequence
  Description of Artificial Sequence: Synthetic oligonucleotide
  Sense strand starting at position 548 of SEQ ID NO: 1886446
uguggcuaucaaugagauc

SEQ ID NO: 2410351 - RNA, 19 nt, Artificial Sequence
  Description of Artificial Sequence: Synthetic oligonucleotide
  Antisense strand to SEQ ID NO: 2410350
gaucucauugauagccaca

SEQ ID NO: 2410352 - RNA, 19 nt, Artificial Sequence
  Description of Artificial Sequence: Synthetic oligonucleotide
  Sense strand starting at position 549 of SEQ ID NO: 1886446
guggcuaucaaugagaucu

SEQ ID NO: 2410353 - RNA, 19 nt, Artificial Sequence
  Description of Artificial Sequence: Synthetic oligonucleotide
  Antisense strand to SEQ ID NO: 2410352
agaucucauugauagccac

SEQ ID NO: 2410354 - RNA, 19 nt, Artificial Sequence
  Description of Artificial Sequence: Synthetic oligonucleotide
  Sense strand starting at position 567 of SEQ ID NO: 1886446
uugugccuccauuagaaua

SEQ ID NO: 2410355 - RNA, 19 nt, Artificial Sequence
  Description of Artificial Sequence: Synthetic oligonucleotide
  Antisense strand to SEQ ID NO: 2410354
uauucuaauggaggcacaa

SEQ ID NO: 2410356 - RNA, 19 nt, Artificial Sequence
  Description of Artificial Sequence: Synthetic oligonucleotide
  Sense strand starting at position 578 of SEQ ID NO: 1886446
uuagaauacugagcuagca

SEQ ID NO: 2410357 - RNA, 19 nt, Artificial Sequence
  Description of Artificial Sequence: Synthetic oligonucleotide
  Antisense strand to SEQ ID NO: 2410356
ugcuagcucaguauucuaa

SEQ ID NO: 2410358 - RNA, 19 nt, Artificial Sequence
  Description of Artificial Sequence: Synthetic oligonucleotide
  Sense strand starting at position 588 of SEQ ID NO: 1886446
gagcuagcauuugauauuu

SEQ ID NO: 2410359 - RNA, 19 nt, Artificial Sequence
  Description of Artificial Sequence: Synthetic oligonucleotide
  Antisense strand to SEQ ID NO: 2410358
aaauaucaaaugcuagcuc

SEQ ID NO: 2410360 - RNA, 19 nt, Artificial Sequence
  Description of Artificial Sequence: Synthetic oligonucleotide
  Sense strand starting at position 590 of SEQ ID NO: 1886446
gcuagcauuugauauuuga

SEQ ID NO: 2410361 - RNA, 19 nt, Artificial Sequence
  Description of Artificial Sequence: Synthetic oligonucleotide
  Antisense strand to SEQ ID NO: 2410360
ucaaauaucaaaugcuagc

SEQ ID NO: 2410362 - RNA, 19 nt, Artificial Sequence
  Description of Artificial Sequence: Synthetic oligonucleotide
  Sense strand starting at position 632 of SEQ ID NO: 1886446
ggguuucuguuguugauuu

SEQ ID NO: 2410363 - RNA, 19 nt, Artificial Sequence
  Description of Artificial Sequence: Synthetic oligonucleotide
  Antisense strand to SEQ ID NO: 2410362
aaaucaacaacagaaaccc

SEQ ID NO: 2410364 - RNA, 19 nt, Artificial Sequence
  Description of Artificial Sequence: Synthetic oligonucleotide
  Sense strand starting at position 986 of SEQ ID NO: 1886446
uugaauaugccucauaaug

SEQ ID NO: 2410365 - RNA, 19 nt, Artificial Sequence
  Description of Artificial Sequence: Synthetic oligonucleotide
  Antisense strand to SEQ ID NO: 2410364
cauuaugaggcauauucaa

SEQ ID NO: 2410366 - RNA, 19 nt, Artificial Sequence
  Description of Artificial Sequence: Synthetic oligonucleotide
  Sense strand starting at position 1322 of SEQ ID NO: 1886446
cauuuaugaucgcugcuac

SEQ ID NO: 2410367 - RNA, 19 nt, Artificial Sequence
  Description of Artificial Sequence: Synthetic oligonucleotide
  Antisense strand to SEQ ID NO: 2410366
guagcagcgaucauaaaug

SEQ ID NO: 2410368 - RNA, 19 nt, Artificial Sequence
  Description of Artificial Sequence: Synthetic oligonucleotide
  Sense strand starting at position 1323 of SEQ ID NO: 1886446
auuuaugaucgcugcuaca

SEQ ID NO: 2410369 - RNA, 19 nt, Artificial Sequence
  Description of Artificial Sequence: Synthetic oligonucleotide
  Antisense strand to SEQ ID NO: 2410368
uguagcagcgaucauaaau

SEQ ID NO: 2410370 - RNA, 19 nt, Artificial Sequence
  Description of Artificial Sequence: Synthetic oligonucleotide
  Sense strand starting at position 1956 of SEQ ID NO: 1886446
gggcgacuucuccagacac

SEQ ID NO: 2410371 - RNA, 19 nt, Artificial Sequence
  Description of Artificial Sequence: Synthetic oligonucleotide
  Antisense strand to SEQ ID NO: 2410370
gugucuggagaagucgccc

SEQ ID NO: 2410372 - RNA, 19 nt, Artificial Sequence
  Description of Artificial Sequence: Synthetic oligonucleotide
  Sense strand starting at position 1958 of SEQ ID NO: 1886446
gcgacuucuccagacaccu

SEQ ID NO: 2410373 - RNA, 19 nt, Artificial Sequence
  Description of Artificial Sequence: Synthetic oligonucleotide
  Antisense strand to SEQ ID NO: 2410372
aggugucuggagaagucgc

SEQ ID NO: 2410374 - RNA, 19 nt, Artificial Sequence
  Description of Artificial Sequence: Synthetic oligonucleotide
  Sense strand starting at position 1978 of SEQ ID NO: 1886446
agacuacgcuucccagaaa

SEQ ID NO: 2410375 - RNA, 19 nt, Artificial Sequence
  Description of Artificial Sequence: Synthetic oligonucleotide
  Antisense strand to SEQ ID NO: 2410374
uuucugggaagcguagucu

SEQ ID NO: 2410376 - RNA, 19 nt, Artificial Sequence
  Description of Artificial Sequence: Synthetic oligonucleotide
  Sense strand starting at position 1981 of SEQ ID NO: 1886446
cuacgcuucccagaaagga

SEQ ID NO: 2410377 - RNA, 19 nt, Artificial Sequence
  Description of Artificial Sequence: Synthetic oligonucleotide
  Antisense strand to SEQ ID NO: 2410376
uccuuucugggaagcguag

SEQ ID NO: 2410378 - RNA, 19 nt, Artificial Sequence
  Description of Artificial Sequence: Synthetic oligonucleotide
  Sense strand starting at position 1989 of SEQ ID NO: 1886446
cccagaaaggauugcgaua

SEQ ID NO: 2410379 - RNA, 19 nt, Artificial Sequence
  Description of Artificial Sequence: Synthetic oligonucleotide
  Antisense strand to SEQ ID NO: 2410378
uaucgcaauccuuucuggg

SEQ ID NO: 2410380 - RNA, 19 nt, Artificial Sequence
  Description of Artificial Sequence: Synthetic oligonucleotide
  Sense strand starting at position 1994 of SEQ ID NO: 1886446
aaaggauugcgauacucuc

SEQ ID NO: 2410381 - RNA, 19 nt, Artificial Sequence
  Description of Artificial Sequence: Synthetic oligonucleotide
  Antisense strand to SEQ ID NO: 2410380
gagaguaucgcaauccuuu

SEQ ID NO: 2410382 - RNA, 19 nt, Artificial Sequence
  Description of Artificial Sequence: Synthetic oligonucleotide
  Sense strand starting at position 2039 of SEQ ID NO: 1886446
gucaaauuuccggguuaug

SEQ ID NO: 2410383 - RNA, 19 nt, Artificial Sequence
  Description of Artificial Sequence: Synthetic oligonucleotide
  Antisense strand to SEQ ID NO: 2410382
cauaacccggaaauuugac

SEQ ID NO: 2410384 - RNA, 19 nt, Artificial Sequence
  Description of Artificial Sequence: Synthetic oligonucleotide
  Sense strand starting at position 2108 of SEQ ID NO: 1886446
gcaggagaauugcucaaug

SEQ ID NO: 2410385 - RNA, 19 nt, Artificial Sequence
  Description of Artificial Sequence: Synthetic oligonucleotide
  Antisense strand to SEQ ID NO: 2410384
cauugagcaauucuccugc

SEQ ID NO: 2410386 - RNA, 19 nt, Artificial Sequence
  Description of Artificial Sequence: Synthetic oligonucleotide
  Sense strand starting at position 2513 of SEQ ID NO: 1886446
gaagaauacgcucaaggcu

SEQ ID NO: 2410387 - RNA, 19 nt, Artificial Sequence
  Description of Artificial Sequence: Synthetic oligonucleotide
  Antisense strand to SEQ ID NO: 2410386
agccuugagcguauucuuc

SEQ ID NO: 2410388 - RNA, 19 nt, Artificial Sequence
  Description of Artificial Sequence: Synthetic oligonucleotide
  Sense strand starting at position 2835 of SEQ ID NO: 1886446
gugugaucccuguugugca

SEQ ID NO: 2410389 - RNA, 19 nt, Artificial Sequence
  Description of Artificial Sequence: Synthetic oligonucleotide
  Antisense strand to SEQ ID NO: 2410388
ugcacaacagggaucacac

SEQ ID NO: 2410390 - RNA, 19 nt, Artificial Sequence
  Description of Artificial Sequence: Synthetic oligonucleotide
  Sense strand starting at position 2898 of SEQ ID NO: 1886446
aguaauaucucuuugcaga

SEQ ID NO: 2410391 - RNA, 19 nt, Artificial Sequence
  Description of Artificial Sequence: Synthetic oligonucleotide
  Antisense strand to SEQ ID NO: 2410390
ucugcaaagagauauuacu

SEQ ID NO: 2410392 - RNA, 19 nt, Artificial Sequence
  Description of Artificial Sequence: Synthetic oligonucleotide
  Sense strand starting at position 2984 of SEQ ID NO: 1886446
guacgugucagagaaagag

SEQ ID NO: 2410393 - RNA, 19 nt, Artificial Sequence
  Description of Artificial Sequence: Synthetic oligonucleotide
  Antisense strand to SEQ ID NO: 2410392
cucuuucucugacacguac

SEQ ID NO: 2410394 - RNA, 19 nt, Artificial Sequence
  Description of Artificial Sequence: Synthetic oligonucleotide
  Sense strand starting at position 3098 of SEQ ID NO: 1886446
guaggaauucgauggugga

SEQ ID NO: 2410395 - RNA, 19 nt, Artificial Sequence
  Description of Artificial Sequence: Synthetic oligonucleotide
  Antisense strand to SEQ ID NO: 2410394
uccaccaucgaauuccuac

SEQ ID NO: 2410396 - RNA, 19 nt, Artificial Sequence
  Description of Artificial Sequence: Synthetic oligonucleotide
  Sense strand starting at position 3099 of SEQ ID NO: 1886446
uaggaauucgaugguggaa

SEQ ID NO: 2410397 - RNA, 19 nt, Artificial Sequence
  Description of Artificial Sequence: Synthetic oligonucleotide
  Antisense strand to SEQ ID NO: 2410396
uuccaccaucgaauuccua

SEQ ID NO: 2410398 - RNA, 19 nt, Artificial Sequence
  Description of Artificial Sequence: Synthetic oligonucleotide
  Sense strand starting at position 3102 of SEQ ID NO: 1886446
gaauucgaugguggaaaua

SEQ ID NO: 2410399 - RNA, 19 nt, Artificial Sequence
  Description of Artificial Sequence: Synthetic oligonucleotide
  Antisense strand to SEQ ID NO: 2410398
uauuuccaccaucgaauuc

SEQ ID NO: 2410400 - RNA, 19 nt, Artificial Sequence
  Description of Artificial Sequence: Synthetic oligonucleotide
  Sense strand starting at position 3141 of SEQ ID NO: 1886446
uggugucagacauacugga

SEQ ID NO: 2410401 - RNA, 19 nt, Artificial Sequence
  Description of Artificial Sequence: Synthetic oligonucleotide
  Antisense strand to SEQ ID NO: 2410400
uccaguaugucugacacca

SEQ ID NO: 2410402 - RNA, 19 nt, Artificial Sequence
  Description of Artificial Sequence: Synthetic oligonucleotide
  Sense strand starting at position 3630 of SEQ ID NO: 1886446
aggaaaguuguaggagagu

SEQ ID NO: 2410403 - RNA, 19 nt, Artificial Sequence
  Description of Artificial Sequence: Synthetic oligonucleotide
  Antisense strand to SEQ ID NO: 2410402
acucuccuacaacuuuccu

SEQ ID NO: 2410404 - RNA, 19 nt, Artificial Sequence
  Description of Artificial Sequence: Synthetic oligonucleotide
  Sense strand starting at position 3655 of SEQ ID NO: 1886446
aggagugugaacuguuaga

SEQ ID NO: 2410405 - RNA, 19 nt, Artificial Sequence
  Description of Artificial Sequence: Synthetic oligonucleotide
  Antisense strand to SEQ ID NO: 2410404
ucuaacaguucacacuccu

SEQ ID NO: 2410406 - RNA, 19 nt, Artificial Sequence
  Description of Artificial Sequence: Synthetic oligonucleotide
  Sense strand starting at position 3687 of SEQ ID NO: 1886446
ugcuuuaaaggugggagaa

SEQ ID NO: 2410407 - RNA, 19 nt, Artificial Sequence
  Description of Artificial Sequence: Synthetic oligonucleotide
  Antisense strand to SEQ ID NO: 2410406
uucucccaccuuuaaagca

SEQ ID NO: 2410408 - RNA, 19 nt, Artificial Sequence
  Description of Artificial Sequence: Synthetic oligonucleotide
  Sense strand starting at position 3688 of SEQ ID NO: 1886446
gcuuuaaaggugggagaag

SEQ ID NO: 2410409 - RNA, 19 nt, Artificial Sequence
  Description of Artificial Sequence: Synthetic oligonucleotide
  Antisense strand to SEQ ID NO: 2410408
cuucucccaccuuuaaagc

SEQ ID NO: 2410410 - RNA, 19 nt, Artificial Sequence
  Description of Artificial Sequence: Synthetic oligonucleotide
  Sense strand starting at position 3754 of SEQ ID NO: 1886446
uggauuaaaccuugcacuu

SEQ ID NO: 2410411 - RNA, 19 nt, Artificial Sequence
  Description of Artificial Sequence: Synthetic oligonucleotide
  Antisense strand to SEQ ID NO: 2410410
aagugcaagguuuaaucca

SEQ ID NO: 2410412 - RNA, 19 nt, Artificial Sequence
  Description of Artificial Sequence: Synthetic oligonucleotide
  Sense strand starting at position 3923 of SEQ ID NO: 1886446
auaauaacgcaucauaggu

SEQ ID NO: 2410413 - RNA, 19 nt, Artificial Sequence
  Description of Artificial Sequence: Synthetic oligonucleotide
  Antisense strand to SEQ ID NO: 2410412
accuaugaugcguuauuau

SEQ ID NO: 2410414 - RNA, 19 nt, Artificial Sequence
  Description of Artificial Sequence: Synthetic oligonucleotide
  Sense strand starting at position 3963 of SEQ ID NO: 1886446
uuaauauuaguagagcacu

SEQ ID NO: 2410415 - RNA, 19 nt, Artificial Sequence
  Description of Artificial Sequence: Synthetic oligonucleotide
  Antisense strand to SEQ ID NO: 2410414
agugcucuacuaauauuaa

SEQ ID NO: 2410416 - RNA, 19 nt, Artificial Sequence
  Description of Artificial Sequence: Synthetic oligonucleotide
  Sense strand starting at position 444 of SEQ ID NO: 1886447
acaagaauccaguagcucu

SEQ ID NO: 2410417 - RNA, 19 nt, Artificial Sequence
  Description of Artificial Sequence: Synthetic oligonucleotide
  Antisense strand to SEQ ID NO: 2410416
agagcuacuggauucuugu

SEQ ID NO: 2410418 - RNA, 19 nt, Artificial Sequence
  Description of Artificial Sequence: Synthetic oligonucleotide
  Sense strand starting at position 533 of SEQ ID NO: 1886447
uaggucgggcgguaagaua

SEQ ID NO: 2410419 - RNA, 19 nt, Artificial Sequence
  Description of Artificial Sequence: Synthetic oligonucleotide
  Antisense strand to SEQ ID NO: 2410418
uaucuuaccgcccgaccua

SEQ ID NO: 2410420 - RNA, 19 nt, Artificial Sequence
  Description of Artificial Sequence: Synthetic oligonucleotide
  Sense strand starting at position 757 of SEQ ID NO: 1886447
uuaagcgauccucacuuua

SEQ ID NO: 2410421 - RNA, 19 nt, Artificial Sequence
  Description of Artificial Sequence: Synthetic oligonucleotide
  Antisense strand to SEQ ID NO: 2410420
uaaagugaggaucgcuuaa

SEQ ID NO: 2410422 - RNA, 19 nt, Artificial Sequence
  Description of Artificial Sequence: Synthetic oligonucleotide
  Sense strand starting at position 924 of SEQ ID NO: 1886447
ugauacaucccagguguga

SEQ ID NO: 2410423 - RNA, 19 nt, Artificial Sequence
  Description of Artificial Sequence: Synthetic oligonucleotide
  Antisense strand to SEQ ID NO: 2410422
ucacaccugggauguauca

SEQ ID NO: 2410424 - RNA, 19 nt, Artificial Sequence
  Description of Artificial Sequence: Synthetic oligonucleotide
  Sense strand starting at position 926 of SEQ ID NO: 1886447
auacaucccaggugugagu

SEQ ID NO: 2410425 - RNA, 19 nt, Artificial Sequence
  Description of Artificial Sequence: Synthetic oligonucleotide
  Antisense strand to SEQ ID NO: 2410424
acucacaccugggauguau

SEQ ID NO: 2410426 - RNA, 19 nt, Artificial Sequence
  Description of Artificial Sequence: Synthetic oligonucleotide
  Sense strand starting at position 961 of SEQ ID NO: 1886447
ggcauugcccaugacugua

SEQ ID NO: 2410427 - RNA, 19 nt, Artificial Sequence
  Description of Artificial Sequence: Synthetic oligonucleotide
  Antisense strand to SEQ ID NO: 2410426
uacagucaugggcaaugcc

SEQ ID NO: 2410428 - RNA, 19 nt, Artificial Sequence
  Description of Artificial Sequence: Synthetic oligonucleotide
  Sense strand starting at position 984 of SEQ ID NO: 1886447
cugugucugcuugucuuau

SEQ ID NO: 2410429 - RNA, 19 nt, Artificial Sequence
  Description of Artificial Sequence: Synthetic oligonucleotide
  Antisense strand to SEQ ID NO: 2410428
auaagacaagcagacacag

SEQ ID NO: 2410430 - RNA, 19 nt, Artificial Sequence
  Description of Artificial Sequence: Synthetic oligonucleotide
  Sense strand starting at position 990 of SEQ ID NO: 1886447
cugcuugucuuauuaaagg

SEQ ID NO: 2410431 - RNA, 19 nt, Artificial Sequence
  Description of Artificial Sequence: Synthetic oligonucleotide
  Antisense strand to SEQ ID NO: 2410430
ccuuuaauaagacaagcag

SEQ ID NO: 2410432 - RNA, 19 nt, Artificial Sequence
  Description of Artificial Sequence: Synthetic oligonucleotide
  Sense strand starting at position 1213 of SEQ ID NO: 1886447
uuugguaguaaccgaauga

SEQ ID NO: 2410433 - RNA, 19 nt, Artificial Sequence
  Description of Artificial Sequence: Synthetic oligonucleotide
  Antisense strand to SEQ ID NO: 2410432
ucauucgguuacuaccaaa

SEQ ID NO: 2410434 - RNA, 19 nt, Artificial Sequence
  Description of Artificial Sequence: Synthetic oligonucleotide
  Sense strand starting at position 1217 of SEQ ID NO: 1886447
guaguaaccgaaugacagu

SEQ ID NO: 2410435 - RNA, 19 nt, Artificial Sequence
  Description of Artificial Sequence: Synthetic oligonucleotide
  Antisense strand to SEQ ID NO: 2410434
acugucauucgguuacuac

SEQ ID NO: 2410436 - RNA, 19 nt, Artificial Sequence
  Description of Artificial Sequence: Synthetic oligonucleotide
  Sense strand starting at position 1436 of SEQ ID NO: 1886447
agacuugaagauugucaac

SEQ ID NO: 2410437 - RNA, 19 nt, Artificial Sequence
  Description of Artificial Sequence: Synthetic oligonucleotide
  Antisense strand to SEQ ID NO: 2410436
guugacaaucuucaagucu

SEQ ID NO: 2410438 - RNA, 19 nt, Artificial Sequence
  Description of Artificial Sequence: Synthetic oligonucleotide
  Sense strand starting at position 1438 of SEQ ID NO: 1886447
acuugaagauugucaacua

SEQ ID NO: 2410439 - RNA, 19 nt, Artificial Sequence
  Description of Artificial Sequence: Synthetic oligonucleotide
  Antisense strand to SEQ ID NO: 2410438
uaguugacaaucuucaagu

SEQ ID NO: 2410440 - RNA, 19 nt, Artificial Sequence
  Description of Artificial Sequence: Synthetic oligonucleotide
  Sense strand starting at position 1449 of SEQ ID NO: 1886447
gucaacuauugggucugaa

SEQ ID NO: 2410441 - RNA, 19 nt, Artificial Sequence
  Description of Artificial Sequence: Synthetic oligonucleotide
  Antisense strand to SEQ ID NO: 2410440
uucagacccaauaguugac

SEQ ID NO: 2410442 - RNA, 19 nt, Artificial Sequence
  Description of Artificial Sequence: Synthetic oligonucleotide
  Sense strand starting at position 1529 of SEQ ID NO: 1886447
guucgagccaaugaaguua

SEQ ID NO: 2410443 - RNA, 19 nt, Artificial Sequence
  Description of Artificial Sequence: Synthetic oligonucleotide
  Antisense strand to SEQ ID NO: 2410442
uaacuucauuggcucgaac

SEQ ID NO: 2410444 - RNA, 19 nt, Artificial Sequence
  Description of Artificial Sequence: Synthetic oligonucleotide
  Sense strand starting at position 1772 of SEQ ID NO: 1886447
gagggaaauuacuccuugu

SEQ ID NO: 2410445 - RNA, 19 nt, Artificial Sequence
  Description of Artificial Sequence: Synthetic oligonucleotide
  Antisense strand to SEQ ID NO: 2410444
acaaggaguaauuucccuc

SEQ ID NO: 2410446 - RNA, 19 nt, Artificial Sequence
  Description of Artificial Sequence: Synthetic oligonucleotide
  Sense strand starting at position 1775 of SEQ ID NO: 1886447
ggaaauuacuccuugugcu

SEQ ID NO: 2410447 - RNA, 19 nt, Artificial Sequence
  Description of Artificial Sequence: Synthetic oligonucleotide
  Antisense strand to SEQ ID NO: 2410446
agcacaaggaguaauuucc

SEQ ID NO: 2410448 - RNA, 19 nt, Artificial Sequence
  Description of Artificial Sequence: Synthetic oligonucleotide
  Sense strand starting at position 1795 of SEQ ID NO: 1886447
cuaccuggcucaccagaua

SEQ ID NO: 2410449 - RNA, 19 nt, Artificial Sequence
  Description of Artificial Sequence: Synthetic oligonucleotide
  Antisense strand to SEQ ID NO: 2410448
uaucuggugagccagguag

SEQ ID NO: 2410450 - RNA, 19 nt, Artificial Sequence
  Description of Artificial Sequence: Synthetic oligonucleotide
  Sense strand starting at position 2009 of SEQ ID NO: 1886447
gggaaugcgggucagcaua

SEQ ID NO: 2410451 - RNA, 19 nt, Artificial Sequence
  Description of Artificial Sequence: Synthetic oligonucleotide
  Antisense strand to SEQ ID NO: 2410450
uaugcugacccgcauuccc

SEQ ID NO: 2410452 - RNA, 19 nt, Artificial Sequence
  Description of Artificial Sequence: Synthetic oligonucleotide
  Sense strand starting at position 2038 of SEQ ID NO: 1886447
gaugguuaucuugguuaau

SEQ ID NO: 2410453 - RNA, 19 nt, Artificial Sequence
  Description of Artificial Sequence: Synthetic oligonucleotide
  Antisense strand to SEQ ID NO: 2410452
auuaaccaagauaaccauc

SEQ ID NO: 2410454 - RNA, 19 nt, Artificial Sequence
  Description of Artificial Sequence: Synthetic oligonucleotide
  Sense strand starting at position 2039 of SEQ ID NO: 1886447
augguuaucuugguuaaug

SEQ ID NO: 2410455 - RNA, 19 nt, Artificial Sequence
  Description of Artificial Sequence: Synthetic oligonucleotide
  Antisense strand to SEQ ID NO: 2410454
cauuaaccaagauaaccau

SEQ ID NO: 2410456 - RNA, 19 nt, Artificial Sequence
  Description of Artificial Sequence: Synthetic oligonucleotide
  Sense strand starting at position 2082 of SEQ ID NO: 1886447
gcaacaaggcuguaaucaa

SEQ ID NO: 2410457 - RNA, 19 nt, Artificial Sequence
  Description of Artificial Sequence: Synthetic oligonucleotide
  Antisense strand to SEQ ID NO: 2410456
uugauuacagccuuguugc

SEQ ID NO: 2410458 - RNA, 19 nt, Artificial Sequence
  Description of Artificial Sequence: Synthetic oligonucleotide
  Sense strand starting at position 2356 of SEQ ID NO: 1886447
ccaccaccuugguuugaua

SEQ ID NO: 2410459 - RNA, 19 nt, Artificial Sequence
  Description of Artificial Sequence: Synthetic oligonucleotide
  Antisense strand to SEQ ID NO: 2410458
uaucaaaccaagguggugg

SEQ ID NO: 2410460 - RNA, 19 nt, Artificial Sequence
  Description of Artificial Sequence: Synthetic oligonucleotide
  Sense strand starting at position 2358 of SEQ ID NO: 1886447
accaccuugguuugauauu

SEQ ID NO: 2410461 - RNA, 19 nt, Artificial Sequence
  Description of Artificial Sequence: Synthetic oligonucleotide
  Antisense strand to SEQ ID NO: 2410460
aauaucaaaccaagguggu

SEQ ID NO: 2410462 - RNA, 19 nt, Artificial Sequence
  Description of Artificial Sequence: Synthetic oligonucleotide
  Sense strand starting at position 2388 of SEQ ID NO: 1886447
aggcuaguuccugggauuc

SEQ ID NO: 2410463 - RNA, 19 nt, Artificial Sequence
  Description of Artificial Sequence: Synthetic oligonucleotide
  Antisense strand to SEQ ID NO: 2410462
gaaucccaggaacuagccu

SEQ ID NO: 2410464 - RNA, 19 nt, Artificial Sequence
  Description of Artificial Sequence: Synthetic oligonucleotide
  Sense strand starting at position 2442 of SEQ ID NO: 1886447
gccguaucccauuccuguu

SEQ ID NO: 2410465 - RNA, 19 nt, Artificial Sequence
  Description of Artificial Sequence: Synthetic oligonucleotide
  Antisense strand to SEQ ID NO: 2410464
aacaggaaugggauacggc

SEQ ID NO: 2410466 - RNA, 19 nt, Artificial Sequence
  Description of Artificial Sequence: Synthetic oligonucleotide
  Sense strand starting at position 2488 of SEQ ID NO: 1886447
aauguaguugccuggaaca

SEQ ID NO: 2410467 - RNA, 19 nt, Artificial Sequence
  Description of Artificial Sequence: Synthetic oligonucleotide
  Antisense strand to SEQ ID NO: 2410466
uguuccaggcaacuacauu

SEQ ID NO: 2410468 - RNA, 19 nt, Artificial Sequence
  Description of Artificial Sequence: Synthetic oligonucleotide
  Sense strand starting at position 2490 of SEQ ID NO: 1886447
uguaguugccuggaacauu

SEQ ID NO: 2410469 - RNA, 19 nt, Artificial Sequence
  Description of Artificial Sequence: Synthetic oligonucleotide
  Antisense strand to SEQ ID NO: 2410468
aauguuccaggcaacuaca

SEQ ID NO: 2410470 - RNA, 19 nt, Artificial Sequence
  Description of Artificial Sequence: Synthetic oligonucleotide
  Sense strand starting at position 2562 of SEQ ID NO: 1886447
acuuuauuccgagggcaug

SEQ ID NO: 2410471 - RNA, 19 nt, Artificial Sequence
  Description of Artificial Sequence: Synthetic oligonucleotide
  Antisense strand to SEQ ID NO: 2410470
caugcccucggaauaaagu

SEQ ID NO: 2410472 - RNA, 19 nt, Artificial Sequence
  Description of Artificial Sequence: Synthetic oligonucleotide
  Sense strand starting at position 2903 of SEQ ID NO: 1886447
uagguuaccugguccagaa

SEQ ID NO: 2410473 - RNA, 19 nt, Artificial Sequence
  Description of Artificial Sequence: Synthetic oligonucleotide
  Antisense strand to SEQ ID NO: 2410472
uucuggaccagguaaccua

SEQ ID NO: 2410474 - RNA, 19 nt, Artificial Sequence
  Description of Artificial Sequence: Synthetic oligonucleotide
  Sense strand starting at position 2905 of SEQ ID NO: 1886447
gguuaccugguccagaaua

SEQ ID NO: 2410475 - RNA, 19 nt, Artificial Sequence
  Description of Artificial Sequence: Synthetic oligonucleotide
  Antisense strand to SEQ ID NO: 2410474
uauucuggaccagguaacc

SEQ ID NO: 2410476 - RNA, 19 nt, Artificial Sequence
  Description of Artificial Sequence: Synthetic oligonucleotide
  Sense strand starting at position 2916 of SEQ ID NO: 1886447
ccagaauagaugugcagua

SEQ ID NO: 2410477 - RNA, 19 nt, Artificial Sequence
  Description of Artificial Sequence: Synthetic oligonucleotide
  Antisense strand to SEQ ID NO: 2410476
uacugcacaucuauucugg

SEQ ID NO: 2410478 - RNA, 19 nt, Artificial Sequence
  Description of Artificial Sequence: Synthetic oligonucleotide
  Sense strand starting at position 2917 of SEQ ID NO: 1886447
cagaauagaugugcaguaa

SEQ ID NO: 2410479 - RNA, 19 nt, Artificial Sequence
  Description of Artificial Sequence: Synthetic oligonucleotide
  Antisense strand to SEQ ID NO: 2410478
uuacugcacaucuauucug

SEQ ID NO: 2410480 - RNA, 19 nt, Artificial Sequence
  Description of Artificial Sequence: Synthetic oligonucleotide
  Sense strand starting at position 2970 of SEQ ID NO: 1886447
gacugaaguuaguuauuau

SEQ ID NO: 2410481 - RNA, 19 nt, Artificial Sequence
  Description of Artificial Sequence: Synthetic oligonucleotide
  Antisense strand to SEQ ID NO: 2410480
auaauaacuaacuucaguc

SEQ ID NO: 2410482 - RNA, 19 nt, Artificial Sequence
  Description of Artificial Sequence: Synthetic oligonucleotide
  Sense strand starting at position 3031 of SEQ ID NO: 1886447
aguuuacagaguugcagau

SEQ ID NO: 2410483 - RNA, 19 nt, Artificial Sequence
  Description of Artificial Sequence: Synthetic oligonucleotide
  Antisense strand to SEQ ID NO: 2410482
aucugcaacucuguaaacu

SEQ ID NO: 2410484 - RNA, 19 nt, Artificial Sequence
  Description of Artificial Sequence: Synthetic oligonucleotide
  Sense strand starting at position 3046 of SEQ ID NO: 1886447
agaugacagguuugcuaau

SEQ ID NO: 2410485 - RNA, 19 nt, Artificial Sequence
  Description of Artificial Sequence: Synthetic oligonucleotide
  Antisense strand to SEQ ID NO: 2410484
auuagcaaaccugucaucu

SEQ ID NO: 2410486 - RNA, 19 nt, Artificial Sequence
  Description of Artificial Sequence: Synthetic oligonucleotide
  Sense strand starting at position 3704 of SEQ ID NO: 1886447
gugaguaaacauuaagugu

SEQ ID NO: 2410487 - RNA, 19 nt, Artificial Sequence
  Description of Artificial Sequence: Synthetic oligonucleotide
  Antisense strand to SEQ ID NO: 2410486
acacuuaauguuuacucac

SEQ ID NO: 2410488 - RNA, 19 nt, Artificial Sequence
  Description of Artificial Sequence: Synthetic oligonucleotide
  Sense strand starting at position 3807 of SEQ ID NO: 1886447
ggaucacccuuuccugaua

SEQ ID NO: 2410489 - RNA, 19 nt, Artificial Sequence
  Description of Artificial Sequence: Synthetic oligonucleotide
  Antisense strand to SEQ ID NO: 2410488
uaucaggaaagggugaucc

SEQ ID NO: 2410490 - RNA, 19 nt, Artificial Sequence
  Description of Artificial Sequence: Synthetic oligonucleotide
  Sense strand starting at position 3892 of SEQ ID NO: 1886447
aaaguacuggcugguuaga

SEQ ID NO: 2410491 - RNA, 19 nt, Artificial Sequence
  Description of Artificial Sequence: Synthetic oligonucleotide
  Antisense strand to SEQ ID NO: 2410490
ucuaaccagccaguacuuu

SEQ ID NO: 2410492 - RNA, 19 nt, Artificial Sequence
  Description of Artificial Sequence: Synthetic oligonucleotide
  Sense strand starting at position 3906 of SEQ ID NO: 1886447
uuagaacucugaguggaau

SEQ ID NO: 2410493 - RNA, 19 nt, Artificial Sequence
  Description of Artificial Sequence: Synthetic oligonucleotide
  Antisense strand to SEQ ID NO: 2410492
auuccacucagaguucuaa

SEQ ID NO: 2410494 - RNA, 19 nt, Artificial Sequence
  Description of Artificial Sequence: Synthetic oligonucleotide
  Sense strand starting at position 3928 of SEQ ID NO: 1886447
aguaacuggcucuagguua

SEQ ID NO: 2410495 - RNA, 19 nt, Artificial Sequence
  Description of Artificial Sequence: Synthetic oligonucleotide
  Antisense strand to SEQ ID NO: 2410494
uaaccuagagccaguuacu

SEQ ID NO: 2410496 - RNA, 19 nt, Artificial Sequence
  Description of Artificial Sequence: Synthetic oligonucleotide
  Sense strand starting at position 168 of SEQ ID NO: 1886448
caggucugucuggauguga

SEQ ID NO: 2410497 - RNA, 19 nt, Artificial Sequence
  Description of Artificial Sequence: Synthetic oligonucleotide
  Antisense strand to SEQ ID NO: 2410496
ucacauccagacagaccug

SEQ ID NO: 2410498 - RNA, 19 nt, Artificial Sequence
  Description of Artificial Sequence: Synthetic oligonucleotide
  Sense strand starting at position 220 of SEQ ID NO: 1886448
ggagcagggcucggucaau

SEQ ID NO: 2410499 - RNA, 19 nt, Artificial Sequence
  Description of Artificial Sequence: Synthetic oligonucleotide
  Antisense strand to SEQ ID NO: 2410498
auugaccgagcccugcucc

SEQ ID NO: 2410500 - RNA, 19 nt, Artificial Sequence
  Description of Artificial Sequence: Synthetic oligonucleotide
  Sense strand starting at position 231 of SEQ ID NO: 1886448
cggucaauggucuggauaa

SEQ ID NO: 2410501 - RNA, 19 nt, Artificial Sequence
  Description of Artificial Sequence: Synthetic oligonucleotide
  Antisense strand to SEQ ID NO: 2410500
uuauccagaccauugaccg

SEQ ID NO: 2410502 - RNA, 19 nt, Artificial Sequence
  Description of Artificial Sequence: Synthetic oligonucleotide
  Sense strand starting at position 233 of SEQ ID NO: 1886448
gucaauggucuggauaauc

SEQ ID NO: 2410503 - RNA, 19 nt, Artificial Sequence
  Description of Artificial Sequence: Synthetic oligonucleotide
  Antisense strand to SEQ ID NO: 2410502
gauuauccagaccauugac

SEQ ID NO: 2410504 - RNA, 19 nt, Artificial Sequence
  Description of Artificial Sequence: Synthetic oligonucleotide
  Sense strand starting at position 306 of SEQ ID NO: 1886448
gaugucuugugacucagaa

SEQ ID NO: 2410505 - RNA, 19 nt, Artificial Sequence
  Description of Artificial Sequence: Synthetic oligonucleotide
  Antisense strand to SEQ ID NO: 2410504
uucugagucacaagacauc

SEQ ID NO: 2410506 - RNA, 19 nt, Artificial Sequence
  Description of Artificial Sequence: Synthetic oligonucleotide
  Sense strand starting at position 310 of SEQ ID NO: 1886448
ucuugugacucagaaucuu

SEQ ID NO: 2410507 - RNA, 19 nt, Artificial Sequence
  Description of Artificial Sequence: Synthetic oligonucleotide
  Antisense strand to SEQ ID NO: 2410506
aagauucugagucacaaga

SEQ ID NO: 2410508 - RNA, 19 nt, Artificial Sequence
  Description of Artificial Sequence: Synthetic oligonucleotide
  Sense strand starting at position 449 of SEQ ID NO: 1886448
ggcccucuucugggugaau

SEQ ID NO: 2410509 - RNA, 19 nt, Artificial Sequence
  Description of Artificial Sequence: Synthetic oligonucleotide
  Antisense strand to SEQ ID NO: 2410508
auucacccagaagagggcc

SEQ ID NO: 2410510 - RNA, 19 nt, Artificial Sequence
  Description of Artificial Sequence: Synthetic oligonucleotide
  Sense strand starting at position 450 of SEQ ID NO: 1886448
gcccucuucugggugaaug

SEQ ID NO: 2410511 - RNA, 19 nt, Artificial Sequence
  Description of Artificial Sequence: Synthetic oligonucleotide
  Antisense strand to SEQ ID NO: 2410510
cauucacccagaagagggc

SEQ ID NO: 2410512 - RNA, 19 nt, Artificial Sequence
  Description of Artificial Sequence: Synthetic oligonucleotide
  Sense strand starting at position 765 of SEQ ID NO: 1886448
ccucuccugugguucgaaa

SEQ ID NO: 2410513 - RNA, 19 nt, Artificial Sequence
  Description of Artificial Sequence: Synthetic oligonucleotide
  Antisense strand to SEQ ID NO: 2410512
uuucgaaccacaggagagg

SEQ ID NO: 2410514 - RNA, 19 nt, Artificial Sequence
  Description of Artificial Sequence: Synthetic oligonucleotide
  Sense strand starting at position 837 of SEQ ID NO: 1886448
gucccagagccuuguccaa

SEQ ID NO: 2410515 - RNA, 19 nt, Artificial Sequence
  Description of Artificial Sequence: Synthetic oligonucleotide
  Antisense strand to SEQ ID NO: 2410514
uuggacaaggcucugggac

SEQ ID NO: 2410516 - RNA, 19 nt, Artificial Sequence
  Description of Artificial Sequence: Synthetic oligonucleotide
  Sense strand starting at position 839 of SEQ ID NO: 1886448
cccagagccuuguccaagu

SEQ ID NO: 2410517 - RNA, 19 nt, Artificial Sequence
  Description of Artificial Sequence: Synthetic oligonucleotide
  Antisense strand to SEQ ID NO: 2410516
acuuggacaaggcucuggg

SEQ ID NO: 2410518 - RNA, 19 nt, Artificial Sequence
  Description of Artificial Sequence: Synthetic oligonucleotide
  Sense strand starting at position 945 of SEQ ID NO: 1886448
gaugcuuuggcauggauau

SEQ ID NO: 2410519 - RNA, 19 nt, Artificial Sequence
  Description of Artificial Sequence: Synthetic oligonucleotide
  Antisense strand to SEQ ID NO: 2410518
auauccaugccaaagcauc

SEQ ID NO: 2410520 - RNA, 19 nt, Artificial Sequence
  Description of Artificial Sequence: Synthetic oligonucleotide
  Sense strand starting at position 946 of SEQ ID NO: 1886448
augcuuuggcauggauaua

SEQ ID NO: 2410521 - RNA, 19 nt, Artificial Sequence
  Description of Artificial Sequence: Synthetic oligonucleotide
  Antisense strand to SEQ ID NO: 2410520
uauauccaugccaaagcau

SEQ ID NO: 2410522 - RNA, 19 nt, Artificial Sequence
  Description of Artificial Sequence: Synthetic oligonucleotide
  Sense strand starting at position 957 of SEQ ID NO: 1886448
uggauauagucugggaaca

SEQ ID NO: 2410523 - RNA, 19 nt, Artificial Sequence
  Description of Artificial Sequence: Synthetic oligonucleotide
  Antisense strand to SEQ ID NO: 2410522
uguucccagacuauaucca

SEQ ID NO: 2410524 - RNA, 19 nt, Artificial Sequence
  Description of Artificial Sequence: Synthetic oligonucleotide
  Sense strand starting at position 959 of SEQ ID NO: 1886448
gauauagucugggaacaaa

SEQ ID NO: 2410525 - RNA, 19 nt, Artificial Sequence
  Description of Artificial Sequence: Synthetic oligonucleotide
  Antisense strand to SEQ ID NO: 2410524
uuuguucccagacuauauc

SEQ ID NO: 2410526 - RNA, 19 nt, Artificial Sequence
  Description of Artificial Sequence: Synthetic oligonucleotide
  Sense strand starting at position 1046 of SEQ ID NO: 1886448
acaggaaugaaguguccuu

SEQ ID NO: 2410527 - RNA, 19 nt, Artificial Sequence
  Description of Artificial Sequence: Synthetic oligonucleotide
  Antisense strand to SEQ ID NO: 2410526
aaggacacuucauuccugu

SEQ ID NO: 2410528 - RNA, 19 nt, Artificial Sequence
  Description of Artificial Sequence: Synthetic oligonucleotide
  Sense strand starting at position 1193 of SEQ ID NO: 1886448
cuuggcuuuccuggagcau

SEQ ID NO: 2410529 - RNA, 19 nt, Artificial Sequence
  Description of Artificial Sequence: Synthetic oligonucleotide
  Antisense strand to SEQ ID NO: 2410528
augcuccaggaaagccaag

SEQ ID NO: 2410530 - RNA, 19 nt, Artificial Sequence
  Description of Artificial Sequence: Synthetic oligonucleotide
  Sense strand starting at position 1197 of SEQ ID NO: 1886448
gcuuuccuggagcaugaau

SEQ ID NO: 2410531 - RNA, 19 nt, Artificial Sequence
  Description of Artificial Sequence: Synthetic oligonucleotide
  Antisense strand to SEQ ID NO: 2410530
auucaugcuccaggaaagc

SEQ ID NO: 2410532 - RNA, 19 nt, Artificial Sequence
  Description of Artificial Sequence: Synthetic oligonucleotide
  Sense strand starting at position 1199 of SEQ ID NO: 1886448
uuuccuggagcaugaauau

SEQ ID NO: 2410533 - RNA, 19 nt, Artificial Sequence
  Description of Artificial Sequence: Synthetic oligonucleotide
  Antisense strand to SEQ ID NO: 2410532
auauucaugcuccaggaaa

SEQ ID NO: 2410534 - RNA, 19 nt, Artificial Sequence
  Description of Artificial Sequence: Synthetic oligonucleotide
  Sense strand starting at position 1208 of SEQ ID NO: 1886448
gcaugaauauccucugagg

SEQ ID NO: 2410535 - RNA, 19 nt, Artificial Sequence
  Description of Artificial Sequence: Synthetic oligonucleotide
  Antisense strand to SEQ ID NO: 2410534
ccucagaggauauucaugc

SEQ ID NO: 2410536 - RNA, 19 nt, Artificial Sequence
  Description of Artificial Sequence: Synthetic oligonucleotide
  Sense strand starting at position 1253 of SEQ ID NO: 1886448
ugcugagacuggcuuagau

SEQ ID NO: 2410537 - RNA, 19 nt, Artificial Sequence
  Description of Artificial Sequence: Synthetic oligonucleotide
  Antisense strand to SEQ ID NO: 2410536
aucuaagccagucucagca

SEQ ID NO: 2410538 - RNA, 19 nt, Artificial Sequence
  Description of Artificial Sequence: Synthetic oligonucleotide
  Sense strand starting at position 1282 of SEQ ID NO: 1886448
aggagcaaucgucacccaa

SEQ ID NO: 2410539 - RNA, 19 nt, Artificial Sequence
  Description of Artificial Sequence: Synthetic oligonucleotide
  Antisense strand to SEQ ID NO: 2410538
uugggugacgauugcuccu

SEQ ID NO: 2410540 - RNA, 19 nt, Artificial Sequence
  Description of Artificial Sequence: Synthetic oligonucleotide
  Sense strand starting at position 1309 of SEQ ID NO: 1886448
uuguaaaucucgccacaga

SEQ ID NO: 2410541 - RNA, 19 nt, Artificial Sequence
  Description of Artificial Sequence: Synthetic oligonucleotide
  Antisense strand to SEQ ID NO: 2410540
ucuguggcgagauuuacaa

SEQ ID NO: 2410542 - RNA, 19 nt, Artificial Sequence
  Description of Artificial Sequence: Synthetic oligonucleotide
  Sense strand starting at position 1310 of SEQ ID NO: 1886448
uguaaaucucgccacagaa

SEQ ID NO: 2410543 - RNA, 19 nt, Artificial Sequence
  Description of Artificial Sequence: Synthetic oligonucleotide
  Antisense strand to SEQ ID NO: 2410542
uucuguggcgagauuuaca

SEQ ID NO: 2410544 - RNA, 19 nt, Artificial Sequence
  Description of Artificial Sequence: Synthetic oligonucleotide
  Sense strand starting at position 1576 of SEQ ID NO: 1886448
gagaaugaggccugcgcaa

SEQ ID NO: 2410545 - RNA, 19 nt, Artificial Sequence
  Description of Artificial Sequence: Synthetic oligonucleotide
  Antisense strand to SEQ ID NO: 2410544
uugcgcaggccucauucuc

SEQ ID NO: 2410546 - RNA, 19 nt, Artificial Sequence
  Description of Artificial Sequence: Synthetic oligonucleotide
  Sense strand starting at position 2962 of SEQ ID NO: 1886448
gcccuugagugcccuuaua

SEQ ID NO: 2410547 - RNA, 19 nt, Artificial Sequence
  Description of Artificial Sequence: Synthetic oligonucleotide
  Antisense strand to SEQ ID NO: 2410546
uauaagggcacucaagggc

SEQ ID NO: 2410548 - RNA, 19 nt, Artificial Sequence
  Description of Artificial Sequence: Synthetic oligonucleotide
  Sense strand starting at position 3121 of SEQ ID NO: 1886448
caguguucucuuccguguu

SEQ ID NO: 2410549 - RNA, 19 nt, Artificial Sequence
  Description of Artificial Sequence: Synthetic oligonucleotide
  Antisense strand to SEQ ID NO: 2410548
aacacggaagagaacacug

SEQ ID NO: 2410550 - RNA, 19 nt, Artificial Sequence
  Description of Artificial Sequence: Synthetic oligonucleotide
  Sense strand starting at position 3229 of SEQ ID NO: 1886448
gggaacucuugugugguca

SEQ ID NO: 2410551 - RNA, 19 nt, Artificial Sequence
  Description of Artificial Sequence: Synthetic oligonucleotide
  Antisense strand to SEQ ID NO: 2410550
ugaccacacaagaguuccc

SEQ ID NO: 2410552 - RNA, 19 nt, Artificial Sequence
  Description of Artificial Sequence: Synthetic oligonucleotide
  Sense strand starting at position 3279 of SEQ ID NO: 1886448
cccuuacugcucuggaguu

SEQ ID NO: 2410553 - RNA, 19 nt, Artificial Sequence
  Description of Artificial Sequence: Synthetic oligonucleotide
  Antisense strand to SEQ ID NO: 2410552
aacuccagagcaguaaggg

SEQ ID NO: 2410554 - RNA, 19 nt, Artificial Sequence
  Description of Artificial Sequence: Synthetic oligonucleotide
  Sense strand starting at position 3291 of SEQ ID NO: 1886448
uggaguuuguuaccggacu

SEQ ID NO: 2410555 - RNA, 19 nt, Artificial Sequence
  Description of Artificial Sequence: Synthetic oligonucleotide
  Antisense strand to SEQ ID NO: 2410554
aguccgguaacaaacucca

SEQ ID NO: 2410556 - RNA, 19 nt, Artificial Sequence
  Description of Artificial Sequence: Synthetic oligonucleotide
  Sense strand starting at position 3409 of SEQ ID NO: 1886448
ugaagaguugugugcuucu

SEQ ID NO: 2410557 - RNA, 19 nt, Artificial Sequence
  Description of Artificial Sequence: Synthetic oligonucleotide
  Antisense strand to SEQ ID NO: 2410556
agaagcacacaacucuuca

SEQ ID NO: 2410558 - RNA, 19 nt, Artificial Sequence
  Description of Artificial Sequence: Synthetic oligonucleotide
  Sense strand starting at position 3418 of SEQ ID NO: 1886448
gugugcuucuccuucggga

SEQ ID NO: 2410559 - RNA, 19 nt, Artificial Sequence
  Description of Artificial Sequence: Synthetic oligonucleotide
  Antisense strand to SEQ ID NO: 2410558
ucccgaaggagaagcacac

SEQ ID NO: 2410560 - RNA, 19 nt, Artificial Sequence
  Description of Artificial Sequence: Synthetic oligonucleotide
  Sense strand starting at position 3420 of SEQ ID NO: 1886448
gugcuucuccuucgggaaa

SEQ ID NO: 2410561 - RNA, 19 nt, Artificial Sequence
  Description of Artificial Sequence: Synthetic oligonucleotide
  Antisense strand to SEQ ID NO: 2410560
uuucccgaaggagaagcac

SEQ ID NO: 2410562 - RNA, 19 nt, Artificial Sequence
  Description of Artificial Sequence: Synthetic oligonucleotide
  Sense strand starting at position 3472 of SEQ ID NO: 1886448
ugcggaaacgugagucaca

SEQ ID NO: 2410563 - RNA, 19 nt, Artificial Sequence
  Description of Artificial Sequence: Synthetic oligonucleotide
  Antisense strand to SEQ ID NO: 2410562
ugugacucacguuuccgca

SEQ ID NO: 2410564 - RNA, 19 nt, Artificial Sequence
  Description of Artificial Sequence: Synthetic oligonucleotide
  Sense strand starting at position 3475 of SEQ ID NO: 1886448
ggaaacgugagucacaguu

SEQ ID NO: 2410565 - RNA, 19 nt, Artificial Sequence
  Description of Artificial Sequence: Synthetic oligonucleotide
  Antisense strand to SEQ ID NO: 2410564
aacugugacucacguuucc

SEQ ID NO: 2410566 - RNA, 19 nt, Artificial Sequence
  Description of Artificial Sequence: Synthetic oligonucleotide
  Sense strand starting at position 3485 of SEQ ID NO: 1886448
gucacaguucaguguggga

SEQ ID NO: 2410567 - RNA, 19 nt, Artificial Sequence
  Description of Artificial Sequence: Synthetic oligonucleotide
  Antisense strand to SEQ ID NO: 2410566
ucccacacugaacugugac

SEQ ID NO: 2410568 - RNA, 19 nt, Artificial Sequence
  Description of Artificial Sequence: Synthetic oligonucleotide
  Sense strand starting at position 3509 of SEQ ID NO: 1886448
ccguaauugccuccgcguu

SEQ ID NO: 2410569 - RNA, 19 nt, Artificial Sequence
  Description of Artificial Sequence: Synthetic oligonucleotide
  Antisense strand to SEQ ID NO: 2410568
aacgcggaggcaauuacgg

SEQ ID NO: 2410570 - RNA, 19 nt, Artificial Sequence
  Description of Artificial Sequence: Synthetic oligonucleotide
  Sense strand starting at position 3575 of SEQ ID NO: 1886448
gguucugagugacuucuca

SEQ ID NO: 2410571 - RNA, 19 nt, Artificial Sequence
  Description of Artificial Sequence: Synthetic oligonucleotide
  Antisense strand to SEQ ID NO: 2410570
ugagaagucacucagaacc

SEQ ID NO: 2410572 - RNA, 19 nt, Artificial Sequence
  Description of Artificial Sequence: Synthetic oligonucleotide
  Sense strand starting at position 3579 of SEQ ID NO: 1886448
cugagugacuucucaacug

SEQ ID NO: 2410573 - RNA, 19 nt, Artificial Sequence
  Description of Artificial Sequence: Synthetic oligonucleotide
  Antisense strand to SEQ ID NO: 2410572
caguugagaagucacucag

SEQ ID NO: 2410574 - RNA, 19 nt, Artificial Sequence
  Description of Artificial Sequence: Synthetic oligonucleotide
  Sense strand starting at position 3910 of SEQ ID NO: 1886448
ccuguaaugcugcaucugu

SEQ ID NO: 2410575 - RNA, 19 nt, Artificial Sequence
  Description of Artificial Sequence: Synthetic oligonucleotide
  Antisense strand to SEQ ID NO: 2410574
acagaugcagcauuacagg

SEQ ID NO: 2410576 - RNA, 19 nt, Artificial Sequence
  Description of Artificial Sequence: Synthetic oligonucleotide
  Sense strand starting at position 706 of SEQ ID NO: 1886449
gcguaagucagugccacua

SEQ ID NO: 2410577 - RNA, 19 nt, Artificial Sequence
  Description of Artificial Sequence: Synthetic oligonucleotide
  Antisense strand to SEQ ID NO: 2410576
uaguggcacugacuuacgc

SEQ ID NO: 2410578 - RNA, 19 nt, Artificial Sequence
  Description of Artificial Sequence: Synthetic oligonucleotide
  Sense strand starting at position 891 of SEQ ID NO: 1886449
ggcagacucucacuaucau

SEQ ID NO: 2410579 - RNA, 19 nt, Artificial Sequence
  Description of Artificial Sequence: Synthetic oligonucleotide
  Antisense strand to SEQ ID NO: 2410578
augauagugagagucugcc

SEQ ID NO: 2410580 - RNA, 19 nt, Artificial Sequence
  Description of Artificial Sequence: Synthetic oligonucleotide
  Sense strand starting at position 913 of SEQ ID NO: 1886449
aaacuuauauucguggaca

SEQ ID NO: 2410581 - RNA, 19 nt, Artificial Sequence
  Description of Artificial Sequence: Synthetic oligonucleotide
  Antisense strand to SEQ ID NO: 2410580
uguccacgaauauaaguuu

SEQ ID NO: 2410582 - RNA, 19 nt, Artificial Sequence
  Description of Artificial Sequence: Synthetic oligonucleotide
  Sense strand starting at position 915 of SEQ ID NO: 1886449
acuuauauucguggacaua

SEQ ID NO: 2410583 - RNA, 19 nt, Artificial Sequence
  Description of Artificial Sequence: Synthetic oligonucleotide
  Antisense strand to SEQ ID NO: 2410582
uauguccacgaauauaagu

SEQ ID NO: 2410584 - RNA, 19 nt, Artificial Sequence
  Description of Artificial Sequence: Synthetic oligonucleotide
  Sense strand starting at position 916 of SEQ ID NO: 1886449
cuuauauucguggacauau

SEQ ID NO: 2410585 - RNA, 19 nt, Artificial Sequence
  Description of Artificial Sequence: Synthetic oligonucleotide
  Antisense strand to SEQ ID NO: 2410584
auauguccacgaauauaag

SEQ ID NO: 2410586 - RNA, 19 nt, Artificial Sequence
  Description of Artificial Sequence: Synthetic oligonucleotide
  Sense strand starting at position 918 of SEQ ID NO: 1886449
uauauucguggacauauau

SEQ ID NO: 2410587 - RNA, 19 nt, Artificial Sequence
  Description of Artificial Sequence: Synthetic oligonucleotide
  Antisense strand to SEQ ID NO: 2410586
auauauguccacgaauaua

SEQ ID NO: 2410588 - RNA, 19 nt, Artificial Sequence
  Description of Artificial Sequence: Synthetic oligonucleotide
  Sense strand starting at position 986 of SEQ ID NO: 1886449
agagguuaauggccuguga

SEQ ID NO: 2410589 - RNA, 19 nt, Artificial Sequence
  Description of Artificial Sequence: Synthetic oligonucleotide
  Antisense strand to SEQ ID NO: 2410588
ucacaggccauuaaccucu

SEQ ID NO: 2410590 - RNA, 19 nt, Artificial Sequence
  Description of Artificial Sequence: Synthetic oligonucleotide
  Sense strand starting at position 1022 of SEQ ID NO: 1886449
ccgugaauccaucauuccu

SEQ ID NO: 2410591 - RNA, 19 nt, Artificial Sequence
  Description of Artificial Sequence: Synthetic oligonucleotide
  Antisense strand to SEQ ID NO: 2410590
aggaaugauggauucacgg

SEQ ID NO: 2410592 - RNA, 19 nt, Artificial Sequence
  Description of Artificial Sequence: Synthetic oligonucleotide
  Sense strand starting at position 1024 of SEQ ID NO: 1886449
gugaauccaucauuccuga

SEQ ID NO: 2410593 - RNA, 19 nt, Artificial Sequence
  Description of Artificial Sequence: Synthetic oligonucleotide
  Antisense strand to SEQ ID NO: 2410592
ucaggaaugauggauucac

SEQ ID NO: 2410594 - RNA, 19 nt, Artificial Sequence
  Description of Artificial Sequence: Synthetic oligonucleotide
  Sense strand starting at position 1070 of SEQ ID NO: 1886449
guuguccaaugaguuaaua

SEQ ID NO: 2410595 - RNA, 19 nt, Artificial Sequence
  Description of Artificial Sequence: Synthetic oligonucleotide
  Antisense strand to SEQ ID NO: 2410594
uauuaacucauuggacaac

SEQ ID NO: 2410596 - RNA, 19 nt, Artificial Sequence
  Description of Artificial Sequence: Synthetic oligonucleotide
  Sense strand starting at position 1121 of SEQ ID NO: 1886449
acauguacccucuaucagu

SEQ ID NO: 2410597 - RNA, 19 nt, Artificial Sequence
  Description of Artificial Sequence: Synthetic oligonucleotide
  Antisense strand to SEQ ID NO: 2410596
acugauagaggguacaugu

SEQ ID NO: 2410598 - RNA, 19 nt, Artificial Sequence
  Description of Artificial Sequence: Synthetic oligonucleotide
  Sense strand starting at position 1839 of SEQ ID NO: 1886449
ucucuauaguuauuguaca

SEQ ID NO: 2410599 - RNA, 19 nt, Artificial Sequence
  Description of Artificial Sequence: Synthetic oligonucleotide
  Antisense strand to SEQ ID NO: 2410598
uguacaauaacuauagaga

SEQ ID NO: 2410600 - RNA, 19 nt, Artificial Sequence
  Description of Artificial Sequence: Synthetic oligonucleotide
  Sense strand starting at position 1927 of SEQ ID NO: 1886449
auaugagaccgcuacaaca

SEQ ID NO: 2410601 - RNA, 19 nt, Artificial Sequence
  Description of Artificial Sequence: Synthetic oligonucleotide
  Antisense strand to SEQ ID NO: 2410600
uguuguagcggucucauau

SEQ ID NO: 2410602 - RNA, 19 nt, Artificial Sequence
  Description of Artificial Sequence: Synthetic oligonucleotide
  Sense strand starting at position 1947 of SEQ ID NO: 1886449
auguaucuagccuagcaaa

SEQ ID NO: 2410603 - RNA, 19 nt, Artificial Sequence
  Description of Artificial Sequence: Synthetic oligonucleotide
  Antisense strand to SEQ ID NO: 2410602
uuugcuaggcuagauacau

SEQ ID NO: 2410604 - RNA, 19 nt, Artificial Sequence
  Description of Artificial Sequence: Synthetic oligonucleotide
  Sense strand starting at position 1966 of SEQ ID NO: 1886449
acaugaaugaaacguugua

SEQ ID NO: 2410605 - RNA, 19 nt, Artificial Sequence
  Description of Artificial Sequence: Synthetic oligonucleotide
  Antisense strand to SEQ ID NO: 2410604
uacaacguuucauucaugu

SEQ ID NO: 2410606 - RNA, 19 nt, Artificial Sequence
  Description of Artificial Sequence: Synthetic oligonucleotide
  Sense strand starting at position 1978 of SEQ ID NO: 1886449
cguuguaugcagucucuuu

SEQ ID NO: 2410607 - RNA, 19 nt, Artificial Sequence
  Description of Artificial Sequence: Synthetic oligonucleotide
  Antisense strand to SEQ ID NO: 2410606
aaagagacugcauacaacg

SEQ ID NO: 2410608 - RNA, 19 nt, Artificial Sequence
  Description of Artificial Sequence: Synthetic oligonucleotide
  Sense strand starting at position 2012 of SEQ ID NO: 1886449
gcugaaagccuuugaaaca

SEQ ID NO: 2410609 - RNA, 19 nt, Artificial Sequence
  Description of Artificial Sequence: Synthetic oligonucleotide
  Antisense strand to SEQ ID NO: 2410608
uguuucaaaggcuuucagc

SEQ ID NO: 2410610 - RNA, 19 nt, Artificial Sequence
  Description of Artificial Sequence: Synthetic oligonucleotide
  Sense strand starting at position 2038 of SEQ ID NO: 1886449
gggcgguugguauugugua

SEQ ID NO: 2410611 - RNA, 19 nt, Artificial Sequence
  Description of Artificial Sequence: Synthetic oligonucleotide
  Antisense strand to SEQ ID NO: 2410610
uacacaauaccaaccgccc

SEQ ID NO: 2410612 - RNA, 19 nt, Artificial Sequence
  Description of Artificial Sequence: Synthetic oligonucleotide
  Sense strand starting at position 2045 of SEQ ID NO: 1886449
ugguauuguguaagacggu

SEQ ID NO: 2410613 - RNA, 19 nt, Artificial Sequence
  Description of Artificial Sequence: Synthetic oligonucleotide
  Antisense strand to SEQ ID NO: 2410612
accgucuuacacaauacca

SEQ ID NO: 2410614 - RNA, 19 nt, Artificial Sequence
  Description of Artificial Sequence: Synthetic oligonucleotide
  Sense strand starting at position 2117 of SEQ ID NO: 1886449
gugaucauaaugggcuuua

SEQ ID NO: 2410615 - RNA, 19 nt, Artificial Sequence
  Description of Artificial Sequence: Synthetic oligonucleotide
  Antisense strand to SEQ ID NO: 2410614
uaaagcccauuaugaucac

SEQ ID NO: 2410616 - RNA, 19 nt, Artificial Sequence
  Description of Artificial Sequence: Synthetic oligonucleotide
  Sense strand starting at position 2118 of SEQ ID NO: 1886449
ugaucauaaugggcuuuau

SEQ ID NO: 2410617 - RNA, 19 nt, Artificial Sequence
  Description of Artificial Sequence: Synthetic oligonucleotide
  Antisense strand to SEQ ID NO: 2410616
auaaagcccauuaugauca

SEQ ID NO: 2410618 - RNA, 19 nt, Artificial Sequence
  Description of Artificial Sequence: Synthetic oligonucleotide
  Sense strand starting at position 2175 of SEQ ID NO: 1886449
ccaguuguuuaauugaaga

SEQ ID NO: 2410619 - RNA, 19 nt, Artificial Sequence
  Description of Artificial Sequence: Synthetic oligonucleotide
  Antisense strand to SEQ ID NO: 2410618
ucuucaauuaaacaacugg

SEQ ID NO: 2410620 - RNA, 19 nt, Artificial Sequence
  Description of Artificial Sequence: Synthetic oligonucleotide
  Sense strand starting at position 2203 of SEQ ID NO: 1886449
ucuuguaauguggaguuga

SEQ ID NO: 2410621 - RNA, 19 nt, Artificial Sequence
  Description of Artificial Sequence: Synthetic oligonucleotide
  Antisense strand to SEQ ID NO: 2410620
ucaacuccacauuacaaga

SEQ ID NO: 2410622 - RNA, 19 nt, Artificial Sequence
  Description of Artificial Sequence: Synthetic oligonucleotide
  Sense strand starting at position 2427 of SEQ ID NO: 1886449
auacaaguaucgucuaaau

SEQ ID NO: 2410623 - RNA, 19 nt, Artificial Sequence
  Description of Artificial Sequence: Synthetic oligonucleotide
  Antisense strand to SEQ ID NO: 2410622
auuuagacgauacuuguau

SEQ ID NO: 2410624 - RNA, 19 nt, Artificial Sequence
  Description of Artificial Sequence: Synthetic oligonucleotide
  Sense strand starting at position 2429 of SEQ ID NO: 1886449
acaaguaucgucuaaauaa

SEQ ID NO: 2410625 - RNA, 19 nt, Artificial Sequence
  Description of Artificial Sequence: Synthetic oligonucleotide
  Antisense strand to SEQ ID NO: 2410624
uuauuuagacgauacuugu

SEQ ID NO: 2410626 - RNA, 19 nt, Artificial Sequence
  Description of Artificial Sequence: Synthetic oligonucleotide
  Sense strand starting at position 2709 of SEQ ID NO: 1886449
ucaagugauccuggccuga

SEQ ID NO: 2410627 - RNA, 19 nt, Artificial Sequence
  Description of Artificial Sequence: Synthetic oligonucleotide
  Antisense strand to SEQ ID NO: 2410626
ucaggccaggaucacuuga

SEQ ID NO: 2410628 - RNA, 19 nt, Artificial Sequence
  Description of Artificial Sequence: Synthetic oligonucleotide
  Sense strand starting at position 2793 of SEQ ID NO: 1886449
ugugauggguucucauaag

SEQ ID NO: 2410629 - RNA, 19 nt, Artificial Sequence
  Description of Artificial Sequence: Synthetic oligonucleotide
  Antisense strand to SEQ ID NO: 2410628
cuuaugagaacccaucaca

SEQ ID NO: 2410630 - RNA, 19 nt, Artificial Sequence
  Description of Artificial Sequence: Synthetic oligonucleotide
  Sense strand starting at position 2883 of SEQ ID NO: 1886449
guuucauggguuugggaac

SEQ ID NO: 2410631 - RNA, 19 nt, Artificial Sequence
  Description of Artificial Sequence: Synthetic oligonucleotide
  Antisense strand to SEQ ID NO: 2410630
guucccaaacccaugaaac

SEQ ID NO: 2410632 - RNA, 19 nt, Artificial Sequence
  Description of Artificial Sequence: Synthetic oligonucleotide
  Sense strand starting at position 2952 of SEQ ID NO: 1886449
ggauguuugacacaguuga

SEQ ID NO: 2410633 - RNA, 19 nt, Artificial Sequence
  Description of Artificial Sequence: Synthetic oligonucleotide
  Antisense strand to SEQ ID NO: 2410632
ucaacugugucaaacaucc

SEQ ID NO: 2410634 - RNA, 19 nt, Artificial Sequence
  Description of Artificial Sequence: Synthetic oligonucleotide
  Sense strand starting at position 2959 of SEQ ID NO: 1886449
ugacacaguugaguguaaa

SEQ ID NO: 2410635 - RNA, 19 nt, Artificial Sequence
  Description of Artificial Sequence: Synthetic oligonucleotide
  Antisense strand to SEQ ID NO: 2410634
uuuacacucaacuguguca

SEQ ID NO: 2410636 - RNA, 19 nt, Artificial Sequence
  Description of Artificial Sequence: Synthetic oligonucleotide
  Sense strand starting at position 3000 of SEQ ID NO: 1886449
cuuguaagauuugagaagu

SEQ ID NO: 2410637 - RNA, 19 nt, Artificial Sequence
  Description of Artificial Sequence: Synthetic oligonucleotide
  Antisense strand to SEQ ID NO: 2410636
acuucucaaaucuuacaag

SEQ ID NO: 2410638 - RNA, 19 nt, Artificial Sequence
  Description of Artificial Sequence: Synthetic oligonucleotide
  Sense strand starting at position 3046 of SEQ ID NO: 1886449
aaugguggugucuauuaaa

SEQ ID NO: 2410639 - RNA, 19 nt, Artificial Sequence
  Description of Artificial Sequence: Synthetic oligonucleotide
  Antisense strand to SEQ ID NO: 2410638
uuuaauagacaccaccauu

SEQ ID NO: 2410640 - RNA, 19 nt, Artificial Sequence
  Description of Artificial Sequence: Synthetic oligonucleotide
  Sense strand starting at position 3228 of SEQ ID NO: 1886449
uggucugagcaaugguaaa

SEQ ID NO: 2410641 - RNA, 19 nt, Artificial Sequence
  Description of Artificial Sequence: Synthetic oligonucleotide
  Antisense strand to SEQ ID NO: 2410640
uuuaccauugcucagacca

SEQ ID NO: 2410642 - RNA, 19 nt, Artificial Sequence
  Description of Artificial Sequence: Synthetic oligonucleotide
  Sense strand starting at position 3239 of SEQ ID NO: 1886449
augguaaauggucaccuuu

SEQ ID NO: 2410643 - RNA, 19 nt, Artificial Sequence
  Description of Artificial Sequence: Synthetic oligonucleotide
  Antisense strand to SEQ ID NO: 2410642
aaaggugaccauuuaccau

SEQ ID NO: 2410644 - RNA, 19 nt, Artificial Sequence
  Description of Artificial Sequence: Synthetic oligonucleotide
  Sense strand starting at position 3245 of SEQ ID NO: 1886449
aauggucaccuuugugaaa

SEQ ID NO: 2410645 - RNA, 19 nt, Artificial Sequence
  Description of Artificial Sequence: Synthetic oligonucleotide
  Antisense strand to SEQ ID NO: 2410644
uuucacaaaggugaccauu

SEQ ID NO: 2410646 - RNA, 19 nt, Artificial Sequence
  Description of Artificial Sequence: Synthetic oligonucleotide
  Sense strand starting at position 3267 of SEQ ID NO: 1886449
cauugaguuguacacugau

SEQ ID NO: 2410647 - RNA, 19 nt, Artificial Sequence
  Description of Artificial Sequence: Synthetic oligonucleotide
  Antisense strand to SEQ ID NO: 2410646
aucaguguacaacucaaug

SEQ ID NO: 2410648 - RNA, 19 nt, Artificial Sequence
  Description of Artificial Sequence: Synthetic oligonucleotide
  Sense strand starting at position 3767 of SEQ ID NO: 1886449
caauauuagccaggaguug

SEQ ID NO: 2410649 - RNA, 19 nt, Artificial Sequence
  Description of Artificial Sequence: Synthetic oligonucleotide
  Antisense strand to SEQ ID NO: 2410648
caacuccuggcuaauauug

SEQ ID NO: 2410650 - RNA, 19 nt, Artificial Sequence
  Description of Artificial Sequence: Synthetic oligonucleotide
  Sense strand starting at position 3962 of SEQ ID NO: 1886449
auagaagaaucuuugucag

SEQ ID NO: 2410651 - RNA, 19 nt, Artificial Sequence
  Description of Artificial Sequence: Synthetic oligonucleotide
  Antisense strand to SEQ ID NO: 2410650
cugacaaagauucuucuau

SEQ ID NO: 2410652 - RNA, 19 nt, Artificial Sequence
  Description of Artificial Sequence: Synthetic oligonucleotide
  Sense strand starting at position 3964 of SEQ ID NO: 1886449
agaagaaucuuugucaguc

SEQ ID NO: 2410653 - RNA, 19 nt, Artificial Sequence
  Description of Artificial Sequence: Synthetic oligonucleotide
  Antisense strand to SEQ ID NO: 2410652
gacugacaaagauucuucu

SEQ ID NO: 2410654 - RNA, 19 nt, Artificial Sequence
  Description of Artificial Sequence: Synthetic oligonucleotide
  Sense strand starting at position 3974 of SEQ ID NO: 1886449
uugucaguccuuuacagaa

SEQ ID NO: 2410655 - RNA, 19 nt, Artificial Sequence
  Description of Artificial Sequence: Synthetic oligonucleotide
  Antisense strand to SEQ ID NO: 2410654
uucuguaaaggacugacaa

SEQ ID NO: 2410656 - RNA, 19 nt, Artificial Sequence
  Description of Artificial Sequence: Synthetic oligonucleotide
  Sense strand starting at position 27 of SEQ ID NO: 1886450
augcaacuccugcagaaua

SEQ ID NO: 2410657 - RNA, 19 nt, Artificial Sequence
  Description of Artificial Sequence: Synthetic oligonucleotide
  Antisense strand to SEQ ID NO: 2410656
uauucugcaggaguugcau

SEQ ID NO: 2410658 - RNA, 19 nt, Artificial Sequence
  Description of Artificial Sequence: Synthetic oligonucleotide
  Sense strand starting at position 589 of SEQ ID NO: 1886450
cgcgccucucuggaaacau

SEQ ID NO: 2410659 - RNA, 19 nt, Artificial Sequence
  Description of Artificial Sequence: Synthetic oligonucleotide
  Antisense strand to SEQ ID NO: 2410658
auguuuccagagaggcgcg

SEQ ID NO: 2410660 - RNA, 19 nt, Artificial Sequence
  Description of Artificial Sequence: Synthetic oligonucleotide
  Sense strand starting at position 681 of SEQ ID NO: 1886450
gcuuucgggagagaaugau

SEQ ID NO: 2410661 - RNA, 19 nt, Artificial Sequence
  Description of Artificial Sequence: Synthetic oligonucleotide
  Antisense strand to SEQ ID NO: 2410660
aucauucucucccgaaagc

SEQ ID NO: 2410662 - RNA, 19 nt, Artificial Sequence
  Description of Artificial Sequence: Synthetic oligonucleotide
  Sense strand starting at position 690 of SEQ ID NO: 1886450
agagaaugaugagucucuu

SEQ ID NO: 2410663 - RNA, 19 nt, Artificial Sequence
  Description of Artificial Sequence: Synthetic oligonucleotide
  Antisense strand to SEQ ID NO: 2410662
aagagacucaucauucucu

SEQ ID NO: 2410664 - RNA, 19 nt, Artificial Sequence
  Description of Artificial Sequence: Synthetic oligonucleotide
  Sense strand starting at position 696 of SEQ ID NO: 1886450
ugaugagucucuuaccgac

SEQ ID NO: 2410665 - RNA, 19 nt, Artificial Sequence
  Description of Artificial Sequence: Synthetic oligonucleotide
  Antisense strand to SEQ ID NO: 2410664
gucgguaagagacucauca

SEQ ID NO: 2410666 - RNA, 19 nt, Artificial Sequence
  Description of Artificial Sequence: Synthetic oligonucleotide
  Sense strand starting at position 1244 of SEQ ID NO: 1886450
ccggcuuugccugagguuu

SEQ ID NO: 2410667 - RNA, 19 nt, Artificial Sequence
  Description of Artificial Sequence: Synthetic oligonucleotide
  Antisense strand to SEQ ID NO: 2410666
aaaccucaggcaaagccgg

SEQ ID NO: 2410668 - RNA, 19 nt, Artificial Sequence
  Description of Artificial Sequence: Synthetic oligonucleotide
  Sense strand starting at position 2040 of SEQ ID NO: 1886450
gccauacaugucuaaguag

SEQ ID NO: 2410669 - RNA, 19 nt, Artificial Sequence
  Description of Artificial Sequence: Synthetic oligonucleotide
  Antisense strand to SEQ ID NO: 2410668
cuacuuagacauguauggc

SEQ ID NO: 2410670 - RNA, 19 nt, Artificial Sequence
  Description of Artificial Sequence: Synthetic oligonucleotide
  Sense strand starting at position 2770 of SEQ ID NO: 1886450
gaguguuccgcggcccaaa

SEQ ID NO: 2410671 - RNA, 19 nt, Artificial Sequence
  Description of Artificial Sequence: Synthetic oligonucleotide
  Antisense strand to SEQ ID NO: 2410670
uuugggccgcggaacacuc

SEQ ID NO: 2410672 - RNA, 19 nt, Artificial Sequence
  Description of Artificial Sequence: Synthetic oligonucleotide
  Sense strand starting at position 2932 of SEQ ID NO: 1886450
uuuguauugcaccgcuaga

SEQ ID NO: 2410673 - RNA, 19 nt, Artificial Sequence
  Description of Artificial Sequence: Synthetic oligonucleotide
  Antisense strand to SEQ ID NO: 2410672
ucuagcggugcaauacaaa

SEQ ID NO: 2410674 - RNA, 19 nt, Artificial Sequence
  Description of Artificial Sequence: Synthetic oligonucleotide
  Sense strand starting at position 3057 of SEQ ID NO: 1886450
cgugguaguucugaccaua

SEQ ID NO: 2410675 - RNA, 19 nt, Artificial Sequence
  Description of Artificial Sequence: Synthetic oligonucleotide
  Antisense strand to SEQ ID NO: 2410674
uauggucagaacuaccacg

SEQ ID NO: 2410676 - RNA, 19 nt, Artificial Sequence
  Description of Artificial Sequence: Synthetic oligonucleotide
  Sense strand starting at position 3060 of SEQ ID NO: 1886450
gguaguucugaccauaaac

SEQ ID NO: 2410677 - RNA, 19 nt, Artificial Sequence
  Description of Artificial Sequence: Synthetic oligonucleotide
  Antisense strand to SEQ ID NO: 2410676
guuuauggucagaacuacc

SEQ ID NO: 2410678 - RNA, 19 nt, Artificial Sequence
  Description of Artificial Sequence: Synthetic oligonucleotide
  Sense strand starting at position 3090 of SEQ ID NO: 1886450
gcaacguggcgguguuauu

SEQ ID NO: 2410679 - RNA, 19 nt, Artificial Sequence
  Description of Artificial Sequence: Synthetic oligonucleotide
  Antisense strand to SEQ ID NO: 2410678
aauaacaccgccacguugc

SEQ ID NO: 2410680 - RNA, 19 nt, Artificial Sequence
  Description of Artificial Sequence: Synthetic oligonucleotide
  Sense strand starting at position 3570 of SEQ ID NO: 1886450
cggguaaccuguugaaccu

SEQ ID NO: 2410681 - RNA, 19 nt, Artificial Sequence
  Description of Artificial Sequence: Synthetic oligonucleotide
  Antisense strand to SEQ ID NO: 2410680
agguucaacagguuacccg

SEQ ID NO: 2410682 - RNA, 19 nt, Artificial Sequence
  Description of Artificial Sequence: Synthetic oligonucleotide
  Sense strand starting at position 3579 of SEQ ID NO: 1886450
uguugaaccucauucguga

SEQ ID NO: 2410683 - RNA, 19 nt, Artificial Sequence
  Description of Artificial Sequence: Synthetic oligonucleotide
  Antisense strand to SEQ ID NO: 2410682
ucacgaaugagguucaaca

SEQ ID NO: 2410684 - RNA, 19 nt, Artificial Sequence
  Description of Artificial Sequence: Synthetic oligonucleotide
  Sense strand starting at position 3910 of SEQ ID NO: 1886450
guccuuccuccuuggcaga

SEQ ID NO: 2410685 - RNA, 19 nt, Artificial Sequence
  Description of Artificial Sequence: Synthetic oligonucleotide
  Antisense strand to SEQ ID NO: 2410684
ucugccaaggaggaaggac

SEQ ID NO: 2410686 - RNA, 19 nt, Artificial Sequence
  Description of Artificial Sequence: Synthetic oligonucleotide
  Sense strand starting at position 1209 of SEQ ID NO: 1886451
uugagacucccagggugau

SEQ ID NO: 2410687 - RNA, 19 nt, Artificial Sequence
  Description of Artificial Sequence: Synthetic oligonucleotide
  Antisense strand to SEQ ID NO: 2410686
aucacccugggagucucaa

SEQ ID NO: 2410688 - RNA, 19 nt, Artificial Sequence
  Description of Artificial Sequence: Synthetic oligonucleotide
  Sense strand starting at position 1289 of SEQ ID NO: 1886451
ccagaucugccuggcucaa

SEQ ID NO: 2410689 - RNA, 19 nt, Artificial Sequence
  Description of Artificial Sequence: Synthetic oligonucleotide
  Antisense strand to SEQ ID NO: 2410688
uugagccaggcagaucugg

SEQ ID NO: 2410690 - RNA, 19 nt, Artificial Sequence
  Description of Artificial Sequence: Synthetic oligonucleotide
  Sense strand starting at position 1637 of SEQ ID NO: 1886451
gugugagaacccugggaag

SEQ ID NO: 2410691 - RNA, 19 nt, Artificial Sequence
  Description of Artificial Sequence: Synthetic oligonucleotide
  Antisense strand to SEQ ID NO: 2410690
cuucccaggguucucacac

SEQ ID NO: 2410692 - RNA, 19 nt, Artificial Sequence
  Description of Artificial Sequence: Synthetic oligonucleotide
  Sense strand starting at position 2242 of SEQ ID NO: 1886451
gcacaaggaccuugugaug

SEQ ID NO: 2410693 - RNA, 19 nt, Artificial Sequence
  Description of Artificial Sequence: Synthetic oligonucleotide
  Antisense strand to SEQ ID NO: 2410692
caucacaagguccuugugc

SEQ ID NO: 2410694 - RNA, 19 nt, Artificial Sequence
  Description of Artificial Sequence: Synthetic oligonucleotide
  Sense strand starting at position 2254 of SEQ ID NO: 1886451
ugugaugagagcuaccuga

SEQ ID NO: 2410695 - RNA, 19 nt, Artificial Sequence
  Description of Artificial Sequence: Synthetic oligonucleotide
  Antisense strand to SEQ ID NO: 2410694
ucagguagcucucaucaca

SEQ ID NO: 2410696 - RNA, 19 nt, Artificial Sequence
  Description of Artificial Sequence: Synthetic oligonucleotide
  Sense strand starting at position 2409 of SEQ ID NO: 1886451
guccaugugccuguaugua

SEQ ID NO: 2410697 - RNA, 19 nt, Artificial Sequence
  Description of Artificial Sequence: Synthetic oligonucleotide
  Antisense strand to SEQ ID NO: 2410696
uacauacaggcacauggac

SEQ ID NO: 2410698 - RNA, 19 nt, Artificial Sequence
  Description of Artificial Sequence: Synthetic oligonucleotide
  Sense strand starting at position 2469 of SEQ ID NO: 1886451
aggcgugugagauacacau

SEQ ID NO: 2410699 - RNA, 19 nt, Artificial Sequence
  Description of Artificial Sequence: Synthetic oligonucleotide
  Antisense strand to SEQ ID NO: 2410698
auguguaucucacacgccu

SEQ ID NO: 2410700 - RNA, 19 nt, Artificial Sequence
  Description of Artificial Sequence: Synthetic oligonucleotide
  Sense strand starting at position 2549 of SEQ ID NO: 1886451
gacacauaccuguggugua

SEQ ID NO: 2410701 - RNA, 19 nt, Artificial Sequence
  Description of Artificial Sequence: Synthetic oligonucleotide
  Antisense strand to SEQ ID NO: 2410700
uacaccacagguauguguc

SEQ ID NO: 2410702 - RNA, 19 nt, Artificial Sequence
  Description of Artificial Sequence: Synthetic oligonucleotide
  Sense strand starting at position 2588 of SEQ ID NO: 1886451
augugauauaugcaggugu

SEQ ID NO: 2410703 - RNA, 19 nt, Artificial Sequence
  Description of Artificial Sequence: Synthetic oligonucleotide
  Antisense strand to SEQ ID NO: 2410702
acaccugcauauaucacau

SEQ ID NO: 2410704 - RNA, 19 nt, Artificial Sequence
  Description of Artificial Sequence: Synthetic oligonucleotide
  Sense strand starting at position 2592 of SEQ ID NO: 1886451
gauauaugcagguguguga

SEQ ID NO: 2410705 - RNA, 19 nt, Artificial Sequence
  Description of Artificial Sequence: Synthetic oligonucleotide
  Antisense strand to SEQ ID NO: 2410704
ucacacaccugcauauauc

SEQ ID NO: 2410706 - RNA, 19 nt, Artificial Sequence
  Description of Artificial Sequence: Synthetic oligonucleotide
  Sense strand starting at position 2631 of SEQ ID NO: 1886451
aggcgugugaggcauauau

SEQ ID NO: 2410707 - RNA, 19 nt, Artificial Sequence
  Description of Artificial Sequence: Synthetic oligonucleotide
  Antisense strand to SEQ ID NO: 2410706
auauaugccucacacgccu

SEQ ID NO: 2410708 - RNA, 19 nt, Artificial Sequence
  Description of Artificial Sequence: Synthetic oligonucleotide
  Sense strand starting at position 2635 of SEQ ID NO: 1886451
gugugaggcauauaugugu

SEQ ID NO: 2410709 - RNA, 19 nt, Artificial Sequence
  Description of Artificial Sequence: Synthetic oligonucleotide
  Antisense strand to SEQ ID NO: 2410708
acacauauaugccucacac

SEQ ID NO: 2410710 - RNA, 19 nt, Artificial Sequence
  Description of Artificial Sequence: Synthetic oligonucleotide
  Sense strand starting at position 2641 of SEQ ID NO: 1886451
ggcauauauguguaugcag

SEQ ID NO: 2410711 - RNA, 19 nt, Artificial Sequence
  Description of Artificial Sequence: Synthetic oligonucleotide
  Antisense strand to SEQ ID NO: 2410710
cugcauacacauauaugcc

SEQ ID NO: 2410712 - RNA, 19 nt, Artificial Sequence
  Description of Artificial Sequence: Synthetic oligonucleotide
  Sense strand starting at position 2660 of SEQ ID NO: 1886451
gugugugagacacauacaa

SEQ ID NO: 2410713 - RNA, 19 nt, Artificial Sequence
  Description of Artificial Sequence: Synthetic oligonucleotide
  Antisense strand to SEQ ID NO: 2410712
uuguaugugucucacacac

SEQ ID NO: 2410714 - RNA, 19 nt, Artificial Sequence
  Description of Artificial Sequence: Synthetic oligonucleotide
  Sense strand starting at position 2662 of SEQ ID NO: 1886451
gugugagacacauacaagu

SEQ ID NO: 2410715 - RNA, 19 nt, Artificial Sequence
  Description of Artificial Sequence: Synthetic oligonucleotide
  Antisense strand to SEQ ID NO: 2410714
acuuguaugugucucacac

SEQ ID NO: 2410716 - RNA, 19 nt, Artificial Sequence
  Description of Artificial Sequence: Synthetic oligonucleotide
  Sense strand starting at position 2679 of SEQ ID NO: 1886451
gugauauaugcagaugugu

SEQ ID NO: 2410717 - RNA, 19 nt, Artificial Sequence
  Description of Artificial Sequence: Synthetic oligonucleotide
  Antisense strand to SEQ ID NO: 2410716
acacaucugcauauaucac

SEQ ID NO: 2410718 - RNA, 19 nt, Artificial Sequence
  Description of Artificial Sequence: Synthetic oligonucleotide
  Sense strand starting at position 2698 of SEQ ID NO: 1886451
gugacauacauguggugua

SEQ ID NO: 2410719 - RNA, 19 nt, Artificial Sequence
  Description of Artificial Sequence: Synthetic oligonucleotide
  Antisense strand to SEQ ID NO: 2410718
uacaccacauguaugucac

SEQ ID NO: 2410720 - RNA, 19 nt, Artificial Sequence
  Description of Artificial Sequence: Synthetic oligonucleotide
  Sense strand starting at position 2726 of SEQ ID NO: 1886451
gugugacacauauacaugu

SEQ ID NO: 2410721 - RNA, 19 nt, Artificial Sequence
  Description of Artificial Sequence: Synthetic oligonucleotide
  Antisense strand to SEQ ID NO: 2410720
acauguauaugugucacac

SEQ ID NO: 2410722 - RNA, 19 nt, Artificial Sequence
  Description of Artificial Sequence: Synthetic oligonucleotide
  Sense strand starting at position 2756 of SEQ ID NO: 1886451
gcgugugugagacauacau

SEQ ID NO: 2410723 - RNA, 19 nt, Artificial Sequence
  Description of Artificial Sequence: Synthetic oligonucleotide
  Antisense strand to SEQ ID NO: 2410722
auguaugucucacacacgc

SEQ ID NO: 2410724 - RNA, 19 nt, Artificial Sequence
  Description of Artificial Sequence: Synthetic oligonucleotide
  Sense strand starting at position 2758 of SEQ ID NO: 1886451
gugugugagacauacauac

SEQ ID NO: 2410725 - RNA, 19 nt, Artificial Sequence
  Description of Artificial Sequence: Synthetic oligonucleotide
  Antisense strand to SEQ ID NO: 2410724
guauguaugucucacacac

SEQ ID NO: 2410726 - RNA, 19 nt, Artificial Sequence
  Description of Artificial Sequence: Synthetic oligonucleotide
  Sense strand starting at position 2768 of SEQ ID NO: 1886451
cauacauaccuguggugua

SEQ ID NO: 2410727 - RNA, 19 nt, Artificial Sequence
  Description of Artificial Sequence: Synthetic oligonucleotide
  Antisense strand to SEQ ID NO: 2410726
uacaccacagguauguaug

SEQ ID NO: 2410728 - RNA, 19 nt, Artificial Sequence
  Description of Artificial Sequence: Synthetic oligonucleotide
  Sense strand starting at position 2784 of SEQ ID NO: 1886451
guaugcaggcgugugagau

SEQ ID NO: 2410729 - RNA, 19 nt, Artificial Sequence
  Description of Artificial Sequence: Synthetic oligonucleotide
  Antisense strand to SEQ ID NO: 2410728
aucucacacgccugcauac

SEQ ID NO: 2410730 - RNA, 19 nt, Artificial Sequence
  Description of Artificial Sequence: Synthetic oligonucleotide
  Sense strand starting at position 2815 of SEQ ID NO: 1886451
gacauaugcaggcgugaga

SEQ ID NO: 2410731 - RNA, 19 nt, Artificial Sequence
  Description of Artificial Sequence: Synthetic oligonucleotide
  Antisense strand to SEQ ID NO: 2410730
ucucacgccugcauauguc

SEQ ID NO: 2410732 - RNA, 19 nt, Artificial Sequence
  Description of Artificial Sequence: Synthetic oligonucleotide
  Sense strand starting at position 2958 of SEQ ID NO: 1886451
gugugagacacauacaugu

SEQ ID NO: 2410733 - RNA, 19 nt, Artificial Sequence
  Description of Artificial Sequence: Synthetic oligonucleotide
  Antisense strand to SEQ ID NO: 2410732
acauguaugugucucacac

SEQ ID NO: 2410734 - RNA, 19 nt, Artificial Sequence
  Description of Artificial Sequence: Synthetic oligonucleotide
  Sense strand starting at position 2988 of SEQ ID NO: 1886451
gcgugugagacacauacau

SEQ ID NO: 2410735 - RNA, 19 nt, Artificial Sequence
  Description of Artificial Sequence: Synthetic oligonucleotide
  Antisense strand to SEQ ID NO: 2410734
auguaugugucucacacgc

SEQ ID NO: 2410736 - RNA, 19 nt, Artificial Sequence
  Description of Artificial Sequence: Synthetic oligonucleotide
  Sense strand starting at position 3084 of SEQ ID NO: 1886451
gugugugauacacauacau

SEQ ID NO: 2410737 - RNA, 19 nt, Artificial Sequence
  Description of Artificial Sequence: Synthetic oligonucleotide
  Antisense strand to SEQ ID NO: 2410736
auguauguguaucacacac

SEQ ID NO: 2410738 - RNA, 19 nt, Artificial Sequence
  Description of Artificial Sequence: Synthetic oligonucleotide
  Sense strand starting at position 3086 of SEQ ID NO: 1886451
gugugauacacauacaugu

SEQ ID NO: 2410739 - RNA, 19 nt, Artificial Sequence
  Description of Artificial Sequence: Synthetic oligonucleotide
  Antisense strand to SEQ ID NO: 2410738
acauguauguguaucacac

SEQ ID NO: 2410740 - RNA, 19 nt, Artificial Sequence
  Description of Artificial Sequence: Synthetic oligonucleotide
  Sense strand starting at position 3120 of SEQ ID NO: 1886451
gugacauauacgugugaca

SEQ ID NO: 2410741 - RNA, 19 nt, Artificial Sequence
  Description of Artificial Sequence: Synthetic oligonucleotide
  Antisense strand to SEQ ID NO: 2410740
ugucacacguauaugucac

SEQ ID NO: 2410742 - RNA, 19 nt, Artificial Sequence
  Description of Artificial Sequence: Synthetic oligonucleotide
  Sense strand starting at position 3122 of SEQ ID NO: 1886451
gacauauacgugugacaug

SEQ ID NO: 2410743 - RNA, 19 nt, Artificial Sequence
  Description of Artificial Sequence: Synthetic oligonucleotide
  Antisense strand to SEQ ID NO: 2410742
caugucacacguauauguc

SEQ ID NO: 2410744 - RNA, 19 nt, Artificial Sequence
  Description of Artificial Sequence: Synthetic oligonucleotide
  Sense strand starting at position 3340 of SEQ ID NO: 1886451
gcgugugagacacauguga

SEQ ID NO: 2410745 - RNA, 19 nt, Artificial Sequence
  Description of Artificial Sequence: Synthetic oligonucleotide
  Antisense strand to SEQ ID NO: 2410744
ucacaugugucucacacgc

SEQ ID NO: 2410746 - RNA, 19 nt, Artificial Sequence
  Description of Artificial Sequence: Synthetic oligonucleotide
  Sense strand starting at position 3342 of SEQ ID NO: 1886451
gugugagacacaugugaca

SEQ ID NO: 2410747 - RNA, 19 nt, Artificial Sequence
  Description of Artificial Sequence: Synthetic oligonucleotide
  Antisense strand to SEQ ID NO: 2410746
ugucacaugugucucacac

SEQ ID NO: 2410748 - RNA, 19 nt, Artificial Sequence
  Description of Artificial Sequence: Synthetic oligonucleotide
  Sense strand starting at position 3364 of SEQ ID NO: 1886451
aggcgugugacuuacauac

SEQ ID NO: 2410749 - RNA, 19 nt, Artificial Sequence
  Description of Artificial Sequence: Synthetic oligonucleotide
  Antisense strand to SEQ ID NO: 2410748
guauguaagucacacgccu

SEQ ID NO: 2410750 - RNA, 19 nt, Artificial Sequence
  Description of Artificial Sequence: Synthetic oligonucleotide
  Sense strand starting at position 3368 of SEQ ID NO: 1886451
gugugacuuacauaccugu

SEQ ID NO: 2410751 - RNA, 19 nt, Artificial Sequence
  Description of Artificial Sequence: Synthetic oligonucleotide
  Antisense strand to SEQ ID NO: 2410750
acagguauguaagucacac

SEQ ID NO: 2410752 - RNA, 19 nt, Artificial Sequence
  Description of Artificial Sequence: Synthetic oligonucleotide
  Sense strand starting at position 3400 of SEQ ID NO: 1886451
gugugagacacacaugcau

SEQ ID NO: 2410753 - RNA, 19 nt, Artificial Sequence
  Description of Artificial Sequence: Synthetic oligonucleotide
  Antisense strand to SEQ ID NO: 2410752
augcaugugugucucacac

SEQ ID NO: 2410754 - RNA, 19 nt, Artificial Sequence
  Description of Artificial Sequence: Synthetic oligonucleotide
  Sense strand starting at position 3564 of SEQ ID NO: 1886451
gcgugugagauacauacau

SEQ ID NO: 2410755 - RNA, 19 nt, Artificial Sequence
  Description of Artificial Sequence: Synthetic oligonucleotide
  Antisense strand to SEQ ID NO: 2410754
auguauguaucucacacgc

SEQ ID NO: 2410756 - RNA, 19 nt, Artificial Sequence
  Description of Artificial Sequence: Synthetic oligonucleotide
  Sense strand starting at position 3566 of SEQ ID NO: 1886451
gugugagauacauacaugu

SEQ ID NO: 2410757 - RNA, 19 nt, Artificial Sequence
  Description of Artificial Sequence: Synthetic oligonucleotide
  Antisense strand to SEQ ID NO: 2410756
acauguauguaucucacac

SEQ ID NO: 2410758 - RNA, 19 nt, Artificial Sequence
  Description of Artificial Sequence: Synthetic oligonucleotide
  Sense strand starting at position 3626 of SEQ ID NO: 1886451
gcgugagacacacaugcau

SEQ ID NO: 2410759 - RNA, 19 nt, Artificial Sequence
  Description of Artificial Sequence: Synthetic oligonucleotide
  Antisense strand to SEQ ID NO: 2410758
augcaugugugucucacgc

SEQ ID NO: 2410760 - RNA, 19 nt, Artificial Sequence
  Description of Artificial Sequence: Synthetic oligonucleotide
  Sense strand starting at position 3656 of SEQ ID NO: 1886451
aggcgugagacacauacau

SEQ ID NO: 2410761 - RNA, 19 nt, Artificial Sequence
  Description of Artificial Sequence: Synthetic oligonucleotide
  Antisense strand to SEQ ID NO: 2410760
auguaugugucucacgccu

SEQ ID NO: 2410762 - RNA, 19 nt, Artificial Sequence
  Description of Artificial Sequence: Synthetic oligonucleotide
  Sense strand starting at position 3658 of SEQ ID NO: 1886451
gcgugagacacauacaugu

SEQ ID NO: 2410763 - RNA, 19 nt, Artificial Sequence
  Description of Artificial Sequence: Synthetic oligonucleotide
  Antisense strand to SEQ ID NO: 2410762
acauguaugugucucacgc

SEQ ID NO: 2410764 - RNA, 19 nt, Artificial Sequence
  Description of Artificial Sequence: Synthetic oligonucleotide
  Sense strand starting at position 3803 of SEQ ID NO: 1886451
guuacugaugguuaacuca

SEQ ID NO: 2410765 - RNA, 19 nt, Artificial Sequence
  Description of Artificial Sequence: Synthetic oligonucleotide
  Antisense strand to SEQ ID NO: 2410764
ugaguuaaccaucaguaac

SEQ ID NO: 2410766 - RNA, 19 nt, Artificial Sequence
  Description of Artificial Sequence: Synthetic oligonucleotide
  Sense strand starting at position 44 of SEQ ID NO: 1886452
caaauucuggucugugauu

SEQ ID NO: 2410767 - RNA, 19 nt, Artificial Sequence
  Description of Artificial Sequence: Synthetic oligonucleotide
  Antisense strand to SEQ ID NO: 2410766
aaucacagaccagaauuug

SEQ ID NO: 2410768 - RNA, 19 nt, Artificial Sequence
  Description of Artificial Sequence: Synthetic oligonucleotide
  Sense strand starting at position 45 of SEQ ID NO: 1886452
aaauucuggucugugauua

SEQ ID NO: 2410769 - RNA, 19 nt, Artificial Sequence
  Description of Artificial Sequence: Synthetic oligonucleotide
  Antisense strand to SEQ ID NO: 2410768
uaaucacagaccagaauuu

SEQ ID NO: 2410770 - RNA, 19 nt, Artificial Sequence
  Description of Artificial Sequence: Synthetic oligonucleotide
  Sense strand starting at position 46 of SEQ ID NO: 1886452
aauucuggucugugauuac

SEQ ID NO: 2410771 - RNA, 19 nt, Artificial Sequence
  Description of Artificial Sequence: Synthetic oligonucleotide
  Antisense strand to SEQ ID NO: 2410770
guaaucacagaccagaauu

SEQ ID NO: 2410772 - RNA, 19 nt, Artificial Sequence
  Description of Artificial Sequence: Synthetic oligonucleotide
  Sense strand starting at position 49 of SEQ ID NO: 1886452
ucuggucugugauuacaga

SEQ ID NO: 2410773 - RNA, 19 nt, Artificial Sequence
  Description of Artificial Sequence: Synthetic oligonucleotide
  Antisense strand to SEQ ID NO: 2410772
ucuguaaucacagaccaga

SEQ ID NO: 2410774 - RNA, 19 nt, Artificial Sequence
  Description of Artificial Sequence: Synthetic oligonucleotide
  Sense strand starting at position 106 of SEQ ID NO: 1886452
gcugacaucucagcaauac

SEQ ID NO: 2410775 - RNA, 19 nt, Artificial Sequence
  Description of Artificial Sequence: Synthetic oligonucleotide
  Antisense strand to SEQ ID NO: 2410774
guauugcugagaugucagc

SEQ ID NO: 2410776 - RNA, 19 nt, Artificial Sequence
  Description of Artificial Sequence: Synthetic oligonucleotide
  Sense strand starting at position 221 of SEQ ID NO: 1886452
cuuaguauuccaugagcca

SEQ ID NO: 2410777 - RNA, 19 nt, Artificial Sequence
  Description of Artificial Sequence: Synthetic oligonucleotide
  Antisense strand to SEQ ID NO: 2410776
uggcucauggaauacuaag

SEQ ID NO: 2410778 - RNA, 19 nt, Artificial Sequence
  Description of Artificial Sequence: Synthetic oligonucleotide
  Sense strand starting at position 222 of SEQ ID NO: 1886452
uuaguauuccaugagccac

SEQ ID NO: 2410779 - RNA, 19 nt, Artificial Sequence
  Description of Artificial Sequence: Synthetic oligonucleotide
  Antisense strand to SEQ ID NO: 2410778
guggcucauggaauacuaa

SEQ ID NO: 2410780 - RNA, 19 nt, Artificial Sequence
  Description of Artificial Sequence: Synthetic oligonucleotide
  Sense strand starting at position 303 of SEQ ID NO: 1886452
agcagcgggcguuuaauau

SEQ ID NO: 2410781 - RNA, 19 nt, Artificial Sequence
  Description of Artificial Sequence: Synthetic oligonucleotide
  Antisense strand to SEQ ID NO: 2410780
auauuaaacgcccgcugcu

SEQ ID NO: 2410782 - RNA, 19 nt, Artificial Sequence
  Description of Artificial Sequence: Synthetic oligonucleotide
  Sense strand starting at position 311 of SEQ ID NO: 1886452
gcguuuaauauccaguuag

SEQ ID NO: 2410783 - RNA, 19 nt, Artificial Sequence
  Description of Artificial Sequence: Synthetic oligonucleotide
  Antisense strand to SEQ ID NO: 2410782
cuaacuggauauuaaacgc

SEQ ID NO: 2410784 - RNA, 19 nt, Artificial Sequence
  Description of Artificial Sequence: Synthetic oligonucleotide
  Sense strand starting at position 372 of SEQ ID NO: 1886452
caccgaguucccgagaauc

SEQ ID NO: 2410785 - RNA, 19 nt, Artificial Sequence
  Description of Artificial Sequence: Synthetic oligonucleotide
  Antisense strand to SEQ ID NO: 2410784
gauucucgggaacucggug

SEQ ID NO: 2410786 - RNA, 19 nt, Artificial Sequence
  Description of Artificial Sequence: Synthetic oligonucleotide
  Sense strand starting at position 406 of SEQ ID NO: 1886452
cccuuaauugguggacaug

SEQ ID NO: 2410787 - RNA, 19 nt, Artificial Sequence
  Description of Artificial Sequence: Synthetic oligonucleotide
  Antisense strand to SEQ ID NO: 2410786
cauguccaccaauuaaggg

SEQ ID NO: 2410788 - RNA, 19 nt, Artificial Sequence
  Description of Artificial Sequence: Synthetic oligonucleotide
  Sense strand starting at position 434 of SEQ ID NO: 1886452
ggcuuugugcuguaauaac

SEQ ID NO: 2410789 - RNA, 19 nt, Artificial Sequence
  Description of Artificial Sequence: Synthetic oligonucleotide
  Antisense strand to SEQ ID NO: 2410788
guuauuacagcacaaagcc

SEQ ID NO: 2410790 - RNA, 19 nt, Artificial Sequence
  Description of Artificial Sequence: Synthetic oligonucleotide
  Sense strand starting at position 471 of SEQ ID NO: 1886452
ggaguuugugccgcuugga

SEQ ID NO: 2410791 - RNA, 19 nt, Artificial Sequence
  Description of Artificial Sequence: Synthetic oligonucleotide
  Antisense strand to SEQ ID NO: 2410790
uccaagcggcacaaacucc

SEQ ID NO: 2410792 - RNA, 19 nt, Artificial Sequence
  Description of Artificial Sequence: Synthetic oligonucleotide
  Sense strand starting at position 649 of SEQ ID NO: 1886452
cgccuucucccugucugau

SEQ ID NO: 2410793 - RNA, 19 nt, Artificial Sequence
  Description of Artificial Sequence: Synthetic oligonucleotide
  Antisense strand to SEQ ID NO: 2410792
aucagacagggagaaggcg

SEQ ID NO: 2410794 - RNA, 19 nt, Artificial Sequence
  Description of Artificial Sequence: Synthetic oligonucleotide
  Sense strand starting at position 697 of SEQ ID NO: 1886452
gcgccacaugcugugauua

SEQ ID NO: 2410795 - RNA, 19 nt, Artificial Sequence
  Description of Artificial Sequence: Synthetic oligonucleotide
  Antisense strand to SEQ ID NO: 2410794
uaaucacagcauguggcgc

SEQ ID NO: 2410796 - RNA, 19 nt, Artificial Sequence
  Description of Artificial Sequence: Synthetic oligonucleotide
  Sense strand starting at position 709 of SEQ ID NO: 1886452
gugauuacacgccaagagu

SEQ ID NO: 2410797 - RNA, 19 nt, Artificial Sequence
  Description of Artificial Sequence: Synthetic oligonucleotide
  Antisense strand to SEQ ID NO: 2410796
acucuuggcguguaaucac

SEQ ID NO: 2410798 - RNA, 19 nt, Artificial Sequence
  Description of Artificial Sequence: Synthetic oligonucleotide
  Sense strand starting at position 1062 of SEQ ID NO: 1886452
gccagacggccugagauua

SEQ ID NO: 2410799 - RNA, 19 nt, Artificial Sequence
  Description of Artificial Sequence: Synthetic oligonucleotide
  Antisense strand to SEQ ID NO: 2410798
uaaucucaggccgucuggc

SEQ ID NO: 2410800 - RNA, 19 nt, Artificial Sequence
  Description of Artificial Sequence: Synthetic oligonucleotide
  Sense strand starting at position 1155 of SEQ ID NO: 1886452
guauaauaauggucucuac

SEQ ID NO: 2410801 - RNA, 19 nt, Artificial Sequence
  Description of Artificial Sequence: Synthetic oligonucleotide
  Antisense strand to SEQ ID NO: 2410800
guagagaccauuauuauac

SEQ ID NO: 2410802 - RNA, 19 nt, Artificial Sequence
  Description of Artificial Sequence: Synthetic oligonucleotide
  Sense strand starting at position 1191 of SEQ ID NO: 1886452
agggcugaaugagcuaaua

SEQ ID NO: 2410803 - RNA, 19 nt, Artificial Sequence
  Description of Artificial Sequence: Synthetic oligonucleotide
  Antisense strand to SEQ ID NO: 2410802
uauuagcucauucagcccu

SEQ ID NO: 2410804 - RNA, 19 nt, Artificial Sequence
  Description of Artificial Sequence: Synthetic oligonucleotide
  Sense strand starting at position 2085 of SEQ ID NO: 1886452
aucagugaugacugugguu

SEQ ID NO: 2410805 - RNA, 19 nt, Artificial Sequence
  Description of Artificial Sequence: Synthetic oligonucleotide
  Antisense strand to SEQ ID NO: 2410804
aaccacagucaucacugau

SEQ ID NO: 2410806 - RNA, 19 nt, Artificial Sequence
  Description of Artificial Sequence: Synthetic oligonucleotide
  Sense strand starting at position 2090 of SEQ ID NO: 1886452
ugaugacugugguuguaag

SEQ ID NO: 2410807 - RNA, 19 nt, Artificial Sequence
  Description of Artificial Sequence: Synthetic oligonucleotide
  Antisense strand to SEQ ID NO: 2410806
cuuacaaccacagucauca

SEQ ID NO: 2410808 - RNA, 19 nt, Artificial Sequence
  Description of Artificial Sequence: Synthetic oligonucleotide
  Sense strand starting at position 2100 of SEQ ID NO: 1886452
gguuguaagccacaagguu

SEQ ID NO: 2410809 - RNA, 19 nt, Artificial Sequence
  Description of Artificial Sequence: Synthetic oligonucleotide
  Antisense strand to SEQ ID NO: 2410808
aaccuuguggcuuacaacc

SEQ ID NO: 2410810 - RNA, 19 nt, Artificial Sequence
  Description of Artificial Sequence: Synthetic oligonucleotide
  Sense strand starting at position 2118 of SEQ ID NO: 1886452
uugggagugauucguuaug

SEQ ID NO: 2410811 - RNA, 19 nt, Artificial Sequence
  Description of Artificial Sequence: Synthetic oligonucleotide
  Antisense strand to SEQ ID NO: 2410810
cauaacgaaucacucccaa

SEQ ID NO: 2410812 - RNA, 19 nt, Artificial Sequence
  Description of Artificial Sequence: Synthetic oligonucleotide
  Sense strand starting at position 2128 of SEQ ID NO: 1886452
uucguuaugcagcacuaga

SEQ ID NO: 2410813 - RNA, 19 nt, Artificial Sequence
  Description of Artificial Sequence: Synthetic oligonucleotide
  Antisense strand to SEQ ID NO: 2410812
ucuagugcugcauaacgaa

SEQ ID NO: 2410814 - RNA, 19 nt, Artificial Sequence
  Description of Artificial Sequence: Synthetic oligonucleotide
  Sense strand starting at position 2168 of SEQ ID NO: 1886452
augcaaauuugucaagaga

SEQ ID NO: 2410815 - RNA, 19 nt, Artificial Sequence
  Description of Artificial Sequence: Synthetic oligonucleotide
  Antisense strand to SEQ ID NO: 2410814
ucucuugacaaauuugcau

SEQ ID NO: 2410816 - RNA, 19 nt, Artificial Sequence
  Description of Artificial Sequence: Synthetic oligonucleotide
  Sense strand starting at position 2201 of SEQ ID NO: 1886452
aggugauaacauugaaucu

SEQ ID NO: 2410817 - RNA, 19 nt, Artificial Sequence
  Description of Artificial Sequence: Synthetic oligonucleotide
  Antisense strand to SEQ ID NO: 2410816
agauucaauguuaucaccu

SEQ ID NO: 2410818 - RNA, 19 nt, Artificial Sequence
  Description of Artificial Sequence: Synthetic oligonucleotide
  Sense strand starting at position 2363 of SEQ ID NO: 1886452
cugugaccucgucaccaaa

SEQ ID NO: 2410819 - RNA, 19 nt, Artificial Sequence
  Description of Artificial Sequence: Synthetic oligonucleotide
  Antisense strand to SEQ ID NO: 2410818
uuuggugacgaggucacag

SEQ ID NO: 2410820 - RNA, 19 nt, Artificial Sequence
  Description of Artificial Sequence: Synthetic oligonucleotide
  Sense strand starting at position 2365 of SEQ ID NO: 1886452
gugaccucgucaccaaaca

SEQ ID NO: 2410821 - RNA, 19 nt, Artificial Sequence
  Description of Artificial Sequence: Synthetic oligonucleotide
  Antisense strand to SEQ ID NO: 2410820
uguuuggugacgaggucac

SEQ ID NO: 2410822 - RNA, 19 nt, Artificial Sequence
  Description of Artificial Sequence: Synthetic oligonucleotide
  Sense strand starting at position 2426 of SEQ ID NO: 1886452
acuuucugagacuggaauu

SEQ ID NO: 2410823 - RNA, 19 nt, Artificial Sequence
  Description of Artificial Sequence: Synthetic oligonucleotide
  Antisense strand to SEQ ID NO: 2410822
aauuccagucucagaaagu

SEQ ID NO: 2410824 - RNA, 19 nt, Artificial Sequence
  Description of Artificial Sequence: Synthetic oligonucleotide
  Sense strand starting at position 2592 of SEQ ID NO: 1886452
guggcaaauugaucuaaag

SEQ ID NO: 2410825 - RNA, 19 nt, Artificial Sequence
  Description of Artificial Sequence: Synthetic oligonucleotide
  Antisense strand to SEQ ID NO: 2410824
cuuuagaucaauuugccac

SEQ ID NO: 2410826 - RNA, 19 nt, Artificial Sequence
  Description of Artificial Sequence: Synthetic oligonucleotide
  Sense strand starting at position 3078 of SEQ ID NO: 1886452
gggcguguccugcucagau

SEQ ID NO: 2410827 - RNA, 19 nt, Artificial Sequence
  Description of Artificial Sequence: Synthetic oligonucleotide
  Antisense strand to SEQ ID NO: 2410826
aucugagcaggacacgccc

SEQ ID NO: 2410828 - RNA, 19 nt, Artificial Sequence
  Description of Artificial Sequence: Synthetic oligonucleotide
  Sense strand starting at position 3090 of SEQ ID NO: 1886452
cucagauaacgugaaucua

SEQ ID NO: 2410829 - RNA, 19 nt, Artificial Sequence
  Description of Artificial Sequence: Synthetic oligonucleotide
  Antisense strand to SEQ ID NO: 2410828
uagauucacguuaucugag

SEQ ID NO: 2410830 - RNA, 19 nt, Artificial Sequence
  Description of Artificial Sequence: Synthetic oligonucleotide
  Sense strand starting at position 3121 of SEQ ID NO: 1886452
uccagagcuccugaaauca

SEQ ID NO: 2410831 - RNA, 19 nt, Artificial Sequence
  Description of Artificial Sequence: Synthetic oligonucleotide
  Antisense strand to SEQ ID NO: 2410830
ugauuucaggagcucugga

SEQ ID NO: 2410832 - RNA, 19 nt, Artificial Sequence
  Description of Artificial Sequence: Synthetic oligonucleotide
  Sense strand starting at position 3327 of SEQ ID NO: 1886452
uuucucuuucuggagcauu

SEQ ID NO: 2410833 - RNA, 19 nt, Artificial Sequence
  Description of Artificial Sequence: Synthetic oligonucleotide
  Antisense strand to SEQ ID NO: 2410832
aaugcuccagaaagagaaa

SEQ ID NO: 2410834 - RNA, 19 nt, Artificial Sequence
  Description of Artificial Sequence: Synthetic oligonucleotide
  Sense strand starting at position 3337 of SEQ ID NO: 1886452
uggagcauugcauaucguu

SEQ ID NO: 2410835 - RNA, 19 nt, Artificial Sequence
  Description of Artificial Sequence: Synthetic oligonucleotide
  Antisense strand to SEQ ID NO: 2410834
aacgauaugcaaugcucca

SEQ ID NO: 2410836 - RNA, 19 nt, Artificial Sequence
  Description of Artificial Sequence: Synthetic oligonucleotide
  Sense strand starting at position 3452 of SEQ ID NO: 1886452
gguaacuucucaucuggca

SEQ ID NO: 2410837 - RNA, 19 nt, Artificial Sequence
  Description of Artificial Sequence: Synthetic oligonucleotide
  Antisense strand to SEQ ID NO: 2410836
ugccagaugagaaguuacc

SEQ ID NO: 2410838 - RNA, 19 nt, Artificial Sequence
  Description of Artificial Sequence: Synthetic oligonucleotide
  Sense strand starting at position 3534 of SEQ ID NO: 1886452
auaauuaucuccuuuggag

SEQ ID NO: 2410839 - RNA, 19 nt, Artificial Sequence
  Description of Artificial Sequence: Synthetic oligonucleotide
  Antisense strand to SEQ ID NO: 2410838
cuccaaaggagauaauuau

SEQ ID NO: 2410840 - RNA, 19 nt, Artificial Sequence
  Description of Artificial Sequence: Synthetic oligonucleotide
  Sense strand starting at position 3556 of SEQ ID NO: 1886452
ugcugugaggguuaauuaa

SEQ ID NO: 2410841 - RNA, 19 nt, Artificial Sequence
  Description of Artificial Sequence: Synthetic oligonucleotide
  Antisense strand to SEQ ID NO: 2410840
uuaauuaacccucacagca

SEQ ID NO: 2410842 - RNA, 19 nt, Artificial Sequence
  Description of Artificial Sequence: Synthetic oligonucleotide
  Sense strand starting at position 3772 of SEQ ID NO: 1886452
aacugacagccuggaagau

SEQ ID NO: 2410843 - RNA, 19 nt, Artificial Sequence
  Description of Artificial Sequence: Synthetic oligonucleotide
  Antisense strand to SEQ ID NO: 2410842
aucuuccaggcugucaguu

SEQ ID NO: 2410844 - RNA, 19 nt, Artificial Sequence
  Description of Artificial Sequence: Synthetic oligonucleotide
  Sense strand starting at position 3901 of SEQ ID NO: 1886452
gggagagccguucaucuca

SEQ ID NO: 2410845 - RNA, 19 nt, Artificial Sequence
  Description of Artificial Sequence: Synthetic oligonucleotide
  Antisense strand to SEQ ID NO: 2410844
ugagaugaacggcucuccc

SEQ ID NO: 2410846 - RNA, 19 nt, Artificial Sequence
  Description of Artificial Sequence: Synthetic oligonucleotide
  Sense strand starting at position 301 of SEQ ID NO: 1886453
gcccacuucccgugagaca

SEQ ID NO: 2410847 - RNA, 19 nt, Artificial Sequence
  Description of Artificial Sequence: Synthetic oligonucleotide
  Antisense strand to SEQ ID NO: 2410846
ugucucacgggaagugggc

SEQ ID NO: 2410848 - RNA, 19 nt, Artificial Sequence
  Description of Artificial Sequence: Synthetic oligonucleotide
  Sense strand starting at position 1072 of SEQ ID NO: 1886453
ccaucauagccuggagaga

SEQ ID NO: 2410849 - RNA, 19 nt, Artificial Sequence
  Description of Artificial Sequence: Synthetic oligonucleotide
  Antisense strand to SEQ ID NO: 2410848
ucucuccaggcuaugaugg

SEQ ID NO: 2410850 - RNA, 19 nt, Artificial Sequence
  Description of Artificial Sequence: Synthetic oligonucleotide
  Sense strand starting at position 1374 of SEQ ID NO: 1886453
ccauguauuucugagacga

SEQ ID NO: 2410851 - RNA, 19 nt, Artificial Sequence
  Description of Artificial Sequence: Synthetic oligonucleotide
  Antisense strand to SEQ ID NO: 2410850
ucgucucagaaauacaugg

SEQ ID NO: 2410852 - RNA, 19 nt, Artificial Sequence
  Description of Artificial Sequence: Synthetic oligonucleotide
  Sense strand starting at position 1376 of SEQ ID NO: 1886453
auguauuucugagacgacu

SEQ ID NO: 2410853 - RNA, 19 nt, Artificial Sequence
  Description of Artificial Sequence: Synthetic oligonucleotide
  Antisense strand to SEQ ID NO: 2410852
agucgucucagaaauacau

SEQ ID NO: 2410854 - RNA, 19 nt, Artificial Sequence
  Description of Artificial Sequence: Synthetic oligonucleotide
  Sense strand starting at position 2054 of SEQ ID NO: 1886453
aguaaagacucuuccauga

SEQ ID NO: 2410855 - RNA, 19 nt, Artificial Sequence
  Description of Artificial Sequence: Synthetic oligonucleotide
  Antisense strand to SEQ ID NO: 2410854
ucauggaagagucuuuacu

SEQ ID NO: 2410856 - RNA, 19 nt, Artificial Sequence
  Description of Artificial Sequence: Synthetic oligonucleotide
  Sense strand starting at position 2233 of SEQ ID NO: 1886453
ccgggagacucuucugaga

SEQ ID NO: 2410857 - RNA, 19 nt, Artificial Sequence
  Description of Artificial Sequence: Synthetic oligonucleotide
  Antisense strand to SEQ ID NO: 2410856
ucucagaagagucucccgg

SEQ ID NO: 2410858 - RNA, 19 nt, Artificial Sequence
  Description of Artificial Sequence: Synthetic oligonucleotide
  Sense strand starting at position 2235 of SEQ ID NO: 1886453
gggagacucuucugagagu

SEQ ID NO: 2410859 - RNA, 19 nt, Artificial Sequence
  Description of Artificial Sequence: Synthetic oligonucleotide
  Antisense strand to SEQ ID NO: 2410858
acucucagaagagucuccc

SEQ ID NO: 2410860 - RNA, 19 nt, Artificial Sequence
  Description of Artificial Sequence: Synthetic oligonucleotide
  Sense strand starting at position 2238 of SEQ ID NO: 1886453
agacucuucugagagugca

SEQ ID NO: 2410861 - RNA, 19 nt, Artificial Sequence
  Description of Artificial Sequence: Synthetic oligonucleotide
  Antisense strand to SEQ ID NO: 2410860
ugcacucucagaagagucu

SEQ ID NO: 2410862 - RNA, 19 nt, Artificial Sequence
  Description of Artificial Sequence: Synthetic oligonucleotide
  Sense strand starting at position 2282 of SEQ ID NO: 1886453
guggacacuugaugagacu

SEQ ID NO: 2410863 - RNA, 19 nt, Artificial Sequence
  Description of Artificial Sequence: Synthetic oligonucleotide
  Antisense strand to SEQ ID NO: 2410862
agucucaucaaguguccac

SEQ ID NO: 2410864 - RNA, 19 nt, Artificial Sequence
  Description of Artificial Sequence: Synthetic oligonucleotide
  Sense strand starting at position 2566 of SEQ ID NO: 1886453
gucugaauucucugcccag

SEQ ID NO: 2410865 - RNA, 19 nt, Artificial Sequence
  Description of Artificial Sequence: Synthetic oligonucleotide
  Antisense strand to SEQ ID NO: 2410864
cugggcagagaauucagac

SEQ ID NO: 2410866 - RNA, 19 nt, Artificial Sequence
  Description of Artificial Sequence: Synthetic oligonucleotide
  Sense strand starting at position 2567 of SEQ ID NO: 1886453
ucugaauucucugcccaga

SEQ ID NO: 2410867 - RNA, 19 nt, Artificial Sequence
  Description of Artificial Sequence: Synthetic oligonucleotide
  Antisense strand to SEQ ID NO: 2410866
ucugggcagagaauucaga

SEQ ID NO: 2410868 - RNA, 19 nt, Artificial Sequence
  Description of Artificial Sequence: Synthetic oligonucleotide
  Sense strand starting at position 2775 of SEQ ID NO: 1886453
ccaugacucuaggcagagu

SEQ ID NO: 2410869 - RNA, 19 nt, Artificial Sequence
  Description of Artificial Sequence: Synthetic oligonucleotide
  Antisense strand to SEQ ID NO: 2410868
acucugccuagagucaugg

SEQ ID NO: 2410870 - RNA, 19 nt, Artificial Sequence
  Description of Artificial Sequence: Synthetic oligonucleotide
  Sense strand starting at position 3120 of SEQ ID NO: 1886453
uggaguguugcagacagca

SEQ ID NO: 2410871 - RNA, 19 nt, Artificial Sequence
  Description of Artificial Sequence: Synthetic oligonucleotide
  Antisense strand to SEQ ID NO: 2410870
ugcugucugcaacacucca

SEQ ID NO: 2410872 - RNA, 19 nt, Artificial Sequence
  Description of Artificial Sequence: Synthetic oligonucleotide
  Sense strand starting at position 3203 of SEQ ID NO: 1886453
ggugucaucccgucuaguc

SEQ ID NO: 2410873 - RNA, 19 nt, Artificial Sequence
  Description of Artificial Sequence: Synthetic oligonucleotide
  Antisense strand to SEQ ID NO: 2410872
gacuagacgggaugacacc

SEQ ID NO: 2410874 - RNA, 19 nt, Artificial Sequence
  Description of Artificial Sequence: Synthetic oligonucleotide
  Sense strand starting at position 3212 of SEQ ID NO: 1886453
ccgucuaguccugagacca

SEQ ID NO: 2410875 - RNA, 19 nt, Artificial Sequence
  Description of Artificial Sequence: Synthetic oligonucleotide
  Antisense strand to SEQ ID NO: 2410874
uggucucaggacuagacgg

SEQ ID NO: 2410876 - RNA, 19 nt, Artificial Sequence
  Description of Artificial Sequence: Synthetic oligonucleotide
  Sense strand starting at position 3248 of SEQ ID NO: 1886453
ggcccuuuguccucaugga

SEQ ID NO: 2410877 - RNA, 19 nt, Artificial Sequence
  Description of Artificial Sequence: Synthetic oligonucleotide
  Antisense strand to SEQ ID NO: 2410876
uccaugaggacaaagggcc

SEQ ID NO: 2410878 - RNA, 19 nt, Artificial Sequence
  Description of Artificial Sequence: Synthetic oligonucleotide
  Sense strand starting at position 3437 of SEQ ID NO: 1886453
acucuaacuuugggucaca

SEQ ID NO: 2410879 - RNA, 19 nt, Artificial Sequence
  Description of Artificial Sequence: Synthetic oligonucleotide
  Antisense strand to SEQ ID NO: 2410878
ugugacccaaaguuagagu

SEQ ID NO: 2410880 - RNA, 19 nt, Artificial Sequence
  Description of Artificial Sequence: Synthetic oligonucleotide
  Sense strand starting at position 3442 of SEQ ID NO: 1886453
aacuuugggucacagacua

SEQ ID NO: 2410881 - RNA, 19 nt, Artificial Sequence
  Description of Artificial Sequence: Synthetic oligonucleotide
  Antisense strand to SEQ ID NO: 2410880
uagucugugacccaaaguu

SEQ ID NO: 2410882 - RNA, 19 nt, Artificial Sequence
  Description of Artificial Sequence: Synthetic oligonucleotide
  Sense strand starting at position 66 of SEQ ID NO: 1886454
auaaaugcucugggcaauu

SEQ ID NO: 2410883 - RNA, 19 nt, Artificial Sequence
  Description of Artificial Sequence: Synthetic oligonucleotide
  Antisense strand to SEQ ID NO: 2410882
aauugcccagagcauuuau

SEQ ID NO: 2410884 - RNA, 19 nt, Artificial Sequence
  Description of Artificial Sequence: Synthetic oligonucleotide
  Sense strand starting at position 148 of SEQ ID NO: 1886454
ucaggacauuaauugcauu

SEQ ID NO: 2410885 - RNA, 19 nt, Artificial Sequence
  Description of Artificial Sequence: Synthetic oligonucleotide
  Antisense strand to SEQ ID NO: 2410884
aaugcaauuaauguccuga

SEQ ID NO: 2410886 - RNA, 19 nt, Artificial Sequence
  Description of Artificial Sequence: Synthetic oligonucleotide
  Sense strand starting at position 201 of SEQ ID NO: 1886454
ccaggcuugccagagaaga

SEQ ID NO: 2410887 - RNA, 19 nt, Artificial Sequence
  Description of Artificial Sequence: Synthetic oligonucleotide
  Antisense strand to SEQ ID NO: 2410886
ucuucucuggcaagccugg

SEQ ID NO: 2410888 - RNA, 19 nt, Artificial Sequence
  Description of Artificial Sequence: Synthetic oligonucleotide
  Sense strand starting at position 366 of SEQ ID NO: 1886454
cccuuaugccauggagaag

SEQ ID NO: 2410889 - RNA, 19 nt, Artificial Sequence
  Description of Artificial Sequence: Synthetic oligonucleotide
  Antisense strand to SEQ ID NO: 2410888
cuucuccauggcauaaggg

SEQ ID NO: 2410890 - RNA, 19 nt, Artificial Sequence
  Description of Artificial Sequence: Synthetic oligonucleotide
  Sense strand starting at position 509 of SEQ ID NO: 1886454
gagggacucuugguuccuu

SEQ ID NO: 2410891 - RNA, 19 nt, Artificial Sequence
  Description of Artificial Sequence: Synthetic oligonucleotide
  Antisense strand to SEQ ID NO: 2410890
aaggaaccaagagucccuc

SEQ ID NO: 2410892 - RNA, 19 nt, Artificial Sequence
  Description of Artificial Sequence: Synthetic oligonucleotide
  Sense strand starting at position 517 of SEQ ID NO: 1886454
cuugguuccuuaguaaaca

SEQ ID NO: 2410893 - RNA, 19 nt, Artificial Sequence
  Description of Artificial Sequence: Synthetic oligonucleotide
  Antisense strand to SEQ ID NO: 2410892
uguuuacuaaggaaccaag

SEQ ID NO: 2410894 - RNA, 19 nt, Artificial Sequence
  Description of Artificial Sequence: Synthetic oligonucleotide
  Sense strand starting at position 638 of SEQ ID NO: 1886454
gauugugucagguagugag

SEQ ID NO: 2410895 - RNA, 19 nt, Artificial Sequence
  Description of Artificial Sequence: Synthetic oligonucleotide
  Antisense strand to SEQ ID NO: 2410894
cucacuaccugacacaauc

SEQ ID NO: 2410896 - RNA, 19 nt, Artificial Sequence
  Description of Artificial Sequence: Synthetic oligonucleotide
  Sense strand starting at position 655 of SEQ ID NO: 1886454
agcuguuuccuggagaagc

SEQ ID NO: 2410897 - RNA, 19 nt, Artificial Sequence
  Description of Artificial Sequence: Synthetic oligonucleotide
  Antisense strand to SEQ ID NO: 2410896
gcuucuccaggaaacagcu

SEQ ID NO: 2410898 - RNA, 19 nt, Artificial Sequence
  Description of Artificial Sequence: Synthetic oligonucleotide
  Sense strand starting at position 679 of SEQ ID NO: 1886454
ucugguuccagagggaagu

SEQ ID NO: 2410899 - RNA, 19 nt, Artificial Sequence
  Description of Artificial Sequence: Synthetic oligonucleotide
  Antisense strand to SEQ ID NO: 2410898
acuucccucuggaaccaga

SEQ ID NO: 2410900 - RNA, 19 nt, Artificial Sequence
  Description of Artificial Sequence: Synthetic oligonucleotide
  Sense strand starting at position 692 of SEQ ID NO: 1886454
ggaagugaguuucuaagag

SEQ ID NO: 2410901 - RNA, 19 nt, Artificial Sequence
  Description of Artificial Sequence: Synthetic oligonucleotide
  Antisense strand to SEQ ID NO: 2410900
cucuuagaaacucacuucc

SEQ ID NO: 2410902 - RNA, 19 nt, Artificial Sequence
  Description of Artificial Sequence: Synthetic oligonucleotide
  Sense strand starting at position 818 of SEQ ID NO: 1886454
ugugcaauaucauuagaac

SEQ ID NO: 2410903 - RNA, 19 nt, Artificial Sequence
  Description of Artificial Sequence: Synthetic oligonucleotide
  Antisense strand to SEQ ID NO: 2410902
guucuaaugauauugcaca

SEQ ID NO: 2410904 - RNA, 19 nt, Artificial Sequence
  Description of Artificial Sequence: Synthetic oligonucleotide
  Sense strand starting at position 819 of SEQ ID NO: 1886454
gugcaauaucauuagaacu

SEQ ID NO: 2410905 - RNA, 19 nt, Artificial Sequence
  Description of Artificial Sequence: Synthetic oligonucleotide
  Antisense strand to SEQ ID NO: 2410904
aguucuaaugauauugcac

SEQ ID NO: 2410906 - RNA, 19 nt, Artificial Sequence
  Description of Artificial Sequence: Synthetic oligonucleotide
  Sense strand starting at position 836 of SEQ ID NO: 1886454
cuggcagacccuuauuaaa

SEQ ID NO: 2410907 - RNA, 19 nt, Artificial Sequence
  Description of Artificial Sequence: Synthetic oligonucleotide
  Antisense strand to SEQ ID NO: 2410906
uuuaauaagggucugccag

SEQ ID NO: 2410908 - RNA, 19 nt, Artificial Sequence
  Description of Artificial Sequence: Synthetic oligonucleotide
  Sense strand starting at position 875 of SEQ ID NO: 1886454
cuauauccugugugagaca

SEQ ID NO: 2410909 - RNA, 19 nt, Artificial Sequence
  Description of Artificial Sequence: Synthetic oligonucleotide
  Antisense strand to SEQ ID NO: 2410908
ugucucacacaggauauag

SEQ ID NO: 2410910 - RNA, 19 nt, Artificial Sequence
  Description of Artificial Sequence: Synthetic oligonucleotide
  Sense strand starting at position 1082 of SEQ ID NO: 1886454
gcacuugugaaaugacaga

SEQ ID NO: 2410911 - RNA, 19 nt, Artificial Sequence
  Description of Artificial Sequence: Synthetic oligonucleotide
  Antisense strand to SEQ ID NO: 2410910
ucugucauuucacaagugc

SEQ ID NO: 2410912 - RNA, 19 nt, Artificial Sequence
  Description of Artificial Sequence: Synthetic oligonucleotide
  Sense strand starting at position 1223 of SEQ ID NO: 1886454
uuaggacugggcugaguua

SEQ ID NO: 2410913 - RNA, 19 nt, Artificial Sequence
  Description of Artificial Sequence: Synthetic oligonucleotide
  Antisense strand to SEQ ID NO: 2410912
uaacucagcccaguccuaa

SEQ ID NO: 2410914 - RNA, 19 nt, Artificial Sequence
  Description of Artificial Sequence: Synthetic oligonucleotide
  Sense strand starting at position 1234 of SEQ ID NO: 1886454
cugaguuagcucuaucuag

SEQ ID NO: 2410915 - RNA, 19 nt, Artificial Sequence
  Description of Artificial Sequence: Synthetic oligonucleotide
  Antisense strand to SEQ ID NO: 2410914
cuagauagagcuaacucag

SEQ ID NO: 2410916 - RNA, 19 nt, Artificial Sequence
  Description of Artificial Sequence: Synthetic oligonucleotide
  Sense strand starting at position 1244 of SEQ ID NO: 1886454
ucuaucuaguacuuuguaa

SEQ ID NO: 2410917 - RNA, 19 nt, Artificial Sequence
  Description of Artificial Sequence: Synthetic oligonucleotide
  Antisense strand to SEQ ID NO: 2410916
uuacaaaguacuagauaga

SEQ ID NO: 2410918 - RNA, 19 nt, Artificial Sequence
  Description of Artificial Sequence: Synthetic oligonucleotide
  Sense strand starting at position 1458 of SEQ ID NO: 1886454
uauauugaacuaugugagu

SEQ ID NO: 2410919 - RNA, 19 nt, Artificial Sequence
  Description of Artificial Sequence: Synthetic oligonucleotide
  Antisense strand to SEQ ID NO: 2410918
acucacauaguucaauaua

SEQ ID NO: 2410920 - RNA, 19 nt, Artificial Sequence
  Description of Artificial Sequence: Synthetic oligonucleotide
  Sense strand starting at position 1567 of SEQ ID NO: 1886454
uauggcaaagucuaguuaa

SEQ ID NO: 2410921 - RNA, 19 nt, Artificial Sequence
  Description of Artificial Sequence: Synthetic oligonucleotide
  Antisense strand to SEQ ID NO: 2410920
uuaacuagacuuugccaua

SEQ ID NO: 2410922 - RNA, 19 nt, Artificial Sequence
  Description of Artificial Sequence: Synthetic oligonucleotide
  Sense strand starting at position 2048 of SEQ ID NO: 1886454
ucugaaauccucuggucug

SEQ ID NO: 2410923 - RNA, 19 nt, Artificial Sequence
  Description of Artificial Sequence: Synthetic oligonucleotide
  Antisense strand to SEQ ID NO: 2410922
cagaccagaggauuucaga

SEQ ID NO: 2410924 - RNA, 19 nt, Artificial Sequence
  Description of Artificial Sequence: Synthetic oligonucleotide
  Sense strand starting at position 2164 of SEQ ID NO: 1886454
gccgggugugcaguagaua

SEQ ID NO: 2410925 - RNA, 19 nt, Artificial Sequence
  Description of Artificial Sequence: Synthetic oligonucleotide
  Antisense strand to SEQ ID NO: 2410924
uaucuacugcacacccggc

SEQ ID NO: 2410926 - RNA, 19 nt, Artificial Sequence
  Description of Artificial Sequence: Synthetic oligonucleotide
  Sense strand starting at position 2172 of SEQ ID NO: 1886454
ugcaguagauacucaacaa

SEQ ID NO: 2410927 - RNA, 19 nt, Artificial Sequence
  Description of Artificial Sequence: Synthetic oligonucleotide
  Antisense strand to SEQ ID NO: 2410926
uuguugaguaucuacugca

SEQ ID NO: 2410928 - RNA, 19 nt, Artificial Sequence
  Description of Artificial Sequence: Synthetic oligonucleotide
  Sense strand starting at position 2361 of SEQ ID NO: 1886454
caguuuagauuguuccaga

SEQ ID NO: 2410929 - RNA, 19 nt, Artificial Sequence
  Description of Artificial Sequence: Synthetic oligonucleotide
  Antisense strand to SEQ ID NO: 2410928
ucuggaacaaucuaaacug

SEQ ID NO: 2410930 - RNA, 19 nt, Artificial Sequence
  Description of Artificial Sequence: Synthetic oligonucleotide
  Sense strand starting at position 2362 of SEQ ID NO: 1886454
aguuuagauuguuccagaa

SEQ ID NO: 2410931 - RNA, 19 nt, Artificial Sequence
  Description of Artificial Sequence: Synthetic oligonucleotide
  Antisense strand to SEQ ID NO: 2410930
uucuggaacaaucuaaacu

SEQ ID NO: 2410932 - RNA, 19 nt, Artificial Sequence
  Description of Artificial Sequence: Synthetic oligonucleotide
  Sense strand starting at position 2430 of SEQ ID NO: 1886454
ucaggaaggucccuguuaa

SEQ ID NO: 2410933 - RNA, 19 nt, Artificial Sequence
  Description of Artificial Sequence: Synthetic oligonucleotide
  Antisense strand to SEQ ID NO: 2410932
uuaacagggaccuuccuga

SEQ ID NO: 2410934 - RNA, 19 nt, Artificial Sequence
  Description of Artificial Sequence: Synthetic oligonucleotide
  Sense strand starting at position 2431 of SEQ ID NO: 1886454
caggaaggucccuguuaaa

SEQ ID NO: 2410935 - RNA, 19 nt, Artificial Sequence
  Description of Artificial Sequence: Synthetic oligonucleotide
  Antisense strand to SEQ ID NO: 2410934
uuuaacagggaccuuccug

SEQ ID NO: 2410936 - RNA, 19 nt, Artificial Sequence
  Description of Artificial Sequence: Synthetic oligonucleotide
  Sense strand starting at position 2499 of SEQ ID NO: 1886454
uucuaucucugagaauuug

SEQ ID NO: 2410937 - RNA, 19 nt, Artificial Sequence
  Description of Artificial Sequence: Synthetic oligonucleotide
  Antisense strand to SEQ ID NO: 2410936
caaauucucagagauagaa

SEQ ID NO: 2410938 - RNA, 19 nt, Artificial Sequence
  Description of Artificial Sequence: Synthetic oligonucleotide
  Sense strand starting at position 2529 of SEQ ID NO: 1886454
caagucaugucuguggaau

SEQ ID NO: 2410939 - RNA, 19 nt, Artificial Sequence
  Description of Artificial Sequence: Synthetic oligonucleotide
  Antisense strand to SEQ ID NO: 2410938
auuccacagacaugacuug

SEQ ID NO: 2410940 - RNA, 19 nt, Artificial Sequence
  Description of Artificial Sequence: Synthetic oligonucleotide
  Sense strand starting at position 2589 of SEQ ID NO: 1886454
gcaccauauccucaaggcu

SEQ ID NO: 2410941 - RNA, 19 nt, Artificial Sequence
  Description of Artificial Sequence: Synthetic oligonucleotide
  Antisense strand to SEQ ID NO: 2410940
agccuugaggauauggugc

SEQ ID NO: 2410942 - RNA, 19 nt, Artificial Sequence
  Description of Artificial Sequence: Synthetic oligonucleotide
  Sense strand starting at position 2774 of SEQ ID NO: 1886454
acguguuugcauggauuua

SEQ ID NO: 2410943 - RNA, 19 nt, Artificial Sequence
  Description of Artificial Sequence: Synthetic oligonucleotide
  Antisense strand to SEQ ID NO: 2410942
uaaauccaugcaaacacgu

SEQ ID NO: 2410944 - RNA, 19 nt, Artificial Sequence
  Description of Artificial Sequence: Synthetic oligonucleotide
  Sense strand starting at position 2775 of SEQ ID NO: 1886454
cguguuugcauggauuuaa

SEQ ID NO: 2410945 - RNA, 19 nt, Artificial Sequence
  Description of Artificial Sequence: Synthetic oligonucleotide
  Antisense strand to SEQ ID NO: 2410944
uuaaauccaugcaaacacg

SEQ ID NO: 2410946 - RNA, 19 nt, Artificial Sequence
  Description of Artificial Sequence: Synthetic oligonucleotide
  Sense strand starting at position 2956 of SEQ ID NO: 1886454
uuguaucugguguaagaga

SEQ ID NO: 2410947 - RNA, 19 nt, Artificial Sequence
  Description of Artificial Sequence: Synthetic oligonucleotide
  Antisense strand to SEQ ID NO: 2410946
ucucuuacaccagauacaa

SEQ ID NO: 2410948 - RNA, 19 nt, Artificial Sequence
  Description of Artificial Sequence: Synthetic oligonucleotide
  Sense strand starting at position 2988 of SEQ ID NO: 1886454
auucuucugcgugugguau

SEQ ID NO: 2410949 - RNA, 19 nt, Artificial Sequence
  Description of Artificial Sequence: Synthetic oligonucleotide
  Antisense strand to SEQ ID NO: 2410948
auaccacacgcagaagaau

SEQ ID NO: 2410950 - RNA, 19 nt, Artificial Sequence
  Description of Artificial Sequence: Synthetic oligonucleotide
  Sense strand starting at position 3056 of SEQ ID NO: 1886454
agggucuuggcucaagaca

SEQ ID NO: 2410951 - RNA, 19 nt, Artificial Sequence
  Description of Artificial Sequence: Synthetic oligonucleotide
  Antisense strand to SEQ ID NO: 2410950
ugucuugagccaagacccu

SEQ ID NO: 2410952 - RNA, 19 nt, Artificial Sequence
  Description of Artificial Sequence: Synthetic oligonucleotide
  Sense strand starting at position 3205 of SEQ ID NO: 1886454
gaaaguguaugacuuccaa

SEQ ID NO: 2410953 - RNA, 19 nt, Artificial Sequence
  Description of Artificial Sequence: Synthetic oligonucleotide
  Antisense strand to SEQ ID NO: 2410952
uuggaagucauacacuuuc

SEQ ID NO: 2410954 - RNA, 19 nt, Artificial Sequence
  Description of Artificial Sequence: Synthetic oligonucleotide
  Sense strand starting at position 3300 of SEQ ID NO: 1886454
acugacuuccgaggucaca

SEQ ID NO: 2410955 - RNA, 19 nt, Artificial Sequence
  Description of Artificial Sequence: Synthetic oligonucleotide
  Antisense strand to SEQ ID NO: 2410954
ugugaccucggaagucagu

SEQ ID NO: 2410956 - RNA, 19 nt, Artificial Sequence
  Description of Artificial Sequence: Synthetic oligonucleotide
  Sense strand starting at position 3441 of SEQ ID NO: 1886454
uccuguccugcugaugaau

SEQ ID NO: 2410957 - RNA, 19 nt, Artificial Sequence
  Description of Artificial Sequence: Synthetic oligonucleotide
  Antisense strand to SEQ ID NO: 2410956
auucaucagcaggacagga

SEQ ID NO: 2410958 - RNA, 19 nt, Artificial Sequence
  Description of Artificial Sequence: Synthetic oligonucleotide
  Sense strand starting at position 3631 of SEQ ID NO: 1886454
guaagucucacgugauuug

SEQ ID NO: 2410959 - RNA, 19 nt, Artificial Sequence
  Description of Artificial Sequence: Synthetic oligonucleotide
  Antisense strand to SEQ ID NO: 2410958
caaaucacgugagacuuac

SEQ ID NO: 2410960 - RNA, 19 nt, Artificial Sequence
  Description of Artificial Sequence: Synthetic oligonucleotide
  Sense strand starting at position 3662 of SEQ ID NO: 1886454
augggaauucccugucaca

SEQ ID NO: 2410961 - RNA, 19 nt, Artificial Sequence
  Description of Artificial Sequence: Synthetic oligonucleotide
  Antisense strand to SEQ ID NO: 2410960
ugugacagggaauucccau

SEQ ID NO: 2410962 - RNA, 19 nt, Artificial Sequence
  Description of Artificial Sequence: Synthetic oligonucleotide
  Sense strand starting at position 246 of SEQ ID NO: 1886455
cauuguggacugcauaauu

SEQ ID NO: 2410963 - RNA, 19 nt, Artificial Sequence
  Description of Artificial Sequence: Synthetic oligonucleotide
  Antisense strand to SEQ ID NO: 2410962
aauuaugcaguccacaaug

SEQ ID NO: 2410964 - RNA, 19 nt, Artificial Sequence
  Description of Artificial Sequence: Synthetic oligonucleotide
  Sense strand starting at position 441 of SEQ ID NO: 1886455
aucagagaucuauggcaca

SEQ ID NO: 2410965 - RNA, 19 nt, Artificial Sequence
  Description of Artificial Sequence: Synthetic oligonucleotide
  Antisense strand to SEQ ID NO: 2410964
ugugccauagaucucugau

SEQ ID NO: 2410966 - RNA, 19 nt, Artificial Sequence
  Description of Artificial Sequence: Synthetic oligonucleotide
  Sense strand starting at position 620 of SEQ ID NO: 1886455
agauguaguuugguaauaa

SEQ ID NO: 2410967 - RNA, 19 nt, Artificial Sequence
  Description of Artificial Sequence: Synthetic oligonucleotide
  Antisense strand to SEQ ID NO: 2410966
uuauuaccaaacuacaucu

SEQ ID NO: 2410968 - RNA, 19 nt, Artificial Sequence
  Description of Artificial Sequence: Synthetic oligonucleotide
  Sense strand starting at position 740 of SEQ ID NO: 1886455
cuguuuauuugggugaguu

SEQ ID NO: 2410969 - RNA, 19 nt, Artificial Sequence
  Description of Artificial Sequence: Synthetic oligonucleotide
  Antisense strand to SEQ ID NO: 2410968
aacucacccaaauaaacag

SEQ ID NO: 2410970 - RNA, 19 nt, Artificial Sequence
  Description of Artificial Sequence: Synthetic oligonucleotide
  Sense strand starting at position 741 of SEQ ID NO: 1886455
uguuuauuugggugaguua

SEQ ID NO: 2410971 - RNA, 19 nt, Artificial Sequence
  Description of Artificial Sequence: Synthetic oligonucleotide
  Antisense strand to SEQ ID NO: 2410970
uaacucacccaaauaaaca

SEQ ID NO: 2410972 - RNA, 19 nt, Artificial Sequence
  Description of Artificial Sequence: Synthetic oligonucleotide
  Sense strand starting at position 810 of SEQ ID NO: 1886455
gggagacucuacuuuguua

SEQ ID NO: 2410973 - RNA, 19 nt, Artificial Sequence
  Description of Artificial Sequence: Synthetic oligonucleotide
  Antisense strand to SEQ ID NO: 2410972
uaacaaaguagagucuccc

SEQ ID NO: 2410974 - RNA, 19 nt, Artificial Sequence
  Description of Artificial Sequence: Synthetic oligonucleotide
  Sense strand starting at position 812 of SEQ ID NO: 1886455
gagacucuacuuuguuaga

SEQ ID NO: 2410975 - RNA, 19 nt, Artificial Sequence
  Description of Artificial Sequence: Synthetic oligonucleotide
  Antisense strand to SEQ ID NO: 2410974
ucuaacaaaguagagucuc

SEQ ID NO: 2410976 - RNA, 19 nt, Artificial Sequence
  Description of Artificial Sequence: Synthetic oligonucleotide
  Sense strand starting at position 813 of SEQ ID NO: 1886455
agacucuacuuuguuagau

SEQ ID NO: 2410977 - RNA, 19 nt, Artificial Sequence
  Description of Artificial Sequence: Synthetic oligonucleotide
  Antisense strand to SEQ ID NO: 2410976
aucuaacaaaguagagucu

SEQ ID NO: 2410978 - RNA, 19 nt, Artificial Sequence
  Description of Artificial Sequence: Synthetic oligonucleotide
  Sense strand starting at position 836 of SEQ ID NO: 1886455
gcucaaauucuggaccaca

SEQ ID NO: 2410979 - RNA, 19 nt, Artificial Sequence
  Description of Artificial Sequence: Synthetic oligonucleotide
  Antisense strand to SEQ ID NO: 2410978
ugugguccagaauuugagc

SEQ ID NO: 2410980 - RNA, 19 nt, Artificial Sequence
  Description of Artificial Sequence: Synthetic oligonucleotide
  Sense strand starting at position 913 of SEQ ID NO: 1886455
auuagagguugucugaaug

SEQ ID NO: 2410981 - RNA, 19 nt, Artificial Sequence
  Description of Artificial Sequence: Synthetic oligonucleotide
  Antisense strand to SEQ ID NO: 2410980
cauucagacaaccucuaau

SEQ ID NO: 2410982 - RNA, 19 nt, Artificial Sequence
  Description of Artificial Sequence: Synthetic oligonucleotide
  Sense strand starting at position 930 of SEQ ID NO: 1886455
ugcguauuauuucccagga

SEQ ID NO: 2410983 - RNA, 19 nt, Artificial Sequence
  Description of Artificial Sequence: Synthetic oligonucleotide
  Antisense strand to SEQ ID NO: 2410982
uccugggaaauaauacgca

SEQ ID NO: 2410984 - RNA, 19 nt, Artificial Sequence
  Description of Artificial Sequence: Synthetic oligonucleotide
  Sense strand starting at position 931 of SEQ ID NO: 1886455
gcguauuauuucccaggag

SEQ ID NO: 2410985 - RNA, 19 nt, Artificial Sequence
  Description of Artificial Sequence: Synthetic oligonucleotide
  Antisense strand to SEQ ID NO: 2410984
cuccugggaaauaauacgc

SEQ ID NO: 2410986 - RNA, 19 nt, Artificial Sequence
  Description of Artificial Sequence: Synthetic oligonucleotide
  Sense strand starting at position 1089 of SEQ ID NO: 1886455
ugcgcauuccuucuucuua

SEQ ID NO: 2410987 - RNA, 19 nt, Artificial Sequence
  Description of Artificial Sequence: Synthetic oligonucleotide
  Antisense strand to SEQ ID NO: 2410986
uaagaagaaggaaugcgca

SEQ ID NO: 2410988 - RNA, 19 nt, Artificial Sequence
  Description of Artificial Sequence: Synthetic oligonucleotide
  Sense strand starting at position 1190 of SEQ ID NO: 1886455
gucagaugcguugagagaa

SEQ ID NO: 2410989 - RNA, 19 nt, Artificial Sequence
  Description of Artificial Sequence: Synthetic oligonucleotide
  Antisense strand to SEQ ID NO: 2410988
uucucucaacgcaucugac

SEQ ID NO: 2410990 - RNA, 19 nt, Artificial Sequence
  Description of Artificial Sequence: Synthetic oligonucleotide
  Sense strand starting at position 1210 of SEQ ID NO: 1886455
gggcuucuccggaguguau

SEQ ID NO: 2410991 - RNA, 19 nt, Artificial Sequence
  Description of Artificial Sequence: Synthetic oligonucleotide
  Antisense strand to SEQ ID NO: 2410990
auacacuccggagaagccc

SEQ ID NO: 2410992 - RNA, 19 nt, Artificial Sequence
  Description of Artificial Sequence: Synthetic oligonucleotide
  Sense strand starting at position 1327 of SEQ ID NO: 1886455
ucucaucuuccuuggaaag

SEQ ID NO: 2410993 - RNA, 19 nt, Artificial Sequence
  Description of Artificial Sequence: Synthetic oligonucleotide
  Antisense strand to SEQ ID NO: 2410992
cuuuccaaggaagaugaga

SEQ ID NO: 2410994 - RNA, 19 nt, Artificial Sequence
  Description of Artificial Sequence: Synthetic oligonucleotide
  Sense strand starting at position 1338 of SEQ ID NO: 1886455
uuggaaaggucuuuauauc

SEQ ID NO: 2410995 - RNA, 19 nt, Artificial Sequence
  Description of Artificial Sequence: Synthetic oligonucleotide
  Antisense strand to SEQ ID NO: 2410994
gauauaaagaccuuuccaa

SEQ ID NO: 2410996 - RNA, 19 nt, Artificial Sequence
  Description of Artificial Sequence: Synthetic oligonucleotide
  Sense strand starting at position 1349 of SEQ ID NO: 1886455
uuuauaucacucugggauu

SEQ ID NO: 2410997 - RNA, 19 nt, Artificial Sequence
  Description of Artificial Sequence: Synthetic oligonucleotide
  Antisense strand to SEQ ID NO: 2410996
aaucccagagugauauaaa

SEQ ID NO: 2410998 - RNA, 19 nt, Artificial Sequence
  Description of Artificial Sequence: Synthetic oligonucleotide
  Sense strand starting at position 1386 of SEQ ID NO: 1886455
caguauuaacauggcugaa

SEQ ID NO: 2410999 - RNA, 19 nt, Artificial Sequence
  Description of Artificial Sequence: Synthetic oligonucleotide
  Antisense strand to SEQ ID NO: 2410998
uucagccauguuaauacug

SEQ ID NO: 2411000 - RNA, 19 nt, Artificial Sequence
  Description of Artificial Sequence: Synthetic oligonucleotide
  Sense strand starting at position 1558 of SEQ ID NO: 1886455
gccuacuuguaauuuguga

SEQ ID NO: 2411001 - RNA, 19 nt, Artificial Sequence
  Description of Artificial Sequence: Synthetic oligonucleotide
  Antisense strand to SEQ ID NO: 2411000
ucacaaauuacaaguaggc

SEQ ID NO: 2411002 - RNA, 19 nt, Artificial Sequence
  Description of Artificial Sequence: Synthetic oligonucleotide
  Sense strand starting at position 1679 of SEQ ID NO: 1886455
uggcaaguuaaugauguaa

SEQ ID NO: 2411003 - RNA, 19 nt, Artificial Sequence
  Description of Artificial Sequence: Synthetic oligonucleotide
  Antisense strand to SEQ ID NO: 2411002
uuacaucauuaacuugcca

SEQ ID NO: 2411004 - RNA, 19 nt, Artificial Sequence
  Description of Artificial Sequence: Synthetic oligonucleotide
  Sense strand starting at position 1705 of SEQ ID NO: 1886455
cuucuacaugccuagaaag

SEQ ID NO: 2411005 - RNA, 19 nt, Artificial Sequence
  Description of Artificial Sequence: Synthetic oligonucleotide
  Antisense strand to SEQ ID NO: 2411004
cuuucuaggcauguagaag

SEQ ID NO: 2411006 - RNA, 19 nt, Artificial Sequence
  Description of Artificial Sequence: Synthetic oligonucleotide
  Sense strand starting at position 1962 of SEQ ID NO: 1886455
uggauuaaguuccucuuga

SEQ ID NO: 2411007 - RNA, 19 nt, Artificial Sequence
  Description of Artificial Sequence: Synthetic oligonucleotide
  Antisense strand to SEQ ID NO: 2411006
ucaagaggaacuuaaucca

SEQ ID NO: 2411008 - RNA, 19 nt, Artificial Sequence
  Description of Artificial Sequence: Synthetic oligonucleotide
  Sense strand starting at position 1963 of SEQ ID NO: 1886455
ggauuaaguuccucuugau

SEQ ID NO: 2411009 - RNA, 19 nt, Artificial Sequence
  Description of Artificial Sequence: Synthetic oligonucleotide
  Antisense strand to SEQ ID NO: 2411008
aucaagaggaacuuaaucc

SEQ ID NO: 2411010 - RNA, 19 nt, Artificial Sequence
  Description of Artificial Sequence: Synthetic oligonucleotide
  Sense strand starting at position 2073 of SEQ ID NO: 1886455
cagugugauguugaaccua

SEQ ID NO: 2411011 - RNA, 19 nt, Artificial Sequence
  Description of Artificial Sequence: Synthetic oligonucleotide
  Antisense strand to SEQ ID NO: 2411010
uagguucaacaucacacug

SEQ ID NO: 2411012 - RNA, 19 nt, Artificial Sequence
  Description of Artificial Sequence: Synthetic oligonucleotide
  Sense strand starting at position 2098 of SEQ ID NO: 1886455
ucuauugugacauacguag

SEQ ID NO: 2411013 - RNA, 19 nt, Artificial Sequence
  Description of Artificial Sequence: Synthetic oligonucleotide
  Antisense strand to SEQ ID NO: 2411012
cuacguaugucacaauaga

SEQ ID NO: 2411014 - RNA, 19 nt, Artificial Sequence
  Description of Artificial Sequence: Synthetic oligonucleotide
  Sense strand starting at position 2397 of SEQ ID NO: 1886455
gaggauccauuugauccau

SEQ ID NO: 2411015 - RNA, 19 nt, Artificial Sequence
  Description of Artificial Sequence: Synthetic oligonucleotide
  Antisense strand to SEQ ID NO: 2411014
auggaucaaauggauccuc

SEQ ID NO: 2411016 - RNA, 19 nt, Artificial Sequence
  Description of Artificial Sequence: Synthetic oligonucleotide
  Sense strand starting at position 2417 of SEQ ID NO: 1886455
guaagaaauucugugauag

SEQ ID NO: 2411017 - RNA, 19 nt, Artificial Sequence
  Description of Artificial Sequence: Synthetic oligonucleotide
  Antisense strand to SEQ ID NO: 2411016
cuaucacagaauuucuuac

SEQ ID NO: 2411018 - RNA, 19 nt, Artificial Sequence
  Description of Artificial Sequence: Synthetic oligonucleotide
  Sense strand starting at position 2418 of SEQ ID NO: 1886455
uaagaaauucugugauagu

SEQ ID NO: 2411019 - RNA, 19 nt, Artificial Sequence
  Description of Artificial Sequence: Synthetic oligonucleotide
  Antisense strand to SEQ ID NO: 2411018
acuaucacagaauuucuua

SEQ ID NO: 2411020 - RNA, 19 nt, Artificial Sequence
  Description of Artificial Sequence: Synthetic oligonucleotide
  Sense strand starting at position 2427 of SEQ ID NO: 1886455
cugugauaguuauuuaugu

SEQ ID NO: 2411021 - RNA, 19 nt, Artificial Sequence
  Description of Artificial Sequence: Synthetic oligonucleotide
  Antisense strand to SEQ ID NO: 2411020
acauaaauaacuaucacag

SEQ ID NO: 2411022 - RNA, 19 nt, Artificial Sequence
  Description of Artificial Sequence: Synthetic oligonucleotide
  Sense strand starting at position 2858 of SEQ ID NO: 1886455
gacauaagagcuugugaaa

SEQ ID NO: 2411023 - RNA, 19 nt, Artificial Sequence
  Description of Artificial Sequence: Synthetic oligonucleotide
  Antisense strand to SEQ ID NO: 2411022
uuucacaagcucuuauguc

SEQ ID NO: 2411024 - RNA, 19 nt, Artificial Sequence
  Description of Artificial Sequence: Synthetic oligonucleotide
  Sense strand starting at position 3003 of SEQ ID NO: 1886455
gggucagguagauaauucu

SEQ ID NO: 2411025 - RNA, 19 nt, Artificial Sequence
  Description of Artificial Sequence: Synthetic oligonucleotide
  Antisense strand to SEQ ID NO: 2411024
agaauuaucuaccugaccc

SEQ ID NO: 2411026 - RNA, 19 nt, Artificial Sequence
  Description of Artificial Sequence: Synthetic oligonucleotide
  Sense strand starting at position 3006 of SEQ ID NO: 1886455
ucagguagauaauucugua

SEQ ID NO: 2411027 - RNA, 19 nt, Artificial Sequence
  Description of Artificial Sequence: Synthetic oligonucleotide
  Antisense strand to SEQ ID NO: 2411026
uacagaauuaucuaccuga

SEQ ID NO: 2411028 - RNA, 19 nt, Artificial Sequence
  Description of Artificial Sequence: Synthetic oligonucleotide
  Sense strand starting at position 3074 of SEQ ID NO: 1886455
gugguuuaacaccauaaau

SEQ ID NO: 2411029 - RNA, 19 nt, Artificial Sequence
  Description of Artificial Sequence: Synthetic oligonucleotide
  Antisense strand to SEQ ID NO: 2411028
auuuaugguguuaaaccac

SEQ ID NO: 2411030 - RNA, 19 nt, Artificial Sequence
  Description of Artificial Sequence: Synthetic oligonucleotide
  Sense strand starting at position 3159 of SEQ ID NO: 1886455
aaacaagauguuggucauu

SEQ ID NO: 2411031 - RNA, 19 nt, Artificial Sequence
  Description of Artificial Sequence: Synthetic oligonucleotide
  Antisense strand to SEQ ID NO: 2411030
aaugaccaacaucuuguuu

SEQ ID NO: 2411032 - RNA, 19 nt, Artificial Sequence
  Description of Artificial Sequence: Synthetic oligonucleotide
  Sense strand starting at position 3258 of SEQ ID NO: 1886455
gacuguaugacugagguuu

SEQ ID NO: 2411033 - RNA, 19 nt, Artificial Sequence
  Description of Artificial Sequence: Synthetic oligonucleotide
  Antisense strand to SEQ ID NO: 2411032
aaaccucagucauacaguc

SEQ ID NO: 2411034 - RNA, 19 nt, Artificial Sequence
  Description of Artificial Sequence: Synthetic oligonucleotide
  Sense strand starting at position 3447 of SEQ ID NO: 1886455
cucauuugauuagaugaga

SEQ ID NO: 2411035 - RNA, 19 nt, Artificial Sequence
  Description of Artificial Sequence: Synthetic oligonucleotide
  Antisense strand to SEQ ID NO: 2411034
ucucaucuaaucaaaugag

SEQ ID NO: 2411036 - RNA, 19 nt, Artificial Sequence
  Description of Artificial Sequence: Synthetic oligonucleotide
  Sense strand starting at position 3473 of SEQ ID NO: 1886455
augauaaucuuucuuguga

SEQ ID NO: 2411037 - RNA, 19 nt, Artificial Sequence
  Description of Artificial Sequence: Synthetic oligonucleotide
  Antisense strand to SEQ ID NO: 2411036
ucacaagaaagauuaucau

SEQ ID NO: 2411038 - RNA, 19 nt, Artificial Sequence
  Description of Artificial Sequence: Synthetic oligonucleotide
  Sense strand starting at position 3519 of SEQ ID NO: 1886455
cuuaauuacguccacagaa

SEQ ID NO: 2411039 - RNA, 19 nt, Artificial Sequence
  Description of Artificial Sequence: Synthetic oligonucleotide
  Antisense strand to SEQ ID NO: 2411038
uucuguggacguaauuaag

SEQ ID NO: 2411040 - RNA, 19 nt, Artificial Sequence
  Description of Artificial Sequence: Synthetic oligonucleotide
  Sense strand starting at position 3605 of SEQ ID NO: 1886455
agaauugugagaggcaucu

SEQ ID NO: 2411041 - RNA, 19 nt, Artificial Sequence
  Description of Artificial Sequence: Synthetic oligonucleotide
  Antisense strand to SEQ ID NO: 2411040
agaugccucucacaauucu

SEQ ID NO: 2411042 - RNA, 19 nt, Artificial Sequence
  Description of Artificial Sequence: Synthetic oligonucleotide
  Sense strand starting at position 252 of SEQ ID NO: 1886456
cagagaacccagcaauguu

SEQ ID NO: 2411043 - RNA, 19 nt, Artificial Sequence
  Description of Artificial Sequence: Synthetic oligonucleotide
  Antisense strand to SEQ ID NO: 2411042
aacauugcuggguucucug

SEQ ID NO: 2411044 - RNA, 19 nt, Artificial Sequence
  Description of Artificial Sequence: Synthetic oligonucleotide
  Sense strand starting at position 261 of SEQ ID NO: 1886456
cagcaauguuauuccugga

SEQ ID NO: 2411045 - RNA, 19 nt, Artificial Sequence
  Description of Artificial Sequence: Synthetic oligonucleotide
  Antisense strand to SEQ ID NO: 2411044
uccaggaauaacauugcug

SEQ ID NO: 2411046 - RNA, 19 nt, Artificial Sequence
  Description of Artificial Sequence: Synthetic oligonucleotide
  Sense strand starting at position 329 of SEQ ID NO: 1886456
ugugaaauuuguuacagag

SEQ ID NO: 2411047 - RNA, 19 nt, Artificial Sequence
  Description of Artificial Sequence: Synthetic oligonucleotide
  Antisense strand to SEQ ID NO: 2411046
cucuguaacaaauuucaca

SEQ ID NO: 2411048 - RNA, 19 nt, Artificial Sequence
  Description of Artificial Sequence: Synthetic oligonucleotide
  Sense strand starting at position 331 of SEQ ID NO: 1886456
ugaaauuuguuacagagca

SEQ ID NO: 2411049 - RNA, 19 nt, Artificial Sequence
  Description of Artificial Sequence: Synthetic oligonucleotide
  Antisense strand to SEQ ID NO: 2411048
ugcucuguaacaaauuuca

SEQ ID NO: 2411050 - RNA, 19 nt, Artificial Sequence
  Description of Artificial Sequence: Synthetic oligonucleotide
  Sense strand starting at position 339 of SEQ ID NO: 1886456
guuacagagcaguggauaa

SEQ ID NO: 2411051 - RNA, 19 nt, Artificial Sequence
  Description of Artificial Sequence: Synthetic oligonucleotide
  Antisense strand to SEQ ID NO: 2411050
uuauccacugcucuguaac

SEQ ID NO: 2411052 - RNA, 19 nt, Artificial Sequence
  Description of Artificial Sequence: Synthetic oligonucleotide
  Sense strand starting at position 425 of SEQ ID NO: 1886456
uuaguuccaguauaaacuu

SEQ ID NO: 2411053 - RNA, 19 nt, Artificial Sequence
  Description of Artificial Sequence: Synthetic oligonucleotide
  Antisense strand to SEQ ID NO: 2411052
aaguuuauacuggaacuaa

SEQ ID NO: 2411054 - RNA, 19 nt, Artificial Sequence
  Description of Artificial Sequence: Synthetic oligonucleotide
  Sense strand starting at position 491 of SEQ ID NO: 1886456
cuacuugaugcuggguaau

SEQ ID NO: 2411055 - RNA, 19 nt, Artificial Sequence
  Description of Artificial Sequence: Synthetic oligonucleotide
  Antisense strand to SEQ ID NO: 2411054
auuacccagcaucaaguag

SEQ ID NO: 2411056 - RNA, 19 nt, Artificial Sequence
  Description of Artificial Sequence: Synthetic oligonucleotide
  Sense strand starting at position 1076 of SEQ ID NO: 1886456
auuauucuugcccauggga

SEQ ID NO: 2411057 - RNA, 19 nt, Artificial Sequence
  Description of Artificial Sequence: Synthetic oligonucleotide
  Antisense strand to SEQ ID NO: 2411056
ucccaugggcaagaauaau

SEQ ID NO: 2411058 - RNA, 19 nt, Artificial Sequence
  Description of Artificial Sequence: Synthetic oligonucleotide
  Sense strand starting at position 1079 of SEQ ID NO: 1886456
auucuugcccaugggagua

SEQ ID NO: 2411059 - RNA, 19 nt, Artificial Sequence
  Description of Artificial Sequence: Synthetic oligonucleotide
  Antisense strand to SEQ ID NO: 2411058
uacucccaugggcaagaau

SEQ ID NO: 2411060 - RNA, 19 nt, Artificial Sequence
  Description of Artificial Sequence: Synthetic oligonucleotide
  Sense strand starting at position 1084 of SEQ ID NO: 1886456
ugcccaugggaguacaaau

SEQ ID NO: 2411061 - RNA, 19 nt, Artificial Sequence
  Description of Artificial Sequence: Synthetic oligonucleotide
  Antisense strand to SEQ ID NO: 2411060
auuuguacucccaugggca

SEQ ID NO: 2411062 - RNA, 19 nt, Artificial Sequence
  Description of Artificial Sequence: Synthetic oligonucleotide
  Sense strand starting at position 1103 of SEQ ID NO: 1886456
gauuauguccaauggaaug

SEQ ID NO: 2411063 - RNA, 19 nt, Artificial Sequence
  Description of Artificial Sequence: Synthetic oligonucleotide
  Antisense strand to SEQ ID NO: 2411062
cauuccauuggacauaauc

SEQ ID NO: 2411064 - RNA, 19 nt, Artificial Sequence
  Description of Artificial Sequence: Synthetic oligonucleotide
  Sense strand starting at position 1115 of SEQ ID NO: 1886456
uggaaugcagucuaucuuu

SEQ ID NO: 2411065 - RNA, 19 nt, Artificial Sequence
  Description of Artificial Sequence: Synthetic oligonucleotide
  Antisense strand to SEQ ID NO: 2411064
aaagauagacugcauucca

SEQ ID NO: 2411066 - RNA, 19 nt, Artificial Sequence
  Description of Artificial Sequence: Synthetic oligonucleotide
  Sense strand starting at position 1401 of SEQ ID NO: 1886456
gugccaaauuugguucuau

SEQ ID NO: 2411067 - RNA, 19 nt, Artificial Sequence
  Description of Artificial Sequence: Synthetic oligonucleotide
  Antisense strand to SEQ ID NO: 2411066
auagaaccaaauuuggcac

SEQ ID NO: 2411068 - RNA, 19 nt, Artificial Sequence
  Description of Artificial Sequence: Synthetic oligonucleotide
  Sense strand starting at position 1402 of SEQ ID NO: 1886456
ugccaaauuugguucuauu

SEQ ID NO: 2411069 - RNA, 19 nt, Artificial Sequence
  Description of Artificial Sequence: Synthetic oligonucleotide
  Antisense strand to SEQ ID NO: 2411068
aauagaaccaaauuuggca

SEQ ID NO: 2411070 - RNA, 19 nt, Artificial Sequence
  Description of Artificial Sequence: Synthetic oligonucleotide
  Sense strand starting at position 1461 of SEQ ID NO: 1886456
uagaguaggcaguauauua

SEQ ID NO: 2411071 - RNA, 19 nt, Artificial Sequence
  Description of Artificial Sequence: Synthetic oligonucleotide
  Antisense strand to SEQ ID NO: 2411070
uaauauacugccuacucua

SEQ ID NO: 2411072 - RNA, 19 nt, Artificial Sequence
  Description of Artificial Sequence: Synthetic oligonucleotide
  Sense strand starting at position 1468 of SEQ ID NO: 1886456
ggcaguauauuaccuuauu

SEQ ID NO: 2411073 - RNA, 19 nt, Artificial Sequence
  Description of Artificial Sequence: Synthetic oligonucleotide
  Antisense strand to SEQ ID NO: 2411072
aauaagguaauauacugcc

SEQ ID NO: 2411074 - RNA, 19 nt, Artificial Sequence
  Description of Artificial Sequence: Synthetic oligonucleotide
  Sense strand starting at position 1506 of SEQ ID NO: 1886456
uugugacucagggagguua

SEQ ID NO: 2411075 - RNA, 19 nt, Artificial Sequence
  Description of Artificial Sequence: Synthetic oligonucleotide
  Antisense strand to SEQ ID NO: 2411074
uaaccucccugagucacaa

SEQ ID NO: 2411076 - RNA, 19 nt, Artificial Sequence
  Description of Artificial Sequence: Synthetic oligonucleotide
  Sense strand starting at position 1529 of SEQ ID NO: 1886456
acuaacucugcuuguagga

SEQ ID NO: 2411077 - RNA, 19 nt, Artificial Sequence
  Description of Artificial Sequence: Synthetic oligonucleotide
  Antisense strand to SEQ ID NO: 2411076
uccuacaagcagaguuagu

SEQ ID NO: 2411078 - RNA, 19 nt, Artificial Sequence
  Description of Artificial Sequence: Synthetic oligonucleotide
  Sense strand starting at position 2003 of SEQ ID NO: 1886456
cccagagucugaucugaaa

SEQ ID NO: 2411079 - RNA, 19 nt, Artificial Sequence
  Description of Artificial Sequence: Synthetic oligonucleotide
  Antisense strand to SEQ ID NO: 2411078
uuucagaucagacucuggg

SEQ ID NO: 2411080 - RNA, 19 nt, Artificial Sequence
  Description of Artificial Sequence: Synthetic oligonucleotide
  Sense strand starting at position 2052 of SEQ ID NO: 1886456
gcguaacaacauuaaacau

SEQ ID NO: 2411081 - RNA, 19 nt, Artificial Sequence
  Description of Artificial Sequence: Synthetic oligonucleotide
  Antisense strand to SEQ ID NO: 2411080
auguuuaauguuguuacgc

SEQ ID NO: 2411082 - RNA, 19 nt, Artificial Sequence
  Description of Artificial Sequence: Synthetic oligonucleotide
  Sense strand starting at position 2100 of SEQ ID NO: 1886456
auaagauaacugugcuuuc

SEQ ID NO: 2411083 - RNA, 19 nt, Artificial Sequence
  Description of Artificial Sequence: Synthetic oligonucleotide
  Antisense strand to SEQ ID NO: 2411082
gaaagcacaguuaucuuau

SEQ ID NO: 2411084 - RNA, 19 nt, Artificial Sequence
  Description of Artificial Sequence: Synthetic oligonucleotide
  Sense strand starting at position 2103 of SEQ ID NO: 1886456
agauaacugugcuuucuau

SEQ ID NO: 2411085 - RNA, 19 nt, Artificial Sequence
  Description of Artificial Sequence: Synthetic oligonucleotide
  Antisense strand to SEQ ID NO: 2411084
auagaaagcacaguuaucu

SEQ ID NO: 2411086 - RNA, 19 nt, Artificial Sequence
  Description of Artificial Sequence: Synthetic oligonucleotide
  Sense strand starting at position 2245 of SEQ ID NO: 1886456
uuucucuuaucuuugagga

SEQ ID NO: 2411087 - RNA, 19 nt, Artificial Sequence
  Description of Artificial Sequence: Synthetic oligonucleotide
  Antisense strand to SEQ ID NO: 2411086
uccucaaagauaagagaaa

SEQ ID NO: 2411088 - RNA, 19 nt, Artificial Sequence
  Description of Artificial Sequence: Synthetic oligonucleotide
  Sense strand starting at position 2246 of SEQ ID NO: 1886456
uucucuuaucuuugaggaa

SEQ ID NO: 2411089 - RNA, 19 nt, Artificial Sequence
  Description of Artificial Sequence: Synthetic oligonucleotide
  Antisense strand to SEQ ID NO: 2411088
uuccucaaagauaagagaa

SEQ ID NO: 2411090 - RNA, 19 nt, Artificial Sequence
  Description of Artificial Sequence: Synthetic oligonucleotide
  Sense strand starting at position 2291 of SEQ ID NO: 1886456
ugcagaauccuauggaagu

SEQ ID NO: 2411091 - RNA, 19 nt, Artificial Sequence
  Description of Artificial Sequence: Synthetic oligonucleotide
  Antisense strand to SEQ ID NO: 2411090
acuuccauaggauucugca

SEQ ID NO: 2411092 - RNA, 19 nt, Artificial Sequence
  Description of Artificial Sequence: Synthetic oligonucleotide
  Sense strand starting at position 2304 of SEQ ID NO: 1886456
ggaagucacuuggcugaaa

SEQ ID NO: 2411093 - RNA, 19 nt, Artificial Sequence
  Description of Artificial Sequence: Synthetic oligonucleotide
  Antisense strand to SEQ ID NO: 2411092
uuucagccaagugacuucc

SEQ ID NO: 2411094 - RNA, 19 nt, Artificial Sequence
  Description of Artificial Sequence: Synthetic oligonucleotide
  Sense strand starting at position 2325 of SEQ ID NO: 1886456
ccggguuucccucauauca

SEQ ID NO: 2411095 - RNA, 19 nt, Artificial Sequence
  Description of Artificial Sequence: Synthetic oligonucleotide
  Antisense strand to SEQ ID NO: 2411094
ugauaugagggaaacccgg

SEQ ID NO: 2411096 - RNA, 19 nt, Artificial Sequence
  Description of Artificial Sequence: Synthetic oligonucleotide
  Sense strand starting at position 2346 of SEQ ID NO: 1886456
gacuguaacugcucugauc

SEQ ID NO: 2411097 - RNA, 19 nt, Artificial Sequence
  Description of Artificial Sequence: Synthetic oligonucleotide
  Antisense strand to SEQ ID NO: 2411096
gaucagagcaguuacaguc

SEQ ID NO: 2411098 - RNA, 19 nt, Artificial Sequence
  Description of Artificial Sequence: Synthetic oligonucleotide
  Sense strand starting at position 2355 of SEQ ID NO: 1886456
ugcucugauccagaaagug

SEQ ID NO: 2411099 - RNA, 19 nt, Artificial Sequence
  Description of Artificial Sequence: Synthetic oligonucleotide
  Antisense strand to SEQ ID NO: 2411098
cacuuucuggaucagagca

SEQ ID NO: 2411100 - RNA, 19 nt, Artificial Sequence
  Description of Artificial Sequence: Synthetic oligonucleotide
  Sense strand starting at position 2364 of SEQ ID NO: 1886456
ccagaaaguggcuggaaau

SEQ ID NO: 2411101 - RNA, 19 nt, Artificial Sequence
  Description of Artificial Sequence: Synthetic oligonucleotide
  Antisense strand to SEQ ID NO: 2411100
auuuccagccacuuucugg

SEQ ID NO: 2411102 - RNA, 19 nt, Artificial Sequence
  Description of Artificial Sequence: Synthetic oligonucleotide
  Sense strand starting at position 2365 of SEQ ID NO: 1886456
cagaaaguggcuggaaauu

SEQ ID NO: 2411103 - RNA, 19 nt, Artificial Sequence
  Description of Artificial Sequence: Synthetic oligonucleotide
  Antisense strand to SEQ ID NO: 2411102
aauuuccagccacuuucug

SEQ ID NO: 2411104 - RNA, 19 nt, Artificial Sequence
  Description of Artificial Sequence: Synthetic oligonucleotide
  Sense strand starting at position 2374 of SEQ ID NO: 1886456
gcuggaaauuugcuguuaa

SEQ ID NO: 2411105 - RNA, 19 nt, Artificial Sequence
  Description of Artificial Sequence: Synthetic oligonucleotide
  Antisense strand to SEQ ID NO: 2411104
uuaacagcaaauuuccagc

SEQ ID NO: 2411106 - RNA, 19 nt, Artificial Sequence
  Description of Artificial Sequence: Synthetic oligonucleotide
  Sense strand starting at position 3028 of SEQ ID NO: 1886456
uugagaucugacuguaaau

SEQ ID NO: 2411107 - RNA, 19 nt, Artificial Sequence
  Description of Artificial Sequence: Synthetic oligonucleotide
  Antisense strand to SEQ ID NO: 2411106
auuuacagucagaucucaa

SEQ ID NO: 2411108 - RNA, 19 nt, Artificial Sequence
  Description of Artificial Sequence: Synthetic oligonucleotide
  Sense strand starting at position 3265 of SEQ ID NO: 1886456
cuaggagguccuuagcaau

SEQ ID NO: 2411109 - RNA, 19 nt, Artificial Sequence
  Description of Artificial Sequence: Synthetic oligonucleotide
  Antisense strand to SEQ ID NO: 2411108
auugcuaaggaccuccuag

SEQ ID NO: 2411110 - RNA, 19 nt, Artificial Sequence
  Description of Artificial Sequence: Synthetic oligonucleotide
  Sense strand starting at position 3353 of SEQ ID NO: 1886456
ugaagacaguaggauuuau

SEQ ID NO: 2411111 - RNA, 19 nt, Artificial Sequence
  Description of Artificial Sequence: Synthetic oligonucleotide
  Antisense strand to SEQ ID NO: 2411110
auaaauccuacugucuuca

SEQ ID NO: 2411112 - RNA, 19 nt, Artificial Sequence
  Description of Artificial Sequence: Synthetic oligonucleotide
  Sense strand starting at position 3362 of SEQ ID NO: 1886456
uaggauuuauucgaaggau

SEQ ID NO: 2411113 - RNA, 19 nt, Artificial Sequence
  Description of Artificial Sequence: Synthetic oligonucleotide
  Antisense strand to SEQ ID NO: 2411112
auccuucgaauaaauccua

SEQ ID NO: 2411114 - RNA, 19 nt, Artificial Sequence
  Description of Artificial Sequence: Synthetic oligonucleotide
  Sense strand starting at position 3456 of SEQ ID NO: 1886456
caggauuggcuuggcgaaa

SEQ ID NO: 2411115 - RNA, 19 nt, Artificial Sequence
  Description of Artificial Sequence: Synthetic oligonucleotide
  Antisense strand to SEQ ID NO: 2411114
uuucgccaagccaauccug

SEQ ID NO: 2411116 - RNA, 19 nt, Artificial Sequence
  Description of Artificial Sequence: Synthetic oligonucleotide
  Sense strand starting at position 3761 of SEQ ID NO: 1886456
agaccagguucucugucaa

SEQ ID NO: 2411117 - RNA, 19 nt, Artificial Sequence
  Description of Artificial Sequence: Synthetic oligonucleotide
  Antisense strand to SEQ ID NO: 2411116
uugacagagaaccuggucu

SEQ ID NO: 2411118 - RNA, 19 nt, Artificial Sequence
  Description of Artificial Sequence: Synthetic oligonucleotide
  Sense strand starting at position 3804 of SEQ ID NO: 1886456
guccauugauugccaggau

SEQ ID NO: 2411119 - RNA, 19 nt, Artificial Sequence
  Description of Artificial Sequence: Synthetic oligonucleotide
  Antisense strand to SEQ ID NO: 2411118
auccuggcaaucaauggac

SEQ ID NO: 2411120 - RNA, 19 nt, Artificial Sequence
  Description of Artificial Sequence: Synthetic oligonucleotide
  Sense strand starting at position 3959 of SEQ ID NO: 1886456
cugggaagucuguagauuc

SEQ ID NO: 2411121 - RNA, 19 nt, Artificial Sequence
  Description of Artificial Sequence: Synthetic oligonucleotide
  Antisense strand to SEQ ID NO: 2411120
gaaucuacagacuucccag

SEQ ID NO: 2411122 - RNA, 19 nt, Artificial Sequence
  Description of Artificial Sequence: Synthetic oligonucleotide
  Sense strand starting at position 2066 of SEQ ID NO: 1886457
gugucagugcugcugcuua

SEQ ID NO: 2411123 - RNA, 19 nt, Artificial Sequence
  Description of Artificial Sequence: Synthetic oligonucleotide
  Antisense strand to SEQ ID NO: 2411122
uaagcagcagcacugacac

SEQ ID NO: 2411124 - RNA, 19 nt, Artificial Sequence
  Description of Artificial Sequence: Synthetic oligonucleotide
  Sense strand starting at position 2076 of SEQ ID NO: 1886457
ugcugcuuaguugguaaga

SEQ ID NO: 2411125 - RNA, 19 nt, Artificial Sequence
  Description of Artificial Sequence: Synthetic oligonucleotide
  Antisense strand to SEQ ID NO: 2411124
ucuuaccaacuaagcagca

SEQ ID NO: 2411126 - RNA, 19 nt, Artificial Sequence
  Description of Artificial Sequence: Synthetic oligonucleotide
  Sense strand starting at position 2077 of SEQ ID NO: 1886457
gcugcuuaguugguaagaa

SEQ ID NO: 2411127 - RNA, 19 nt, Artificial Sequence
  Description of Artificial Sequence: Synthetic oligonucleotide
  Antisense strand to SEQ ID NO: 2411126
uucuuaccaacuaagcagc

SEQ ID NO: 2411128 - RNA, 19 nt, Artificial Sequence
  Description of Artificial Sequence: Synthetic oligonucleotide
  Sense strand starting at position 2078 of SEQ ID NO: 1886457
cugcuuaguugguaagaaa

SEQ ID NO: 2411129 - RNA, 19 nt, Artificial Sequence
  Description of Artificial Sequence: Synthetic oligonucleotide
  Antisense strand to SEQ ID NO: 2411128
uuucuuaccaacuaagcag

SEQ ID NO: 2411130 - RNA, 19 nt, Artificial Sequence
  Description of Artificial Sequence: Synthetic oligonucleotide
  Sense strand starting at position 2313 of SEQ ID NO: 1886457
ggcacauguagugagcuaa

SEQ ID NO: 2411131 - RNA, 19 nt, Artificial Sequence
  Description of Artificial Sequence: Synthetic oligonucleotide
  Antisense strand to SEQ ID NO: 2411130
uuagcucacuacaugugcc

SEQ ID NO: 2411132 - RNA, 19 nt, Artificial Sequence
  Description of Artificial Sequence: Synthetic oligonucleotide
  Sense strand starting at position 2505 of SEQ ID NO: 1886457
cuagucagguuccuauaaa

SEQ ID NO: 2411133 - RNA, 19 nt, Artificial Sequence
  Description of Artificial Sequence: Synthetic oligonucleotide
  Antisense strand to SEQ ID NO: 2411132
uuuauaggaaccugacuag

SEQ ID NO: 2411134 - RNA, 19 nt, Artificial Sequence
  Description of Artificial Sequence: Synthetic oligonucleotide
  Sense strand starting at position 2518 of SEQ ID NO: 1886457
uauaaauauugguaggaca

SEQ ID NO: 2411135 - RNA, 19 nt, Artificial Sequence
  Description of Artificial Sequence: Synthetic oligonucleotide
  Antisense strand to SEQ ID NO: 2411134
uguccuaccaauauuuaua

SEQ ID NO: 2411136 - RNA, 19 nt, Artificial Sequence
  Description of Artificial Sequence: Synthetic oligonucleotide
  Sense strand starting at position 2530 of SEQ ID NO: 1886457
uaggacagagcguauuaaa

SEQ ID NO: 2411137 - RNA, 19 nt, Artificial Sequence
  Description of Artificial Sequence: Synthetic oligonucleotide
  Antisense strand to SEQ ID NO: 2411136
uuuaauacgcucuguccua

SEQ ID NO: 2411138 - RNA, 19 nt, Artificial Sequence
  Description of Artificial Sequence: Synthetic oligonucleotide
  Sense strand starting at position 2533 of SEQ ID NO: 1886457
gacagagcguauuaaaguu

SEQ ID NO: 2411139 - RNA, 19 nt, Artificial Sequence
  Description of Artificial Sequence: Synthetic oligonucleotide
  Antisense strand to SEQ ID NO: 2411138
aacuuuaauacgcucuguc

SEQ ID NO: 2411140 - RNA, 19 nt, Artificial Sequence
  Description of Artificial Sequence: Synthetic oligonucleotide
  Sense strand starting at position 2574 of SEQ ID NO: 1886457
caagaaaguugagagagua

SEQ ID NO: 2411141 - RNA, 19 nt, Artificial Sequence
  Description of Artificial Sequence: Synthetic oligonucleotide
  Antisense strand to SEQ ID NO: 2411140
uacucucucaacuuucuug

SEQ ID NO: 2411142 - RNA, 19 nt, Artificial Sequence
  Description of Artificial Sequence: Synthetic oligonucleotide
  Sense strand starting at position 2582 of SEQ ID NO: 1886457
uugagagaguaacaugaau

SEQ ID NO: 2411143 - RNA, 19 nt, Artificial Sequence
  Description of Artificial Sequence: Synthetic oligonucleotide
  Antisense strand to SEQ ID NO: 2411142
auucauguuacucucucaa

SEQ ID NO: 2411144 - RNA, 19 nt, Artificial Sequence
  Description of Artificial Sequence: Synthetic oligonucleotide
  Sense strand starting at position 2865 of SEQ ID NO: 1886457
caauuaguguuaucugcgu

SEQ ID NO: 2411145 - RNA, 19 nt, Artificial Sequence
  Description of Artificial Sequence: Synthetic oligonucleotide
  Antisense strand to SEQ ID NO: 2411144
acgcagauaacacuaauug

SEQ ID NO: 2411146 - RNA, 19 nt, Artificial Sequence
  Description of Artificial Sequence: Synthetic oligonucleotide
  Sense strand starting at position 2867 of SEQ ID NO: 1886457
auuaguguuaucugcguag

SEQ ID NO: 2411147 - RNA, 19 nt, Artificial Sequence
  Description of Artificial Sequence: Synthetic oligonucleotide
  Antisense strand to SEQ ID NO: 2411146
cuacgcagauaacacuaau

SEQ ID NO: 2411148 - RNA, 19 nt, Artificial Sequence
  Description of Artificial Sequence: Synthetic oligonucleotide
  Sense strand starting at position 2893 of SEQ ID NO: 1886457
ggcagcagaucucauugau

SEQ ID NO: 2411149 - RNA, 19 nt, Artificial Sequence
  Description of Artificial Sequence: Synthetic oligonucleotide
  Antisense strand to SEQ ID NO: 2411148
aucaaugagaucugcugcc

SEQ ID NO: 2411150 - RNA, 19 nt, Artificial Sequence
  Description of Artificial Sequence: Synthetic oligonucleotide
  Sense strand starting at position 2896 of SEQ ID NO: 1886457
agcagaucucauugaucug

SEQ ID NO: 2411151 - RNA, 19 nt, Artificial Sequence
  Description of Artificial Sequence: Synthetic oligonucleotide
  Antisense strand to SEQ ID NO: 2411150
cagaucaaugagaucugcu

SEQ ID NO: 2411152 - RNA, 19 nt, Artificial Sequence
  Description of Artificial Sequence: Synthetic oligonucleotide
  Sense strand starting at position 2930 of SEQ ID NO: 1886457
guggguugguccaaguuga

SEQ ID NO: 2411153 - RNA, 19 nt, Artificial Sequence
  Description of Artificial Sequence: Synthetic oligonucleotide
  Antisense strand to SEQ ID NO: 2411152
ucaacuuggaccaacccac

SEQ ID NO: 2411154 - RNA, 19 nt, Artificial Sequence
  Description of Artificial Sequence: Synthetic oligonucleotide
  Sense strand starting at position 3042 of SEQ ID NO: 1886457
acagguaucuuagaugcau

SEQ ID NO: 2411155 - RNA, 19 nt, Artificial Sequence
  Description of Artificial Sequence: Synthetic oligonucleotide
  Antisense strand to SEQ ID NO: 2411154
augcaucuaagauaccugu

SEQ ID NO: 2411156 - RNA, 19 nt, Artificial Sequence
  Description of Artificial Sequence: Synthetic oligonucleotide
  Sense strand starting at position 3170 of SEQ ID NO: 1886457
uuuccugcauugugacaau

SEQ ID NO: 2411157 - RNA, 19 nt, Artificial Sequence
  Description of Artificial Sequence: Synthetic oligonucleotide
  Antisense strand to SEQ ID NO: 2411156
auugucacaaugcaggaaa

SEQ ID NO: 2411158 - RNA, 19 nt, Artificial Sequence
  Description of Artificial Sequence: Synthetic oligonucleotide
  Sense strand starting at position 3173 of SEQ ID NO: 1886457
ccugcauugugacaauaga

SEQ ID NO: 2411159 - RNA, 19 nt, Artificial Sequence
  Description of Artificial Sequence: Synthetic oligonucleotide
  Antisense strand to SEQ ID NO: 2411158
ucuauugucacaaugcagg

SEQ ID NO: 2411160 - RNA, 19 nt, Artificial Sequence
  Description of Artificial Sequence: Synthetic oligonucleotide
  Sense strand starting at position 3224 of SEQ ID NO: 1886457
ucucuugucucuuauggaa

SEQ ID NO: 2411161 - RNA, 19 nt, Artificial Sequence
  Description of Artificial Sequence: Synthetic oligonucleotide
  Antisense strand to SEQ ID NO: 2411160
uuccauaagagacaagaga

SEQ ID NO: 2411162 - RNA, 19 nt, Artificial Sequence
  Description of Artificial Sequence: Synthetic oligonucleotide
  Sense strand starting at position 3241 of SEQ ID NO: 1886457
aagccagaguguucucuuu

SEQ ID NO: 2411163 - RNA, 19 nt, Artificial Sequence
  Description of Artificial Sequence: Synthetic oligonucleotide
  Antisense strand to SEQ ID NO: 2411162
aaagagaacacucuggcuu

SEQ ID NO: 2411164 - RNA, 19 nt, Artificial Sequence
  Description of Artificial Sequence: Synthetic oligonucleotide
  Sense strand starting at position 3784 of SEQ ID NO: 1886457
cucuguaaauaggcaaaga

SEQ ID NO: 2411165 - RNA, 19 nt, Artificial Sequence
  Description of Artificial Sequence: Synthetic oligonucleotide
  Antisense strand to SEQ ID NO: 2411164
ucuuugccuauuuacagag

SEQ ID NO: 2411166 - RNA, 19 nt, Artificial Sequence
  Description of Artificial Sequence: Synthetic oligonucleotide
  Sense strand starting at position 108 of SEQ ID NO: 1886458
uauuucgagcuuuggugua

SEQ ID NO: 2411167 - RNA, 19 nt, Artificial Sequence
  Description of Artificial Sequence: Synthetic oligonucleotide
  Antisense strand to SEQ ID NO: 2411166
uacaccaaagcucgaaaua

SEQ ID NO: 2411168 - RNA, 19 nt, Artificial Sequence
  Description of Artificial Sequence: Synthetic oligonucleotide
  Sense strand starting at position 294 of SEQ ID NO: 1886458
guaaucggcggauaauaau

SEQ ID NO: 2411169 - RNA, 19 nt, Artificial Sequence
  Description of Artificial Sequence: Synthetic oligonucleotide
  Antisense strand to SEQ ID NO: 2411168
auuauuauccgccgauuac

SEQ ID NO: 2411170 - RNA, 19 nt, Artificial Sequence
  Description of Artificial Sequence: Synthetic oligonucleotide
  Sense strand starting at position 302 of SEQ ID NO: 1886458
cggauaauaauaggucacu

SEQ ID NO: 2411171 - RNA, 19 nt, Artificial Sequence
  Description of Artificial Sequence: Synthetic oligonucleotide
  Antisense strand to SEQ ID NO: 2411170
agugaccuauuauuauccg

SEQ ID NO: 2411172 - RNA, 19 nt, Artificial Sequence
  Description of Artificial Sequence: Synthetic oligonucleotide
  Sense strand starting at position 362 of SEQ ID NO: 1886458
ugcuaauugcgggauaaug

SEQ ID NO: 2411173 - RNA, 19 nt, Artificial Sequence
  Description of Artificial Sequence: Synthetic oligonucleotide
  Antisense strand to SEQ ID NO: 2411172
cauuaucccgcaauuagca

SEQ ID NO: 2411174 - RNA, 19 nt, Artificial Sequence
  Description of Artificial Sequence: Synthetic oligonucleotide
  Sense strand starting at position 364 of SEQ ID NO: 1886458
cuaauugcgggauaaugua

SEQ ID NO: 2411175 - RNA, 19 nt, Artificial Sequence
  Description of Artificial Sequence: Synthetic oligonucleotide
  Antisense strand to SEQ ID NO: 2411174
uacauuaucccgcaauuag

SEQ ID NO: 2411176 - RNA, 19 nt, Artificial Sequence
  Description of Artificial Sequence: Synthetic oligonucleotide
  Sense strand starting at position 404 of SEQ ID NO: 1886458
auagaauuagacugagcau

SEQ ID NO: 2411177 - RNA, 19 nt, Artificial Sequence
  Description of Artificial Sequence: Synthetic oligonucleotide
  Antisense strand to SEQ ID NO: 2411176
augcucagucuaauucuau

SEQ ID NO: 2411178 - RNA, 19 nt, Artificial Sequence
  Description of Artificial Sequence: Synthetic oligonucleotide
  Sense strand starting at position 539 of SEQ ID NO: 1886458
uacagaggaucuuugguau

SEQ ID NO: 2411179 - RNA, 19 nt, Artificial Sequence
  Description of Artificial Sequence: Synthetic oligonucleotide
  Antisense strand to SEQ ID NO: 2411178
auaccaaagauccucugua

SEQ ID NO: 2411180 - RNA, 19 nt, Artificial Sequence
  Description of Artificial Sequence: Synthetic oligonucleotide
  Sense strand starting at position 542 of SEQ ID NO: 1886458
agaggaucuuugguauucu

SEQ ID NO: 2411181 - RNA, 19 nt, Artificial Sequence
  Description of Artificial Sequence: Synthetic oligonucleotide
  Antisense strand to SEQ ID NO: 2411180
agaauaccaaagauccucu

SEQ ID NO: 2411182 - RNA, 19 nt, Artificial Sequence
  Description of Artificial Sequence: Synthetic oligonucleotide
  Sense strand starting at position 550 of SEQ ID NO: 1886458
uuugguauucuugauguca

SEQ ID NO: 2411183 - RNA, 19 nt, Artificial Sequence
  Description of Artificial Sequence: Synthetic oligonucleotide
  Antisense strand to SEQ ID NO: 2411182
ugacaucaagaauaccaaa

SEQ ID NO: 2411184 - RNA, 19 nt, Artificial Sequence
  Description of Artificial Sequence: Synthetic oligonucleotide
  Sense strand starting at position 1196 of SEQ ID NO: 1886458
uggcaaagucaggagcuau

SEQ ID NO: 2411185 - RNA, 19 nt, Artificial Sequence
  Description of Artificial Sequence: Synthetic oligonucleotide
  Antisense strand to SEQ ID NO: 2411184
auagcuccugacuuugcca

SEQ ID NO: 2411186 - RNA, 19 nt, Artificial Sequence
  Description of Artificial Sequence: Synthetic oligonucleotide
  Sense strand starting at position 1323 of SEQ ID NO: 1886458
uauuguaaguuaucuggaa

SEQ ID NO: 2411187 - RNA, 19 nt, Artificial Sequence
  Description of Artificial Sequence: Synthetic oligonucleotide
  Antisense strand to SEQ ID NO: 2411186
uuccagauaacuuacaaua

SEQ ID NO: 2411188 - RNA, 19 nt, Artificial Sequence
  Description of Artificial Sequence: Synthetic oligonucleotide
  Sense strand starting at position 1324 of SEQ ID NO: 1886458
auuguaaguuaucuggaaa

SEQ ID NO: 2411189 - RNA, 19 nt, Artificial Sequence
  Description of Artificial Sequence: Synthetic oligonucleotide
  Antisense strand to SEQ ID NO: 2411188
uuuccagauaacuuacaau

SEQ ID NO: 2411190 - RNA, 19 nt, Artificial Sequence
  Description of Artificial Sequence: Synthetic oligonucleotide
  Sense strand starting at position 1325 of SEQ ID NO: 1886458
uuguaaguuaucuggaaag

SEQ ID NO: 2411191 - RNA, 19 nt, Artificial Sequence
  Description of Artificial Sequence: Synthetic oligonucleotide
  Antisense strand to SEQ ID NO: 2411190
cuuuccagauaacuuacaa

SEQ ID NO: 2411192 - RNA, 19 nt, Artificial Sequence
  Description of Artificial Sequence: Synthetic oligonucleotide
  Sense strand starting at position 1461 of SEQ ID NO: 1886458
gaaggauguguuugcaaga

SEQ ID NO: 2411193 - RNA, 19 nt, Artificial Sequence
  Description of Artificial Sequence: Synthetic oligonucleotide
  Antisense strand to SEQ ID NO: 2411192
ucuugcaaacacauccuuc

SEQ ID NO: 2411194 - RNA, 19 nt, Artificial Sequence
  Description of Artificial Sequence: Synthetic oligonucleotide
  Sense strand starting at position 1462 of SEQ ID NO: 1886458
aaggauguguuugcaagag

SEQ ID NO: 2411195 - RNA, 19 nt, Artificial Sequence
  Description of Artificial Sequence: Synthetic oligonucleotide
  Antisense strand to SEQ ID NO: 2411194
cucuugcaaacacauccuu

SEQ ID NO: 2411196 - RNA, 19 nt, Artificial Sequence
  Description of Artificial Sequence: Synthetic oligonucleotide
  Sense strand starting at position 1506 of SEQ ID NO: 1886458
guguauguccgucuuagca

SEQ ID NO: 2411197 - RNA, 19 nt, Artificial Sequence
  Description of Artificial Sequence: Synthetic oligonucleotide
  Antisense strand to SEQ ID NO: 2411196
ugcuaagacggacauacac

SEQ ID NO: 2411198 - RNA, 19 nt, Artificial Sequence
  Description of Artificial Sequence: Synthetic oligonucleotide
  Sense strand starting at position 1514 of SEQ ID NO: 1886458
ccgucuuagcagucagcau

SEQ ID NO: 2411199 - RNA, 19 nt, Artificial Sequence
  Description of Artificial Sequence: Synthetic oligonucleotide
  Antisense strand to SEQ ID NO: 2411198
augcugacugcuaagacgg

SEQ ID NO: 2411200 - RNA, 19 nt, Artificial Sequence
  Description of Artificial Sequence: Synthetic oligonucleotide
  Sense strand starting at position 1525 of SEQ ID NO: 1886458
gucagcaucccucauggau

SEQ ID NO: 2411201 - RNA, 19 nt, Artificial Sequence
  Description of Artificial Sequence: Synthetic oligonucleotide
  Antisense strand to SEQ ID NO: 2411200
auccaugagggaugcugac

SEQ ID NO: 2411202 - RNA, 19 nt, Artificial Sequence
  Description of Artificial Sequence: Synthetic oligonucleotide
  Sense strand starting at position 1724 of SEQ ID NO: 1886458
augugugaagauggaaauu

SEQ ID NO: 2411203 - RNA, 19 nt, Artificial Sequence
  Description of Artificial Sequence: Synthetic oligonucleotide
  Antisense strand to SEQ ID NO: 2411202
aauuuccaucuucacacau

SEQ ID NO: 2411204 - RNA, 19 nt, Artificial Sequence
  Description of Artificial Sequence: Synthetic oligonucleotide
  Sense strand starting at position 1733 of SEQ ID NO: 1886458
gauggaaauuaugcucaug

SEQ ID NO: 2411205 - RNA, 19 nt, Artificial Sequence
  Description of Artificial Sequence: Synthetic oligonucleotide
  Antisense strand to SEQ ID NO: 2411204
caugagcauaauuuccauc

SEQ ID NO: 2411206 - RNA, 19 nt, Artificial Sequence
  Description of Artificial Sequence: Synthetic oligonucleotide
  Sense strand starting at position 1735 of SEQ ID NO: 1886458
uggaaauuaugcucaugac

SEQ ID NO: 2411207 - RNA, 19 nt, Artificial Sequence
  Description of Artificial Sequence: Synthetic oligonucleotide
  Antisense strand to SEQ ID NO: 2411206
gucaugagcauaauuucca

SEQ ID NO: 2411208 - RNA, 19 nt, Artificial Sequence
  Description of Artificial Sequence: Synthetic oligonucleotide
  Sense strand starting at position 1808 of SEQ ID NO: 1886458
ugagaaacagccuguauua

SEQ ID NO: 2411209 - RNA, 19 nt, Artificial Sequence
  Description of Artificial Sequence: Synthetic oligonucleotide
  Antisense strand to SEQ ID NO: 2411208
uaauacaggcuguuucuca

SEQ ID NO: 2411210 - RNA, 19 nt, Artificial Sequence
  Description of Artificial Sequence: Synthetic oligonucleotide
  Sense strand starting at position 1810 of SEQ ID NO: 1886458
agaaacagccuguauuaau

SEQ ID NO: 2411211 - RNA, 19 nt, Artificial Sequence
  Description of Artificial Sequence: Synthetic oligonucleotide
  Antisense strand to SEQ ID NO: 2411210
auuaauacaggcuguuucu

SEQ ID NO: 2411212 - RNA, 19 nt, Artificial Sequence
  Description of Artificial Sequence: Synthetic oligonucleotide
  Sense strand starting at position 2499 of SEQ ID NO: 1886458
gagggaggugagugugaau

SEQ ID NO: 2411213 - RNA, 19 nt, Artificial Sequence
  Description of Artificial Sequence: Synthetic oligonucleotide
  Antisense strand to SEQ ID NO: 2411212
auucacacucaccucccuc

SEQ ID NO: 2411214 - RNA, 19 nt, Artificial Sequence
  Description of Artificial Sequence: Synthetic oligonucleotide
  Sense strand starting at position 2549 of SEQ ID NO: 1886458
ggcgcuguuggugcuagaa

SEQ ID NO: 2411215 - RNA, 19 nt, Artificial Sequence
  Description of Artificial Sequence: Synthetic oligonucleotide
  Antisense strand to SEQ ID NO: 2411214
uucuagcaccaacagcgcc

SEQ ID NO: 2411216 - RNA, 19 nt, Artificial Sequence
  Description of Artificial Sequence: Synthetic oligonucleotide
  Sense strand starting at position 2552 of SEQ ID NO: 1886458
gcuguuggugcuagaagga

SEQ ID NO: 2411217 - RNA, 19 nt, Artificial Sequence
  Description of Artificial Sequence: Synthetic oligonucleotide
  Antisense strand to SEQ ID NO: 2411216
uccuucuagcaccaacagc

SEQ ID NO: 2411218 - RNA, 19 nt, Artificial Sequence
  Description of Artificial Sequence: Synthetic oligonucleotide
  Sense strand starting at position 2853 of SEQ ID NO: 1886458
cacuaaggucugggugaca

SEQ ID NO: 2411219 - RNA, 19 nt, Artificial Sequence
  Description of Artificial Sequence: Synthetic oligonucleotide
  Antisense strand to SEQ ID NO: 2411218
ugucacccagaccuuagug

SEQ ID NO: 2411220 - RNA, 19 nt, Artificial Sequence
  Description of Artificial Sequence: Synthetic oligonucleotide
  Sense strand starting at position 2968 of SEQ ID NO: 1886458
agaggagauuguguucuuu

SEQ ID NO: 2411221 - RNA, 19 nt, Artificial Sequence
  Description of Artificial Sequence: Synthetic oligonucleotide
  Antisense strand to SEQ ID NO: 2411220
aaagaacacaaucuccucu

SEQ ID NO: 2411222 - RNA, 19 nt, Artificial Sequence
  Description of Artificial Sequence: Synthetic oligonucleotide
  Sense strand starting at position 3128 of SEQ ID NO: 1886458
gugauaugagcugagcaga

SEQ ID NO: 2411223 - RNA, 19 nt, Artificial Sequence
  Description of Artificial Sequence: Synthetic oligonucleotide
  Antisense strand to SEQ ID NO: 2411222
ucugcucagcucauaucac

SEQ ID NO: 2411224 - RNA, 19 nt, Artificial Sequence
  Description of Artificial Sequence: Synthetic oligonucleotide
  Sense strand starting at position 3226 of SEQ ID NO: 1886458
ggcacugagagcuaacuca

SEQ ID NO: 2411225 - RNA, 19 nt, Artificial Sequence
  Description of Artificial Sequence: Synthetic oligonucleotide
  Antisense strand to SEQ ID NO: 2411224
ugaguuagcucucagugcc

SEQ ID NO: 2411226 - RNA, 19 nt, Artificial Sequence
  Description of Artificial Sequence: Synthetic oligonucleotide
  Sense strand starting at position 3306 of SEQ ID NO: 1886458
ucaggugaguggucaauga

SEQ ID NO: 2411227 - RNA, 19 nt, Artificial Sequence
  Description of Artificial Sequence: Synthetic oligonucleotide
  Antisense strand to SEQ ID NO: 2411226
ucauugaccacucaccuga

SEQ ID NO: 2411228 - RNA, 19 nt, Artificial Sequence
  Description of Artificial Sequence: Synthetic oligonucleotide
  Sense strand starting at position 3343 of SEQ ID NO: 1886458
agccuauagguccauaagu

SEQ ID NO: 2411229 - RNA, 19 nt, Artificial Sequence
  Description of Artificial Sequence: Synthetic oligonucleotide
  Antisense strand to SEQ ID NO: 2411228
acuuauggaccuauaggcu

SEQ ID NO: 2411230 - RNA, 19 nt, Artificial Sequence
  Description of Artificial Sequence: Synthetic oligonucleotide
  Sense strand starting at position 3345 of SEQ ID NO: 1886458
ccuauagguccauaaguag

SEQ ID NO: 2411231 - RNA, 19 nt, Artificial Sequence
  Description of Artificial Sequence: Synthetic oligonucleotide
  Antisense strand to SEQ ID NO: 2411230
cuacuuauggaccuauagg

SEQ ID NO: 2411232 - RNA, 19 nt, Artificial Sequence
  Description of Artificial Sequence: Synthetic oligonucleotide
  Sense strand starting at position 3417 of SEQ ID NO: 1886458
gaccgaauucuagaagcca

SEQ ID NO: 2411233 - RNA, 19 nt, Artificial Sequence
  Description of Artificial Sequence: Synthetic oligonucleotide
  Antisense strand to SEQ ID NO: 2411232
uggcuucuagaauucgguc

SEQ ID NO: 2411234 - RNA, 19 nt, Artificial Sequence
  Description of Artificial Sequence: Synthetic oligonucleotide
  Sense strand starting at position 3520 of SEQ ID NO: 1886458
aguggagggucccuaagau

SEQ ID NO: 2411235 - RNA, 19 nt, Artificial Sequence
  Description of Artificial Sequence: Synthetic oligonucleotide
  Antisense strand to SEQ ID NO: 2411234
aucuuagggacccuccacu

SEQ ID NO: 2411236 - RNA, 19 nt, Artificial Sequence
  Description of Artificial Sequence: Synthetic oligonucleotide
  Sense strand starting at position 3542 of SEQ ID NO: 1886458
acaacagaguuacucagua

SEQ ID NO: 2411237 - RNA, 19 nt, Artificial Sequence
  Description of Artificial Sequence: Synthetic oligonucleotide
  Antisense strand to SEQ ID NO: 2411236
uacugaguaacucuguugu

SEQ ID NO: 2411238 - RNA, 19 nt, Artificial Sequence
  Description of Artificial Sequence: Synthetic oligonucleotide
  Sense strand starting at position 3546 of SEQ ID NO: 1886458
cagaguuacucaguaaacg

SEQ ID NO: 2411239 - RNA, 19 nt, Artificial Sequence
  Description of Artificial Sequence: Synthetic oligonucleotide
  Antisense strand to SEQ ID NO: 2411238
cguuuacugaguaacucug

SEQ ID NO: 2411240 - RNA, 19 nt, Artificial Sequence
  Description of Artificial Sequence: Synthetic oligonucleotide
  Sense strand starting at position 3547 of SEQ ID NO: 1886458
agaguuacucaguaaacgu

SEQ ID NO: 2411241 - RNA, 19 nt, Artificial Sequence
  Description of Artificial Sequence: Synthetic oligonucleotide
  Antisense strand to SEQ ID NO: 2411240
acguuuacugaguaacucu

SEQ ID NO: 2411242 - RNA, 19 nt, Artificial Sequence
  Description of Artificial Sequence: Synthetic oligonucleotide
  Sense strand starting at position 3668 of SEQ ID NO: 1886458
uugagcucuggucaaugga

SEQ ID NO: 2411243 - RNA, 19 nt, Artificial Sequence
  Description of Artificial Sequence: Synthetic oligonucleotide
  Antisense strand to SEQ ID NO: 2411242
uccauugaccagagcucaa

SEQ ID NO: 2411244 - RNA, 19 nt, Artificial Sequence
  Description of Artificial Sequence: Synthetic oligonucleotide
  Sense strand starting at position 3687 of SEQ ID NO: 1886458
agacucauuugugaagaau

SEQ ID NO: 2411245 - RNA, 19 nt, Artificial Sequence
  Description of Artificial Sequence: Synthetic oligonucleotide
  Antisense strand to SEQ ID NO: 2411244
auucuucacaaaugagucu

SEQ ID NO: 2411246 - RNA, 19 nt, Artificial Sequence
  Description of Artificial Sequence: Synthetic oligonucleotide
  Sense strand starting at position 98 of SEQ ID NO: 1886459
agggucuccagguacuauu

SEQ ID NO: 2411247 - RNA, 19 nt, Artificial Sequence
  Description of Artificial Sequence: Synthetic oligonucleotide
  Antisense strand to SEQ ID NO: 2411246
aauaguaccuggagacccu

SEQ ID NO: 2411248 - RNA, 19 nt, Artificial Sequence
  Description of Artificial Sequence: Synthetic oligonucleotide
  Sense strand starting at position 159 of SEQ ID NO: 1886459
acgaaacaguucuuguaag

SEQ ID NO: 2411249 - RNA, 19 nt, Artificial Sequence
  Description of Artificial Sequence: Synthetic oligonucleotide
  Antisense strand to SEQ ID NO: 2411248
cuuacaagaacuguuucgu

SEQ ID NO: 2411250 - RNA, 19 nt, Artificial Sequence
  Description of Artificial Sequence: Synthetic oligonucleotide
  Sense strand starting at position 383 of SEQ ID NO: 1886459
caugacuagcuuugagauc

SEQ ID NO: 2411251 - RNA, 19 nt, Artificial Sequence
  Description of Artificial Sequence: Synthetic oligonucleotide
  Antisense strand to SEQ ID NO: 2411250
gaucucaaagcuagucaug

SEQ ID NO: 2411252 - RNA, 19 nt, Artificial Sequence
  Description of Artificial Sequence: Synthetic oligonucleotide
  Sense strand starting at position 392 of SEQ ID NO: 1886459
cuuugagaucuggguacca

SEQ ID NO: 2411253 - RNA, 19 nt, Artificial Sequence
  Description of Artificial Sequence: Synthetic oligonucleotide
  Antisense strand to SEQ ID NO: 2411252
ugguacccagaucucaaag

SEQ ID NO: 2411254 - RNA, 19 nt, Artificial Sequence
  Description of Artificial Sequence: Synthetic oligonucleotide
  Sense strand starting at position 433 of SEQ ID NO: 1886459
ucaugaaaguuggccaacu

SEQ ID NO: 2411255 - RNA, 19 nt, Artificial Sequence
  Description of Artificial Sequence: Synthetic oligonucleotide
  Antisense strand to SEQ ID NO: 2411254
aguuggccaacuuucauga

SEQ ID NO: 2411256 - RNA, 19 nt, Artificial Sequence
  Description of Artificial Sequence: Synthetic oligonucleotide
  Sense strand starting at position 434 of SEQ ID NO: 1886459
caugaaaguuggccaacua

SEQ ID NO: 2411257 - RNA, 19 nt, Artificial Sequence
  Description of Artificial Sequence: Synthetic oligonucleotide
  Antisense strand to SEQ ID NO: 2411256
uaguuggccaacuuucaug

SEQ ID NO: 2411258 - RNA, 19 nt, Artificial Sequence
  Description of Artificial Sequence: Synthetic oligonucleotide
  Sense strand starting at position 549 of SEQ ID NO: 1886459
caagaaauguccuccaggu

SEQ ID NO: 2411259 - RNA, 19 nt, Artificial Sequence
  Description of Artificial Sequence: Synthetic oligonucleotide
  Antisense strand to SEQ ID NO: 2411258
accuggaggacauuucuug

SEQ ID NO: 2411260 - RNA, 19 nt, Artificial Sequence
  Description of Artificial Sequence: Synthetic oligonucleotide
  Sense strand starting at position 662 of SEQ ID NO: 1886459
agcacaguucuuggcauuu

SEQ ID NO: 2411261 - RNA, 19 nt, Artificial Sequence
  Description of Artificial Sequence: Synthetic oligonucleotide
  Antisense strand to SEQ ID NO: 2411260
aaaugccaagaacugugcu

SEQ ID NO: 2411262 - RNA, 19 nt, Artificial Sequence
  Description of Artificial Sequence: Synthetic oligonucleotide
  Sense strand starting at position 671 of SEQ ID NO: 1886459
cuuggcauuucggaggaau

SEQ ID NO: 2411263 - RNA, 19 nt, Artificial Sequence
  Description of Artificial Sequence: Synthetic oligonucleotide
  Antisense strand to SEQ ID NO: 2411262
auuccuccgaaaugccaag

SEQ ID NO: 2411264 - RNA, 19 nt, Artificial Sequence
  Description of Artificial Sequence: Synthetic oligonucleotide
  Sense strand starting at position 682 of SEQ ID NO: 1886459
ggaggaaucugauaaaugu

SEQ ID NO: 2411265 - RNA, 19 nt, Artificial Sequence
  Description of Artificial Sequence: Synthetic oligonucleotide
  Antisense strand to SEQ ID NO: 2411264
acauuuaucagauuccucc

SEQ ID NO: 2411266 - RNA, 19 nt, Artificial Sequence
  Description of Artificial Sequence: Synthetic oligonucleotide
  Sense strand starting at position 726 of SEQ ID NO: 1886459
gguggugauccauagcgga

SEQ ID NO: 2411267 - RNA, 19 nt, Artificial Sequence
  Description of Artificial Sequence: Synthetic oligonucleotide
  Antisense strand to SEQ ID NO: 2411266
uccgcuauggaucaccacc

SEQ ID NO: 2411268 - RNA, 19 nt, Artificial Sequence
  Description of Artificial Sequence: Synthetic oligonucleotide
  Sense strand starting at position 970 of SEQ ID NO: 1886459
gaguauaugaggugccacu

SEQ ID NO: 2411269 - RNA, 19 nt, Artificial Sequence
  Description of Artificial Sequence: Synthetic oligonucleotide
  Antisense strand to SEQ ID NO: 2411268
aguggcaccucauauacuc

SEQ ID NO: 2411270 - RNA, 19 nt, Artificial Sequence
  Description of Artificial Sequence: Synthetic oligonucleotide
  Sense strand starting at position 992 of SEQ ID NO: 1886459
gggcauucccuguuucguu

SEQ ID NO: 2411271 - RNA, 19 nt, Artificial Sequence
  Description of Artificial Sequence: Synthetic oligonucleotide
  Antisense strand to SEQ ID NO: 2411270
aacgaaacagggaaugccc

SEQ ID NO: 2411272 - RNA, 19 nt, Artificial Sequence
  Description of Artificial Sequence: Synthetic oligonucleotide
  Sense strand starting at position 1532 of SEQ ID NO: 1886459
uuugcauaucagugaagug

SEQ ID NO: 2411273 - RNA, 19 nt, Artificial Sequence
  Description of Artificial Sequence: Synthetic oligonucleotide
  Antisense strand to SEQ ID NO: 2411272
cacuucacugauaugcaaa

SEQ ID NO: 2411274 - RNA, 19 nt, Artificial Sequence
  Description of Artificial Sequence: Synthetic oligonucleotide
  Sense strand starting at position 1542 of SEQ ID NO: 1886459
agugaagugcgaugauaaa

SEQ ID NO: 2411275 - RNA, 19 nt, Artificial Sequence
  Description of Artificial Sequence: Synthetic oligonucleotide
  Antisense strand to SEQ ID NO: 2411274
uuuaucaucgcacuucacu

SEQ ID NO: 2411276 - RNA, 19 nt, Artificial Sequence
  Description of Artificial Sequence: Synthetic oligonucleotide
  Sense strand starting at position 1616 of SEQ ID NO: 1886459
uccguagcucucuagacua

SEQ ID NO: 2411277 - RNA, 19 nt, Artificial Sequence
  Description of Artificial Sequence: Synthetic oligonucleotide
  Antisense strand to SEQ ID NO: 2411276
uagucuagagagcuacgga

SEQ ID NO: 2411278 - RNA, 19 nt, Artificial Sequence
  Description of Artificial Sequence: Synthetic oligonucleotide
  Sense strand starting at position 1618 of SEQ ID NO: 1886459
cguagcucucuagacuaua

SEQ ID NO: 2411279 - RNA, 19 nt, Artificial Sequence
  Description of Artificial Sequence: Synthetic oligonucleotide
  Antisense strand to SEQ ID NO: 2411278
uauagucuagagagcuacg

SEQ ID NO: 2411280 - RNA, 19 nt, Artificial Sequence
  Description of Artificial Sequence: Synthetic oligonucleotide
  Sense strand starting at position 1663 of SEQ ID NO: 1886459
cugugacuauuaucaugau

SEQ ID NO: 2411281 - RNA, 19 nt, Artificial Sequence
  Description of Artificial Sequence: Synthetic oligonucleotide
  Antisense strand to SEQ ID NO: 2411280
aucaugauaauagucacag

SEQ ID NO: 2411282 - RNA, 19 nt, Artificial Sequence
  Description of Artificial Sequence: Synthetic oligonucleotide
  Sense strand starting at position 1867 of SEQ ID NO: 1886459
ggguguaauccaugucugg

SEQ ID NO: 2411283 - RNA, 19 nt, Artificial Sequence
  Description of Artificial Sequence: Synthetic oligonucleotide
  Antisense strand to SEQ ID NO: 2411282
ccagacauggauuacaccc

SEQ ID NO: 2411284 - RNA, 19 nt, Artificial Sequence
  Description of Artificial Sequence: Synthetic oligonucleotide
  Sense strand starting at position 1870 of SEQ ID NO: 1886459
uguaauccaugucuggaga

SEQ ID NO: 2411285 - RNA, 19 nt, Artificial Sequence
  Description of Artificial Sequence: Synthetic oligonucleotide
  Antisense strand to SEQ ID NO: 2411284
ucuccagacauggauuaca

SEQ ID NO: 2411286 - RNA, 19 nt, Artificial Sequence
  Description of Artificial Sequence: Synthetic oligonucleotide
  Sense strand starting at position 1871 of SEQ ID NO: 1886459
guaauccaugucuggagau

SEQ ID NO: 2411287 - RNA, 19 nt, Artificial Sequence
  Description of Artificial Sequence: Synthetic oligonucleotide
  Antisense strand to SEQ ID NO: 2411286
aucuccagacauggauuac

SEQ ID NO: 2411288 - RNA, 19 nt, Artificial Sequence
  Description of Artificial Sequence: Synthetic oligonucleotide
  Sense strand starting at position 1991 of SEQ ID NO: 1886459
gaucuaauauguccaggcu

SEQ ID NO: 2411289 - RNA, 19 nt, Artificial Sequence
  Description of Artificial Sequence: Synthetic oligonucleotide
  Antisense strand to SEQ ID NO: 2411288
agccuggacauauuagauc

SEQ ID NO: 2411290 - RNA, 19 nt, Artificial Sequence
  Description of Artificial Sequence: Synthetic oligonucleotide
  Sense strand starting at position 2016 of SEQ ID NO: 1886459
gggaucuguuuauuaagca

SEQ ID NO: 2411291 - RNA, 19 nt, Artificial Sequence
  Description of Artificial Sequence: Synthetic oligonucleotide
  Antisense strand to SEQ ID NO: 2411290
ugcuuaauaaacagauccc

SEQ ID NO: 2411292 - RNA, 19 nt, Artificial Sequence
  Description of Artificial Sequence: Synthetic oligonucleotide
  Sense strand starting at position 2603 of SEQ ID NO: 1886459
ggcgguuuccgaagcgaag

SEQ ID NO: 2411293 - RNA, 19 nt, Artificial Sequence
  Description of Artificial Sequence: Synthetic oligonucleotide
  Antisense strand to SEQ ID NO: 2411292
cuucgcuucggaaaccgcc

SEQ ID NO: 2411294 - RNA, 19 nt, Artificial Sequence
  Description of Artificial Sequence: Synthetic oligonucleotide
  Sense strand starting at position 2604 of SEQ ID NO: 1886459
gcgguuuccgaagcgaagu

SEQ ID NO: 2411295 - RNA, 19 nt, Artificial Sequence
  Description of Artificial Sequence: Synthetic oligonucleotide
  Antisense strand to SEQ ID NO: 2411294
acuucgcuucggaaaccgc

SEQ ID NO: 2411296 - RNA, 19 nt, Artificial Sequence
  Description of Artificial Sequence: Synthetic oligonucleotide
  Sense strand starting at position 2696 of SEQ ID NO: 1886459
ggcccucccuccucugaaa

SEQ ID NO: 2411297 - RNA, 19 nt, Artificial Sequence
  Description of Artificial Sequence: Synthetic oligonucleotide
  Antisense strand to SEQ ID NO: 2411296
uuucagaggagggagggcc

SEQ ID NO: 2411298 - RNA, 19 nt, Artificial Sequence
  Description of Artificial Sequence: Synthetic oligonucleotide
  Sense strand starting at position 3412 of SEQ ID NO: 1886459
gugugugauugauugauug

SEQ ID NO: 2411299 - RNA, 19 nt, Artificial Sequence
  Description of Artificial Sequence: Synthetic oligonucleotide
  Antisense strand to SEQ ID NO: 2411298
caaucaaucaaucacacac

SEQ ID NO: 2411300 - RNA, 19 nt, Artificial Sequence
  Description of Artificial Sequence: Synthetic oligonucleotide
  Sense strand starting at position 3498 of SEQ ID NO: 1886459
caguauuaucauuggaaag

SEQ ID NO: 2411301 - RNA, 19 nt, Artificial Sequence
  Description of Artificial Sequence: Synthetic oligonucleotide
  Antisense strand to SEQ ID NO: 2411300
cuuuccaaugauaauacug

SEQ ID NO: 2411302 - RNA, 19 nt, Artificial Sequence
  Description of Artificial Sequence: Synthetic oligonucleotide
  Sense strand starting at position 3526 of SEQ ID NO: 1886459
ugaagaaagagccaguguu

SEQ ID NO: 2411303 - RNA, 19 nt, Artificial Sequence
  Description of Artificial Sequence: Synthetic oligonucleotide
  Antisense strand to SEQ ID NO: 2411302
aacacuggcucuuucuuca

SEQ ID NO: 2411304 - RNA, 19 nt, Artificial Sequence
  Description of Artificial Sequence: Synthetic oligonucleotide
  Sense strand starting at position 3540 of SEQ ID NO: 1886459
guguuuguggaguuuguuu

SEQ ID NO: 2411305 - RNA, 19 nt, Artificial Sequence
  Description of Artificial Sequence: Synthetic oligonucleotide
  Antisense strand to SEQ ID NO: 2411304
aaacaaacuccacaaacac

SEQ ID NO: 2411306 - RNA, 19 nt, Artificial Sequence
  Description of Artificial Sequence: Synthetic oligonucleotide
  Sense strand starting at position 3606 of SEQ ID NO: 1886459
agaagcaaaguuuguugaa

SEQ ID NO: 2411307 - RNA, 19 nt, Artificial Sequence
  Description of Artificial Sequence: Synthetic oligonucleotide
  Antisense strand to SEQ ID NO: 2411306
uucaacaaacuuugcuucu

SEQ ID NO: 2411308 - RNA, 19 nt, Artificial Sequence
  Description of Artificial Sequence: Synthetic oligonucleotide
  Sense strand starting at position 3613 of SEQ ID NO: 1886459
aaguuuguugaacgcugaa

SEQ ID NO: 2411309 - RNA, 19 nt, Artificial Sequence
  Description of Artificial Sequence: Synthetic oligonucleotide
  Antisense strand to SEQ ID NO: 2411308
uucagcguucaacaaacuu

SEQ ID NO: 2411310 - RNA, 19 nt, Artificial Sequence
  Description of Artificial Sequence: Synthetic oligonucleotide
  Sense strand starting at position 3616 of SEQ ID NO: 1886459
uuuguugaacgcugaagau

SEQ ID NO: 2411311 - RNA, 19 nt, Artificial Sequence
  Description of Artificial Sequence: Synthetic oligonucleotide
  Antisense strand to SEQ ID NO: 2411310
aucuucagcguucaacaaa

SEQ ID NO: 2411312 - RNA, 19 nt, Artificial Sequence
  Description of Artificial Sequence: Synthetic oligonucleotide
  Sense strand starting at position 3625 of SEQ ID NO: 1886459
cgcugaagaucaccuugua

SEQ ID NO: 2411313 - RNA, 19 nt, Artificial Sequence
  Description of Artificial Sequence: Synthetic oligonucleotide
  Antisense strand to SEQ ID NO: 2411312
uacaaggugaucuucagcg

SEQ ID NO: 2411314 - RNA, 19 nt, Artificial Sequence
  Description of Artificial Sequence: Synthetic oligonucleotide
  Sense strand starting at position 3628 of SEQ ID NO: 1886459
ugaagaucaccuuguaaag

SEQ ID NO: 2411315 - RNA, 19 nt, Artificial Sequence
  Description of Artificial Sequence: Synthetic oligonucleotide
  Antisense strand to SEQ ID NO: 2411314
cuuuacaaggugaucuuca

SEQ ID NO: 2411316 - RNA, 19 nt, Artificial Sequence
  Description of Artificial Sequence: Synthetic oligonucleotide
  Sense strand starting at position 3646 of SEQ ID NO: 1886459
gguggaguuccucaggcuu

SEQ ID NO: 2411317 - RNA, 19 nt, Artificial Sequence
  Description of Artificial Sequence: Synthetic oligonucleotide
  Antisense strand to SEQ ID NO: 2411316
aagccugaggaacuccacc

SEQ ID NO: 2411318 - RNA, 19 nt, Artificial Sequence
  Description of Artificial Sequence: Synthetic oligonucleotide
  Sense strand starting at position 3944 of SEQ ID NO: 1886459
caggacagaugguauagaa

SEQ ID NO: 2411319 - RNA, 19 nt, Artificial Sequence
  Description of Artificial Sequence: Synthetic oligonucleotide
  Antisense strand to SEQ ID NO: 2411318
uucuauaccaucuguccug

SEQ ID NO: 2411320 - RNA, 19 nt, Artificial Sequence
  Description of Artificial Sequence: Synthetic oligonucleotide
  Sense strand starting at position 3952 of SEQ ID NO: 1886459
augguauagaaacguggua

SEQ ID NO: 2411321 - RNA, 19 nt, Artificial Sequence
  Description of Artificial Sequence: Synthetic oligonucleotide
  Antisense strand to SEQ ID NO: 2411320
uaccacguuucuauaccau

SEQ ID NO: 2411322 - RNA, 19 nt, Artificial Sequence
  Description of Artificial Sequence: Synthetic oligonucleotide
  Sense strand starting at position 3954 of SEQ ID NO: 1886459
gguauagaaacgugguacu

SEQ ID NO: 2411323 - RNA, 19 nt, Artificial Sequence
  Description of Artificial Sequence: Synthetic oligonucleotide
  Antisense strand to SEQ ID NO: 2411322
aguaccacguuucuauacc

SEQ ID NO: 2411324 - RNA, 19 nt, Artificial Sequence
  Description of Artificial Sequence: Synthetic oligonucleotide
  Sense strand starting at position 3964 of SEQ ID NO: 1886459
cgugguacuuugguaaaga

SEQ ID NO: 2411325 - RNA, 19 nt, Artificial Sequence
  Description of Artificial Sequence: Synthetic oligonucleotide
  Antisense strand to SEQ ID NO: 2411324
ucuuuaccaaaguaccacg

SEQ ID NO: 2411326 - RNA, 19 nt, Artificial Sequence
  Description of Artificial Sequence: Synthetic oligonucleotide
  Sense strand starting at position 279 of SEQ ID NO: 1886460
uuuaaaggaguuuggacau

SEQ ID NO: 2411327 - RNA, 19 nt, Artificial Sequence
  Description of Artificial Sequence: Synthetic oligonucleotide
  Antisense strand to SEQ ID NO: 2411326
auguccaaacuccuuuaaa

SEQ ID NO: 2411328 - RNA, 19 nt, Artificial Sequence
  Description of Artificial Sequence: Synthetic oligonucleotide
  Sense strand starting at position 472 of SEQ ID NO: 1886460
agaugauucuuugucuaug

SEQ ID NO: 2411329 - RNA, 19 nt, Artificial Sequence
  Description of Artificial Sequence: Synthetic oligonucleotide
  Antisense strand to SEQ ID NO: 2411328
cauagacaaagaaucaucu

SEQ ID NO: 2411330 - RNA, 19 nt, Artificial Sequence
  Description of Artificial Sequence: Synthetic oligonucleotide
  Sense strand starting at position 640 of SEQ ID NO: 1886460
cuugcaagaucgguaaaca

SEQ ID NO: 2411331 - RNA, 19 nt, Artificial Sequence
  Description of Artificial Sequence: Synthetic oligonucleotide
  Antisense strand to SEQ ID NO: 2411330
uguuuaccgaucuugcaag

SEQ ID NO: 2411332 - RNA, 19 nt, Artificial Sequence
  Description of Artificial Sequence: Synthetic oligonucleotide
  Sense strand starting at position 641 of SEQ ID NO: 1886460
uugcaagaucgguaaacau

SEQ ID NO: 2411333 - RNA, 19 nt, Artificial Sequence
  Description of Artificial Sequence: Synthetic oligonucleotide
  Antisense strand to SEQ ID NO: 2411332
auguuuaccgaucuugcaa

SEQ ID NO: 2411334 - RNA, 19 nt, Artificial Sequence
  Description of Artificial Sequence: Synthetic oligonucleotide
  Sense strand starting at position 672 of SEQ ID NO: 1886460
caagcagagguggguuaaa

SEQ ID NO: 2411335 - RNA, 19 nt, Artificial Sequence
  Description of Artificial Sequence: Synthetic oligonucleotide
  Antisense strand to SEQ ID NO: 2411334
uuuaacccaccucugcuug

SEQ ID NO: 2411336 - RNA, 19 nt, Artificial Sequence
  Description of Artificial Sequence: Synthetic oligonucleotide
  Sense strand starting at position 840 of SEQ ID NO: 1886460
cucccuggacuaugaauau

SEQ ID NO: 2411337 - RNA, 19 nt, Artificial Sequence
  Description of Artificial Sequence: Synthetic oligonucleotide
  Antisense strand to SEQ ID NO: 2411336
auauucauaguccagggag

SEQ ID NO: 2411338 - RNA, 19 nt, Artificial Sequence
  Description of Artificial Sequence: Synthetic oligonucleotide
  Sense strand starting at position 884 of SEQ ID NO: 1886460
ugcauugauuugccacacu

SEQ ID NO: 2411339 - RNA, 19 nt, Artificial Sequence
  Description of Artificial Sequence: Synthetic oligonucleotide
  Antisense strand to SEQ ID NO: 2411338
aguguggcaaaucaaugca

SEQ ID NO: 2411340 - RNA, 19 nt, Artificial Sequence
  Description of Artificial Sequence: Synthetic oligonucleotide
  Sense strand starting at position 941 of SEQ ID NO: 1886460
auuacugguccugggauga

SEQ ID NO: 2411341 - RNA, 19 nt, Artificial Sequence
  Description of Artificial Sequence: Synthetic oligonucleotide
  Antisense strand to SEQ ID NO: 2411340
ucaucccaggaccaguaau

SEQ ID NO: 2411342 - RNA, 19 nt, Artificial Sequence
  Description of Artificial Sequence: Synthetic oligonucleotide
  Sense strand starting at position 1158 of SEQ ID NO: 1886460
ccuugcuauagacggaaua

SEQ ID NO: 2411343 - RNA, 19 nt, Artificial Sequence
  Description of Artificial Sequence: Synthetic oligonucleotide
  Antisense strand to SEQ ID NO: 2411342
uauuccgucuauagcaagg

SEQ ID NO: 2411344 - RNA, 19 nt, Artificial Sequence
  Description of Artificial Sequence: Synthetic oligonucleotide
  Sense strand starting at position 1159 of SEQ ID NO: 1886460
cuugcuauagacggaauaa

SEQ ID NO: 2411345 - RNA, 19 nt, Artificial Sequence
  Description of Artificial Sequence: Synthetic oligonucleotide
  Antisense strand to SEQ ID NO: 2411344
uuauuccgucuauagcaag

SEQ ID NO: 2411346 - RNA, 19 nt, Artificial Sequence
  Description of Artificial Sequence: Synthetic oligonucleotide
  Sense strand starting at position 1175 of SEQ ID NO: 1886460
uaaguaugugcguuuguga

SEQ ID NO: 2411347 - RNA, 19 nt, Artificial Sequence
  Description of Artificial Sequence: Synthetic oligonucleotide
  Antisense strand to SEQ ID NO: 2411346
ucacaaacgcacauacuua

SEQ ID NO: 2411348 - RNA, 19 nt, Artificial Sequence
  Description of Artificial Sequence: Synthetic oligonucleotide
  Sense strand starting at position 1286 of SEQ ID NO: 1886460
ggaauugcugaagaguguu

SEQ ID NO: 2411349 - RNA, 19 nt, Artificial Sequence
  Description of Artificial Sequence: Synthetic oligonucleotide
  Antisense strand to SEQ ID NO: 2411348
aacacucuucagcaauucc

SEQ ID NO: 2411350 - RNA, 19 nt, Artificial Sequence
  Description of Artificial Sequence: Synthetic oligonucleotide
  Sense strand starting at position 1289 of SEQ ID NO: 1886460
auugcugaagaguguugaa

SEQ ID NO: 2411351 - RNA, 19 nt, Artificial Sequence
  Description of Artificial Sequence: Synthetic oligonucleotide
  Antisense strand to SEQ ID NO: 2411350
uucaacacucuucagcaau

SEQ ID NO: 2411352 - RNA, 19 nt, Artificial Sequence
  Description of Artificial Sequence: Synthetic oligonucleotide
  Sense strand starting at position 1595 of SEQ ID NO: 1886460
ccguuuccuguuuaagaaa

SEQ ID NO: 2411353 - RNA, 19 nt, Artificial Sequence
  Description of Artificial Sequence: Synthetic oligonucleotide
  Antisense strand to SEQ ID NO: 2411352
uuucuuaaacaggaaacgg

SEQ ID NO: 2411354 - RNA, 19 nt, Artificial Sequence
  Description of Artificial Sequence: Synthetic oligonucleotide
  Sense strand starting at position 1661 of SEQ ID NO: 1886460
augugaauuguacaucaug

SEQ ID NO: 2411355 - RNA, 19 nt, Artificial Sequence
  Description of Artificial Sequence: Synthetic oligonucleotide
  Antisense strand to SEQ ID NO: 2411354
caugauguacaauucacau

SEQ ID NO: 2411356 - RNA, 19 nt, Artificial Sequence
  Description of Artificial Sequence: Synthetic oligonucleotide
  Sense strand starting at position 2053 of SEQ ID NO: 1886460
cugccuaaacccugaggau

SEQ ID NO: 2411357 - RNA, 19 nt, Artificial Sequence
  Description of Artificial Sequence: Synthetic oligonucleotide
  Antisense strand to SEQ ID NO: 2411356
auccucaggguuuaggcag

SEQ ID NO: 2411358 - RNA, 19 nt, Artificial Sequence
  Description of Artificial Sequence: Synthetic oligonucleotide
  Sense strand starting at position 2181 of SEQ ID NO: 1886460
gcucaaauuugauauugga

SEQ ID NO: 2411359 - RNA, 19 nt, Artificial Sequence
  Description of Artificial Sequence: Synthetic oligonucleotide
  Antisense strand to SEQ ID NO: 2411358
uccaauaucaaauuugagc

SEQ ID NO: 2411360 - RNA, 19 nt, Artificial Sequence
  Description of Artificial Sequence: Synthetic oligonucleotide
  Sense strand starting at position 2371 of SEQ ID NO: 1886460
auauuuagauaggacgaaa

SEQ ID NO: 2411361 - RNA, 19 nt, Artificial Sequence
  Description of Artificial Sequence: Synthetic oligonucleotide
  Antisense strand to SEQ ID NO: 2411360
uuucguccuaucuaaauau

SEQ ID NO: 2411362 - RNA, 19 nt, Artificial Sequence
  Description of Artificial Sequence: Synthetic oligonucleotide
  Sense strand starting at position 2397 of SEQ ID NO: 1886460
cuaucagugcugcauauaa

SEQ ID NO: 2411363 - RNA, 19 nt, Artificial Sequence
  Description of Artificial Sequence: Synthetic oligonucleotide
  Antisense strand to SEQ ID NO: 2411362
uuauaugcagcacugauag

SEQ ID NO: 2411364 - RNA, 19 nt, Artificial Sequence
  Description of Artificial Sequence: Synthetic oligonucleotide
  Sense strand starting at position 2399 of SEQ ID NO: 1886460
aucagugcugcauauaauu

SEQ ID NO: 2411365 - RNA, 19 nt, Artificial Sequence
  Description of Artificial Sequence: Synthetic oligonucleotide
  Antisense strand to SEQ ID NO: 2411364
aauuauaugcagcacugau

SEQ ID NO: 2411366 - RNA, 19 nt, Artificial Sequence
  Description of Artificial Sequence: Synthetic oligonucleotide
  Sense strand starting at position 2418 of SEQ ID NO: 1886460
uuugguuuggaguauuaga

SEQ ID NO: 2411367 - RNA, 19 nt, Artificial Sequence
  Description of Artificial Sequence: Synthetic oligonucleotide
  Antisense strand to SEQ ID NO: 2411366
ucuaauacuccaaaccaaa

SEQ ID NO: 2411368 - RNA, 19 nt, Artificial Sequence
  Description of Artificial Sequence: Synthetic oligonucleotide
  Sense strand starting at position 2610 of SEQ ID NO: 1886460
guuguuugauuugacauuu

SEQ ID NO: 2411369 - RNA, 19 nt, Artificial Sequence
  Description of Artificial Sequence: Synthetic oligonucleotide
  Antisense strand to SEQ ID NO: 2411368
aaaugucaaaucaaacaac

SEQ ID NO: 2411370 - RNA, 19 nt, Artificial Sequence
  Description of Artificial Sequence: Synthetic oligonucleotide
  Sense strand starting at position 2728 of SEQ ID NO: 1886460
ugaccagaaccuugguaau

SEQ ID NO: 2411371 - RNA, 19 nt, Artificial Sequence
  Description of Artificial Sequence: Synthetic oligonucleotide
  Antisense strand to SEQ ID NO: 2411370
auuaccaagguucugguca

SEQ ID NO: 2411372 - RNA, 19 nt, Artificial Sequence
  Description of Artificial Sequence: Synthetic oligonucleotide
  Sense strand starting at position 2730 of SEQ ID NO: 1886460
accagaaccuugguaauuc

SEQ ID NO: 2411373 - RNA, 19 nt, Artificial Sequence
  Description of Artificial Sequence: Synthetic oligonucleotide
  Antisense strand to SEQ ID NO: 2411372
gaauuaccaagguucuggu

SEQ ID NO: 2411374 - RNA, 19 nt, Artificial Sequence
  Description of Artificial Sequence: Synthetic oligonucleotide
  Sense strand starting at position 2734 of SEQ ID NO: 1886460
gaaccuugguaauucugau

SEQ ID NO: 2411375 - RNA, 19 nt, Artificial Sequence
  Description of Artificial Sequence: Synthetic oligonucleotide
  Antisense strand to SEQ ID NO: 2411374
aucagaauuaccaagguuc

SEQ ID NO: 2411376 - RNA, 19 nt, Artificial Sequence
  Description of Artificial Sequence: Synthetic oligonucleotide
  Sense strand starting at position 2883 of SEQ ID NO: 1886460
acagcaagcuuucugagaa

SEQ ID NO: 2411377 - RNA, 19 nt, Artificial Sequence
  Description of Artificial Sequence: Synthetic oligonucleotide
  Antisense strand to SEQ ID NO: 2411376
uucucagaaagcuugcugu

SEQ ID NO: 2411378 - RNA, 19 nt, Artificial Sequence
  Description of Artificial Sequence: Synthetic oligonucleotide
  Sense strand starting at position 3029 of SEQ ID NO: 1886460
ggcagaaccuaacugagau

SEQ ID NO: 2411379 - RNA, 19 nt, Artificial Sequence
  Description of Artificial Sequence: Synthetic oligonucleotide
  Antisense strand to SEQ ID NO: 2411378
aucucaguuagguucugcc

SEQ ID NO: 2411380 - RNA, 19 nt, Artificial Sequence
  Description of Artificial Sequence: Synthetic oligonucleotide
  Sense strand starting at position 3385 of SEQ ID NO: 1886460
ucacaacuuggauguaaca

SEQ ID NO: 2411381 - RNA, 19 nt, Artificial Sequence
  Description of Artificial Sequence: Synthetic oligonucleotide
  Antisense strand to SEQ ID NO: 2411380
uguuacauccaaguuguga

SEQ ID NO: 2411382 - RNA, 19 nt, Artificial Sequence
  Description of Artificial Sequence: Synthetic oligonucleotide
  Sense strand starting at position 3628 of SEQ ID NO: 1886460
uuuaaauauguuggcuaca

SEQ ID NO: 2411383 - RNA, 19 nt, Artificial Sequence
  Description of Artificial Sequence: Synthetic oligonucleotide
  Antisense strand to SEQ ID NO: 2411382
uguagccaacauauuuaaa

SEQ ID NO: 2411384 - RNA, 19 nt, Artificial Sequence
  Description of Artificial Sequence: Synthetic oligonucleotide
  Sense strand starting at position 3629 of SEQ ID NO: 1886460
uuaaauauguuggcuacau

SEQ ID NO: 2411385 - RNA, 19 nt, Artificial Sequence
  Description of Artificial Sequence: Synthetic oligonucleotide
  Antisense strand to SEQ ID NO: 2411384
auguagccaacauauuuaa

SEQ ID NO: 2411386 - RNA, 19 nt, Artificial Sequence
  Description of Artificial Sequence: Synthetic oligonucleotide
  Sense strand starting at position 3630 of SEQ ID NO: 1886460
uaaauauguuggcuacaug

SEQ ID NO: 2411387 - RNA, 19 nt, Artificial Sequence
  Description of Artificial Sequence: Synthetic oligonucleotide
  Antisense strand to SEQ ID NO: 2411386
cauguagccaacauauuua

SEQ ID NO: 2411388 - RNA, 19 nt, Artificial Sequence
  Description of Artificial Sequence: Synthetic oligonucleotide
  Sense strand starting at position 3631 of SEQ ID NO: 1886460
aaauauguuggcuacauga

SEQ ID NO: 2411389 - RNA, 19 nt, Artificial Sequence
  Description of Artificial Sequence: Synthetic oligonucleotide
  Antisense strand to SEQ ID NO: 2411388
ucauguagccaacauauuu

SEQ ID NO: 2411390 - RNA, 19 nt, Artificial Sequence
  Description of Artificial Sequence: Synthetic oligonucleotide
  Sense strand starting at position 3633 of SEQ ID NO: 1886460
auauguuggcuacaugauu

SEQ ID NO: 2411391 - RNA, 19 nt, Artificial Sequence
  Description of Artificial Sequence: Synthetic oligonucleotide
  Antisense strand to SEQ ID NO: 2411390
aaucauguagccaacauau

SEQ ID NO: 2411392 - RNA, 19 nt, Artificial Sequence
  Description of Artificial Sequence: Synthetic oligonucleotide
  Sense strand starting at position 3644 of SEQ ID NO: 1886460
acaugauuauugucagaga

SEQ ID NO: 2411393 - RNA, 19 nt, Artificial Sequence
  Description of Artificial Sequence: Synthetic oligonucleotide
  Antisense strand to SEQ ID NO: 2411392
ucucugacaauaaucaugu

SEQ ID NO: 2411394 - RNA, 19 nt, Artificial Sequence
  Description of Artificial Sequence: Synthetic oligonucleotide
  Sense strand starting at position 3660 of SEQ ID NO: 1886460
agagaaucaugcuccagau

SEQ ID NO: 2411395 - RNA, 19 nt, Artificial Sequence
  Description of Artificial Sequence: Synthetic oligonucleotide
  Antisense strand to SEQ ID NO: 2411394
aucuggagcaugauucucu

SEQ ID NO: 2411396 - RNA, 19 nt, Artificial Sequence
  Description of Artificial Sequence: Synthetic oligonucleotide
  Sense strand starting at position 3740 of SEQ ID NO: 1886460
gagguuucugcagagacuu

SEQ ID NO: 2411397 - RNA, 19 nt, Artificial Sequence
  Description of Artificial Sequence: Synthetic oligonucleotide
  Antisense strand to SEQ ID NO: 2411396
aagucucugcagaaaccuc

SEQ ID NO: 2411398 - RNA, 19 nt, Artificial Sequence
  Description of Artificial Sequence: Synthetic oligonucleotide
  Sense strand starting at position 3748 of SEQ ID NO: 1886460
ugcagagacuuagauuuga

SEQ ID NO: 2411399 - RNA, 19 nt, Artificial Sequence
  Description of Artificial Sequence: Synthetic oligonucleotide
  Antisense strand to SEQ ID NO: 2411398
ucaaaucuaagucucugca

SEQ ID NO: 2411400 - RNA, 19 nt, Artificial Sequence
  Description of Artificial Sequence: Synthetic oligonucleotide
  Sense strand starting at position 3793 of SEQ ID NO: 1886460
ccauccacucagugacauu

SEQ ID NO: 2411401 - RNA, 19 nt, Artificial Sequence
  Description of Artificial Sequence: Synthetic oligonucleotide
  Antisense strand to SEQ ID NO: 2411400
aaugucacugaguggaugg

SEQ ID NO: 2411402 - RNA, 19 nt, Artificial Sequence
  Description of Artificial Sequence: Synthetic oligonucleotide
  Sense strand starting at position 3947 of SEQ ID NO: 1886460
gaguuauuaccagaugcca

SEQ ID NO: 2411403 - RNA, 19 nt, Artificial Sequence
  Description of Artificial Sequence: Synthetic oligonucleotide
  Antisense strand to SEQ ID NO: 2411402
uggcaucugguaauaacuc

SEQ ID NO: 2411404 - RNA, 19 nt, Artificial Sequence
  Description of Artificial Sequence: Synthetic oligonucleotide
  Sense strand starting at position 3980 of SEQ ID NO: 1886460
cuguuauaccaucauacgu

SEQ ID NO: 2411405 - RNA, 19 nt, Artificial Sequence
  Description of Artificial Sequence: Synthetic oligonucleotide
  Antisense strand to SEQ ID NO: 2411404
acguaugaugguauaacag

SEQ ID NO: 2411406 - RNA, 19 nt, Artificial Sequence
  Description of Artificial Sequence: Synthetic oligonucleotide
  Sense strand starting at position 52 of SEQ ID NO: 1886461
agggaaaugcuaugauuau

SEQ ID NO: 2411407 - RNA, 19 nt, Artificial Sequence
  Description of Artificial Sequence: Synthetic oligonucleotide
  Antisense strand to SEQ ID NO: 2411406
auaaucauagcauuucccu

SEQ ID NO: 2411408 - RNA, 19 nt, Artificial Sequence
  Description of Artificial Sequence: Synthetic oligonucleotide
  Sense strand starting at position 77 of SEQ ID NO: 1886461
uguguuuacagaugaugau

SEQ ID NO: 2411409 - RNA, 19 nt, Artificial Sequence
  Description of Artificial Sequence: Synthetic oligonucleotide
  Antisense strand to SEQ ID NO: 2411408
aucaucaucuguaaacaca

SEQ ID NO: 2411410 - RNA, 19 nt, Artificial Sequence
  Description of Artificial Sequence: Synthetic oligonucleotide
  Sense strand starting at position 78 of SEQ ID NO: 1886461
guguuuacagaugaugauc

SEQ ID NO: 2411411 - RNA, 19 nt, Artificial Sequence
  Description of Artificial Sequence: Synthetic oligonucleotide
  Antisense strand to SEQ ID NO: 2411410
gaucaucaucuguaaacac

SEQ ID NO: 2411412 - RNA, 19 nt, Artificial Sequence
  Description of Artificial Sequence: Synthetic oligonucleotide
  Sense strand starting at position 100 of SEQ ID NO: 1886461
ggcucaaagaaaugaggua

SEQ ID NO: 2411413 - RNA, 19 nt, Artificial Sequence
  Description of Artificial Sequence: Synthetic oligonucleotide
  Antisense strand to SEQ ID NO: 2411412
uaccucauuucuuugagcc

SEQ ID NO: 2411414 - RNA, 19 nt, Artificial Sequence
  Description of Artificial Sequence: Synthetic oligonucleotide
  Sense strand starting at position 333 of SEQ ID NO: 1886461
ccucaacugcucugggaaa

SEQ ID NO: 2411415 - RNA, 19 nt, Artificial Sequence
  Description of Artificial Sequence: Synthetic oligonucleotide
  Antisense strand to SEQ ID NO: 2411414
uuucccagagcaguugagg

SEQ ID NO: 2411416 - RNA, 19 nt, Artificial Sequence
  Description of Artificial Sequence: Synthetic oligonucleotide
  Sense strand starting at position 335 of SEQ ID NO: 1886461
ucaacugcucugggaaacu

SEQ ID NO: 2411417 - RNA, 19 nt, Artificial Sequence
  Description of Artificial Sequence: Synthetic oligonucleotide
  Antisense strand to SEQ ID NO: 2411416
aguuucccagagcaguuga

SEQ ID NO: 2411418 - RNA, 19 nt, Artificial Sequence
  Description of Artificial Sequence: Synthetic oligonucleotide
  Sense strand starting at position 345 of SEQ ID NO: 1886461
ugggaaacugccugaucua

SEQ ID NO: 2411419 - RNA, 19 nt, Artificial Sequence
  Description of Artificial Sequence: Synthetic oligonucleotide
  Antisense strand to SEQ ID NO: 2411418
uagaucaggcaguuuccca

SEQ ID NO: 2411420 - RNA, 19 nt, Artificial Sequence
  Description of Artificial Sequence: Synthetic oligonucleotide
  Sense strand starting at position 992 of SEQ ID NO: 1886461
ggaaguaccuggcuuccaa

SEQ ID NO: 2411421 - RNA, 19 nt, Artificial Sequence
  Description of Artificial Sequence: Synthetic oligonucleotide
  Antisense strand to SEQ ID NO: 2411420
uuggaagccagguacuucc

SEQ ID NO: 2411422 - RNA, 19 nt, Artificial Sequence
  Description of Artificial Sequence: Synthetic oligonucleotide
  Sense strand starting at position 1316 of SEQ ID NO: 1886461
aggucuaaucacugucuca

SEQ ID NO: 2411423 - RNA, 19 nt, Artificial Sequence
  Description of Artificial Sequence: Synthetic oligonucleotide
  Antisense strand to SEQ ID NO: 2411422
ugagacagugauuagaccu

SEQ ID NO: 2411424 - RNA, 19 nt, Artificial Sequence
  Description of Artificial Sequence: Synthetic oligonucleotide
  Sense strand starting at position 1406 of SEQ ID NO: 1886461
cauaccaggucuuugguua

SEQ ID NO: 2411425 - RNA, 19 nt, Artificial Sequence
  Description of Artificial Sequence: Synthetic oligonucleotide
  Antisense strand to SEQ ID NO: 2411424
uaaccaaagaccugguaug

SEQ ID NO: 2411426 - RNA, 19 nt, Artificial Sequence
  Description of Artificial Sequence: Synthetic oligonucleotide
  Sense strand starting at position 1411 of SEQ ID NO: 1886461
caggucuuugguuagcaua

SEQ ID NO: 2411427 - RNA, 19 nt, Artificial Sequence
  Description of Artificial Sequence: Synthetic oligonucleotide
  Antisense strand to SEQ ID NO: 2411426
uaugcuaaccaaagaccug

SEQ ID NO: 2411428 - RNA, 19 nt, Artificial Sequence
  Description of Artificial Sequence: Synthetic oligonucleotide
  Sense strand starting at position 1567 of SEQ ID NO: 1886461
agguauauaugauuccuga

SEQ ID NO: 2411429 - RNA, 19 nt, Artificial Sequence
  Description of Artificial Sequence: Synthetic oligonucleotide
  Antisense strand to SEQ ID NO: 2411428
ucaggaaucauauauaccu

SEQ ID NO: 2411430 - RNA, 19 nt, Artificial Sequence
  Description of Artificial Sequence: Synthetic oligonucleotide
  Sense strand starting at position 2114 of SEQ ID NO: 1886461
auugguaacugguucuaga

SEQ ID NO: 2411431 - RNA, 19 nt, Artificial Sequence
  Description of Artificial Sequence: Synthetic oligonucleotide
  Antisense strand to SEQ ID NO: 2411430
ucuagaaccaguuaccaau

SEQ ID NO: 2411432 - RNA, 19 nt, Artificial Sequence
  Description of Artificial Sequence: Synthetic oligonucleotide
  Sense strand starting at position 2124 of SEQ ID NO: 1886461
gguucuagaaccugugauu

SEQ ID NO: 2411433 - RNA, 19 nt, Artificial Sequence
  Description of Artificial Sequence: Synthetic oligonucleotide
  Antisense strand to SEQ ID NO: 2411432
aaucacagguucuagaacc

SEQ ID NO: 2411434 - RNA, 19 nt, Artificial Sequence
  Description of Artificial Sequence: Synthetic oligonucleotide
  Sense strand starting at position 2173 of SEQ ID NO: 1886461
cacugcuuuccugagaguu

SEQ ID NO: 2411435 - RNA, 19 nt, Artificial Sequence
  Description of Artificial Sequence: Synthetic oligonucleotide
  Antisense strand to SEQ ID NO: 2411434
aacucucaggaaagcagug

SEQ ID NO: 2411436 - RNA, 19 nt, Artificial Sequence
  Description of Artificial Sequence: Synthetic oligonucleotide
  Sense strand starting at position 2199 of SEQ ID NO: 1886461
uccugaguaacuugggauc

SEQ ID NO: 2411437 - RNA, 19 nt, Artificial Sequence
  Description of Artificial Sequence: Synthetic oligonucleotide
  Antisense strand to SEQ ID NO: 2411436
gaucccaaguuacucagga

SEQ ID NO: 2411438 - RNA, 19 nt, Artificial Sequence
  Description of Artificial Sequence: Synthetic oligonucleotide
  Sense strand starting at position 2306 of SEQ ID NO: 1886461
acuggaggugauuguauau

SEQ ID NO: 2411439 - RNA, 19 nt, Artificial Sequence
  Description of Artificial Sequence: Synthetic oligonucleotide
  Antisense strand to SEQ ID NO: 2411438
auauacaaucaccuccagu

SEQ ID NO: 2411440 - RNA, 19 nt, Artificial Sequence
  Description of Artificial Sequence: Synthetic oligonucleotide
  Sense strand starting at position 2354 of SEQ ID NO: 1886461
uuugaauuguagcuuaaag

SEQ ID NO: 2411441 - RNA, 19 nt, Artificial Sequence
  Description of Artificial Sequence: Synthetic oligonucleotide
  Antisense strand to SEQ ID NO: 2411440
cuuuaagcuacaauucaaa

SEQ ID NO: 2411442 - RNA, 19 nt, Artificial Sequence
  Description of Artificial Sequence: Synthetic oligonucleotide
  Sense strand starting at position 2356 of SEQ ID NO: 1886461
ugaauuguagcuuaaagau

SEQ ID NO: 2411443 - RNA, 19 nt, Artificial Sequence
  Description of Artificial Sequence: Synthetic oligonucleotide
  Antisense strand to SEQ ID NO: 2411442
aucuuuaagcuacaauuca

SEQ ID NO: 2411444 - RNA, 19 nt, Artificial Sequence
  Description of Artificial Sequence: Synthetic oligonucleotide
  Sense strand starting at position 2471 of SEQ ID NO: 1886461
ugagauaauucuucucugu

SEQ ID NO: 2411445 - RNA, 19 nt, Artificial Sequence
  Description of Artificial Sequence: Synthetic oligonucleotide
  Antisense strand to SEQ ID NO: 2411444
acagagaagaauuaucuca

SEQ ID NO: 2411446 - RNA, 19 nt, Artificial Sequence
  Description of Artificial Sequence: Synthetic oligonucleotide
  Sense strand starting at position 2544 of SEQ ID NO: 1886461
aguagacuccgaggucaga

SEQ ID NO: 2411447 - RNA, 19 nt, Artificial Sequence
  Description of Artificial Sequence: Synthetic oligonucleotide
  Antisense strand to SEQ ID NO: 2411446
ucugaccucggagucuacu

SEQ ID NO: 2411448 - RNA, 19 nt, Artificial Sequence
  Description of Artificial Sequence: Synthetic oligonucleotide
  Sense strand starting at position 2606 of SEQ ID NO: 1886461
guccuuggaccagauacuu

SEQ ID NO: 2411449 - RNA, 19 nt, Artificial Sequence
  Description of Artificial Sequence: Synthetic oligonucleotide
  Antisense strand to SEQ ID NO: 2411448
aaguaucugguccaaggac

SEQ ID NO: 2411450 - RNA, 19 nt, Artificial Sequence
  Description of Artificial Sequence: Synthetic oligonucleotide
  Sense strand starting at position 2712 of SEQ ID NO: 1886461
auguuaaaugcuuagcuua

SEQ ID NO: 2411451 - RNA, 19 nt, Artificial Sequence
  Description of Artificial Sequence: Synthetic oligonucleotide
  Antisense strand to SEQ ID NO: 2411450
uaagcuaagcauuuaacau

SEQ ID NO: 2411452 - RNA, 19 nt, Artificial Sequence
  Description of Artificial Sequence: Synthetic oligonucleotide
  Sense strand starting at position 2742 of SEQ ID NO: 1886461
ucgguaaugugaucauuaa

SEQ ID NO: 2411453 - RNA, 19 nt, Artificial Sequence
  Description of Artificial Sequence: Synthetic oligonucleotide
  Antisense strand to SEQ ID NO: 2411452
uuaaugaucacauuaccga

SEQ ID NO: 2411454 - RNA, 19 nt, Artificial Sequence
  Description of Artificial Sequence: Synthetic oligonucleotide
  Sense strand starting at position 2743 of SEQ ID NO: 1886461
cgguaaugugaucauuaaa

SEQ ID NO: 2411455 - RNA, 19 nt, Artificial Sequence
  Description of Artificial Sequence: Synthetic oligonucleotide
  Antisense strand to SEQ ID NO: 2411454
uuuaaugaucacauuaccg

SEQ ID NO: 2411456 - RNA, 19 nt, Artificial Sequence
  Description of Artificial Sequence: Synthetic oligonucleotide
  Sense strand starting at position 2839 of SEQ ID NO: 1886461
uugucauuugccugacaau

SEQ ID NO: 2411457 - RNA, 19 nt, Artificial Sequence
  Description of Artificial Sequence: Synthetic oligonucleotide
  Antisense strand to SEQ ID NO: 2411456
auugucaggcaaaugacaa

SEQ ID NO: 2411458 - RNA, 19 nt, Artificial Sequence
  Description of Artificial Sequence: Synthetic oligonucleotide
  Sense strand starting at position 2975 of SEQ ID NO: 1886461
aaagguaaggccugugaag

SEQ ID NO: 2411459 - RNA, 19 nt, Artificial Sequence
  Description of Artificial Sequence: Synthetic oligonucleotide
  Antisense strand to SEQ ID NO: 2411458
cuucacaggccuuaccuuu

SEQ ID NO: 2411460 - RNA, 19 nt, Artificial Sequence
  Description of Artificial Sequence: Synthetic oligonucleotide
  Sense strand starting at position 3146 of SEQ ID NO: 1886461
ucucaacacugucugaaga

SEQ ID NO: 2411461 - RNA, 19 nt, Artificial Sequence
  Description of Artificial Sequence: Synthetic oligonucleotide
  Antisense strand to SEQ ID NO: 2411460
ucuucagacaguguugaga

SEQ ID NO: 2411462 - RNA, 19 nt, Artificial Sequence
  Description of Artificial Sequence: Synthetic oligonucleotide
  Sense strand starting at position 3147 of SEQ ID NO: 1886461
cucaacacugucugaagaa

SEQ ID NO: 2411463 - RNA, 19 nt, Artificial Sequence
  Description of Artificial Sequence: Synthetic oligonucleotide
  Antisense strand to SEQ ID NO: 2411462
uucuucagacaguguugag

SEQ ID NO: 2411464 - RNA, 19 nt, Artificial Sequence
  Description of Artificial Sequence: Synthetic oligonucleotide
  Sense strand starting at position 3200 of SEQ ID NO: 1886461
ggagauauuugguaucuuc

SEQ ID NO: 2411465 - RNA, 19 nt, Artificial Sequence
  Description of Artificial Sequence: Synthetic oligonucleotide
  Antisense strand to SEQ ID NO: 2411464
gaagauaccaaauaucucc

SEQ ID NO: 2411466 - RNA, 19 nt, Artificial Sequence
  Description of Artificial Sequence: Synthetic oligonucleotide
  Sense strand starting at position 3213 of SEQ ID NO: 1886461
aucuuccuuugauugguaa

SEQ ID NO: 2411467 - RNA, 19 nt, Artificial Sequence
  Description of Artificial Sequence: Synthetic oligonucleotide
  Antisense strand to SEQ ID NO: 2411466
uuaccaaucaaaggaagau

SEQ ID NO: 2411468 - RNA, 19 nt, Artificial Sequence
  Description of Artificial Sequence: Synthetic oligonucleotide
  Sense strand starting at position 3239 of SEQ ID NO: 1886461
cggaaccugugauugagua

SEQ ID NO: 2411469 - RNA, 19 nt, Artificial Sequence
  Description of Artificial Sequence: Synthetic oligonucleotide
  Antisense strand to SEQ ID NO: 2411468
uacucaaucacagguuccg

SEQ ID NO: 2411470 - RNA, 19 nt, Artificial Sequence
  Description of Artificial Sequence: Synthetic oligonucleotide
  Sense strand starting at position 3240 of SEQ ID NO: 1886461
ggaaccugugauugaguaa

SEQ ID NO: 2411471 - RNA, 19 nt, Artificial Sequence
  Description of Artificial Sequence: Synthetic oligonucleotide
  Antisense strand to SEQ ID NO: 2411470
uuacucaaucacagguucc

SEQ ID NO: 2411472 - RNA, 19 nt, Artificial Sequence
  Description of Artificial Sequence: Synthetic oligonucleotide
  Sense strand starting at position 3243 of SEQ ID NO: 1886461
accugugauugaguaauac

SEQ ID NO: 2411473 - RNA, 19 nt, Artificial Sequence
  Description of Artificial Sequence: Synthetic oligonucleotide
  Antisense strand to SEQ ID NO: 2411472
guauuacucaaucacaggu

SEQ ID NO: 2411474 - RNA, 19 nt, Artificial Sequence
  Description of Artificial Sequence: Synthetic oligonucleotide
  Sense strand starting at position 3249 of SEQ ID NO: 1886461
gauugaguaauacguagag

SEQ ID NO: 2411475 - RNA, 19 nt, Artificial Sequence
  Description of Artificial Sequence: Synthetic oligonucleotide
  Antisense strand to SEQ ID NO: 2411474
cucuacguauuacucaauc

SEQ ID NO: 2411476 - RNA, 19 nt, Artificial Sequence
  Description of Artificial Sequence: Synthetic oligonucleotide
  Sense strand starting at position 3283 of SEQ ID NO: 1886461
cacugcuuuccugagaguc

SEQ ID NO: 2411477 - RNA, 19 nt, Artificial Sequence
  Description of Artificial Sequence: Synthetic oligonucleotide
  Antisense strand to SEQ ID NO: 2411476
gacucucaggaaagcagug

SEQ ID NO: 2411478 - RNA, 19 nt, Artificial Sequence
  Description of Artificial Sequence: Synthetic oligonucleotide
  Sense strand starting at position 3359 of SEQ ID NO: 1886461
aucguugagacucagaguu

SEQ ID NO: 2411479 - RNA, 19 nt, Artificial Sequence
  Description of Artificial Sequence: Synthetic oligonucleotide
  Antisense strand to SEQ ID NO: 2411478
aacucugagucucaacgau

SEQ ID NO: 2411480 - RNA, 19 nt, Artificial Sequence
  Description of Artificial Sequence: Synthetic oligonucleotide
  Sense strand starting at position 3590 of SEQ ID NO: 1886461
ggcugauuagaggaaguuc

SEQ ID NO: 2411481 - RNA, 19 nt, Artificial Sequence
  Description of Artificial Sequence: Synthetic oligonucleotide
  Antisense strand to SEQ ID NO: 2411480
gaacuuccucuaaucagcc

SEQ ID NO: 2411482 - RNA, 19 nt, Artificial Sequence
  Description of Artificial Sequence: Synthetic oligonucleotide
  Sense strand starting at position 3598 of SEQ ID NO: 1886461
agaggaaguucugcccauu

SEQ ID NO: 2411483 - RNA, 19 nt, Artificial Sequence
  Description of Artificial Sequence: Synthetic oligonucleotide
  Antisense strand to SEQ ID NO: 2411482
aaugggcagaacuuccucu

SEQ ID NO: 2411484 - RNA, 19 nt, Artificial Sequence
  Description of Artificial Sequence: Synthetic oligonucleotide
  Sense strand starting at position 3955 of SEQ ID NO: 1886461
cccaaaguagugugagauu

SEQ ID NO: 2411485 - RNA, 19 nt, Artificial Sequence
  Description of Artificial Sequence: Synthetic oligonucleotide
  Antisense strand to SEQ ID NO: 2411484
aaucucacacuacuuuggg

SEQ ID NO: 2411486 - RNA, 19 nt, Artificial Sequence
  Description of Artificial Sequence: Synthetic oligonucleotide
  Sense strand starting at position 25 of SEQ ID NO: 1886462
acuccauagccucagguau

SEQ ID NO: 2411487 - RNA, 19 nt, Artificial Sequence
  Description of Artificial Sequence: Synthetic oligonucleotide
  Antisense strand to SEQ ID NO: 2411486
auaccugaggcuauggagu

SEQ ID NO: 2411488 - RNA, 19 nt, Artificial Sequence
  Description of Artificial Sequence: Synthetic oligonucleotide
  Sense strand starting at position 334 of SEQ ID NO: 1886462
ccauccuucugguugagau

SEQ ID NO: 2411489 - RNA, 19 nt, Artificial Sequence
  Description of Artificial Sequence: Synthetic oligonucleotide
  Antisense strand to SEQ ID NO: 2411488
aucucaaccagaaggaugg

SEQ ID NO: 2411490 - RNA, 19 nt, Artificial Sequence
  Description of Artificial Sequence: Synthetic oligonucleotide
  Sense strand starting at position 335 of SEQ ID NO: 1886462
cauccuucugguugagaug

SEQ ID NO: 2411491 - RNA, 19 nt, Artificial Sequence
  Description of Artificial Sequence: Synthetic oligonucleotide
  Antisense strand to SEQ ID NO: 2411490
caucucaaccagaaggaug

SEQ ID NO: 2411492 - RNA, 19 nt, Artificial Sequence
  Description of Artificial Sequence: Synthetic oligonucleotide
  Sense strand starting at position 346 of SEQ ID NO: 1886462
uugagaugucuccaauagc

SEQ ID NO: 2411493 - RNA, 19 nt, Artificial Sequence
  Description of Artificial Sequence: Synthetic oligonucleotide
  Antisense strand to SEQ ID NO: 2411492
gcuauuggagacaucucaa

SEQ ID NO: 2411494 - RNA, 19 nt, Artificial Sequence
  Description of Artificial Sequence: Synthetic oligonucleotide
  Sense strand starting at position 434 of SEQ ID NO: 1886462
cacaguguuggucagacca

SEQ ID NO: 2411495 - RNA, 19 nt, Artificial Sequence
  Description of Artificial Sequence: Synthetic oligonucleotide
  Antisense strand to SEQ ID NO: 2411494
uggucugaccaacacugug

SEQ ID NO: 2411496 - RNA, 19 nt, Artificial Sequence
  Description of Artificial Sequence: Synthetic oligonucleotide
  Sense strand starting at position 691 of SEQ ID NO: 1886462
agcuuuaaucaugagguua

SEQ ID NO: 2411497 - RNA, 19 nt, Artificial Sequence
  Description of Artificial Sequence: Synthetic oligonucleotide
  Antisense strand to SEQ ID NO: 2411496
uaaccucaugauuaaagcu

SEQ ID NO: 2411498 - RNA, 19 nt, Artificial Sequence
  Description of Artificial Sequence: Synthetic oligonucleotide
  Sense strand starting at position 745 of SEQ ID NO: 1886462
cuuauuguccuggaaucau

SEQ ID NO: 2411499 - RNA, 19 nt, Artificial Sequence
  Description of Artificial Sequence: Synthetic oligonucleotide
  Antisense strand to SEQ ID NO: 2411498
augauuccaggacaauaag

SEQ ID NO: 2411500 - RNA, 19 nt, Artificial Sequence
  Description of Artificial Sequence: Synthetic oligonucleotide
  Sense strand starting at position 794 of SEQ ID NO: 1886462
uuaacuacucugcagguaa

SEQ ID NO: 2411501 - RNA, 19 nt, Artificial Sequence
  Description of Artificial Sequence: Synthetic oligonucleotide
  Antisense strand to SEQ ID NO: 2411500
uuaccugcagaguaguuaa

SEQ ID NO: 2411502 - RNA, 19 nt, Artificial Sequence
  Description of Artificial Sequence: Synthetic oligonucleotide
  Sense strand starting at position 1144 of SEQ ID NO: 1886462
ugcguuggucuguuacuau

SEQ ID NO: 2411503 - RNA, 19 nt, Artificial Sequence
  Description of Artificial Sequence: Synthetic oligonucleotide
  Antisense strand to SEQ ID NO: 2411502
auaguaacagaccaacgca

SEQ ID NO: 2411504 - RNA, 19 nt, Artificial Sequence
  Description of Artificial Sequence: Synthetic oligonucleotide
  Sense strand starting at position 1212 of SEQ ID NO: 1886462
cugacugccucccuagaaa

SEQ ID NO: 2411505 - RNA, 19 nt, Artificial Sequence
  Description of Artificial Sequence: Synthetic oligonucleotide
  Antisense strand to SEQ ID NO: 2411504
uuucuagggaggcagucag

SEQ ID NO: 2411506 - RNA, 19 nt, Artificial Sequence
  Description of Artificial Sequence: Synthetic oligonucleotide
  Sense strand starting at position 1270 of SEQ ID NO: 1886462
gcaacaacuggucagaguu

SEQ ID NO: 2411507 - RNA, 19 nt, Artificial Sequence
  Description of Artificial Sequence: Synthetic oligonucleotide
  Antisense strand to SEQ ID NO: 2411506
aacucugaccaguuguugc

SEQ ID NO: 2411508 - RNA, 19 nt, Artificial Sequence
  Description of Artificial Sequence: Synthetic oligonucleotide
  Sense strand starting at position 1490 of SEQ ID NO: 1886462
ugaaucucugcucagaauc

SEQ ID NO: 2411509 - RNA, 19 nt, Artificial Sequence
  Description of Artificial Sequence: Synthetic oligonucleotide
  Antisense strand to SEQ ID NO: 2411508
gauucugagcagagauuca

SEQ ID NO: 2411510 - RNA, 19 nt, Artificial Sequence
  Description of Artificial Sequence: Synthetic oligonucleotide
  Sense strand starting at position 1542 of SEQ ID NO: 1886462
cuuacaagguucuccauga

SEQ ID NO: 2411511 - RNA, 19 nt, Artificial Sequence
  Description of Artificial Sequence: Synthetic oligonucleotide
  Antisense strand to SEQ ID NO: 2411510
ucauggagaaccuuguaag

SEQ ID NO: 2411512 - RNA, 19 nt, Artificial Sequence
  Description of Artificial Sequence: Synthetic oligonucleotide
  Sense strand starting at position 1599 of SEQ ID NO: 1886462
cagugaguaccuuggauug

SEQ ID NO: 2411513 - RNA, 19 nt, Artificial Sequence
  Description of Artificial Sequence: Synthetic oligonucleotide
  Antisense strand to SEQ ID NO: 2411512
caauccaagguacucacug

SEQ ID NO: 2411514 - RNA, 19 nt, Artificial Sequence
  Description of Artificial Sequence: Synthetic oligonucleotide
  Sense strand starting at position 1610 of SEQ ID NO: 1886462
uuggauugauuggcucauu

SEQ ID NO: 2411515 - RNA, 19 nt, Artificial Sequence
  Description of Artificial Sequence: Synthetic oligonucleotide
  Antisense strand to SEQ ID NO: 2411514
aaugagccaaucaauccaa

SEQ ID NO: 2411516 - RNA, 19 nt, Artificial Sequence
  Description of Artificial Sequence: Synthetic oligonucleotide
  Sense strand starting at position 1736 of SEQ ID NO: 1886462
gggcaugaucaguggacau

SEQ ID NO: 2411517 - RNA, 19 nt, Artificial Sequence
  Description of Artificial Sequence: Synthetic oligonucleotide
  Antisense strand to SEQ ID NO: 2411516
auguccacugaucaugccc

SEQ ID NO: 2411518 - RNA, 19 nt, Artificial Sequence
  Description of Artificial Sequence: Synthetic oligonucleotide
  Sense strand starting at position 1800 of SEQ ID NO: 1886462
ucaguaaugaaggguaucu

SEQ ID NO: 2411519 - RNA, 19 nt, Artificial Sequence
  Description of Artificial Sequence: Synthetic oligonucleotide
  Antisense strand to SEQ ID NO: 2411518
agauacccuucauuacuga

SEQ ID NO: 2411520 - RNA, 19 nt, Artificial Sequence
  Description of Artificial Sequence: Synthetic oligonucleotide
  Sense strand starting at position 1805 of SEQ ID NO: 1886462
aaugaaggguaucuguaau

SEQ ID NO: 2411521 - RNA, 19 nt, Artificial Sequence
  Description of Artificial Sequence: Synthetic oligonucleotide
  Antisense strand to SEQ ID NO: 2411520
auuacagauacccuucauu

SEQ ID NO: 2411522 - RNA, 19 nt, Artificial Sequence
  Description of Artificial Sequence: Synthetic oligonucleotide
  Sense strand starting at position 1885 of SEQ ID NO: 1886462
uuucuauuagcagagcauu

SEQ ID NO: 2411523 - RNA, 19 nt, Artificial Sequence
  Description of Artificial Sequence: Synthetic oligonucleotide
  Antisense strand to SEQ ID NO: 2411522
aaugcucugcuaauagaaa

SEQ ID NO: 2411524 - RNA, 19 nt, Artificial Sequence
  Description of Artificial Sequence: Synthetic oligonucleotide
  Sense strand starting at position 1998 of SEQ ID NO: 1886462
uguagcuguggcugaauuu

SEQ ID NO: 2411525 - RNA, 19 nt, Artificial Sequence
  Description of Artificial Sequence: Synthetic oligonucleotide
  Antisense strand to SEQ ID NO: 2411524
aaauucagccacagcuaca

SEQ ID NO: 2411526 - RNA, 19 nt, Artificial Sequence
  Description of Artificial Sequence: Synthetic oligonucleotide
  Sense strand starting at position 2092 of SEQ ID NO: 1886462
accugaucccgucaagcaa

SEQ ID NO: 2411527 - RNA, 19 nt, Artificial Sequence
  Description of Artificial Sequence: Synthetic oligonucleotide
  Antisense strand to SEQ ID NO: 2411526
uugcuugacgggaucaggu

SEQ ID NO: 2411528 - RNA, 19 nt, Artificial Sequence
  Description of Artificial Sequence: Synthetic oligonucleotide
  Sense strand starting at position 2100 of SEQ ID NO: 1886462
ccgucaagcaaagagaaau

SEQ ID NO: 2411529 - RNA, 19 nt, Artificial Sequence
  Description of Artificial Sequence: Synthetic oligonucleotide
  Antisense strand to SEQ ID NO: 2411528
auuucucuuugcuugacgg

SEQ ID NO: 2411530 - RNA, 19 nt, Artificial Sequence
  Description of Artificial Sequence: Synthetic oligonucleotide
  Sense strand starting at position 2194 of SEQ ID NO: 1886462
uugaguaugcuauaaaguu

SEQ ID NO: 2411531 - RNA, 19 nt, Artificial Sequence
  Description of Artificial Sequence: Synthetic oligonucleotide
  Antisense strand to SEQ ID NO: 2411530
aacuuuauagcauacucaa

SEQ ID NO: 2411532 - RNA, 19 nt, Artificial Sequence
  Description of Artificial Sequence: Synthetic oligonucleotide
  Sense strand starting at position 2245 of SEQ ID NO: 1886462
ugcauagcuccugcuugua

SEQ ID NO: 2411533 - RNA, 19 nt, Artificial Sequence
  Description of Artificial Sequence: Synthetic oligonucleotide
  Antisense strand to SEQ ID NO: 2411532
uacaagcaggagcuaugca

SEQ ID NO: 2411534 - RNA, 19 nt, Artificial Sequence
  Description of Artificial Sequence: Synthetic oligonucleotide
  Sense strand starting at position 2279 of SEQ ID NO: 1886462
cagacaugaccuuguauag

SEQ ID NO: 2411535 - RNA, 19 nt, Artificial Sequence
  Description of Artificial Sequence: Synthetic oligonucleotide
  Antisense strand to SEQ ID NO: 2411534
cuauacaaggucaugucug

SEQ ID NO: 2411536 - RNA, 19 nt, Artificial Sequence
  Description of Artificial Sequence: Synthetic oligonucleotide
  Sense strand starting at position 2337 of SEQ ID NO: 1886462
auaccaaauuguccuguaa

SEQ ID NO: 2411537 - RNA, 19 nt, Artificial Sequence
  Description of Artificial Sequence: Synthetic oligonucleotide
  Antisense strand to SEQ ID NO: 2411536
uuacaggacaauuugguau

SEQ ID NO: 2411538 - RNA, 19 nt, Artificial Sequence
  Description of Artificial Sequence: Synthetic oligonucleotide
  Sense strand starting at position 2385 of SEQ ID NO: 1886462
gaagcucagugcucaauuu

SEQ ID NO: 2411539 - RNA, 19 nt, Artificial Sequence
  Description of Artificial Sequence: Synthetic oligonucleotide
  Antisense strand to SEQ ID NO: 2411538
aaauugagcacugagcuuc

SEQ ID NO: 2411540 - RNA, 19 nt, Artificial Sequence
  Description of Artificial Sequence: Synthetic oligonucleotide
  Sense strand starting at position 2420 of SEQ ID NO: 1886462
cuguuaaacauguauguug

SEQ ID NO: 2411541 - RNA, 19 nt, Artificial Sequence
  Description of Artificial Sequence: Synthetic oligonucleotide
  Antisense strand to SEQ ID NO: 2411540
caacauacauguuuaacag

SEQ ID NO: 2411542 - RNA, 19 nt, Artificial Sequence
  Description of Artificial Sequence: Synthetic oligonucleotide
  Sense strand starting at position 2431 of SEQ ID NO: 1886462
guauguugugaacacuaau

SEQ ID NO: 2411543 - RNA, 19 nt, Artificial Sequence
  Description of Artificial Sequence: Synthetic oligonucleotide
  Antisense strand to SEQ ID NO: 2411542
auuaguguucacaacauac

SEQ ID NO: 2411544 - RNA, 19 nt, Artificial Sequence
  Description of Artificial Sequence: Synthetic oligonucleotide
  Sense strand starting at position 2587 of SEQ ID NO: 1886462
aaaugaccacgauguauua

SEQ ID NO: 2411545 - RNA, 19 nt, Artificial Sequence
  Description of Artificial Sequence: Synthetic oligonucleotide
  Antisense strand to SEQ ID NO: 2411544
uaauacaucguggucauuu

SEQ ID NO: 2411546 - RNA, 19 nt, Artificial Sequence
  Description of Artificial Sequence: Synthetic oligonucleotide
  Sense strand starting at position 2704 of SEQ ID NO: 1886462
cuuaguagguucucagaaa

SEQ ID NO: 2411547 - RNA, 19 nt, Artificial Sequence
  Description of Artificial Sequence: Synthetic oligonucleotide
  Antisense strand to SEQ ID NO: 2411546
uuucugagaaccuacuaag

SEQ ID NO: 2411548 - RNA, 19 nt, Artificial Sequence
  Description of Artificial Sequence: Synthetic oligonucleotide
  Sense strand starting at position 2718 of SEQ ID NO: 1886462
agaaauauuuacugaguga

SEQ ID NO: 2411549 - RNA, 19 nt, Artificial Sequence
  Description of Artificial Sequence: Synthetic oligonucleotide
  Antisense strand to SEQ ID NO: 2411548
ucacucaguaaauauuucu

SEQ ID NO: 2411550 - RNA, 19 nt, Artificial Sequence
  Description of Artificial Sequence: Synthetic oligonucleotide
  Sense strand starting at position 2759 of SEQ ID NO: 1886462
ugaggugagaauggugauu

SEQ ID NO: 2411551 - RNA, 19 nt, Artificial Sequence
  Description of Artificial Sequence: Synthetic oligonucleotide
  Antisense strand to SEQ ID NO: 2411550
aaucaccauucucaccuca

SEQ ID NO: 2411552 - RNA, 19 nt, Artificial Sequence
  Description of Artificial Sequence: Synthetic oligonucleotide
  Sense strand starting at position 2791 of SEQ ID NO: 1886462
cuuugaaccgauuacagua

SEQ ID NO: 2411553 - RNA, 19 nt, Artificial Sequence
  Description of Artificial Sequence: Synthetic oligonucleotide
  Antisense strand to SEQ ID NO: 2411552
uacuguaaucgguucaaag

SEQ ID NO: 2411554 - RNA, 19 nt, Artificial Sequence
  Description of Artificial Sequence: Synthetic oligonucleotide
  Sense strand starting at position 2927 of SEQ ID NO: 1886462
gggaaauugucucauuugg

SEQ ID NO: 2411555 - RNA, 19 nt, Artificial Sequence
  Description of Artificial Sequence: Synthetic oligonucleotide
  Antisense strand to SEQ ID NO: 2411554
ccaaaugagacaauuuccc

SEQ ID NO: 2411556 - RNA, 19 nt, Artificial Sequence
  Description of Artificial Sequence: Synthetic oligonucleotide
  Sense strand starting at position 3511 of SEQ ID NO: 1886462
auuugaaacucagagaagu

SEQ ID NO: 2411557 - RNA, 19 nt, Artificial Sequence
  Description of Artificial Sequence: Synthetic oligonucleotide
  Antisense strand to SEQ ID NO: 2411556
acuucucugaguuucaaau

SEQ ID NO: 2411558 - RNA, 19 nt, Artificial Sequence
  Description of Artificial Sequence: Synthetic oligonucleotide
  Sense strand starting at position 3751 of SEQ ID NO: 1886462
uccucagugggacaaguuu

SEQ ID NO: 2411559 - RNA, 19 nt, Artificial Sequence
  Description of Artificial Sequence: Synthetic oligonucleotide
  Antisense strand to SEQ ID NO: 2411558
aaacuugucccacugagga

SEQ ID NO: 2411560 - RNA, 19 nt, Artificial Sequence
  Description of Artificial Sequence: Synthetic oligonucleotide
  Sense strand starting at position 3760 of SEQ ID NO: 1886462
ggacaaguuugucuccaca

SEQ ID NO: 2411561 - RNA, 19 nt, Artificial Sequence
  Description of Artificial Sequence: Synthetic oligonucleotide
  Antisense strand to SEQ ID NO: 2411560
uguggagacaaacuugucc

SEQ ID NO: 2411562 - RNA, 19 nt, Artificial Sequence
  Description of Artificial Sequence: Synthetic oligonucleotide
  Sense strand starting at position 3763 of SEQ ID NO: 1886462
caaguuugucuccacagga

SEQ ID NO: 2411563 - RNA, 19 nt, Artificial Sequence
  Description of Artificial Sequence: Synthetic oligonucleotide
  Antisense strand to SEQ ID NO: 2411562
uccuguggagacaaacuug

SEQ ID NO: 2411564 - RNA, 19 nt, Artificial Sequence
  Description of Artificial Sequence: Synthetic oligonucleotide
  Sense strand starting at position 3970 of SEQ ID NO: 1886462
gcugaacucugacuuagag

SEQ ID NO: 2411565 - RNA, 19 nt, Artificial Sequence
  Description of Artificial Sequence: Synthetic oligonucleotide
  Antisense strand to SEQ ID NO: 2411564
cucuaagucagaguucagc

SEQ ID NO: 2411566 - RNA, 19 nt, Artificial Sequence
  Description of Artificial Sequence: Synthetic oligonucleotide
  Sense strand starting at position 2 of SEQ ID NO: 1886463
aagucugcuguggaaacaa

SEQ ID NO: 2411567 - RNA, 19 nt, Artificial Sequence
  Description of Artificial Sequence: Synthetic oligonucleotide
  Antisense strand to SEQ ID NO: 2411566
uuguuuccacagcagacuu

SEQ ID NO: 2411568 - RNA, 19 nt, Artificial Sequence
  Description of Artificial Sequence: Synthetic oligonucleotide
  Sense strand starting at position 21 of SEQ ID NO: 1886463
aggucuuguguacacagau

SEQ ID NO: 2411569 - RNA, 19 nt, Artificial Sequence
  Description of Artificial Sequence: Synthetic oligonucleotide
  Antisense strand to SEQ ID NO: 2411568
aucuguguacacaagaccu

SEQ ID NO: 2411570 - RNA, 19 nt, Artificial Sequence
  Description of Artificial Sequence: Synthetic oligonucleotide
  Sense strand starting at position 97 of SEQ ID NO: 1886463
ggaggugauugauugguua

SEQ ID NO: 2411571 - RNA, 19 nt, Artificial Sequence
  Description of Artificial Sequence: Synthetic oligonucleotide
  Antisense strand to SEQ ID NO: 2411570
uaaccaaucaaucaccucc

SEQ ID NO: 2411572 - RNA, 19 nt, Artificial Sequence
  Description of Artificial Sequence: Synthetic oligonucleotide
  Sense strand starting at position 99 of SEQ ID NO: 1886463
aggugauugauugguuaau

SEQ ID NO: 2411573 - RNA, 19 nt, Artificial Sequence
  Description of Artificial Sequence: Synthetic oligonucleotide
  Antisense strand to SEQ ID NO: 2411572
auuaaccaaucaaucaccu

SEQ ID NO: 2411574 - RNA, 19 nt, Artificial Sequence
  Description of Artificial Sequence: Synthetic oligonucleotide
  Sense strand starting at position 100 of SEQ ID NO: 1886463
ggugauugauugguuaaua

SEQ ID NO: 2411575 - RNA, 19 nt, Artificial Sequence
  Description of Artificial Sequence: Synthetic oligonucleotide
  Antisense strand to SEQ ID NO: 2411574
uauuaaccaaucaaucacc

SEQ ID NO: 2411576 - RNA, 19 nt, Artificial Sequence
  Description of Artificial Sequence: Synthetic oligonucleotide
  Sense strand starting at position 101 of SEQ ID NO: 1886463
gugauugauugguuaauaa

SEQ ID NO: 2411577 - RNA, 19 nt, Artificial Sequence
  Description of Artificial Sequence: Synthetic oligonucleotide
  Antisense strand to SEQ ID NO: 2411576
uuauuaaccaaucaaucac

SEQ ID NO: 2411578 - RNA, 19 nt, Artificial Sequence
  Description of Artificial Sequence: Synthetic oligonucleotide
  Sense strand starting at position 213 of SEQ ID NO: 1886463
gucagaucuaaaggugaac

SEQ ID NO: 2411579 - RNA, 19 nt, Artificial Sequence
  Description of Artificial Sequence: Synthetic oligonucleotide
  Antisense strand to SEQ ID NO: 2411578
guucaccuuuagaucugac

SEQ ID NO: 2411580 - RNA, 19 nt, Artificial Sequence
  Description of Artificial Sequence: Synthetic oligonucleotide
  Sense strand starting at position 226 of SEQ ID NO: 1886463
gugaacuugagguggugaa

SEQ ID NO: 2411581 - RNA, 19 nt, Artificial Sequence
  Description of Artificial Sequence: Synthetic oligonucleotide
  Antisense strand to SEQ ID NO: 2411580
uucaccaccucaaguucac

SEQ ID NO: 2411582 - RNA, 19 nt, Artificial Sequence
  Description of Artificial Sequence: Synthetic oligonucleotide
  Sense strand starting at position 227 of SEQ ID NO: 1886463
ugaacuugagguggugaaa

SEQ ID NO: 2411583 - RNA, 19 nt, Artificial Sequence
  Description of Artificial Sequence: Synthetic oligonucleotide
  Antisense strand to SEQ ID NO: 2411582
uuucaccaccucaaguuca

SEQ ID NO: 2411584 - RNA, 19 nt, Artificial Sequence
  Description of Artificial Sequence: Synthetic oligonucleotide
  Sense strand starting at position 238 of SEQ ID NO: 1886463
uggugaaacuaccuuggaa

SEQ ID NO: 2411585 - RNA, 19 nt, Artificial Sequence
  Description of Artificial Sequence: Synthetic oligonucleotide
  Antisense strand to SEQ ID NO: 2411584
uuccaagguaguuucacca

SEQ ID NO: 2411586 - RNA, 19 nt, Artificial Sequence
  Description of Artificial Sequence: Synthetic oligonucleotide
  Sense strand starting at position 240 of SEQ ID NO: 1886463
gugaaacuaccuuggaauu

SEQ ID NO: 2411587 - RNA, 19 nt, Artificial Sequence
  Description of Artificial Sequence: Synthetic oligonucleotide
  Antisense strand to SEQ ID NO: 2411586
aauuccaagguaguuucac

SEQ ID NO: 2411588 - RNA, 19 nt, Artificial Sequence
  Description of Artificial Sequence: Synthetic oligonucleotide
  Sense strand starting at position 473 of SEQ ID NO: 1886463
caucauuacguaggucaga

SEQ ID NO: 2411589 - RNA, 19 nt, Artificial Sequence
  Description of Artificial Sequence: Synthetic oligonucleotide
  Antisense strand to SEQ ID NO: 2411588
ucugaccuacguaaugaug

SEQ ID NO: 2411590 - RNA, 19 nt, Artificial Sequence
  Description of Artificial Sequence: Synthetic oligonucleotide
  Sense strand starting at position 474 of SEQ ID NO: 1886463
aucauuacguaggucagaa

SEQ ID NO: 2411591 - RNA, 19 nt, Artificial Sequence
  Description of Artificial Sequence: Synthetic oligonucleotide
  Antisense strand to SEQ ID NO: 2411590
uucugaccuacguaaugau

SEQ ID NO: 2411592 - RNA, 19 nt, Artificial Sequence
  Description of Artificial Sequence: Synthetic oligonucleotide
  Sense strand starting at position 476 of SEQ ID NO: 1886463
cauuacguaggucagaaau

SEQ ID NO: 2411593 - RNA, 19 nt, Artificial Sequence
  Description of Artificial Sequence: Synthetic oligonucleotide
  Antisense strand to SEQ ID NO: 2411592
auuucugaccuacguaaug

SEQ ID NO: 2411594 - RNA, 19 nt, Artificial Sequence
  Description of Artificial Sequence: Synthetic oligonucleotide
  Sense strand starting at position 527 of SEQ ID NO: 1886463
aguguuuaaauagguaaga

SEQ ID NO: 2411595 - RNA, 19 nt, Artificial Sequence
  Description of Artificial Sequence: Synthetic oligonucleotide
  Antisense strand to SEQ ID NO: 2411594
ucuuaccuauuuaaacacu

SEQ ID NO: 2411596 - RNA, 19 nt, Artificial Sequence
  Description of Artificial Sequence: Synthetic oligonucleotide
  Sense strand starting at position 528 of SEQ ID NO: 1886463
guguuuaaauagguaagaa

SEQ ID NO: 2411597 - RNA, 19 nt, Artificial Sequence
  Description of Artificial Sequence: Synthetic oligonucleotide
  Antisense strand to SEQ ID NO: 2411596
uucuuaccuauuuaaacac

SEQ ID NO: 2411598 - RNA, 19 nt, Artificial Sequence
  Description of Artificial Sequence: Synthetic oligonucleotide
  Sense strand starting at position 1345 of SEQ ID NO: 1886463
ccaggcuuuacuugagaag

SEQ ID NO: 2411599 - RNA, 19 nt, Artificial Sequence
  Description of Artificial Sequence: Synthetic oligonucleotide
  Antisense strand to SEQ ID NO: 2411598
cuucucaaguaaagccugg

SEQ ID NO: 2411600 - RNA, 19 nt, Artificial Sequence
  Description of Artificial Sequence: Synthetic oligonucleotide
  Sense strand starting at position 1362 of SEQ ID NO: 1886463
aggaaagccuuuccaggaa

SEQ ID NO: 2411601 - RNA, 19 nt, Artificial Sequence
  Description of Artificial Sequence: Synthetic oligonucleotide
  Antisense strand to SEQ ID NO: 2411600
uuccuggaaaggcuuuccu

SEQ ID NO: 2411602 - RNA, 19 nt, Artificial Sequence
  Description of Artificial Sequence: Synthetic oligonucleotide
  Sense strand starting at position 1433 of SEQ ID NO: 1886463
guagaagggaguugauaca

SEQ ID NO: 2411603 - RNA, 19 nt, Artificial Sequence
  Description of Artificial Sequence: Synthetic oligonucleotide
  Antisense strand to SEQ ID NO: 2411602
uguaucaacucccuucuac

SEQ ID NO: 2411604 - RNA, 19 nt, Artificial Sequence
  Description of Artificial Sequence: Synthetic oligonucleotide
  Sense strand starting at position 1443 of SEQ ID NO: 1886463
guugauacauaggucauaa

SEQ ID NO: 2411605 - RNA, 19 nt, Artificial Sequence
  Description of Artificial Sequence: Synthetic oligonucleotide
  Antisense strand to SEQ ID NO: 2411604
uuaugaccuauguaucaac

SEQ ID NO: 2411606 - RNA, 19 nt, Artificial Sequence
  Description of Artificial Sequence: Synthetic oligonucleotide
  Sense strand starting at position 1511 of SEQ ID NO: 1886463
aaauguaagcauuguugau

SEQ ID NO: 2411607 - RNA, 19 nt, Artificial Sequence
  Description of Artificial Sequence: Synthetic oligonucleotide
  Antisense strand to SEQ ID NO: 2411606
aucaacaaugcuuacauuu

SEQ ID NO: 2411608 - RNA, 19 nt, Artificial Sequence
  Description of Artificial Sequence: Synthetic oligonucleotide
  Sense strand starting at position 1513 of SEQ ID NO: 1886463
auguaagcauuguugauau

SEQ ID NO: 2411609 - RNA, 19 nt, Artificial Sequence
  Description of Artificial Sequence: Synthetic oligonucleotide
  Antisense strand to SEQ ID NO: 2411608
auaucaacaaugcuuacau

SEQ ID NO: 2411610 - RNA, 19 nt, Artificial Sequence
  Description of Artificial Sequence: Synthetic oligonucleotide
  Sense strand starting at position 1515 of SEQ ID NO: 1886463
guaagcauuguugauauca

SEQ ID NO: 2411611 - RNA, 19 nt, Artificial Sequence
  Description of Artificial Sequence: Synthetic oligonucleotide
  Antisense strand to SEQ ID NO: 2411610
ugauaucaacaaugcuuac

SEQ ID NO: 2411612 - RNA, 19 nt, Artificial Sequence
  Description of Artificial Sequence: Synthetic oligonucleotide
  Sense strand starting at position 1523 of SEQ ID NO: 1886463
uguugauaucauugcaaca

SEQ ID NO: 2411613 - RNA, 19 nt, Artificial Sequence
  Description of Artificial Sequence: Synthetic oligonucleotide
  Antisense strand to SEQ ID NO: 2411612
uguugcaaugauaucaaca

SEQ ID NO: 2411614 - RNA, 19 nt, Artificial Sequence
  Description of Artificial Sequence: Synthetic oligonucleotide
  Sense strand starting at position 1540 of SEQ ID NO: 1886463
cagugacaauggcuaugaa

SEQ ID NO: 2411615 - RNA, 19 nt, Artificial Sequence
  Description of Artificial Sequence: Synthetic oligonucleotide
  Antisense strand to SEQ ID NO: 2411614
uucauagccauugucacug

SEQ ID NO: 2411616 - RNA, 19 nt, Artificial Sequence
  Description of Artificial Sequence: Synthetic oligonucleotide
  Sense strand starting at position 1605 of SEQ ID NO: 1886463
augaacucgccuuaaauua

SEQ ID NO: 2411617 - RNA, 19 nt, Artificial Sequence
  Description of Artificial Sequence: Synthetic oligonucleotide
  Antisense strand to SEQ ID NO: 2411616
uaauuuaaggcgaguucau

SEQ ID NO: 2411618 - RNA, 19 nt, Artificial Sequence
  Description of Artificial Sequence: Synthetic oligonucleotide
  Sense strand starting at position 1801 of SEQ ID NO: 1886463
ggcaaaguccuauaucaaa

SEQ ID NO: 2411619 - RNA, 19 nt, Artificial Sequence
  Description of Artificial Sequence: Synthetic oligonucleotide
  Antisense strand to SEQ ID NO: 2411618
uuugauauaggacuuugcc

SEQ ID NO: 2411620 - RNA, 19 nt, Artificial Sequence
  Description of Artificial Sequence: Synthetic oligonucleotide
  Sense strand starting at position 2171 of SEQ ID NO: 1886463
gguaaugacucucuaugac

SEQ ID NO: 2411621 - RNA, 19 nt, Artificial Sequence
  Description of Artificial Sequence: Synthetic oligonucleotide
  Antisense strand to SEQ ID NO: 2411620
gucauagagagucauuacc

SEQ ID NO: 2411622 - RNA, 19 nt, Artificial Sequence
  Description of Artificial Sequence: Synthetic oligonucleotide
  Sense strand starting at position 2298 of SEQ ID NO: 1886463
guacauccaucugcagaua

SEQ ID NO: 2411623 - RNA, 19 nt, Artificial Sequence
  Description of Artificial Sequence: Synthetic oligonucleotide
  Antisense strand to SEQ ID NO: 2411622
uaucugcagauggauguac

SEQ ID NO: 2411624 - RNA, 19 nt, Artificial Sequence
  Description of Artificial Sequence: Synthetic oligonucleotide
  Sense strand starting at position 2366 of SEQ ID NO: 1886463
cgugaaauaaacugugauu

SEQ ID NO: 2411625 - RNA, 19 nt, Artificial Sequence
  Description of Artificial Sequence: Synthetic oligonucleotide
  Antisense strand to SEQ ID NO: 2411624
aaucacaguuuauuucacg

SEQ ID NO: 2411626 - RNA, 19 nt, Artificial Sequence
  Description of Artificial Sequence: Synthetic oligonucleotide
  Sense strand starting at position 2479 of SEQ ID NO: 1886463
aaaugcuaguugguugaga

SEQ ID NO: 2411627 - RNA, 19 nt, Artificial Sequence
  Description of Artificial Sequence: Synthetic oligonucleotide
  Antisense strand to SEQ ID NO: 2411626
ucucaaccaacuagcauuu

SEQ ID NO: 2411628 - RNA, 19 nt, Artificial Sequence
  Description of Artificial Sequence: Synthetic oligonucleotide
  Sense strand starting at position 2529 of SEQ ID NO: 1886463
ggaaaccuguuguuaaauu

SEQ ID NO: 2411629 - RNA, 19 nt, Artificial Sequence
  Description of Artificial Sequence: Synthetic oligonucleotide
  Antisense strand to SEQ ID NO: 2411628
aauuuaacaacagguuucc

SEQ ID NO: 2411630 - RNA, 19 nt, Artificial Sequence
  Description of Artificial Sequence: Synthetic oligonucleotide
  Sense strand starting at position 2543 of SEQ ID NO: 1886463
aaauuauggugacuuagca

SEQ ID NO: 2411631 - RNA, 19 nt, Artificial Sequence
  Description of Artificial Sequence: Synthetic oligonucleotide
  Antisense strand to SEQ ID NO: 2411630
ugcuaagucaccauaauuu

SEQ ID NO: 2411632 - RNA, 19 nt, Artificial Sequence
  Description of Artificial Sequence: Synthetic oligonucleotide
  Sense strand starting at position 3446 of SEQ ID NO: 1886463
ucugaaaugcaauaaugua

SEQ ID NO: 2411633 - RNA, 19 nt, Artificial Sequence
  Description of Artificial Sequence: Synthetic oligonucleotide
  Antisense strand to SEQ ID NO: 2411632
uacauuauugcauuucaga

SEQ ID NO: 2411634 - RNA, 19 nt, Artificial Sequence
  Description of Artificial Sequence: Synthetic oligonucleotide
  Sense strand starting at position 3454 of SEQ ID NO: 1886463
gcaauaauguauguaagga

SEQ ID NO: 2411635 - RNA, 19 nt, Artificial Sequence
  Description of Artificial Sequence: Synthetic oligonucleotide
  Antisense strand to SEQ ID NO: 2411634
uccuuacauacauuauugc

SEQ ID NO: 2411636 - RNA, 19 nt, Artificial Sequence
  Description of Artificial Sequence: Synthetic oligonucleotide
  Sense strand starting at position 3536 of SEQ ID NO: 1886463
agugcugauguugaaacua

SEQ ID NO: 2411637 - RNA, 19 nt, Artificial Sequence
  Description of Artificial Sequence: Synthetic oligonucleotide
  Antisense strand to SEQ ID NO: 2411636
uaguuucaacaucagcacu

SEQ ID NO: 2411638 - RNA, 19 nt, Artificial Sequence
  Description of Artificial Sequence: Synthetic oligonucleotide
  Sense strand starting at position 3566 of SEQ ID NO: 1886463
gagagaagugucuaggcau

SEQ ID NO: 2411639 - RNA, 19 nt, Artificial Sequence
  Description of Artificial Sequence: Synthetic oligonucleotide
  Antisense strand to SEQ ID NO: 2411638
augccuagacacuucucuc

SEQ ID NO: 2411640 - RNA, 19 nt, Artificial Sequence
  Description of Artificial Sequence: Synthetic oligonucleotide
  Sense strand starting at position 3610 of SEQ ID NO: 1886463
uuaggagugguguauacuu

SEQ ID NO: 2411641 - RNA, 19 nt, Artificial Sequence
  Description of Artificial Sequence: Synthetic oligonucleotide
  Antisense strand to SEQ ID NO: 2411640
aaguauacaccacuccuaa

SEQ ID NO: 2411642 - RNA, 19 nt, Artificial Sequence
  Description of Artificial Sequence: Synthetic oligonucleotide
  Sense strand starting at position 3646 of SEQ ID NO: 1886463
uugguuccaucuuugaaac

SEQ ID NO: 2411643 - RNA, 19 nt, Artificial Sequence
  Description of Artificial Sequence: Synthetic oligonucleotide
  Antisense strand to SEQ ID NO: 2411642
guuucaaagauggaaccaa

SEQ ID NO: 2411644 - RNA, 19 nt, Artificial Sequence
  Description of Artificial Sequence: Synthetic oligonucleotide
  Sense strand starting at position 3675 of SEQ ID NO: 1886463
ucuguucuuccugauauca

SEQ ID NO: 2411645 - RNA, 19 nt, Artificial Sequence
  Description of Artificial Sequence: Synthetic oligonucleotide
  Antisense strand to SEQ ID NO: 2411644
ugauaucaggaagaacaga

SEQ ID NO: 2411646 - RNA, 19 nt, Artificial Sequence
  Description of Artificial Sequence: Synthetic oligonucleotide
  Sense strand starting at position 248 of SEQ ID NO: 1886464
ucugaaaugcaauaaugua

SEQ ID NO: 2411647 - RNA, 19 nt, Artificial Sequence
  Description of Artificial Sequence: Synthetic oligonucleotide
  Antisense strand to SEQ ID NO: 2411646
uacauuauugcauuucaga

SEQ ID NO: 2411648 - RNA, 19 nt, Artificial Sequence
  Description of Artificial Sequence: Synthetic oligonucleotide
  Sense strand starting at position 256 of SEQ ID NO: 1886464
gcaauaauguauguaagga

SEQ ID NO: 2411649 - RNA, 19 nt, Artificial Sequence
  Description of Artificial Sequence: Synthetic oligonucleotide
  Antisense strand to SEQ ID NO: 2411648
uccuuacauacauuauugc

SEQ ID NO: 2411650 - RNA, 19 nt, Artificial Sequence
  Description of Artificial Sequence: Synthetic oligonucleotide
  Sense strand starting at position 338 of SEQ ID NO: 1886464
agugcugauguugaaacua

SEQ ID NO: 2411651 - RNA, 19 nt, Artificial Sequence
  Description of Artificial Sequence: Synthetic oligonucleotide
  Antisense strand to SEQ ID NO: 2411650
uaguuucaacaucagcacu

SEQ ID NO: 2411652 - RNA, 19 nt, Artificial Sequence
  Description of Artificial Sequence: Synthetic oligonucleotide
  Sense strand starting at position 368 of SEQ ID NO: 1886464
gagagaagugucuaggcau

SEQ ID NO: 2411653 - RNA, 19 nt, Artificial Sequence
  Description of Artificial Sequence: Synthetic oligonucleotide
  Antisense strand to SEQ ID NO: 2411652
augccuagacacuucucuc

SEQ ID NO: 2411654 - RNA, 19 nt, Artificial Sequence
  Description of Artificial Sequence: Synthetic oligonucleotide
  Sense strand starting at position 412 of SEQ ID NO: 1886464
uuaggagugguguauacuu

SEQ ID NO: 2411655 - RNA, 19 nt, Artificial Sequence
  Description of Artificial Sequence: Synthetic oligonucleotide
  Antisense strand to SEQ ID NO: 2411654
aaguauacaccacuccuaa

SEQ ID NO: 2411656 - RNA, 19 nt, Artificial Sequence
  Description of Artificial Sequence: Synthetic oligonucleotide
  Sense strand starting at position 448 of SEQ ID NO: 1886464
uugguuccaucuuugaaac

SEQ ID NO: 2411657 - RNA, 19 nt, Artificial Sequence
  Description of Artificial Sequence: Synthetic oligonucleotide
  Antisense strand to SEQ ID NO: 2411656
guuucaaagauggaaccaa

SEQ ID NO: 2411658 - RNA, 19 nt, Artificial Sequence
  Description of Artificial Sequence: Synthetic oligonucleotide
  Sense strand starting at position 477 of SEQ ID NO: 1886464
ucuguucuuccugauauca

SEQ ID NO: 2411659 - RNA, 19 nt, Artificial Sequence
  Description of Artificial Sequence: Synthetic oligonucleotide
  Antisense strand to SEQ ID NO: 2411658
ugauaucaggaagaacaga

SEQ ID NO: 2411660 - RNA, 19 nt, Artificial Sequence
  Description of Artificial Sequence: Synthetic oligonucleotide
  Sense strand starting at position 485 of SEQ ID NO: 1886464
uccugauaucaugggugcu

SEQ ID NO: 2411661 - RNA, 19 nt, Artificial Sequence
  Description of Artificial Sequence: Synthetic oligonucleotide
  Antisense strand to SEQ ID NO: 2411660
agcacccaugauaucagga

SEQ ID NO: 2411662 - RNA, 19 nt, Artificial Sequence
  Description of Artificial Sequence: Synthetic oligonucleotide
  Sense strand starting at position 961 of SEQ ID NO: 1886464
ucaagaugugauuaagcua

SEQ ID NO: 2411663 - RNA, 19 nt, Artificial Sequence
  Description of Artificial Sequence: Synthetic oligonucleotide
  Antisense strand to SEQ ID NO: 2411662
uagcuuaaucacaucuuga

SEQ ID NO: 2411664 - RNA, 19 nt, Artificial Sequence
  Description of Artificial Sequence: Synthetic oligonucleotide
  Sense strand starting at position 995 of SEQ ID NO: 1886464
ugagauuauccugguuguc

SEQ ID NO: 2411665 - RNA, 19 nt, Artificial Sequence
  Description of Artificial Sequence: Synthetic oligonucleotide
  Antisense strand to SEQ ID NO: 2411664
gacaaccaggauaaucuca

SEQ ID NO: 2411666 - RNA, 19 nt, Artificial Sequence
  Description of Artificial Sequence: Synthetic oligonucleotide
  Sense strand starting at position 997 of SEQ ID NO: 1886464
agauuauccugguugucua

SEQ ID NO: 2411667 - RNA, 19 nt, Artificial Sequence
  Description of Artificial Sequence: Synthetic oligonucleotide
  Antisense strand to SEQ ID NO: 2411666
uagacaaccaggauaaucu

SEQ ID NO: 2411668 - RNA, 19 nt, Artificial Sequence
  Description of Artificial Sequence: Synthetic oligonucleotide
  Sense strand starting at position 1000 of SEQ ID NO: 1886464
uuauccugguugucuagau

SEQ ID NO: 2411669 - RNA, 19 nt, Artificial Sequence
  Description of Artificial Sequence: Synthetic oligonucleotide
  Antisense strand to SEQ ID NO: 2411668
aucuagacaaccaggauaa

SEQ ID NO: 2411670 - RNA, 19 nt, Artificial Sequence
  Description of Artificial Sequence: Synthetic oligonucleotide
  Sense strand starting at position 1028 of SEQ ID NO: 1886464
gguaguccauucuugaaau

SEQ ID NO: 2411671 - RNA, 19 nt, Artificial Sequence
  Description of Artificial Sequence: Synthetic oligonucleotide
  Antisense strand to SEQ ID NO: 2411670
auuucaagaauggacuacc

SEQ ID NO: 2411672 - RNA, 19 nt, Artificial Sequence
  Description of Artificial Sequence: Synthetic oligonucleotide
  Sense strand starting at position 1284 of SEQ ID NO: 1886464
ucacuaucgagaggacagu

SEQ ID NO: 2411673 - RNA, 19 nt, Artificial Sequence
  Description of Artificial Sequence: Synthetic oligonucleotide
  Antisense strand to SEQ ID NO: 2411672
acuguccucucgauaguga

SEQ ID NO: 2411674 - RNA, 19 nt, Artificial Sequence
  Description of Artificial Sequence: Synthetic oligonucleotide
  Sense strand starting at position 1435 of SEQ ID NO: 1886464
cuauaucaaguccaaugua

SEQ ID NO: 2411675 - RNA, 19 nt, Artificial Sequence
  Description of Artificial Sequence: Synthetic oligonucleotide
  Antisense strand to SEQ ID NO: 2411674
uacauuggacuugauauag

SEQ ID NO: 2411676 - RNA, 19 nt, Artificial Sequence
  Description of Artificial Sequence: Synthetic oligonucleotide
  Sense strand starting at position 1484 of SEQ ID NO: 1886464
gagggucagaguuacugua

SEQ ID NO: 2411677 - RNA, 19 nt, Artificial Sequence
  Description of Artificial Sequence: Synthetic oligonucleotide
  Antisense strand to SEQ ID NO: 2411676
uacaguaacucugacccuc

SEQ ID NO: 2411678 - RNA, 19 nt, Artificial Sequence
  Description of Artificial Sequence: Synthetic oligonucleotide
  Sense strand starting at position 1486 of SEQ ID NO: 1886464
gggucagaguuacuguaga

SEQ ID NO: 2411679 - RNA, 19 nt, Artificial Sequence
  Description of Artificial Sequence: Synthetic oligonucleotide
  Antisense strand to SEQ ID NO: 2411678
ucuacaguaacucugaccc

SEQ ID NO: 2411680 - RNA, 19 nt, Artificial Sequence
  Description of Artificial Sequence: Synthetic oligonucleotide
  Sense strand starting at position 1491 of SEQ ID NO: 1886464
agaguuacuguagagguga

SEQ ID NO: 2411681 - RNA, 19 nt, Artificial Sequence
  Description of Artificial Sequence: Synthetic oligonucleotide
  Antisense strand to SEQ ID NO: 2411680
ucaccucuacaguaacucu

SEQ ID NO: 2411682 - RNA, 19 nt, Artificial Sequence
  Description of Artificial Sequence: Synthetic oligonucleotide
  Sense strand starting at position 1641 of SEQ ID NO: 1886464
ggauucucccuuggagcuu

SEQ ID NO: 2411683 - RNA, 19 nt, Artificial Sequence
  Description of Artificial Sequence: Synthetic oligonucleotide
  Antisense strand to SEQ ID NO: 2411682
aagcuccaagggagaaucc

SEQ ID NO: 2411684 - RNA, 19 nt, Artificial Sequence
  Description of Artificial Sequence: Synthetic oligonucleotide
  Sense strand starting at position 1740 of SEQ ID NO: 1886464
ggauaauaaauaugcgugu

SEQ ID NO: 2411685 - RNA, 19 nt, Artificial Sequence
  Description of Artificial Sequence: Synthetic oligonucleotide
  Antisense strand to SEQ ID NO: 2411684
acacgcauauuuauuaucc

SEQ ID NO: 2411686 - RNA, 19 nt, Artificial Sequence
  Description of Artificial Sequence: Synthetic oligonucleotide
  Sense strand starting at position 2200 of SEQ ID NO: 1886464
gggcuuggucugaggucuu

SEQ ID NO: 2411687 - RNA, 19 nt, Artificial Sequence
  Description of Artificial Sequence: Synthetic oligonucleotide
  Antisense strand to SEQ ID NO: 2411686
aagaccucagaccaagccc

SEQ ID NO: 2411688 - RNA, 19 nt, Artificial Sequence
  Description of Artificial Sequence: Synthetic oligonucleotide
  Sense strand starting at position 2210 of SEQ ID NO: 1886464
ugaggucuucucugaugac

SEQ ID NO: 2411689 - RNA, 19 nt, Artificial Sequence
  Description of Artificial Sequence: Synthetic oligonucleotide
  Antisense strand to SEQ ID NO: 2411688
gucaucagagaagaccuca

SEQ ID NO: 2411690 - RNA, 19 nt, Artificial Sequence
  Description of Artificial Sequence: Synthetic oligonucleotide
  Sense strand starting at position 2222 of SEQ ID NO: 1886464
ugaugacaucugcauguua

SEQ ID NO: 2411691 - RNA, 19 nt, Artificial Sequence
  Description of Artificial Sequence: Synthetic oligonucleotide
  Antisense strand to SEQ ID NO: 2411690
uaacaugcagaugucauca

SEQ ID NO: 2411692 - RNA, 19 nt, Artificial Sequence
  Description of Artificial Sequence: Synthetic oligonucleotide
  Sense strand starting at position 2224 of SEQ ID NO: 1886464
augacaucugcauguuaaa

SEQ ID NO: 2411693 - RNA, 19 nt, Artificial Sequence
  Description of Artificial Sequence: Synthetic oligonucleotide
  Antisense strand to SEQ ID NO: 2411692
uuuaacaugcagaugucau

SEQ ID NO: 2411694 - RNA, 19 nt, Artificial Sequence
  Description of Artificial Sequence: Synthetic oligonucleotide
  Sense strand starting at position 2425 of SEQ ID NO: 1886464
gaaugauggcugggcuaug

SEQ ID NO: 2411695 - RNA, 19 nt, Artificial Sequence
  Description of Artificial Sequence: Synthetic oligonucleotide
  Antisense strand to SEQ ID NO: 2411694
cauagcccagccaucauuc

SEQ ID NO: 2411696 - RNA, 19 nt, Artificial Sequence
  Description of Artificial Sequence: Synthetic oligonucleotide
  Sense strand starting at position 2456 of SEQ ID NO: 1886464
auuuaucaguuuggaugaa

SEQ ID NO: 2411697 - RNA, 19 nt, Artificial Sequence
  Description of Artificial Sequence: Synthetic oligonucleotide
  Antisense strand to SEQ ID NO: 2411696
uucauccaaacugauaaau

SEQ ID NO: 2411698 - RNA, 19 nt, Artificial Sequence
  Description of Artificial Sequence: Synthetic oligonucleotide
  Sense strand starting at position 2539 of SEQ ID NO: 1886464
gucaguguugaauaaagau

SEQ ID NO: 2411699 - RNA, 19 nt, Artificial Sequence
  Description of Artificial Sequence: Synthetic oligonucleotide
  Antisense strand to SEQ ID NO: 2411698
aucuuuauucaacacugac

SEQ ID NO: 2411700 - RNA, 19 nt, Artificial Sequence
  Description of Artificial Sequence: Synthetic oligonucleotide
  Sense strand starting at position 2632 of SEQ ID NO: 1886464
gugugucuuccucauuaac

SEQ ID NO: 2411701 - RNA, 19 nt, Artificial Sequence
  Description of Artificial Sequence: Synthetic oligonucleotide
  Antisense strand to SEQ ID NO: 2411700
guuaaugaggaagacacac

SEQ ID NO: 2411702 - RNA, 19 nt, Artificial Sequence
  Description of Artificial Sequence: Synthetic oligonucleotide
  Sense strand starting at position 2752 of SEQ ID NO: 1886464
ggaagucugagcuggcaga

SEQ ID NO: 2411703 - RNA, 19 nt, Artificial Sequence
  Description of Artificial Sequence: Synthetic oligonucleotide
  Antisense strand to SEQ ID NO: 2411702
ucugccagcucagacuucc

SEQ ID NO: 2411704 - RNA, 19 nt, Artificial Sequence
  Description of Artificial Sequence: Synthetic oligonucleotide
  Sense strand starting at position 2862 of SEQ ID NO: 1886464
gccuauuucucaguguaca

SEQ ID NO: 2411705 - RNA, 19 nt, Artificial Sequence
  Description of Artificial Sequence: Synthetic oligonucleotide
  Antisense strand to SEQ ID NO: 2411704
uguacacugagaaauaggc

SEQ ID NO: 2411706 - RNA, 19 nt, Artificial Sequence
  Description of Artificial Sequence: Synthetic oligonucleotide
  Sense strand starting at position 2863 of SEQ ID NO: 1886464
ccuauuucucaguguacac

SEQ ID NO: 2411707 - RNA, 19 nt, Artificial Sequence
  Description of Artificial Sequence: Synthetic oligonucleotide
  Antisense strand to SEQ ID NO: 2411706
guguacacugagaaauagg

SEQ ID NO: 2411708 - RNA, 19 nt, Artificial Sequence
  Description of Artificial Sequence: Synthetic oligonucleotide
  Sense strand starting at position 3155 of SEQ ID NO: 1886464
cagauaauugcuggcugaa

SEQ ID NO: 2411709 - RNA, 19 nt, Artificial Sequence
  Description of Artificial Sequence: Synthetic oligonucleotide
  Antisense strand to SEQ ID NO: 2411708
uucagccagcaauuaucug

SEQ ID NO: 2411710 - RNA, 19 nt, Artificial Sequence
  Description of Artificial Sequence: Synthetic oligonucleotide
  Sense strand starting at position 3157 of SEQ ID NO: 1886464
gauaauugcuggcugaaau

SEQ ID NO: 2411711 - RNA, 19 nt, Artificial Sequence
  Description of Artificial Sequence: Synthetic oligonucleotide
  Antisense strand to SEQ ID NO: 2411710
auuucagccagcaauuauc

SEQ ID NO: 2411712 - RNA, 19 nt, Artificial Sequence
  Description of Artificial Sequence: Synthetic oligonucleotide
  Sense strand starting at position 3158 of SEQ ID NO: 1886464
auaauugcuggcugaaaug

SEQ ID NO: 2411713 - RNA, 19 nt, Artificial Sequence
  Description of Artificial Sequence: Synthetic oligonucleotide
  Antisense strand to SEQ ID NO: 2411712
cauuucagccagcaauuau

SEQ ID NO: 2411714 - RNA, 19 nt, Artificial Sequence
  Description of Artificial Sequence: Synthetic oligonucleotide
  Sense strand starting at position 3713 of SEQ ID NO: 1886464
gaaugaaacugagagcaaa

SEQ ID NO: 2411715 - RNA, 19 nt, Artificial Sequence
  Description of Artificial Sequence: Synthetic oligonucleotide
  Antisense strand to SEQ ID NO: 2411714
uuugcucucaguuucauuc

SEQ ID NO: 2411716 - RNA, 19 nt, Artificial Sequence
  Description of Artificial Sequence: Synthetic oligonucleotide
  Sense strand starting at position 3733 of SEQ ID NO: 1886464
gagcuucuagaagauguua

SEQ ID NO: 2411717 - RNA, 19 nt, Artificial Sequence
  Description of Artificial Sequence: Synthetic oligonucleotide
  Antisense strand to SEQ ID NO: 2411716
uaacaucuucuagaagcuc

SEQ ID NO: 2411718 - RNA, 19 nt, Artificial Sequence
  Description of Artificial Sequence: Synthetic oligonucleotide
  Sense strand starting at position 3735 of SEQ ID NO: 1886464
gcuucuagaagauguuaag

SEQ ID NO: 2411719 - RNA, 19 nt, Artificial Sequence
  Description of Artificial Sequence: Synthetic oligonucleotide
  Antisense strand to SEQ ID NO: 2411718
cuuaacaucuucuagaagc

SEQ ID NO: 2411720 - RNA, 19 nt, Artificial Sequence
  Description of Artificial Sequence: Synthetic oligonucleotide
  Sense strand starting at position 3741 of SEQ ID NO: 1886464
agaagauguuaagcaacuu

SEQ ID NO: 2411721 - RNA, 19 nt, Artificial Sequence
  Description of Artificial Sequence: Synthetic oligonucleotide
  Antisense strand to SEQ ID NO: 2411720
aaguugcuuaacaucuucu

SEQ ID NO: 2411722 - RNA, 19 nt, Artificial Sequence
  Description of Artificial Sequence: Synthetic oligonucleotide
  Sense strand starting at position 3762 of SEQ ID NO: 1886464
ucaagaucccacugcuagu

SEQ ID NO: 2411723 - RNA, 19 nt, Artificial Sequence
  Description of Artificial Sequence: Synthetic oligonucleotide
  Antisense strand to SEQ ID NO: 2411722
acuagcagugggaucuuga

SEQ ID NO: 2411724 - RNA, 19 nt, Artificial Sequence
  Description of Artificial Sequence: Synthetic oligonucleotide
  Sense strand starting at position 3963 of SEQ ID NO: 1886464
accugaauucuaugaccug

SEQ ID NO: 2411725 - RNA, 19 nt, Artificial Sequence
  Description of Artificial Sequence: Synthetic oligonucleotide
  Antisense strand to SEQ ID NO: 2411724
caggucauagaauucaggu

SEQ ID NO: 2411726 - RNA, 19 nt, Artificial Sequence
  Description of Artificial Sequence: Synthetic oligonucleotide
  Sense strand starting at position 84 of SEQ ID NO: 1886465
cuguaaugucuccaaagug

SEQ ID NO: 2411727 - RNA, 19 nt, Artificial Sequence
  Description of Artificial Sequence: Synthetic oligonucleotide
  Antisense strand to SEQ ID NO: 2411726
cacuuuggagacauuacag

SEQ ID NO: 2411728 - RNA, 19 nt, Artificial Sequence
  Description of Artificial Sequence: Synthetic oligonucleotide
  Sense strand starting at position 385 of SEQ ID NO: 1886465
acgugagauuccucuggga

SEQ ID NO: 2411729 - RNA, 19 nt, Artificial Sequence
  Description of Artificial Sequence: Synthetic oligonucleotide
  Antisense strand to SEQ ID NO: 2411728
ucccagaggaaucucacgu

SEQ ID NO: 2411730 - RNA, 19 nt, Artificial Sequence
  Description of Artificial Sequence: Synthetic oligonucleotide
  Sense strand starting at position 387 of SEQ ID NO: 1886465
gugagauuccucugggaca

SEQ ID NO: 2411731 - RNA, 19 nt, Artificial Sequence
  Description of Artificial Sequence: Synthetic oligonucleotide
  Antisense strand to SEQ ID NO: 2411730
ugucccagaggaaucucac

SEQ ID NO: 2411732 - RNA, 19 nt, Artificial Sequence
  Description of Artificial Sequence: Synthetic oligonucleotide
  Sense strand starting at position 389 of SEQ ID NO: 1886465
gagauuccucugggacauu

SEQ ID NO: 2411733 - RNA, 19 nt, Artificial Sequence
  Description of Artificial Sequence: Synthetic oligonucleotide
  Antisense strand to SEQ ID NO: 2411732
aaugucccagaggaaucuc

SEQ ID NO: 2411734 - RNA, 19 nt, Artificial Sequence
  Description of Artificial Sequence: Synthetic oligonucleotide
  Sense strand starting at position 390 of SEQ ID NO: 1886465
agauuccucugggacauuu

SEQ ID NO: 2411735 - RNA, 19 nt, Artificial Sequence
  Description of Artificial Sequence: Synthetic oligonucleotide
  Antisense strand to SEQ ID NO: 2411734
aaaugucccagaggaaucu

SEQ ID NO: 2411736 - RNA, 19 nt, Artificial Sequence
  Description of Artificial Sequence: Synthetic oligonucleotide
  Sense strand starting at position 561 of SEQ ID NO: 1886465
ugcauuugggcuggucaca

SEQ ID NO: 2411737 - RNA, 19 nt, Artificial Sequence
  Description of Artificial Sequence: Synthetic oligonucleotide
  Antisense strand to SEQ ID NO: 2411736
ugugaccagcccaaaugca

SEQ ID NO: 2411738 - RNA, 19 nt, Artificial Sequence
  Description of Artificial Sequence: Synthetic oligonucleotide
  Sense strand starting at position 651 of SEQ ID NO: 1886465
ccauuucuuuaggaaaguu

SEQ ID NO: 2411739 - RNA, 19 nt, Artificial Sequence
  Description of Artificial Sequence: Synthetic oligonucleotide
  Antisense strand to SEQ ID NO: 2411738
aacuuuccuaaagaaaugg

SEQ ID NO: 2411740 - RNA, 19 nt, Artificial Sequence
  Description of Artificial Sequence: Synthetic oligonucleotide
  Sense strand starting at position 680 of SEQ ID NO: 1886465
cucugaaggcucuaaucua

SEQ ID NO: 2411741 - RNA, 19 nt, Artificial Sequence
  Description of Artificial Sequence: Synthetic oligonucleotide
  Antisense strand to SEQ ID NO: 2411740
uagauuagagccuucagag

SEQ ID NO: 2411742 - RNA, 19 nt, Artificial Sequence
  Description of Artificial Sequence: Synthetic oligonucleotide
  Sense strand starting at position 691 of SEQ ID NO: 1886465
cuaaucuaagucugcugaa

SEQ ID NO: 2411743 - RNA, 19 nt, Artificial Sequence
  Description of Artificial Sequence: Synthetic oligonucleotide
  Antisense strand to SEQ ID NO: 2411742
uucagcagacuuagauuag

SEQ ID NO: 2411744 - RNA, 19 nt, Artificial Sequence
  Description of Artificial Sequence: Synthetic oligonucleotide
  Sense strand starting at position 717 of SEQ ID NO: 1886465
acaagaaauuaacaggaga

SEQ ID NO: 2411745 - RNA, 19 nt, Artificial Sequence
  Description of Artificial Sequence: Synthetic oligonucleotide
  Antisense strand to SEQ ID NO: 2411744
ucuccuguuaauuucuugu

SEQ ID NO: 2411746 - RNA, 19 nt, Artificial Sequence
  Description of Artificial Sequence: Synthetic oligonucleotide
  Sense strand starting at position 865 of SEQ ID NO: 1886465
cauggauagccagguagaa

SEQ ID NO: 2411747 - RNA, 19 nt, Artificial Sequence
  Description of Artificial Sequence: Synthetic oligonucleotide
  Antisense strand to SEQ ID NO: 2411746
uucuaccuggcuauccaug

SEQ ID NO: 2411748 - RNA, 19 nt, Artificial Sequence
  Description of Artificial Sequence: Synthetic oligonucleotide
  Sense strand starting at position 1077 of SEQ ID NO: 1886465
gguuccuggcaucaugaaa

SEQ ID NO: 2411749 - RNA, 19 nt, Artificial Sequence
  Description of Artificial Sequence: Synthetic oligonucleotide
  Antisense strand to SEQ ID NO: 2411748
uuucaugaugccaggaacc

SEQ ID NO: 2411750 - RNA, 19 nt, Artificial Sequence
  Description of Artificial Sequence: Synthetic oligonucleotide
  Sense strand starting at position 1129 of SEQ ID NO: 1886465
uugaauccuguguaaccau

SEQ ID NO: 2411751 - RNA, 19 nt, Artificial Sequence
  Description of Artificial Sequence: Synthetic oligonucleotide
  Antisense strand to SEQ ID NO: 2411750
augguuacacaggauucaa

SEQ ID NO: 2411752 - RNA, 19 nt, Artificial Sequence
  Description of Artificial Sequence: Synthetic oligonucleotide
  Sense strand starting at position 1297 of SEQ ID NO: 1886465
gucaaagcccgguacauaa

SEQ ID NO: 2411753 - RNA, 19 nt, Artificial Sequence
  Description of Artificial Sequence: Synthetic oligonucleotide
  Antisense strand to SEQ ID NO: 2411752
uuauguaccgggcuuugac

SEQ ID NO: 2411754 - RNA, 19 nt, Artificial Sequence
  Description of Artificial Sequence: Synthetic oligonucleotide
  Sense strand starting at position 1347 of SEQ ID NO: 1886465
acagaucuugcagaucagu

SEQ ID NO: 2411755 - RNA, 19 nt, Artificial Sequence
  Description of Artificial Sequence: Synthetic oligonucleotide
  Antisense strand to SEQ ID NO: 2411754
acugaucugcaagaucugu

SEQ ID NO: 2411756 - RNA, 19 nt, Artificial Sequence
  Description of Artificial Sequence: Synthetic oligonucleotide
  Sense strand starting at position 1397 of SEQ ID NO: 1886465
aggcuauuguaauugaaga

SEQ ID NO: 2411757 - RNA, 19 nt, Artificial Sequence
  Description of Artificial Sequence: Synthetic oligonucleotide
  Antisense strand to SEQ ID NO: 2411756
ucuucaauuacaauagccu

SEQ ID NO: 2411758 - RNA, 19 nt, Artificial Sequence
  Description of Artificial Sequence: Synthetic oligonucleotide
  Sense strand starting at position 1398 of SEQ ID NO: 1886465
ggcuauuguaauugaagac

SEQ ID NO: 2411759 - RNA, 19 nt, Artificial Sequence
  Description of Artificial Sequence: Synthetic oligonucleotide
  Antisense strand to SEQ ID NO: 2411758
gucuucaauuacaauagcc

SEQ ID NO: 2411760 - RNA, 19 nt, Artificial Sequence
  Description of Artificial Sequence: Synthetic oligonucleotide
  Sense strand starting at position 1476 of SEQ ID NO: 1886465
ugagacuucuccuuugggu

SEQ ID NO: 2411761 - RNA, 19 nt, Artificial Sequence
  Description of Artificial Sequence: Synthetic oligonucleotide
  Antisense strand to SEQ ID NO: 2411760
acccaaaggagaagucuca

SEQ ID NO: 2411762 - RNA, 19 nt, Artificial Sequence
  Description of Artificial Sequence: Synthetic oligonucleotide
  Sense strand starting at position 1483 of SEQ ID NO: 1886465
ucuccuuugggugggaaga

SEQ ID NO: 2411763 - RNA, 19 nt, Artificial Sequence
  Description of Artificial Sequence: Synthetic oligonucleotide
  Antisense strand to SEQ ID NO: 2411762
ucuucccacccaaaggaga

SEQ ID NO: 2411764 - RNA, 19 nt, Artificial Sequence
  Description of Artificial Sequence: Synthetic oligonucleotide
  Sense strand starting at position 2072 of SEQ ID NO: 1886465
uuuaucaacucggugaacu

SEQ ID NO: 2411765 - RNA, 19 nt, Artificial Sequence
  Description of Artificial Sequence: Synthetic oligonucleotide
  Antisense strand to SEQ ID NO: 2411764
aguucaccgaguugauaaa

SEQ ID NO: 2411766 - RNA, 19 nt, Artificial Sequence
  Description of Artificial Sequence: Synthetic oligonucleotide
  Sense strand starting at position 2073 of SEQ ID NO: 1886465
uuaucaacucggugaacuc

SEQ ID NO: 2411767 - RNA, 19 nt, Artificial Sequence
  Description of Artificial Sequence: Synthetic oligonucleotide
  Antisense strand to SEQ ID NO: 2411766
gaguucaccgaguugauaa

SEQ ID NO: 2411768 - RNA, 19 nt, Artificial Sequence
  Description of Artificial Sequence: Synthetic oligonucleotide
  Sense strand starting at position 2450 of SEQ ID NO: 1886465
gguacuuaggguuaguaau

SEQ ID NO: 2411769 - RNA, 19 nt, Artificial Sequence
  Description of Artificial Sequence: Synthetic oligonucleotide
  Antisense strand to SEQ ID NO: 2411768
auuacuaacccuaaguacc

SEQ ID NO: 2411770 - RNA, 19 nt, Artificial Sequence
  Description of Artificial Sequence: Synthetic oligonucleotide
  Sense strand starting at position 2452 of SEQ ID NO: 1886465
uacuuaggguuaguaauaa

SEQ ID NO: 2411771 - RNA, 19 nt, Artificial Sequence
  Description of Artificial Sequence: Synthetic oligonucleotide
  Antisense strand to SEQ ID NO: 2411770
uuauuacuaacccuaagua

SEQ ID NO: 2411772 - RNA, 19 nt, Artificial Sequence
  Description of Artificial Sequence: Synthetic oligonucleotide
  Sense strand starting at position 2479 of SEQ ID NO: 1886465
auaauacuaucguuucuga

SEQ ID NO: 2411773 - RNA, 19 nt, Artificial Sequence
  Description of Artificial Sequence: Synthetic oligonucleotide
  Antisense strand to SEQ ID NO: 2411772
ucagaaacgauaguauuau

SEQ ID NO: 2411774 - RNA, 19 nt, Artificial Sequence
  Description of Artificial Sequence: Synthetic oligonucleotide
  Sense strand starting at position 2606 of SEQ ID NO: 1886465
acuggaaacugucugugua

SEQ ID NO: 2411775 - RNA, 19 nt, Artificial Sequence
  Description of Artificial Sequence: Synthetic oligonucleotide
  Antisense strand to SEQ ID NO: 2411774
uacacagacaguuuccagu

SEQ ID NO: 2411776 - RNA, 19 nt, Artificial Sequence
  Description of Artificial Sequence: Synthetic oligonucleotide
  Sense strand starting at position 2608 of SEQ ID NO: 1886465
uggaaacugucuguguaac

SEQ ID NO: 2411777 - RNA, 19 nt, Artificial Sequence
  Description of Artificial Sequence: Synthetic oligonucleotide
  Antisense strand to SEQ ID NO: 2411776
guuacacagacaguuucca

SEQ ID NO: 2411778 - RNA, 19 nt, Artificial Sequence
  Description of Artificial Sequence: Synthetic oligonucleotide
  Sense strand starting at position 2782 of SEQ ID NO: 1886465
ucagaaugagcauguuuau

SEQ ID NO: 2411779 - RNA, 19 nt, Artificial Sequence
  Description of Artificial Sequence: Synthetic oligonucleotide
  Antisense strand to SEQ ID NO: 2411778
auaaacaugcucauucuga

SEQ ID NO: 2411780 - RNA, 19 nt, Artificial Sequence
  Description of Artificial Sequence: Synthetic oligonucleotide
  Sense strand starting at position 2785 of SEQ ID NO: 1886465
gaaugagcauguuuaucac

SEQ ID NO: 2411781 - RNA, 19 nt, Artificial Sequence
  Description of Artificial Sequence: Synthetic oligonucleotide
  Antisense strand to SEQ ID NO: 2411780
gugauaaacaugcucauuc

SEQ ID NO: 2411782 - RNA, 19 nt, Artificial Sequence
  Description of Artificial Sequence: Synthetic oligonucleotide
  Sense strand starting at position 2847 of SEQ ID NO: 1886465
uuagguggaucuuccucaa

SEQ ID NO: 2411783 - RNA, 19 nt, Artificial Sequence
  Description of Artificial Sequence: Synthetic oligonucleotide
  Antisense strand to SEQ ID NO: 2411782
uugaggaagauccaccuaa

SEQ ID NO: 2411784 - RNA, 19 nt, Artificial Sequence
  Description of Artificial Sequence: Synthetic oligonucleotide
  Sense strand starting at position 2850 of SEQ ID NO: 1886465
gguggaucuuccucaauaa

SEQ ID NO: 2411785 - RNA, 19 nt, Artificial Sequence
  Description of Artificial Sequence: Synthetic oligonucleotide
  Antisense strand to SEQ ID NO: 2411784
uuauugaggaagauccacc

SEQ ID NO: 2411786 - RNA, 19 nt, Artificial Sequence
  Description of Artificial Sequence: Synthetic oligonucleotide
  Sense strand starting at position 2851 of SEQ ID NO: 1886465
guggaucuuccucaauaau

SEQ ID NO: 2411787 - RNA, 19 nt, Artificial Sequence
  Description of Artificial Sequence: Synthetic oligonucleotide
  Antisense strand to SEQ ID NO: 2411786
auuauugaggaagauccac

SEQ ID NO: 2411788 - RNA, 19 nt, Artificial Sequence
  Description of Artificial Sequence: Synthetic oligonucleotide
  Sense strand starting at position 3034 of SEQ ID NO: 1886465
uucccacaucugugagaca

SEQ ID NO: 2411789 - RNA, 19 nt, Artificial Sequence
  Description of Artificial Sequence: Synthetic oligonucleotide
  Antisense strand to SEQ ID NO: 2411788
ugucucacagaugugggaa

SEQ ID NO: 2411790 - RNA, 19 nt, Artificial Sequence
  Description of Artificial Sequence: Synthetic oligonucleotide
  Sense strand starting at position 3141 of SEQ ID NO: 1886465
acuggaagucacugugauu

SEQ ID NO: 2411791 - RNA, 19 nt, Artificial Sequence
  Description of Artificial Sequence: Synthetic oligonucleotide
  Antisense strand to SEQ ID NO: 2411790
aaucacagugacuuccagu

SEQ ID NO: 2411792 - RNA, 19 nt, Artificial Sequence
  Description of Artificial Sequence: Synthetic oligonucleotide
  Sense strand starting at position 3176 of SEQ ID NO: 1886465
uuaucaaguugagcauauu

SEQ ID NO: 2411793 - RNA, 19 nt, Artificial Sequence
  Description of Artificial Sequence: Synthetic oligonucleotide
  Antisense strand to SEQ ID NO: 2411792
aauaugcucaacuugauaa

SEQ ID NO: 2411794 - RNA, 19 nt, Artificial Sequence
  Description of Artificial Sequence: Synthetic oligonucleotide
  Sense strand starting at position 3285 of SEQ ID NO: 1886465
gucaauauggcaugcagaa

SEQ ID NO: 2411795 - RNA, 19 nt, Artificial Sequence
  Description of Artificial Sequence: Synthetic oligonucleotide
  Antisense strand to SEQ ID NO: 2411794
uucugcaugccauauugac

SEQ ID NO: 2411796 - RNA, 19 nt, Artificial Sequence
  Description of Artificial Sequence: Synthetic oligonucleotide
  Sense strand starting at position 3344 of SEQ ID NO: 1886465
acauguagcccagacacau

SEQ ID NO: 2411797 - RNA, 19 nt, Artificial Sequence
  Description of Artificial Sequence: Synthetic oligonucleotide
  Antisense strand to SEQ ID NO: 2411796
augugucugggcuacaugu

SEQ ID NO: 2411798 - RNA, 19 nt, Artificial Sequence
  Description of Artificial Sequence: Synthetic oligonucleotide
  Sense strand starting at position 3382 of SEQ ID NO: 1886465
ccagucuuggagcacagau

SEQ ID NO: 2411799 - RNA, 19 nt, Artificial Sequence
  Description of Artificial Sequence: Synthetic oligonucleotide
  Antisense strand to SEQ ID NO: 2411798
aucugugcuccaagacugg

SEQ ID NO: 2411800 - RNA, 19 nt, Artificial Sequence
  Description of Artificial Sequence: Synthetic oligonucleotide
  Sense strand starting at position 3834 of SEQ ID NO: 1886465
gcaccuaagagaugguucu

SEQ ID NO: 2411801 - RNA, 19 nt, Artificial Sequence
  Description of Artificial Sequence: Synthetic oligonucleotide
  Antisense strand to SEQ ID NO: 2411800
agaaccaucucuuaggugc

SEQ ID NO: 2411802 - RNA, 19 nt, Artificial Sequence
  Description of Artificial Sequence: Synthetic oligonucleotide
  Sense strand starting at position 3835 of SEQ ID NO: 1886465
caccuaagagaugguucuu

SEQ ID NO: 2411803 - RNA, 19 nt, Artificial Sequence
  Description of Artificial Sequence: Synthetic oligonucleotide
  Antisense strand to SEQ ID NO: 2411802
aagaaccaucucuuaggug

SEQ ID NO: 2411804 - RNA, 19 nt, Artificial Sequence
  Description of Artificial Sequence: Synthetic oligonucleotide
  Sense strand starting at position 3942 of SEQ ID NO: 1886465
agacucacuuggucucaga

SEQ ID NO: 2411805 - RNA, 19 nt, Artificial Sequence
  Description of Artificial Sequence: Synthetic oligonucleotide
  Antisense strand to SEQ ID NO: 2411804
ucugagaccaagugagucu

SEQ ID NO: 2411806 - RNA, 19 nt, Artificial Sequence
  Description of Artificial Sequence: Synthetic oligonucleotide
  Sense strand starting at position 81 of SEQ ID NO: 1886466
agaauuacacucuguacag

SEQ ID NO: 2411807 - RNA, 19 nt, Artificial Sequence
  Description of Artificial Sequence: Synthetic oligonucleotide
  Antisense strand to SEQ ID NO: 2411806
cuguacagaguguaauucu

SEQ ID NO: 2411808 - RNA, 19 nt, Artificial Sequence
  Description of Artificial Sequence: Synthetic oligonucleotide
  Sense strand starting at position 171 of SEQ ID NO: 1886466
cucucaugccagggaaacu

SEQ ID NO: 2411809 - RNA, 19 nt, Artificial Sequence
  Description of Artificial Sequence: Synthetic oligonucleotide
  Antisense strand to SEQ ID NO: 2411808
aguuucccuggcaugagag

SEQ ID NO: 2411810 - RNA, 19 nt, Artificial Sequence
  Description of Artificial Sequence: Synthetic oligonucleotide
  Sense strand starting at position 537 of SEQ ID NO: 1886466
cucuucugucaugauuacu

SEQ ID NO: 2411811 - RNA, 19 nt, Artificial Sequence
  Description of Artificial Sequence: Synthetic oligonucleotide
  Antisense strand to SEQ ID NO: 2411810
aguaaucaugacagaagag

SEQ ID NO: 2411812 - RNA, 19 nt, Artificial Sequence
  Description of Artificial Sequence: Synthetic oligonucleotide
  Sense strand starting at position 734 of SEQ ID NO: 1886466
ccuguugggaccugagaaa

SEQ ID NO: 2411813 - RNA, 19 nt, Artificial Sequence
  Description of Artificial Sequence: Synthetic oligonucleotide
  Antisense strand to SEQ ID NO: 2411812
uuucucaggucccaacagg

SEQ ID NO: 2411814 - RNA, 19 nt, Artificial Sequence
  Description of Artificial Sequence: Synthetic oligonucleotide
  Sense strand starting at position 1145 of SEQ ID NO: 1886466
uggacaggacuaugcuaaa

SEQ ID NO: 2411815 - RNA, 19 nt, Artificial Sequence
  Description of Artificial Sequence: Synthetic oligonucleotide
  Antisense strand to SEQ ID NO: 2411814
uuuagcauaguccugucca

SEQ ID NO: 2411816 - RNA, 19 nt, Artificial Sequence
  Description of Artificial Sequence: Synthetic oligonucleotide
  Sense strand starting at position 1163 of SEQ ID NO: 1886466
accagcaaggcucagauaa

SEQ ID NO: 2411817 - RNA, 19 nt, Artificial Sequence
  Description of Artificial Sequence: Synthetic oligonucleotide
  Antisense strand to SEQ ID NO: 2411816
uuaucugagccuugcuggu

SEQ ID NO: 2411818 - RNA, 19 nt, Artificial Sequence
  Description of Artificial Sequence: Synthetic oligonucleotide
  Sense strand starting at position 1299 of SEQ ID NO: 1886466
aacuucuguuccuugagga

SEQ ID NO: 2411819 - RNA, 19 nt, Artificial Sequence
  Description of Artificial Sequence: Synthetic oligonucleotide
  Antisense strand to SEQ ID NO: 2411818
uccucaaggaacagaaguu

SEQ ID NO: 2411820 - RNA, 19 nt, Artificial Sequence
  Description of Artificial Sequence: Synthetic oligonucleotide
  Sense strand starting at position 1300 of SEQ ID NO: 1886466
acuucuguuccuugaggaa

SEQ ID NO: 2411821 - RNA, 19 nt, Artificial Sequence
  Description of Artificial Sequence: Synthetic oligonucleotide
  Antisense strand to SEQ ID NO: 2411820
uuccucaaggaacagaagu

SEQ ID NO: 2411822 - RNA, 19 nt, Artificial Sequence
  Description of Artificial Sequence: Synthetic oligonucleotide
  Sense strand starting at position 1315 of SEQ ID NO: 1886466
ggaagacuagcauguaaca

SEQ ID NO: 2411823 - RNA, 19 nt, Artificial Sequence
  Description of Artificial Sequence: Synthetic oligonucleotide
  Antisense strand to SEQ ID NO: 2411822
uguuacaugcuagucuucc

SEQ ID NO: 2411824 - RNA, 19 nt, Artificial Sequence
  Description of Artificial Sequence: Synthetic oligonucleotide
  Sense strand starting at position 1372 of SEQ ID NO: 1886466
caucaugacguguacuaga

SEQ ID NO: 2411825 - RNA, 19 nt, Artificial Sequence
  Description of Artificial Sequence: Synthetic oligonucleotide
  Antisense strand to SEQ ID NO: 2411824
ucuaguacacgucaugaug

SEQ ID NO: 2411826 - RNA, 19 nt, Artificial Sequence
  Description of Artificial Sequence: Synthetic oligonucleotide
  Sense strand starting at position 1458 of SEQ ID NO: 1886466
agauuucccugaggaaaua

SEQ ID NO: 2411827 - RNA, 19 nt, Artificial Sequence
  Description of Artificial Sequence: Synthetic oligonucleotide
  Antisense strand to SEQ ID NO: 2411826
uauuuccucagggaaaucu

SEQ ID NO: 2411828 - RNA, 19 nt, Artificial Sequence
  Description of Artificial Sequence: Synthetic oligonucleotide
  Sense strand starting at position 1701 of SEQ ID NO: 1886466
uucuaacguggucaauaua

SEQ ID NO: 2411829 - RNA, 19 nt, Artificial Sequence
  Description of Artificial Sequence: Synthetic oligonucleotide
  Antisense strand to SEQ ID NO: 2411828
uauauugaccacguuagaa

SEQ ID NO: 2411830 - RNA, 19 nt, Artificial Sequence
  Description of Artificial Sequence: Synthetic oligonucleotide
  Sense strand starting at position 1704 of SEQ ID NO: 1886466
uaacguggucaauauacau

SEQ ID NO: 2411831 - RNA, 19 nt, Artificial Sequence
  Description of Artificial Sequence: Synthetic oligonucleotide
  Antisense strand to SEQ ID NO: 2411830
auguauauugaccacguua

SEQ ID NO: 2411832 - RNA, 19 nt, Artificial Sequence
  Description of Artificial Sequence: Synthetic oligonucleotide
  Sense strand starting at position 1739 of SEQ ID NO: 1886466
gguguuguuaaacagauau

SEQ ID NO: 2411833 - RNA, 19 nt, Artificial Sequence
  Description of Artificial Sequence: Synthetic oligonucleotide
  Antisense strand to SEQ ID NO: 2411832
auaucuguuuaacaacacc

SEQ ID NO: 2411834 - RNA, 19 nt, Artificial Sequence
  Description of Artificial Sequence: Synthetic oligonucleotide
  Sense strand starting at position 1751 of SEQ ID NO: 1886466
cagauauuauugcuggauc

SEQ ID NO: 2411835 - RNA, 19 nt, Artificial Sequence
  Description of Artificial Sequence: Synthetic oligonucleotide
  Antisense strand to SEQ ID NO: 2411834
gauccagcaauaauaucug

SEQ ID NO: 2411836 - RNA, 19 nt, Artificial Sequence
  Description of Artificial Sequence: Synthetic oligonucleotide
  Sense strand starting at position 1943 of SEQ ID NO: 1886466
ugguacugaccuugaaaca

SEQ ID NO: 2411837 - RNA, 19 nt, Artificial Sequence
  Description of Artificial Sequence: Synthetic oligonucleotide
  Antisense strand to SEQ ID NO: 2411836
uguuucaaggucaguacca

SEQ ID NO: 2411838 - RNA, 19 nt, Artificial Sequence
  Description of Artificial Sequence: Synthetic oligonucleotide
  Sense strand starting at position 2050 of SEQ ID NO: 1886466
ugguaaagagcuuggaaga

SEQ ID NO: 2411839 - RNA, 19 nt, Artificial Sequence
  Description of Artificial Sequence: Synthetic oligonucleotide
  Antisense strand to SEQ ID NO: 2411838
ucuuccaagcucuuuacca

SEQ ID NO: 2411840 - RNA, 19 nt, Artificial Sequence
  Description of Artificial Sequence: Synthetic oligonucleotide
  Sense strand starting at position 2094 of SEQ ID NO: 1886466
ggcauccuuccaggagaaa

SEQ ID NO: 2411841 - RNA, 19 nt, Artificial Sequence
  Description of Artificial Sequence: Synthetic oligonucleotide
  Antisense strand to SEQ ID NO: 2411840
uuucuccuggaaggaugcc

SEQ ID NO: 2411842 - RNA, 19 nt, Artificial Sequence
  Description of Artificial Sequence: Synthetic oligonucleotide
  Sense strand starting at position 2230 of SEQ ID NO: 1886466
uucgguguuaaucaacaga

SEQ ID NO: 2411843 - RNA, 19 nt, Artificial Sequence
  Description of Artificial Sequence: Synthetic oligonucleotide
  Antisense strand to SEQ ID NO: 2411842
ucuguugauuaacaccgaa

SEQ ID NO: 2411844 - RNA, 19 nt, Artificial Sequence
  Description of Artificial Sequence: Synthetic oligonucleotide
  Sense strand starting at position 2297 of SEQ ID NO: 1886466
uuuauuuacugagagggaa

SEQ ID NO: 2411845 - RNA, 19 nt, Artificial Sequence
  Description of Artificial Sequence: Synthetic oligonucleotide
  Antisense strand to SEQ ID NO: 2411844
uucccucucaguaaauaaa

SEQ ID NO: 2411846 - RNA, 19 nt, Artificial Sequence
  Description of Artificial Sequence: Synthetic oligonucleotide
  Sense strand starting at position 2316 of SEQ ID NO: 1886466
acagaacagugguuccauu

SEQ ID NO: 2411847 - RNA, 19 nt, Artificial Sequence
  Description of Artificial Sequence: Synthetic oligonucleotide
  Antisense strand to SEQ ID NO: 2411846
aauggaaccacuguucugu

SEQ ID NO: 2411848 - RNA, 19 nt, Artificial Sequence
  Description of Artificial Sequence: Synthetic oligonucleotide
  Sense strand starting at position 2485 of SEQ ID NO: 1886466
ggaaauaguagacguaacu

SEQ ID NO: 2411849 - RNA, 19 nt, Artificial Sequence
  Description of Artificial Sequence: Synthetic oligonucleotide
  Antisense strand to SEQ ID NO: 2411848
aguuacgucuacuauuucc

SEQ ID NO: 2411850 - RNA, 19 nt, Artificial Sequence
  Description of Artificial Sequence: Synthetic oligonucleotide
  Sense strand starting at position 2547 of SEQ ID NO: 1886466
uugcaaaggcuaugaaaua

SEQ ID NO: 2411851 - RNA, 19 nt, Artificial Sequence
  Description of Artificial Sequence: Synthetic oligonucleotide
  Antisense strand to SEQ ID NO: 2411850
uauuucauagccuuugcaa

SEQ ID NO: 2411852 - RNA, 19 nt, Artificial Sequence
  Description of Artificial Sequence: Synthetic oligonucleotide
  Sense strand starting at position 2615 of SEQ ID NO: 1886466
gguuaaucacuacaggcau

SEQ ID NO: 2411853 - RNA, 19 nt, Artificial Sequence
  Description of Artificial Sequence: Synthetic oligonucleotide
  Antisense strand to SEQ ID NO: 2411852
augccuguagugauuaacc

SEQ ID NO: 2411854 - RNA, 19 nt, Artificial Sequence
  Description of Artificial Sequence: Synthetic oligonucleotide
  Sense strand starting at position 2645 of SEQ ID NO: 1886466
gaaggaguguucccauauu

SEQ ID NO: 2411855 - RNA, 19 nt, Artificial Sequence
  Description of Artificial Sequence: Synthetic oligonucleotide
  Antisense strand to SEQ ID NO: 2411854
aauaugggaacacuccuuc

SEQ ID NO: 2411856 - RNA, 19 nt, Artificial Sequence
  Description of Artificial Sequence: Synthetic oligonucleotide
  Sense strand starting at position 2687 of SEQ ID NO: 1886466
gaugaacuuucuguguaag

SEQ ID NO: 2411857 - RNA, 19 nt, Artificial Sequence
  Description of Artificial Sequence: Synthetic oligonucleotide
  Antisense strand to SEQ ID NO: 2411856
cuuacacagaaaguucauc

SEQ ID NO: 2411858 - RNA, 19 nt, Artificial Sequence
  Description of Artificial Sequence: Synthetic oligonucleotide
  Sense strand starting at position 2688 of SEQ ID NO: 1886466
augaacuuucuguguaaga

SEQ ID NO: 2411859 - RNA, 19 nt, Artificial Sequence
  Description of Artificial Sequence: Synthetic oligonucleotide
  Antisense strand to SEQ ID NO: 2411858
ucuuacacagaaaguucau

SEQ ID NO: 2411860 - RNA, 19 nt, Artificial Sequence
  Description of Artificial Sequence: Synthetic oligonucleotide
  Sense strand starting at position 2690 of SEQ ID NO: 1886466
gaacuuucuguguaagaug

SEQ ID NO: 2411861 - RNA, 19 nt, Artificial Sequence
  Description of Artificial Sequence: Synthetic oligonucleotide
  Antisense strand to SEQ ID NO: 2411860
caucuuacacagaaaguuc

SEQ ID NO: 2411862 - RNA, 19 nt, Artificial Sequence
  Description of Artificial Sequence: Synthetic oligonucleotide
  Sense strand starting at position 2708 of SEQ ID NO: 1886466
ggucccaaccaaugaucaa

SEQ ID NO: 2411863 - RNA, 19 nt, Artificial Sequence
  Description of Artificial Sequence: Synthetic oligonucleotide
  Antisense strand to SEQ ID NO: 2411862
uugaucauugguugggacc

SEQ ID NO: 2411864 - RNA, 19 nt, Artificial Sequence
  Description of Artificial Sequence: Synthetic oligonucleotide
  Sense strand starting at position 2953 of SEQ ID NO: 1886466
aaaggugugcuggaguaga

SEQ ID NO: 2411865 - RNA, 19 nt, Artificial Sequence
  Description of Artificial Sequence: Synthetic oligonucleotide
  Antisense strand to SEQ ID NO: 2411864
ucuacuccagcacaccuuu

SEQ ID NO: 2411866 - RNA, 19 nt, Artificial Sequence
  Description of Artificial Sequence: Synthetic oligonucleotide
  Sense strand starting at position 2996 of SEQ ID NO: 1886466
uuggaaagaucucuuccca

SEQ ID NO: 2411867 - RNA, 19 nt, Artificial Sequence
  Description of Artificial Sequence: Synthetic oligonucleotide
  Antisense strand to SEQ ID NO: 2411866
ugggaagagaucuuuccaa

SEQ ID NO: 2411868 - RNA, 19 nt, Artificial Sequence
  Description of Artificial Sequence: Synthetic oligonucleotide
  Sense strand starting at position 3032 of SEQ ID NO: 1886466
cucuuaucggcagcgugaa

SEQ ID NO: 2411869 - RNA, 19 nt, Artificial Sequence
  Description of Artificial Sequence: Synthetic oligonucleotide
  Antisense strand to SEQ ID NO: 2411868
uucacgcugccgauaagag

SEQ ID NO: 2411870 - RNA, 19 nt, Artificial Sequence
  Description of Artificial Sequence: Synthetic oligonucleotide
  Sense strand starting at position 3259 of SEQ ID NO: 1886466
ugaguugacuuguccagaa

SEQ ID NO: 2411871 - RNA, 19 nt, Artificial Sequence
  Description of Artificial Sequence: Synthetic oligonucleotide
  Antisense strand to SEQ ID NO: 2411870
uucuggacaagucaacuca

SEQ ID NO: 2411872 - RNA, 19 nt, Artificial Sequence
  Description of Artificial Sequence: Synthetic oligonucleotide
  Sense strand starting at position 3261 of SEQ ID NO: 1886466
aguugacuuguccagaaac

SEQ ID NO: 2411873 - RNA, 19 nt, Artificial Sequence
  Description of Artificial Sequence: Synthetic oligonucleotide
  Antisense strand to SEQ ID NO: 2411872
guuucuggacaagucaacu

SEQ ID NO: 2411874 - RNA, 19 nt, Artificial Sequence
  Description of Artificial Sequence: Synthetic oligonucleotide
  Sense strand starting at position 3454 of SEQ ID NO: 1886466
ggaacuuccgaucaguuga

SEQ ID NO: 2411875 - RNA, 19 nt, Artificial Sequence
  Description of Artificial Sequence: Synthetic oligonucleotide
  Antisense strand to SEQ ID NO: 2411874
ucaacugaucggaaguucc

SEQ ID NO: 2411876 - RNA, 19 nt, Artificial Sequence
  Description of Artificial Sequence: Synthetic oligonucleotide
  Sense strand starting at position 3456 of SEQ ID NO: 1886466
aacuuccgaucaguugaaa

SEQ ID NO: 2411877 - RNA, 19 nt, Artificial Sequence
  Description of Artificial Sequence: Synthetic oligonucleotide
  Antisense strand to SEQ ID NO: 2411876
uuucaacugaucggaaguu

SEQ ID NO: 2411878 - RNA, 19 nt, Artificial Sequence
  Description of Artificial Sequence: Synthetic oligonucleotide
  Sense strand starting at position 3665 of SEQ ID NO: 1886466
cgguuacaccuuuaagaag

SEQ ID NO: 2411879 - RNA, 19 nt, Artificial Sequence
  Description of Artificial Sequence: Synthetic oligonucleotide
  Antisense strand to SEQ ID NO: 2411878
cuucuuaaagguguaaccg

SEQ ID NO: 2411880 - RNA, 19 nt, Artificial Sequence
  Description of Artificial Sequence: Synthetic oligonucleotide
  Sense strand starting at position 3673 of SEQ ID NO: 1886466
ccuuuaagaagugggaagu

SEQ ID NO: 2411881 - RNA, 19 nt, Artificial Sequence
  Description of Artificial Sequence: Synthetic oligonucleotide
  Antisense strand to SEQ ID NO: 2411880
acuucccacuucuuaaagg

SEQ ID NO: 2411882 - RNA, 19 nt, Artificial Sequence
  Description of Artificial Sequence: Synthetic oligonucleotide
  Sense strand starting at position 3797 of SEQ ID NO: 1886466
uuaaauugucaccaccgau

SEQ ID NO: 2411883 - RNA, 19 nt, Artificial Sequence
  Description of Artificial Sequence: Synthetic oligonucleotide
  Antisense strand to SEQ ID NO: 2411882
aucgguggugacaauuuaa

SEQ ID NO: 2411884 - RNA, 19 nt, Artificial Sequence
  Description of Artificial Sequence: Synthetic oligonucleotide
  Sense strand starting at position 3830 of SEQ ID NO: 1886466
gcggcuggcauuguuauua

SEQ ID NO: 2411885 - RNA, 19 nt, Artificial Sequence
  Description of Artificial Sequence: Synthetic oligonucleotide
  Antisense strand to SEQ ID NO: 2411884
uaauaacaaugccagccgc

SEQ ID NO: 2411886 - RNA, 19 nt, Artificial Sequence
  Description of Artificial Sequence: Synthetic oligonucleotide
  Sense strand starting at position 590 of SEQ ID NO: 1886468
ucuguauugcguuugcaca

SEQ ID NO: 2411887 - RNA, 19 nt, Artificial Sequence
  Description of Artificial Sequence: Synthetic oligonucleotide
  Antisense strand to SEQ ID NO: 2411886
ugugcaaacgcaauacaga

SEQ ID NO: 2411888 - RNA, 19 nt, Artificial Sequence
  Description of Artificial Sequence: Synthetic oligonucleotide
  Sense strand starting at position 598 of SEQ ID NO: 1886468
gcguuugcacaugagauuu

SEQ ID NO: 2411889 - RNA, 19 nt, Artificial Sequence
  Description of Artificial Sequence: Synthetic oligonucleotide
  Antisense strand to SEQ ID NO: 2411888
aaaucucaugugcaaacgc

SEQ ID NO: 2411890 - RNA, 19 nt, Artificial Sequence
  Description of Artificial Sequence: Synthetic oligonucleotide
  Sense strand starting at position 663 of SEQ ID NO: 1886468
gucagcuggauguacauau

SEQ ID NO: 2411891 - RNA, 19 nt, Artificial Sequence
  Description of Artificial Sequence: Synthetic oligonucleotide
  Antisense strand to SEQ ID NO: 2411890
auauguacauccagcugac

SEQ ID NO: 2411892 - RNA, 19 nt, Artificial Sequence
  Description of Artificial Sequence: Synthetic oligonucleotide
  Sense strand starting at position 775 of SEQ ID NO: 1886468
cuaugaccuuuguuaaagu

SEQ ID NO: 2411893 - RNA, 19 nt, Artificial Sequence
  Description of Artificial Sequence: Synthetic oligonucleotide
  Antisense strand to SEQ ID NO: 2411892
acuuuaacaaaggucauag

SEQ ID NO: 2411894 - RNA, 19 nt, Artificial Sequence
  Description of Artificial Sequence: Synthetic oligonucleotide
  Sense strand starting at position 826 of SEQ ID NO: 1886468
ccuagcuaugagggucaaa

SEQ ID NO: 2411895 - RNA, 19 nt, Artificial Sequence
  Description of Artificial Sequence: Synthetic oligonucleotide
  Antisense strand to SEQ ID NO: 2411894
uuugacccucauagcuagg

SEQ ID NO: 2411896 - RNA, 19 nt, Artificial Sequence
  Description of Artificial Sequence: Synthetic oligonucleotide
  Sense strand starting at position 859 of SEQ ID NO: 1886468
cuggaucccacguaugaca

SEQ ID NO: 2411897 - RNA, 19 nt, Artificial Sequence
  Description of Artificial Sequence: Synthetic oligonucleotide
  Antisense strand to SEQ ID NO: 2411896
ugucauacgugggauccag

SEQ ID NO: 2411898 - RNA, 19 nt, Artificial Sequence
  Description of Artificial Sequence: Synthetic oligonucleotide
  Sense strand starting at position 964 of SEQ ID NO: 1886468
gggugcugggucagcuaua

SEQ ID NO: 2411899 - RNA, 19 nt, Artificial Sequence
  Description of Artificial Sequence: Synthetic oligonucleotide
  Antisense strand to SEQ ID NO: 2411898
uauagcugacccagcaccc

SEQ ID NO: 2411900 - RNA, 19 nt, Artificial Sequence
  Description of Artificial Sequence: Synthetic oligonucleotide
  Sense strand starting at position 969 of SEQ ID NO: 1886468
cugggucagcuauauguca

SEQ ID NO: 2411901 - RNA, 19 nt, Artificial Sequence
  Description of Artificial Sequence: Synthetic oligonucleotide
  Antisense strand to SEQ ID NO: 2411900
ugacauauagcugacccag

SEQ ID NO: 2411902 - RNA, 19 nt, Artificial Sequence
  Description of Artificial Sequence: Synthetic oligonucleotide
  Sense strand starting at position 1112 of SEQ ID NO: 1886468
cugcuuggccaagaaauau

SEQ ID NO: 2411903 - RNA, 19 nt, Artificial Sequence
  Description of Artificial Sequence: Synthetic oligonucleotide
  Antisense strand to SEQ ID NO: 2411902
auauuucuuggccaagcag

SEQ ID NO: 2411904 - RNA, 19 nt, Artificial Sequence
  Description of Artificial Sequence: Synthetic oligonucleotide
  Sense strand starting at position 1392 of SEQ ID NO: 1886468
ucacaucaccuaugugacu

SEQ ID NO: 2411905 - RNA, 19 nt, Artificial Sequence
  Description of Artificial Sequence: Synthetic oligonucleotide
  Antisense strand to SEQ ID NO: 2411904
agucacauaggugauguga

SEQ ID NO: 2411906 - RNA, 19 nt, Artificial Sequence
  Description of Artificial Sequence: Synthetic oligonucleotide
  Sense strand starting at position 1403 of SEQ ID NO: 1886468
augugacuggcccaaagau

SEQ ID NO: 2411907 - RNA, 19 nt, Artificial Sequence
  Description of Artificial Sequence: Synthetic oligonucleotide
  Antisense strand to SEQ ID NO: 2411906
aucuuugggccagucacau

SEQ ID NO: 2411908 - RNA, 19 nt, Artificial Sequence
  Description of Artificial Sequence: Synthetic oligonucleotide
  Sense strand starting at position 1412 of SEQ ID NO: 1886468
gcccaaagauauguaauaa

SEQ ID NO: 2411909 - RNA, 19 nt, Artificial Sequence
  Description of Artificial Sequence: Synthetic oligonucleotide
  Antisense strand to SEQ ID NO: 2411908
uuauuacauaucuuugggc

SEQ ID NO: 2411910 - RNA, 19 nt, Artificial Sequence
  Description of Artificial Sequence: Synthetic oligonucleotide
  Sense strand starting at position 1553 of SEQ ID NO: 1886468
gguuuagccaagcaauaug

SEQ ID NO: 2411911 - RNA, 19 nt, Artificial Sequence
  Description of Artificial Sequence: Synthetic oligonucleotide
  Antisense strand to SEQ ID NO: 2411910
cauauugcuuggcuaaacc

SEQ ID NO: 2411912 - RNA, 19 nt, Artificial Sequence
  Description of Artificial Sequence: Synthetic oligonucleotide
  Sense strand starting at position 2177 of SEQ ID NO: 1886468
ucacaauuccuuugaagga

SEQ ID NO: 2411913 - RNA, 19 nt, Artificial Sequence
  Description of Artificial Sequence: Synthetic oligonucleotide
  Antisense strand to SEQ ID NO: 2411912
uccuucaaaggaauuguga

SEQ ID NO: 2411914 - RNA, 19 nt, Artificial Sequence
  Description of Artificial Sequence: Synthetic oligonucleotide
  Sense strand starting at position 2190 of SEQ ID NO: 1886468
gaaggaagugucuaggcaa

SEQ ID NO: 2411915 - RNA, 19 nt, Artificial Sequence
  Description of Artificial Sequence: Synthetic oligonucleotide
  Antisense strand to SEQ ID NO: 2411914
uugccuagacacuuccuuc

SEQ ID NO: 2411916 - RNA, 19 nt, Artificial Sequence
  Description of Artificial Sequence: Synthetic oligonucleotide
  Sense strand starting at position 2229 of SEQ ID NO: 1886468
guuuauuccagguauaagu

SEQ ID NO: 2411917 - RNA, 19 nt, Artificial Sequence
  Description of Artificial Sequence: Synthetic oligonucleotide
  Antisense strand to SEQ ID NO: 2411916
acuuauaccuggaauaaac

SEQ ID NO: 2411918 - RNA, 19 nt, Artificial Sequence
  Description of Artificial Sequence: Synthetic oligonucleotide
  Sense strand starting at position 2250 of SEQ ID NO: 1886468
caagauauaucugugcuga

SEQ ID NO: 2411919 - RNA, 19 nt, Artificial Sequence
  Description of Artificial Sequence: Synthetic oligonucleotide
  Antisense strand to SEQ ID NO: 2411918
ucagcacagauauaucuug

SEQ ID NO: 2411920 - RNA, 19 nt, Artificial Sequence
  Description of Artificial Sequence: Synthetic oligonucleotide
  Sense strand starting at position 2251 of SEQ ID NO: 1886468
aagauauaucugugcugag

SEQ ID NO: 2411921 - RNA, 19 nt, Artificial Sequence
  Description of Artificial Sequence: Synthetic oligonucleotide
  Antisense strand to SEQ ID NO: 2411920
cucagcacagauauaucuu

SEQ ID NO: 2411922 - RNA, 19 nt, Artificial Sequence
  Description of Artificial Sequence: Synthetic oligonucleotide
  Sense strand starting at position 2271 of SEQ ID NO: 1886468
ccagaagcacugugaaauc

SEQ ID NO: 2411923 - RNA, 19 nt, Artificial Sequence
  Description of Artificial Sequence: Synthetic oligonucleotide
  Antisense strand to SEQ ID NO: 2411922
gauuucacagugcuucugg

SEQ ID NO: 2411924 - RNA, 19 nt, Artificial Sequence
  Description of Artificial Sequence: Synthetic oligonucleotide
  Sense strand starting at position 2280 of SEQ ID NO: 1886468
cugugaaaucacuaagguu

SEQ ID NO: 2411925 - RNA, 19 nt, Artificial Sequence
  Description of Artificial Sequence: Synthetic oligonucleotide
  Antisense strand to SEQ ID NO: 2411924
aaccuuagugauuucacag

SEQ ID NO: 2411926 - RNA, 19 nt, Artificial Sequence
  Description of Artificial Sequence: Synthetic oligonucleotide
  Sense strand starting at position 2376 of SEQ ID NO: 1886468
guagaacuccuguugcguu

SEQ ID NO: 2411927 - RNA, 19 nt, Artificial Sequence
  Description of Artificial Sequence: Synthetic oligonucleotide
  Antisense strand to SEQ ID NO: 2411926
aacgcaacaggaguucuac

SEQ ID NO: 2411928 - RNA, 19 nt, Artificial Sequence
  Description of Artificial Sequence: Synthetic oligonucleotide
  Sense strand starting at position 2399 of SEQ ID NO: 1886468
ccaaguacuugagucacaa

SEQ ID NO: 2411929 - RNA, 19 nt, Artificial Sequence
  Description of Artificial Sequence: Synthetic oligonucleotide
  Antisense strand to SEQ ID NO: 2411928
uugugacucaaguacuugg

SEQ ID NO: 2411930 - RNA, 19 nt, Artificial Sequence
  Description of Artificial Sequence: Synthetic oligonucleotide
  Sense strand starting at position 2505 of SEQ ID NO: 1886468
ugcugaaucuuggugagag

SEQ ID NO: 2411931 - RNA, 19 nt, Artificial Sequence
  Description of Artificial Sequence: Synthetic oligonucleotide
  Antisense strand to SEQ ID NO: 2411930
cucucaccaagauucagca

SEQ ID NO: 2411932 - RNA, 19 nt, Artificial Sequence
  Description of Artificial Sequence: Synthetic oligonucleotide
  Sense strand starting at position 2515 of SEQ ID NO: 1886468
uggugagagagucaccauu

SEQ ID NO: 2411933 - RNA, 19 nt, Artificial Sequence
  Description of Artificial Sequence: Synthetic oligonucleotide
  Antisense strand to SEQ ID NO: 2411932
aauggugacucucucacca

SEQ ID NO: 2411934 - RNA, 19 nt, Artificial Sequence
  Description of Artificial Sequence: Synthetic oligonucleotide
  Sense strand starting at position 2544 of SEQ ID NO: 1886468
acuggauccaccugugaga

SEQ ID NO: 2411935 - RNA, 19 nt, Artificial Sequence
  Description of Artificial Sequence: Synthetic oligonucleotide
  Antisense strand to SEQ ID NO: 2411934
ucucacagguggauccagu

SEQ ID NO: 2411936 - RNA, 19 nt, Artificial Sequence
  Description of Artificial Sequence: Synthetic oligonucleotide
  Sense strand starting at position 2546 of SEQ ID NO: 1886468
uggauccaccugugagagu

SEQ ID NO: 2411937 - RNA, 19 nt, Artificial Sequence
  Description of Artificial Sequence: Synthetic oligonucleotide
  Antisense strand to SEQ ID NO: 2411936
acucucacagguggaucca

SEQ ID NO: 2411938 - RNA, 19 nt, Artificial Sequence
  Description of Artificial Sequence: Synthetic oligonucleotide
  Sense strand starting at position 2781 of SEQ ID NO: 1886468
guagaagauccaggacuuu

SEQ ID NO: 2411939 - RNA, 19 nt, Artificial Sequence
  Description of Artificial Sequence: Synthetic oligonucleotide
  Antisense strand to SEQ ID NO: 2411938
aaaguccuggaucuucuac

SEQ ID NO: 2411940 - RNA, 19 nt, Artificial Sequence
  Description of Artificial Sequence: Synthetic oligonucleotide
  Sense strand starting at position 2849 of SEQ ID NO: 1886468
uuggcucauguauaagauu

SEQ ID NO: 2411941 - RNA, 19 nt, Artificial Sequence
  Description of Artificial Sequence: Synthetic oligonucleotide
  Antisense strand to SEQ ID NO: 2411940
aaucuuauacaugagccaa

SEQ ID NO: 2411942 - RNA, 19 nt, Artificial Sequence
  Description of Artificial Sequence: Synthetic oligonucleotide
  Sense strand starting at position 2906 of SEQ ID NO: 1886468
ccuucucaacuguggagau

SEQ ID NO: 2411943 - RNA, 19 nt, Artificial Sequence
  Description of Artificial Sequence: Synthetic oligonucleotide
  Antisense strand to SEQ ID NO: 2411942
aucuccacaguugagaagg

SEQ ID NO: 2411944 - RNA, 19 nt, Artificial Sequence
  Description of Artificial Sequence: Synthetic oligonucleotide
  Sense strand starting at position 3057 of SEQ ID NO: 1886468
gaaguauugcaauggugga

SEQ ID NO: 2411945 - RNA, 19 nt, Artificial Sequence
  Description of Artificial Sequence: Synthetic oligonucleotide
  Antisense strand to SEQ ID NO: 2411944
uccaccauugcaauacuuc

SEQ ID NO: 2411946 - RNA, 19 nt, Artificial Sequence
  Description of Artificial Sequence: Synthetic oligonucleotide
  Sense strand starting at position 3121 of SEQ ID NO: 1886468
aagagcugucuuugaaaug

SEQ ID NO: 2411947 - RNA, 19 nt, Artificial Sequence
  Description of Artificial Sequence: Synthetic oligonucleotide
  Antisense strand to SEQ ID NO: 2411946
cauuucaaagacagcucuu

SEQ ID NO: 2411948 - RNA, 19 nt, Artificial Sequence
  Description of Artificial Sequence: Synthetic oligonucleotide
  Sense strand starting at position 3126 of SEQ ID NO: 1886468
cugucuuugaaauggagga

SEQ ID NO: 2411949 - RNA, 19 nt, Artificial Sequence
  Description of Artificial Sequence: Synthetic oligonucleotide
  Antisense strand to SEQ ID NO: 2411948
uccuccauuucaaagacag

SEQ ID NO: 2411950 - RNA, 19 nt, Artificial Sequence
  Description of Artificial Sequence: Synthetic oligonucleotide
  Sense strand starting at position 3272 of SEQ ID NO: 1886468
ugguuauauguuuacucag

SEQ ID NO: 2411951 - RNA, 19 nt, Artificial Sequence
  Description of Artificial Sequence: Synthetic oligonucleotide
  Antisense strand to SEQ ID NO: 2411950
cugaguaaacauauaacca

SEQ ID NO: 2411952 - RNA, 19 nt, Artificial Sequence
  Description of Artificial Sequence: Synthetic oligonucleotide
  Sense strand starting at position 3275 of SEQ ID NO: 1886468
uuauauguuuacucagacu

SEQ ID NO: 2411953 - RNA, 19 nt, Artificial Sequence
  Description of Artificial Sequence: Synthetic oligonucleotide
  Antisense strand to SEQ ID NO: 2411952
agucugaguaaacauauaa

SEQ ID NO: 2411954 - RNA, 19 nt, Artificial Sequence
  Description of Artificial Sequence: Synthetic oligonucleotide
  Sense strand starting at position 3425 of SEQ ID NO: 1886468
aucuaugaaucugugauau

SEQ ID NO: 2411955 - RNA, 19 nt, Artificial Sequence
  Description of Artificial Sequence: Synthetic oligonucleotide
  Antisense strand to SEQ ID NO: 2411954
auaucacagauucauagau

SEQ ID NO: 2411956 - RNA, 19 nt, Artificial Sequence
  Description of Artificial Sequence: Synthetic oligonucleotide
  Sense strand starting at position 3455 of SEQ ID NO: 1886468
uguaccaucuagguaacaa

SEQ ID NO: 2411957 - RNA, 19 nt, Artificial Sequence
  Description of Artificial Sequence: Synthetic oligonucleotide
  Antisense strand to SEQ ID NO: 2411956
uuguuaccuagaugguaca

SEQ ID NO: 2411958 - RNA, 19 nt, Artificial Sequence
  Description of Artificial Sequence: Synthetic oligonucleotide
  Sense strand starting at position 3650 of SEQ ID NO: 1886468
cuggcaagcauaggugaaa

SEQ ID NO: 2411959 - RNA, 19 nt, Artificial Sequence
  Description of Artificial Sequence: Synthetic oligonucleotide
  Antisense strand to SEQ ID NO: 2411958
uuucaccuaugcuugccag

SEQ ID NO: 2411960 - RNA, 19 nt, Artificial Sequence
  Description of Artificial Sequence: Synthetic oligonucleotide
  Sense strand starting at position 3651 of SEQ ID NO: 1886468
uggcaagcauaggugaaau

SEQ ID NO: 2411961 - RNA, 19 nt, Artificial Sequence
  Description of Artificial Sequence: Synthetic oligonucleotide
  Antisense strand to SEQ ID NO: 2411960
auuucaccuaugcuugcca

SEQ ID NO: 2411962 - RNA, 19 nt, Artificial Sequence
  Description of Artificial Sequence: Synthetic oligonucleotide
  Sense strand starting at position 3653 of SEQ ID NO: 1886468
gcaagcauaggugaaaugu

SEQ ID NO: 2411963 - RNA, 19 nt, Artificial Sequence
  Description of Artificial Sequence: Synthetic oligonucleotide
  Antisense strand to SEQ ID NO: 2411962
acauuucaccuaugcuugc

SEQ ID NO: 2411964 - RNA, 19 nt, Artificial Sequence
  Description of Artificial Sequence: Synthetic oligonucleotide
  Sense strand starting at position 3826 of SEQ ID NO: 1886468
ccugaacuuguggagucua

SEQ ID NO: 2411965 - RNA, 19 nt, Artificial Sequence
  Description of Artificial Sequence: Synthetic oligonucleotide
  Antisense strand to SEQ ID NO: 2411964
uagacuccacaaguucagg

SEQ ID NO: 2411966 - RNA, 19 nt, Artificial Sequence
  Description of Artificial Sequence: Synthetic oligonucleotide
  Sense strand starting at position 475 of SEQ ID NO: 1886467
ucuguauugcguuugcaca

SEQ ID NO: 2411967 - RNA, 19 nt, Artificial Sequence
  Description of Artificial Sequence: Synthetic oligonucleotide
  Antisense strand to SEQ ID NO: 2411966
ugugcaaacgcaauacaga

SEQ ID NO: 2411968 - RNA, 19 nt, Artificial Sequence
  Description of Artificial Sequence: Synthetic oligonucleotide
  Sense strand starting at position 483 of SEQ ID NO: 1886467
gcguuugcacaugagauuu

SEQ ID NO: 2411969 - RNA, 19 nt, Artificial Sequence
  Description of Artificial Sequence: Synthetic oligonucleotide
  Antisense strand to SEQ ID NO: 2411968
aaaucucaugugcaaacgc

SEQ ID NO: 2411970 - RNA, 19 nt, Artificial Sequence
  Description of Artificial Sequence: Synthetic oligonucleotide
  Sense strand starting at position 548 of SEQ ID NO: 1886467
gucagcuggauguacauau

SEQ ID NO: 2411971 - RNA, 19 nt, Artificial Sequence
  Description of Artificial Sequence: Synthetic oligonucleotide
  Antisense strand to SEQ ID NO: 2411970
auauguacauccagcugac

SEQ ID NO: 2411972 - RNA, 19 nt, Artificial Sequence
  Description of Artificial Sequence: Synthetic oligonucleotide
  Sense strand starting at position 660 of SEQ ID NO: 1886467
cuaugaccuuuguuaaagu

SEQ ID NO: 2411973 - RNA, 19 nt, Artificial Sequence
  Description of Artificial Sequence: Synthetic oligonucleotide
  Antisense strand to SEQ ID NO: 2411972
acuuuaacaaaggucauag

SEQ ID NO: 2411974 - RNA, 19 nt, Artificial Sequence
  Description of Artificial Sequence: Synthetic oligonucleotide
  Sense strand starting at position 711 of SEQ ID NO: 1886467
ccuagcuaugagggucaaa

SEQ ID NO: 2411975 - RNA, 19 nt, Artificial Sequence
  Description of Artificial Sequence: Synthetic oligonucleotide
  Antisense strand to SEQ ID NO: 2411974
uuugacccucauagcuagg

SEQ ID NO: 2411976 - RNA, 19 nt, Artificial Sequence
  Description of Artificial Sequence: Synthetic oligonucleotide
  Sense strand starting at position 744 of SEQ ID NO: 1886467
cuggaucccacguaugaca

SEQ ID NO: 2411977 - RNA, 19 nt, Artificial Sequence
  Description of Artificial Sequence: Synthetic oligonucleotide
  Antisense strand to SEQ ID NO: 2411976
ugucauacgugggauccag

SEQ ID NO: 2411978 - RNA, 19 nt, Artificial Sequence
  Description of Artificial Sequence: Synthetic oligonucleotide
  Sense strand starting at position 849 of SEQ ID NO: 1886467
gggugcugggucagcuaua

SEQ ID NO: 2411979 - RNA, 19 nt, Artificial Sequence
  Description of Artificial Sequence: Synthetic oligonucleotide
  Antisense strand to SEQ ID NO: 2411978
uauagcugacccagcaccc

SEQ ID NO: 2411980 - RNA, 19 nt, Artificial Sequence
  Description of Artificial Sequence: Synthetic oligonucleotide
  Sense strand starting at position 854 of SEQ ID NO: 1886467
cugggucagcuauauguca

SEQ ID NO: 2411981 - RNA, 19 nt, Artificial Sequence
  Description of Artificial Sequence: Synthetic oligonucleotide
  Antisense strand to SEQ ID NO: 2411980
ugacauauagcugacccag

SEQ ID NO: 2411982 - RNA, 19 nt, Artificial Sequence
  Description of Artificial Sequence: Synthetic oligonucleotide
  Sense strand starting at position 997 of SEQ ID NO: 1886467
cugcuuggccaagaaauau

SEQ ID NO: 2411983 - RNA, 19 nt, Artificial Sequence
  Description of Artificial Sequence: Synthetic oligonucleotide
  Antisense strand to SEQ ID NO: 2411982
auauuucuuggccaagcag

SEQ ID NO: 2411984 - RNA, 19 nt, Artificial Sequence
  Description of Artificial Sequence: Synthetic oligonucleotide
  Sense strand starting at position 1277 of SEQ ID NO: 1886467
ucacaucaccuaugugacu

SEQ ID NO: 2411985 - RNA, 19 nt, Artificial Sequence
  Description of Artificial Sequence: Synthetic oligonucleotide
  Antisense strand to SEQ ID NO: 2411984
agucacauaggugauguga

SEQ ID NO: 2411986 - RNA, 19 nt, Artificial Sequence
  Description of Artificial Sequence: Synthetic oligonucleotide
  Sense strand starting at position 1288 of SEQ ID NO: 1886467
augugacuggcccaaagau

SEQ ID NO: 2411987 - RNA, 19 nt, Artificial Sequence
  Description of Artificial Sequence: Synthetic oligonucleotide
  Antisense strand to SEQ ID NO: 2411986
aucuuugggccagucacau

SEQ ID NO: 2411988 - RNA, 19 nt, Artificial Sequence
  Description of Artificial Sequence: Synthetic oligonucleotide
  Sense strand starting at position 1297 of SEQ ID NO: 1886467
gcccaaagauauguaauaa

SEQ ID NO: 2411989 - RNA, 19 nt, Artificial Sequence
  Description of Artificial Sequence: Synthetic oligonucleotide
  Antisense strand to SEQ ID NO: 2411988
uuauuacauaucuuugggc

SEQ ID NO: 2411990 - RNA, 19 nt, Artificial Sequence
  Description of Artificial Sequence: Synthetic oligonucleotide
  Sense strand starting at position 1438 of SEQ ID NO: 1886467
gguuuagccaagcaauaug

SEQ ID NO: 2411991 - RNA, 19 nt, Artificial Sequence
  Description of Artificial Sequence: Synthetic oligonucleotide
  Antisense strand to SEQ ID NO: 2411990
cauauugcuuggcuaaacc

SEQ ID NO: 2411992 - RNA, 19 nt, Artificial Sequence
  Description of Artificial Sequence: Synthetic oligonucleotide
  Sense strand starting at position 2062 of SEQ ID NO: 1886467
ucacaauuccuuugaagga

SEQ ID NO: 2411993 - RNA, 19 nt, Artificial Sequence
  Description of Artificial Sequence: Synthetic oligonucleotide
  Antisense strand to SEQ ID NO: 2411992
uccuucaaaggaauuguga

SEQ ID NO: 2411994 - RNA, 19 nt, Artificial Sequence
  Description of Artificial Sequence: Synthetic oligonucleotide
  Sense strand starting at position 2075 of SEQ ID NO: 1886467
gaaggaagugucuaggcaa

SEQ ID NO: 2411995 - RNA, 19 nt, Artificial Sequence
  Description of Artificial Sequence: Synthetic oligonucleotide
  Antisense strand to SEQ ID NO: 2411994
uugccuagacacuuccuuc

SEQ ID NO: 2411996 - RNA, 19 nt, Artificial Sequence
  Description of Artificial Sequence: Synthetic oligonucleotide
  Sense strand starting at position 2114 of SEQ ID NO: 1886467
guuuauuccagguauaagu

SEQ ID NO: 2411997 - RNA, 19 nt, Artificial Sequence
  Description of Artificial Sequence: Synthetic oligonucleotide
  Antisense strand to SEQ ID NO: 2411996
acuuauaccuggaauaaac

SEQ ID NO: 2411998 - RNA, 19 nt, Artificial Sequence
  Description of Artificial Sequence: Synthetic oligonucleotide
  Sense strand starting at position 2135 of SEQ ID NO: 1886467
caagauauaucugugcuga

SEQ ID NO: 2411999 - RNA, 19 nt, Artificial Sequence
  Description of Artificial Sequence: Synthetic oligonucleotide
  Antisense strand to SEQ ID NO: 2411998
ucagcacagauauaucuug

SEQ ID NO: 2412000 - RNA, 19 nt, Artificial Sequence
  Description of Artificial Sequence: Synthetic oligonucleotide
  Sense strand starting at position 2136 of SEQ ID NO: 1886467
aagauauaucugugcugag

SEQ ID NO: 2412001 - RNA, 19 nt, Artificial Sequence
  Description of Artificial Sequence: Synthetic oligonucleotide
  Antisense strand to SEQ ID NO: 2412000
cucagcacagauauaucuu

SEQ ID NO: 2412002 - RNA, 19 nt, Artificial Sequence
  Description of Artificial Sequence: Synthetic oligonucleotide
  Sense strand starting at position 2156 of SEQ ID NO: 1886467
ccagaagcacugugaaauc

SEQ ID NO: 2412003 - RNA, 19 nt, Artificial Sequence
  Description of Artificial Sequence: Synthetic oligonucleotide
  Antisense strand to SEQ ID NO: 2412002
gauuucacagugcuucugg

SEQ ID NO: 2412004 - RNA, 19 nt, Artificial Sequence
  Description of Artificial Sequence: Synthetic oligonucleotide
  Sense strand starting at position 2165 of SEQ ID NO: 1886467
cugugaaaucacuaagguu

SEQ ID NO: 2412005 - RNA, 19 nt, Artificial Sequence
  Description of Artificial Sequence: Synthetic oligonucleotide
  Antisense strand to SEQ ID NO: 2412004
aaccuuagugauuucacag

SEQ ID NO: 2412006 - RNA, 19 nt, Artificial Sequence
  Description of Artificial Sequence: Synthetic oligonucleotide
  Sense strand starting at position 2261 of SEQ ID NO: 1886467
guagaacuccuguugcguu

SEQ ID NO: 2412007 - RNA, 19 nt, Artificial Sequence
  Description of Artificial Sequence: Synthetic oligonucleotide
  Antisense strand to SEQ ID NO: 2412006
aacgcaacaggaguucuac

SEQ ID NO: 2412008 - RNA, 19 nt, Artificial Sequence
  Description of Artificial Sequence: Synthetic oligonucleotide
  Sense strand starting at position 2284 of SEQ ID NO: 1886467
ccaaguacuugagucacaa

SEQ ID NO: 2412009 - RNA, 19 nt, Artificial Sequence
  Description of Artificial Sequence: Synthetic oligonucleotide
  Antisense strand to SEQ ID NO: 2412008
uugugacucaaguacuugg

SEQ ID NO: 2412010 - RNA, 19 nt, Artificial Sequence
  Description of Artificial Sequence: Synthetic oligonucleotide
  Sense strand starting at position 2390 of SEQ ID NO: 1886467
ugcugaaucuuggugagag

SEQ ID NO: 2412011 - RNA, 19 nt, Artificial Sequence
  Description of Artificial Sequence: Synthetic oligonucleotide
  Antisense strand to SEQ ID NO: 2412010
cucucaccaagauucagca

SEQ ID NO: 2412012 - RNA, 19 nt, Artificial Sequence
  Description of Artificial Sequence: Synthetic oligonucleotide
  Sense strand starting at position 2400 of SEQ ID NO: 1886467
uggugagagagucaccauu

SEQ ID NO: 2412013 - RNA, 19 nt, Artificial Sequence
  Description of Artificial Sequence: Synthetic oligonucleotide
  Antisense strand to SEQ ID NO: 2412012
aauggugacucucucacca

SEQ ID NO: 2412014 - RNA, 19 nt, Artificial Sequence
  Description of Artificial Sequence: Synthetic oligonucleotide
  Sense strand starting at position 2429 of SEQ ID NO: 1886467
acuggauccaccugugaga

SEQ ID NO: 2412015 - RNA, 19 nt, Artificial Sequence
  Description of Artificial Sequence: Synthetic oligonucleotide
  Antisense strand to SEQ ID NO: 2412014
ucucacagguggauccagu

SEQ ID NO: 2412016 - RNA, 19 nt, Artificial Sequence
  Description of Artificial Sequence: Synthetic oligonucleotide
  Sense strand starting at position 2431 of SEQ ID NO: 1886467
uggauccaccugugagagu

SEQ ID NO: 2412017 - RNA, 19 nt, Artificial Sequence
  Description of Artificial Sequence: Synthetic oligonucleotide
  Antisense strand to SEQ ID NO: 2412016
acucucacagguggaucca

SEQ ID NO: 2412018 - RNA, 19 nt, Artificial Sequence
  Description of Artificial Sequence: Synthetic oligonucleotide
  Sense strand starting at position 2666 of SEQ ID NO: 1886467
guagaagauccaggacuuu

SEQ ID NO: 2412019 - RNA, 19 nt, Artificial Sequence
  Description of Artificial Sequence: Synthetic oligonucleotide
  Antisense strand to SEQ ID NO: 2412018
aaaguccuggaucuucuac

SEQ ID NO: 2412020 - RNA, 19 nt, Artificial Sequence
  Description of Artificial Sequence: Synthetic oligonucleotide
  Sense strand starting at position 2734 of SEQ ID NO: 1886467
uuggcucauguauaagauu

SEQ ID NO: 2412021 - RNA, 19 nt, Artificial Sequence
  Description of Artificial Sequence: Synthetic oligonucleotide
  Antisense strand to SEQ ID NO: 2412020
aaucuuauacaugagccaa

SEQ ID NO: 2412022 - RNA, 19 nt, Artificial Sequence
  Description of Artificial Sequence: Synthetic oligonucleotide
  Sense strand starting at position 2791 of SEQ ID NO: 1886467
ccuucucaacuguggagau

SEQ ID NO: 2412023 - RNA, 19 nt, Artificial Sequence
  Description of Artificial Sequence: Synthetic oligonucleotide
  Antisense strand to SEQ ID NO: 2412022
aucuccacaguugagaagg

SEQ ID NO: 2412024 - RNA, 19 nt, Artificial Sequence
  Description of Artificial Sequence: Synthetic oligonucleotide
  Sense strand starting at position 2942 of SEQ ID NO: 1886467
gaaguauugcaauggugga

SEQ ID NO: 2412025 - RNA, 19 nt, Artificial Sequence
  Description of Artificial Sequence: Synthetic oligonucleotide
  Antisense strand to SEQ ID NO: 2412024
uccaccauugcaauacuuc

SEQ ID NO: 2412026 - RNA, 19 nt, Artificial Sequence
  Description of Artificial Sequence: Synthetic oligonucleotide
  Sense strand starting at position 3006 of SEQ ID NO: 1886467
aagagcugucuuugaaaug

SEQ ID NO: 2412027 - RNA, 19 nt, Artificial Sequence
  Description of Artificial Sequence: Synthetic oligonucleotide
  Antisense strand to SEQ ID NO: 2412026
cauuucaaagacagcucuu

SEQ ID NO: 2412028 - RNA, 19 nt, Artificial Sequence
  Description of Artificial Sequence: Synthetic oligonucleotide
  Sense strand starting at position 3011 of SEQ ID NO: 1886467
cugucuuugaaauggagga

SEQ ID NO: 2412029 - RNA, 19 nt, Artificial Sequence
  Description of Artificial Sequence: Synthetic oligonucleotide
  Antisense strand to SEQ ID NO: 2412028
uccuccauuucaaagacag

SEQ ID NO: 2412030 - RNA, 19 nt, Artificial Sequence
  Description of Artificial Sequence: Synthetic oligonucleotide
  Sense strand starting at position 3157 of SEQ ID NO: 1886467
ugguuauauguuuacucag

SEQ ID NO: 2412031 - RNA, 19 nt, Artificial Sequence
  Description of Artificial Sequence: Synthetic oligonucleotide
  Antisense strand to SEQ ID NO: 2412030
cugaguaaacauauaacca

SEQ ID NO: 2412032 - RNA, 19 nt, Artificial Sequence
  Description of Artificial Sequence: Synthetic oligonucleotide
  Sense strand starting at position 3160 of SEQ ID NO: 1886467
uuauauguuuacucagacu

SEQ ID NO: 2412033 - RNA, 19 nt, Artificial Sequence
  Description of Artificial Sequence: Synthetic oligonucleotide
  Antisense strand to SEQ ID NO: 2412032
agucugaguaaacauauaa

SEQ ID NO: 2412034 - RNA, 19 nt, Artificial Sequence
  Description of Artificial Sequence: Synthetic oligonucleotide
  Sense strand starting at position 3310 of SEQ ID NO: 1886467
aucuaugaaucugugauau

SEQ ID NO: 2412035 - RNA, 19 nt, Artificial Sequence
  Description of Artificial Sequence: Synthetic oligonucleotide
  Antisense strand to SEQ ID NO: 2412034
auaucacagauucauagau

SEQ ID NO: 2412036 - RNA, 19 nt, Artificial Sequence
  Description of Artificial Sequence: Synthetic oligonucleotide
  Sense strand starting at position 3340 of SEQ ID NO: 1886467
uguaccaucuagguaacaa

SEQ ID NO: 2412037 - RNA, 19 nt, Artificial Sequence
  Description of Artificial Sequence: Synthetic oligonucleotide
  Antisense strand to SEQ ID NO: 2412036
uuguuaccuagaugguaca

SEQ ID NO: 2412038 - RNA, 19 nt, Artificial Sequence
  Description of Artificial Sequence: Synthetic oligonucleotide
  Sense strand starting at position 3535 of SEQ ID NO: 1886467
cuggcaagcauaggugaaa

SEQ ID NO: 2412039 - RNA, 19 nt, Artificial Sequence
  Description of Artificial Sequence: Synthetic oligonucleotide
  Antisense strand to SEQ ID NO: 2412038
uuucaccuaugcuugccag

SEQ ID NO: 2412040 - RNA, 19 nt, Artificial Sequence
  Description of Artificial Sequence: Synthetic oligonucleotide
  Sense strand starting at position 3536 of SEQ ID NO: 1886467
uggcaagcauaggugaaau

SEQ ID NO: 2412041 - RNA, 19 nt, Artificial Sequence
  Description of Artificial Sequence: Synthetic oligonucleotide
  Antisense strand to SEQ ID NO: 2412040
auuucaccuaugcuugcca

SEQ ID NO: 2412042 - RNA, 19 nt, Artificial Sequence
  Description of Artificial Sequence: Synthetic oligonucleotide
  Sense strand starting at position 3538 of SEQ ID NO: 1886467
gcaagcauaggugaaaugu

SEQ ID NO: 2412043 - RNA, 19 nt, Artificial Sequence
  Description of Artificial Sequence: Synthetic oligonucleotide
  Antisense strand to SEQ ID NO: 2412042
acauuucaccuaugcuugc

SEQ ID NO: 2412044 - RNA, 19 nt, Artificial Sequence
  Description of Artificial Sequence: Synthetic oligonucleotide
  Sense strand starting at position 3711 of SEQ ID NO: 1886467
ccugaacuuguggagucua

SEQ ID NO: 2412045 - RNA, 19 nt, Artificial Sequence
  Description of Artificial Sequence: Synthetic oligonucleotide
  Antisense strand to SEQ ID NO: 2412044
uagacuccacaaguucagg

SEQ ID NO: 2412046 - RNA, 19 nt, Artificial Sequence
  Description of Artificial Sequence: Synthetic oligonucleotide
  Sense strand starting at position 51 of SEQ ID NO: 1886469
uaacaaugugagugguacu

SEQ ID NO: 2412047 - RNA, 19 nt, Artificial Sequence
  Description of Artificial Sequence: Synthetic oligonucleotide
  Antisense strand to SEQ ID NO: 2412046
aguaccacucacauuguua

SEQ ID NO: 2412048 - RNA, 19 nt, Artificial Sequence
  Description of Artificial Sequence: Synthetic oligonucleotide
  Sense strand starting at position 58 of SEQ ID NO: 1886469
gugagugguacucaggacu

SEQ ID NO: 2412049 - RNA, 19 nt, Artificial Sequence
  Description of Artificial Sequence: Synthetic oligonucleotide
  Antisense strand to SEQ ID NO: 2412048
aguccugaguaccacucac

SEQ ID NO: 2412050 - RNA, 19 nt, Artificial Sequence
  Description of Artificial Sequence: Synthetic oligonucleotide
  Sense strand starting at position 120 of SEQ ID NO: 1886469
ugaaauagaucaucuguac

SEQ ID NO: 2412051 - RNA, 19 nt, Artificial Sequence
  Description of Artificial Sequence: Synthetic oligonucleotide
  Antisense strand to SEQ ID NO: 2412050
guacagaugaucuauuuca

SEQ ID NO: 2412052 - RNA, 19 nt, Artificial Sequence
  Description of Artificial Sequence: Synthetic oligonucleotide
  Sense strand starting at position 369 of SEQ ID NO: 1886469
gugagcucagauugcaaca

SEQ ID NO: 2412053 - RNA, 19 nt, Artificial Sequence
  Description of Artificial Sequence: Synthetic oligonucleotide
  Antisense strand to SEQ ID NO: 2412052
uguugcaaucugagcucac

SEQ ID NO: 2412054 - RNA, 19 nt, Artificial Sequence
  Description of Artificial Sequence: Synthetic oligonucleotide
  Sense strand starting at position 452 of SEQ ID NO: 1886469
auaggauucccugguuguu

SEQ ID NO: 2412055 - RNA, 19 nt, Artificial Sequence
  Description of Artificial Sequence: Synthetic oligonucleotide
  Antisense strand to SEQ ID NO: 2412054
aacaaccagggaauccuau

SEQ ID NO: 2412056 - RNA, 19 nt, Artificial Sequence
  Description of Artificial Sequence: Synthetic oligonucleotide
  Sense strand starting at position 475 of SEQ ID NO: 1886469
gagucaugccuuuguugga

SEQ ID NO: 2412057 - RNA, 19 nt, Artificial Sequence
  Description of Artificial Sequence: Synthetic oligonucleotide
  Antisense strand to SEQ ID NO: 2412056
uccaacaaaggcaugacuc

SEQ ID NO: 2412058 - RNA, 19 nt, Artificial Sequence
  Description of Artificial Sequence: Synthetic oligonucleotide
  Sense strand starting at position 482 of SEQ ID NO: 1886469
gccuuuguuggacacuaga

SEQ ID NO: 2412059 - RNA, 19 nt, Artificial Sequence
  Description of Artificial Sequence: Synthetic oligonucleotide
  Antisense strand to SEQ ID NO: 2412058
ucuaguguccaacaaaggc

SEQ ID NO: 2412060 - RNA, 19 nt, Artificial Sequence
  Description of Artificial Sequence: Synthetic oligonucleotide
  Sense strand starting at position 812 of SEQ ID NO: 1886469
aaguauuaggcuuaaugcu

SEQ ID NO: 2412061 - RNA, 19 nt, Artificial Sequence
  Description of Artificial Sequence: Synthetic oligonucleotide
  Antisense strand to SEQ ID NO: 2412060
agcauuaagccuaauacuu

SEQ ID NO: 2412062 - RNA, 19 nt, Artificial Sequence
  Description of Artificial Sequence: Synthetic oligonucleotide
  Sense strand starting at position 820 of SEQ ID NO: 1886469
ggcuuaaugcuauaugcau

SEQ ID NO: 2412063 - RNA, 19 nt, Artificial Sequence
  Description of Artificial Sequence: Synthetic oligonucleotide
  Antisense strand to SEQ ID NO: 2412062
augcauauagcauuaagcc

SEQ ID NO: 2412064 - RNA, 19 nt, Artificial Sequence
  Description of Artificial Sequence: Synthetic oligonucleotide
  Sense strand starting at position 1221 of SEQ ID NO: 1886469
gacauugaggcuuaaugug

SEQ ID NO: 2412065 - RNA, 19 nt, Artificial Sequence
  Description of Artificial Sequence: Synthetic oligonucleotide
  Antisense strand to SEQ ID NO: 2412064
cacauuaagccucaauguc

SEQ ID NO: 2412066 - RNA, 19 nt, Artificial Sequence
  Description of Artificial Sequence: Synthetic oligonucleotide
  Sense strand starting at position 1226 of SEQ ID NO: 1886469
ugaggcuuaaugugggaaa

SEQ ID NO: 2412067 - RNA, 19 nt, Artificial Sequence
  Description of Artificial Sequence: Synthetic oligonucleotide
  Antisense strand to SEQ ID NO: 2412066
uuucccacauuaagccuca

SEQ ID NO: 2412068 - RNA, 19 nt, Artificial Sequence
  Description of Artificial Sequence: Synthetic oligonucleotide
  Sense strand starting at position 1349 of SEQ ID NO: 1886469
ccgcaagggucucccagau

SEQ ID NO: 2412069 - RNA, 19 nt, Artificial Sequence
  Description of Artificial Sequence: Synthetic oligonucleotide
  Antisense strand to SEQ ID NO: 2412068
aucugggagacccuugcgg

SEQ ID NO: 2412070 - RNA, 19 nt, Artificial Sequence
  Description of Artificial Sequence: Synthetic oligonucleotide
  Sense strand starting at position 1353 of SEQ ID NO: 1886469
aagggucucccagaugcaa

SEQ ID NO: 2412071 - RNA, 19 nt, Artificial Sequence
  Description of Artificial Sequence: Synthetic oligonucleotide
  Antisense strand to SEQ ID NO: 2412070
uugcaucugggagacccuu

SEQ ID NO: 2412072 - RNA, 19 nt, Artificial Sequence
  Description of Artificial Sequence: Synthetic oligonucleotide
  Sense strand starting at position 1438 of SEQ ID NO: 1886469
uuggaagcagucuggauau

SEQ ID NO: 2412073 - RNA, 19 nt, Artificial Sequence
  Description of Artificial Sequence: Synthetic oligonucleotide
  Antisense strand to SEQ ID NO: 2412072
auauccagacugcuuccaa

SEQ ID NO: 2412074 - RNA, 19 nt, Artificial Sequence
  Description of Artificial Sequence: Synthetic oligonucleotide
  Sense strand starting at position 1460 of SEQ ID NO: 1886469
aaugaugucuuaguaaugu

SEQ ID NO: 2412075 - RNA, 19 nt, Artificial Sequence
  Description of Artificial Sequence: Synthetic oligonucleotide
  Antisense strand to SEQ ID NO: 2412074
acauuacuaagacaucauu

SEQ ID NO: 2412076 - RNA, 19 nt, Artificial Sequence
  Description of Artificial Sequence: Synthetic oligonucleotide
  Sense strand starting at position 1517 of SEQ ID NO: 1886469
ucaguagacuaucugagaa

SEQ ID NO: 2412077 - RNA, 19 nt, Artificial Sequence
  Description of Artificial Sequence: Synthetic oligonucleotide
  Antisense strand to SEQ ID NO: 2412076
uucucagauagucuacuga

SEQ ID NO: 2412078 - RNA, 19 nt, Artificial Sequence
  Description of Artificial Sequence: Synthetic oligonucleotide
  Sense strand starting at position 1622 of SEQ ID NO: 1886469
aaaugagauucggauggaa

SEQ ID NO: 2412079 - RNA, 19 nt, Artificial Sequence
  Description of Artificial Sequence: Synthetic oligonucleotide
  Antisense strand to SEQ ID NO: 2412078
uuccauccgaaucucauuu

SEQ ID NO: 2412080 - RNA, 19 nt, Artificial Sequence
  Description of Artificial Sequence: Synthetic oligonucleotide
  Sense strand starting at position 2087 of SEQ ID NO: 1886469
uggacaugacaccguuaau

SEQ ID NO: 2412081 - RNA, 19 nt, Artificial Sequence
  Description of Artificial Sequence: Synthetic oligonucleotide
  Antisense strand to SEQ ID NO: 2412080
auuaacggugucaugucca

SEQ ID NO: 2412082 - RNA, 19 nt, Artificial Sequence
  Description of Artificial Sequence: Synthetic oligonucleotide
  Sense strand starting at position 2104 of SEQ ID NO: 1886469
augccucacugugucuaaa

SEQ ID NO: 2412083 - RNA, 19 nt, Artificial Sequence
  Description of Artificial Sequence: Synthetic oligonucleotide
  Antisense strand to SEQ ID NO: 2412082
uuuagacacagugaggcau

SEQ ID NO: 2412084 - RNA, 19 nt, Artificial Sequence
  Description of Artificial Sequence: Synthetic oligonucleotide
  Sense strand starting at position 2242 of SEQ ID NO: 1886469
gcuuaaggucuccaggaga

SEQ ID NO: 2412085 - RNA, 19 nt, Artificial Sequence
  Description of Artificial Sequence: Synthetic oligonucleotide
  Antisense strand to SEQ ID NO: 2412084
ucuccuggagaccuuaagc

SEQ ID NO: 2412086 - RNA, 19 nt, Artificial Sequence
  Description of Artificial Sequence: Synthetic oligonucleotide
  Sense strand starting at position 2380 of SEQ ID NO: 1886469
ggaggaugcugguuggaau

SEQ ID NO: 2412087 - RNA, 19 nt, Artificial Sequence
  Description of Artificial Sequence: Synthetic oligonucleotide
  Antisense strand to SEQ ID NO: 2412086
auuccaaccagcauccucc

SEQ ID NO: 2412088 - RNA, 19 nt, Artificial Sequence
  Description of Artificial Sequence: Synthetic oligonucleotide
  Sense strand starting at position 2408 of SEQ ID NO: 1886469
ggcaauggcucauuuauuc

SEQ ID NO: 2412089 - RNA, 19 nt, Artificial Sequence
  Description of Artificial Sequence: Synthetic oligonucleotide
  Antisense strand to SEQ ID NO: 2412088
gaauaaaugagccauugcc

SEQ ID NO: 2412090 - RNA, 19 nt, Artificial Sequence
  Description of Artificial Sequence: Synthetic oligonucleotide
  Sense strand starting at position 2585 of SEQ ID NO: 1886469
aggaaacaaucacacgaau

SEQ ID NO: 2412091 - RNA, 19 nt, Artificial Sequence
  Description of Artificial Sequence: Synthetic oligonucleotide
  Antisense strand to SEQ ID NO: 2412090
auucgugugauuguuuccu

SEQ ID NO: 2412092 - RNA, 19 nt, Artificial Sequence
  Description of Artificial Sequence: Synthetic oligonucleotide
  Sense strand starting at position 2933 of SEQ ID NO: 1886469
gagggacaguuggugaaau

SEQ ID NO: 2412093 - RNA, 19 nt, Artificial Sequence
  Description of Artificial Sequence: Synthetic oligonucleotide
  Antisense strand to SEQ ID NO: 2412092
auuucaccaacugucccuc

SEQ ID NO: 2412094 - RNA, 19 nt, Artificial Sequence
  Description of Artificial Sequence: Synthetic oligonucleotide
  Sense strand starting at position 2958 of SEQ ID NO: 1886469
auggacagcaugugagauu

SEQ ID NO: 2412095 - RNA, 19 nt, Artificial Sequence
  Description of Artificial Sequence: Synthetic oligonucleotide
  Antisense strand to SEQ ID NO: 2412094
aaucucacaugcuguccau

SEQ ID NO: 2412096 - RNA, 19 nt, Artificial Sequence
  Description of Artificial Sequence: Synthetic oligonucleotide
  Sense strand starting at position 2967 of SEQ ID NO: 1886469
augugagauuguguuagga

SEQ ID NO: 2412097 - RNA, 19 nt, Artificial Sequence
  Description of Artificial Sequence: Synthetic oligonucleotide
  Antisense strand to SEQ ID NO: 2412096
uccuaacacaaucucacau

SEQ ID NO: 2412098 - RNA, 19 nt, Artificial Sequence
  Description of Artificial Sequence: Synthetic oligonucleotide
  Sense strand starting at position 3002 of SEQ ID NO: 1886469
cuucaagagugauucggga

SEQ ID NO: 2412099 - RNA, 19 nt, Artificial Sequence
  Description of Artificial Sequence: Synthetic oligonucleotide
  Antisense strand to SEQ ID NO: 2412098
ucccgaaucacucuugaag

SEQ ID NO: 2412100 - RNA, 19 nt, Artificial Sequence
  Description of Artificial Sequence: Synthetic oligonucleotide
  Sense strand starting at position 3004 of SEQ ID NO: 1886469
ucaagagugauucgggagu

SEQ ID NO: 2412101 - RNA, 19 nt, Artificial Sequence
  Description of Artificial Sequence: Synthetic oligonucleotide
  Antisense strand to SEQ ID NO: 2412100
acucccgaaucacucuuga

SEQ ID NO: 2412102 - RNA, 19 nt, Artificial Sequence
  Description of Artificial Sequence: Synthetic oligonucleotide
  Sense strand starting at position 3007 of SEQ ID NO: 1886469
agagugauucgggaguugu

SEQ ID NO: 2412103 - RNA, 19 nt, Artificial Sequence
  Description of Artificial Sequence: Synthetic oligonucleotide
  Antisense strand to SEQ ID NO: 2412102
acaacucccgaaucacucu

SEQ ID NO: 2412104 - RNA, 19 nt, Artificial Sequence
  Description of Artificial Sequence: Synthetic oligonucleotide
  Sense strand starting at position 3015 of SEQ ID NO: 1886469
ucgggaguuguguuugugu

SEQ ID NO: 2412105 - RNA, 19 nt, Artificial Sequence
  Description of Artificial Sequence: Synthetic oligonucleotide
  Antisense strand to SEQ ID NO: 2412104
acacaaacacaacucccga

SEQ ID NO: 2412106 - RNA, 19 nt, Artificial Sequence
  Description of Artificial Sequence: Synthetic oligonucleotide
  Sense strand starting at position 3029 of SEQ ID NO: 1886469
uguguaggaaaguguucuu

SEQ ID NO: 2412107 - RNA, 19 nt, Artificial Sequence
  Description of Artificial Sequence: Synthetic oligonucleotide
  Antisense strand to SEQ ID NO: 2412106
aagaacacuuuccuacaca

SEQ ID NO: 2412108 - RNA, 19 nt, Artificial Sequence
  Description of Artificial Sequence: Synthetic oligonucleotide
  Sense strand starting at position 3032 of SEQ ID NO: 1886469
guaggaaaguguucuuugu

SEQ ID NO: 2412109 - RNA, 19 nt, Artificial Sequence
  Description of Artificial Sequence: Synthetic oligonucleotide
  Antisense strand to SEQ ID NO: 2412108
acaaagaacacuuuccuac

SEQ ID NO: 2412110 - RNA, 19 nt, Artificial Sequence
  Description of Artificial Sequence: Synthetic oligonucleotide
  Sense strand starting at position 3034 of SEQ ID NO: 1886469
aggaaaguguucuuuguuu

SEQ ID NO: 2412111 - RNA, 19 nt, Artificial Sequence
  Description of Artificial Sequence: Synthetic oligonucleotide
  Antisense strand to SEQ ID NO: 2412110
aaacaaagaacacuuuccu

SEQ ID NO: 2412112 - RNA, 19 nt, Artificial Sequence
  Description of Artificial Sequence: Synthetic oligonucleotide
  Sense strand starting at position 3036 of SEQ ID NO: 1886469
gaaaguguucuuuguuuau

SEQ ID NO: 2412113 - RNA, 19 nt, Artificial Sequence
  Description of Artificial Sequence: Synthetic oligonucleotide
  Antisense strand to SEQ ID NO: 2412112
auaaacaaagaacacuuuc

SEQ ID NO: 2412114 - RNA, 19 nt, Artificial Sequence
  Description of Artificial Sequence: Synthetic oligonucleotide
  Sense strand starting at position 3568 of SEQ ID NO: 1886469
acaggagacuugccauaua

SEQ ID NO: 2412115 - RNA, 19 nt, Artificial Sequence
  Description of Artificial Sequence: Synthetic oligonucleotide
  Antisense strand to SEQ ID NO: 2412114
uauauggcaagucuccugu

SEQ ID NO: 2412116 - RNA, 19 nt, Artificial Sequence
  Description of Artificial Sequence: Synthetic oligonucleotide
  Sense strand starting at position 3571 of SEQ ID NO: 1886469
ggagacuugccauauagcu

SEQ ID NO: 2412117 - RNA, 19 nt, Artificial Sequence
  Description of Artificial Sequence: Synthetic oligonucleotide
  Antisense strand to SEQ ID NO: 2412116
agcuauauggcaagucucc

SEQ ID NO: 2412118 - RNA, 19 nt, Artificial Sequence
  Description of Artificial Sequence: Synthetic oligonucleotide
  Sense strand starting at position 3696 of SEQ ID NO: 1886469
gaugauacaggcugaagua

SEQ ID NO: 2412119 - RNA, 19 nt, Artificial Sequence
  Description of Artificial Sequence: Synthetic oligonucleotide
  Antisense strand to SEQ ID NO: 2412118
uacuucagccuguaucauc

SEQ ID NO: 2412120 - RNA, 19 nt, Artificial Sequence
  Description of Artificial Sequence: Synthetic oligonucleotide
  Sense strand starting at position 3735 of SEQ ID NO: 1886469
ccuguaacuuacuuguaga

SEQ ID NO: 2412121 - RNA, 19 nt, Artificial Sequence
  Description of Artificial Sequence: Synthetic oligonucleotide
  Antisense strand to SEQ ID NO: 2412120
ucuacaaguaaguuacagg

SEQ ID NO: 2412122 - RNA, 19 nt, Artificial Sequence
  Description of Artificial Sequence: Synthetic oligonucleotide
  Sense strand starting at position 3829 of SEQ ID NO: 1886469
aucauugugucaucaauag

SEQ ID NO: 2412123 - RNA, 19 nt, Artificial Sequence
  Description of Artificial Sequence: Synthetic oligonucleotide
  Antisense strand to SEQ ID NO: 2412122
cuauugaugacacaaugau

SEQ ID NO: 2412124 - RNA, 19 nt, Artificial Sequence
  Description of Artificial Sequence: Synthetic oligonucleotide
  Sense strand starting at position 3833 of SEQ ID NO: 1886469
uugugucaucaauaguacu

SEQ ID NO: 2412125 - RNA, 19 nt, Artificial Sequence
  Description of Artificial Sequence: Synthetic oligonucleotide
  Antisense strand to SEQ ID NO: 2412124
aguacuauugaugacacaa

SEQ ID NO: 2412126 - RNA, 19 nt, Artificial Sequence
  Description of Artificial Sequence: Synthetic oligonucleotide
  Sense strand starting at position 43 of SEQ ID NO: 1886470
cucagauuggugcaucgga

SEQ ID NO: 2412127 - RNA, 19 nt, Artificial Sequence
  Description of Artificial Sequence: Synthetic oligonucleotide
  Antisense strand to SEQ ID NO: 2412126
uccgaugcaccaaucugag

SEQ ID NO: 2412128 - RNA, 19 nt, Artificial Sequence
  Description of Artificial Sequence: Synthetic oligonucleotide
  Sense strand starting at position 80 of SEQ ID NO: 1886470
ggccuucuaauagggaagu

SEQ ID NO: 2412129 - RNA, 19 nt, Artificial Sequence
  Description of Artificial Sequence: Synthetic oligonucleotide
  Antisense strand to SEQ ID NO: 2412128
acuucccuauuagaaggcc

SEQ ID NO: 2412130 - RNA, 19 nt, Artificial Sequence
  Description of Artificial Sequence: Synthetic oligonucleotide
  Sense strand starting at position 133 of SEQ ID NO: 1886470
ucaggaagucuucgacucu

SEQ ID NO: 2412131 - RNA, 19 nt, Artificial Sequence
  Description of Artificial Sequence: Synthetic oligonucleotide
  Antisense strand to SEQ ID NO: 2412130
agagucgaagacuuccuga

SEQ ID NO: 2412132 - RNA, 19 nt, Artificial Sequence
  Description of Artificial Sequence: Synthetic oligonucleotide
  Sense strand starting at position 684 of SEQ ID NO: 1886470
gccgcauugcuucucaagu

SEQ ID NO: 2412133 - RNA, 19 nt, Artificial Sequence
  Description of Artificial Sequence: Synthetic oligonucleotide
  Antisense strand to SEQ ID NO: 2412132
acuugagaagcaaugcggc

SEQ ID NO: 2412134 - RNA, 19 nt, Artificial Sequence
  Description of Artificial Sequence: Synthetic oligonucleotide
  Sense strand starting at position 870 of SEQ ID NO: 1886470
uugguaucccuuuaacuag

SEQ ID NO: 2412135 - RNA, 19 nt, Artificial Sequence
  Description of Artificial Sequence: Synthetic oligonucleotide
  Antisense strand to SEQ ID NO: 2412134
cuaguuaaagggauaccaa

SEQ ID NO: 2412136 - RNA, 19 nt, Artificial Sequence
  Description of Artificial Sequence: Synthetic oligonucleotide
  Sense strand starting at position 895 of SEQ ID NO: 1886470
uauucuucugcugggagau

SEQ ID NO: 2412137 - RNA, 19 nt, Artificial Sequence
  Description of Artificial Sequence: Synthetic oligonucleotide
  Antisense strand to SEQ ID NO: 2412136
aucucccagcagaagaaua

SEQ ID NO: 2412138 - RNA, 19 nt, Artificial Sequence
  Description of Artificial Sequence: Synthetic oligonucleotide
  Sense strand starting at position 938 of SEQ ID NO: 1886470
ugucauacaugaucucuga

SEQ ID NO: 2412139 - RNA, 19 nt, Artificial Sequence
  Description of Artificial Sequence: Synthetic oligonucleotide
  Antisense strand to SEQ ID NO: 2412138
ucagagaucauguaugaca

SEQ ID NO: 2412140 - RNA, 19 nt, Artificial Sequence
  Description of Artificial Sequence: Synthetic oligonucleotide
  Sense strand starting at position 1020 of SEQ ID NO: 1886470
guuuaugugcgacuugugu

SEQ ID NO: 2412141 - RNA, 19 nt, Artificial Sequence
  Description of Artificial Sequence: Synthetic oligonucleotide
  Antisense strand to SEQ ID NO: 2412140
acacaagucgcacauaaac

SEQ ID NO: 2412142 - RNA, 19 nt, Artificial Sequence
  Description of Artificial Sequence: Synthetic oligonucleotide
  Sense strand starting at position 1028 of SEQ ID NO: 1886470
gcgacuuguguauaaagau

SEQ ID NO: 2412143 - RNA, 19 nt, Artificial Sequence
  Description of Artificial Sequence: Synthetic oligonucleotide
  Antisense strand to SEQ ID NO: 2412142
aucuuuauacacaagucgc

SEQ ID NO: 2412144 - RNA, 19 nt, Artificial Sequence
  Description of Artificial Sequence: Synthetic oligonucleotide
  Sense strand starting at position 1354 of SEQ ID NO: 1886470
aagauauguuauccugaag

SEQ ID NO: 2412145 - RNA, 19 nt, Artificial Sequence
  Description of Artificial Sequence: Synthetic oligonucleotide
  Antisense strand to SEQ ID NO: 2412144
cuucaggauaacauaucuu

SEQ ID NO: 2412146 - RNA, 19 nt, Artificial Sequence
  Description of Artificial Sequence: Synthetic oligonucleotide
  Sense strand starting at position 1357 of SEQ ID NO: 1886470
auauguuauccugaagucu

SEQ ID NO: 2412147 - RNA, 19 nt, Artificial Sequence
  Description of Artificial Sequence: Synthetic oligonucleotide
  Antisense strand to SEQ ID NO: 2412146
agacuucaggauaacauau

SEQ ID NO: 2412148 - RNA, 19 nt, Artificial Sequence
  Description of Artificial Sequence: Synthetic oligonucleotide
  Sense strand starting at position 1460 of SEQ ID NO: 1886470
auguuaaucuaucuuguca

SEQ ID NO: 2412149 - RNA, 19 nt, Artificial Sequence
  Description of Artificial Sequence: Synthetic oligonucleotide
  Antisense strand to SEQ ID NO: 2412148
ugacaagauagauuaacau

SEQ ID NO: 2412150 - RNA, 19 nt, Artificial Sequence
  Description of Artificial Sequence: Synthetic oligonucleotide
  Sense strand starting at position 1473 of SEQ ID NO: 1886470
uugucaugaaguuguggga

SEQ ID NO: 2412151 - RNA, 19 nt, Artificial Sequence
  Description of Artificial Sequence: Synthetic oligonucleotide
  Antisense strand to SEQ ID NO: 2412150
ucccacaacuucaugacaa

SEQ ID NO: 2412152 - RNA, 19 nt, Artificial Sequence
  Description of Artificial Sequence: Synthetic oligonucleotide
  Sense strand starting at position 1510 of SEQ ID NO: 1886470
augugaaauuuccacaaug

SEQ ID NO: 2412153 - RNA, 19 nt, Artificial Sequence
  Description of Artificial Sequence: Synthetic oligonucleotide
  Antisense strand to SEQ ID NO: 2412152
cauuguggaaauuucacau

SEQ ID NO: 2412154 - RNA, 19 nt, Artificial Sequence
  Description of Artificial Sequence: Synthetic oligonucleotide
  Sense strand starting at position 2059 of SEQ ID NO: 1886470
ccacauauauggccugagu

SEQ ID NO: 2412155 - RNA, 19 nt, Artificial Sequence
  Description of Artificial Sequence: Synthetic oligonucleotide
  Antisense strand to SEQ ID NO: 2412154
acucaggccauauaugugg

SEQ ID NO: 2412156 - RNA, 19 nt, Artificial Sequence
  Description of Artificial Sequence: Synthetic oligonucleotide
  Sense strand starting at position 2061 of SEQ ID NO: 1886470
acauauauggccugaguuu

SEQ ID NO: 2412157 - RNA, 19 nt, Artificial Sequence
  Description of Artificial Sequence: Synthetic oligonucleotide
  Antisense strand to SEQ ID NO: 2412156
aaacucaggccauauaugu

SEQ ID NO: 2412158 - RNA, 19 nt, Artificial Sequence
  Description of Artificial Sequence: Synthetic oligonucleotide
  Sense strand starting at position 2079 of SEQ ID NO: 1886470
ucugauucucagggucauu

SEQ ID NO: 2412159 - RNA, 19 nt, Artificial Sequence
  Description of Artificial Sequence: Synthetic oligonucleotide
  Antisense strand to SEQ ID NO: 2412158
aaugacccugagaaucaga

SEQ ID NO: 2412160 - RNA, 19 nt, Artificial Sequence
  Description of Artificial Sequence: Synthetic oligonucleotide
  Sense strand starting at position 2088 of SEQ ID NO: 1886470
cagggucauugccuaagga

SEQ ID NO: 2412161 - RNA, 19 nt, Artificial Sequence
  Description of Artificial Sequence: Synthetic oligonucleotide
  Antisense strand to SEQ ID NO: 2412160
uccuuaggcaaugacccug

SEQ ID NO: 2412162 - RNA, 19 nt, Artificial Sequence
  Description of Artificial Sequence: Synthetic oligonucleotide
  Sense strand starting at position 2205 of SEQ ID NO: 1886470
uccuaauguuggguuaaga

SEQ ID NO: 2412163 - RNA, 19 nt, Artificial Sequence
  Description of Artificial Sequence: Synthetic oligonucleotide
  Antisense strand to SEQ ID NO: 2412162
ucuuaacccaacauuagga

SEQ ID NO: 2412164 - RNA, 19 nt, Artificial Sequence
  Description of Artificial Sequence: Synthetic oligonucleotide
  Sense strand starting at position 2225 of SEQ ID NO: 1886470
aggaauugcucccuaugaa

SEQ ID NO: 2412165 - RNA, 19 nt, Artificial Sequence
  Description of Artificial Sequence: Synthetic oligonucleotide
  Antisense strand to SEQ ID NO: 2412164
uucauagggagcaauuccu

SEQ ID NO: 2412166 - RNA, 19 nt, Artificial Sequence
  Description of Artificial Sequence: Synthetic oligonucleotide
  Sense strand starting at position 2307 of SEQ ID NO: 1886470
guuugauaauagucuuaca

SEQ ID NO: 2412167 - RNA, 19 nt, Artificial Sequence
  Description of Artificial Sequence: Synthetic oligonucleotide
  Antisense strand to SEQ ID NO: 2412166
uguaagacuauuaucaaac

SEQ ID NO: 2412168 - RNA, 19 nt, Artificial Sequence
  Description of Artificial Sequence: Synthetic oligonucleotide
  Sense strand starting at position 2539 of SEQ ID NO: 1886470
ucugcuuacuaguugaaag

SEQ ID NO: 2412169 - RNA, 19 nt, Artificial Sequence
  Description of Artificial Sequence: Synthetic oligonucleotide
  Antisense strand to SEQ ID NO: 2412168
cuuucaacuaguaagcaga

SEQ ID NO: 2412170 - RNA, 19 nt, Artificial Sequence
  Description of Artificial Sequence: Synthetic oligonucleotide
  Sense strand starting at position 2541 of SEQ ID NO: 1886470
ugcuuacuaguugaaaguu

SEQ ID NO: 2412171 - RNA, 19 nt, Artificial Sequence
  Description of Artificial Sequence: Synthetic oligonucleotide
  Antisense strand to SEQ ID NO: 2412170
aacuuucaacuaguaagca

SEQ ID NO: 2412172 - RNA, 19 nt, Artificial Sequence
  Description of Artificial Sequence: Synthetic oligonucleotide
  Sense strand starting at position 2644 of SEQ ID NO: 1886470
gagagugagcauugguuac

SEQ ID NO: 2412173 - RNA, 19 nt, Artificial Sequence
  Description of Artificial Sequence: Synthetic oligonucleotide
  Antisense strand to SEQ ID NO: 2412172
guaaccaaugcucacucuc

SEQ ID NO: 2412174 - RNA, 19 nt, Artificial Sequence
  Description of Artificial Sequence: Synthetic oligonucleotide
  Sense strand starting at position 2648 of SEQ ID NO: 1886470
gugagcauugguuacuuua

SEQ ID NO: 2412175 - RNA, 19 nt, Artificial Sequence
  Description of Artificial Sequence: Synthetic oligonucleotide
  Antisense strand to SEQ ID NO: 2412174
uaaaguaaccaaugcucac

SEQ ID NO: 2412176 - RNA, 19 nt, Artificial Sequence
  Description of Artificial Sequence: Synthetic oligonucleotide
  Sense strand starting at position 2673 of SEQ ID NO: 1886470
agaagaugcuaagagaaca

SEQ ID NO: 2412177 - RNA, 19 nt, Artificial Sequence
  Description of Artificial Sequence: Synthetic oligonucleotide
  Antisense strand to SEQ ID NO: 2412176
uguucucuuagcaucuucu

SEQ ID NO: 2412178 - RNA, 19 nt, Artificial Sequence
  Description of Artificial Sequence: Synthetic oligonucleotide
  Sense strand starting at position 2723 of SEQ ID NO: 1886470
auaguuucgccugagauga

SEQ ID NO: 2412179 - RNA, 19 nt, Artificial Sequence
  Description of Artificial Sequence: Synthetic oligonucleotide
  Antisense strand to SEQ ID NO: 2412178
ucaucucaggcgaaacuau

SEQ ID NO: 2412180 - RNA, 19 nt, Artificial Sequence
  Description of Artificial Sequence: Synthetic oligonucleotide
  Sense strand starting at position 2825 of SEQ ID NO: 1886470
acacaucuuggucaaguga

SEQ ID NO: 2412181 - RNA, 19 nt, Artificial Sequence
  Description of Artificial Sequence: Synthetic oligonucleotide
  Antisense strand to SEQ ID NO: 2412180
ucacuugaccaagaugugu

SEQ ID NO: 2412182 - RNA, 19 nt, Artificial Sequence
  Description of Artificial Sequence: Synthetic oligonucleotide
  Sense strand starting at position 2951 of SEQ ID NO: 1886470
ucaccuuccgugggaacaa

SEQ ID NO: 2412183 - RNA, 19 nt, Artificial Sequence
  Description of Artificial Sequence: Synthetic oligonucleotide
  Antisense strand to SEQ ID NO: 2412182
uuguucccacggaagguga

SEQ ID NO: 2412184 - RNA, 19 nt, Artificial Sequence
  Description of Artificial Sequence: Synthetic oligonucleotide
  Sense strand starting at position 2983 of SEQ ID NO: 1886470
ucaucauggcaaugucuua

SEQ ID NO: 2412185 - RNA, 19 nt, Artificial Sequence
  Description of Artificial Sequence: Synthetic oligonucleotide
  Antisense strand to SEQ ID NO: 2412184
uaagacauugccaugauga

SEQ ID NO: 2412186 - RNA, 19 nt, Artificial Sequence
  Description of Artificial Sequence: Synthetic oligonucleotide
  Sense strand starting at position 3336 of SEQ ID NO: 1886470
gggccuauaagugauagca

SEQ ID NO: 2412187 - RNA, 19 nt, Artificial Sequence
  Description of Artificial Sequence: Synthetic oligonucleotide
  Antisense strand to SEQ ID NO: 2412186
ugcuaucacuuauaggccc

SEQ ID NO: 2412188 - RNA, 19 nt, Artificial Sequence
  Description of Artificial Sequence: Synthetic oligonucleotide
  Sense strand starting at position 3484 of SEQ ID NO: 1886470
cacagucagacggaaaguu

SEQ ID NO: 2412189 - RNA, 19 nt, Artificial Sequence
  Description of Artificial Sequence: Synthetic oligonucleotide
  Antisense strand to SEQ ID NO: 2412188
aacuuuccgucugacugug

SEQ ID NO: 2412190 - RNA, 19 nt, Artificial Sequence
  Description of Artificial Sequence: Synthetic oligonucleotide
  Sense strand starting at position 3579 of SEQ ID NO: 1886470
aagggaugugugggcucau

SEQ ID NO: 2412191 - RNA, 19 nt, Artificial Sequence
  Description of Artificial Sequence: Synthetic oligonucleotide
  Antisense strand to SEQ ID NO: 2412190
augagcccacacaucccuu

SEQ ID NO: 2412192 - RNA, 19 nt, Artificial Sequence
  Description of Artificial Sequence: Synthetic oligonucleotide
  Sense strand starting at position 3580 of SEQ ID NO: 1886470
agggaugugugggcucaua

SEQ ID NO: 2412193 - RNA, 19 nt, Artificial Sequence
  Description of Artificial Sequence: Synthetic oligonucleotide
  Antisense strand to SEQ ID NO: 2412192
uaugagcccacacaucccu

SEQ ID NO: 2412194 - RNA, 19 nt, Artificial Sequence
  Description of Artificial Sequence: Synthetic oligonucleotide
  Sense strand starting at position 3672 of SEQ ID NO: 1886470
guuucuucuccuuuguguu

SEQ ID NO: 2412195 - RNA, 19 nt, Artificial Sequence
  Description of Artificial Sequence: Synthetic oligonucleotide
  Antisense strand to SEQ ID NO: 2412194
aacacaaaggagaagaaac

SEQ ID NO: 2412196 - RNA, 19 nt, Artificial Sequence
  Description of Artificial Sequence: Synthetic oligonucleotide
  Sense strand starting at position 3735 of SEQ ID NO: 1886470
ugccuucuuagcgucauga

SEQ ID NO: 2412197 - RNA, 19 nt, Artificial Sequence
  Description of Artificial Sequence: Synthetic oligonucleotide
  Antisense strand to SEQ ID NO: 2412196
ucaugacgcuaagaaggca

SEQ ID NO: 2412198 - RNA, 19 nt, Artificial Sequence
  Description of Artificial Sequence: Synthetic oligonucleotide
  Sense strand starting at position 3737 of SEQ ID NO: 1886470
ccuucuuagcgucaugaaa

SEQ ID NO: 2412199 - RNA, 19 nt, Artificial Sequence
  Description of Artificial Sequence: Synthetic oligonucleotide
  Antisense strand to SEQ ID NO: 2412198
uuucaugacgcuaagaagg

SEQ ID NO: 2412200 - RNA, 19 nt, Artificial Sequence
  Description of Artificial Sequence: Synthetic oligonucleotide
  Sense strand starting at position 3745 of SEQ ID NO: 1886470
gcgucaugaaaugcguaca

SEQ ID NO: 2412201 - RNA, 19 nt, Artificial Sequence
  Description of Artificial Sequence: Synthetic oligonucleotide
  Antisense strand to SEQ ID NO: 2412200
uguacgcauuucaugacgc

SEQ ID NO: 2412202 - RNA, 19 nt, Artificial Sequence
  Description of Artificial Sequence: Synthetic oligonucleotide
  Sense strand starting at position 3748 of SEQ ID NO: 1886470
ucaugaaaugcguacagca

SEQ ID NO: 2412203 - RNA, 19 nt, Artificial Sequence
  Description of Artificial Sequence: Synthetic oligonucleotide
  Antisense strand to SEQ ID NO: 2412202
ugcuguacgcauuucauga

SEQ ID NO: 2412204 - RNA, 19 nt, Artificial Sequence
  Description of Artificial Sequence: Synthetic oligonucleotide
  Sense strand starting at position 3881 of SEQ ID NO: 1886470
aaccaaucaggguaacgua

SEQ ID NO: 2412205 - RNA, 19 nt, Artificial Sequence
  Description of Artificial Sequence: Synthetic oligonucleotide
  Antisense strand to SEQ ID NO: 2412204
uacguuacccugauugguu

SEQ ID NO: 2412206 - RNA, 19 nt, Artificial Sequence
  Description of Artificial Sequence: Synthetic oligonucleotide
  Sense strand starting at position 232 of SEQ ID NO: 1886471
gugagaccuuguuccuauu

SEQ ID NO: 2412207 - RNA, 19 nt, Artificial Sequence
  Description of Artificial Sequence: Synthetic oligonucleotide
  Antisense strand to SEQ ID NO: 2412206
aauaggaacaaggucucac

SEQ ID NO: 2412208 - RNA, 19 nt, Artificial Sequence
  Description of Artificial Sequence: Synthetic oligonucleotide
  Sense strand starting at position 427 of SEQ ID NO: 1886471
guguaaaucugaguaaguc

SEQ ID NO: 2412209 - RNA, 19 nt, Artificial Sequence
  Description of Artificial Sequence: Synthetic oligonucleotide
  Antisense strand to SEQ ID NO: 2412208
gacuuacucagauuuacac

SEQ ID NO: 2412210 - RNA, 19 nt, Artificial Sequence
  Description of Artificial Sequence: Synthetic oligonucleotide
  Sense strand starting at position 437 of SEQ ID NO: 1886471
gaguaagucccauguacag

SEQ ID NO: 2412211 - RNA, 19 nt, Artificial Sequence
  Description of Artificial Sequence: Synthetic oligonucleotide
  Antisense strand to SEQ ID NO: 2412210
cuguacaugggacuuacuc

SEQ ID NO: 2412212 - RNA, 19 nt, Artificial Sequence
  Description of Artificial Sequence: Synthetic oligonucleotide
  Sense strand starting at position 439 of SEQ ID NO: 1886471
guaagucccauguacagua

SEQ ID NO: 2412213 - RNA, 19 nt, Artificial Sequence
  Description of Artificial Sequence: Synthetic oligonucleotide
  Antisense strand to SEQ ID NO: 2412212
uacuguacaugggacuuac

SEQ ID NO: 2412214 - RNA, 19 nt, Artificial Sequence
  Description of Artificial Sequence: Synthetic oligonucleotide
  Sense strand starting at position 486 of SEQ ID NO: 1886471
aacuguagcuaugcaagau

SEQ ID NO: 2412215 - RNA, 19 nt, Artificial Sequence
  Description of Artificial Sequence: Synthetic oligonucleotide
  Antisense strand to SEQ ID NO: 2412214
aucuugcauagcuacaguu

SEQ ID NO: 2412216 - RNA, 19 nt, Artificial Sequence
  Description of Artificial Sequence: Synthetic oligonucleotide
  Sense strand starting at position 514 of SEQ ID NO: 1886471
gagggauacugggugaucu

SEQ ID NO: 2412217 - RNA, 19 nt, Artificial Sequence
  Description of Artificial Sequence: Synthetic oligonucleotide
  Antisense strand to SEQ ID NO: 2412216
agaucacccaguaucccuc

SEQ ID NO: 2412218 - RNA, 19 nt, Artificial Sequence
  Description of Artificial Sequence: Synthetic oligonucleotide
  Sense strand starting at position 524 of SEQ ID NO: 1886471
gggugaucucccuauacau

SEQ ID NO: 2412219 - RNA, 19 nt, Artificial Sequence
  Description of Artificial Sequence: Synthetic oligonucleotide
  Antisense strand to SEQ ID NO: 2412218
auguauagggagaucaccc

SEQ ID NO: 2412220 - RNA, 19 nt, Artificial Sequence
  Description of Artificial Sequence: Synthetic oligonucleotide
  Sense strand starting at position 526 of SEQ ID NO: 1886471
gugaucucccuauacaucu

SEQ ID NO: 2412221 - RNA, 19 nt, Artificial Sequence
  Description of Artificial Sequence: Synthetic oligonucleotide
  Antisense strand to SEQ ID NO: 2412220
agauguauagggagaucac

SEQ ID NO: 2412222 - RNA, 19 nt, Artificial Sequence
  Description of Artificial Sequence: Synthetic oligonucleotide
  Sense strand starting at position 885 of SEQ ID NO: 1886471
ucuagaaauccagggcuaa

SEQ ID NO: 2412223 - RNA, 19 nt, Artificial Sequence
  Description of Artificial Sequence: Synthetic oligonucleotide
  Antisense strand to SEQ ID NO: 2412222
uuagcccuggauuucuaga

SEQ ID NO: 2412224 - RNA, 19 nt, Artificial Sequence
  Description of Artificial Sequence: Synthetic oligonucleotide
  Sense strand starting at position 886 of SEQ ID NO: 1886471
cuagaaauccagggcuaaa

SEQ ID NO: 2412225 - RNA, 19 nt, Artificial Sequence
  Description of Artificial Sequence: Synthetic oligonucleotide
  Antisense strand to SEQ ID NO: 2412224
uuuagcccuggauuucuag

SEQ ID NO: 2412226 - RNA, 19 nt, Artificial Sequence
  Description of Artificial Sequence: Synthetic oligonucleotide
  Sense strand starting at position 962 of SEQ ID NO: 1886471
ccagacuucucccuguaca

SEQ ID NO: 2412227 - RNA, 19 nt, Artificial Sequence
  Description of Artificial Sequence: Synthetic oligonucleotide
  Antisense strand to SEQ ID NO: 2412226
uguacagggagaagucugg

SEQ ID NO: 2412228 - RNA, 19 nt, Artificial Sequence
  Description of Artificial Sequence: Synthetic oligonucleotide
  Sense strand starting at position 1018 of SEQ ID NO: 1886471
aagcaaacugcuugauagu

SEQ ID NO: 2412229 - RNA, 19 nt, Artificial Sequence
  Description of Artificial Sequence: Synthetic oligonucleotide
  Antisense strand to SEQ ID NO: 2412228
acuaucaagcaguuugcuu

SEQ ID NO: 2412230 - RNA, 19 nt, Artificial Sequence
  Description of Artificial Sequence: Synthetic oligonucleotide
  Sense strand starting at position 1025 of SEQ ID NO: 1886471
cugcuugauaguggcagaa

SEQ ID NO: 2412231 - RNA, 19 nt, Artificial Sequence
  Description of Artificial Sequence: Synthetic oligonucleotide
  Antisense strand to SEQ ID NO: 2412230
uucugccacuaucaagcag

SEQ ID NO: 2412232 - RNA, 19 nt, Artificial Sequence
  Description of Artificial Sequence: Synthetic oligonucleotide
  Sense strand starting at position 1139 of SEQ ID NO: 1886471
cccucuucugaauguguua

SEQ ID NO: 2412233 - RNA, 19 nt, Artificial Sequence
  Description of Artificial Sequence: Synthetic oligonucleotide
  Antisense strand to SEQ ID NO: 2412232
uaacacauucagaagaggg

SEQ ID NO: 2412234 - RNA, 19 nt, Artificial Sequence
  Description of Artificial Sequence: Synthetic oligonucleotide
  Sense strand starting at position 1146 of SEQ ID NO: 1886471
cugaauguguuacccagua

SEQ ID NO: 2412235 - RNA, 19 nt, Artificial Sequence
  Description of Artificial Sequence: Synthetic oligonucleotide
  Antisense strand to SEQ ID NO: 2412234
uacuggguaacacauucag

SEQ ID NO: 2412236 - RNA, 19 nt, Artificial Sequence
  Description of Artificial Sequence: Synthetic oligonucleotide
  Sense strand starting at position 1151 of SEQ ID NO: 1886471
uguguuacccaguacucca

SEQ ID NO: 2412237 - RNA, 19 nt, Artificial Sequence
  Description of Artificial Sequence: Synthetic oligonucleotide
  Antisense strand to SEQ ID NO: 2412236
uggaguacuggguaacaca

SEQ ID NO: 2412238 - RNA, 19 nt, Artificial Sequence
  Description of Artificial Sequence: Synthetic oligonucleotide
  Sense strand starting at position 1154 of SEQ ID NO: 1886471
guuacccaguacuccaaua

SEQ ID NO: 2412239 - RNA, 19 nt, Artificial Sequence
  Description of Artificial Sequence: Synthetic oligonucleotide
  Antisense strand to SEQ ID NO: 2412238
uauuggaguacuggguaac

SEQ ID NO: 2412240 - RNA, 19 nt, Artificial Sequence
  Description of Artificial Sequence: Synthetic oligonucleotide
  Sense strand starting at position 1438 of SEQ ID NO: 1886471
uggucaacaugagcuaaau

SEQ ID NO: 2412241 - RNA, 19 nt, Artificial Sequence
  Description of Artificial Sequence: Synthetic oligonucleotide
  Antisense strand to SEQ ID NO: 2412240
auuuagcucauguugacca

SEQ ID NO: 2412242 - RNA, 19 nt, Artificial Sequence
  Description of Artificial Sequence: Synthetic oligonucleotide
  Sense strand starting at position 1448 of SEQ ID NO: 1886471
gagcuaaauuacgucucaa

SEQ ID NO: 2412243 - RNA, 19 nt, Artificial Sequence
  Description of Artificial Sequence: Synthetic oligonucleotide
  Antisense strand to SEQ ID NO: 2412242
uugagacguaauuuagcuc

SEQ ID NO: 2412244 - RNA, 19 nt, Artificial Sequence
  Description of Artificial Sequence: Synthetic oligonucleotide
  Sense strand starting at position 1792 of SEQ ID NO: 1886471
cucccaucgcacugagauu

SEQ ID NO: 2412245 - RNA, 19 nt, Artificial Sequence
  Description of Artificial Sequence: Synthetic oligonucleotide
  Antisense strand to SEQ ID NO: 2412244
aaucucagugcgaugggag

SEQ ID NO: 2412246 - RNA, 19 nt, Artificial Sequence
  Description of Artificial Sequence: Synthetic oligonucleotide
  Sense strand starting at position 1803 of SEQ ID NO: 1886471
cugagauugacacggcaau

SEQ ID NO: 2412247 - RNA, 19 nt, Artificial Sequence
  Description of Artificial Sequence: Synthetic oligonucleotide
  Antisense strand to SEQ ID NO: 2412246
auugccgugucaaucucag

SEQ ID NO: 2412248 - RNA, 19 nt, Artificial Sequence
  Description of Artificial Sequence: Synthetic oligonucleotide
  Sense strand starting at position 2262 of SEQ ID NO: 1886471
acgccucuggccuaugaga

SEQ ID NO: 2412249 - RNA, 19 nt, Artificial Sequence
  Description of Artificial Sequence: Synthetic oligonucleotide
  Antisense strand to SEQ ID NO: 2412248
ucucauaggccagaggcgu

SEQ ID NO: 2412250 - RNA, 19 nt, Artificial Sequence
  Description of Artificial Sequence: Synthetic oligonucleotide
  Sense strand starting at position 2264 of SEQ ID NO: 1886471
gccucuggccuaugagaac

SEQ ID NO: 2412251 - RNA, 19 nt, Artificial Sequence
  Description of Artificial Sequence: Synthetic oligonucleotide
  Antisense strand to SEQ ID NO: 2412250
guucucauaggccagaggc

SEQ ID NO: 2412252 - RNA, 19 nt, Artificial Sequence
  Description of Artificial Sequence: Synthetic oligonucleotide
  Sense strand starting at position 2437 of SEQ ID NO: 1886471
gccagauccuauguaaauu

SEQ ID NO: 2412253 - RNA, 19 nt, Artificial Sequence
  Description of Artificial Sequence: Synthetic oligonucleotide
  Antisense strand to SEQ ID NO: 2412252
aauuuacauaggaucuggc

SEQ ID NO: 2412254 - RNA, 19 nt, Artificial Sequence
  Description of Artificial Sequence: Synthetic oligonucleotide
  Sense strand starting at position 2460 of SEQ ID NO: 1886471
uggauaaucucagcaagag

SEQ ID NO: 2412255 - RNA, 19 nt, Artificial Sequence
  Description of Artificial Sequence: Synthetic oligonucleotide
  Antisense strand to SEQ ID NO: 2412254
cucuugcugagauuaucca

SEQ ID NO: 2412256 - RNA, 19 nt, Artificial Sequence
  Description of Artificial Sequence: Synthetic oligonucleotide
  Sense strand starting at position 2525 of SEQ ID NO: 1886471
ucccauuucuaugacaugu

SEQ ID NO: 2412257 - RNA, 19 nt, Artificial Sequence
  Description of Artificial Sequence: Synthetic oligonucleotide
  Antisense strand to SEQ ID NO: 2412256
acaugucauagaaauggga

SEQ ID NO: 2412258 - RNA, 19 nt, Artificial Sequence
  Description of Artificial Sequence: Synthetic oligonucleotide
  Sense strand starting at position 2527 of SEQ ID NO: 1886471
ccauuucuaugacauguca

SEQ ID NO: 2412259 - RNA, 19 nt, Artificial Sequence
  Description of Artificial Sequence: Synthetic oligonucleotide
  Antisense strand to SEQ ID NO: 2412258
ugacaugucauagaaaugg

SEQ ID NO: 2412260 - RNA, 19 nt, Artificial Sequence
  Description of Artificial Sequence: Synthetic oligonucleotide
  Sense strand starting at position 2536 of SEQ ID NO: 1886471
ugacaugucacagguaaga

SEQ ID NO: 2412261 - RNA, 19 nt, Artificial Sequence
  Description of Artificial Sequence: Synthetic oligonucleotide
  Antisense strand to SEQ ID NO: 2412260
ucuuaccugugacauguca

SEQ ID NO: 2412262 - RNA, 19 nt, Artificial Sequence
  Description of Artificial Sequence: Synthetic oligonucleotide
  Sense strand starting at position 2995 of SEQ ID NO: 1886471
aucauaucuugaucauagu

SEQ ID NO: 2412263 - RNA, 19 nt, Artificial Sequence
  Description of Artificial Sequence: Synthetic oligonucleotide
  Antisense strand to SEQ ID NO: 2412262
acuaugaucaagauaugau

SEQ ID NO: 2412264 - RNA, 19 nt, Artificial Sequence
  Description of Artificial Sequence: Synthetic oligonucleotide
  Sense strand starting at position 3028 of SEQ ID NO: 1886471
uaugcauuugcguguagga

SEQ ID NO: 2412265 - RNA, 19 nt, Artificial Sequence
  Description of Artificial Sequence: Synthetic oligonucleotide
  Antisense strand to SEQ ID NO: 2412264
uccuacacgcaaaugcaua

SEQ ID NO: 2412266 - RNA, 19 nt, Artificial Sequence
  Description of Artificial Sequence: Synthetic oligonucleotide
  Sense strand starting at position 3030 of SEQ ID NO: 1886471
ugcauuugcguguaggaaa

SEQ ID NO: 2412267 - RNA, 19 nt, Artificial Sequence
  Description of Artificial Sequence: Synthetic oligonucleotide
  Antisense strand to SEQ ID NO: 2412266
uuuccuacacgcaaaugca

SEQ ID NO: 2412268 - RNA, 19 nt, Artificial Sequence
  Description of Artificial Sequence: Synthetic oligonucleotide
  Sense strand starting at position 3066 of SEQ ID NO: 1886471
cagaaagugugacuucuac

SEQ ID NO: 2412269 - RNA, 19 nt, Artificial Sequence
  Description of Artificial Sequence: Synthetic oligonucleotide
  Antisense strand to SEQ ID NO: 2412268
guagaagucacacuuucug

SEQ ID NO: 2412270 - RNA, 19 nt, Artificial Sequence
  Description of Artificial Sequence: Synthetic oligonucleotide
  Sense strand starting at position 3664 of SEQ ID NO: 1886471
uggagugacggacauguuu

SEQ ID NO: 2412271 - RNA, 19 nt, Artificial Sequence
  Description of Artificial Sequence: Synthetic oligonucleotide
  Antisense strand to SEQ ID NO: 2412270
aaacauguccgucacucca

SEQ ID NO: 2412272 - RNA, 19 nt, Artificial Sequence
  Description of Artificial Sequence: Synthetic oligonucleotide
  Sense strand starting at position 3688 of SEQ ID NO: 1886471
ccagguaggcuguguaaca

SEQ ID NO: 2412273 - RNA, 19 nt, Artificial Sequence
  Description of Artificial Sequence: Synthetic oligonucleotide
  Antisense strand to SEQ ID NO: 2412272
uguuacacagccuaccugg

SEQ ID NO: 2412274 - RNA, 19 nt, Artificial Sequence
  Description of Artificial Sequence: Synthetic oligonucleotide
  Sense strand starting at position 3702 of SEQ ID NO: 1886471
uaacacugugaauguauga

SEQ ID NO: 2412275 - RNA, 19 nt, Artificial Sequence
  Description of Artificial Sequence: Synthetic oligonucleotide
  Antisense strand to SEQ ID NO: 2412274
ucauacauucacaguguua

SEQ ID NO: 2412276 - RNA, 19 nt, Artificial Sequence
  Description of Artificial Sequence: Synthetic oligonucleotide
  Sense strand starting at position 3718 of SEQ ID NO: 1886471
ugaagugccauugaauugu

SEQ ID NO: 2412277 - RNA, 19 nt, Artificial Sequence
  Description of Artificial Sequence: Synthetic oligonucleotide
  Antisense strand to SEQ ID NO: 2412276
acaauucaauggcacuuca

SEQ ID NO: 2412278 - RNA, 19 nt, Artificial Sequence
  Description of Artificial Sequence: Synthetic oligonucleotide
  Sense strand starting at position 3766 of SEQ ID NO: 1886471
acuccugccuuucugugaa

SEQ ID NO: 2412279 - RNA, 19 nt, Artificial Sequence
  Description of Artificial Sequence: Synthetic oligonucleotide
  Antisense strand to SEQ ID NO: 2412278
uucacagaaaggcaggagu

SEQ ID NO: 2412280 - RNA, 19 nt, Artificial Sequence
  Description of Artificial Sequence: Synthetic oligonucleotide
  Sense strand starting at position 3768 of SEQ ID NO: 1886471
uccugccuuucugugaaga

SEQ ID NO: 2412281 - RNA, 19 nt, Artificial Sequence
  Description of Artificial Sequence: Synthetic oligonucleotide
  Antisense strand to SEQ ID NO: 2412280
ucuucacagaaaggcagga

SEQ ID NO: 2412282 - RNA, 19 nt, Artificial Sequence
  Description of Artificial Sequence: Synthetic oligonucleotide
  Sense strand starting at position 3769 of SEQ ID NO: 1886471
ccugccuuucugugaagag

SEQ ID NO: 2412283 - RNA, 19 nt, Artificial Sequence
  Description of Artificial Sequence: Synthetic oligonucleotide
  Antisense strand to SEQ ID NO: 2412282
cucuucacagaaaggcagg

SEQ ID NO: 2412284 - RNA, 19 nt, Artificial Sequence
  Description of Artificial Sequence: Synthetic oligonucleotide
  Sense strand starting at position 3896 of SEQ ID NO: 1886471
guaaaucgaucucugguca

SEQ ID NO: 2412285 - RNA, 19 nt, Artificial Sequence
  Description of Artificial Sequence: Synthetic oligonucleotide
  Antisense strand to SEQ ID NO: 2412284
ugaccagagaucgauuuac

SEQ ID NO: 2412286 - RNA, 19 nt, Artificial Sequence
  Description of Artificial Sequence: Synthetic oligonucleotide
  Sense strand starting at position 228 of SEQ ID NO: 1886472
ucuggugcacuuuaaauga

SEQ ID NO: 2412287 - RNA, 19 nt, Artificial Sequence
  Description of Artificial Sequence: Synthetic oligonucleotide
  Antisense strand to SEQ ID NO: 2412286
ucauuuaaagugcaccaga

SEQ ID NO: 2412288 - RNA, 19 nt, Artificial Sequence
  Description of Artificial Sequence: Synthetic oligonucleotide
  Sense strand starting at position 268 of SEQ ID NO: 1886472
ucaggcuccugauuuguca

SEQ ID NO: 2412289 - RNA, 19 nt, Artificial Sequence
  Description of Artificial Sequence: Synthetic oligonucleotide
  Antisense strand to SEQ ID NO: 2412288
ugacaaaucaggagccuga

SEQ ID NO: 2412290 - RNA, 19 nt, Artificial Sequence
  Description of Artificial Sequence: Synthetic oligonucleotide
  Sense strand starting at position 407 of SEQ ID NO: 1886472
uccaguugucaacauucca

SEQ ID NO: 2412291 - RNA, 19 nt, Artificial Sequence
  Description of Artificial Sequence: Synthetic oligonucleotide
  Antisense strand to SEQ ID NO: 2412290
uggaauguugacaacugga

SEQ ID NO: 2412292 - RNA, 19 nt, Artificial Sequence
  Description of Artificial Sequence: Synthetic oligonucleotide
  Sense strand starting at position 446 of SEQ ID NO: 1886472
cuuguacuagcaggaagaa

SEQ ID NO: 2412293 - RNA, 19 nt, Artificial Sequence
  Description of Artificial Sequence: Synthetic oligonucleotide
  Antisense strand to SEQ ID NO: 2412292
uucuuccugcuaguacaag

SEQ ID NO: 2412294 - RNA, 19 nt, Artificial Sequence
  Description of Artificial Sequence: Synthetic oligonucleotide
  Sense strand starting at position 491 of SEQ ID NO: 1886472
ugcaaaucuagaugcgaga

SEQ ID NO: 2412295 - RNA, 19 nt, Artificial Sequence
  Description of Artificial Sequence: Synthetic oligonucleotide
  Antisense strand to SEQ ID NO: 2412294
ucucgcaucuagauuugca

SEQ ID NO: 2412296 - RNA, 19 nt, Artificial Sequence
  Description of Artificial Sequence: Synthetic oligonucleotide
  Sense strand starting at position 507 of SEQ ID NO: 1886472
agaugcuaugggugaguga

SEQ ID NO: 2412297 - RNA, 19 nt, Artificial Sequence
  Description of Artificial Sequence: Synthetic oligonucleotide
  Antisense strand to SEQ ID NO: 2412296
ucacucacccauagcaucu

SEQ ID NO: 2412298 - RNA, 19 nt, Artificial Sequence
  Description of Artificial Sequence: Synthetic oligonucleotide
  Sense strand starting at position 508 of SEQ ID NO: 1886472
gaugcuaugggugagugaa

SEQ ID NO: 2412299 - RNA, 19 nt, Artificial Sequence
  Description of Artificial Sequence: Synthetic oligonucleotide
  Antisense strand to SEQ ID NO: 2412298
uucacucacccauagcauc

SEQ ID NO: 2412300 - RNA, 19 nt, Artificial Sequence
  Description of Artificial Sequence: Synthetic oligonucleotide
  Sense strand starting at position 521 of SEQ ID NO: 1886472
agugaaggugcacaaauua

SEQ ID NO: 2412301 - RNA, 19 nt, Artificial Sequence
  Description of Artificial Sequence: Synthetic oligonucleotide
  Antisense strand to SEQ ID NO: 2412300
uaauuugugcaccuucacu

SEQ ID NO: 2412302 - RNA, 19 nt, Artificial Sequence
  Description of Artificial Sequence: Synthetic oligonucleotide
  Sense strand starting at position 573 of SEQ ID NO: 1886472
agauaauaugcuuaucguu

SEQ ID NO: 2412303 - RNA, 19 nt, Artificial Sequence
  Description of Artificial Sequence: Synthetic oligonucleotide
  Antisense strand to SEQ ID NO: 2412302
aacgauaagcauauuaucu

SEQ ID NO: 2412304 - RNA, 19 nt, Artificial Sequence
  Description of Artificial Sequence: Synthetic oligonucleotide
  Sense strand starting at position 580 of SEQ ID NO: 1886472
augcuuaucguuuagagaa

SEQ ID NO: 2412305 - RNA, 19 nt, Artificial Sequence
  Description of Artificial Sequence: Synthetic oligonucleotide
  Antisense strand to SEQ ID NO: 2412304
uucucuaaacgauaagcau

SEQ ID NO: 2412306 - RNA, 19 nt, Artificial Sequence
  Description of Artificial Sequence: Synthetic oligonucleotide
  Sense strand starting at position 615 of SEQ ID NO: 1886472
cguugacuuacaugacaug

SEQ ID NO: 2412307 - RNA, 19 nt, Artificial Sequence
  Description of Artificial Sequence: Synthetic oligonucleotide
  Antisense strand to SEQ ID NO: 2412306
caugucauguaagucaacg

SEQ ID NO: 2412308 - RNA, 19 nt, Artificial Sequence
  Description of Artificial Sequence: Synthetic oligonucleotide
  Sense strand starting at position 681 of SEQ ID NO: 1886472
gugagagguacuuggaaga

SEQ ID NO: 2412309 - RNA, 19 nt, Artificial Sequence
  Description of Artificial Sequence: Synthetic oligonucleotide
  Antisense strand to SEQ ID NO: 2412308
ucuuccaaguaccucucac

SEQ ID NO: 2412310 - RNA, 19 nt, Artificial Sequence
  Description of Artificial Sequence: Synthetic oligonucleotide
  Sense strand starting at position 761 of SEQ ID NO: 1886472
aacagaaaguguguagcau

SEQ ID NO: 2412311 - RNA, 19 nt, Artificial Sequence
  Description of Artificial Sequence: Synthetic oligonucleotide
  Antisense strand to SEQ ID NO: 2412310
augcuacacacuuucuguu

SEQ ID NO: 2412312 - RNA, 19 nt, Artificial Sequence
  Description of Artificial Sequence: Synthetic oligonucleotide
  Sense strand starting at position 762 of SEQ ID NO: 1886472
acagaaaguguguagcauu

SEQ ID NO: 2412313 - RNA, 19 nt, Artificial Sequence
  Description of Artificial Sequence: Synthetic oligonucleotide
  Antisense strand to SEQ ID NO: 2412312
aaugcuacacacuuucugu

SEQ ID NO: 2412314 - RNA, 19 nt, Artificial Sequence
  Description of Artificial Sequence: Synthetic oligonucleotide
  Sense strand starting at position 1124 of SEQ ID NO: 1886472
ugaugugugcuugauagac

SEQ ID NO: 2412315 - RNA, 19 nt, Artificial Sequence
  Description of Artificial Sequence: Synthetic oligonucleotide
  Antisense strand to SEQ ID NO: 2412314
gucuaucaagcacacauca

SEQ ID NO: 2412316 - RNA, 19 nt, Artificial Sequence
  Description of Artificial Sequence: Synthetic oligonucleotide
  Sense strand starting at position 1197 of SEQ ID NO: 1886472
gacagcuacguuuaucuga

SEQ ID NO: 2412317 - RNA, 19 nt, Artificial Sequence
  Description of Artificial Sequence: Synthetic oligonucleotide
  Antisense strand to SEQ ID NO: 2412316
ucagauaaacguagcuguc

SEQ ID NO: 2412318 - RNA, 19 nt, Artificial Sequence
  Description of Artificial Sequence: Synthetic oligonucleotide
  Sense strand starting at position 1266 of SEQ ID NO: 1886472
gggacauuggagugguauu

SEQ ID NO: 2412319 - RNA, 19 nt, Artificial Sequence
  Description of Artificial Sequence: Synthetic oligonucleotide
  Antisense strand to SEQ ID NO: 2412318
aauaccacuccaauguccc

SEQ ID NO: 2412320 - RNA, 19 nt, Artificial Sequence
  Description of Artificial Sequence: Synthetic oligonucleotide
  Sense strand starting at position 1345 of SEQ ID NO: 1886472
cccauagguccuugaaccu

SEQ ID NO: 2412321 - RNA, 19 nt, Artificial Sequence
  Description of Artificial Sequence: Synthetic oligonucleotide
  Antisense strand to SEQ ID NO: 2412320
agguucaaggaccuauggg

SEQ ID NO: 2412322 - RNA, 19 nt, Artificial Sequence
  Description of Artificial Sequence: Synthetic oligonucleotide
  Sense strand starting at position 1419 of SEQ ID NO: 1886472
gaucgagccguuucuaugu

SEQ ID NO: 2412323 - RNA, 19 nt, Artificial Sequence
  Description of Artificial Sequence: Synthetic oligonucleotide
  Antisense strand to SEQ ID NO: 2412322
acauagaaacggcucgauc

SEQ ID NO: 2412324 - RNA, 19 nt, Artificial Sequence
  Description of Artificial Sequence: Synthetic oligonucleotide
  Sense strand starting at position 1468 of SEQ ID NO: 1886472
ggaccugagccuggaucaa

SEQ ID NO: 2412325 - RNA, 19 nt, Artificial Sequence
  Description of Artificial Sequence: Synthetic oligonucleotide
  Antisense strand to SEQ ID NO: 2412324
uugauccaggcucaggucc

SEQ ID NO: 2412326 - RNA, 19 nt, Artificial Sequence
  Description of Artificial Sequence: Synthetic oligonucleotide
  Sense strand starting at position 1516 of SEQ ID NO: 1886472
ccagaugaugagugccuau

SEQ ID NO: 2412327 - RNA, 19 nt, Artificial Sequence
  Description of Artificial Sequence: Synthetic oligonucleotide
  Antisense strand to SEQ ID NO: 2412326
auaggcacucaucaucugg

SEQ ID NO: 2412328 - RNA, 19 nt, Artificial Sequence
  Description of Artificial Sequence: Synthetic oligonucleotide
  Sense strand starting at position 1756 of SEQ ID NO: 1886472
uguuguggucaagaucaga

SEQ ID NO: 2412329 - RNA, 19 nt, Artificial Sequence
  Description of Artificial Sequence: Synthetic oligonucleotide
  Antisense strand to SEQ ID NO: 2412328
ucugaucuugaccacaaca

SEQ ID NO: 2412330 - RNA, 19 nt, Artificial Sequence
  Description of Artificial Sequence: Synthetic oligonucleotide
  Sense strand starting at position 2253 of SEQ ID NO: 1886472
auacgagcucuuggagaug

SEQ ID NO: 2412331 - RNA, 19 nt, Artificial Sequence
  Description of Artificial Sequence: Synthetic oligonucleotide
  Antisense strand to SEQ ID NO: 2412330
caucuccaagagcucguau

SEQ ID NO: 2412332 - RNA, 19 nt, Artificial Sequence
  Description of Artificial Sequence: Synthetic oligonucleotide
  Sense strand starting at position 2966 of SEQ ID NO: 1886472
ccagaaucuuuagcacaug

SEQ ID NO: 2412333 - RNA, 19 nt, Artificial Sequence
  Description of Artificial Sequence: Synthetic oligonucleotide
  Antisense strand to SEQ ID NO: 2412332
caugugcuaaagauucugg

SEQ ID NO: 2412334 - RNA, 19 nt, Artificial Sequence
  Description of Artificial Sequence: Synthetic oligonucleotide
  Sense strand starting at position 3092 of SEQ ID NO: 1886472
uccugaggucuucacgagu

SEQ ID NO: 2412335 - RNA, 19 nt, Artificial Sequence
  Description of Artificial Sequence: Synthetic oligonucleotide
  Antisense strand to SEQ ID NO: 2412334
acucgugaagaccucagga

SEQ ID NO: 2412336 - RNA, 19 nt, Artificial Sequence
  Description of Artificial Sequence: Synthetic oligonucleotide
  Sense strand starting at position 3214 of SEQ ID NO: 1886472
cucuguguucuccaaucau

SEQ ID NO: 2412337 - RNA, 19 nt, Artificial Sequence
  Description of Artificial Sequence: Synthetic oligonucleotide
  Antisense strand to SEQ ID NO: 2412336
augauuggagaacacagag

SEQ ID NO: 2412338 - RNA, 19 nt, Artificial Sequence
  Description of Artificial Sequence: Synthetic oligonucleotide
  Sense strand starting at position 3255 of SEQ ID NO: 1886472
ggguguccuguacacagua

SEQ ID NO: 2412339 - RNA, 19 nt, Artificial Sequence
  Description of Artificial Sequence: Synthetic oligonucleotide
  Antisense strand to SEQ ID NO: 2412338
uacuguguacaggacaccc

SEQ ID NO: 2412340 - RNA, 19 nt, Artificial Sequence
  Description of Artificial Sequence: Synthetic oligonucleotide
  Sense strand starting at position 3267 of SEQ ID NO: 1886472
cacaguagcguccauugaa

SEQ ID NO: 2412341 - RNA, 19 nt, Artificial Sequence
  Description of Artificial Sequence: Synthetic oligonucleotide
  Antisense strand to SEQ ID NO: 2412340
uucaauggacgcuacugug

SEQ ID NO: 2412342 - RNA, 19 nt, Artificial Sequence
  Description of Artificial Sequence: Synthetic oligonucleotide
  Sense strand starting at position 3409 of SEQ ID NO: 1886472
guuguuucugaggacuaua

SEQ ID NO: 2412343 - RNA, 19 nt, Artificial Sequence
  Description of Artificial Sequence: Synthetic oligonucleotide
  Antisense strand to SEQ ID NO: 2412342
uauaguccucagaaacaac

SEQ ID NO: 2412344 - RNA, 19 nt, Artificial Sequence
  Description of Artificial Sequence: Synthetic oligonucleotide
  Sense strand starting at position 3489 of SEQ ID NO: 1886472
uaaugcugugaacgggaaa

SEQ ID NO: 2412345 - RNA, 19 nt, Artificial Sequence
  Description of Artificial Sequence: Synthetic oligonucleotide
  Antisense strand to SEQ ID NO: 2412344
uuucccguucacagcauua

SEQ ID NO: 2412346 - RNA, 19 nt, Artificial Sequence
  Description of Artificial Sequence: Synthetic oligonucleotide
  Sense strand starting at position 3511 of SEQ ID NO: 1886472
aagguuugcucuuugauuu

SEQ ID NO: 2412347 - RNA, 19 nt, Artificial Sequence
  Description of Artificial Sequence: Synthetic oligonucleotide
  Antisense strand to SEQ ID NO: 2412346
aaaucaaagagcaaaccuu

SEQ ID NO: 2412348 - RNA, 19 nt, Artificial Sequence
  Description of Artificial Sequence: Synthetic oligonucleotide
  Sense strand starting at position 3519 of SEQ ID NO: 1886472
cucuuugauuuguugcaga

SEQ ID NO: 2412349 - RNA, 19 nt, Artificial Sequence
  Description of Artificial Sequence: Synthetic oligonucleotide
  Antisense strand to SEQ ID NO: 2412348
ucugcaacaaaucaaagag

SEQ ID NO: 2412350 - RNA, 19 nt, Artificial Sequence
  Description of Artificial Sequence: Synthetic oligonucleotide
  Sense strand starting at position 3548 of SEQ ID NO: 1886472
gguagccauuuauauuuaa

SEQ ID NO: 2412351 - RNA, 19 nt, Artificial Sequence
  Description of Artificial Sequence: Synthetic oligonucleotide
  Antisense strand to SEQ ID NO: 2412350
uuaaauauaaauggcuacc

SEQ ID NO: 2412352 - RNA, 19 nt, Artificial Sequence
  Description of Artificial Sequence: Synthetic oligonucleotide
  Sense strand starting at position 3576 of SEQ ID NO: 1886472
agaugaugagagugucucu

SEQ ID NO: 2412353 - RNA, 19 nt, Artificial Sequence
  Description of Artificial Sequence: Synthetic oligonucleotide
  Antisense strand to SEQ ID NO: 2412352
agagacacucucaucaucu

SEQ ID NO: 2412354 - RNA, 19 nt, Artificial Sequence
  Description of Artificial Sequence: Synthetic oligonucleotide
  Sense strand starting at position 3643 of SEQ ID NO: 1886472
guaacacucuuaccuggua

SEQ ID NO: 2412355 - RNA, 19 nt, Artificial Sequence
  Description of Artificial Sequence: Synthetic oligonucleotide
  Antisense strand to SEQ ID NO: 2412354
uaccagguaagaguguuac

SEQ ID NO: 2412356 - RNA, 19 nt, Artificial Sequence
  Description of Artificial Sequence: Synthetic oligonucleotide
  Sense strand starting at position 3726 of SEQ ID NO: 1886472
ccaggaaaugguuggcaau

SEQ ID NO: 2412357 - RNA, 19 nt, Artificial Sequence
  Description of Artificial Sequence: Synthetic oligonucleotide
  Antisense strand to SEQ ID NO: 2412356
auugccaaccauuuccugg

SEQ ID NO: 2412358 - RNA, 19 nt, Artificial Sequence
  Description of Artificial Sequence: Synthetic oligonucleotide
  Sense strand starting at position 3727 of SEQ ID NO: 1886472
caggaaaugguuggcaauu

SEQ ID NO: 2412359 - RNA, 19 nt, Artificial Sequence
  Description of Artificial Sequence: Synthetic oligonucleotide
  Antisense strand to SEQ ID NO: 2412358
aauugccaaccauuuccug

SEQ ID NO: 2412360 - RNA, 19 nt, Artificial Sequence
  Description of Artificial Sequence: Synthetic oligonucleotide
  Sense strand starting at position 3821 of SEQ ID NO: 1886472
uguguaucucuggauuacu

SEQ ID NO: 2412361 - RNA, 19 nt, Artificial Sequence
  Description of Artificial Sequence: Synthetic oligonucleotide
  Antisense strand to SEQ ID NO: 2412360
aguaauccagagauacaca

SEQ ID NO: 2412362 - RNA, 19 nt, Artificial Sequence
  Description of Artificial Sequence: Synthetic oligonucleotide
  Sense strand starting at position 3951 of SEQ ID NO: 1886472
guuucugagagucauagag

SEQ ID NO: 2412363 - RNA, 19 nt, Artificial Sequence
  Description of Artificial Sequence: Synthetic oligonucleotide
  Antisense strand to SEQ ID NO: 2412362
cucuaugacucucagaaac

SEQ ID NO: 2412364 - RNA, 19 nt, Artificial Sequence
  Description of Artificial Sequence: Synthetic oligonucleotide
  Sense strand starting at position 3972 of SEQ ID NO: 1886472
ggaauccugaccugaugca

SEQ ID NO: 2412365 - RNA, 19 nt, Artificial Sequence
  Description of Artificial Sequence: Synthetic oligonucleotide
  Antisense strand to SEQ ID NO: 2412364
ugcaucaggucaggauucc

SEQ ID NO: 2412366 - RNA, 19 nt, Artificial Sequence
  Description of Artificial Sequence: Synthetic oligonucleotide
  Sense strand starting at position 104 of SEQ ID NO: 1886473
ugugaaaucacuugguaga

SEQ ID NO: 2412367 - RNA, 19 nt, Artificial Sequence
  Description of Artificial Sequence: Synthetic oligonucleotide
  Antisense strand to SEQ ID NO: 2412366
ucuaccaagugauuucaca

SEQ ID NO: 2412368 - RNA, 19 nt, Artificial Sequence
  Description of Artificial Sequence: Synthetic oligonucleotide
  Sense strand starting at position 105 of SEQ ID NO: 1886473
gugaaaucacuugguagaa

SEQ ID NO: 2412369 - RNA, 19 nt, Artificial Sequence
  Description of Artificial Sequence: Synthetic oligonucleotide
  Antisense strand to SEQ ID NO: 2412368
uucuaccaagugauuucac

SEQ ID NO: 2412370 - RNA, 19 nt, Artificial Sequence
  Description of Artificial Sequence: Synthetic oligonucleotide
  Sense strand starting at position 106 of SEQ ID NO: 1886473
ugaaaucacuugguagaac

SEQ ID NO: 2412371 - RNA, 19 nt, Artificial Sequence
  Description of Artificial Sequence: Synthetic oligonucleotide
  Antisense strand to SEQ ID NO: 2412370
guucuaccaagugauuuca

SEQ ID NO: 2412372 - RNA, 19 nt, Artificial Sequence
  Description of Artificial Sequence: Synthetic oligonucleotide
  Sense strand starting at position 191 of SEQ ID NO: 1886473
aagggucucuagguaaaga

SEQ ID NO: 2412373 - RNA, 19 nt, Artificial Sequence
  Description of Artificial Sequence: Synthetic oligonucleotide
  Antisense strand to SEQ ID NO: 2412372
ucuuuaccuagagacccuu

SEQ ID NO: 2412374 - RNA, 19 nt, Artificial Sequence
  Description of Artificial Sequence: Synthetic oligonucleotide
  Sense strand starting at position 211 of SEQ ID NO: 1886473
ucacuuugccaggaaaccu

SEQ ID NO: 2412375 - RNA, 19 nt, Artificial Sequence
  Description of Artificial Sequence: Synthetic oligonucleotide
  Antisense strand to SEQ ID NO: 2412374
agguuuccuggcaaaguga

SEQ ID NO: 2412376 - RNA, 19 nt, Artificial Sequence
  Description of Artificial Sequence: Synthetic oligonucleotide
  Sense strand starting at position 252 of SEQ ID NO: 1886473
uuuccagaugaaugguauu

SEQ ID NO: 2412377 - RNA, 19 nt, Artificial Sequence
  Description of Artificial Sequence: Synthetic oligonucleotide
  Antisense strand to SEQ ID NO: 2412376
aauaccauucaucuggaaa

SEQ ID NO: 2412378 - RNA, 19 nt, Artificial Sequence
  Description of Artificial Sequence: Synthetic oligonucleotide
  Sense strand starting at position 398 of SEQ ID NO: 1886473
gugguuaaucgagagaauc

SEQ ID NO: 2412379 - RNA, 19 nt, Artificial Sequence
  Description of Artificial Sequence: Synthetic oligonucleotide
  Antisense strand to SEQ ID NO: 2412378
gauucucucgauuaaccac

SEQ ID NO: 2412380 - RNA, 19 nt, Artificial Sequence
  Description of Artificial Sequence: Synthetic oligonucleotide
  Sense strand starting at position 469 of SEQ ID NO: 1886473
uguguaacugggcaaauua

SEQ ID NO: 2412381 - RNA, 19 nt, Artificial Sequence
  Description of Artificial Sequence: Synthetic oligonucleotide
  Antisense strand to SEQ ID NO: 2412380
uaauuugcccaguuacaca

SEQ ID NO: 2412382 - RNA, 19 nt, Artificial Sequence
  Description of Artificial Sequence: Synthetic oligonucleotide
  Sense strand starting at position 506 of SEQ ID NO: 1886473
ugguuuccuggcuaaagau

SEQ ID NO: 2412383 - RNA, 19 nt, Artificial Sequence
  Description of Artificial Sequence: Synthetic oligonucleotide
  Antisense strand to SEQ ID NO: 2412382
aucuuuagccaggaaacca

SEQ ID NO: 2412384 - RNA, 19 nt, Artificial Sequence
  Description of Artificial Sequence: Synthetic oligonucleotide
  Sense strand starting at position 529 of SEQ ID NO: 1886473
acuagagggucucuaauag

SEQ ID NO: 2412385 - RNA, 19 nt, Artificial Sequence
  Description of Artificial Sequence: Synthetic oligonucleotide
  Antisense strand to SEQ ID NO: 2412384
cuauuagagacccucuagu

SEQ ID NO: 2412386 - RNA, 19 nt, Artificial Sequence
  Description of Artificial Sequence: Synthetic oligonucleotide
  Sense strand starting at position 652 of SEQ ID NO: 1886473
cuuaaaucugaaugucaga

SEQ ID NO: 2412387 - RNA, 19 nt, Artificial Sequence
  Description of Artificial Sequence: Synthetic oligonucleotide
  Antisense strand to SEQ ID NO: 2412386
ucugacauucagauuuaag

SEQ ID NO: 2412388 - RNA, 19 nt, Artificial Sequence
  Description of Artificial Sequence: Synthetic oligonucleotide
  Sense strand starting at position 706 of SEQ ID NO: 1886473
acguaauaucugggacaua

SEQ ID NO: 2412389 - RNA, 19 nt, Artificial Sequence
  Description of Artificial Sequence: Synthetic oligonucleotide
  Antisense strand to SEQ ID NO: 2412388
uaugucccagauauuacgu

SEQ ID NO: 2412390 - RNA, 19 nt, Artificial Sequence
  Description of Artificial Sequence: Synthetic oligonucleotide
  Sense strand starting at position 769 of SEQ ID NO: 1886473
aaauguaacuggguauucu

SEQ ID NO: 2412391 - RNA, 19 nt, Artificial Sequence
  Description of Artificial Sequence: Synthetic oligonucleotide
  Antisense strand to SEQ ID NO: 2412390
agaauacccaguuacauuu

SEQ ID NO: 2412392 - RNA, 19 nt, Artificial Sequence
  Description of Artificial Sequence: Synthetic oligonucleotide
  Sense strand starting at position 911 of SEQ ID NO: 1886473
ccgguugcuagucugcaaa

SEQ ID NO: 2412393 - RNA, 19 nt, Artificial Sequence
  Description of Artificial Sequence: Synthetic oligonucleotide
  Antisense strand to SEQ ID NO: 2412392
uuugcagacuagcaaccgg

SEQ ID NO: 2412394 - RNA, 19 nt, Artificial Sequence
  Description of Artificial Sequence: Synthetic oligonucleotide
  Sense strand starting at position 1224 of SEQ ID NO: 1886473
aaucauccuuagguggaaa

SEQ ID NO: 2412395 - RNA, 19 nt, Artificial Sequence
  Description of Artificial Sequence: Synthetic oligonucleotide
  Antisense strand to SEQ ID NO: 2412394
uuuccaccuaaggaugauu

SEQ ID NO: 2412396 - RNA, 19 nt, Artificial Sequence
  Description of Artificial Sequence: Synthetic oligonucleotide
  Sense strand starting at position 1385 of SEQ ID NO: 1886473
gucaguguugcagucaguu

SEQ ID NO: 2412397 - RNA, 19 nt, Artificial Sequence
  Description of Artificial Sequence: Synthetic oligonucleotide
  Antisense strand to SEQ ID NO: 2412396
aacugacugcaacacugac

SEQ ID NO: 2412398 - RNA, 19 nt, Artificial Sequence
  Description of Artificial Sequence: Synthetic oligonucleotide
  Sense strand starting at position 1416 of SEQ ID NO: 1886473
gguaguuagaauugggaua

SEQ ID NO: 2412399 - RNA, 19 nt, Artificial Sequence
  Description of Artificial Sequence: Synthetic oligonucleotide
  Antisense strand to SEQ ID NO: 2412398
uaucccaauucuaacuacc

SEQ ID NO: 2412400 - RNA, 19 nt, Artificial Sequence
  Description of Artificial Sequence: Synthetic oligonucleotide
  Sense strand starting at position 1417 of SEQ ID NO: 1886473
guaguuagaauugggauac

SEQ ID NO: 2412401 - RNA, 19 nt, Artificial Sequence
  Description of Artificial Sequence: Synthetic oligonucleotide
  Antisense strand to SEQ ID NO: 2412400
guaucccaauucuaacuac

SEQ ID NO: 2412402 - RNA, 19 nt, Artificial Sequence
  Description of Artificial Sequence: Synthetic oligonucleotide
  Sense strand starting at position 1621 of SEQ ID NO: 1886473
aaguguguugauugcauuu

SEQ ID NO: 2412403 - RNA, 19 nt, Artificial Sequence
  Description of Artificial Sequence: Synthetic oligonucleotide
  Antisense strand to SEQ ID NO: 2412402
aaaugcaaucaacacacuu

SEQ ID NO: 2412404 - RNA, 19 nt, Artificial Sequence
  Description of Artificial Sequence: Synthetic oligonucleotide
  Sense strand starting at position 1678 of SEQ ID NO: 1886473
cuccacugauuccuggaau

SEQ ID NO: 2412405 - RNA, 19 nt, Artificial Sequence
  Description of Artificial Sequence: Synthetic oligonucleotide
  Antisense strand to SEQ ID NO: 2412404
auuccaggaaucaguggag

SEQ ID NO: 2412406 - RNA, 19 nt, Artificial Sequence
  Description of Artificial Sequence: Synthetic oligonucleotide
  Sense strand starting at position 1848 of SEQ ID NO: 1886473
guguaaagaggauaugguu

SEQ ID NO: 2412407 - RNA, 19 nt, Artificial Sequence
  Description of Artificial Sequence: Synthetic oligonucleotide
  Antisense strand to SEQ ID NO: 2412406
aaccauauccucuuuacac

SEQ ID NO: 2412408 - RNA, 19 nt, Artificial Sequence
  Description of Artificial Sequence: Synthetic oligonucleotide
  Sense strand starting at position 2307 of SEQ ID NO: 1886473
gugccauuccuggacugaa

SEQ ID NO: 2412409 - RNA, 19 nt, Artificial Sequence
  Description of Artificial Sequence: Synthetic oligonucleotide
  Antisense strand to SEQ ID NO: 2412408
uucaguccaggaauggcac

SEQ ID NO: 2412410 - RNA, 19 nt, Artificial Sequence
  Description of Artificial Sequence: Synthetic oligonucleotide
  Sense strand starting at position 2310 of SEQ ID NO: 1886473
ccauuccuggacugaaaca

SEQ ID NO: 2412411 - RNA, 19 nt, Artificial Sequence
  Description of Artificial Sequence: Synthetic oligonucleotide
  Antisense strand to SEQ ID NO: 2412410
uguuucaguccaggaaugg

SEQ ID NO: 2412412 - RNA, 19 nt, Artificial Sequence
  Description of Artificial Sequence: Synthetic oligonucleotide
  Sense strand starting at position 2323 of SEQ ID NO: 1886473
gaaacaaauguuuguggaa

SEQ ID NO: 2412413 - RNA, 19 nt, Artificial Sequence
  Description of Artificial Sequence: Synthetic oligonucleotide
  Antisense strand to SEQ ID NO: 2412412
uuccacaaacauuuguuuc

SEQ ID NO: 2412414 - RNA, 19 nt, Artificial Sequence
  Description of Artificial Sequence: Synthetic oligonucleotide
  Sense strand starting at position 2335 of SEQ ID NO: 1886473
uguggaauuaaguagugau

SEQ ID NO: 2412415 - RNA, 19 nt, Artificial Sequence
  Description of Artificial Sequence: Synthetic oligonucleotide
  Antisense strand to SEQ ID NO: 2412414
aucacuacuuaauuccaca

SEQ ID NO: 2412416 - RNA, 19 nt, Artificial Sequence
  Description of Artificial Sequence: Synthetic oligonucleotide
  Sense strand starting at position 2345 of SEQ ID NO: 1886473
aguagugauuuccuuuagu

SEQ ID NO: 2412417 - RNA, 19 nt, Artificial Sequence
  Description of Artificial Sequence: Synthetic oligonucleotide
  Antisense strand to SEQ ID NO: 2412416
acuaaaggaaaucacuacu

SEQ ID NO: 2412418 - RNA, 19 nt, Artificial Sequence
  Description of Artificial Sequence: Synthetic oligonucleotide
  Sense strand starting at position 2498 of SEQ ID NO: 1886473
cuagcaaaggucugcauuu

SEQ ID NO: 2412419 - RNA, 19 nt, Artificial Sequence
  Description of Artificial Sequence: Synthetic oligonucleotide
  Antisense strand to SEQ ID NO: 2412418
aaaugcagaccuuugcuag

SEQ ID NO: 2412420 - RNA, 19 nt, Artificial Sequence
  Description of Artificial Sequence: Synthetic oligonucleotide
  Sense strand starting at position 2580 of SEQ ID NO: 1886473
ugcugagaaauguaaguaa

SEQ ID NO: 2412421 - RNA, 19 nt, Artificial Sequence
  Description of Artificial Sequence: Synthetic oligonucleotide
  Antisense strand to SEQ ID NO: 2412420
uuacuuacauuucucagca

SEQ ID NO: 2412422 - RNA, 19 nt, Artificial Sequence
  Description of Artificial Sequence: Synthetic oligonucleotide
  Sense strand starting at position 2754 of SEQ ID NO: 1886473
augugauugcuggaaacac

SEQ ID NO: 2412423 - RNA, 19 nt, Artificial Sequence
  Description of Artificial Sequence: Synthetic oligonucleotide
  Antisense strand to SEQ ID NO: 2412422
guguuuccagcaaucacau

SEQ ID NO: 2412424 - RNA, 19 nt, Artificial Sequence
  Description of Artificial Sequence: Synthetic oligonucleotide
  Sense strand starting at position 2872 of SEQ ID NO: 1886473
guuaaacaacaauggguua

SEQ ID NO: 2412425 - RNA, 19 nt, Artificial Sequence
  Description of Artificial Sequence: Synthetic oligonucleotide
  Antisense strand to SEQ ID NO: 2412424
uaacccauuguuguuuaac

SEQ ID NO: 2412426 - RNA, 19 nt, Artificial Sequence
  Description of Artificial Sequence: Synthetic oligonucleotide
  Sense strand starting at position 3014 of SEQ ID NO: 1886473
gagcaucuccgacaagaug

SEQ ID NO: 2412427 - RNA, 19 nt, Artificial Sequence
  Description of Artificial Sequence: Synthetic oligonucleotide
  Antisense strand to SEQ ID NO: 2412426
caucuugucggagaugcuc

SEQ ID NO: 2412428 - RNA, 19 nt, Artificial Sequence
  Description of Artificial Sequence: Synthetic oligonucleotide
  Sense strand starting at position 3200 of SEQ ID NO: 1886473
uuagucacugcagaauuga

SEQ ID NO: 2412429 - RNA, 19 nt, Artificial Sequence
  Description of Artificial Sequence: Synthetic oligonucleotide
  Antisense strand to SEQ ID NO: 2412428
ucaauucugcagugacuaa

SEQ ID NO: 2412430 - RNA, 19 nt, Artificial Sequence
  Description of Artificial Sequence: Synthetic oligonucleotide
  Sense strand starting at position 3222 of SEQ ID NO: 1886473
acaacugauugauuaagca

SEQ ID NO: 2412431 - RNA, 19 nt, Artificial Sequence
  Description of Artificial Sequence: Synthetic oligonucleotide
  Antisense strand to SEQ ID NO: 2412430
ugcuuaaucaaucaguugu

SEQ ID NO: 2412432 - RNA, 19 nt, Artificial Sequence
  Description of Artificial Sequence: Synthetic oligonucleotide
  Sense strand starting at position 3230 of SEQ ID NO: 1886473
uugauuaagcagggaugga

SEQ ID NO: 2412433 - RNA, 19 nt, Artificial Sequence
  Description of Artificial Sequence: Synthetic oligonucleotide
  Antisense strand to SEQ ID NO: 2412432
uccaucccugcuuaaucaa

SEQ ID NO: 2412434 - RNA, 19 nt, Artificial Sequence
  Description of Artificial Sequence: Synthetic oligonucleotide
  Sense strand starting at position 3308 of SEQ ID NO: 1886473
agcauuucuugcucagauu

SEQ ID NO: 2412435 - RNA, 19 nt, Artificial Sequence
  Description of Artificial Sequence: Synthetic oligonucleotide
  Antisense strand to SEQ ID NO: 2412434
aaucugagcaagaaaugcu

SEQ ID NO: 2412436 - RNA, 19 nt, Artificial Sequence
  Description of Artificial Sequence: Synthetic oligonucleotide
  Sense strand starting at position 3321 of SEQ ID NO: 1886473
cagauugaacugugaguca

SEQ ID NO: 2412437 - RNA, 19 nt, Artificial Sequence
  Description of Artificial Sequence: Synthetic oligonucleotide
  Antisense strand to SEQ ID NO: 2412436
ugacucacaguucaaucug

SEQ ID NO: 2412438 - RNA, 19 nt, Artificial Sequence
  Description of Artificial Sequence: Synthetic oligonucleotide
  Sense strand starting at position 3342 of SEQ ID NO: 1886473
gcccuaaagagugaguaca

SEQ ID NO: 2412439 - RNA, 19 nt, Artificial Sequence
  Description of Artificial Sequence: Synthetic oligonucleotide
  Antisense strand to SEQ ID NO: 2412438
uguacucacucuuuagggc

SEQ ID NO: 2412440 - RNA, 19 nt, Artificial Sequence
  Description of Artificial Sequence: Synthetic oligonucleotide
  Sense strand starting at position 3572 of SEQ ID NO: 1886473
cuauguuacugcuuuauuu

SEQ ID NO: 2412441 - RNA, 19 nt, Artificial Sequence
  Description of Artificial Sequence: Synthetic oligonucleotide
  Antisense strand to SEQ ID NO: 2412440
aaauaaagcaguaacauag

SEQ ID NO: 2412442 - RNA, 19 nt, Artificial Sequence
  Description of Artificial Sequence: Synthetic oligonucleotide
  Sense strand starting at position 3894 of SEQ ID NO: 1886473
aguuaacguagugaaauga

SEQ ID NO: 2412443 - RNA, 19 nt, Artificial Sequence
  Description of Artificial Sequence: Synthetic oligonucleotide
  Antisense strand to SEQ ID NO: 2412442
ucauuucacuacguuaacu

SEQ ID NO: 2412444 - RNA, 19 nt, Artificial Sequence
  Description of Artificial Sequence: Synthetic oligonucleotide
  Sense strand starting at position 3981 of SEQ ID NO: 1886473
cuguaauauccagaaguug

SEQ ID NO: 2412445 - RNA, 19 nt, Artificial Sequence
  Description of Artificial Sequence: Synthetic oligonucleotide
  Antisense strand to SEQ ID NO: 2412444
caacuucuggauauuacag

SEQ ID NO: 2412446 - RNA, 19 nt, Artificial Sequence
  Description of Artificial Sequence: Synthetic oligonucleotide
  Sense strand starting at position 1 of SEQ ID NO: 1886474
gaugcaauaccuugugaac

SEQ ID NO: 2412447 - RNA, 19 nt, Artificial Sequence
  Description of Artificial Sequence: Synthetic oligonucleotide
  Antisense strand to SEQ ID NO: 2412446
guucacaagguauugcauc

SEQ ID NO: 2412448 - RNA, 19 nt, Artificial Sequence
  Description of Artificial Sequence: Synthetic oligonucleotide
  Sense strand starting at position 94 of SEQ ID NO: 1886474
uggagauaggcacgaucau

SEQ ID NO: 2412449 - RNA, 19 nt, Artificial Sequence
  Description of Artificial Sequence: Synthetic oligonucleotide
  Antisense strand to SEQ ID NO: 2412448
augaucgugccuaucucca

SEQ ID NO: 2412450 - RNA, 19 nt, Artificial Sequence
  Description of Artificial Sequence: Synthetic oligonucleotide
  Sense strand starting at position 452 of SEQ ID NO: 1886474
acagccauucgguagaagu

SEQ ID NO: 2412451 - RNA, 19 nt, Artificial Sequence
  Description of Artificial Sequence: Synthetic oligonucleotide
  Antisense strand to SEQ ID NO: 2412450
acuucuaccgaauggcugu

SEQ ID NO: 2412452 - RNA, 19 nt, Artificial Sequence
  Description of Artificial Sequence: Synthetic oligonucleotide
  Sense strand starting at position 454 of SEQ ID NO: 1886474
agccauucgguagaaguua

SEQ ID NO: 2412453 - RNA, 19 nt, Artificial Sequence
  Description of Artificial Sequence: Synthetic oligonucleotide
  Antisense strand to SEQ ID NO: 2412452
uaacuucuaccgaauggcu

SEQ ID NO: 2412454 - RNA, 19 nt, Artificial Sequence
  Description of Artificial Sequence: Synthetic oligonucleotide
  Sense strand starting at position 476 of SEQ ID NO: 1886474
cacuguuucgcugcuuauu

SEQ ID NO: 2412455 - RNA, 19 nt, Artificial Sequence
  Description of Artificial Sequence: Synthetic oligonucleotide
  Antisense strand to SEQ ID NO: 2412454
aauaagcagcgaaacagug

SEQ ID NO: 2412456 - RNA, 19 nt, Artificial Sequence
  Description of Artificial Sequence: Synthetic oligonucleotide
  Sense strand starting at position 484 of SEQ ID NO: 1886474
cgcugcuuauuucuacuua

SEQ ID NO: 2412457 - RNA, 19 nt, Artificial Sequence
  Description of Artificial Sequence: Synthetic oligonucleotide
  Antisense strand to SEQ ID NO: 2412456
uaaguagaaauaagcagcg

SEQ ID NO: 2412458 - RNA, 19 nt, Artificial Sequence
  Description of Artificial Sequence: Synthetic oligonucleotide
  Sense strand starting at position 713 of SEQ ID NO: 1886474
agaucagucugagcaacaa

SEQ ID NO: 2412459 - RNA, 19 nt, Artificial Sequence
  Description of Artificial Sequence: Synthetic oligonucleotide
  Antisense strand to SEQ ID NO: 2412458
uuguugcucagacugaucu

SEQ ID NO: 2412460 - RNA, 19 nt, Artificial Sequence
  Description of Artificial Sequence: Synthetic oligonucleotide
  Sense strand starting at position 876 of SEQ ID NO: 1886474
aucucuguucuagaggcua

SEQ ID NO: 2412461 - RNA, 19 nt, Artificial Sequence
  Description of Artificial Sequence: Synthetic oligonucleotide
  Antisense strand to SEQ ID NO: 2412460
uagccucuagaacagagau

SEQ ID NO: 2412462 - RNA, 19 nt, Artificial Sequence
  Description of Artificial Sequence: Synthetic oligonucleotide
  Sense strand starting at position 884 of SEQ ID NO: 1886474
ucuagaggcuaagcauaua

SEQ ID NO: 2412463 - RNA, 19 nt, Artificial Sequence
  Description of Artificial Sequence: Synthetic oligonucleotide
  Antisense strand to SEQ ID NO: 2412462
uauaugcuuagccucuaga

SEQ ID NO: 2412464 - RNA, 19 nt, Artificial Sequence
  Description of Artificial Sequence: Synthetic oligonucleotide
  Sense strand starting at position 1122 of SEQ ID NO: 1886474
ugggaucaauccucaguuu

SEQ ID NO: 2412465 - RNA, 19 nt, Artificial Sequence
  Description of Artificial Sequence: Synthetic oligonucleotide
  Antisense strand to SEQ ID NO: 2412464
aaacugaggauugauccca

SEQ ID NO: 2412466 - RNA, 19 nt, Artificial Sequence
  Description of Artificial Sequence: Synthetic oligonucleotide
  Sense strand starting at position 1312 of SEQ ID NO: 1886474
gcugcuuuccacgucauga

SEQ ID NO: 2412467 - RNA, 19 nt, Artificial Sequence
  Description of Artificial Sequence: Synthetic oligonucleotide
  Antisense strand to SEQ ID NO: 2412466
ucaugacguggaaagcagc

SEQ ID NO: 2412468 - RNA, 19 nt, Artificial Sequence
  Description of Artificial Sequence: Synthetic oligonucleotide
  Sense strand starting at position 1470 of SEQ ID NO: 1886474
cucauaguauuagugauga

SEQ ID NO: 2412469 - RNA, 19 nt, Artificial Sequence
  Description of Artificial Sequence: Synthetic oligonucleotide
  Antisense strand to SEQ ID NO: 2412468
ucaucacuaauacuaugag

SEQ ID NO: 2412470 - RNA, 19 nt, Artificial Sequence
  Description of Artificial Sequence: Synthetic oligonucleotide
  Sense strand starting at position 1480 of SEQ ID NO: 1886474
uagugaugaagacgaggau

SEQ ID NO: 2412471 - RNA, 19 nt, Artificial Sequence
  Description of Artificial Sequence: Synthetic oligonucleotide
  Antisense strand to SEQ ID NO: 2412470
auccucgucuucaucacua

SEQ ID NO: 2412472 - RNA, 19 nt, Artificial Sequence
  Description of Artificial Sequence: Synthetic oligonucleotide
  Sense strand starting at position 1765 of SEQ ID NO: 1886474
cuggaaaugacguguuuaa

SEQ ID NO: 2412473 - RNA, 19 nt, Artificial Sequence
  Description of Artificial Sequence: Synthetic oligonucleotide
  Antisense strand to SEQ ID NO: 2412472
uuaaacacgucauuuccag

SEQ ID NO: 2412474 - RNA, 19 nt, Artificial Sequence
  Description of Artificial Sequence: Synthetic oligonucleotide
  Sense strand starting at position 1985 of SEQ ID NO: 1886474
aaacgucucccagagugaa

SEQ ID NO: 2412475 - RNA, 19 nt, Artificial Sequence
  Description of Artificial Sequence: Synthetic oligonucleotide
  Antisense strand to SEQ ID NO: 2412474
uucacucugggagacguuu

SEQ ID NO: 2412476 - RNA, 19 nt, Artificial Sequence
  Description of Artificial Sequence: Synthetic oligonucleotide
  Sense strand starting at position 2047 of SEQ ID NO: 1886474
aggcgauaggcguugcuaa

SEQ ID NO: 2412477 - RNA, 19 nt, Artificial Sequence
  Description of Artificial Sequence: Synthetic oligonucleotide
  Antisense strand to SEQ ID NO: 2412476
uuagcaacgccuaucgccu

SEQ ID NO: 2412478 - RNA, 19 nt, Artificial Sequence
  Description of Artificial Sequence: Synthetic oligonucleotide
  Sense strand starting at position 2049 of SEQ ID NO: 1886474
gcgauaggcguugcuaaga

SEQ ID NO: 2412479 - RNA, 19 nt, Artificial Sequence
  Description of Artificial Sequence: Synthetic oligonucleotide
  Antisense strand to SEQ ID NO: 2412478
ucuuagcaacgccuaucgc

SEQ ID NO: 2412480 - RNA, 19 nt, Artificial Sequence
  Description of Artificial Sequence: Synthetic oligonucleotide
  Sense strand starting at position 2308 of SEQ ID NO: 1886474
cacguuauuucccuaaggu

SEQ ID NO: 2412481 - RNA, 19 nt, Artificial Sequence
  Description of Artificial Sequence: Synthetic oligonucleotide
  Antisense strand to SEQ ID NO: 2412480
accuuagggaaauaacgug

SEQ ID NO: 2412482 - RNA, 19 nt, Artificial Sequence
  Description of Artificial Sequence: Synthetic oligonucleotide
  Sense strand starting at position 2497 of SEQ ID NO: 1886474
uguagucuuuaaccauuga

SEQ ID NO: 2412483 - RNA, 19 nt, Artificial Sequence
  Description of Artificial Sequence: Synthetic oligonucleotide
  Antisense strand to SEQ ID NO: 2412482
ucaaugguuaaagacuaca

SEQ ID NO: 2412484 - RNA, 19 nt, Artificial Sequence
  Description of Artificial Sequence: Synthetic oligonucleotide
  Sense strand starting at position 2505 of SEQ ID NO: 1886474
uuaaccauugaaugcgauu

SEQ ID NO: 2412485 - RNA, 19 nt, Artificial Sequence
  Description of Artificial Sequence: Synthetic oligonucleotide
  Antisense strand to SEQ ID NO: 2412484
aaucgcauucaaugguuaa

SEQ ID NO: 2412486 - RNA, 19 nt, Artificial Sequence
  Description of Artificial Sequence: Synthetic oligonucleotide
  Sense strand starting at position 2581 of SEQ ID NO: 1886474
ccaguuaauggacgaagaa

SEQ ID NO: 2412487 - RNA, 19 nt, Artificial Sequence
  Description of Artificial Sequence: Synthetic oligonucleotide
  Antisense strand to SEQ ID NO: 2412486
uucuucguccauuaacugg

SEQ ID NO: 2412488 - RNA, 19 nt, Artificial Sequence
  Description of Artificial Sequence: Synthetic oligonucleotide
  Sense strand starting at position 2624 of SEQ ID NO: 1886474
ucucauagguucucagacu

SEQ ID NO: 2412489 - RNA, 19 nt, Artificial Sequence
  Description of Artificial Sequence: Synthetic oligonucleotide
  Antisense strand to SEQ ID NO: 2412488
agucugagaaccuaugaga

SEQ ID NO: 2412490 - RNA, 19 nt, Artificial Sequence
  Description of Artificial Sequence: Synthetic oligonucleotide
  Sense strand starting at position 2665 of SEQ ID NO: 1886474
ucugaaggcagguguuaaa

SEQ ID NO: 2412491 - RNA, 19 nt, Artificial Sequence
  Description of Artificial Sequence: Synthetic oligonucleotide
  Antisense strand to SEQ ID NO: 2412490
uuuaacaccugccuucaga

SEQ ID NO: 2412492 - RNA, 19 nt, Artificial Sequence
  Description of Artificial Sequence: Synthetic oligonucleotide
  Sense strand starting at position 2680 of SEQ ID NO: 1886474
uaaagaugagcaggugauu

SEQ ID NO: 2412493 - RNA, 19 nt, Artificial Sequence
  Description of Artificial Sequence: Synthetic oligonucleotide
  Antisense strand to SEQ ID NO: 2412492
aaucaccugcucaucuuua

SEQ ID NO: 2412494 - RNA, 19 nt, Artificial Sequence
  Description of Artificial Sequence: Synthetic oligonucleotide
  Sense strand starting at position 2737 of SEQ ID NO: 1886474
gagacuccuuucguuagga

SEQ ID NO: 2412495 - RNA, 19 nt, Artificial Sequence
  Description of Artificial Sequence: Synthetic oligonucleotide
  Antisense strand to SEQ ID NO: 2412494
uccuaacgaaaggagucuc

SEQ ID NO: 2412496 - RNA, 19 nt, Artificial Sequence
  Description of Artificial Sequence: Synthetic oligonucleotide
  Sense strand starting at position 2745 of SEQ ID NO: 1886474
uuucguuaggagcauuauu

SEQ ID NO: 2412497 - RNA, 19 nt, Artificial Sequence
  Description of Artificial Sequence: Synthetic oligonucleotide
  Antisense strand to SEQ ID NO: 2412496
aauaaugcuccuaacgaaa

SEQ ID NO: 2412498 - RNA, 19 nt, Artificial Sequence
  Description of Artificial Sequence: Synthetic oligonucleotide
  Sense strand starting at position 2814 of SEQ ID NO: 1886474
aguugugucucauuugaug

SEQ ID NO: 2412499 - RNA, 19 nt, Artificial Sequence
  Description of Artificial Sequence: Synthetic oligonucleotide
  Antisense strand to SEQ ID NO: 2412498
caucaaaugagacacaacu

SEQ ID NO: 2412500 - RNA, 19 nt, Artificial Sequence
  Description of Artificial Sequence: Synthetic oligonucleotide
  Sense strand starting at position 2901 of SEQ ID NO: 1886474
gcagauaacucuuuaaacg

SEQ ID NO: 2412501 - RNA, 19 nt, Artificial Sequence
  Description of Artificial Sequence: Synthetic oligonucleotide
  Antisense strand to SEQ ID NO: 2412500
cguuuaaagaguuaucugc

SEQ ID NO: 2412502 - RNA, 19 nt, Artificial Sequence
  Description of Artificial Sequence: Synthetic oligonucleotide
  Sense strand starting at position 3043 of SEQ ID NO: 1886474
agcuuagaucuauaugugu

SEQ ID NO: 2412503 - RNA, 19 nt, Artificial Sequence
  Description of Artificial Sequence: Synthetic oligonucleotide
  Antisense strand to SEQ ID NO: 2412502
acacauauagaucuaagcu

SEQ ID NO: 2412504 - RNA, 19 nt, Artificial Sequence
  Description of Artificial Sequence: Synthetic oligonucleotide
  Sense strand starting at position 3050 of SEQ ID NO: 1886474
aucuauauguguuugggau

SEQ ID NO: 2412505 - RNA, 19 nt, Artificial Sequence
  Description of Artificial Sequence: Synthetic oligonucleotide
  Antisense strand to SEQ ID NO: 2412504
aucccaaacacauauagau

SEQ ID NO: 2412506 - RNA, 19 nt, Artificial Sequence
  Description of Artificial Sequence: Synthetic oligonucleotide
  Sense strand starting at position 3051 of SEQ ID NO: 1886474
ucuauauguguuugggauc

SEQ ID NO: 2412507 - RNA, 19 nt, Artificial Sequence
  Description of Artificial Sequence: Synthetic oligonucleotide
  Antisense strand to SEQ ID NO: 2412506
gaucccaaacacauauaga

SEQ ID NO: 2412508 - RNA, 19 nt, Artificial Sequence
  Description of Artificial Sequence: Synthetic oligonucleotide
  Sense strand starting at position 3150 of SEQ ID NO: 1886474
ugaauaauucgucagccug

SEQ ID NO: 2412509 - RNA, 19 nt, Artificial Sequence
  Description of Artificial Sequence: Synthetic oligonucleotide
  Antisense strand to SEQ ID NO: 2412508
caggcugacgaauuauuca

SEQ ID NO: 2412510 - RNA, 19 nt, Artificial Sequence
  Description of Artificial Sequence: Synthetic oligonucleotide
  Sense strand starting at position 3164 of SEQ ID NO: 1886474
gccugaagguuagaaauuu

SEQ ID NO: 2412511 - RNA, 19 nt, Artificial Sequence
  Description of Artificial Sequence: Synthetic oligonucleotide
  Antisense strand to SEQ ID NO: 2412510
aaauuucuaaccuucaggc

SEQ ID NO: 2412512 - RNA, 19 nt, Artificial Sequence
  Description of Artificial Sequence: Synthetic oligonucleotide
  Sense strand starting at position 3299 of SEQ ID NO: 1886474
gccauuuaaugugaugaga

SEQ ID NO: 2412513 - RNA, 19 nt, Artificial Sequence
  Description of Artificial Sequence: Synthetic oligonucleotide
  Antisense strand to SEQ ID NO: 2412512
ucucaucacauuaaauggc

SEQ ID NO: 2412514 - RNA, 19 nt, Artificial Sequence
  Description of Artificial Sequence: Synthetic oligonucleotide
  Sense strand starting at position 3445 of SEQ ID NO: 1886474
gaugaacccgaguauccuu

SEQ ID NO: 2412515 - RNA, 19 nt, Artificial Sequence
  Description of Artificial Sequence: Synthetic oligonucleotide
  Antisense strand to SEQ ID NO: 2412514
aaggauacucggguucauc

SEQ ID NO: 2412516 - RNA, 19 nt, Artificial Sequence
  Description of Artificial Sequence: Synthetic oligonucleotide
  Sense strand starting at position 3450 of SEQ ID NO: 1886474
acccgaguauccuuuggau

SEQ ID NO: 2412517 - RNA, 19 nt, Artificial Sequence
  Description of Artificial Sequence: Synthetic oligonucleotide
  Antisense strand to SEQ ID NO: 2412516
auccaaaggauacucgggu

SEQ ID NO: 2412518 - RNA, 19 nt, Artificial Sequence
  Description of Artificial Sequence: Synthetic oligonucleotide
  Sense strand starting at position 3573 of SEQ ID NO: 1886474
agugaucuuagagguuaga

SEQ ID NO: 2412519 - RNA, 19 nt, Artificial Sequence
  Description of Artificial Sequence: Synthetic oligonucleotide
  Antisense strand to SEQ ID NO: 2412518
ucuaaccucuaagaucacu

SEQ ID NO: 2412520 - RNA, 19 nt, Artificial Sequence
  Description of Artificial Sequence: Synthetic oligonucleotide
  Sense strand starting at position 3639 of SEQ ID NO: 1886474
auaaauuuccuccgguagu

SEQ ID NO: 2412521 - RNA, 19 nt, Artificial Sequence
  Description of Artificial Sequence: Synthetic oligonucleotide
  Antisense strand to SEQ ID NO: 2412520
acuaccggaggaaauuuau

SEQ ID NO: 2412522 - RNA, 19 nt, Artificial Sequence
  Description of Artificial Sequence: Synthetic oligonucleotide
  Sense strand starting at position 3649 of SEQ ID NO: 1886474
uccgguaguagacauguau

SEQ ID NO: 2412523 - RNA, 19 nt, Artificial Sequence
  Description of Artificial Sequence: Synthetic oligonucleotide
  Antisense strand to SEQ ID NO: 2412522
auacaugucuacuaccgga

SEQ ID NO: 2412524 - RNA, 19 nt, Artificial Sequence
  Description of Artificial Sequence: Synthetic oligonucleotide
  Sense strand starting at position 3796 of SEQ ID NO: 1886474
ccugaaugccuauaauagu

SEQ ID NO: 2412525 - RNA, 19 nt, Artificial Sequence
  Description of Artificial Sequence: Synthetic oligonucleotide
  Antisense strand to SEQ ID NO: 2412524
acuauuauaggcauucagg

SEQ ID NO: 2412526 - RNA, 19 nt, Artificial Sequence
  Description of Artificial Sequence: Synthetic oligonucleotide
  Sense strand starting at position 8 of SEQ ID NO: 1886475
aagugcaauauggguguua

SEQ ID NO: 2412527 - RNA, 19 nt, Artificial Sequence
  Description of Artificial Sequence: Synthetic oligonucleotide
  Antisense strand to SEQ ID NO: 2412526
uaacacccauauugcacuu

SEQ ID NO: 2412528 - RNA, 19 nt, Artificial Sequence
  Description of Artificial Sequence: Synthetic oligonucleotide
  Sense strand starting at position 10 of SEQ ID NO: 1886475
gugcaauauggguguuacu

SEQ ID NO: 2412529 - RNA, 19 nt, Artificial Sequence
  Description of Artificial Sequence: Synthetic oligonucleotide
  Antisense strand to SEQ ID NO: 2412528
aguaacacccauauugcac

SEQ ID NO: 2412530 - RNA, 19 nt, Artificial Sequence
  Description of Artificial Sequence: Synthetic oligonucleotide
  Sense strand starting at position 25 of SEQ ID NO: 1886475
uacucuaugccagguaaag

SEQ ID NO: 2412531 - RNA, 19 nt, Artificial Sequence
  Description of Artificial Sequence: Synthetic oligonucleotide
  Antisense strand to SEQ ID NO: 2412530
cuuuaccuggcauagagua

SEQ ID NO: 2412532 - RNA, 19 nt, Artificial Sequence
  Description of Artificial Sequence: Synthetic oligonucleotide
  Sense strand starting at position 126 of SEQ ID NO: 1886475
ucuguaggcaucuggguua

SEQ ID NO: 2412533 - RNA, 19 nt, Artificial Sequence
  Description of Artificial Sequence: Synthetic oligonucleotide
  Antisense strand to SEQ ID NO: 2412532
uaacccagaugccuacaga

SEQ ID NO: 2412534 - RNA, 19 nt, Artificial Sequence
  Description of Artificial Sequence: Synthetic oligonucleotide
  Sense strand starting at position 133 of SEQ ID NO: 1886475
gcaucuggguuaguccuaa

SEQ ID NO: 2412535 - RNA, 19 nt, Artificial Sequence
  Description of Artificial Sequence: Synthetic oligonucleotide
  Antisense strand to SEQ ID NO: 2412534
uuaggacuaacccagaugc

SEQ ID NO: 2412536 - RNA, 19 nt, Artificial Sequence
  Description of Artificial Sequence: Synthetic oligonucleotide
  Sense strand starting at position 137 of SEQ ID NO: 1886475
cuggguuaguccuaaauag

SEQ ID NO: 2412537 - RNA, 19 nt, Artificial Sequence
  Description of Artificial Sequence: Synthetic oligonucleotide
  Antisense strand to SEQ ID NO: 2412536
cuauuuaggacuaacccag

SEQ ID NO: 2412538 - RNA, 19 nt, Artificial Sequence
  Description of Artificial Sequence: Synthetic oligonucleotide
  Sense strand starting at position 269 of SEQ ID NO: 1886475
ucagacagucuuugaacca

SEQ ID NO: 2412539 - RNA, 19 nt, Artificial Sequence
  Description of Artificial Sequence: Synthetic oligonucleotide
  Antisense strand to SEQ ID NO: 2412538
ugguucaaagacugucuga

SEQ ID NO: 2412540 - RNA, 19 nt, Artificial Sequence
  Description of Artificial Sequence: Synthetic oligonucleotide
  Sense strand starting at position 315 of SEQ ID NO: 1886475
gaggcauccucuuugggaa

SEQ ID NO: 2412541 - RNA, 19 nt, Artificial Sequence
  Description of Artificial Sequence: Synthetic oligonucleotide
  Antisense strand to SEQ ID NO: 2412540
uucccaaagaggaugccuc

SEQ ID NO: 2412542 - RNA, 19 nt, Artificial Sequence
  Description of Artificial Sequence: Synthetic oligonucleotide
  Sense strand starting at position 600 of SEQ ID NO: 1886475
gaggguauuugccuagcuu

SEQ ID NO: 2412543 - RNA, 19 nt, Artificial Sequence
  Description of Artificial Sequence: Synthetic oligonucleotide
  Antisense strand to SEQ ID NO: 2412542
aagcuaggcaaauacccuc

SEQ ID NO: 2412544 - RNA, 19 nt, Artificial Sequence
  Description of Artificial Sequence: Synthetic oligonucleotide
  Sense strand starting at position 809 of SEQ ID NO: 1886475
cccgcuucgcucucugauu

SEQ ID NO: 2412545 - RNA, 19 nt, Artificial Sequence
  Description of Artificial Sequence: Synthetic oligonucleotide
  Antisense strand to SEQ ID NO: 2412544
aaucagagagcgaagcggg

SEQ ID NO: 2412546 - RNA, 19 nt, Artificial Sequence
  Description of Artificial Sequence: Synthetic oligonucleotide
  Sense strand starting at position 810 of SEQ ID NO: 1886475
ccgcuucgcucucugauuu

SEQ ID NO: 2412547 - RNA, 19 nt, Artificial Sequence
  Description of Artificial Sequence: Synthetic oligonucleotide
  Antisense strand to SEQ ID NO: 2412546
aaaucagagagcgaagcgg

SEQ ID NO: 2412548 - RNA, 19 nt, Artificial Sequence
  Description of Artificial Sequence: Synthetic oligonucleotide
  Sense strand starting at position 927 of SEQ ID NO: 1886475
gaagucaaauguuuggcaa

SEQ ID NO: 2412549 - RNA, 19 nt, Artificial Sequence
  Description of Artificial Sequence: Synthetic oligonucleotide
  Antisense strand to SEQ ID NO: 2412548
uugccaaacauuugacuuc

SEQ ID NO: 2412550 - RNA, 19 nt, Artificial Sequence
  Description of Artificial Sequence: Synthetic oligonucleotide
  Sense strand starting at position 928 of SEQ ID NO: 1886475
aagucaaauguuuggcaaa

SEQ ID NO: 2412551 - RNA, 19 nt, Artificial Sequence
  Description of Artificial Sequence: Synthetic oligonucleotide
  Antisense strand to SEQ ID NO: 2412550
uuugccaaacauuugacuu

SEQ ID NO: 2412552 - RNA, 19 nt, Artificial Sequence
  Description of Artificial Sequence: Synthetic oligonucleotide
  Sense strand starting at position 930 of SEQ ID NO: 1886475
gucaaauguuuggcaaaua

SEQ ID NO: 2412553 - RNA, 19 nt, Artificial Sequence
  Description of Artificial Sequence: Synthetic oligonucleotide
  Antisense strand to SEQ ID NO: 2412552
uauuugccaaacauuugac

SEQ ID NO: 2412554 - RNA, 19 nt, Artificial Sequence
  Description of Artificial Sequence: Synthetic oligonucleotide
  Sense strand starting at position 931 of SEQ ID NO: 1886475
ucaaauguuuggcaaauag

SEQ ID NO: 2412555 - RNA, 19 nt, Artificial Sequence
  Description of Artificial Sequence: Synthetic oligonucleotide
  Antisense strand to SEQ ID NO: 2412554
cuauuugccaaacauuuga

SEQ ID NO: 2412556 - RNA, 19 nt, Artificial Sequence
  Description of Artificial Sequence: Synthetic oligonucleotide
  Sense strand starting at position 1027 of SEQ ID NO: 1886475
caaccugagucacuagaga

SEQ ID NO: 2412557 - RNA, 19 nt, Artificial Sequence
  Description of Artificial Sequence: Synthetic oligonucleotide
  Antisense strand to SEQ ID NO: 2412556
ucucuagugacucagguug

SEQ ID NO: 2412558 - RNA, 19 nt, Artificial Sequence
  Description of Artificial Sequence: Synthetic oligonucleotide
  Sense strand starting at position 2007 of SEQ ID NO: 1886475
cucggcuuccugucugcaa

SEQ ID NO: 2412559 - RNA, 19 nt, Artificial Sequence
  Description of Artificial Sequence: Synthetic oligonucleotide
  Antisense strand to SEQ ID NO: 2412558
uugcagacaggaagccgag

SEQ ID NO: 2412560 - RNA, 19 nt, Artificial Sequence
  Description of Artificial Sequence: Synthetic oligonucleotide
  Sense strand starting at position 2008 of SEQ ID NO: 1886475
ucggcuuccugucugcaaa

SEQ ID NO: 2412561 - RNA, 19 nt, Artificial Sequence
  Description of Artificial Sequence: Synthetic oligonucleotide
  Antisense strand to SEQ ID NO: 2412560
uuugcagacaggaagccga

SEQ ID NO: 2412562 - RNA, 19 nt, Artificial Sequence
  Description of Artificial Sequence: Synthetic oligonucleotide
  Sense strand starting at position 2039 of SEQ ID NO: 1886475
gcgguccugucuccuaaga

SEQ ID NO: 2412563 - RNA, 19 nt, Artificial Sequence
  Description of Artificial Sequence: Synthetic oligonucleotide
  Antisense strand to SEQ ID NO: 2412562
ucuuaggagacaggaccgc

SEQ ID NO: 2412564 - RNA, 19 nt, Artificial Sequence
  Description of Artificial Sequence: Synthetic oligonucleotide
  Sense strand starting at position 2073 of SEQ ID NO: 1886475
cugggaagaugguaaaguu

SEQ ID NO: 2412565 - RNA, 19 nt, Artificial Sequence
  Description of Artificial Sequence: Synthetic oligonucleotide
  Antisense strand to SEQ ID NO: 2412564
aacuuuaccaucuucccag

SEQ ID NO: 2412566 - RNA, 19 nt, Artificial Sequence
  Description of Artificial Sequence: Synthetic oligonucleotide
  Sense strand starting at position 2099 of SEQ ID NO: 1886475
caggauagguauuagguaa

SEQ ID NO: 2412567 - RNA, 19 nt, Artificial Sequence
  Description of Artificial Sequence: Synthetic oligonucleotide
  Antisense strand to SEQ ID NO: 2412566
uuaccuaauaccuauccug

SEQ ID NO: 2412568 - RNA, 19 nt, Artificial Sequence
  Description of Artificial Sequence: Synthetic oligonucleotide
  Sense strand starting at position 2173 of SEQ ID NO: 1886475
aggccuuucucagccauca

SEQ ID NO: 2412569 - RNA, 19 nt, Artificial Sequence
  Description of Artificial Sequence: Synthetic oligonucleotide
  Antisense strand to SEQ ID NO: 2412568
ugauggcugagaaaggccu

SEQ ID NO: 2412570 - RNA, 19 nt, Artificial Sequence
  Description of Artificial Sequence: Synthetic oligonucleotide
  Sense strand starting at position 2194 of SEQ ID NO: 1886475
gaaagcaagcucuggaaau

SEQ ID NO: 2412571 - RNA, 19 nt, Artificial Sequence
  Description of Artificial Sequence: Synthetic oligonucleotide
  Antisense strand to SEQ ID NO: 2412570
auuuccagagcuugcuuuc

SEQ ID NO: 2412572 - RNA, 19 nt, Artificial Sequence
  Description of Artificial Sequence: Synthetic oligonucleotide
  Sense strand starting at position 2315 of SEQ ID NO: 1886475
gcaggcucucugggaaauc

SEQ ID NO: 2412573 - RNA, 19 nt, Artificial Sequence
  Description of Artificial Sequence: Synthetic oligonucleotide
  Antisense strand to SEQ ID NO: 2412572
gauuucccagagagccugc

SEQ ID NO: 2412574 - RNA, 19 nt, Artificial Sequence
  Description of Artificial Sequence: Synthetic oligonucleotide
  Sense strand starting at position 2316 of SEQ ID NO: 1886475
caggcucucugggaaauca

SEQ ID NO: 2412575 - RNA, 19 nt, Artificial Sequence
  Description of Artificial Sequence: Synthetic oligonucleotide
  Antisense strand to SEQ ID NO: 2412574
ugauuucccagagagccug

SEQ ID NO: 2412576 - RNA, 19 nt, Artificial Sequence
  Description of Artificial Sequence: Synthetic oligonucleotide
  Sense strand starting at position 2326 of SEQ ID NO: 1886475
gggaaaucauuagagggaa

SEQ ID NO: 2412577 - RNA, 19 nt, Artificial Sequence
  Description of Artificial Sequence: Synthetic oligonucleotide
  Antisense strand to SEQ ID NO: 2412576
uucccucuaaugauuuccc

SEQ ID NO: 2412578 - RNA, 19 nt, Artificial Sequence
  Description of Artificial Sequence: Synthetic oligonucleotide
  Sense strand starting at position 2457 of SEQ ID NO: 1886475
uggcaaagaccuggaucuu

SEQ ID NO: 2412579 - RNA, 19 nt, Artificial Sequence
  Description of Artificial Sequence: Synthetic oligonucleotide
  Antisense strand to SEQ ID NO: 2412578
aagauccaggucuuugcca

SEQ ID NO: 2412580 - RNA, 19 nt, Artificial Sequence
  Description of Artificial Sequence: Synthetic oligonucleotide
  Sense strand starting at position 2502 of SEQ ID NO: 1886475
gccuuuacccgagguccua

SEQ ID NO: 2412581 - RNA, 19 nt, Artificial Sequence
  Description of Artificial Sequence: Synthetic oligonucleotide
  Antisense strand to SEQ ID NO: 2412580
uaggaccucggguaaaggc

SEQ ID NO: 2412582 - RNA, 19 nt, Artificial Sequence
  Description of Artificial Sequence: Synthetic oligonucleotide
  Sense strand starting at position 2686 of SEQ ID NO: 1886475
gagguucccauguagaugu

SEQ ID NO: 2412583 - RNA, 19 nt, Artificial Sequence
  Description of Artificial Sequence: Synthetic oligonucleotide
  Antisense strand to SEQ ID NO: 2412582
acaucuacaugggaaccuc

SEQ ID NO: 2412584 - RNA, 19 nt, Artificial Sequence
  Description of Artificial Sequence: Synthetic oligonucleotide
  Sense strand starting at position 2701 of SEQ ID NO: 1886475
auguuauuagugugggcaa

SEQ ID NO: 2412585 - RNA, 19 nt, Artificial Sequence
  Description of Artificial Sequence: Synthetic oligonucleotide
  Antisense strand to SEQ ID NO: 2412584
uugcccacacuaauaacau

SEQ ID NO: 2412586 - RNA, 19 nt, Artificial Sequence
  Description of Artificial Sequence: Synthetic oligonucleotide
  Sense strand starting at position 2703 of SEQ ID NO: 1886475
guuauuagugugggcaaca

SEQ ID NO: 2412587 - RNA, 19 nt, Artificial Sequence
  Description of Artificial Sequence: Synthetic oligonucleotide
  Antisense strand to SEQ ID NO: 2412586
uguugcccacacuaauaac

SEQ ID NO: 2412588 - RNA, 19 nt, Artificial Sequence
  Description of Artificial Sequence: Synthetic oligonucleotide
  Sense strand starting at position 2704 of SEQ ID NO: 1886475
uuauuagugugggcaacau

SEQ ID NO: 2412589 - RNA, 19 nt, Artificial Sequence
  Description of Artificial Sequence: Synthetic oligonucleotide
  Antisense strand to SEQ ID NO: 2412588
auguugcccacacuaauaa

SEQ ID NO: 2412590 - RNA, 19 nt, Artificial Sequence
  Description of Artificial Sequence: Synthetic oligonucleotide
  Sense strand starting at position 2975 of SEQ ID NO: 1886475
uguagugagcuauaaucga

SEQ ID NO: 2412591 - RNA, 19 nt, Artificial Sequence
  Description of Artificial Sequence: Synthetic oligonucleotide
  Antisense strand to SEQ ID NO: 2412590
ucgauuauagcucacuaca

SEQ ID NO: 2412592 - RNA, 19 nt, Artificial Sequence
  Description of Artificial Sequence: Synthetic oligonucleotide
  Sense strand starting at position 3190 of SEQ ID NO: 1886475
cuccauucucaggaugcaa

SEQ ID NO: 2412593 - RNA, 19 nt, Artificial Sequence
  Description of Artificial Sequence: Synthetic oligonucleotide
  Antisense strand to SEQ ID NO: 2412592
uugcauccugagaauggag

SEQ ID NO: 2412594 - RNA, 19 nt, Artificial Sequence
  Description of Artificial Sequence: Synthetic oligonucleotide
  Sense strand starting at position 3216 of SEQ ID NO: 1886475
uugcaaagguaccaauuau

SEQ ID NO: 2412595 - RNA, 19 nt, Artificial Sequence
  Description of Artificial Sequence: Synthetic oligonucleotide
  Antisense strand to SEQ ID NO: 2412594
auaauugguaccuuugcaa

SEQ ID NO: 2412596 - RNA, 19 nt, Artificial Sequence
  Description of Artificial Sequence: Synthetic oligonucleotide
  Sense strand starting at position 3593 of SEQ ID NO: 1886475
acggcugugagcuugcaau

SEQ ID NO: 2412597 - RNA, 19 nt, Artificial Sequence
  Description of Artificial Sequence: Synthetic oligonucleotide
  Antisense strand to SEQ ID NO: 2412596
auugcaagcucacagccgu

SEQ ID NO: 2412598 - RNA, 19 nt, Artificial Sequence
  Description of Artificial Sequence: Synthetic oligonucleotide
  Sense strand starting at position 3624 of SEQ ID NO: 1886475
gagcuauaagacuguaacu

SEQ ID NO: 2412599 - RNA, 19 nt, Artificial Sequence
  Description of Artificial Sequence: Synthetic oligonucleotide
  Antisense strand to SEQ ID NO: 2412598
aguuacagucuuauagcuc

SEQ ID NO: 2412600 - RNA, 19 nt, Artificial Sequence
  Description of Artificial Sequence: Synthetic oligonucleotide
  Sense strand starting at position 3626 of SEQ ID NO: 1886475
gcuauaagacuguaacucu

SEQ ID NO: 2412601 - RNA, 19 nt, Artificial Sequence
  Description of Artificial Sequence: Synthetic oligonucleotide
  Antisense strand to SEQ ID NO: 2412600
agaguuacagucuuauagc

SEQ ID NO: 2412602 - RNA, 19 nt, Artificial Sequence
  Description of Artificial Sequence: Synthetic oligonucleotide
  Sense strand starting at position 3861 of SEQ ID NO: 1886475
ugacacacuuaaugguaaa

SEQ ID NO: 2412603 - RNA, 19 nt, Artificial Sequence
  Description of Artificial Sequence: Synthetic oligonucleotide
  Antisense strand to SEQ ID NO: 2412602
uuuaccauuaaguguguca

SEQ ID NO: 2412604 - RNA, 19 nt, Artificial Sequence
  Description of Artificial Sequence: Synthetic oligonucleotide
  Sense strand starting at position 3965 of SEQ ID NO: 1886475
ggccauugccauuaggcaa

SEQ ID NO: 2412605 - RNA, 19 nt, Artificial Sequence
  Description of Artificial Sequence: Synthetic oligonucleotide
  Antisense strand to SEQ ID NO: 2412604
uugccuaauggcaauggcc

SEQ ID NO: 2412606 - RNA, 19 nt, Artificial Sequence
  Description of Artificial Sequence: Synthetic oligonucleotide
  Sense strand starting at position 281 of SEQ ID NO: 1886477
accugugucccagggacuu

SEQ ID NO: 2412607 - RNA, 19 nt, Artificial Sequence
  Description of Artificial Sequence: Synthetic oligonucleotide
  Antisense strand to SEQ ID NO: 2412606
aagucccugggacacaggu

SEQ ID NO: 2412608 - RNA, 19 nt, Artificial Sequence
  Description of Artificial Sequence: Synthetic oligonucleotide
  Sense strand starting at position 299 of SEQ ID NO: 1886477
ugaagcuuccuugguggau

SEQ ID NO: 2412609 - RNA, 19 nt, Artificial Sequence
  Description of Artificial Sequence: Synthetic oligonucleotide
  Antisense strand to SEQ ID NO: 2412608
auccaccaaggaagcuuca

SEQ ID NO: 2412610 - RNA, 19 nt, Artificial Sequence
  Description of Artificial Sequence: Synthetic oligonucleotide
  Sense strand starting at position 871 of SEQ ID NO: 1886477
ggccaaugcuuccuccaaa

SEQ ID NO: 2412611 - RNA, 19 nt, Artificial Sequence
  Description of Artificial Sequence: Synthetic oligonucleotide
  Antisense strand to SEQ ID NO: 2412610
uuuggaggaagcauuggcc

SEQ ID NO: 2412612 - RNA, 19 nt, Artificial Sequence
  Description of Artificial Sequence: Synthetic oligonucleotide
  Sense strand starting at position 872 of SEQ ID NO: 1886477
gccaaugcuuccuccaaag

SEQ ID NO: 2412613 - RNA, 19 nt, Artificial Sequence
  Description of Artificial Sequence: Synthetic oligonucleotide
  Antisense strand to SEQ ID NO: 2412612
cuuuggaggaagcauuggc

SEQ ID NO: 2412614 - RNA, 19 nt, Artificial Sequence
  Description of Artificial Sequence: Synthetic oligonucleotide
  Sense strand starting at position 920 of SEQ ID NO: 1886477
uccgguuguucccaaugca

SEQ ID NO: 2412615 - RNA, 19 nt, Artificial Sequence
  Description of Artificial Sequence: Synthetic oligonucleotide
  Antisense strand to SEQ ID NO: 2412614
ugcauugggaacaaccgga

SEQ ID NO: 2412616 - RNA, 19 nt, Artificial Sequence
  Description of Artificial Sequence: Synthetic oligonucleotide
  Sense strand starting at position 923 of SEQ ID NO: 1886477
gguuguucccaaugcaaag

SEQ ID NO: 2412617 - RNA, 19 nt, Artificial Sequence
  Description of Artificial Sequence: Synthetic oligonucleotide
  Antisense strand to SEQ ID NO: 2412616
cuuugcauugggaacaacc

SEQ ID NO: 2412618 - RNA, 19 nt, Artificial Sequence
  Description of Artificial Sequence: Synthetic oligonucleotide
  Sense strand starting at position 1098 of SEQ ID NO: 1886477
cgacuuugcaucuggacuu

SEQ ID NO: 2412619 - RNA, 19 nt, Artificial Sequence
  Description of Artificial Sequence: Synthetic oligonucleotide
  Antisense strand to SEQ ID NO: 2412618
aaguccagaugcaaagucg

SEQ ID NO: 2412620 - RNA, 19 nt, Artificial Sequence
  Description of Artificial Sequence: Synthetic oligonucleotide
  Sense strand starting at position 1320 of SEQ ID NO: 1886477
gcgcgcugguugaaaggau

SEQ ID NO: 2412621 - RNA, 19 nt, Artificial Sequence
  Description of Artificial Sequence: Synthetic oligonucleotide
  Antisense strand to SEQ ID NO: 2412620
auccuuucaaccagcgcgc

SEQ ID NO: 2412622 - RNA, 19 nt, Artificial Sequence
  Description of Artificial Sequence: Synthetic oligonucleotide
  Sense strand starting at position 2309 of SEQ ID NO: 1886477
cggagcuuucuuuaugggu

SEQ ID NO: 2412623 - RNA, 19 nt, Artificial Sequence
  Description of Artificial Sequence: Synthetic oligonucleotide
  Antisense strand to SEQ ID NO: 2412622
acccauaaagaaagcuccg

SEQ ID NO: 2412624 - RNA, 19 nt, Artificial Sequence
  Description of Artificial Sequence: Synthetic oligonucleotide
  Sense strand starting at position 3424 of SEQ ID NO: 1886477
ggugcucccuccuuagaaa

SEQ ID NO: 2412625 - RNA, 19 nt, Artificial Sequence
  Description of Artificial Sequence: Synthetic oligonucleotide
  Antisense strand to SEQ ID NO: 2412624
uuucuaaggagggagcacc

SEQ ID NO: 2412626 - RNA, 19 nt, Artificial Sequence
  Description of Artificial Sequence: Synthetic oligonucleotide
  Sense strand starting at position 3509 of SEQ ID NO: 1886477
gcagguuugccugcgagua

SEQ ID NO: 2412627 - RNA, 19 nt, Artificial Sequence
  Description of Artificial Sequence: Synthetic oligonucleotide
  Antisense strand to SEQ ID NO: 2412626
uacucgcaggcaaaccugc

SEQ ID NO: 2412628 - RNA, 19 nt, Artificial Sequence
  Description of Artificial Sequence: Synthetic oligonucleotide
  Sense strand starting at position 3510 of SEQ ID NO: 1886477
cagguuugccugcgaguac

SEQ ID NO: 2412629 - RNA, 19 nt, Artificial Sequence
  Description of Artificial Sequence: Synthetic oligonucleotide
  Antisense strand to SEQ ID NO: 2412628
guacucgcaggcaaaccug

SEQ ID NO: 2412630 - RNA, 19 nt, Artificial Sequence
  Description of Artificial Sequence: Synthetic oligonucleotide
  Sense strand starting at position 3670 of SEQ ID NO: 1886477
gaacuuguugcucaggaca

SEQ ID NO: 2412631 - RNA, 19 nt, Artificial Sequence
  Description of Artificial Sequence: Synthetic oligonucleotide
  Antisense strand to SEQ ID NO: 2412630
uguccugagcaacaaguuc

SEQ ID NO: 2412632 - RNA, 19 nt, Artificial Sequence
  Description of Artificial Sequence: Synthetic oligonucleotide
  Sense strand starting at position 3698 of SEQ ID NO: 1886477
caccgaguguccucugguu

SEQ ID NO: 2412633 - RNA, 19 nt, Artificial Sequence
  Description of Artificial Sequence: Synthetic oligonucleotide
  Antisense strand to SEQ ID NO: 2412632
aaccagaggacacucggug

SEQ ID NO: 2412634 - RNA, 19 nt, Artificial Sequence
  Description of Artificial Sequence: Synthetic oligonucleotide
  Sense strand starting at position 3813 of SEQ ID NO: 1886477
ugccuucugucuggaucua

SEQ ID NO: 2412635 - RNA, 19 nt, Artificial Sequence
  Description of Artificial Sequence: Synthetic oligonucleotide
  Antisense strand to SEQ ID NO: 2412634
uagauccagacagaaggca

SEQ ID NO: 2412636 - RNA, 19 nt, Artificial Sequence
  Description of Artificial Sequence: Synthetic oligonucleotide
  Sense strand starting at position 3927 of SEQ ID NO: 1886477
gaguguguccuguggcuca

SEQ ID NO: 2412637 - RNA, 19 nt, Artificial Sequence
  Description of Artificial Sequence: Synthetic oligonucleotide
  Antisense strand to SEQ ID NO: 2412636
ugagccacaggacacacuc

SEQ ID NO: 2412638 - RNA, 19 nt, Artificial Sequence
  Description of Artificial Sequence: Synthetic oligonucleotide
  Sense strand starting at position 3931 of SEQ ID NO: 1886477
guguccuguggcucaguga

SEQ ID NO: 2412639 - RNA, 19 nt, Artificial Sequence
  Description of Artificial Sequence: Synthetic oligonucleotide
  Antisense strand to SEQ ID NO: 2412638
ucacugagccacaggacac

SEQ ID NO: 2412640 - RNA, 19 nt, Artificial Sequence
  Description of Artificial Sequence: Synthetic oligonucleotide
  Sense strand starting at position 3979 of SEQ ID NO: 1886477
cugggugucugggaaugga

SEQ ID NO: 2412641 - RNA, 19 nt, Artificial Sequence
  Description of Artificial Sequence: Synthetic oligonucleotide
  Antisense strand to SEQ ID NO: 2412640
uccauucccagacacccag

SEQ ID NO: 2412642 - RNA, 19 nt, Artificial Sequence
  Description of Artificial Sequence: Synthetic oligonucleotide
  Sense strand starting at position 3 of SEQ ID NO: 1886476
guuuaauacuguggaggga

SEQ ID NO: 2412643 - RNA, 19 nt, Artificial Sequence
  Description of Artificial Sequence: Synthetic oligonucleotide
  Antisense strand to SEQ ID NO: 2412642
ucccuccacaguauuaaac

SEQ ID NO: 2412644 - RNA, 19 nt, Artificial Sequence
  Description of Artificial Sequence: Synthetic oligonucleotide
  Sense strand starting at position 420 of SEQ ID NO: 1886476
caggaaaccuuguagugau

SEQ ID NO: 2412645 - RNA, 19 nt, Artificial Sequence
  Description of Artificial Sequence: Synthetic oligonucleotide
  Antisense strand to SEQ ID NO: 2412644
aucacuacaagguuuccug

SEQ ID NO: 2412646 - RNA, 19 nt, Artificial Sequence
  Description of Artificial Sequence: Synthetic oligonucleotide
  Sense strand starting at position 432 of SEQ ID NO: 1886476
uagugaugagcgcgucuca

SEQ ID NO: 2412647 - RNA, 19 nt, Artificial Sequence
  Description of Artificial Sequence: Synthetic oligonucleotide
  Antisense strand to SEQ ID NO: 2412646
ugagacgcgcucaucacua

SEQ ID NO: 2412648 - RNA, 19 nt, Artificial Sequence
  Description of Artificial Sequence: Synthetic oligonucleotide
  Sense strand starting at position 433 of SEQ ID NO: 1886476
agugaugagcgcgucucau

SEQ ID NO: 2412649 - RNA, 19 nt, Artificial Sequence
  Description of Artificial Sequence: Synthetic oligonucleotide
  Antisense strand to SEQ ID NO: 2412648
augagacgcgcucaucacu

SEQ ID NO: 2412650 - RNA, 19 nt, Artificial Sequence
  Description of Artificial Sequence: Synthetic oligonucleotide
  Sense strand starting at position 439 of SEQ ID NO: 1886476
gagcgcgucucaucacuuu

SEQ ID NO: 2412651 - RNA, 19 nt, Artificial Sequence
  Description of Artificial Sequence: Synthetic oligonucleotide
  Antisense strand to SEQ ID NO: 2412650
aaagugaugagacgcgcuc

SEQ ID NO: 2412652 - RNA, 19 nt, Artificial Sequence
  Description of Artificial Sequence: Synthetic oligonucleotide
  Sense strand starting at position 467 of SEQ ID NO: 1886476
gguggaaaguaucacacaa

SEQ ID NO: 2412653 - RNA, 19 nt, Artificial Sequence
  Description of Artificial Sequence: Synthetic oligonucleotide
  Antisense strand to SEQ ID NO: 2412652
uugugugauacuuuccacc

SEQ ID NO: 2412654 - RNA, 19 nt, Artificial Sequence
  Description of Artificial Sequence: Synthetic oligonucleotide
  Sense strand starting at position 469 of SEQ ID NO: 1886476
uggaaaguaucacacaaau

SEQ ID NO: 2412655 - RNA, 19 nt, Artificial Sequence
  Description of Artificial Sequence: Synthetic oligonucleotide
  Antisense strand to SEQ ID NO: 2412654
auuugugugauacuuucca

SEQ ID NO: 2412656 - RNA, 19 nt, Artificial Sequence
  Description of Artificial Sequence: Synthetic oligonucleotide
  Sense strand starting at position 575 of SEQ ID NO: 1886476
agaagaacuucugcaaccu

SEQ ID NO: 2412657 - RNA, 19 nt, Artificial Sequence
  Description of Artificial Sequence: Synthetic oligonucleotide
  Antisense strand to SEQ ID NO: 2412656
agguugcagaaguucuucu

SEQ ID NO: 2412658 - RNA, 19 nt, Artificial Sequence
  Description of Artificial Sequence: Synthetic oligonucleotide
  Sense strand starting at position 817 of SEQ ID NO: 1886476
acacguugggcuuaugaaa

SEQ ID NO: 2412659 - RNA, 19 nt, Artificial Sequence
  Description of Artificial Sequence: Synthetic oligonucleotide
  Antisense strand to SEQ ID NO: 2412658
uuucauaagcccaacgugu

SEQ ID NO: 2412660 - RNA, 19 nt, Artificial Sequence
  Description of Artificial Sequence: Synthetic oligonucleotide
  Sense strand starting at position 824 of SEQ ID NO: 1886476
gggcuuaugaaacauguau

SEQ ID NO: 2412661 - RNA, 19 nt, Artificial Sequence
  Description of Artificial Sequence: Synthetic oligonucleotide
  Antisense strand to SEQ ID NO: 2412660
auacauguuucauaagccc

SEQ ID NO: 2412662 - RNA, 19 nt, Artificial Sequence
  Description of Artificial Sequence: Synthetic oligonucleotide
  Sense strand starting at position 832 of SEQ ID NO: 1886476
gaaacauguauccguguga

SEQ ID NO: 2412663 - RNA, 19 nt, Artificial Sequence
  Description of Artificial Sequence: Synthetic oligonucleotide
  Antisense strand to SEQ ID NO: 2412662
ucacacggauacauguuuc

SEQ ID NO: 2412664 - RNA, 19 nt, Artificial Sequence
  Description of Artificial Sequence: Synthetic oligonucleotide
  Sense strand starting at position 833 of SEQ ID NO: 1886476
aaacauguauccgugugau

SEQ ID NO: 2412665 - RNA, 19 nt, Artificial Sequence
  Description of Artificial Sequence: Synthetic oligonucleotide
  Antisense strand to SEQ ID NO: 2412664
aucacacggauacauguuu

SEQ ID NO: 2412666 - RNA, 19 nt, Artificial Sequence
  Description of Artificial Sequence: Synthetic oligonucleotide
  Sense strand starting at position 836 of SEQ ID NO: 1886476
cauguauccgugugaucac

SEQ ID NO: 2412667 - RNA, 19 nt, Artificial Sequence
  Description of Artificial Sequence: Synthetic oligonucleotide
  Antisense strand to SEQ ID NO: 2412666
gugaucacacggauacaug

SEQ ID NO: 2412668 - RNA, 19 nt, Artificial Sequence
  Description of Artificial Sequence: Synthetic oligonucleotide
  Sense strand starting at position 837 of SEQ ID NO: 1886476
auguauccgugugaucaca

SEQ ID NO: 2412669 - RNA, 19 nt, Artificial Sequence
  Description of Artificial Sequence: Synthetic oligonucleotide
  Antisense strand to SEQ ID NO: 2412668
ugugaucacacggauacau

SEQ ID NO: 2412670 - RNA, 19 nt, Artificial Sequence
  Description of Artificial Sequence: Synthetic oligonucleotide
  Sense strand starting at position 839 of SEQ ID NO: 1886476
guauccgugugaucacaug

SEQ ID NO: 2412671 - RNA, 19 nt, Artificial Sequence
  Description of Artificial Sequence: Synthetic oligonucleotide
  Antisense strand to SEQ ID NO: 2412670
caugugaucacacggauac

SEQ ID NO: 2412672 - RNA, 19 nt, Artificial Sequence
  Description of Artificial Sequence: Synthetic oligonucleotide
  Sense strand starting at position 849 of SEQ ID NO: 1886476
gaucacaugucaccgugau

SEQ ID NO: 2412673 - RNA, 19 nt, Artificial Sequence
  Description of Artificial Sequence: Synthetic oligonucleotide
  Antisense strand to SEQ ID NO: 2412672
aucacggugacaugugauc

SEQ ID NO: 2412674 - RNA, 19 nt, Artificial Sequence
  Description of Artificial Sequence: Synthetic oligonucleotide
  Sense strand starting at position 850 of SEQ ID NO: 1886476
aucacaugucaccgugauc

SEQ ID NO: 2412675 - RNA, 19 nt, Artificial Sequence
  Description of Artificial Sequence: Synthetic oligonucleotide
  Antisense strand to SEQ ID NO: 2412674
gaucacggugacaugugau

SEQ ID NO: 2412676 - RNA, 19 nt, Artificial Sequence
  Description of Artificial Sequence: Synthetic oligonucleotide
  Sense strand starting at position 853 of SEQ ID NO: 1886476
acaugucaccgugaucaca

SEQ ID NO: 2412677 - RNA, 19 nt, Artificial Sequence
  Description of Artificial Sequence: Synthetic oligonucleotide
  Antisense strand to SEQ ID NO: 2412676
ugugaucacggugacaugu

SEQ ID NO: 2412678 - RNA, 19 nt, Artificial Sequence
  Description of Artificial Sequence: Synthetic oligonucleotide
  Sense strand starting at position 855 of SEQ ID NO: 1886476
augucaccgugaucacaga

SEQ ID NO: 2412679 - RNA, 19 nt, Artificial Sequence
  Description of Artificial Sequence: Synthetic oligonucleotide
  Antisense strand to SEQ ID NO: 2412678
ucugugaucacggugacau

SEQ ID NO: 2412680 - RNA, 19 nt, Artificial Sequence
  Description of Artificial Sequence: Synthetic oligonucleotide
  Sense strand starting at position 887 of SEQ ID NO: 1886476
aaaccaguucuggguugua

SEQ ID NO: 2412681 - RNA, 19 nt, Artificial Sequence
  Description of Artificial Sequence: Synthetic oligonucleotide
  Antisense strand to SEQ ID NO: 2412680
uacaacccagaacugguuu

SEQ ID NO: 2412682 - RNA, 19 nt, Artificial Sequence
  Description of Artificial Sequence: Synthetic oligonucleotide
  Sense strand starting at position 1138 of SEQ ID NO: 1886476
gggaaucuucccgaacgca

SEQ ID NO: 2412683 - RNA, 19 nt, Artificial Sequence
  Description of Artificial Sequence: Synthetic oligonucleotide
  Antisense strand to SEQ ID NO: 2412682
ugcguucgggaagauuccc

SEQ ID NO: 2412684 - RNA, 19 nt, Artificial Sequence
  Description of Artificial Sequence: Synthetic oligonucleotide
  Sense strand starting at position 1157 of SEQ ID NO: 1886476
gacugagcuagucgagaac

SEQ ID NO: 2412685 - RNA, 19 nt, Artificial Sequence
  Description of Artificial Sequence: Synthetic oligonucleotide
  Antisense strand to SEQ ID NO: 2412684
guucucgacuagcucaguc

SEQ ID NO: 2412686 - RNA, 19 nt, Artificial Sequence
  Description of Artificial Sequence: Synthetic oligonucleotide
  Sense strand starting at position 1160 of SEQ ID NO: 1886476
ugagcuagucgagaacacu

SEQ ID NO: 2412687 - RNA, 19 nt, Artificial Sequence
  Description of Artificial Sequence: Synthetic oligonucleotide
  Antisense strand to SEQ ID NO: 2412686
aguguucucgacuagcuca

SEQ ID NO: 2412688 - RNA, 19 nt, Artificial Sequence
  Description of Artificial Sequence: Synthetic oligonucleotide
  Sense strand starting at position 1163 of SEQ ID NO: 1886476
gcuagucgagaacacuaaa

SEQ ID NO: 2412689 - RNA, 19 nt, Artificial Sequence
  Description of Artificial Sequence: Synthetic oligonucleotide
  Antisense strand to SEQ ID NO: 2412688
uuuaguguucucgacuagc

SEQ ID NO: 2412690 - RNA, 19 nt, Artificial Sequence
  Description of Artificial Sequence: Synthetic oligonucleotide
  Sense strand starting at position 2770 of SEQ ID NO: 1886476
aggcauuccuuagaggaaa

SEQ ID NO: 2412691 - RNA, 19 nt, Artificial Sequence
  Description of Artificial Sequence: Synthetic oligonucleotide
  Antisense strand to SEQ ID NO: 2412690
uuuccucuaaggaaugccu

SEQ ID NO: 2412692 - RNA, 19 nt, Artificial Sequence
  Description of Artificial Sequence: Synthetic oligonucleotide
  Sense strand starting at position 2772 of SEQ ID NO: 1886476
gcauuccuuagaggaaaga

SEQ ID NO: 2412693 - RNA, 19 nt, Artificial Sequence
  Description of Artificial Sequence: Synthetic oligonucleotide
  Antisense strand to SEQ ID NO: 2412692
ucuuuccucuaaggaaugc

SEQ ID NO: 2412694 - RNA, 19 nt, Artificial Sequence
  Description of Artificial Sequence: Synthetic oligonucleotide
  Sense strand starting at position 2862 of SEQ ID NO: 1886476
agugcagauuucuccuuau

SEQ ID NO: 2412695 - RNA, 19 nt, Artificial Sequence
  Description of Artificial Sequence: Synthetic oligonucleotide
  Antisense strand to SEQ ID NO: 2412694
auaaggagaaaucugcacu

SEQ ID NO: 2412696 - RNA, 19 nt, Artificial Sequence
  Description of Artificial Sequence: Synthetic oligonucleotide
  Sense strand starting at position 2887 of SEQ ID NO: 1886476
gucagcacucuuuacguau

SEQ ID NO: 2412697 - RNA, 19 nt, Artificial Sequence
  Description of Artificial Sequence: Synthetic oligonucleotide
  Antisense strand to SEQ ID NO: 2412696
auacguaaagagugcugac

SEQ ID NO: 2412698 - RNA, 19 nt, Artificial Sequence
  Description of Artificial Sequence: Synthetic oligonucleotide
  Sense strand starting at position 2890 of SEQ ID NO: 1886476
agcacucuuuacguaugaa

SEQ ID NO: 2412699 - RNA, 19 nt, Artificial Sequence
  Description of Artificial Sequence: Synthetic oligonucleotide
  Antisense strand to SEQ ID NO: 2412698
uucauacguaaagagugcu

SEQ ID NO: 2412700 - RNA, 19 nt, Artificial Sequence
  Description of Artificial Sequence: Synthetic oligonucleotide
  Sense strand starting at position 3025 of SEQ ID NO: 1886476
gccacuggguuggucaaau

SEQ ID NO: 2412701 - RNA, 19 nt, Artificial Sequence
  Description of Artificial Sequence: Synthetic oligonucleotide
  Antisense strand to SEQ ID NO: 2412700
auuugaccaacccaguggc

SEQ ID NO: 2412702 - RNA, 19 nt, Artificial Sequence
  Description of Artificial Sequence: Synthetic oligonucleotide
  Sense strand starting at position 3036 of SEQ ID NO: 1886476
ggucaaaugacccgucuuu

SEQ ID NO: 2412703 - RNA, 19 nt, Artificial Sequence
  Description of Artificial Sequence: Synthetic oligonucleotide
  Antisense strand to SEQ ID NO: 2412702
aaagacgggucauuugacc

SEQ ID NO: 2412704 - RNA, 19 nt, Artificial Sequence
  Description of Artificial Sequence: Synthetic oligonucleotide
  Sense strand starting at position 3048 of SEQ ID NO: 1886476
cgucuuuauugcuuguuua

SEQ ID NO: 2412705 - RNA, 19 nt, Artificial Sequence
  Description of Artificial Sequence: Synthetic oligonucleotide
  Antisense strand to SEQ ID NO: 2412704
uaaacaagcaauaaagacg

SEQ ID NO: 2412706 - RNA, 19 nt, Artificial Sequence
  Description of Artificial Sequence: Synthetic oligonucleotide
  Sense strand starting at position 3049 of SEQ ID NO: 1886476
gucuuuauugcuuguuuaa

SEQ ID NO: 2412707 - RNA, 19 nt, Artificial Sequence
  Description of Artificial Sequence: Synthetic oligonucleotide
  Antisense strand to SEQ ID NO: 2412706
uuaaacaagcaauaaagac

SEQ ID NO: 2412708 - RNA, 19 nt, Artificial Sequence
  Description of Artificial Sequence: Synthetic oligonucleotide
  Sense strand starting at position 3216 of SEQ ID NO: 1886476
guagcauacguguacaucu

SEQ ID NO: 2412709 - RNA, 19 nt, Artificial Sequence
  Description of Artificial Sequence: Synthetic oligonucleotide
  Antisense strand to SEQ ID NO: 2412708
agauguacacguaugcuac

SEQ ID NO: 2412710 - RNA, 19 nt, Artificial Sequence
  Description of Artificial Sequence: Synthetic oligonucleotide
  Sense strand starting at position 3218 of SEQ ID NO: 1886476
agcauacguguacaucuua

SEQ ID NO: 2412711 - RNA, 19 nt, Artificial Sequence
  Description of Artificial Sequence: Synthetic oligonucleotide
  Antisense strand to SEQ ID NO: 2412710
uaagauguacacguaugcu

SEQ ID NO: 2412712 - RNA, 19 nt, Artificial Sequence
  Description of Artificial Sequence: Synthetic oligonucleotide
  Sense strand starting at position 3223 of SEQ ID NO: 1886476
acguguacaucuuaugguu

SEQ ID NO: 2412713 - RNA, 19 nt, Artificial Sequence
  Description of Artificial Sequence: Synthetic oligonucleotide
  Antisense strand to SEQ ID NO: 2412712
aaccauaagauguacacgu

SEQ ID NO: 2412714 - RNA, 19 nt, Artificial Sequence
  Description of Artificial Sequence: Synthetic oligonucleotide
  Sense strand starting at position 3303 of SEQ ID NO: 1886476
augggacccuguuaaagau

SEQ ID NO: 2412715 - RNA, 19 nt, Artificial Sequence
  Description of Artificial Sequence: Synthetic oligonucleotide
  Antisense strand to SEQ ID NO: 2412714
aucuuuaacagggucccau

SEQ ID NO: 2412716 - RNA, 19 nt, Artificial Sequence
  Description of Artificial Sequence: Synthetic oligonucleotide
  Sense strand starting at position 3759 of SEQ ID NO: 1886476
gggcauugugcagagcaga

SEQ ID NO: 2412717 - RNA, 19 nt, Artificial Sequence
  Description of Artificial Sequence: Synthetic oligonucleotide
  Antisense strand to SEQ ID NO: 2412716
ucugcucugcacaaugccc

SEQ ID NO: 2412718 - RNA, 19 nt, Artificial Sequence
  Description of Artificial Sequence: Synthetic oligonucleotide
  Sense strand starting at position 3876 of SEQ ID NO: 1886476
ucucucugagcucaaguuu

SEQ ID NO: 2412719 - RNA, 19 nt, Artificial Sequence
  Description of Artificial Sequence: Synthetic oligonucleotide
  Antisense strand to SEQ ID NO: 2412718
aaacuugagcucagagaga

SEQ ID NO: 2412720 - RNA, 19 nt, Artificial Sequence
  Description of Artificial Sequence: Synthetic oligonucleotide
  Sense strand starting at position 3900 of SEQ ID NO: 1886476
agggucugcucucuugaga

SEQ ID NO: 2412721 - RNA, 19 nt, Artificial Sequence
  Description of Artificial Sequence: Synthetic oligonucleotide
  Antisense strand to SEQ ID NO: 2412720
ucucaagagagcagacccu

SEQ ID NO: 2412722 - RNA, 19 nt, Artificial Sequence
  Description of Artificial Sequence: Synthetic oligonucleotide
  Sense strand starting at position 547 of SEQ ID NO: 1886478
ucagcuguuuguccacaca

SEQ ID NO: 2412723 - RNA, 19 nt, Artificial Sequence
  Description of Artificial Sequence: Synthetic oligonucleotide
  Antisense strand to SEQ ID NO: 2412722
uguguggacaaacagcuga

SEQ ID NO: 2412724 - RNA, 19 nt, Artificial Sequence
  Description of Artificial Sequence: Synthetic oligonucleotide
  Sense strand starting at position 802 of SEQ ID NO: 1886478
cuggucugccugugagaaa

SEQ ID NO: 2412725 - RNA, 19 nt, Artificial Sequence
  Description of Artificial Sequence: Synthetic oligonucleotide
  Antisense strand to SEQ ID NO: 2412724
uuucucacaggcagaccag

SEQ ID NO: 2412726 - RNA, 19 nt, Artificial Sequence
  Description of Artificial Sequence: Synthetic oligonucleotide
  Sense strand starting at position 874 of SEQ ID NO: 1886478
cccgaucugccuggaaguu

SEQ ID NO: 2412727 - RNA, 19 nt, Artificial Sequence
  Description of Artificial Sequence: Synthetic oligonucleotide
  Antisense strand to SEQ ID NO: 2412726
aacuuccaggcagaucggg

SEQ ID NO: 2412728 - RNA, 19 nt, Artificial Sequence
  Description of Artificial Sequence: Synthetic oligonucleotide
  Sense strand starting at position 875 of SEQ ID NO: 1886478
ccgaucugccuggaaguuu

SEQ ID NO: 2412729 - RNA, 19 nt, Artificial Sequence
  Description of Artificial Sequence: Synthetic oligonucleotide
  Antisense strand to SEQ ID NO: 2412728
aaacuuccaggcagaucgg

SEQ ID NO: 2412730 - RNA, 19 nt, Artificial Sequence
  Description of Artificial Sequence: Synthetic oligonucleotide
  Sense strand starting at position 928 of SEQ ID NO: 1886478
ccguguuggcugcuuggaa

SEQ ID NO: 2412731 - RNA, 19 nt, Artificial Sequence
  Description of Artificial Sequence: Synthetic oligonucleotide
  Antisense strand to SEQ ID NO: 2412730
uuccaagcagccaacacgg

SEQ ID NO: 2412732 - RNA, 19 nt, Artificial Sequence
  Description of Artificial Sequence: Synthetic oligonucleotide
  Sense strand starting at position 956 of SEQ ID NO: 1886478
cuggaccucaucugggaua

SEQ ID NO: 2412733 - RNA, 19 nt, Artificial Sequence
  Description of Artificial Sequence: Synthetic oligonucleotide
  Antisense strand to SEQ ID NO: 2412732
uaucccagaugagguccag

SEQ ID NO: 2412734 - RNA, 19 nt, Artificial Sequence
  Description of Artificial Sequence: Synthetic oligonucleotide
  Sense strand starting at position 957 of SEQ ID NO: 1886478
uggaccucaucugggauaa

SEQ ID NO: 2412735 - RNA, 19 nt, Artificial Sequence
  Description of Artificial Sequence: Synthetic oligonucleotide
  Antisense strand to SEQ ID NO: 2412734
uuaucccagaugaggucca

SEQ ID NO: 2412736 - RNA, 19 nt, Artificial Sequence
  Description of Artificial Sequence: Synthetic oligonucleotide
  Sense strand starting at position 1083 of SEQ ID NO: 1886478
ggcuaagccuauuucugua

SEQ ID NO: 2412737 - RNA, 19 nt, Artificial Sequence
  Description of Artificial Sequence: Synthetic oligonucleotide
  Antisense strand to SEQ ID NO: 2412736
uacagaaauaggcuuagcc

SEQ ID NO: 2412738 - RNA, 19 nt, Artificial Sequence
  Description of Artificial Sequence: Synthetic oligonucleotide
  Sense strand starting at position 1095 of SEQ ID NO: 1886478
uucuguagauucucuuacu

SEQ ID NO: 2412739 - RNA, 19 nt, Artificial Sequence
  Description of Artificial Sequence: Synthetic oligonucleotide
  Antisense strand to SEQ ID NO: 2412738
aguaagagaaucuacagaa

SEQ ID NO: 2412740 - RNA, 19 nt, Artificial Sequence
  Description of Artificial Sequence: Synthetic oligonucleotide
  Sense strand starting at position 1096 of SEQ ID NO: 1886478
ucuguagauucucuuacuu

SEQ ID NO: 2412741 - RNA, 19 nt, Artificial Sequence
  Description of Artificial Sequence: Synthetic oligonucleotide
  Antisense strand to SEQ ID NO: 2412740
aaguaagagaaucuacaga

SEQ ID NO: 2412742 - RNA, 19 nt, Artificial Sequence
  Description of Artificial Sequence: Synthetic oligonucleotide
  Sense strand starting at position 1101 of SEQ ID NO: 1886478
agauucucuuacuuauguu

SEQ ID NO: 2412743 - RNA, 19 nt, Artificial Sequence
  Description of Artificial Sequence: Synthetic oligonucleotide
  Antisense strand to SEQ ID NO: 2412742
aacauaaguaagagaaucu

SEQ ID NO: 2412744 - RNA, 19 nt, Artificial Sequence
  Description of Artificial Sequence: Synthetic oligonucleotide
  Sense strand starting at position 1381 of SEQ ID NO: 1886478
cgucuuucccuccauaaag

SEQ ID NO: 2412745 - RNA, 19 nt, Artificial Sequence
  Description of Artificial Sequence: Synthetic oligonucleotide
  Antisense strand to SEQ ID NO: 2412744
cuuuauggagggaaagacg

SEQ ID NO: 2412746 - RNA, 19 nt, Artificial Sequence
  Description of Artificial Sequence: Synthetic oligonucleotide
  Sense strand starting at position 1494 of SEQ ID NO: 1886478
acagcugucuuguucuaag

SEQ ID NO: 2412747 - RNA, 19 nt, Artificial Sequence
  Description of Artificial Sequence: Synthetic oligonucleotide
  Antisense strand to SEQ ID NO: 2412746
cuuagaacaagacagcugu

SEQ ID NO: 2412748 - RNA, 19 nt, Artificial Sequence
  Description of Artificial Sequence: Synthetic oligonucleotide
  Sense strand starting at position 1511 of SEQ ID NO: 1886478
agggcgagucccugugaga

SEQ ID NO: 2412749 - RNA, 19 nt, Artificial Sequence
  Description of Artificial Sequence: Synthetic oligonucleotide
  Antisense strand to SEQ ID NO: 2412748
ucucacagggacucgcccu

SEQ ID NO: 2412750 - RNA, 19 nt, Artificial Sequence
  Description of Artificial Sequence: Synthetic oligonucleotide
  Sense strand starting at position 1732 of SEQ ID NO: 1886478
ggcucugcgcugucugaaa

SEQ ID NO: 2412751 - RNA, 19 nt, Artificial Sequence
  Description of Artificial Sequence: Synthetic oligonucleotide
  Antisense strand to SEQ ID NO: 2412750
uuucagacagcgcagagcc

SEQ ID NO: 2412752 - RNA, 19 nt, Artificial Sequence
  Description of Artificial Sequence: Synthetic oligonucleotide
  Sense strand starting at position 1787 of SEQ ID NO: 1886478
ggugauauuagggaagcuu

SEQ ID NO: 2412753 - RNA, 19 nt, Artificial Sequence
  Description of Artificial Sequence: Synthetic oligonucleotide
  Antisense strand to SEQ ID NO: 2412752
aagcuucccuaauaucacc

SEQ ID NO: 2412754 - RNA, 19 nt, Artificial Sequence
  Description of Artificial Sequence: Synthetic oligonucleotide
  Sense strand starting at position 1859 of SEQ ID NO: 1886478
agucuuaccuccuugaguu

SEQ ID NO: 2412755 - RNA, 19 nt, Artificial Sequence
  Description of Artificial Sequence: Synthetic oligonucleotide
  Antisense strand to SEQ ID NO: 2412754
aacucaaggagguaagacu

SEQ ID NO: 2412756 - RNA, 19 nt, Artificial Sequence
  Description of Artificial Sequence: Synthetic oligonucleotide
  Sense strand starting at position 1860 of SEQ ID NO: 1886478
gucuuaccuccuugaguug

SEQ ID NO: 2412757 - RNA, 19 nt, Artificial Sequence
  Description of Artificial Sequence: Synthetic oligonucleotide
  Antisense strand to SEQ ID NO: 2412756
caacucaaggagguaagac

SEQ ID NO: 2412758 - RNA, 19 nt, Artificial Sequence
  Description of Artificial Sequence: Synthetic oligonucleotide
  Sense strand starting at position 2087 of SEQ ID NO: 1886478
ggagaacagcgguguccuu

SEQ ID NO: 2412759 - RNA, 19 nt, Artificial Sequence
  Description of Artificial Sequence: Synthetic oligonucleotide
  Antisense strand to SEQ ID NO: 2412758
aaggacaccgcuguucucc

SEQ ID NO: 2412760 - RNA, 19 nt, Artificial Sequence
  Description of Artificial Sequence: Synthetic oligonucleotide
  Sense strand starting at position 2110 of SEQ ID NO: 1886478
gcuggagaugccugcagau

SEQ ID NO: 2412761 - RNA, 19 nt, Artificial Sequence
  Description of Artificial Sequence: Synthetic oligonucleotide
  Antisense strand to SEQ ID NO: 2412760
aucugcaggcaucuccagc

SEQ ID NO: 2412762 - RNA, 19 nt, Artificial Sequence
  Description of Artificial Sequence: Synthetic oligonucleotide
  Sense strand starting at position 2125 of SEQ ID NO: 1886478
agaugcuugcucugggcau

SEQ ID NO: 2412763 - RNA, 19 nt, Artificial Sequence
  Description of Artificial Sequence: Synthetic oligonucleotide
  Antisense strand to SEQ ID NO: 2412762
augcccagagcaagcaucu

SEQ ID NO: 2412764 - RNA, 19 nt, Artificial Sequence
  Description of Artificial Sequence: Synthetic oligonucleotide
  Sense strand starting at position 2207 of SEQ ID NO: 1886478
cgggaagucgacuaucauu

SEQ ID NO: 2412765 - RNA, 19 nt, Artificial Sequence
  Description of Artificial Sequence: Synthetic oligonucleotide
  Antisense strand to SEQ ID NO: 2412764
aaugauagucgacuucccg

SEQ ID NO: 2412766 - RNA, 19 nt, Artificial Sequence
  Description of Artificial Sequence: Synthetic oligonucleotide
  Sense strand starting at position 2212 of SEQ ID NO: 1886478
agucgacuaucauuccuga

SEQ ID NO: 2412767 - RNA, 19 nt, Artificial Sequence
  Description of Artificial Sequence: Synthetic oligonucleotide
  Antisense strand to SEQ ID NO: 2412766
ucaggaaugauagucgacu

SEQ ID NO: 2412768 - RNA, 19 nt, Artificial Sequence
  Description of Artificial Sequence: Synthetic oligonucleotide
  Sense strand starting at position 2215 of SEQ ID NO: 1886478
cgacuaucauuccugacgu

SEQ ID NO: 2412769 - RNA, 19 nt, Artificial Sequence
  Description of Artificial Sequence: Synthetic oligonucleotide
  Antisense strand to SEQ ID NO: 2412768
acgucaggaaugauagucg

SEQ ID NO: 2412770 - RNA, 19 nt, Artificial Sequence
  Description of Artificial Sequence: Synthetic oligonucleotide
  Sense strand starting at position 2234 of SEQ ID NO: 1886478
uccaguguaacguguuaug

SEQ ID NO: 2412771 - RNA, 19 nt, Artificial Sequence
  Description of Artificial Sequence: Synthetic oligonucleotide
  Antisense strand to SEQ ID NO: 2412770
cauaacacguuacacugga

SEQ ID NO: 2412772 - RNA, 19 nt, Artificial Sequence
  Description of Artificial Sequence: Synthetic oligonucleotide
  Sense strand starting at position 2236 of SEQ ID NO: 1886478
caguguaacguguuauguu

SEQ ID NO: 2412773 - RNA, 19 nt, Artificial Sequence
  Description of Artificial Sequence: Synthetic oligonucleotide
  Antisense strand to SEQ ID NO: 2412772
aacauaacacguuacacug

SEQ ID NO: 2412774 - RNA, 19 nt, Artificial Sequence
  Description of Artificial Sequence: Synthetic oligonucleotide
  Sense strand starting at position 2244 of SEQ ID NO: 1886478
cguguuauguuucucugau

SEQ ID NO: 2412775 - RNA, 19 nt, Artificial Sequence
  Description of Artificial Sequence: Synthetic oligonucleotide
  Antisense strand to SEQ ID NO: 2412774
aucagagaaacauaacacg

SEQ ID NO: 2412776 - RNA, 19 nt, Artificial Sequence
  Description of Artificial Sequence: Synthetic oligonucleotide
  Sense strand starting at position 2245 of SEQ ID NO: 1886478
guguuauguuucucugaug

SEQ ID NO: 2412777 - RNA, 19 nt, Artificial Sequence
  Description of Artificial Sequence: Synthetic oligonucleotide
  Antisense strand to SEQ ID NO: 2412776
caucagagaaacauaacac

SEQ ID NO: 2412778 - RNA, 19 nt, Artificial Sequence
  Description of Artificial Sequence: Synthetic oligonucleotide
  Sense strand starting at position 2285 of SEQ ID NO: 1886478
guugccaguuucuugacua

SEQ ID NO: 2412779 - RNA, 19 nt, Artificial Sequence
  Description of Artificial Sequence: Synthetic oligonucleotide
  Antisense strand to SEQ ID NO: 2412778
uagucaagaaacuggcaac

SEQ ID NO: 2412780 - RNA, 19 nt, Artificial Sequence
  Description of Artificial Sequence: Synthetic oligonucleotide
  Sense strand starting at position 2289 of SEQ ID NO: 1886478
ccaguuucuugacuaugau

SEQ ID NO: 2412781 - RNA, 19 nt, Artificial Sequence
  Description of Artificial Sequence: Synthetic oligonucleotide
  Antisense strand to SEQ ID NO: 2412780
aucauagucaagaaacugg

SEQ ID NO: 2412782 - RNA, 19 nt, Artificial Sequence
  Description of Artificial Sequence: Synthetic oligonucleotide
  Sense strand starting at position 2292 of SEQ ID NO: 1886478
guuucuugacuaugauaug

SEQ ID NO: 2412783 - RNA, 19 nt, Artificial Sequence
  Description of Artificial Sequence: Synthetic oligonucleotide
  Antisense strand to SEQ ID NO: 2412782
cauaucauagucaagaaac

SEQ ID NO: 2412784 - RNA, 19 nt, Artificial Sequence
  Description of Artificial Sequence: Synthetic oligonucleotide
  Sense strand starting at position 2298 of SEQ ID NO: 1886478
ugacuaugauaugccuacu

SEQ ID NO: 2412785 - RNA, 19 nt, Artificial Sequence
  Description of Artificial Sequence: Synthetic oligonucleotide
  Antisense strand to SEQ ID NO: 2412784
aguaggcauaucauaguca

SEQ ID NO: 2412786 - RNA, 19 nt, Artificial Sequence
  Description of Artificial Sequence: Synthetic oligonucleotide
  Sense strand starting at position 2469 of SEQ ID NO: 1886478
gccucucaucucuagaaug

SEQ ID NO: 2412787 - RNA, 19 nt, Artificial Sequence
  Description of Artificial Sequence: Synthetic oligonucleotide
  Antisense strand to SEQ ID NO: 2412786
cauucuagagaugagaggc

SEQ ID NO: 2412788 - RNA, 19 nt, Artificial Sequence
  Description of Artificial Sequence: Synthetic oligonucleotide
  Sense strand starting at position 2474 of SEQ ID NO: 1886478
ucaucucuagaaugaguca

SEQ ID NO: 2412789 - RNA, 19 nt, Artificial Sequence
  Description of Artificial Sequence: Synthetic oligonucleotide
  Antisense strand to SEQ ID NO: 2412788
ugacucauucuagagauga

SEQ ID NO: 2412790 - RNA, 19 nt, Artificial Sequence
  Description of Artificial Sequence: Synthetic oligonucleotide
  Sense strand starting at position 2563 of SEQ ID NO: 1886478
gggcauuugugcucuggag

SEQ ID NO: 2412791 - RNA, 19 nt, Artificial Sequence
  Description of Artificial Sequence: Synthetic oligonucleotide
  Antisense strand to SEQ ID NO: 2412790
cuccagagcacaaaugccc

SEQ ID NO: 2412792 - RNA, 19 nt, Artificial Sequence
  Description of Artificial Sequence: Synthetic oligonucleotide
  Sense strand starting at position 2565 of SEQ ID NO: 1886478
gcauuugugcucuggagau

SEQ ID NO: 2412793 - RNA, 19 nt, Artificial Sequence
  Description of Artificial Sequence: Synthetic oligonucleotide
  Antisense strand to SEQ ID NO: 2412792
aucuccagagcacaaaugc

SEQ ID NO: 2412794 - RNA, 19 nt, Artificial Sequence
  Description of Artificial Sequence: Synthetic oligonucleotide
  Sense strand starting at position 2678 of SEQ ID NO: 1886478
ugugcuuuccgguccugau

SEQ ID NO: 2412795 - RNA, 19 nt, Artificial Sequence
  Description of Artificial Sequence: Synthetic oligonucleotide
  Antisense strand to SEQ ID NO: 2412794
aucaggaccggaaagcaca

SEQ ID NO: 2412796 - RNA, 19 nt, Artificial Sequence
  Description of Artificial Sequence: Synthetic oligonucleotide
  Sense strand starting at position 3255 of SEQ ID NO: 1886478
ggcccugccacaugaugua

SEQ ID NO: 2412797 - RNA, 19 nt, Artificial Sequence
  Description of Artificial Sequence: Synthetic oligonucleotide
  Antisense strand to SEQ ID NO: 2412796
uacaucauguggcagggcc

SEQ ID NO: 2412798 - RNA, 19 nt, Artificial Sequence
  Description of Artificial Sequence: Synthetic oligonucleotide
  Sense strand starting at position 3296 of SEQ ID NO: 1886478
acaccaguguuucuaggaa

SEQ ID NO: 2412799 - RNA, 19 nt, Artificial Sequence
  Description of Artificial Sequence: Synthetic oligonucleotide
  Antisense strand to SEQ ID NO: 2412798
uuccuagaaacacuggugu

SEQ ID NO: 2412800 - RNA, 19 nt, Artificial Sequence
  Description of Artificial Sequence: Synthetic oligonucleotide
  Sense strand starting at position 3558 of SEQ ID NO: 1886478
acgcgagcgcuggagauau

SEQ ID NO: 2412801 - RNA, 19 nt, Artificial Sequence
  Description of Artificial Sequence: Synthetic oligonucleotide
  Antisense strand to SEQ ID NO: 2412800
auaucuccagcgcucgcgu

SEQ ID NO: 2412802 - RNA, 19 nt, Artificial Sequence
  Description of Artificial Sequence: Synthetic oligonucleotide
  Sense strand starting at position 269 of SEQ ID NO: 1886479
ccagcuccucagcaguaua

SEQ ID NO: 2412803 - RNA, 19 nt, Artificial Sequence
  Description of Artificial Sequence: Synthetic oligonucleotide
  Antisense strand to SEQ ID NO: 2412802
uauacugcugaggagcugg

SEQ ID NO: 2412804 - RNA, 19 nt, Artificial Sequence
  Description of Artificial Sequence: Synthetic oligonucleotide
  Sense strand starting at position 335 of SEQ ID NO: 1886479
ugggcugagugcuuuccau

SEQ ID NO: 2412805 - RNA, 19 nt, Artificial Sequence
  Description of Artificial Sequence: Synthetic oligonucleotide
  Antisense strand to SEQ ID NO: 2412804
auggaaagcacucagccca

SEQ ID NO: 2412806 - RNA, 19 nt, Artificial Sequence
  Description of Artificial Sequence: Synthetic oligonucleotide
  Sense strand starting at position 339 of SEQ ID NO: 1886479
cugagugcuuuccaugacu

SEQ ID NO: 2412807 - RNA, 19 nt, Artificial Sequence
  Description of Artificial Sequence: Synthetic oligonucleotide
  Antisense strand to SEQ ID NO: 2412806
agucauggaaagcacucag

SEQ ID NO: 2412808 - RNA, 19 nt, Artificial Sequence
  Description of Artificial Sequence: Synthetic oligonucleotide
  Sense strand starting at position 341 of SEQ ID NO: 1886479
gagugcuuuccaugacucu

SEQ ID NO: 2412809 - RNA, 19 nt, Artificial Sequence
  Description of Artificial Sequence: Synthetic oligonucleotide
  Antisense strand to SEQ ID NO: 2412808
agagucauggaaagcacuc

SEQ ID NO: 2412810 - RNA, 19 nt, Artificial Sequence
  Description of Artificial Sequence: Synthetic oligonucleotide
  Sense strand starting at position 981 of SEQ ID NO: 1886479
gccaaccuuucuugaguga

SEQ ID NO: 2412811 - RNA, 19 nt, Artificial Sequence
  Description of Artificial Sequence: Synthetic oligonucleotide
  Antisense strand to SEQ ID NO: 2412810
ucacucaagaaagguuggc

SEQ ID NO: 2412812 - RNA, 19 nt, Artificial Sequence
  Description of Artificial Sequence: Synthetic oligonucleotide
  Sense strand starting at position 982 of SEQ ID NO: 1886479
ccaaccuuucuugagugaa

SEQ ID NO: 2412813 - RNA, 19 nt, Artificial Sequence
  Description of Artificial Sequence: Synthetic oligonucleotide
  Antisense strand to SEQ ID NO: 2412812
uucacucaagaaagguugg

SEQ ID NO: 2412814 - RNA, 19 nt, Artificial Sequence
  Description of Artificial Sequence: Synthetic oligonucleotide
  Sense strand starting at position 985 of SEQ ID NO: 1886479
accuuucuugagugaacaa

SEQ ID NO: 2412815 - RNA, 19 nt, Artificial Sequence
  Description of Artificial Sequence: Synthetic oligonucleotide
  Antisense strand to SEQ ID NO: 2412814
uuguucacucaagaaaggu

SEQ ID NO: 2412816 - RNA, 19 nt, Artificial Sequence
  Description of Artificial Sequence: Synthetic oligonucleotide
  Sense strand starting at position 1803 of SEQ ID NO: 1886479
cuucuuguccugcagaagu

SEQ ID NO: 2412817 - RNA, 19 nt, Artificial Sequence
  Description of Artificial Sequence: Synthetic oligonucleotide
  Antisense strand to SEQ ID NO: 2412816
acuucugcaggacaagaag

SEQ ID NO: 2412818 - RNA, 19 nt, Artificial Sequence
  Description of Artificial Sequence: Synthetic oligonucleotide
  Sense strand starting at position 1833 of SEQ ID NO: 1886479
ugacguccuccuugaagga

SEQ ID NO: 2412819 - RNA, 19 nt, Artificial Sequence
  Description of Artificial Sequence: Synthetic oligonucleotide
  Antisense strand to SEQ ID NO: 2412818
uccuucaaggaggacguca

SEQ ID NO: 2412820 - RNA, 19 nt, Artificial Sequence
  Description of Artificial Sequence: Synthetic oligonucleotide
  Sense strand starting at position 2027 of SEQ ID NO: 1886479
aguggagcucaggaaaugu

SEQ ID NO: 2412821 - RNA, 19 nt, Artificial Sequence
  Description of Artificial Sequence: Synthetic oligonucleotide
  Antisense strand to SEQ ID NO: 2412820
acauuuccugagcuccacu

SEQ ID NO: 2412822 - RNA, 19 nt, Artificial Sequence
  Description of Artificial Sequence: Synthetic oligonucleotide
  Sense strand starting at position 2036 of SEQ ID NO: 1886479
caggaaaugugggaggauu

SEQ ID NO: 2412823 - RNA, 19 nt, Artificial Sequence
  Description of Artificial Sequence: Synthetic oligonucleotide
  Antisense strand to SEQ ID NO: 2412822
aauccucccacauuuccug

SEQ ID NO: 2412824 - RNA, 19 nt, Artificial Sequence
  Description of Artificial Sequence: Synthetic oligonucleotide
  Sense strand starting at position 2051 of SEQ ID NO: 1886479
gauugauagcagugugggu

SEQ ID NO: 2412825 - RNA, 19 nt, Artificial Sequence
  Description of Artificial Sequence: Synthetic oligonucleotide
  Antisense strand to SEQ ID NO: 2412824
acccacacugcuaucaauc

SEQ ID NO: 2412826 - RNA, 19 nt, Artificial Sequence
  Description of Artificial Sequence: Synthetic oligonucleotide
  Sense strand starting at position 2069 of SEQ ID NO: 1886479
uggauagacuuagagauau

SEQ ID NO: 2412827 - RNA, 19 nt, Artificial Sequence
  Description of Artificial Sequence: Synthetic oligonucleotide
  Antisense strand to SEQ ID NO: 2412826
auaucucuaagucuaucca

SEQ ID NO: 2412828 - RNA, 19 nt, Artificial Sequence
  Description of Artificial Sequence: Synthetic oligonucleotide
  Sense strand starting at position 2082 of SEQ ID NO: 1886479
agauauuguguccaggcca

SEQ ID NO: 2412829 - RNA, 19 nt, Artificial Sequence
  Description of Artificial Sequence: Synthetic oligonucleotide
  Antisense strand to SEQ ID NO: 2412828
uggccuggacacaauaucu

SEQ ID NO: 2412830 - RNA, 19 nt, Artificial Sequence
  Description of Artificial Sequence: Synthetic oligonucleotide
  Sense strand starting at position 2119 of SEQ ID NO: 1886479
gagcaucagccaggacaau

SEQ ID NO: 2412831 - RNA, 19 nt, Artificial Sequence
  Description of Artificial Sequence: Synthetic oligonucleotide
  Antisense strand to SEQ ID NO: 2412830
auuguccuggcugaugcuc

SEQ ID NO: 2412832 - RNA, 19 nt, Artificial Sequence
  Description of Artificial Sequence: Synthetic oligonucleotide
  Sense strand starting at position 2142 of SEQ ID NO: 1886479
ccuugaaccugacagcuua

SEQ ID NO: 2412833 - RNA, 19 nt, Artificial Sequence
  Description of Artificial Sequence: Synthetic oligonucleotide
  Antisense strand to SEQ ID NO: 2412832
uaagcugucagguucaagg

SEQ ID NO: 2412834 - RNA, 19 nt, Artificial Sequence
  Description of Artificial Sequence: Synthetic oligonucleotide
  Sense strand starting at position 2150 of SEQ ID NO: 1886479
cugacagcuuaauccugaa

SEQ ID NO: 2412835 - RNA, 19 nt, Artificial Sequence
  Description of Artificial Sequence: Synthetic oligonucleotide
  Antisense strand to SEQ ID NO: 2412834
uucaggauuaagcugucag

SEQ ID NO: 2412836 - RNA, 19 nt, Artificial Sequence
  Description of Artificial Sequence: Synthetic oligonucleotide
  Sense strand starting at position 2153 of SEQ ID NO: 1886479
acagcuuaauccugaagcu

SEQ ID NO: 2412837 - RNA, 19 nt, Artificial Sequence
  Description of Artificial Sequence: Synthetic oligonucleotide
  Antisense strand to SEQ ID NO: 2412836
agcuucaggauuaagcugu

SEQ ID NO: 2412838 - RNA, 19 nt, Artificial Sequence
  Description of Artificial Sequence: Synthetic oligonucleotide
  Sense strand starting at position 2170 of SEQ ID NO: 1886479
cuguguugccucugcagua

SEQ ID NO: 2412839 - RNA, 19 nt, Artificial Sequence
  Description of Artificial Sequence: Synthetic oligonucleotide
  Antisense strand to SEQ ID NO: 2412838
uacugcagaggcaacacag

SEQ ID NO: 2412840 - RNA, 19 nt, Artificial Sequence
  Description of Artificial Sequence: Synthetic oligonucleotide
  Sense strand starting at position 2171 of SEQ ID NO: 1886479
uguguugccucugcaguau

SEQ ID NO: 2412841 - RNA, 19 nt, Artificial Sequence
  Description of Artificial Sequence: Synthetic oligonucleotide
  Antisense strand to SEQ ID NO: 2412840
auacugcagaggcaacaca

SEQ ID NO: 2412842 - RNA, 19 nt, Artificial Sequence
  Description of Artificial Sequence: Synthetic oligonucleotide
  Sense strand starting at position 2179 of SEQ ID NO: 1886479
cucugcaguauucgguuaa

SEQ ID NO: 2412843 - RNA, 19 nt, Artificial Sequence
  Description of Artificial Sequence: Synthetic oligonucleotide
  Antisense strand to SEQ ID NO: 2412842
uuaaccgaauacugcagag

SEQ ID NO: 2412844 - RNA, 19 nt, Artificial Sequence
  Description of Artificial Sequence: Synthetic oligonucleotide
  Sense strand starting at position 2183 of SEQ ID NO: 1886479
gcaguauucgguuaagagu

SEQ ID NO: 2412845 - RNA, 19 nt, Artificial Sequence
  Description of Artificial Sequence: Synthetic oligonucleotide
  Antisense strand to SEQ ID NO: 2412844
acucuuaaccgaauacugc

SEQ ID NO: 2412846 - RNA, 19 nt, Artificial Sequence
  Description of Artificial Sequence: Synthetic oligonucleotide
  Sense strand starting at position 2198 of SEQ ID NO: 1886479
gaguucugcugccugaguu

SEQ ID NO: 2412847 - RNA, 19 nt, Artificial Sequence
  Description of Artificial Sequence: Synthetic oligonucleotide
  Antisense strand to SEQ ID NO: 2412846
aacucaggcagcagaacuc

SEQ ID NO: 2412848 - RNA, 19 nt, Artificial Sequence
  Description of Artificial Sequence: Synthetic oligonucleotide
  Sense strand starting at position 2399 of SEQ ID NO: 1886479
ggcgcacgccaguaaucuu

SEQ ID NO: 2412849 - RNA, 19 nt, Artificial Sequence
  Description of Artificial Sequence: Synthetic oligonucleotide
  Antisense strand to SEQ ID NO: 2412848
aagauuacuggcgugcgcc

SEQ ID NO: 2412850 - RNA, 19 nt, Artificial Sequence
  Description of Artificial Sequence: Synthetic oligonucleotide
  Sense strand starting at position 2465 of SEQ ID NO: 1886479
ggacauugccgugagcuga

SEQ ID NO: 2412851 - RNA, 19 nt, Artificial Sequence
  Description of Artificial Sequence: Synthetic oligonucleotide
  Antisense strand to SEQ ID NO: 2412850
ucagcucacggcaaugucc

SEQ ID NO: 2412852 - RNA, 19 nt, Artificial Sequence
  Description of Artificial Sequence: Synthetic oligonucleotide
  Sense strand starting at position 2564 of SEQ ID NO: 1886479
acaauaaaugacugugugu

SEQ ID NO: 2412853 - RNA, 19 nt, Artificial Sequence
  Description of Artificial Sequence: Synthetic oligonucleotide
  Antisense strand to SEQ ID NO: 2412852
acacacagucauuuauugu

SEQ ID NO: 2412854 - RNA, 19 nt, Artificial Sequence
  Description of Artificial Sequence: Synthetic oligonucleotide
  Sense strand starting at position 2569 of SEQ ID NO: 1886479
aaaugacuguguguccuua

SEQ ID NO: 2412855 - RNA, 19 nt, Artificial Sequence
  Description of Artificial Sequence: Synthetic oligonucleotide
  Antisense strand to SEQ ID NO: 2412854
uaaggacacacagucauuu

SEQ ID NO: 2412856 - RNA, 19 nt, Artificial Sequence
  Description of Artificial Sequence: Synthetic oligonucleotide
  Sense strand starting at position 2631 of SEQ ID NO: 1886479
ccaggacguuagugauucu

SEQ ID NO: 2412857 - RNA, 19 nt, Artificial Sequence
  Description of Artificial Sequence: Synthetic oligonucleotide
  Antisense strand to SEQ ID NO: 2412856
agaaucacuaacguccugg

SEQ ID NO: 2412858 - RNA, 19 nt, Artificial Sequence
  Description of Artificial Sequence: Synthetic oligonucleotide
  Sense strand starting at position 2638 of SEQ ID NO: 1886479
guuagugauucucccucua

SEQ ID NO: 2412859 - RNA, 19 nt, Artificial Sequence
  Description of Artificial Sequence: Synthetic oligonucleotide
  Antisense strand to SEQ ID NO: 2412858
uagagggagaaucacuaac

SEQ ID NO: 2412860 - RNA, 19 nt, Artificial Sequence
  Description of Artificial Sequence: Synthetic oligonucleotide
  Sense strand starting at position 2772 of SEQ ID NO: 1886479
gagagugggccagagguua

SEQ ID NO: 2412861 - RNA, 19 nt, Artificial Sequence
  Description of Artificial Sequence: Synthetic oligonucleotide
  Antisense strand to SEQ ID NO: 2412860
uaaccucuggcccacucuc

SEQ ID NO: 2412862 - RNA, 19 nt, Artificial Sequence
  Description of Artificial Sequence: Synthetic oligonucleotide
  Sense strand starting at position 2887 of SEQ ID NO: 1886479
caggguuaauuagagggaa

SEQ ID NO: 2412863 - RNA, 19 nt, Artificial Sequence
  Description of Artificial Sequence: Synthetic oligonucleotide
  Antisense strand to SEQ ID NO: 2412862
uucccucuaauuaacccug

SEQ ID NO: 2412864 - RNA, 19 nt, Artificial Sequence
  Description of Artificial Sequence: Synthetic oligonucleotide
  Sense strand starting at position 2994 of SEQ ID NO: 1886479
gggcuugaacucugccaga

SEQ ID NO: 2412865 - RNA, 19 nt, Artificial Sequence
  Description of Artificial Sequence: Synthetic oligonucleotide
  Antisense strand to SEQ ID NO: 2412864
ucuggcagaguucaagccc

SEQ ID NO: 2412866 - RNA, 19 nt, Artificial Sequence
  Description of Artificial Sequence: Synthetic oligonucleotide
  Sense strand starting at position 3073 of SEQ ID NO: 1886479
gugaguggucaucagagau

SEQ ID NO: 2412867 - RNA, 19 nt, Artificial Sequence
  Description of Artificial Sequence: Synthetic oligonucleotide
  Antisense strand to SEQ ID NO: 2412866
aucucugaugaccacucac

SEQ ID NO: 2412868 - RNA, 19 nt, Artificial Sequence
  Description of Artificial Sequence: Synthetic oligonucleotide
  Sense strand starting at position 3136 of SEQ ID NO: 1886479
ucggaaccuucccucuaaa

SEQ ID NO: 2412869 - RNA, 19 nt, Artificial Sequence
  Description of Artificial Sequence: Synthetic oligonucleotide
  Antisense strand to SEQ ID NO: 2412868
uuuagagggaagguuccga

SEQ ID NO: 2412870 - RNA, 19 nt, Artificial Sequence
  Description of Artificial Sequence: Synthetic oligonucleotide
  Sense strand starting at position 3147 of SEQ ID NO: 1886479
ccucuaaaucucugggucu

SEQ ID NO: 2412871 - RNA, 19 nt, Artificial Sequence
  Description of Artificial Sequence: Synthetic oligonucleotide
  Antisense strand to SEQ ID NO: 2412870
agacccagagauuuagagg

SEQ ID NO: 2412872 - RNA, 19 nt, Artificial Sequence
  Description of Artificial Sequence: Synthetic oligonucleotide
  Sense strand starting at position 3148 of SEQ ID NO: 1886479
cucuaaaucucugggucuu

SEQ ID NO: 2412873 - RNA, 19 nt, Artificial Sequence
  Description of Artificial Sequence: Synthetic oligonucleotide
  Antisense strand to SEQ ID NO: 2412872
aagacccagagauuuagag

SEQ ID NO: 2412874 - RNA, 19 nt, Artificial Sequence
  Description of Artificial Sequence: Synthetic oligonucleotide
  Sense strand starting at position 3200 of SEQ ID NO: 1886479
ugugucugucuuggacaca

SEQ ID NO: 2412875 - RNA, 19 nt, Artificial Sequence
  Description of Artificial Sequence: Synthetic oligonucleotide
  Antisense strand to SEQ ID NO: 2412874
uguguccaagacagacaca

SEQ ID NO: 2412876 - RNA, 19 nt, Artificial Sequence
  Description of Artificial Sequence: Synthetic oligonucleotide
  Sense strand starting at position 3201 of SEQ ID NO: 1886479
gugucugucuuggacacaa

SEQ ID NO: 2412877 - RNA, 19 nt, Artificial Sequence
  Description of Artificial Sequence: Synthetic oligonucleotide
  Antisense strand to SEQ ID NO: 2412876
uuguguccaagacagacac

SEQ ID NO: 2412878 - RNA, 19 nt, Artificial Sequence
  Description of Artificial Sequence: Synthetic oligonucleotide
  Sense strand starting at position 3229 of SEQ ID NO: 1886479
aggcuuucucccuaggugu

SEQ ID NO: 2412879 - RNA, 19 nt, Artificial Sequence
  Description of Artificial Sequence: Synthetic oligonucleotide
  Antisense strand to SEQ ID NO: 2412878
acaccuagggagaaagccu

SEQ ID NO: 2412880 - RNA, 19 nt, Artificial Sequence
  Description of Artificial Sequence: Synthetic oligonucleotide
  Sense strand starting at position 3684 of SEQ ID NO: 1886479
gcaggaacuucagagggaa

SEQ ID NO: 2412881 - RNA, 19 nt, Artificial Sequence
  Description of Artificial Sequence: Synthetic oligonucleotide
  Antisense strand to SEQ ID NO: 2412880
uucccucugaaguuccugc

SEQ ID NO: 2412882 - RNA, 19 nt, Artificial Sequence
  Description of Artificial Sequence: Synthetic oligonucleotide
  Sense strand starting at position 17 of SEQ ID NO: 1886480
aacgcaguuuggcgaauua

SEQ ID NO: 2412883 - RNA, 19 nt, Artificial Sequence
  Description of Artificial Sequence: Synthetic oligonucleotide
  Antisense strand to SEQ ID NO: 2412882
uaauucgccaaacugcguu

SEQ ID NO: 2412884 - RNA, 19 nt, Artificial Sequence
  Description of Artificial Sequence: Synthetic oligonucleotide
  Sense strand starting at position 27 of SEQ ID NO: 1886480
ggcgaauuauuuggacuga

SEQ ID NO: 2412885 - RNA, 19 nt, Artificial Sequence
  Description of Artificial Sequence: Synthetic oligonucleotide
  Antisense strand to SEQ ID NO: 2412884
ucaguccaaauaauucgcc

SEQ ID NO: 2412886 - RNA, 19 nt, Artificial Sequence
  Description of Artificial Sequence: Synthetic oligonucleotide
  Sense strand starting at position 28 of SEQ ID NO: 1886480
gcgaauuauuuggacugaa

SEQ ID NO: 2412887 - RNA, 19 nt, Artificial Sequence
  Description of Artificial Sequence: Synthetic oligonucleotide
  Antisense strand to SEQ ID NO: 2412886
uucaguccaaauaauucgc

SEQ ID NO: 2412888 - RNA, 19 nt, Artificial Sequence
  Description of Artificial Sequence: Synthetic oligonucleotide
  Sense strand starting at position 2002 of SEQ ID NO: 1886480
agauguuauucuuauuccu

SEQ ID NO: 2412889 - RNA, 19 nt, Artificial Sequence
  Description of Artificial Sequence: Synthetic oligonucleotide
  Antisense strand to SEQ ID NO: 2412888
aggaauaagaauaacaucu

SEQ ID NO: 2412890 - RNA, 19 nt, Artificial Sequence
  Description of Artificial Sequence: Synthetic oligonucleotide
  Sense strand starting at position 2062 of SEQ ID NO: 1886480
ucaguuuccucgugacaua

SEQ ID NO: 2412891 - RNA, 19 nt, Artificial Sequence
  Description of Artificial Sequence: Synthetic oligonucleotide
  Antisense strand to SEQ ID NO: 2412890
uaugucacgaggaaacuga

SEQ ID NO: 2412892 - RNA, 19 nt, Artificial Sequence
  Description of Artificial Sequence: Synthetic oligonucleotide
  Sense strand starting at position 2063 of SEQ ID NO: 1886480
caguuuccucgugacauac

SEQ ID NO: 2412893 - RNA, 19 nt, Artificial Sequence
  Description of Artificial Sequence: Synthetic oligonucleotide
  Antisense strand to SEQ ID NO: 2412892
guaugucacgaggaaacug

SEQ ID NO: 2412894 - RNA, 19 nt, Artificial Sequence
  Description of Artificial Sequence: Synthetic oligonucleotide
  Sense strand starting at position 2111 of SEQ ID NO: 1886480
cuggaaugaugagggaaca

SEQ ID NO: 2412895 - RNA, 19 nt, Artificial Sequence
  Description of Artificial Sequence: Synthetic oligonucleotide
  Antisense strand to SEQ ID NO: 2412894
uguucccucaucauuccag

SEQ ID NO: 2412896 - RNA, 19 nt, Artificial Sequence
  Description of Artificial Sequence: Synthetic oligonucleotide
  Sense strand starting at position 2162 of SEQ ID NO: 1886480
ccgcucuaagugugcaauu

SEQ ID NO: 2412897 - RNA, 19 nt, Artificial Sequence
  Description of Artificial Sequence: Synthetic oligonucleotide
  Antisense strand to SEQ ID NO: 2412896
aauugcacacuuagagcgg

SEQ ID NO: 2412898 - RNA, 19 nt, Artificial Sequence
  Description of Artificial Sequence: Synthetic oligonucleotide
  Sense strand starting at position 2163 of SEQ ID NO: 1886480
cgcucuaagugugcaauua

SEQ ID NO: 2412899 - RNA, 19 nt, Artificial Sequence
  Description of Artificial Sequence: Synthetic oligonucleotide
  Antisense strand to SEQ ID NO: 2412898
uaauugcacacuuagagcg

SEQ ID NO: 2412900 - RNA, 19 nt, Artificial Sequence
  Description of Artificial Sequence: Synthetic oligonucleotide
  Sense strand starting at position 2164 of SEQ ID NO: 1886480
gcucuaagugugcaauuaa

SEQ ID NO: 2412901 - RNA, 19 nt, Artificial Sequence
  Description of Artificial Sequence: Synthetic oligonucleotide
  Antisense strand to SEQ ID NO: 2412900
uuaauugcacacuuagagc

SEQ ID NO: 2412902 - RNA, 19 nt, Artificial Sequence
  Description of Artificial Sequence: Synthetic oligonucleotide
  Sense strand starting at position 2323 of SEQ ID NO: 1886480
uccucugagcugugacagu

SEQ ID NO: 2412903 - RNA, 19 nt, Artificial Sequence
  Description of Artificial Sequence: Synthetic oligonucleotide
  Antisense strand to SEQ ID NO: 2412902
acugucacagcucagagga

SEQ ID NO: 2412904 - RNA, 19 nt, Artificial Sequence
  Description of Artificial Sequence: Synthetic oligonucleotide
  Sense strand starting at position 2334 of SEQ ID NO: 1886480
gugacaguuucuuagaauc

SEQ ID NO: 2412905 - RNA, 19 nt, Artificial Sequence
  Description of Artificial Sequence: Synthetic oligonucleotide
  Antisense strand to SEQ ID NO: 2412904
gauucuaagaaacugucac

SEQ ID NO: 2412906 - RNA, 19 nt, Artificial Sequence
  Description of Artificial Sequence: Synthetic oligonucleotide
  Sense strand starting at position 2382 of SEQ ID NO: 1886480
gaguacuggccagguacuu

SEQ ID NO: 2412907 - RNA, 19 nt, Artificial Sequence
  Description of Artificial Sequence: Synthetic oligonucleotide
  Antisense strand to SEQ ID NO: 2412906
aaguaccuggccaguacuc

SEQ ID NO: 2412908 - RNA, 19 nt, Artificial Sequence
  Description of Artificial Sequence: Synthetic oligonucleotide
  Sense strand starting at position 2506 of SEQ ID NO: 1886480
acguccuaugaagggaaua

SEQ ID NO: 2412909 - RNA, 19 nt, Artificial Sequence
  Description of Artificial Sequence: Synthetic oligonucleotide
  Antisense strand to SEQ ID NO: 2412908
uauucccuucauaggacgu

SEQ ID NO: 2412910 - RNA, 19 nt, Artificial Sequence
  Description of Artificial Sequence: Synthetic oligonucleotide
  Sense strand starting at position 2507 of SEQ ID NO: 1886480
cguccuaugaagggaauau

SEQ ID NO: 2412911 - RNA, 19 nt, Artificial Sequence
  Description of Artificial Sequence: Synthetic oligonucleotide
  Antisense strand to SEQ ID NO: 2412910
auauucccuucauaggacg

SEQ ID NO: 2412912 - RNA, 19 nt, Artificial Sequence
  Description of Artificial Sequence: Synthetic oligonucleotide
  Sense strand starting at position 2517 of SEQ ID NO: 1886480
agggaauauucugucuaac

SEQ ID NO: 2412913 - RNA, 19 nt, Artificial Sequence
  Description of Artificial Sequence: Synthetic oligonucleotide
  Antisense strand to SEQ ID NO: 2412912
guuagacagaauauucccu

SEQ ID NO: 2412914 - RNA, 19 nt, Artificial Sequence
  Description of Artificial Sequence: Synthetic oligonucleotide
  Sense strand starting at position 2519 of SEQ ID NO: 1886480
ggaauauucugucuaacug

SEQ ID NO: 2412915 - RNA, 19 nt, Artificial Sequence
  Description of Artificial Sequence: Synthetic oligonucleotide
  Antisense strand to SEQ ID NO: 2412914
caguuagacagaauauucc

SEQ ID NO: 2412916 - RNA, 19 nt, Artificial Sequence
  Description of Artificial Sequence: Synthetic oligonucleotide
  Sense strand starting at position 2577 of SEQ ID NO: 1886480
ggcugagugugucugguuu

SEQ ID NO: 2412917 - RNA, 19 nt, Artificial Sequence
  Description of Artificial Sequence: Synthetic oligonucleotide
  Antisense strand to SEQ ID NO: 2412916
aaaccagacacacucagcc

SEQ ID NO: 2412918 - RNA, 19 nt, Artificial Sequence
  Description of Artificial Sequence: Synthetic oligonucleotide
  Sense strand starting at position 2719 of SEQ ID NO: 1886480
agacauuauuugggccuau

SEQ ID NO: 2412919 - RNA, 19 nt, Artificial Sequence
  Description of Artificial Sequence: Synthetic oligonucleotide
  Antisense strand to SEQ ID NO: 2412918
auaggcccaaauaaugucu

SEQ ID NO: 2412920 - RNA, 19 nt, Artificial Sequence
  Description of Artificial Sequence: Synthetic oligonucleotide
  Sense strand starting at position 2781 of SEQ ID NO: 1886480
uuguaauucuuaggaacug

SEQ ID NO: 2412921 - RNA, 19 nt, Artificial Sequence
  Description of Artificial Sequence: Synthetic oligonucleotide
  Antisense strand to SEQ ID NO: 2412920
caguuccuaagaauuacaa

SEQ ID NO: 2412922 - RNA, 19 nt, Artificial Sequence
  Description of Artificial Sequence: Synthetic oligonucleotide
  Sense strand starting at position 2996 of SEQ ID NO: 1886480
ggugacucaccauguuaug

SEQ ID NO: 2412923 - RNA, 19 nt, Artificial Sequence
  Description of Artificial Sequence: Synthetic oligonucleotide
  Antisense strand to SEQ ID NO: 2412922
cauaacauggugagucacc

SEQ ID NO: 2412924 - RNA, 19 nt, Artificial Sequence
  Description of Artificial Sequence: Synthetic oligonucleotide
  Sense strand starting at position 3118 of SEQ ID NO: 1886480
cccuaagaauguucugaac

SEQ ID NO: 2412925 - RNA, 19 nt, Artificial Sequence
  Description of Artificial Sequence: Synthetic oligonucleotide
  Antisense strand to SEQ ID NO: 2412924
guucagaacauucuuaggg

SEQ ID NO: 2412926 - RNA, 19 nt, Artificial Sequence
  Description of Artificial Sequence: Synthetic oligonucleotide
  Sense strand starting at position 3120 of SEQ ID NO: 1886480
cuaagaauguucugaacac

SEQ ID NO: 2412927 - RNA, 19 nt, Artificial Sequence
  Description of Artificial Sequence: Synthetic oligonucleotide
  Antisense strand to SEQ ID NO: 2412926
guguucagaacauucuuag

SEQ ID NO: 2412928 - RNA, 19 nt, Artificial Sequence
  Description of Artificial Sequence: Synthetic oligonucleotide
  Sense strand starting at position 3189 of SEQ ID NO: 1886480
cuggguucccuugaugaac

SEQ ID NO: 2412929 - RNA, 19 nt, Artificial Sequence
  Description of Artificial Sequence: Synthetic oligonucleotide
  Antisense strand to SEQ ID NO: 2412928
guucaucaagggaacccag

SEQ ID NO: 2412930 - RNA, 19 nt, Artificial Sequence
  Description of Artificial Sequence: Synthetic oligonucleotide
  Sense strand starting at position 3255 of SEQ ID NO: 1886480
guucuagguucagagcaga

SEQ ID NO: 2412931 - RNA, 19 nt, Artificial Sequence
  Description of Artificial Sequence: Synthetic oligonucleotide
  Antisense strand to SEQ ID NO: 2412930
ucugcucugaaccuagaac

SEQ ID NO: 2412932 - RNA, 19 nt, Artificial Sequence
  Description of Artificial Sequence: Synthetic oligonucleotide
  Sense strand starting at position 3441 of SEQ ID NO: 1886480
aaggaauccugguggagag

SEQ ID NO: 2412933 - RNA, 19 nt, Artificial Sequence
  Description of Artificial Sequence: Synthetic oligonucleotide
  Antisense strand to SEQ ID NO: 2412932
cucuccaccaggauuccuu

SEQ ID NO: 2412934 - RNA, 19 nt, Artificial Sequence
  Description of Artificial Sequence: Synthetic oligonucleotide
  Sense strand starting at position 3588 of SEQ ID NO: 1886480
cccacaagcuggucucauu

SEQ ID NO: 2412935 - RNA, 19 nt, Artificial Sequence
  Description of Artificial Sequence: Synthetic oligonucleotide
  Antisense strand to SEQ ID NO: 2412934
aaugagaccagcuuguggg

SEQ ID NO: 2412936 - RNA, 19 nt, Artificial Sequence
  Description of Artificial Sequence: Synthetic oligonucleotide
  Sense strand starting at position 3598 of SEQ ID NO: 1886480
ggucucauugguggacaca

SEQ ID NO: 2412937 - RNA, 19 nt, Artificial Sequence
  Description of Artificial Sequence: Synthetic oligonucleotide
  Antisense strand to SEQ ID NO: 2412936
uguguccaccaaugagacc

SEQ ID NO: 2412938 - RNA, 19 nt, Artificial Sequence
  Description of Artificial Sequence: Synthetic oligonucleotide
  Sense strand starting at position 3635 of SEQ ID NO: 1886480
gaccgugcgguguaacaaa

SEQ ID NO: 2412939 - RNA, 19 nt, Artificial Sequence
  Description of Artificial Sequence: Synthetic oligonucleotide
  Antisense strand to SEQ ID NO: 2412938
uuuguuacaccgcacgguc

SEQ ID NO: 2412940 - RNA, 19 nt, Artificial Sequence
  Description of Artificial Sequence: Synthetic oligonucleotide
  Sense strand starting at position 3642 of SEQ ID NO: 1886480
cgguguaacaaauguagca

SEQ ID NO: 2412941 - RNA, 19 nt, Artificial Sequence
  Description of Artificial Sequence: Synthetic oligonucleotide
  Antisense strand to SEQ ID NO: 2412940
ugcuacauuuguuacaccg

SEQ ID NO: 2412942 - RNA, 19 nt, Artificial Sequence
  Description of Artificial Sequence: Synthetic oligonucleotide
  Sense strand starting at position 3658 of SEQ ID NO: 1886480
gcacguauacccuguggga

SEQ ID NO: 2412943 - RNA, 19 nt, Artificial Sequence
  Description of Artificial Sequence: Synthetic oligonucleotide
  Antisense strand to SEQ ID NO: 2412942
ucccacaggguauacgugc

SEQ ID NO: 2412944 - RNA, 19 nt, Artificial Sequence
  Description of Artificial Sequence: Synthetic oligonucleotide
  Sense strand starting at position 3660 of SEQ ID NO: 1886480
acguauacccugugggaua

SEQ ID NO: 2412945 - RNA, 19 nt, Artificial Sequence
  Description of Artificial Sequence: Synthetic oligonucleotide
  Antisense strand to SEQ ID NO: 2412944
uaucccacaggguauacgu

SEQ ID NO: 2412946 - RNA, 19 nt, Artificial Sequence
  Description of Artificial Sequence: Synthetic oligonucleotide
  Sense strand starting at position 3661 of SEQ ID NO: 1886480
cguauacccugugggauau

SEQ ID NO: 2412947 - RNA, 19 nt, Artificial Sequence
  Description of Artificial Sequence: Synthetic oligonucleotide
  Antisense strand to SEQ ID NO: 2412946
auaucccacaggguauacg

SEQ ID NO: 2412948 - RNA, 19 nt, Artificial Sequence
  Description of Artificial Sequence: Synthetic oligonucleotide
  Sense strand starting at position 3662 of SEQ ID NO: 1886480
guauacccugugggauauu

SEQ ID NO: 2412949 - RNA, 19 nt, Artificial Sequence
  Description of Artificial Sequence: Synthetic oligonucleotide
  Antisense strand to SEQ ID NO: 2412948
aauaucccacaggguauac

SEQ ID NO: 2412950 - RNA, 19 nt, Artificial Sequence
  Description of Artificial Sequence: Synthetic oligonucleotide
  Sense strand starting at position 3672 of SEQ ID NO: 1886480
ugggauauuuguuacaaug

SEQ ID NO: 2412951 - RNA, 19 nt, Artificial Sequence
  Description of Artificial Sequence: Synthetic oligonucleotide
  Antisense strand to SEQ ID NO: 2412950
cauuguaacaaauauccca

SEQ ID NO: 2412952 - RNA, 19 nt, Artificial Sequence
  Description of Artificial Sequence: Synthetic oligonucleotide
  Sense strand starting at position 3674 of SEQ ID NO: 1886480
ggauauuuguuacaaugga

SEQ ID NO: 2412953 - RNA, 19 nt, Artificial Sequence
  Description of Artificial Sequence: Synthetic oligonucleotide
  Antisense strand to SEQ ID NO: 2412952
uccauuguaacaaauaucc

SEQ ID NO: 2412954 - RNA, 19 nt, Artificial Sequence
  Description of Artificial Sequence: Synthetic oligonucleotide
  Sense strand starting at position 3764 of SEQ ID NO: 1886480
cgcucuggguguuuagaca

SEQ ID NO: 2412955 - RNA, 19 nt, Artificial Sequence
  Description of Artificial Sequence: Synthetic oligonucleotide
  Antisense strand to SEQ ID NO: 2412954
ugucuaaacacccagagcg

SEQ ID NO: 2412956 - RNA, 19 nt, Artificial Sequence
  Description of Artificial Sequence: Synthetic oligonucleotide
  Sense strand starting at position 3786 of SEQ ID NO: 1886480
gucuaauguccuggagcca

SEQ ID NO: 2412957 - RNA, 19 nt, Artificial Sequence
  Description of Artificial Sequence: Synthetic oligonucleotide
  Antisense strand to SEQ ID NO: 2412956
uggcuccaggacauuagac

SEQ ID NO: 2412958 - RNA, 19 nt, Artificial Sequence
  Description of Artificial Sequence: Synthetic oligonucleotide
  Sense strand starting at position 3797 of SEQ ID NO: 1886480
uggagccaccaauguaaua

SEQ ID NO: 2412959 - RNA, 19 nt, Artificial Sequence
  Description of Artificial Sequence: Synthetic oligonucleotide
  Antisense strand to SEQ ID NO: 2412958
uauuacauugguggcucca

SEQ ID NO: 2412960 - RNA, 19 nt, Artificial Sequence
  Description of Artificial Sequence: Synthetic oligonucleotide
  Sense strand starting at position 3980 of SEQ ID NO: 1886480
gggcuccucucacuuacua

SEQ ID NO: 2412961 - RNA, 19 nt, Artificial Sequence
  Description of Artificial Sequence: Synthetic oligonucleotide
  Antisense strand to SEQ ID NO: 2412960
uaguaagugagaggagccc

SEQ ID NO: 2412962 - RNA, 19 nt, Artificial Sequence
  Description of Artificial Sequence: Synthetic oligonucleotide
  Sense strand starting at position 291 of SEQ ID NO: 1886481
cuuagaccuaucuguggga

SEQ ID NO: 2412963 - RNA, 19 nt, Artificial Sequence
  Description of Artificial Sequence: Synthetic oligonucleotide
  Antisense strand to SEQ ID NO: 2412962
ucccacagauaggucuaag

SEQ ID NO: 2412964 - RNA, 19 nt, Artificial Sequence
  Description of Artificial Sequence: Synthetic oligonucleotide
  Sense strand starting at position 295 of SEQ ID NO: 1886481
gaccuaucugugggaugau

SEQ ID NO: 2412965 - RNA, 19 nt, Artificial Sequence
  Description of Artificial Sequence: Synthetic oligonucleotide
  Antisense strand to SEQ ID NO: 2412964
aucaucccacagauagguc

SEQ ID NO: 2412966 - RNA, 19 nt, Artificial Sequence
  Description of Artificial Sequence: Synthetic oligonucleotide
  Sense strand starting at position 298 of SEQ ID NO: 1886481
cuaucugugggaugauuga

SEQ ID NO: 2412967 - RNA, 19 nt, Artificial Sequence
  Description of Artificial Sequence: Synthetic oligonucleotide
  Antisense strand to SEQ ID NO: 2412966
ucaaucaucccacagauag

SEQ ID NO: 2412968 - RNA, 19 nt, Artificial Sequence
  Description of Artificial Sequence: Synthetic oligonucleotide
  Sense strand starting at position 309 of SEQ ID NO: 1886481
augauugauucugagaaga

SEQ ID NO: 2412969 - RNA, 19 nt, Artificial Sequence
  Description of Artificial Sequence: Synthetic oligonucleotide
  Antisense strand to SEQ ID NO: 2412968
ucuucucagaaucaaucau

SEQ ID NO: 2412970 - RNA, 19 nt, Artificial Sequence
  Description of Artificial Sequence: Synthetic oligonucleotide
  Sense strand starting at position 311 of SEQ ID NO: 1886481
gauugauucugagaagaag

SEQ ID NO: 2412971 - RNA, 19 nt, Artificial Sequence
  Description of Artificial Sequence: Synthetic oligonucleotide
  Antisense strand to SEQ ID NO: 2412970
cuucuucucagaaucaauc

SEQ ID NO: 2412972 - RNA, 19 nt, Artificial Sequence
  Description of Artificial Sequence: Synthetic oligonucleotide
  Sense strand starting at position 435 of SEQ ID NO: 1886481
aggagagagucagaagaau

SEQ ID NO: 2412973 - RNA, 19 nt, Artificial Sequence
  Description of Artificial Sequence: Synthetic oligonucleotide
  Antisense strand to SEQ ID NO: 2412972
auucuucugacucucuccu

SEQ ID NO: 2412974 - RNA, 19 nt, Artificial Sequence
  Description of Artificial Sequence: Synthetic oligonucleotide
  Sense strand starting at position 581 of SEQ ID NO: 1886481
aggccauauugugauuuaa

SEQ ID NO: 2412975 - RNA, 19 nt, Artificial Sequence
  Description of Artificial Sequence: Synthetic oligonucleotide
  Antisense strand to SEQ ID NO: 2412974
uuaaaucacaauauggccu

SEQ ID NO: 2412976 - RNA, 19 nt, Artificial Sequence
  Description of Artificial Sequence: Synthetic oligonucleotide
  Sense strand starting at position 665 of SEQ ID NO: 1886481
ggaaauaaguucuccuuag

SEQ ID NO: 2412977 - RNA, 19 nt, Artificial Sequence
  Description of Artificial Sequence: Synthetic oligonucleotide
  Antisense strand to SEQ ID NO: 2412976
cuaaggagaacuuauuucc

SEQ ID NO: 2412978 - RNA, 19 nt, Artificial Sequence
  Description of Artificial Sequence: Synthetic oligonucleotide
  Sense strand starting at position 713 of SEQ ID NO: 1886481
aggcacagaugaguuauua

SEQ ID NO: 2412979 - RNA, 19 nt, Artificial Sequence
  Description of Artificial Sequence: Synthetic oligonucleotide
  Antisense strand to SEQ ID NO: 2412978
uaauaacucaucugugccu

SEQ ID NO: 2412980 - RNA, 19 nt, Artificial Sequence
  Description of Artificial Sequence: Synthetic oligonucleotide
  Sense strand starting at position 722 of SEQ ID NO: 1886481
ugaguuauuaaaggcagau

SEQ ID NO: 2412981 - RNA, 19 nt, Artificial Sequence
  Description of Artificial Sequence: Synthetic oligonucleotide
  Antisense strand to SEQ ID NO: 2412980
aucugccuuuaauaacuca

SEQ ID NO: 2412982 - RNA, 19 nt, Artificial Sequence
  Description of Artificial Sequence: Synthetic oligonucleotide
  Sense strand starting at position 803 of SEQ ID NO: 1886481
uuccaaauacuguaguaau

SEQ ID NO: 2412983 - RNA, 19 nt, Artificial Sequence
  Description of Artificial Sequence: Synthetic oligonucleotide
  Antisense strand to SEQ ID NO: 2412982
auuacuacaguauuuggaa

SEQ ID NO: 2412984 - RNA, 19 nt, Artificial Sequence
  Description of Artificial Sequence: Synthetic oligonucleotide
  Sense strand starting at position 1435 of SEQ ID NO: 1886481
gaggauuugugacagcuua

SEQ ID NO: 2412985 - RNA, 19 nt, Artificial Sequence
  Description of Artificial Sequence: Synthetic oligonucleotide
  Antisense strand to SEQ ID NO: 2412984
uaagcugucacaaauccuc

SEQ ID NO: 2412986 - RNA, 19 nt, Artificial Sequence
  Description of Artificial Sequence: Synthetic oligonucleotide
  Sense strand starting at position 1481 of SEQ ID NO: 1886481
gcuaauggcaggugacuaa

SEQ ID NO: 2412987 - RNA, 19 nt, Artificial Sequence
  Description of Artificial Sequence: Synthetic oligonucleotide
  Antisense strand to SEQ ID NO: 2412986
uuagucaccugccauuagc

SEQ ID NO: 2412988 - RNA, 19 nt, Artificial Sequence
  Description of Artificial Sequence: Synthetic oligonucleotide
  Sense strand starting at position 1684 of SEQ ID NO: 1886481
ugcacuccgcauguguaaa

SEQ ID NO: 2412989 - RNA, 19 nt, Artificial Sequence
  Description of Artificial Sequence: Synthetic oligonucleotide
  Antisense strand to SEQ ID NO: 2412988
uuuacacaugcggagugca

SEQ ID NO: 2412990 - RNA, 19 nt, Artificial Sequence
  Description of Artificial Sequence: Synthetic oligonucleotide
  Sense strand starting at position 1847 of SEQ ID NO: 1886481
gaaguauuaccauggcaac

SEQ ID NO: 2412991 - RNA, 19 nt, Artificial Sequence
  Description of Artificial Sequence: Synthetic oligonucleotide
  Antisense strand to SEQ ID NO: 2412990
guugccaugguaauacuuc

SEQ ID NO: 2412992 - RNA, 19 nt, Artificial Sequence
  Description of Artificial Sequence: Synthetic oligonucleotide
  Sense strand starting at position 1890 of SEQ ID NO: 1886481
aaaugaaccuuuguugguu

SEQ ID NO: 2412993 - RNA, 19 nt, Artificial Sequence
  Description of Artificial Sequence: Synthetic oligonucleotide
  Antisense strand to SEQ ID NO: 2412992
aaccaacaaagguucauuu

SEQ ID NO: 2412994 - RNA, 19 nt, Artificial Sequence
  Description of Artificial Sequence: Synthetic oligonucleotide
  Sense strand starting at position 1935 of SEQ ID NO: 1886481
gggcuucucccuuggagaa

SEQ ID NO: 2412995 - RNA, 19 nt, Artificial Sequence
  Description of Artificial Sequence: Synthetic oligonucleotide
  Antisense strand to SEQ ID NO: 2412994
uucuccaagggagaagccc

SEQ ID NO: 2412996 - RNA, 19 nt, Artificial Sequence
  Description of Artificial Sequence: Synthetic oligonucleotide
  Sense strand starting at position 1936 of SEQ ID NO: 1886481
ggcuucucccuuggagaag

SEQ ID NO: 2412997 - RNA, 19 nt, Artificial Sequence
  Description of Artificial Sequence: Synthetic oligonucleotide
  Antisense strand to SEQ ID NO: 2412996
cuucuccaagggagaagcc

SEQ ID NO: 2412998 - RNA, 19 nt, Artificial Sequence
  Description of Artificial Sequence: Synthetic oligonucleotide
  Sense strand starting at position 2164 of SEQ ID NO: 1886481
uuuguugaucugcgagaaa

SEQ ID NO: 2412999 - RNA, 19 nt, Artificial Sequence
  Description of Artificial Sequence: Synthetic oligonucleotide
  Antisense strand to SEQ ID NO: 2412998
uuucucgcagaucaacaaa

SEQ ID NO: 2413000 - RNA, 19 nt, Artificial Sequence
  Description of Artificial Sequence: Synthetic oligonucleotide
  Sense strand starting at position 2167 of SEQ ID NO: 1886481
guugaucugcgagaaauca

SEQ ID NO: 2413001 - RNA, 19 nt, Artificial Sequence
  Description of Artificial Sequence: Synthetic oligonucleotide
  Antisense strand to SEQ ID NO: 2413000
ugauuucucgcagaucaac

SEQ ID NO: 2413002 - RNA, 19 nt, Artificial Sequence
  Description of Artificial Sequence: Synthetic oligonucleotide
  Sense strand starting at position 2361 of SEQ ID NO: 1886481
cggaaccgucuucaggaaa

SEQ ID NO: 2413003 - RNA, 19 nt, Artificial Sequence
  Description of Artificial Sequence: Synthetic oligonucleotide
  Antisense strand to SEQ ID NO: 2413002
uuuccugaagacgguuccg

SEQ ID NO: 2413004 - RNA, 19 nt, Artificial Sequence
  Description of Artificial Sequence: Synthetic oligonucleotide
  Sense strand starting at position 3059 of SEQ ID NO: 1886481
agagcuuugcaagaaguga

SEQ ID NO: 2413005 - RNA, 19 nt, Artificial Sequence
  Description of Artificial Sequence: Synthetic oligonucleotide
  Antisense strand to SEQ ID NO: 2413004
ucacuucuugcaaagcucu

SEQ ID NO: 2413006 - RNA, 19 nt, Artificial Sequence
  Description of Artificial Sequence: Synthetic oligonucleotide
  Sense strand starting at position 3070 of SEQ ID NO: 1886481
agaagugaucaugggcuau

SEQ ID NO: 2413007 - RNA, 19 nt, Artificial Sequence
  Description of Artificial Sequence: Synthetic oligonucleotide
  Antisense strand to SEQ ID NO: 2413006
auagcccaugaucacuucu

SEQ ID NO: 2413008 - RNA, 19 nt, Artificial Sequence
  Description of Artificial Sequence: Synthetic oligonucleotide
  Sense strand starting at position 3153 of SEQ ID NO: 1886481
gaggguaaucacugggcua

SEQ ID NO: 2413009 - RNA, 19 nt, Artificial Sequence
  Description of Artificial Sequence: Synthetic oligonucleotide
  Antisense strand to SEQ ID NO: 2413008
uagcccagugauuacccuc

SEQ ID NO: 2413010 - RNA, 19 nt, Artificial Sequence
  Description of Artificial Sequence: Synthetic oligonucleotide
  Sense strand starting at position 3154 of SEQ ID NO: 1886481
aggguaaucacugggcuac

SEQ ID NO: 2413011 - RNA, 19 nt, Artificial Sequence
  Description of Artificial Sequence: Synthetic oligonucleotide
  Antisense strand to SEQ ID NO: 2413010
guagcccagugauuacccu

SEQ ID NO: 2413012 - RNA, 19 nt, Artificial Sequence
  Description of Artificial Sequence: Synthetic oligonucleotide
  Sense strand starting at position 3402 of SEQ ID NO: 1886481
cagcuuuguggaggugaau

SEQ ID NO: 2413013 - RNA, 19 nt, Artificial Sequence
  Description of Artificial Sequence: Synthetic oligonucleotide
  Antisense strand to SEQ ID NO: 2413012
auucaccuccacaaagcug

SEQ ID NO: 2413014 - RNA, 19 nt, Artificial Sequence
  Description of Artificial Sequence: Synthetic oligonucleotide
  Sense strand starting at position 3411 of SEQ ID NO: 1886481
ggaggugaauuucaaggua

SEQ ID NO: 2413015 - RNA, 19 nt, Artificial Sequence
  Description of Artificial Sequence: Synthetic oligonucleotide
  Antisense strand to SEQ ID NO: 2413014
uaccuugaaauucaccucc

SEQ ID NO: 2413016 - RNA, 19 nt, Artificial Sequence
  Description of Artificial Sequence: Synthetic oligonucleotide
  Sense strand starting at position 3482 of SEQ ID NO: 1886481
uccagcuuuguggagauga

SEQ ID NO: 2413017 - RNA, 19 nt, Artificial Sequence
  Description of Artificial Sequence: Synthetic oligonucleotide
  Antisense strand to SEQ ID NO: 2413016
ucaucuccacaaagcugga

SEQ ID NO: 2413018 - RNA, 19 nt, Artificial Sequence
  Description of Artificial Sequence: Synthetic oligonucleotide
  Sense strand starting at position 3484 of SEQ ID NO: 1886481
cagcuuuguggagaugaau

SEQ ID NO: 2413019 - RNA, 19 nt, Artificial Sequence
  Description of Artificial Sequence: Synthetic oligonucleotide
  Antisense strand to SEQ ID NO: 2413018
auucaucuccacaaagcug

SEQ ID NO: 2413020 - RNA, 19 nt, Artificial Sequence
  Description of Artificial Sequence: Synthetic oligonucleotide
  Sense strand starting at position 3612 of SEQ ID NO: 1886481
uggugcucaucuguugaaa

SEQ ID NO: 2413021 - RNA, 19 nt, Artificial Sequence
  Description of Artificial Sequence: Synthetic oligonucleotide
  Antisense strand to SEQ ID NO: 2413020
uuucaacagaugagcacca

SEQ ID NO: 2413022 - RNA, 19 nt, Artificial Sequence
  Description of Artificial Sequence: Synthetic oligonucleotide
  Sense strand starting at position 3615 of SEQ ID NO: 1886481
ugcucaucuguugaaacuu

SEQ ID NO: 2413023 - RNA, 19 nt, Artificial Sequence
  Description of Artificial Sequence: Synthetic oligonucleotide
  Antisense strand to SEQ ID NO: 2413022
aaguuucaacagaugagca

SEQ ID NO: 2413024 - RNA, 19 nt, Artificial Sequence
  Description of Artificial Sequence: Synthetic oligonucleotide
  Sense strand starting at position 3709 of SEQ ID NO: 1886481
cuguguccucagggagagu

SEQ ID NO: 2413025 - RNA, 19 nt, Artificial Sequence
  Description of Artificial Sequence: Synthetic oligonucleotide
  Antisense strand to SEQ ID NO: 2413024
acucucccugaggacacag

SEQ ID NO: 2413026 - RNA, 19 nt, Artificial Sequence
  Description of Artificial Sequence: Synthetic oligonucleotide
  Sense strand starting at position 3710 of SEQ ID NO: 1886481
uguguccucagggagaguu

SEQ ID NO: 2413027 - RNA, 19 nt, Artificial Sequence
  Description of Artificial Sequence: Synthetic oligonucleotide
  Antisense strand to SEQ ID NO: 2413026
aacucucccugaggacaca

SEQ ID NO: 2413028 - RNA, 19 nt, Artificial Sequence
  Description of Artificial Sequence: Synthetic oligonucleotide
  Sense strand starting at position 3718 of SEQ ID NO: 1886481
cagggagaguuccuuugau

SEQ ID NO: 2413029 - RNA, 19 nt, Artificial Sequence
  Description of Artificial Sequence: Synthetic oligonucleotide
  Antisense strand to SEQ ID NO: 2413028
aucaaaggaacucucccug

SEQ ID NO: 2413030 - RNA, 19 nt, Artificial Sequence
  Description of Artificial Sequence: Synthetic oligonucleotide
  Sense strand starting at position 3730 of SEQ ID NO: 1886481
cuuugauuccuggguggua

SEQ ID NO: 2413031 - RNA, 19 nt, Artificial Sequence
  Description of Artificial Sequence: Synthetic oligonucleotide
  Antisense strand to SEQ ID NO: 2413030
uaccacccaggaaucaaag

SEQ ID NO: 2413032 - RNA, 19 nt, Artificial Sequence
  Description of Artificial Sequence: Synthetic oligonucleotide
  Sense strand starting at position 3783 of SEQ ID NO: 1886481
cgcguuaaucuccaugaau

SEQ ID NO: 2413033 - RNA, 19 nt, Artificial Sequence
  Description of Artificial Sequence: Synthetic oligonucleotide
  Antisense strand to SEQ ID NO: 2413032
auucauggagauuaacgcg

SEQ ID NO: 2413034 - RNA, 19 nt, Artificial Sequence
  Description of Artificial Sequence: Synthetic oligonucleotide
  Sense strand starting at position 3785 of SEQ ID NO: 1886481
cguuaaucuccaugaauau

SEQ ID NO: 2413035 - RNA, 19 nt, Artificial Sequence
  Description of Artificial Sequence: Synthetic oligonucleotide
  Antisense strand to SEQ ID NO: 2413034
auauucauggagauuaacg

SEQ ID NO: 2413036 - RNA, 19 nt, Artificial Sequence
  Description of Artificial Sequence: Synthetic oligonucleotide
  Sense strand starting at position 3849 of SEQ ID NO: 1886481
cuuauauucugagcaggau

SEQ ID NO: 2413037 - RNA, 19 nt, Artificial Sequence
  Description of Artificial Sequence: Synthetic oligonucleotide
  Antisense strand to SEQ ID NO: 2413036
auccugcucagaauauaag

SEQ ID NO: 2413038 - RNA, 19 nt, Artificial Sequence
  Description of Artificial Sequence: Synthetic oligonucleotide
  Sense strand starting at position 3850 of SEQ ID NO: 1886481
uuauauucugagcaggauu

SEQ ID NO: 2413039 - RNA, 19 nt, Artificial Sequence
  Description of Artificial Sequence: Synthetic oligonucleotide
  Antisense strand to SEQ ID NO: 2413038
aauccugcucagaauauaa

SEQ ID NO: 2413040 - RNA, 19 nt, Artificial Sequence
  Description of Artificial Sequence: Synthetic oligonucleotide
  Sense strand starting at position 3969 of SEQ ID NO: 1886481
gggcuuguccuauagcuaa

SEQ ID NO: 2413041 - RNA, 19 nt, Artificial Sequence
  Description of Artificial Sequence: Synthetic oligonucleotide
  Antisense strand to SEQ ID NO: 2413040
uuagcuauaggacaagccc

SEQ ID NO: 2413042 - RNA, 19 nt, Artificial Sequence
  Description of Artificial Sequence: Synthetic oligonucleotide
  Sense strand starting at position 181 of SEQ ID NO: 1886482
ugaccuccgugccuuuaaa

SEQ ID NO: 2413043 - RNA, 19 nt, Artificial Sequence
  Description of Artificial Sequence: Synthetic oligonucleotide
  Antisense strand to SEQ ID NO: 2413042
uuuaaaggcacggagguca

SEQ ID NO: 2413044 - RNA, 19 nt, Artificial Sequence
  Description of Artificial Sequence: Synthetic oligonucleotide
  Sense strand starting at position 255 of SEQ ID NO: 1886482
cugggauucccgggaaaca

SEQ ID NO: 2413045 - RNA, 19 nt, Artificial Sequence
  Description of Artificial Sequence: Synthetic oligonucleotide
  Antisense strand to SEQ ID NO: 2413044
uguuucccgggaaucccag

SEQ ID NO: 2413046 - RNA, 19 nt, Artificial Sequence
  Description of Artificial Sequence: Synthetic oligonucleotide
  Sense strand starting at position 503 of SEQ ID NO: 1886482
ggugcuggaucauuccaga

SEQ ID NO: 2413047 - RNA, 19 nt, Artificial Sequence
  Description of Artificial Sequence: Synthetic oligonucleotide
  Antisense strand to SEQ ID NO: 2413046
ucuggaaugauccagcacc

SEQ ID NO: 2413048 - RNA, 19 nt, Artificial Sequence
  Description of Artificial Sequence: Synthetic oligonucleotide
  Sense strand starting at position 506 of SEQ ID NO: 1886482
gcuggaucauuccagacau

SEQ ID NO: 2413049 - RNA, 19 nt, Artificial Sequence
  Description of Artificial Sequence: Synthetic oligonucleotide
  Antisense strand to SEQ ID NO: 2413048
augucuggaaugauccagc

SEQ ID NO: 2413050 - RNA, 19 nt, Artificial Sequence
  Description of Artificial Sequence: Synthetic oligonucleotide
  Sense strand starting at position 517 of SEQ ID NO: 1886482
ccagacauucgaugccuuu

SEQ ID NO: 2413051 - RNA, 19 nt, Artificial Sequence
  Description of Artificial Sequence: Synthetic oligonucleotide
  Antisense strand to SEQ ID NO: 2413050
aaaggcaucgaaugucugg

SEQ ID NO: 2413052 - RNA, 19 nt, Artificial Sequence
  Description of Artificial Sequence: Synthetic oligonucleotide
  Sense strand starting at position 523 of SEQ ID NO: 1886482
auucgaugccuuugacaca

SEQ ID NO: 2413053 - RNA, 19 nt, Artificial Sequence
  Description of Artificial Sequence: Synthetic oligonucleotide
  Antisense strand to SEQ ID NO: 2413052
ugugucaaaggcaucgaau

SEQ ID NO: 2413054 - RNA, 19 nt, Artificial Sequence
  Description of Artificial Sequence: Synthetic oligonucleotide
  Sense strand starting at position 579 of SEQ ID NO: 1886482
augguagagcuuugaacac

SEQ ID NO: 2413055 - RNA, 19 nt, Artificial Sequence
  Description of Artificial Sequence: Synthetic oligonucleotide
  Antisense strand to SEQ ID NO: 2413054
guguucaaagcucuaccau

SEQ ID NO: 2413056 - RNA, 19 nt, Artificial Sequence
  Description of Artificial Sequence: Synthetic oligonucleotide
  Sense strand starting at position 690 of SEQ ID NO: 1886482
acgcucugucucguuuaga

SEQ ID NO: 2413057 - RNA, 19 nt, Artificial Sequence
  Description of Artificial Sequence: Synthetic oligonucleotide
  Antisense strand to SEQ ID NO: 2413056
ucuaaacgagacagagcgu

SEQ ID NO: 2413058 - RNA, 19 nt, Artificial Sequence
  Description of Artificial Sequence: Synthetic oligonucleotide
  Sense strand starting at position 691 of SEQ ID NO: 1886482
cgcucugucucguuuagac

SEQ ID NO: 2413059 - RNA, 19 nt, Artificial Sequence
  Description of Artificial Sequence: Synthetic oligonucleotide
  Antisense strand to SEQ ID NO: 2413058
gucuaaacgagacagagcg

SEQ ID NO: 2413060 - RNA, 19 nt, Artificial Sequence
  Description of Artificial Sequence: Synthetic oligonucleotide
  Sense strand starting at position 792 of SEQ ID NO: 1886482
gugccacuuccgugaacgu

SEQ ID NO: 2413061 - RNA, 19 nt, Artificial Sequence
  Description of Artificial Sequence: Synthetic oligonucleotide
  Antisense strand to SEQ ID NO: 2413060
acguucacggaaguggcac

SEQ ID NO: 2413062 - RNA, 19 nt, Artificial Sequence
  Description of Artificial Sequence: Synthetic oligonucleotide
  Sense strand starting at position 793 of SEQ ID NO: 1886482
ugccacuuccgugaacgua

SEQ ID NO: 2413063 - RNA, 19 nt, Artificial Sequence
  Description of Artificial Sequence: Synthetic oligonucleotide
  Antisense strand to SEQ ID NO: 2413062
uacguucacggaaguggca

SEQ ID NO: 2413064 - RNA, 19 nt, Artificial Sequence
  Description of Artificial Sequence: Synthetic oligonucleotide
  Sense strand starting at position 940 of SEQ ID NO: 1886482
gccacagucucaccuguua

SEQ ID NO: 2413065 - RNA, 19 nt, Artificial Sequence
  Description of Artificial Sequence: Synthetic oligonucleotide
  Antisense strand to SEQ ID NO: 2413064
uaacaggugagacuguggc

SEQ ID NO: 2413066 - RNA, 19 nt, Artificial Sequence
  Description of Artificial Sequence: Synthetic oligonucleotide
  Sense strand starting at position 945 of SEQ ID NO: 1886482
agucucaccuguuaguaca

SEQ ID NO: 2413067 - RNA, 19 nt, Artificial Sequence
  Description of Artificial Sequence: Synthetic oligonucleotide
  Antisense strand to SEQ ID NO: 2413066
uguacuaacaggugagacu

SEQ ID NO: 2413068 - RNA, 19 nt, Artificial Sequence
  Description of Artificial Sequence: Synthetic oligonucleotide
  Sense strand starting at position 967 of SEQ ID NO: 1886482
uuuauuugccaauguguua

SEQ ID NO: 2413069 - RNA, 19 nt, Artificial Sequence
  Description of Artificial Sequence: Synthetic oligonucleotide
  Antisense strand to SEQ ID NO: 2413068
uaacacauuggcaaauaaa

SEQ ID NO: 2413070 - RNA, 19 nt, Artificial Sequence
  Description of Artificial Sequence: Synthetic oligonucleotide
  Sense strand starting at position 972 of SEQ ID NO: 1886482
uugccaauguguuagguga

SEQ ID NO: 2413071 - RNA, 19 nt, Artificial Sequence
  Description of Artificial Sequence: Synthetic oligonucleotide
  Antisense strand to SEQ ID NO: 2413070
ucaccuaacacauuggcaa

SEQ ID NO: 2413072 - RNA, 19 nt, Artificial Sequence
  Description of Artificial Sequence: Synthetic oligonucleotide
  Sense strand starting at position 974 of SEQ ID NO: 1886482
gccaauguguuaggugaaa

SEQ ID NO: 2413073 - RNA, 19 nt, Artificial Sequence
  Description of Artificial Sequence: Synthetic oligonucleotide
  Antisense strand to SEQ ID NO: 2413072
uuucaccuaacacauuggc

SEQ ID NO: 2413074 - RNA, 19 nt, Artificial Sequence
  Description of Artificial Sequence: Synthetic oligonucleotide
  Sense strand starting at position 1232 of SEQ ID NO: 1886482
cggaguagcuggaguaguu

SEQ ID NO: 2413075 - RNA, 19 nt, Artificial Sequence
  Description of Artificial Sequence: Synthetic oligonucleotide
  Antisense strand to SEQ ID NO: 2413074
aacuacuccagcuacuccg

SEQ ID NO: 2413076 - RNA, 19 nt, Artificial Sequence
  Description of Artificial Sequence: Synthetic oligonucleotide
  Sense strand starting at position 1259 of SEQ ID NO: 1886482
gcauuucugcgcugaggga

SEQ ID NO: 2413077 - RNA, 19 nt, Artificial Sequence
  Description of Artificial Sequence: Synthetic oligonucleotide
  Antisense strand to SEQ ID NO: 2413076
ucccucagcgcagaaaugc

SEQ ID NO: 2413078 - RNA, 19 nt, Artificial Sequence
  Description of Artificial Sequence: Synthetic oligonucleotide
  Sense strand starting at position 1323 of SEQ ID NO: 1886482
gggagcguuucugugauug

SEQ ID NO: 2413079 - RNA, 19 nt, Artificial Sequence
  Description of Artificial Sequence: Synthetic oligonucleotide
  Antisense strand to SEQ ID NO: 2413078
caaucacagaaacgcuccc

SEQ ID NO: 2413080 - RNA, 19 nt, Artificial Sequence
  Description of Artificial Sequence: Synthetic oligonucleotide
  Sense strand starting at position 1325 of SEQ ID NO: 1886482
gagcguuucugugauugau

SEQ ID NO: 2413081 - RNA, 19 nt, Artificial Sequence
  Description of Artificial Sequence: Synthetic oligonucleotide
  Antisense strand to SEQ ID NO: 2413080
aucaaucacagaaacgcuc

SEQ ID NO: 2413082 - RNA, 19 nt, Artificial Sequence
  Description of Artificial Sequence: Synthetic oligonucleotide
  Sense strand starting at position 1327 of SEQ ID NO: 1886482
gcguuucugugauugauuu

SEQ ID NO: 2413083 - RNA, 19 nt, Artificial Sequence
  Description of Artificial Sequence: Synthetic oligonucleotide
  Antisense strand to SEQ ID NO: 2413082
aaaucaaucacagaaacgc

SEQ ID NO: 2413084 - RNA, 19 nt, Artificial Sequence
  Description of Artificial Sequence: Synthetic oligonucleotide
  Sense strand starting at position 1328 of SEQ ID NO: 1886482
cguuucugugauugauuua

SEQ ID NO: 2413085 - RNA, 19 nt, Artificial Sequence
  Description of Artificial Sequence: Synthetic oligonucleotide
  Antisense strand to SEQ ID NO: 2413084
uaaaucaaucacagaaacg

SEQ ID NO: 2413086 - RNA, 19 nt, Artificial Sequence
  Description of Artificial Sequence: Synthetic oligonucleotide
  Sense strand starting at position 1335 of SEQ ID NO: 1886482
gugauugauuuagagcugu

SEQ ID NO: 2413087 - RNA, 19 nt, Artificial Sequence
  Description of Artificial Sequence: Synthetic oligonucleotide
  Antisense strand to SEQ ID NO: 2413086
acagcucuaaaucaaucac

SEQ ID NO: 2413088 - RNA, 19 nt, Artificial Sequence
  Description of Artificial Sequence: Synthetic oligonucleotide
  Sense strand starting at position 1343 of SEQ ID NO: 1886482
uuuagagcuguuuauuacu

SEQ ID NO: 2413089 - RNA, 19 nt, Artificial Sequence
  Description of Artificial Sequence: Synthetic oligonucleotide
  Antisense strand to SEQ ID NO: 2413088
aguaauaaacagcucuaaa

SEQ ID NO: 2413090 - RNA, 19 nt, Artificial Sequence
  Description of Artificial Sequence: Synthetic oligonucleotide
  Sense strand starting at position 1351 of SEQ ID NO: 1886482
uguuuauuacugcacuguu

SEQ ID NO: 2413091 - RNA, 19 nt, Artificial Sequence
  Description of Artificial Sequence: Synthetic oligonucleotide
  Antisense strand to SEQ ID NO: 2413090
aacagugcaguaauaaaca

SEQ ID NO: 2413092 - RNA, 19 nt, Artificial Sequence
  Description of Artificial Sequence: Synthetic oligonucleotide
  Sense strand starting at position 1354 of SEQ ID NO: 1886482
uuauuacugcacuguuacu

SEQ ID NO: 2413093 - RNA, 19 nt, Artificial Sequence
  Description of Artificial Sequence: Synthetic oligonucleotide
  Antisense strand to SEQ ID NO: 2413092
aguaacagugcaguaauaa

SEQ ID NO: 2413094 - RNA, 19 nt, Artificial Sequence
  Description of Artificial Sequence: Synthetic oligonucleotide
  Sense strand starting at position 1366 of SEQ ID NO: 1886482
uguuacuagucuuauuaag

SEQ ID NO: 2413095 - RNA, 19 nt, Artificial Sequence
  Description of Artificial Sequence: Synthetic oligonucleotide
  Antisense strand to SEQ ID NO: 2413094
cuuaauaagacuaguaaca

SEQ ID NO: 2413096 - RNA, 19 nt, Artificial Sequence
  Description of Artificial Sequence: Synthetic oligonucleotide
  Sense strand starting at position 1368 of SEQ ID NO: 1886482
uuacuagucuuauuaaggu

SEQ ID NO: 2413097 - RNA, 19 nt, Artificial Sequence
  Description of Artificial Sequence: Synthetic oligonucleotide
  Antisense strand to SEQ ID NO: 2413096
accuuaauaagacuaguaa

SEQ ID NO: 2413098 - RNA, 19 nt, Artificial Sequence
  Description of Artificial Sequence: Synthetic oligonucleotide
  Sense strand starting at position 1374 of SEQ ID NO: 1886482
gucuuauuaaggugagcuc

SEQ ID NO: 2413099 - RNA, 19 nt, Artificial Sequence
  Description of Artificial Sequence: Synthetic oligonucleotide
  Antisense strand to SEQ ID NO: 2413098
gagcucaccuuaauaagac

SEQ ID NO: 2413100 - RNA, 19 nt, Artificial Sequence
  Description of Artificial Sequence: Synthetic oligonucleotide
  Sense strand starting at position 1616 of SEQ ID NO: 1886482
aaucuuacauggugggaau

SEQ ID NO: 2413101 - RNA, 19 nt, Artificial Sequence
  Description of Artificial Sequence: Synthetic oligonucleotide
  Antisense strand to SEQ ID NO: 2413100
auucccaccauguaagauu

SEQ ID NO: 2413102 - RNA, 19 nt, Artificial Sequence
  Description of Artificial Sequence: Synthetic oligonucleotide
  Sense strand starting at position 1699 of SEQ ID NO: 1886482
guacuacagucccuaaaca

SEQ ID NO: 2413103 - RNA, 19 nt, Artificial Sequence
  Description of Artificial Sequence: Synthetic oligonucleotide
  Antisense strand to SEQ ID NO: 2413102
uguuuagggacuguaguac

SEQ ID NO: 2413104 - RNA, 19 nt, Artificial Sequence
  Description of Artificial Sequence: Synthetic oligonucleotide
  Sense strand starting at position 1724 of SEQ ID NO: 1886482
gccuucucgucugugcaua

SEQ ID NO: 2413105 - RNA, 19 nt, Artificial Sequence
  Description of Artificial Sequence: Synthetic oligonucleotide
  Antisense strand to SEQ ID NO: 2413104
uaugcacagacgagaaggc

SEQ ID NO: 2413106 - RNA, 19 nt, Artificial Sequence
  Description of Artificial Sequence: Synthetic oligonucleotide
  Sense strand starting at position 1725 of SEQ ID NO: 1886482
ccuucucgucugugcauaa

SEQ ID NO: 2413107 - RNA, 19 nt, Artificial Sequence
  Description of Artificial Sequence: Synthetic oligonucleotide
  Antisense strand to SEQ ID NO: 2413106
uuaugcacagacgagaagg

SEQ ID NO: 2413108 - RNA, 19 nt, Artificial Sequence
  Description of Artificial Sequence: Synthetic oligonucleotide
  Sense strand starting at position 1726 of SEQ ID NO: 1886482
cuucucgucugugcauaaa

SEQ ID NO: 2413109 - RNA, 19 nt, Artificial Sequence
  Description of Artificial Sequence: Synthetic oligonucleotide
  Antisense strand to SEQ ID NO: 2413108
uuuaugcacagacgagaag

SEQ ID NO: 2413110 - RNA, 19 nt, Artificial Sequence
  Description of Artificial Sequence: Synthetic oligonucleotide
  Sense strand starting at position 1997 of SEQ ID NO: 1886482
gggagaauuuccugcgugu

SEQ ID NO: 2413111 - RNA, 19 nt, Artificial Sequence
  Description of Artificial Sequence: Synthetic oligonucleotide
  Antisense strand to SEQ ID NO: 2413110
acacgcaggaaauucuccc

SEQ ID NO: 2413112 - RNA, 19 nt, Artificial Sequence
  Description of Artificial Sequence: Synthetic oligonucleotide
  Sense strand starting at position 1999 of SEQ ID NO: 1886482
gagaauuuccugcguguuc

SEQ ID NO: 2413113 - RNA, 19 nt, Artificial Sequence
  Description of Artificial Sequence: Synthetic oligonucleotide
  Antisense strand to SEQ ID NO: 2413112
gaacacgcaggaaauucuc

SEQ ID NO: 2413114 - RNA, 19 nt, Artificial Sequence
  Description of Artificial Sequence: Synthetic oligonucleotide
  Sense strand starting at position 2945 of SEQ ID NO: 1886482
ccgggagaaaguuguuaga

SEQ ID NO: 2413115 - RNA, 19 nt, Artificial Sequence
  Description of Artificial Sequence: Synthetic oligonucleotide
  Antisense strand to SEQ ID NO: 2413114
ucuaacaacuuucucccgg

SEQ ID NO: 2413116 - RNA, 19 nt, Artificial Sequence
  Description of Artificial Sequence: Synthetic oligonucleotide
  Sense strand starting at position 3145 of SEQ ID NO: 1886482
uugcauuucuguucccuga

SEQ ID NO: 2413117 - RNA, 19 nt, Artificial Sequence
  Description of Artificial Sequence: Synthetic oligonucleotide
  Antisense strand to SEQ ID NO: 2413116
ucagggaacagaaaugcaa

SEQ ID NO: 2413118 - RNA, 19 nt, Artificial Sequence
  Description of Artificial Sequence: Synthetic oligonucleotide
  Sense strand starting at position 3502 of SEQ ID NO: 1886482
gcuuucugagcuuggcaca

SEQ ID NO: 2413119 - RNA, 19 nt, Artificial Sequence
  Description of Artificial Sequence: Synthetic oligonucleotide
  Antisense strand to SEQ ID NO: 2413118
ugugccaagcucagaaagc

SEQ ID NO: 2413120 - RNA, 19 nt, Artificial Sequence
  Description of Artificial Sequence: Synthetic oligonucleotide
  Sense strand starting at position 3947 of SEQ ID NO: 1886482
ugcggugagccguguucau

SEQ ID NO: 2413121 - RNA, 19 nt, Artificial Sequence
  Description of Artificial Sequence: Synthetic oligonucleotide
  Antisense strand to SEQ ID NO: 2413120
augaacacggcucaccgca

SEQ ID NO: 2413122 - RNA, 19 nt, Artificial Sequence
  Description of Artificial Sequence: Synthetic oligonucleotide
  Sense strand starting at position 2014 of SEQ ID NO: 1886485
gcugcauucccugaugguu

SEQ ID NO: 2413123 - RNA, 19 nt, Artificial Sequence
  Description of Artificial Sequence: Synthetic oligonucleotide
  Antisense strand to SEQ ID NO: 2413122
aaccaucagggaaugcagc

SEQ ID NO: 2413124 - RNA, 19 nt, Artificial Sequence
  Description of Artificial Sequence: Synthetic oligonucleotide
  Sense strand starting at position 2223 of SEQ ID NO: 1886485
cggcaacaucaagaaguua

SEQ ID NO: 2413125 - RNA, 19 nt, Artificial Sequence
  Description of Artificial Sequence: Synthetic oligonucleotide
  Antisense strand to SEQ ID NO: 2413124
uaacuucuugauguugccg

SEQ ID NO: 2413126 - RNA, 19 nt, Artificial Sequence
  Description of Artificial Sequence: Synthetic oligonucleotide
  Sense strand starting at position 2721 of SEQ ID NO: 1886485
guggcaucacccugaauuc

SEQ ID NO: 2413127 - RNA, 19 nt, Artificial Sequence
  Description of Artificial Sequence: Synthetic oligonucleotide
  Antisense strand to SEQ ID NO: 2413126
gaauucagggugaugccac

SEQ ID NO: 2413128 - RNA, 19 nt, Artificial Sequence
  Description of Artificial Sequence: Synthetic oligonucleotide
  Sense strand starting at position 2722 of SEQ ID NO: 1886485
uggcaucacccugaauucu

SEQ ID NO: 2413129 - RNA, 19 nt, Artificial Sequence
  Description of Artificial Sequence: Synthetic oligonucleotide
  Antisense strand to SEQ ID NO: 2413128
agaauucagggugaugcca

SEQ ID NO: 2413130 - RNA, 19 nt, Artificial Sequence
  Description of Artificial Sequence: Synthetic oligonucleotide
  Sense strand starting at position 2997 of SEQ ID NO: 1886485
auauuagcugagcacuuau

SEQ ID NO: 2413131 - RNA, 19 nt, Artificial Sequence
  Description of Artificial Sequence: Synthetic oligonucleotide
  Antisense strand to SEQ ID NO: 2413130
auaagugcucagcuaauau

SEQ ID NO: 2413132 - RNA, 19 nt, Artificial Sequence
  Description of Artificial Sequence: Synthetic oligonucleotide
  Sense strand starting at position 3046 of SEQ ID NO: 1886485
aggaacaagugcuauuuaa

SEQ ID NO: 2413133 - RNA, 19 nt, Artificial Sequence
  Description of Artificial Sequence: Synthetic oligonucleotide
  Antisense strand to SEQ ID NO: 2413132
uuaaauagcacuuguuccu

SEQ ID NO: 2413134 - RNA, 19 nt, Artificial Sequence
  Description of Artificial Sequence: Synthetic oligonucleotide
  Sense strand starting at position 3097 of SEQ ID NO: 1886485
uauaaagaggugugaggau

SEQ ID NO: 2413135 - RNA, 19 nt, Artificial Sequence
  Description of Artificial Sequence: Synthetic oligonucleotide
  Antisense strand to SEQ ID NO: 2413134
auccucacaccucuuuaua

SEQ ID NO: 2413136 - RNA, 19 nt, Artificial Sequence
  Description of Artificial Sequence: Synthetic oligonucleotide
  Sense strand starting at position 3130 of SEQ ID NO: 1886485
aaaccagugucauucugga

SEQ ID NO: 2413137 - RNA, 19 nt, Artificial Sequence
  Description of Artificial Sequence: Synthetic oligonucleotide
  Antisense strand to SEQ ID NO: 2413136
uccagaaugacacugguuu

SEQ ID NO: 2413138 - RNA, 19 nt, Artificial Sequence
  Description of Artificial Sequence: Synthetic oligonucleotide
  Sense strand starting at position 3134 of SEQ ID NO: 1886485
cagugucauucuggauaua

SEQ ID NO: 2413139 - RNA, 19 nt, Artificial Sequence
  Description of Artificial Sequence: Synthetic oligonucleotide
  Antisense strand to SEQ ID NO: 2413138
uauauccagaaugacacug

SEQ ID NO: 2413140 - RNA, 19 nt, Artificial Sequence
  Description of Artificial Sequence: Synthetic oligonucleotide
  Sense strand starting at position 3135 of SEQ ID NO: 1886485
agugucauucuggauauag

SEQ ID NO: 2413141 - RNA, 19 nt, Artificial Sequence
  Description of Artificial Sequence: Synthetic oligonucleotide
  Antisense strand to SEQ ID NO: 2413140
cuauauccagaaugacacu

SEQ ID NO: 2413142 - RNA, 19 nt, Artificial Sequence
  Description of Artificial Sequence: Synthetic oligonucleotide
  Sense strand starting at position 3137 of SEQ ID NO: 1886485
ugucauucuggauauaguu

SEQ ID NO: 2413143 - RNA, 19 nt, Artificial Sequence
  Description of Artificial Sequence: Synthetic oligonucleotide
  Antisense strand to SEQ ID NO: 2413142
aacuauauccagaaugaca

SEQ ID NO: 2413144 - RNA, 19 nt, Artificial Sequence
  Description of Artificial Sequence: Synthetic oligonucleotide
  Sense strand starting at position 3257 of SEQ ID NO: 1886485
cgugguugaagugauauaa

SEQ ID NO: 2413145 - RNA, 19 nt, Artificial Sequence
  Description of Artificial Sequence: Synthetic oligonucleotide
  Antisense strand to SEQ ID NO: 2413144
uuauaucacuucaaccacg

SEQ ID NO: 2413146 - RNA, 19 nt, Artificial Sequence
  Description of Artificial Sequence: Synthetic oligonucleotide
  Sense strand starting at position 3261 of SEQ ID NO: 1886485
guugaagugauauaauguc

SEQ ID NO: 2413147 - RNA, 19 nt, Artificial Sequence
  Description of Artificial Sequence: Synthetic oligonucleotide
  Antisense strand to SEQ ID NO: 2413146
gacauuauaucacuucaac

SEQ ID NO: 2413148 - RNA, 19 nt, Artificial Sequence
  Description of Artificial Sequence: Synthetic oligonucleotide
  Sense strand starting at position 3338 of SEQ ID NO: 1886485
ccuacaaggucugaagacu

SEQ ID NO: 2413149 - RNA, 19 nt, Artificial Sequence
  Description of Artificial Sequence: Synthetic oligonucleotide
  Antisense strand to SEQ ID NO: 2413148
agucuucagaccuuguagg

SEQ ID NO: 2413150 - RNA, 19 nt, Artificial Sequence
  Description of Artificial Sequence: Synthetic oligonucleotide
  Sense strand starting at position 3778 of SEQ ID NO: 1886485
cugggagguugauguuaca

SEQ ID NO: 2413151 - RNA, 19 nt, Artificial Sequence
  Description of Artificial Sequence: Synthetic oligonucleotide
  Antisense strand to SEQ ID NO: 2413150
uguaacaucaaccucccag

SEQ ID NO: 2413152 - RNA, 19 nt, Artificial Sequence
  Description of Artificial Sequence: Synthetic oligonucleotide
  Sense strand starting at position 3787 of SEQ ID NO: 1886485
ugauguuacagugagcuga

SEQ ID NO: 2413153 - RNA, 19 nt, Artificial Sequence
  Description of Artificial Sequence: Synthetic oligonucleotide
  Antisense strand to SEQ ID NO: 2413152
ucagcucacuguaacauca

SEQ ID NO: 2413154 - RNA, 19 nt, Artificial Sequence
  Description of Artificial Sequence: Synthetic oligonucleotide
  Sense strand starting at position 2946 of SEQ ID NO: 1886486
aaugcuuagugaggagacu

SEQ ID NO: 2413155 - RNA, 19 nt, Artificial Sequence
  Description of Artificial Sequence: Synthetic oligonucleotide
  Antisense strand to SEQ ID NO: 2413154
agucuccucacuaagcauu

SEQ ID NO: 2413156 - RNA, 19 nt, Artificial Sequence
  Description of Artificial Sequence: Synthetic oligonucleotide
  Sense strand starting at position 2685 of SEQ ID NO: 1886487
cuccuucucucaugugaag

SEQ ID NO: 2413157 - RNA, 19 nt, Artificial Sequence
  Description of Artificial Sequence: Synthetic oligonucleotide
  Antisense strand to SEQ ID NO: 2413156
cuucacaugagagaaggag

SEQ ID NO: 2413158 - RNA, 19 nt, Artificial Sequence
  Description of Artificial Sequence: Synthetic oligonucleotide
  Sense strand starting at position 2722 of SEQ ID NO: 1886488
cuccuucucucaugugaag

SEQ ID NO: 2413159 - RNA, 19 nt, Artificial Sequence
  Description of Artificial Sequence: Synthetic oligonucleotide
  Antisense strand to SEQ ID NO: 2413158
cuucacaugagagaaggag

SEQ ID NO: 2413160 - RNA, 19 nt, Artificial Sequence
  Description of Artificial Sequence: Synthetic oligonucleotide
  Sense strand starting at position 562 of SEQ ID NO: 1886489
gggcuacauccaggugagu

SEQ ID NO: 2413161 - RNA, 19 nt, Artificial Sequence
  Description of Artificial Sequence: Synthetic oligonucleotide
  Antisense strand to SEQ ID NO: 2413160
acucaccuggauguagccc

SEQ ID NO: 2413162 - RNA, 19 nt, Artificial Sequence
  Description of Artificial Sequence: Synthetic oligonucleotide
  Sense strand starting at position 564 of SEQ ID NO: 1886489
gcuacauccaggugaguug

SEQ ID NO: 2413163 - RNA, 19 nt, Artificial Sequence
  Description of Artificial Sequence: Synthetic oligonucleotide
  Antisense strand to SEQ ID NO: 2413162
caacucaccuggauguagc

SEQ ID NO: 2413164 - RNA, 19 nt, Artificial Sequence
  Description of Artificial Sequence: Synthetic oligonucleotide
  Sense strand starting at position 1006 of SEQ ID NO: 1886489
uggugugucggugcugaca

SEQ ID NO: 2413165 - RNA, 19 nt, Artificial Sequence
  Description of Artificial Sequence: Synthetic oligonucleotide
  Antisense strand to SEQ ID NO: 2413164
ugucagcaccgacacacca

SEQ ID NO: 2413166 - RNA, 19 nt, Artificial Sequence
  Description of Artificial Sequence: Synthetic oligonucleotide
  Sense strand starting at position 1007 of SEQ ID NO: 1886489
ggugugucggugcugacaa

SEQ ID NO: 2413167 - RNA, 19 nt, Artificial Sequence
  Description of Artificial Sequence: Synthetic oligonucleotide
  Antisense strand to SEQ ID NO: 2413166
uugucagcaccgacacacc

SEQ ID NO: 2413168 - RNA, 19 nt, Artificial Sequence
  Description of Artificial Sequence: Synthetic oligonucleotide
  Sense strand starting at position 1042 of SEQ ID NO: 1886489
uuagaucugcucuacugua

SEQ ID NO: 2413169 - RNA, 19 nt, Artificial Sequence
  Description of Artificial Sequence: Synthetic oligonucleotide
  Antisense strand to SEQ ID NO: 2413168
uacaguagagcagaucuaa

SEQ ID NO: 2413170 - RNA, 19 nt, Artificial Sequence
  Description of Artificial Sequence: Synthetic oligonucleotide
  Sense strand starting at position 1308 of SEQ ID NO: 1886489
gcaugaacuuucuggugac

SEQ ID NO: 2413171 - RNA, 19 nt, Artificial Sequence
  Description of Artificial Sequence: Synthetic oligonucleotide
  Antisense strand to SEQ ID NO: 2413170
gucaccagaaaguucaugc

SEQ ID NO: 2413172 - RNA, 19 nt, Artificial Sequence
  Description of Artificial Sequence: Synthetic oligonucleotide
  Sense strand starting at position 2000 of SEQ ID NO: 1886489
ucucuugucuugggucuaa

SEQ ID NO: 2413173 - RNA, 19 nt, Artificial Sequence
  Description of Artificial Sequence: Synthetic oligonucleotide
  Antisense strand to SEQ ID NO: 2413172
uuagacccaagacaagaga

SEQ ID NO: 2413174 - RNA, 19 nt, Artificial Sequence
  Description of Artificial Sequence: Synthetic oligonucleotide
  Sense strand starting at position 2033 of SEQ ID NO: 1886489
uccugucucuugggaaguu

SEQ ID NO: 2413175 - RNA, 19 nt, Artificial Sequence
  Description of Artificial Sequence: Synthetic oligonucleotide
  Antisense strand to SEQ ID NO: 2413174
aacuucccaagagacagga

SEQ ID NO: 2413176 - RNA, 19 nt, Artificial Sequence
  Description of Artificial Sequence: Synthetic oligonucleotide
  Sense strand starting at position 2297 of SEQ ID NO: 1886489
gugucugucagcugggauu

SEQ ID NO: 2413177 - RNA, 19 nt, Artificial Sequence
  Description of Artificial Sequence: Synthetic oligonucleotide
  Antisense strand to SEQ ID NO: 2413176
aaucccagcugacagacac

SEQ ID NO: 2413178 - RNA, 19 nt, Artificial Sequence
  Description of Artificial Sequence: Synthetic oligonucleotide
  Sense strand starting at position 2342 of SEQ ID NO: 1886489
acuggcugcuuuccaagaa

SEQ ID NO: 2413179 - RNA, 19 nt, Artificial Sequence
  Description of Artificial Sequence: Synthetic oligonucleotide
  Antisense strand to SEQ ID NO: 2413178
uucuuggaaagcagccagu

SEQ ID NO: 2413180 - RNA, 19 nt, Artificial Sequence
  Description of Artificial Sequence: Synthetic oligonucleotide
  Sense strand starting at position 2343 of SEQ ID NO: 1886489
cuggcugcuuuccaagaau

SEQ ID NO: 2413181 - RNA, 19 nt, Artificial Sequence
  Description of Artificial Sequence: Synthetic oligonucleotide
  Antisense strand to SEQ ID NO: 2413180
auucuuggaaagcagccag

SEQ ID NO: 2413182 - RNA, 19 nt, Artificial Sequence
  Description of Artificial Sequence: Synthetic oligonucleotide
  Sense strand starting at position 2346 of SEQ ID NO: 1886489
gcugcuuuccaagaauucu

SEQ ID NO: 2413183 - RNA, 19 nt, Artificial Sequence
  Description of Artificial Sequence: Synthetic oligonucleotide
  Antisense strand to SEQ ID NO: 2413182
agaauucuuggaaagcagc

SEQ ID NO: 2413184 - RNA, 19 nt, Artificial Sequence
  Description of Artificial Sequence: Synthetic oligonucleotide
  Sense strand starting at position 2441 of SEQ ID NO: 1886489
cccguauuuggcugggcau

SEQ ID NO: 2413185 - RNA, 19 nt, Artificial Sequence
  Description of Artificial Sequence: Synthetic oligonucleotide
  Antisense strand to SEQ ID NO: 2413184
augcccagccaaauacggg

SEQ ID NO: 2413186 - RNA, 19 nt, Artificial Sequence
  Description of Artificial Sequence: Synthetic oligonucleotide
  Sense strand starting at position 2962 of SEQ ID NO: 1886489
aaucgaguucuaggagcgu

SEQ ID NO: 2413187 - RNA, 19 nt, Artificial Sequence
  Description of Artificial Sequence: Synthetic oligonucleotide
  Antisense strand to SEQ ID NO: 2413186
acgcuccuagaacucgauu

SEQ ID NO: 2413188 - RNA, 19 nt, Artificial Sequence
  Description of Artificial Sequence: Synthetic oligonucleotide
  Sense strand starting at position 2968 of SEQ ID NO: 1886489
guucuaggagcgugagguu

SEQ ID NO: 2413189 - RNA, 19 nt, Artificial Sequence
  Description of Artificial Sequence: Synthetic oligonucleotide
  Antisense strand to SEQ ID NO: 2413188
aaccucacgcuccuagaac

SEQ ID NO: 2413190 - RNA, 19 nt, Artificial Sequence
  Description of Artificial Sequence: Synthetic oligonucleotide
  Sense strand starting at position 3009 of SEQ ID NO: 1886489
gggugugccuguugcuaca

SEQ ID NO: 2413191 - RNA, 19 nt, Artificial Sequence
  Description of Artificial Sequence: Synthetic oligonucleotide
  Antisense strand to SEQ ID NO: 2413190
uguagcaacaggcacaccc

SEQ ID NO: 2413192 - RNA, 19 nt, Artificial Sequence
  Description of Artificial Sequence: Synthetic oligonucleotide
  Sense strand starting at position 3054 of SEQ ID NO: 1886489
agcucuuccuuguugaaac

SEQ ID NO: 2413193 - RNA, 19 nt, Artificial Sequence
  Description of Artificial Sequence: Synthetic oligonucleotide
  Antisense strand to SEQ ID NO: 2413192
guuucaacaaggaagagcu

SEQ ID NO: 2413194 - RNA, 19 nt, Artificial Sequence
  Description of Artificial Sequence: Synthetic oligonucleotide
  Sense strand starting at position 3055 of SEQ ID NO: 1886489
gcucuuccuuguugaaaca

SEQ ID NO: 2413195 - RNA, 19 nt, Artificial Sequence
  Description of Artificial Sequence: Synthetic oligonucleotide
  Antisense strand to SEQ ID NO: 2413194
uguuucaacaaggaagagc

SEQ ID NO: 2413196 - RNA, 19 nt, Artificial Sequence
  Description of Artificial Sequence: Synthetic oligonucleotide
  Sense strand starting at position 3067 of SEQ ID NO: 1886489
ugaaacaucugcuuucgag

SEQ ID NO: 2413197 - RNA, 19 nt, Artificial Sequence
  Description of Artificial Sequence: Synthetic oligonucleotide
  Antisense strand to SEQ ID NO: 2413196
cucgaaagcagauguuuca

SEQ ID NO: 2413198 - RNA, 19 nt, Artificial Sequence
  Description of Artificial Sequence: Synthetic oligonucleotide
  Sense strand starting at position 3131 of SEQ ID NO: 1886489
ugaaauaccugcuaucaag

SEQ ID NO: 2413199 - RNA, 19 nt, Artificial Sequence
  Description of Artificial Sequence: Synthetic oligonucleotide
  Antisense strand to SEQ ID NO: 2413198
cuugauagcagguauuuca

SEQ ID NO: 2413200 - RNA, 19 nt, Artificial Sequence
  Description of Artificial Sequence: Synthetic oligonucleotide
  Sense strand starting at position 3206 of SEQ ID NO: 1886489
gucgccauccugugagauc

SEQ ID NO: 2413201 - RNA, 19 nt, Artificial Sequence
  Description of Artificial Sequence: Synthetic oligonucleotide
  Antisense strand to SEQ ID NO: 2413200
gaucucacaggauggcgac

SEQ ID NO: 2413202 - RNA, 19 nt, Artificial Sequence
  Description of Artificial Sequence: Synthetic oligonucleotide
  Sense strand starting at position 3207 of SEQ ID NO: 1886489
ucgccauccugugagauca

SEQ ID NO: 2413203 - RNA, 19 nt, Artificial Sequence
  Description of Artificial Sequence: Synthetic oligonucleotide
  Antisense strand to SEQ ID NO: 2413202
ugaucucacaggauggcga

SEQ ID NO: 2413204 - RNA, 19 nt, Artificial Sequence
  Description of Artificial Sequence: Synthetic oligonucleotide
  Sense strand starting at position 1463 of SEQ ID NO: 1886490
acgagaauugcuggaacug

SEQ ID NO: 2413205 - RNA, 19 nt, Artificial Sequence
  Description of Artificial Sequence: Synthetic oligonucleotide
  Antisense strand to SEQ ID NO: 2413204
caguuccagcaauucucgu

SEQ ID NO: 2413206 - RNA, 19 nt, Artificial Sequence
  Description of Artificial Sequence: Synthetic oligonucleotide
  Sense strand starting at position 1539 of SEQ ID NO: 1886490
gggcaagacucggccucaa

SEQ ID NO: 2413207 - RNA, 19 nt, Artificial Sequence
  Description of Artificial Sequence: Synthetic oligonucleotide
  Antisense strand to SEQ ID NO: 2413206
uugaggccgagucuugccc

SEQ ID NO: 2413208 - RNA, 19 nt, Artificial Sequence
  Description of Artificial Sequence: Synthetic oligonucleotide
  Sense strand starting at position 1594 of SEQ ID NO: 1886490
guaacaccucuucguaacu

SEQ ID NO: 2413209 - RNA, 19 nt, Artificial Sequence
  Description of Artificial Sequence: Synthetic oligonucleotide
  Antisense strand to SEQ ID NO: 2413208
aguuacgaagagguguuac

SEQ ID NO: 2413210 - RNA, 19 nt, Artificial Sequence
  Description of Artificial Sequence: Synthetic oligonucleotide
  Sense strand starting at position 2200 of SEQ ID NO: 1886490
acgcguuugccgggagaug

SEQ ID NO: 2413211 - RNA, 19 nt, Artificial Sequence
  Description of Artificial Sequence: Synthetic oligonucleotide
  Antisense strand to SEQ ID NO: 2413210
caucucccggcaaacgcgu

SEQ ID NO: 2413212 - RNA, 19 nt, Artificial Sequence
  Description of Artificial Sequence: Synthetic oligonucleotide
  Sense strand starting at position 2225 of SEQ ID NO: 1886490
cuucguccucugcaguuaa

SEQ ID NO: 2413213 - RNA, 19 nt, Artificial Sequence
  Description of Artificial Sequence: Synthetic oligonucleotide
  Antisense strand to SEQ ID NO: 2413212
uuaacugcagaggacgaag

SEQ ID NO: 2413214 - RNA, 19 nt, Artificial Sequence
  Description of Artificial Sequence: Synthetic oligonucleotide
  Sense strand starting at position 2229 of SEQ ID NO: 1886490
guccucugcaguuaagaag

SEQ ID NO: 2413215 - RNA, 19 nt, Artificial Sequence
  Description of Artificial Sequence: Synthetic oligonucleotide
  Antisense strand to SEQ ID NO: 2413214
cuucuuaacugcagaggac

SEQ ID NO: 2413216 - RNA, 19 nt, Artificial Sequence
  Description of Artificial Sequence: Synthetic oligonucleotide
  Sense strand starting at position 2290 of SEQ ID NO: 1886490
cugcguaucugggacgaaa

SEQ ID NO: 2413217 - RNA, 19 nt, Artificial Sequence
  Description of Artificial Sequence: Synthetic oligonucleotide
  Antisense strand to SEQ ID NO: 2413216
uuucgucccagauacgcag

SEQ ID NO: 2413218 - RNA, 19 nt, Artificial Sequence
  Description of Artificial Sequence: Synthetic oligonucleotide
  Sense strand starting at position 2354 of SEQ ID NO: 1886490
aagcucauggcgugugaua

SEQ ID NO: 2413219 - RNA, 19 nt, Artificial Sequence
  Description of Artificial Sequence: Synthetic oligonucleotide
  Antisense strand to SEQ ID NO: 2413218
uaucacacgccaugagcuu

SEQ ID NO: 2413220 - RNA, 19 nt, Artificial Sequence
  Description of Artificial Sequence: Synthetic oligonucleotide
  Sense strand starting at position 2462 of SEQ ID NO: 1886490
ugacuauguucucuguucu

SEQ ID NO: 2413221 - RNA, 19 nt, Artificial Sequence
  Description of Artificial Sequence: Synthetic oligonucleotide
  Antisense strand to SEQ ID NO: 2413220
agaacagagaacauaguca

SEQ ID NO: 2413222 - RNA, 19 nt, Artificial Sequence
  Description of Artificial Sequence: Synthetic oligonucleotide
  Sense strand starting at position 2616 of SEQ ID NO: 1886490
gccgaacgucgucacucau

SEQ ID NO: 2413223 - RNA, 19 nt, Artificial Sequence
  Description of Artificial Sequence: Synthetic oligonucleotide
  Antisense strand to SEQ ID NO: 2413222
augagugacgacguucggc

SEQ ID NO: 2413224 - RNA, 19 nt, Artificial Sequence
  Description of Artificial Sequence: Synthetic oligonucleotide
  Sense strand starting at position 2622 of SEQ ID NO: 1886490
cgucgucacucauggcaaa

SEQ ID NO: 2413225 - RNA, 19 nt, Artificial Sequence
  Description of Artificial Sequence: Synthetic oligonucleotide
  Antisense strand to SEQ ID NO: 2413224
uuugccaugagugacgacg

SEQ ID NO: 2413226 - RNA, 19 nt, Artificial Sequence
  Description of Artificial Sequence: Synthetic oligonucleotide
  Sense strand starting at position 2623 of SEQ ID NO: 1886490
gucgucacucauggcaaau

SEQ ID NO: 2413227 - RNA, 19 nt, Artificial Sequence
  Description of Artificial Sequence: Synthetic oligonucleotide
  Antisense strand to SEQ ID NO: 2413226
auuugccaugagugacgac

SEQ ID NO: 2413228 - RNA, 19 nt, Artificial Sequence
  Description of Artificial Sequence: Synthetic oligonucleotide
  Sense strand starting at position 2664 of SEQ ID NO: 1886490
uggaauuuguuucgacaca

SEQ ID NO: 2413229 - RNA, 19 nt, Artificial Sequence
  Description of Artificial Sequence: Synthetic oligonucleotide
  Antisense strand to SEQ ID NO: 2413228
ugugucgaaacaaauucca

SEQ ID NO: 2413230 - RNA, 19 nt, Artificial Sequence
  Description of Artificial Sequence: Synthetic oligonucleotide
  Sense strand starting at position 2665 of SEQ ID NO: 1886490
ggaauuuguuucgacacac

SEQ ID NO: 2413231 - RNA, 19 nt, Artificial Sequence
  Description of Artificial Sequence: Synthetic oligonucleotide
  Antisense strand to SEQ ID NO: 2413230
gugugucgaaacaaauucc

SEQ ID NO: 2413232 - RNA, 19 nt, Artificial Sequence
  Description of Artificial Sequence: Synthetic oligonucleotide
  Sense strand starting at position 2736 of SEQ ID NO: 1886490
guagcacucuuggcguuua

SEQ ID NO: 2413233 - RNA, 19 nt, Artificial Sequence
  Description of Artificial Sequence: Synthetic oligonucleotide
  Antisense strand to SEQ ID NO: 2413232
uaaacgccaagagugcuac

SEQ ID NO: 2413234 - RNA, 19 nt, Artificial Sequence
  Description of Artificial Sequence: Synthetic oligonucleotide
  Sense strand starting at position 2845 of SEQ ID NO: 1886490
ucauaauaauuaucgagcu

SEQ ID NO: 2413235 - RNA, 19 nt, Artificial Sequence
  Description of Artificial Sequence: Synthetic oligonucleotide
  Antisense strand to SEQ ID NO: 2413234
agcucgauaauuauuauga

SEQ ID NO: 2413236 - RNA, 19 nt, Artificial Sequence
  Description of Artificial Sequence: Synthetic oligonucleotide
  Sense strand starting at position 3061 of SEQ ID NO: 1886490
gaagacaucugucauuuga

SEQ ID NO: 2413237 - RNA, 19 nt, Artificial Sequence
  Description of Artificial Sequence: Synthetic oligonucleotide
  Antisense strand to SEQ ID NO: 2413236
ucaaaugacagaugucuuc

SEQ ID NO: 2413238 - RNA, 19 nt, Artificial Sequence
  Description of Artificial Sequence: Synthetic oligonucleotide
  Sense strand starting at position 3207 of SEQ ID NO: 1886490
gugcgaaaccucgucucua

SEQ ID NO: 2413239 - RNA, 19 nt, Artificial Sequence
  Description of Artificial Sequence: Synthetic oligonucleotide
  Antisense strand to SEQ ID NO: 2413238
uagagacgagguuucgcac

SEQ ID NO: 2413240 - RNA, 19 nt, Artificial Sequence
  Description of Artificial Sequence: Synthetic oligonucleotide
  Sense strand starting at position 3495 of SEQ ID NO: 1886490
agacguuauggcuguagua

SEQ ID NO: 2413241 - RNA, 19 nt, Artificial Sequence
  Description of Artificial Sequence: Synthetic oligonucleotide
  Antisense strand to SEQ ID NO: 2413240
uacuacagccauaacgucu

SEQ ID NO: 2413242 - RNA, 19 nt, Artificial Sequence
  Description of Artificial Sequence: Synthetic oligonucleotide
  Sense strand starting at position 3497 of SEQ ID NO: 1886490
acguuauggcuguaguaaa

SEQ ID NO: 2413243 - RNA, 19 nt, Artificial Sequence
  Description of Artificial Sequence: Synthetic oligonucleotide
  Antisense strand to SEQ ID NO: 2413242
uuuacuacagccauaacgu

SEQ ID NO: 2413244 - RNA, 19 nt, Artificial Sequence
  Description of Artificial Sequence: Synthetic oligonucleotide
  Sense strand starting at position 3554 of SEQ ID NO: 1886490
gccagauuaauguaggauc

SEQ ID NO: 2413245 - RNA, 19 nt, Artificial Sequence
  Description of Artificial Sequence: Synthetic oligonucleotide
  Antisense strand to SEQ ID NO: 2413244
gauccuacauuaaucuggc

SEQ ID NO: 2413246 - RNA, 19 nt, Artificial Sequence
  Description of Artificial Sequence: Synthetic oligonucleotide
  Sense strand starting at position 3556 of SEQ ID NO: 1886490
cagauuaauguaggaucuu

SEQ ID NO: 2413247 - RNA, 19 nt, Artificial Sequence
  Description of Artificial Sequence: Synthetic oligonucleotide
  Antisense strand to SEQ ID NO: 2413246
aagauccuacauuaaucug

SEQ ID NO: 2413248 - RNA, 19 nt, Artificial Sequence
  Description of Artificial Sequence: Synthetic oligonucleotide
  Sense strand starting at position 3557 of SEQ ID NO: 1886490
agauuaauguaggaucuua

SEQ ID NO: 2413249 - RNA, 19 nt, Artificial Sequence
  Description of Artificial Sequence: Synthetic oligonucleotide
  Antisense strand to SEQ ID NO: 2413248
uaagauccuacauuaaucu

SEQ ID NO: 2413250 - RNA, 19 nt, Artificial Sequence
  Description of Artificial Sequence: Synthetic oligonucleotide
  Sense strand starting at position 3562 of SEQ ID NO: 1886490
aauguaggaucuuaaagac

SEQ ID NO: 2413251 - RNA, 19 nt, Artificial Sequence
  Description of Artificial Sequence: Synthetic oligonucleotide
  Antisense strand to SEQ ID NO: 2413250
gucuuuaagauccuacauu

SEQ ID NO: 2413252 - RNA, 19 nt, Artificial Sequence
  Description of Artificial Sequence: Synthetic oligonucleotide
  Sense strand starting at position 3645 of SEQ ID NO: 1886490
aaggaaggauuguugguua

SEQ ID NO: 2413253 - RNA, 19 nt, Artificial Sequence
  Description of Artificial Sequence: Synthetic oligonucleotide
  Antisense strand to SEQ ID NO: 2413252
uaaccaacaauccuuccuu

SEQ ID NO: 2413254 - RNA, 19 nt, Artificial Sequence
  Description of Artificial Sequence: Synthetic oligonucleotide
  Sense strand starting at position 3648 of SEQ ID NO: 1886490
gaaggauuguugguuaaga

SEQ ID NO: 2413255 - RNA, 19 nt, Artificial Sequence
  Description of Artificial Sequence: Synthetic oligonucleotide
  Antisense strand to SEQ ID NO: 2413254
ucuuaaccaacaauccuuc

SEQ ID NO: 2413256 - RNA, 19 nt, Artificial Sequence
  Description of Artificial Sequence: Synthetic oligonucleotide
  Sense strand starting at position 3649 of SEQ ID NO: 1886490
aaggauuguugguuaagag

SEQ ID NO: 2413257 - RNA, 19 nt, Artificial Sequence
  Description of Artificial Sequence: Synthetic oligonucleotide
  Antisense strand to SEQ ID NO: 2413256
cucuuaaccaacaauccuu

SEQ ID NO: 2413258 - RNA, 19 nt, Artificial Sequence
  Description of Artificial Sequence: Synthetic oligonucleotide
  Sense strand starting at position 3650 of SEQ ID NO: 1886490
aggauuguugguuaagagu

SEQ ID NO: 2413259 - RNA, 19 nt, Artificial Sequence
  Description of Artificial Sequence: Synthetic oligonucleotide
  Antisense strand to SEQ ID NO: 2413258
acucuuaaccaacaauccu

SEQ ID NO: 2413260 - RNA, 19 nt, Artificial Sequence
  Description of Artificial Sequence: Synthetic oligonucleotide
  Sense strand starting at position 3813 of SEQ ID NO: 1886490
ugcauuagagaaugacuuu

SEQ ID NO: 2413261 - RNA, 19 nt, Artificial Sequence
  Description of Artificial Sequence: Synthetic oligonucleotide
  Antisense strand to SEQ ID NO: 2413260
aaagucauucucuaaugca

SEQ ID NO: 2413262 - RNA, 19 nt, Artificial Sequence
  Description of Artificial Sequence: Synthetic oligonucleotide
  Sense strand starting at position 3909 of SEQ ID NO: 1886490
gggagauaaugugugaggu

SEQ ID NO: 2413263 - RNA, 19 nt, Artificial Sequence
  Description of Artificial Sequence: Synthetic oligonucleotide
  Antisense strand to SEQ ID NO: 2413262
accucacacauuaucuccc

SEQ ID NO: 2413264 - RNA, 19 nt, Artificial Sequence
  Description of Artificial Sequence: Synthetic oligonucleotide
  Sense strand starting at position 3934 of SEQ ID NO: 1886490
uugguuaggucagaauaca

SEQ ID NO: 2413265 - RNA, 19 nt, Artificial Sequence
  Description of Artificial Sequence: Synthetic oligonucleotide
  Antisense strand to SEQ ID NO: 2413264
uguauucugaccuaaccaa

SEQ ID NO: 2413266 - RNA, 19 nt, Artificial Sequence
  Description of Artificial Sequence: Synthetic oligonucleotide
  Sense strand starting at position 30 of SEQ ID NO: 1886491
ggugucugcagagaaagua

SEQ ID NO: 2413267 - RNA, 19 nt, Artificial Sequence
  Description of Artificial Sequence: Synthetic oligonucleotide
  Antisense strand to SEQ ID NO: 2413266
uacuuucucugcagacacc

SEQ ID NO: 2413268 - RNA, 19 nt, Artificial Sequence
  Description of Artificial Sequence: Synthetic oligonucleotide
  Sense strand starting at position 164 of SEQ ID NO: 1886491
aguggugcuuuguagggau

SEQ ID NO: 2413269 - RNA, 19 nt, Artificial Sequence
  Description of Artificial Sequence: Synthetic oligonucleotide
  Antisense strand to SEQ ID NO: 2413268
aucccuacaaagcaccacu

SEQ ID NO: 2413270 - RNA, 19 nt, Artificial Sequence
  Description of Artificial Sequence: Synthetic oligonucleotide
  Sense strand starting at position 203 of SEQ ID NO: 1886491
gugagucaaccagaaagca

SEQ ID NO: 2413271 - RNA, 19 nt, Artificial Sequence
  Description of Artificial Sequence: Synthetic oligonucleotide
  Antisense strand to SEQ ID NO: 2413270
ugcuuucugguugacucac

SEQ ID NO: 2413272 - RNA, 19 nt, Artificial Sequence
  Description of Artificial Sequence: Synthetic oligonucleotide
  Sense strand starting at position 269 of SEQ ID NO: 1886491
ugggauggucagcagugaa

SEQ ID NO: 2413273 - RNA, 19 nt, Artificial Sequence
  Description of Artificial Sequence: Synthetic oligonucleotide
  Antisense strand to SEQ ID NO: 2413272
uucacugcugaccauccca

SEQ ID NO: 2413274 - RNA, 19 nt, Artificial Sequence
  Description of Artificial Sequence: Synthetic oligonucleotide
  Sense strand starting at position 296 of SEQ ID NO: 1886491
agcccugagacuggaugau

SEQ ID NO: 2413275 - RNA, 19 nt, Artificial Sequence
  Description of Artificial Sequence: Synthetic oligonucleotide
  Antisense strand to SEQ ID NO: 2413274
aucauccagucucagggcu

SEQ ID NO: 2413276 - RNA, 19 nt, Artificial Sequence
  Description of Artificial Sequence: Synthetic oligonucleotide
  Sense strand starting at position 355 of SEQ ID NO: 1886491
ggaagucaugcccagguuu

SEQ ID NO: 2413277 - RNA, 19 nt, Artificial Sequence
  Description of Artificial Sequence: Synthetic oligonucleotide
  Antisense strand to SEQ ID NO: 2413276
aaaccugggcaugacuucc

SEQ ID NO: 2413278 - RNA, 19 nt, Artificial Sequence
  Description of Artificial Sequence: Synthetic oligonucleotide
  Sense strand starting at position 357 of SEQ ID NO: 1886491
aagucaugcccagguuuaa

SEQ ID NO: 2413279 - RNA, 19 nt, Artificial Sequence
  Description of Artificial Sequence: Synthetic oligonucleotide
  Antisense strand to SEQ ID NO: 2413278
uuaaaccugggcaugacuu

SEQ ID NO: 2413280 - RNA, 19 nt, Artificial Sequence
  Description of Artificial Sequence: Synthetic oligonucleotide
  Sense strand starting at position 803 of SEQ ID NO: 1886491
gucugagcaacaugaagaa

SEQ ID NO: 2413281 - RNA, 19 nt, Artificial Sequence
  Description of Artificial Sequence: Synthetic oligonucleotide
  Antisense strand to SEQ ID NO: 2413280
uucuucauguugcucagac

SEQ ID NO: 2413282 - RNA, 19 nt, Artificial Sequence
  Description of Artificial Sequence: Synthetic oligonucleotide
  Sense strand starting at position 1231 of SEQ ID NO: 1886491
aaaccauuccuggguaggu

SEQ ID NO: 2413283 - RNA, 19 nt, Artificial Sequence
  Description of Artificial Sequence: Synthetic oligonucleotide
  Antisense strand to SEQ ID NO: 2413282
accuacccaggaaugguuu

SEQ ID NO: 2413284 - RNA, 19 nt, Artificial Sequence
  Description of Artificial Sequence: Synthetic oligonucleotide
  Sense strand starting at position 1322 of SEQ ID NO: 1886491
gggugucugauugauggga

SEQ ID NO: 2413285 - RNA, 19 nt, Artificial Sequence
  Description of Artificial Sequence: Synthetic oligonucleotide
  Antisense strand to SEQ ID NO: 2413284
ucccaucaaucagacaccc

SEQ ID NO: 2413286 - RNA, 19 nt, Artificial Sequence
  Description of Artificial Sequence: Synthetic oligonucleotide
  Sense strand starting at position 1551 of SEQ ID NO: 1886491
cggcuaugagccuggacuu

SEQ ID NO: 2413287 - RNA, 19 nt, Artificial Sequence
  Description of Artificial Sequence: Synthetic oligonucleotide
  Antisense strand to SEQ ID NO: 2413286
aaguccaggcucauagccg

SEQ ID NO: 2413288 - RNA, 19 nt, Artificial Sequence
  Description of Artificial Sequence: Synthetic oligonucleotide
  Sense strand starting at position 1552 of SEQ ID NO: 1886491
ggcuaugagccuggacuua

SEQ ID NO: 2413289 - RNA, 19 nt, Artificial Sequence
  Description of Artificial Sequence: Synthetic oligonucleotide
  Antisense strand to SEQ ID NO: 2413288
uaaguccaggcucauagcc

SEQ ID NO: 2413290 - RNA, 19 nt, Artificial Sequence
  Description of Artificial Sequence: Synthetic oligonucleotide
  Sense strand starting at position 1614 of SEQ ID NO: 1886491
cgcugaggcuggcugaaau

SEQ ID NO: 2413291 - RNA, 19 nt, Artificial Sequence
  Description of Artificial Sequence: Synthetic oligonucleotide
  Antisense strand to SEQ ID NO: 2413290
auuucagccagccucagcg

SEQ ID NO: 2413292 - RNA, 19 nt, Artificial Sequence
  Description of Artificial Sequence: Synthetic oligonucleotide
  Sense strand starting at position 2769 of SEQ ID NO: 1886491
gcgcaagguuccugcaaca

SEQ ID NO: 2413293 - RNA, 19 nt, Artificial Sequence
  Description of Artificial Sequence: Synthetic oligonucleotide
  Antisense strand to SEQ ID NO: 2413292
uguugcaggaaccuugcgc

SEQ ID NO: 2413294 - RNA, 19 nt, Artificial Sequence
  Description of Artificial Sequence: Synthetic oligonucleotide
  Sense strand starting at position 2806 of SEQ ID NO: 1886491
gcagaacugguuugggcaa

SEQ ID NO: 2413295 - RNA, 19 nt, Artificial Sequence
  Description of Artificial Sequence: Synthetic oligonucleotide
  Antisense strand to SEQ ID NO: 2413294
uugcccaaaccaguucugc

SEQ ID NO: 2413296 - RNA, 19 nt, Artificial Sequence
  Description of Artificial Sequence: Synthetic oligonucleotide
  Sense strand starting at position 3108 of SEQ ID NO: 1886491
cagagagguuaguaguauu

SEQ ID NO: 2413297 - RNA, 19 nt, Artificial Sequence
  Description of Artificial Sequence: Synthetic oligonucleotide
  Antisense strand to SEQ ID NO: 2413296
aauacuacuaaccucucug

SEQ ID NO: 2413298 - RNA, 19 nt, Artificial Sequence
  Description of Artificial Sequence: Synthetic oligonucleotide
  Sense strand starting at position 3116 of SEQ ID NO: 1886491
uuaguaguauucucaaggu

SEQ ID NO: 2413299 - RNA, 19 nt, Artificial Sequence
  Description of Artificial Sequence: Synthetic oligonucleotide
  Antisense strand to SEQ ID NO: 2413298
accuugagaauacuacuaa

SEQ ID NO: 2413300 - RNA, 19 nt, Artificial Sequence
  Description of Artificial Sequence: Synthetic oligonucleotide
  Sense strand starting at position 3159 of SEQ ID NO: 1886491
aggauuagaucugaguccu

SEQ ID NO: 2413301 - RNA, 19 nt, Artificial Sequence
  Description of Artificial Sequence: Synthetic oligonucleotide
  Antisense strand to SEQ ID NO: 2413300
aggacucagaucuaauccu

SEQ ID NO: 2413302 - RNA, 19 nt, Artificial Sequence
  Description of Artificial Sequence: Synthetic oligonucleotide
  Sense strand starting at position 3403 of SEQ ID NO: 1886491
cugggucccgcuugagaga

SEQ ID NO: 2413303 - RNA, 19 nt, Artificial Sequence
  Description of Artificial Sequence: Synthetic oligonucleotide
  Antisense strand to SEQ ID NO: 2413302
ucucucaagcgggacccag

SEQ ID NO: 2413304 - RNA, 19 nt, Artificial Sequence
  Description of Artificial Sequence: Synthetic oligonucleotide
  Sense strand starting at position 3694 of SEQ ID NO: 1886491
gcaguugccauggagacaa

SEQ ID NO: 2413305 - RNA, 19 nt, Artificial Sequence
  Description of Artificial Sequence: Synthetic oligonucleotide
  Antisense strand to SEQ ID NO: 2413304
uugucuccauggcaacugc

SEQ ID NO: 2413306 - RNA, 19 nt, Artificial Sequence
  Description of Artificial Sequence: Synthetic oligonucleotide
  Sense strand starting at position 3908 of SEQ ID NO: 1886491
gugccagucuuggugugua

SEQ ID NO: 2413307 - RNA, 19 nt, Artificial Sequence
  Description of Artificial Sequence: Synthetic oligonucleotide
  Antisense strand to SEQ ID NO: 2413306
uacacaccaagacuggcac

SEQ ID NO: 2413308 - RNA, 19 nt, Artificial Sequence
  Description of Artificial Sequence: Synthetic oligonucleotide
  Sense strand starting at position 3911 of SEQ ID NO: 1886491
ccagucuugguguguagga

SEQ ID NO: 2413309 - RNA, 19 nt, Artificial Sequence
  Description of Artificial Sequence: Synthetic oligonucleotide
  Antisense strand to SEQ ID NO: 2413308
uccuacacaccaagacugg

SEQ ID NO: 2413310 - RNA, 19 nt, Artificial Sequence
  Description of Artificial Sequence: Synthetic oligonucleotide
  Sense strand starting at position 3912 of SEQ ID NO: 1886491
cagucuugguguguaggaa

SEQ ID NO: 2413311 - RNA, 19 nt, Artificial Sequence
  Description of Artificial Sequence: Synthetic oligonucleotide
  Antisense strand to SEQ ID NO: 2413310
uuccuacacaccaagacug

SEQ ID NO: 2413312 - RNA, 19 nt, Artificial Sequence
  Description of Artificial Sequence: Synthetic oligonucleotide
  Sense strand starting at position 3916 of SEQ ID NO: 1886491
cuugguguguaggaaguau

SEQ ID NO: 2413313 - RNA, 19 nt, Artificial Sequence
  Description of Artificial Sequence: Synthetic oligonucleotide
  Antisense strand to SEQ ID NO: 2413312
auacuuccuacacaccaag

SEQ ID NO: 2413314 - RNA, 19 nt, Artificial Sequence
  Description of Artificial Sequence: Synthetic oligonucleotide
  Sense strand starting at position 524 of SEQ ID NO: 1886492
caguuauucuuccuuggga

SEQ ID NO: 2413315 - RNA, 19 nt, Artificial Sequence
  Description of Artificial Sequence: Synthetic oligonucleotide
  Antisense strand to SEQ ID NO: 2413314
ucccaaggaagaauaacug

SEQ ID NO: 2413316 - RNA, 19 nt, Artificial Sequence
  Description of Artificial Sequence: Synthetic oligonucleotide
  Sense strand starting at position 525 of SEQ ID NO: 1886492
aguuauucuuccuugggaa

SEQ ID NO: 2413317 - RNA, 19 nt, Artificial Sequence
  Description of Artificial Sequence: Synthetic oligonucleotide
  Antisense strand to SEQ ID NO: 2413316
uucccaaggaagaauaacu

SEQ ID NO: 2413318 - RNA, 19 nt, Artificial Sequence
  Description of Artificial Sequence: Synthetic oligonucleotide
  Sense strand starting at position 526 of SEQ ID NO: 1886492
guuauucuuccuugggaac

SEQ ID NO: 2413319 - RNA, 19 nt, Artificial Sequence
  Description of Artificial Sequence: Synthetic oligonucleotide
  Antisense strand to SEQ ID NO: 2413318
guucccaaggaagaauaac

SEQ ID NO: 2413320 - RNA, 19 nt, Artificial Sequence
  Description of Artificial Sequence: Synthetic oligonucleotide
  Sense strand starting at position 527 of SEQ ID NO: 1886492
uuauucuuccuugggaacu

SEQ ID NO: 2413321 - RNA, 19 nt, Artificial Sequence
  Description of Artificial Sequence: Synthetic oligonucleotide
  Antisense strand to SEQ ID NO: 2413320
aguucccaaggaagaauaa

SEQ ID NO: 2413322 - RNA, 19 nt, Artificial Sequence
  Description of Artificial Sequence: Synthetic oligonucleotide
  Sense strand starting at position 820 of SEQ ID NO: 1886492
cugggugauaucuguaaau

SEQ ID NO: 2413323 - RNA, 19 nt, Artificial Sequence
  Description of Artificial Sequence: Synthetic oligonucleotide
  Antisense strand to SEQ ID NO: 2413322
auuuacagauaucacccag

SEQ ID NO: 2413324 - RNA, 19 nt, Artificial Sequence
  Description of Artificial Sequence: Synthetic oligonucleotide
  Sense strand starting at position 840 of SEQ ID NO: 1886492
augguuccaugaguuuaga

SEQ ID NO: 2413325 - RNA, 19 nt, Artificial Sequence
  Description of Artificial Sequence: Synthetic oligonucleotide
  Antisense strand to SEQ ID NO: 2413324
ucuaaacucauggaaccau

SEQ ID NO: 2413326 - RNA, 19 nt, Artificial Sequence
  Description of Artificial Sequence: Synthetic oligonucleotide
  Sense strand starting at position 843 of SEQ ID NO: 1886492
guuccaugaguuuagaaau

SEQ ID NO: 2413327 - RNA, 19 nt, Artificial Sequence
  Description of Artificial Sequence: Synthetic oligonucleotide
  Antisense strand to SEQ ID NO: 2413326
auuucuaaacucauggaac

SEQ ID NO: 2413328 - RNA, 19 nt, Artificial Sequence
  Description of Artificial Sequence: Synthetic oligonucleotide
  Sense strand starting at position 929 of SEQ ID NO: 1886492
uucuaucacccaggaaguu

SEQ ID NO: 2413329 - RNA, 19 nt, Artificial Sequence
  Description of Artificial Sequence: Synthetic oligonucleotide
  Antisense strand to SEQ ID NO: 2413328
aacuuccugggugauagaa

SEQ ID NO: 2413330 - RNA, 19 nt, Artificial Sequence
  Description of Artificial Sequence: Synthetic oligonucleotide
  Sense strand starting at position 938 of SEQ ID NO: 1886492
ccaggaaguucucuugugu

SEQ ID NO: 2413331 - RNA, 19 nt, Artificial Sequence
  Description of Artificial Sequence: Synthetic oligonucleotide
  Antisense strand to SEQ ID NO: 2413330
acacaagagaacuuccugg

SEQ ID NO: 2413332 - RNA, 19 nt, Artificial Sequence
  Description of Artificial Sequence: Synthetic oligonucleotide
  Sense strand starting at position 951 of SEQ ID NO: 1886492
uugugucuggaccaaacau

SEQ ID NO: 2413333 - RNA, 19 nt, Artificial Sequence
  Description of Artificial Sequence: Synthetic oligonucleotide
  Antisense strand to SEQ ID NO: 2413332
auguuugguccagacacaa

SEQ ID NO: 2413334 - RNA, 19 nt, Artificial Sequence
  Description of Artificial Sequence: Synthetic oligonucleotide
  Sense strand starting at position 978 of SEQ ID NO: 1886492
acagguaagcucuguuagu

SEQ ID NO: 2413335 - RNA, 19 nt, Artificial Sequence
  Description of Artificial Sequence: Synthetic oligonucleotide
  Antisense strand to SEQ ID NO: 2413334
acuaacagagcuuaccugu

SEQ ID NO: 2413336 - RNA, 19 nt, Artificial Sequence
  Description of Artificial Sequence: Synthetic oligonucleotide
  Sense strand starting at position 1192 of SEQ ID NO: 1886492
agacuuccgucucugcaaa

SEQ ID NO: 2413337 - RNA, 19 nt, Artificial Sequence
  Description of Artificial Sequence: Synthetic oligonucleotide
  Antisense strand to SEQ ID NO: 2413336
uuugcagagacggaagucu

SEQ ID NO: 2413338 - RNA, 19 nt, Artificial Sequence
  Description of Artificial Sequence: Synthetic oligonucleotide
  Sense strand starting at position 1376 of SEQ ID NO: 1886492
guguguuguguuuauugga

SEQ ID NO: 2413339 - RNA, 19 nt, Artificial Sequence
  Description of Artificial Sequence: Synthetic oligonucleotide
  Antisense strand to SEQ ID NO: 2413338
uccaauaaacacaacacac

SEQ ID NO: 2413340 - RNA, 19 nt, Artificial Sequence
  Description of Artificial Sequence: Synthetic oligonucleotide
  Sense strand starting at position 1383 of SEQ ID NO: 1886492
guguuuauuggauggugga

SEQ ID NO: 2413341 - RNA, 19 nt, Artificial Sequence
  Description of Artificial Sequence: Synthetic oligonucleotide
  Antisense strand to SEQ ID NO: 2413340
uccaccauccaauaaacac

SEQ ID NO: 2413342 - RNA, 19 nt, Artificial Sequence
  Description of Artificial Sequence: Synthetic oligonucleotide
  Sense strand starting at position 1384 of SEQ ID NO: 1886492
uguuuauuggaugguggaa

SEQ ID NO: 2413343 - RNA, 19 nt, Artificial Sequence
  Description of Artificial Sequence: Synthetic oligonucleotide
  Antisense strand to SEQ ID NO: 2413342
uuccaccauccaauaaaca

SEQ ID NO: 2413344 - RNA, 19 nt, Artificial Sequence
  Description of Artificial Sequence: Synthetic oligonucleotide
  Sense strand starting at position 1450 of SEQ ID NO: 1886492
accuguuaucgcguuccua

SEQ ID NO: 2413345 - RNA, 19 nt, Artificial Sequence
  Description of Artificial Sequence: Synthetic oligonucleotide
  Antisense strand to SEQ ID NO: 2413344
uaggaacgcgauaacaggu

SEQ ID NO: 2413346 - RNA, 19 nt, Artificial Sequence
  Description of Artificial Sequence: Synthetic oligonucleotide
  Sense strand starting at position 1451 of SEQ ID NO: 1886492
ccuguuaucgcguuccuaa

SEQ ID NO: 2413347 - RNA, 19 nt, Artificial Sequence
  Description of Artificial Sequence: Synthetic oligonucleotide
  Antisense strand to SEQ ID NO: 2413346
uuaggaacgcgauaacagg

SEQ ID NO: 2413348 - RNA, 19 nt, Artificial Sequence
  Description of Artificial Sequence: Synthetic oligonucleotide
  Sense strand starting at position 1452 of SEQ ID NO: 1886492
cuguuaucgcguuccuaac

SEQ ID NO: 2413349 - RNA, 19 nt, Artificial Sequence
  Description of Artificial Sequence: Synthetic oligonucleotide
  Antisense strand to SEQ ID NO: 2413348
guuaggaacgcgauaacag

SEQ ID NO: 2413350 - RNA, 19 nt, Artificial Sequence
  Description of Artificial Sequence: Synthetic oligonucleotide
  Sense strand starting at position 1453 of SEQ ID NO: 1886492
uguuaucgcguuccuaaca

SEQ ID NO: 2413351 - RNA, 19 nt, Artificial Sequence
  Description of Artificial Sequence: Synthetic oligonucleotide
  Antisense strand to SEQ ID NO: 2413350
uguuaggaacgcgauaaca

SEQ ID NO: 2413352 - RNA, 19 nt, Artificial Sequence
  Description of Artificial Sequence: Synthetic oligonucleotide
  Sense strand starting at position 1461 of SEQ ID NO: 1886492
cguuccuaacaguagaaau

SEQ ID NO: 2413353 - RNA, 19 nt, Artificial Sequence
  Description of Artificial Sequence: Synthetic oligonucleotide
  Antisense strand to SEQ ID NO: 2413352
auuucuacuguuaggaacg

SEQ ID NO: 2413354 - RNA, 19 nt, Artificial Sequence
  Description of Artificial Sequence: Synthetic oligonucleotide
  Sense strand starting at position 1540 of SEQ ID NO: 1886492
uuacacauuuaaugugaga

SEQ ID NO: 2413355 - RNA, 19 nt, Artificial Sequence
  Description of Artificial Sequence: Synthetic oligonucleotide
  Antisense strand to SEQ ID NO: 2413354
ucucacauuaaauguguaa

SEQ ID NO: 2413356 - RNA, 19 nt, Artificial Sequence
  Description of Artificial Sequence: Synthetic oligonucleotide
  Sense strand starting at position 1545 of SEQ ID NO: 1886492
cauuuaaugugagauauga

SEQ ID NO: 2413357 - RNA, 19 nt, Artificial Sequence
  Description of Artificial Sequence: Synthetic oligonucleotide
  Antisense strand to SEQ ID NO: 2413356
ucauaucucacauuaaaug

SEQ ID NO: 2413358 - RNA, 19 nt, Artificial Sequence
  Description of Artificial Sequence: Synthetic oligonucleotide
  Sense strand starting at position 1554 of SEQ ID NO: 1886492
ugagauaugacaggcuuaa

SEQ ID NO: 2413359 - RNA, 19 nt, Artificial Sequence
  Description of Artificial Sequence: Synthetic oligonucleotide
  Antisense strand to SEQ ID NO: 2413358
uuaagccugucauaucuca

SEQ ID NO: 2413360 - RNA, 19 nt, Artificial Sequence
  Description of Artificial Sequence: Synthetic oligonucleotide
  Sense strand starting at position 1770 of SEQ ID NO: 1886492
gguagaauagcuugaacac

SEQ ID NO: 2413361 - RNA, 19 nt, Artificial Sequence
  Description of Artificial Sequence: Synthetic oligonucleotide
  Antisense strand to SEQ ID NO: 2413360
guguucaagcuauucuacc

SEQ ID NO: 2413362 - RNA, 19 nt, Artificial Sequence
  Description of Artificial Sequence: Synthetic oligonucleotide
  Sense strand starting at position 1901 of SEQ ID NO: 1886492
aaauaaacguuggcuuauu

SEQ ID NO: 2413363 - RNA, 19 nt, Artificial Sequence
  Description of Artificial Sequence: Synthetic oligonucleotide
  Antisense strand to SEQ ID NO: 2413362
aauaagccaacguuuauuu

SEQ ID NO: 2413364 - RNA, 19 nt, Artificial Sequence
  Description of Artificial Sequence: Synthetic oligonucleotide
  Sense strand starting at position 1912 of SEQ ID NO: 1886492
ggcuuauuucagugugaag

SEQ ID NO: 2413365 - RNA, 19 nt, Artificial Sequence
  Description of Artificial Sequence: Synthetic oligonucleotide
  Antisense strand to SEQ ID NO: 2413364
cuucacacugaaauaagcc

SEQ ID NO: 2413366 - RNA, 19 nt, Artificial Sequence
  Description of Artificial Sequence: Synthetic oligonucleotide
  Sense strand starting at position 1962 of SEQ ID NO: 1886492
cuucguagagcucagacau

SEQ ID NO: 2413367 - RNA, 19 nt, Artificial Sequence
  Description of Artificial Sequence: Synthetic oligonucleotide
  Antisense strand to SEQ ID NO: 2413366
augucugagcucuacgaag

SEQ ID NO: 2413368 - RNA, 19 nt, Artificial Sequence
  Description of Artificial Sequence: Synthetic oligonucleotide
  Sense strand starting at position 2444 of SEQ ID NO: 1886492
ugcucuuagagcuaaagag

SEQ ID NO: 2413369 - RNA, 19 nt, Artificial Sequence
  Description of Artificial Sequence: Synthetic oligonucleotide
  Antisense strand to SEQ ID NO: 2413368
cucuuuagcucuaagagca

SEQ ID NO: 2413370 - RNA, 19 nt, Artificial Sequence
  Description of Artificial Sequence: Synthetic oligonucleotide
  Sense strand starting at position 2540 of SEQ ID NO: 1886492
cugucauuccucuauugac

SEQ ID NO: 2413371 - RNA, 19 nt, Artificial Sequence
  Description of Artificial Sequence: Synthetic oligonucleotide
  Antisense strand to SEQ ID NO: 2413370
gucaauagaggaaugacag

SEQ ID NO: 2413372 - RNA, 19 nt, Artificial Sequence
  Description of Artificial Sequence: Synthetic oligonucleotide
  Sense strand starting at position 2559 of SEQ ID NO: 1886492
cuccucggugacgauuaua

SEQ ID NO: 2413373 - RNA, 19 nt, Artificial Sequence
  Description of Artificial Sequence: Synthetic oligonucleotide
  Antisense strand to SEQ ID NO: 2413372
uauaaucgucaccgaggag

SEQ ID NO: 2413374 - RNA, 19 nt, Artificial Sequence
  Description of Artificial Sequence: Synthetic oligonucleotide
  Sense strand starting at position 2638 of SEQ ID NO: 1886492
ucuguacuacucuguauuu

SEQ ID NO: 2413375 - RNA, 19 nt, Artificial Sequence
  Description of Artificial Sequence: Synthetic oligonucleotide
  Antisense strand to SEQ ID NO: 2413374
aaauacagaguaguacaga

SEQ ID NO: 2413376 - RNA, 19 nt, Artificial Sequence
  Description of Artificial Sequence: Synthetic oligonucleotide
  Sense strand starting at position 2871 of SEQ ID NO: 1886492
ggcuuucuguucuuauauc

SEQ ID NO: 2413377 - RNA, 19 nt, Artificial Sequence
  Description of Artificial Sequence: Synthetic oligonucleotide
  Antisense strand to SEQ ID NO: 2413376
gauauaagaacagaaagcc

SEQ ID NO: 2413378 - RNA, 19 nt, Artificial Sequence
  Description of Artificial Sequence: Synthetic oligonucleotide
  Sense strand starting at position 2904 of SEQ ID NO: 1886492
uagguuuguuuagugauaa

SEQ ID NO: 2413379 - RNA, 19 nt, Artificial Sequence
  Description of Artificial Sequence: Synthetic oligonucleotide
  Antisense strand to SEQ ID NO: 2413378
uuaucacuaaacaaaccua

SEQ ID NO: 2413380 - RNA, 19 nt, Artificial Sequence
  Description of Artificial Sequence: Synthetic oligonucleotide
  Sense strand starting at position 2916 of SEQ ID NO: 1886492
gugauaauggacugucuuu

SEQ ID NO: 2413381 - RNA, 19 nt, Artificial Sequence
  Description of Artificial Sequence: Synthetic oligonucleotide
  Antisense strand to SEQ ID NO: 2413380
aaagacaguccauuaucac

SEQ ID NO: 2413382 - RNA, 19 nt, Artificial Sequence
  Description of Artificial Sequence: Synthetic oligonucleotide
  Sense strand starting at position 2941 of SEQ ID NO: 1886492
guuguaguuguuucucuuu

SEQ ID NO: 2413383 - RNA, 19 nt, Artificial Sequence
  Description of Artificial Sequence: Synthetic oligonucleotide
  Antisense strand to SEQ ID NO: 2413382
aaagagaaacaacuacaac

SEQ ID NO: 2413384 - RNA, 19 nt, Artificial Sequence
  Description of Artificial Sequence: Synthetic oligonucleotide
  Sense strand starting at position 3324 of SEQ ID NO: 1886492
guuagaagugauggcuaau

SEQ ID NO: 2413385 - RNA, 19 nt, Artificial Sequence
  Description of Artificial Sequence: Synthetic oligonucleotide
  Antisense strand to SEQ ID NO: 2413384
auuagccaucacuucuaac

SEQ ID NO: 2413386 - RNA, 19 nt, Artificial Sequence
  Description of Artificial Sequence: Synthetic oligonucleotide
  Sense strand starting at position 3342 of SEQ ID NO: 1886492
uagaaauaucaguguagaa

SEQ ID NO: 2413387 - RNA, 19 nt, Artificial Sequence
  Description of Artificial Sequence: Synthetic oligonucleotide
  Antisense strand to SEQ ID NO: 2413386
uucuacacugauauuucua

SEQ ID NO: 2413388 - RNA, 19 nt, Artificial Sequence
  Description of Artificial Sequence: Synthetic oligonucleotide
  Sense strand starting at position 3346 of SEQ ID NO: 1886492
aauaucaguguagaaguua

SEQ ID NO: 2413389 - RNA, 19 nt, Artificial Sequence
  Description of Artificial Sequence: Synthetic oligonucleotide
  Antisense strand to SEQ ID NO: 2413388
uaacuucuacacugauauu

SEQ ID NO: 2413390 - RNA, 19 nt, Artificial Sequence
  Description of Artificial Sequence: Synthetic oligonucleotide
  Sense strand starting at position 3354 of SEQ ID NO: 1886492
uguagaaguuauucugaua

SEQ ID NO: 2413391 - RNA, 19 nt, Artificial Sequence
  Description of Artificial Sequence: Synthetic oligonucleotide
  Antisense strand to SEQ ID NO: 2413390
uaucagaauaacuucuaca

SEQ ID NO: 2413392 - RNA, 19 nt, Artificial Sequence
  Description of Artificial Sequence: Synthetic oligonucleotide
  Sense strand starting at position 3568 of SEQ ID NO: 1886492
aagggcagauuugauagaa

SEQ ID NO: 2413393 - RNA, 19 nt, Artificial Sequence
  Description of Artificial Sequence: Synthetic oligonucleotide
  Antisense strand to SEQ ID NO: 2413392
uucuaucaaaucugcccuu

SEQ ID NO: 2413394 - RNA, 19 nt, Artificial Sequence
  Description of Artificial Sequence: Synthetic oligonucleotide
  Sense strand starting at position 50 of SEQ ID NO: 1886493
ggaguagggcugggugauu

SEQ ID NO: 2413395 - RNA, 19 nt, Artificial Sequence
  Description of Artificial Sequence: Synthetic oligonucleotide
  Antisense strand to SEQ ID NO: 2413394
aaucacccagcccuacucc

SEQ ID NO: 2413396 - RNA, 19 nt, Artificial Sequence
  Description of Artificial Sequence: Synthetic oligonucleotide
  Sense strand starting at position 70 of SEQ ID NO: 1886493
gcaagcccuccugaucuua

SEQ ID NO: 2413397 - RNA, 19 nt, Artificial Sequence
  Description of Artificial Sequence: Synthetic oligonucleotide
  Antisense strand to SEQ ID NO: 2413396
uaagaucaggagggcuugc

SEQ ID NO: 2413398 - RNA, 19 nt, Artificial Sequence
  Description of Artificial Sequence: Synthetic oligonucleotide
  Sense strand starting at position 177 of SEQ ID NO: 1886493
gguaaagguguaugcaguu

SEQ ID NO: 2413399 - RNA, 19 nt, Artificial Sequence
  Description of Artificial Sequence: Synthetic oligonucleotide
  Antisense strand to SEQ ID NO: 2413398
aacugcauacaccuuuacc

SEQ ID NO: 2413400 - RNA, 19 nt, Artificial Sequence
  Description of Artificial Sequence: Synthetic oligonucleotide
  Sense strand starting at position 723 of SEQ ID NO: 1886493
ccuuguaaggccuagggaa

SEQ ID NO: 2413401 - RNA, 19 nt, Artificial Sequence
  Description of Artificial Sequence: Synthetic oligonucleotide
  Antisense strand to SEQ ID NO: 2413400
uucccuaggccuuacaagg

SEQ ID NO: 2413402 - RNA, 19 nt, Artificial Sequence
  Description of Artificial Sequence: Synthetic oligonucleotide
  Sense strand starting at position 888 of SEQ ID NO: 1886493
augauuaucuguccacguu

SEQ ID NO: 2413403 - RNA, 19 nt, Artificial Sequence
  Description of Artificial Sequence: Synthetic oligonucleotide
  Antisense strand to SEQ ID NO: 2413402
aacguggacagauaaucau

SEQ ID NO: 2413404 - RNA, 19 nt, Artificial Sequence
  Description of Artificial Sequence: Synthetic oligonucleotide
  Sense strand starting at position 889 of SEQ ID NO: 1886493
ugauuaucuguccacguuu

SEQ ID NO: 2413405 - RNA, 19 nt, Artificial Sequence
  Description of Artificial Sequence: Synthetic oligonucleotide
  Antisense strand to SEQ ID NO: 2413404
aaacguggacagauaauca

SEQ ID NO: 2413406 - RNA, 19 nt, Artificial Sequence
  Description of Artificial Sequence: Synthetic oligonucleotide
  Sense strand starting at position 961 of SEQ ID NO: 1886493
gagcuuuacuacuugggaa

SEQ ID NO: 2413407 - RNA, 19 nt, Artificial Sequence
  Description of Artificial Sequence: Synthetic oligonucleotide
  Antisense strand to SEQ ID NO: 2413406
uucccaaguaguaaagcuc

SEQ ID NO: 2413408 - RNA, 19 nt, Artificial Sequence
  Description of Artificial Sequence: Synthetic oligonucleotide
  Sense strand starting at position 962 of SEQ ID NO: 1886493
agcuuuacuacuugggaag

SEQ ID NO: 2413409 - RNA, 19 nt, Artificial Sequence
  Description of Artificial Sequence: Synthetic oligonucleotide
  Antisense strand to SEQ ID NO: 2413408
cuucccaaguaguaaagcu

SEQ ID NO: 2413410 - RNA, 19 nt, Artificial Sequence
  Description of Artificial Sequence: Synthetic oligonucleotide
  Sense strand starting at position 964 of SEQ ID NO: 1886493
cuuuacuacuugggaagga

SEQ ID NO: 2413411 - RNA, 19 nt, Artificial Sequence
  Description of Artificial Sequence: Synthetic oligonucleotide
  Antisense strand to SEQ ID NO: 2413410
uccuucccaaguaguaaag

SEQ ID NO: 2413412 - RNA, 19 nt, Artificial Sequence
  Description of Artificial Sequence: Synthetic oligonucleotide
  Sense strand starting at position 965 of SEQ ID NO: 1886493
uuuacuacuugggaaggaa

SEQ ID NO: 2413413 - RNA, 19 nt, Artificial Sequence
  Description of Artificial Sequence: Synthetic oligonucleotide
  Antisense strand to SEQ ID NO: 2413412
uuccuucccaaguaguaaa

SEQ ID NO: 2413414 - RNA, 19 nt, Artificial Sequence
  Description of Artificial Sequence: Synthetic oligonucleotide
  Sense strand starting at position 1330 of SEQ ID NO: 1886493
cccucaaucucauggugau

SEQ ID NO: 2413415 - RNA, 19 nt, Artificial Sequence
  Description of Artificial Sequence: Synthetic oligonucleotide
  Antisense strand to SEQ ID NO: 2413414
aucaccaugagauugaggg

SEQ ID NO: 2413416 - RNA, 19 nt, Artificial Sequence
  Description of Artificial Sequence: Synthetic oligonucleotide
  Sense strand starting at position 1331 of SEQ ID NO: 1886493
ccucaaucucauggugauc

SEQ ID NO: 2413417 - RNA, 19 nt, Artificial Sequence
  Description of Artificial Sequence: Synthetic oligonucleotide
  Antisense strand to SEQ ID NO: 2413416
gaucaccaugagauugagg

SEQ ID NO: 2413418 - RNA, 19 nt, Artificial Sequence
  Description of Artificial Sequence: Synthetic oligonucleotide
  Sense strand starting at position 1601 of SEQ ID NO: 1886493
ggaugagugucauucccug

SEQ ID NO: 2413419 - RNA, 19 nt, Artificial Sequence
  Description of Artificial Sequence: Synthetic oligonucleotide
  Antisense strand to SEQ ID NO: 2413418
cagggaaugacacucaucc

SEQ ID NO: 2413420 - RNA, 19 nt, Artificial Sequence
  Description of Artificial Sequence: Synthetic oligonucleotide
  Sense strand starting at position 1605 of SEQ ID NO: 1886493
gagugucauucccugacac

SEQ ID NO: 2413421 - RNA, 19 nt, Artificial Sequence
  Description of Artificial Sequence: Synthetic oligonucleotide
  Antisense strand to SEQ ID NO: 2413420
gugucagggaaugacacuc

SEQ ID NO: 2413422 - RNA, 19 nt, Artificial Sequence
  Description of Artificial Sequence: Synthetic oligonucleotide
  Sense strand starting at position 2180 of SEQ ID NO: 1886493
cccugugcucuugaggacu

SEQ ID NO: 2413423 - RNA, 19 nt, Artificial Sequence
  Description of Artificial Sequence: Synthetic oligonucleotide
  Antisense strand to SEQ ID NO: 2413422
aguccucaagagcacaggg

SEQ ID NO: 2413424 - RNA, 19 nt, Artificial Sequence
  Description of Artificial Sequence: Synthetic oligonucleotide
  Sense strand starting at position 2188 of SEQ ID NO: 1886493
ucuugaggacucugaguca

SEQ ID NO: 2413425 - RNA, 19 nt, Artificial Sequence
  Description of Artificial Sequence: Synthetic oligonucleotide
  Antisense strand to SEQ ID NO: 2413424
ugacucagaguccucaaga

SEQ ID NO: 2413426 - RNA, 19 nt, Artificial Sequence
  Description of Artificial Sequence: Synthetic oligonucleotide
  Sense strand starting at position 2498 of SEQ ID NO: 1886493
uggugccuugaugaaacau

SEQ ID NO: 2413427 - RNA, 19 nt, Artificial Sequence
  Description of Artificial Sequence: Synthetic oligonucleotide
  Antisense strand to SEQ ID NO: 2413426
auguuucaucaaggcacca

SEQ ID NO: 2413428 - RNA, 19 nt, Artificial Sequence
  Description of Artificial Sequence: Synthetic oligonucleotide
  Sense strand starting at position 2610 of SEQ ID NO: 1886493
gagucauugccauagggcu

SEQ ID NO: 2413429 - RNA, 19 nt, Artificial Sequence
  Description of Artificial Sequence: Synthetic oligonucleotide
  Antisense strand to SEQ ID NO: 2413428
agcccuauggcaaugacuc

SEQ ID NO: 2413430 - RNA, 19 nt, Artificial Sequence
  Description of Artificial Sequence: Synthetic oligonucleotide
  Sense strand starting at position 2993 of SEQ ID NO: 1886493
accaguccuugcguugaua

SEQ ID NO: 2413431 - RNA, 19 nt, Artificial Sequence
  Description of Artificial Sequence: Synthetic oligonucleotide
  Antisense strand to SEQ ID NO: 2413430
uaucaacgcaaggacuggu

SEQ ID NO: 2413432 - RNA, 19 nt, Artificial Sequence
  Description of Artificial Sequence: Synthetic oligonucleotide
  Sense strand starting at position 2995 of SEQ ID NO: 1886493
caguccuugcguugauaac

SEQ ID NO: 2413433 - RNA, 19 nt, Artificial Sequence
  Description of Artificial Sequence: Synthetic oligonucleotide
  Antisense strand to SEQ ID NO: 2413432
guuaucaacgcaaggacug

SEQ ID NO: 2413434 - RNA, 19 nt, Artificial Sequence
  Description of Artificial Sequence: Synthetic oligonucleotide
  Sense strand starting at position 3059 of SEQ ID NO: 1886493
ggaagauuccuuggagcca

SEQ ID NO: 2413435 - RNA, 19 nt, Artificial Sequence
  Description of Artificial Sequence: Synthetic oligonucleotide
  Antisense strand to SEQ ID NO: 2413434
uggcuccaaggaaucuucc

SEQ ID NO: 2413436 - RNA, 19 nt, Artificial Sequence
  Description of Artificial Sequence: Synthetic oligonucleotide
  Sense strand starting at position 3278 of SEQ ID NO: 1886493
ccguguguuccuggccacu

SEQ ID NO: 2413437 - RNA, 19 nt, Artificial Sequence
  Description of Artificial Sequence: Synthetic oligonucleotide
  Antisense strand to SEQ ID NO: 2413436
aguggccaggaacacacgg

SEQ ID NO: 2413438 - RNA, 19 nt, Artificial Sequence
  Description of Artificial Sequence: Synthetic oligonucleotide
  Sense strand starting at position 3457 of SEQ ID NO: 1886493
acguguguuccauggguuu

SEQ ID NO: 2413439 - RNA, 19 nt, Artificial Sequence
  Description of Artificial Sequence: Synthetic oligonucleotide
  Antisense strand to SEQ ID NO: 2413438
aaacccauggaacacacgu

SEQ ID NO: 2413440 - RNA, 19 nt, Artificial Sequence
  Description of Artificial Sequence: Synthetic oligonucleotide
  Sense strand starting at position 3741 of SEQ ID NO: 1886493
acuggacauuguucccaga

SEQ ID NO: 2413441 - RNA, 19 nt, Artificial Sequence
  Description of Artificial Sequence: Synthetic oligonucleotide
  Antisense strand to SEQ ID NO: 2413440
ucugggaacaauguccagu

SEQ ID NO: 2413442 - RNA, 19 nt, Artificial Sequence
  Description of Artificial Sequence: Synthetic oligonucleotide
  Sense strand starting at position 3743 of SEQ ID NO: 1886493
uggacauuguucccagagu

SEQ ID NO: 2413443 - RNA, 19 nt, Artificial Sequence
  Description of Artificial Sequence: Synthetic oligonucleotide
  Antisense strand to SEQ ID NO: 2413442
acucugggaacaaugucca

SEQ ID NO: 2413444 - RNA, 19 nt, Artificial Sequence
  Description of Artificial Sequence: Synthetic oligonucleotide
  Sense strand starting at position 3744 of SEQ ID NO: 1886493
ggacauuguucccagaguc

SEQ ID NO: 2413445 - RNA, 19 nt, Artificial Sequence
  Description of Artificial Sequence: Synthetic oligonucleotide
  Antisense strand to SEQ ID NO: 2413444
gacucugggaacaaugucc

SEQ ID NO: 2413446 - RNA, 19 nt, Artificial Sequence
  Description of Artificial Sequence: Synthetic oligonucleotide
  Sense strand starting at position 3798 of SEQ ID NO: 1886493
ugugcuguugcguggguua

SEQ ID NO: 2413447 - RNA, 19 nt, Artificial Sequence
  Description of Artificial Sequence: Synthetic oligonucleotide
  Antisense strand to SEQ ID NO: 2413446
uaacccacgcaacagcaca

SEQ ID NO: 2413448 - RNA, 19 nt, Artificial Sequence
  Description of Artificial Sequence: Synthetic oligonucleotide
  Sense strand starting at position 3799 of SEQ ID NO: 1886493
gugcuguugcguggguuau

SEQ ID NO: 2413449 - RNA, 19 nt, Artificial Sequence
  Description of Artificial Sequence: Synthetic oligonucleotide
  Antisense strand to SEQ ID NO: 2413448
auaacccacgcaacagcac

SEQ ID NO: 2413450 - RNA, 19 nt, Artificial Sequence
  Description of Artificial Sequence: Synthetic oligonucleotide
  Sense strand starting at position 3801 of SEQ ID NO: 1886493
gcuguugcguggguuauga

SEQ ID NO: 2413451 - RNA, 19 nt, Artificial Sequence
  Description of Artificial Sequence: Synthetic oligonucleotide
  Antisense strand to SEQ ID NO: 2413450
ucauaacccacgcaacagc

SEQ ID NO: 2413452 - RNA, 19 nt, Artificial Sequence
  Description of Artificial Sequence: Synthetic oligonucleotide
  Sense strand starting at position 3803 of SEQ ID NO: 1886493
uguugcguggguuaugaaa

SEQ ID NO: 2413453 - RNA, 19 nt, Artificial Sequence
  Description of Artificial Sequence: Synthetic oligonucleotide
  Antisense strand to SEQ ID NO: 2413452
uuucauaacccacgcaaca

SEQ ID NO: 2413454 - RNA, 19 nt, Artificial Sequence
  Description of Artificial Sequence: Synthetic oligonucleotide
  Sense strand starting at position 3805 of SEQ ID NO: 1886493
uugcguggguuaugaaaga

SEQ ID NO: 2413455 - RNA, 19 nt, Artificial Sequence
  Description of Artificial Sequence: Synthetic oligonucleotide
  Antisense strand to SEQ ID NO: 2413454
ucuuucauaacccacgcaa

SEQ ID NO: 2413456 - RNA, 19 nt, Artificial Sequence
  Description of Artificial Sequence: Synthetic oligonucleotide
  Sense strand starting at position 3898 of SEQ ID NO: 1886493
cucaguaaagcugguuuga

SEQ ID NO: 2413457 - RNA, 19 nt, Artificial Sequence
  Description of Artificial Sequence: Synthetic oligonucleotide
  Antisense strand to SEQ ID NO: 2413456
ucaaaccagcuuuacugag

SEQ ID NO: 2413458 - RNA, 19 nt, Artificial Sequence
  Description of Artificial Sequence: Synthetic oligonucleotide
  Sense strand starting at position 3903 of SEQ ID NO: 1886493
uaaagcugguuugaccaau

SEQ ID NO: 2413459 - RNA, 19 nt, Artificial Sequence
  Description of Artificial Sequence: Synthetic oligonucleotide
  Antisense strand to SEQ ID NO: 2413458
auuggucaaaccagcuuua

SEQ ID NO: 2413460 - RNA, 19 nt, Artificial Sequence
  Description of Artificial Sequence: Synthetic oligonucleotide
  Sense strand starting at position 54 of SEQ ID NO: 1886494
uggcuuguugcuguguaau

SEQ ID NO: 2413461 - RNA, 19 nt, Artificial Sequence
  Description of Artificial Sequence: Synthetic oligonucleotide
  Antisense strand to SEQ ID NO: 2413460
auuacacagcaacaagcca

SEQ ID NO: 2413462 - RNA, 19 nt, Artificial Sequence
  Description of Artificial Sequence: Synthetic oligonucleotide
  Sense strand starting at position 137 of SEQ ID NO: 1886494
acaugugaaagugauuguu

SEQ ID NO: 2413463 - RNA, 19 nt, Artificial Sequence
  Description of Artificial Sequence: Synthetic oligonucleotide
  Antisense strand to SEQ ID NO: 2413462
aacaaucacuuucacaugu

SEQ ID NO: 2413464 - RNA, 19 nt, Artificial Sequence
  Description of Artificial Sequence: Synthetic oligonucleotide
  Sense strand starting at position 143 of SEQ ID NO: 1886494
gaaagugauuguucugacu

SEQ ID NO: 2413465 - RNA, 19 nt, Artificial Sequence
  Description of Artificial Sequence: Synthetic oligonucleotide
  Antisense strand to SEQ ID NO: 2413464
agucagaacaaucacuuuc

SEQ ID NO: 2413466 - RNA, 19 nt, Artificial Sequence
  Description of Artificial Sequence: Synthetic oligonucleotide
  Sense strand starting at position 224 of SEQ ID NO: 1886494
ccaggauucucuuugaagu

SEQ ID NO: 2413467 - RNA, 19 nt, Artificial Sequence
  Description of Artificial Sequence: Synthetic oligonucleotide
  Antisense strand to SEQ ID NO: 2413466
acuucaaagagaauccugg

SEQ ID NO: 2413468 - RNA, 19 nt, Artificial Sequence
  Description of Artificial Sequence: Synthetic oligonucleotide
  Sense strand starting at position 225 of SEQ ID NO: 1886494
caggauucucuuugaaguu

SEQ ID NO: 2413469 - RNA, 19 nt, Artificial Sequence
  Description of Artificial Sequence: Synthetic oligonucleotide
  Antisense strand to SEQ ID NO: 2413468
aacuucaaagagaauccug

SEQ ID NO: 2413470 - RNA, 19 nt, Artificial Sequence
  Description of Artificial Sequence: Synthetic oligonucleotide
  Sense strand starting at position 399 of SEQ ID NO: 1886494
auuucuuucuuguucuagu

SEQ ID NO: 2413471 - RNA, 19 nt, Artificial Sequence
  Description of Artificial Sequence: Synthetic oligonucleotide
  Antisense strand to SEQ ID NO: 2413470
acuagaacaagaaagaaau

SEQ ID NO: 2413472 - RNA, 19 nt, Artificial Sequence
  Description of Artificial Sequence: Synthetic oligonucleotide
  Sense strand starting at position 533 of SEQ ID NO: 1886494
ucugauuugcugugugauc

SEQ ID NO: 2413473 - RNA, 19 nt, Artificial Sequence
  Description of Artificial Sequence: Synthetic oligonucleotide
  Antisense strand to SEQ ID NO: 2413472
gaucacacagcaaaucaga

SEQ ID NO: 2413474 - RNA, 19 nt, Artificial Sequence
  Description of Artificial Sequence: Synthetic oligonucleotide
  Sense strand starting at position 534 of SEQ ID NO: 1886494
cugauuugcugugugaucu

SEQ ID NO: 2413475 - RNA, 19 nt, Artificial Sequence
  Description of Artificial Sequence: Synthetic oligonucleotide
  Antisense strand to SEQ ID NO: 2413474
agaucacacagcaaaucag

SEQ ID NO: 2413476 - RNA, 19 nt, Artificial Sequence
  Description of Artificial Sequence: Synthetic oligonucleotide
  Sense strand starting at position 535 of SEQ ID NO: 1886494
ugauuugcugugugaucuu

SEQ ID NO: 2413477 - RNA, 19 nt, Artificial Sequence
  Description of Artificial Sequence: Synthetic oligonucleotide
  Antisense strand to SEQ ID NO: 2413476
aagaucacacagcaaauca

SEQ ID NO: 2413478 - RNA, 19 nt, Artificial Sequence
  Description of Artificial Sequence: Synthetic oligonucleotide
  Sense strand starting at position 553 of SEQ ID NO: 1886494
uggauaagauaguuaaccu

SEQ ID NO: 2413479 - RNA, 19 nt, Artificial Sequence
  Description of Artificial Sequence: Synthetic oligonucleotide
  Antisense strand to SEQ ID NO: 2413478
agguuaacuaucuuaucca

SEQ ID NO: 2413480 - RNA, 19 nt, Artificial Sequence
  Description of Artificial Sequence: Synthetic oligonucleotide
  Sense strand starting at position 727 of SEQ ID NO: 1886494
auuauugguuuccuauaug

SEQ ID NO: 2413481 - RNA, 19 nt, Artificial Sequence
  Description of Artificial Sequence: Synthetic oligonucleotide
  Antisense strand to SEQ ID NO: 2413480
cauauaggaaaccaauaau

SEQ ID NO: 2413482 - RNA, 19 nt, Artificial Sequence
  Description of Artificial Sequence: Synthetic oligonucleotide
  Sense strand starting at position 730 of SEQ ID NO: 1886494
auugguuuccuauaugcag

SEQ ID NO: 2413483 - RNA, 19 nt, Artificial Sequence
  Description of Artificial Sequence: Synthetic oligonucleotide
  Antisense strand to SEQ ID NO: 2413482
cugcauauaggaaaccaau

SEQ ID NO: 2413484 - RNA, 19 nt, Artificial Sequence
  Description of Artificial Sequence: Synthetic oligonucleotide
  Sense strand starting at position 764 of SEQ ID NO: 1886494
ugcaauaccucuucuagga

SEQ ID NO: 2413485 - RNA, 19 nt, Artificial Sequence
  Description of Artificial Sequence: Synthetic oligonucleotide
  Antisense strand to SEQ ID NO: 2413484
uccuagaagagguauugca

SEQ ID NO: 2413486 - RNA, 19 nt, Artificial Sequence
  Description of Artificial Sequence: Synthetic oligonucleotide
  Sense strand starting at position 998 of SEQ ID NO: 1886494
gcugucuauguuggauuua

SEQ ID NO: 2413487 - RNA, 19 nt, Artificial Sequence
  Description of Artificial Sequence: Synthetic oligonucleotide
  Antisense strand to SEQ ID NO: 2413486
uaaauccaacauagacagc

SEQ ID NO: 2413488 - RNA, 19 nt, Artificial Sequence
  Description of Artificial Sequence: Synthetic oligonucleotide
  Sense strand starting at position 1173 of SEQ ID NO: 1886494
auugauuucuucuuguugu

SEQ ID NO: 2413489 - RNA, 19 nt, Artificial Sequence
  Description of Artificial Sequence: Synthetic oligonucleotide
  Antisense strand to SEQ ID NO: 2413488
acaacaagaagaaaucaau

SEQ ID NO: 2413490 - RNA, 19 nt, Artificial Sequence
  Description of Artificial Sequence: Synthetic oligonucleotide
  Sense strand starting at position 1179 of SEQ ID NO: 1886494
uucuucuuguugucauuua

SEQ ID NO: 2413491 - RNA, 19 nt, Artificial Sequence
  Description of Artificial Sequence: Synthetic oligonucleotide
  Antisense strand to SEQ ID NO: 2413490
uaaaugacaacaagaagaa

SEQ ID NO: 2413492 - RNA, 19 nt, Artificial Sequence
  Description of Artificial Sequence: Synthetic oligonucleotide
  Sense strand starting at position 1362 of SEQ ID NO: 1886494
uucggucaccacuaaagau

SEQ ID NO: 2413493 - RNA, 19 nt, Artificial Sequence
  Description of Artificial Sequence: Synthetic oligonucleotide
  Antisense strand to SEQ ID NO: 2413492
aucuuuaguggugaccgaa

SEQ ID NO: 2413494 - RNA, 19 nt, Artificial Sequence
  Description of Artificial Sequence: Synthetic oligonucleotide
  Sense strand starting at position 1537 of SEQ ID NO: 1886494
aggcacacuuguucugaaa

SEQ ID NO: 2413495 - RNA, 19 nt, Artificial Sequence
  Description of Artificial Sequence: Synthetic oligonucleotide
  Antisense strand to SEQ ID NO: 2413494
uuucagaacaagugugccu

SEQ ID NO: 2413496 - RNA, 19 nt, Artificial Sequence
  Description of Artificial Sequence: Synthetic oligonucleotide
  Sense strand starting at position 1806 of SEQ ID NO: 1886494
cagagacgucaggguaauu

SEQ ID NO: 2413497 - RNA, 19 nt, Artificial Sequence
  Description of Artificial Sequence: Synthetic oligonucleotide
  Antisense strand to SEQ ID NO: 2413496
aauuacccugacgucucug

SEQ ID NO: 2413498 - RNA, 19 nt, Artificial Sequence
  Description of Artificial Sequence: Synthetic oligonucleotide
  Sense strand starting at position 1872 of SEQ ID NO: 1886494
ccgcuugcugugcuaauga

SEQ ID NO: 2413499 - RNA, 19 nt, Artificial Sequence
  Description of Artificial Sequence: Synthetic oligonucleotide
  Antisense strand to SEQ ID NO: 2413498
ucauuagcacagcaagcgg

SEQ ID NO: 2413500 - RNA, 19 nt, Artificial Sequence
  Description of Artificial Sequence: Synthetic oligonucleotide
  Sense strand starting at position 2048 of SEQ ID NO: 1886494
auagaaucccugugucuag

SEQ ID NO: 2413501 - RNA, 19 nt, Artificial Sequence
  Description of Artificial Sequence: Synthetic oligonucleotide
  Antisense strand to SEQ ID NO: 2413500
cuagacacagggauucuau

SEQ ID NO: 2413502 - RNA, 19 nt, Artificial Sequence
  Description of Artificial Sequence: Synthetic oligonucleotide
  Sense strand starting at position 2049 of SEQ ID NO: 1886494
uagaaucccugugucuaga

SEQ ID NO: 2413503 - RNA, 19 nt, Artificial Sequence
  Description of Artificial Sequence: Synthetic oligonucleotide
  Antisense strand to SEQ ID NO: 2413502
ucuagacacagggauucua

SEQ ID NO: 2413504 - RNA, 19 nt, Artificial Sequence
  Description of Artificial Sequence: Synthetic oligonucleotide
  Sense strand starting at position 2104 of SEQ ID NO: 1886494
ucacucacucauugugaua

SEQ ID NO: 2413505 - RNA, 19 nt, Artificial Sequence
  Description of Artificial Sequence: Synthetic oligonucleotide
  Antisense strand to SEQ ID NO: 2413504
uaucacaaugagugaguga

SEQ ID NO: 2413506 - RNA, 19 nt, Artificial Sequence
  Description of Artificial Sequence: Synthetic oligonucleotide
  Sense strand starting at position 2167 of SEQ ID NO: 1886494
gggcguaaaggagauguua

SEQ ID NO: 2413507 - RNA, 19 nt, Artificial Sequence
  Description of Artificial Sequence: Synthetic oligonucleotide
  Antisense strand to SEQ ID NO: 2413506
uaacaucuccuuuacgccc

SEQ ID NO: 2413508 - RNA, 19 nt, Artificial Sequence
  Description of Artificial Sequence: Synthetic oligonucleotide
  Sense strand starting at position 2359 of SEQ ID NO: 1886494
ugugucaccagucaucaga

SEQ ID NO: 2413509 - RNA, 19 nt, Artificial Sequence
  Description of Artificial Sequence: Synthetic oligonucleotide
  Antisense strand to SEQ ID NO: 2413508
ucugaugacuggugacaca

SEQ ID NO: 2413510 - RNA, 19 nt, Artificial Sequence
  Description of Artificial Sequence: Synthetic oligonucleotide
  Sense strand starting at position 2661 of SEQ ID NO: 1886494
ggaacugugagucaguaga

SEQ ID NO: 2413511 - RNA, 19 nt, Artificial Sequence
  Description of Artificial Sequence: Synthetic oligonucleotide
  Antisense strand to SEQ ID NO: 2413510
ucuacugacucacaguucc

SEQ ID NO: 2413512 - RNA, 19 nt, Artificial Sequence
  Description of Artificial Sequence: Synthetic oligonucleotide
  Sense strand starting at position 2770 of SEQ ID NO: 1886494
ggguuacuugaguguagga

SEQ ID NO: 2413513 - RNA, 19 nt, Artificial Sequence
  Description of Artificial Sequence: Synthetic oligonucleotide
  Antisense strand to SEQ ID NO: 2413512
uccuacacucaaguaaccc

SEQ ID NO: 2413514 - RNA, 19 nt, Artificial Sequence
  Description of Artificial Sequence: Synthetic oligonucleotide
  Sense strand starting at position 2822 of SEQ ID NO: 1886494
ucuucuugacgugauauau

SEQ ID NO: 2413515 - RNA, 19 nt, Artificial Sequence
  Description of Artificial Sequence: Synthetic oligonucleotide
  Antisense strand to SEQ ID NO: 2413514
auauaucacgucaagaaga

SEQ ID NO: 2413516 - RNA, 19 nt, Artificial Sequence
  Description of Artificial Sequence: Synthetic oligonucleotide
  Sense strand starting at position 2826 of SEQ ID NO: 1886494
cuugacgugauauaugcau

SEQ ID NO: 2413517 - RNA, 19 nt, Artificial Sequence
  Description of Artificial Sequence: Synthetic oligonucleotide
  Antisense strand to SEQ ID NO: 2413516
augcauauaucacgucaag

SEQ ID NO: 2413518 - RNA, 19 nt, Artificial Sequence
  Description of Artificial Sequence: Synthetic oligonucleotide
  Sense strand starting at position 2830 of SEQ ID NO: 1886494
acgugauauaugcauguga

SEQ ID NO: 2413519 - RNA, 19 nt, Artificial Sequence
  Description of Artificial Sequence: Synthetic oligonucleotide
  Antisense strand to SEQ ID NO: 2413518
ucacaugcauauaucacgu

SEQ ID NO: 2413520 - RNA, 19 nt, Artificial Sequence
  Description of Artificial Sequence: Synthetic oligonucleotide
  Sense strand starting at position 2973 of SEQ ID NO: 1886494
agaacucuuuauguagaag

SEQ ID NO: 2413521 - RNA, 19 nt, Artificial Sequence
  Description of Artificial Sequence: Synthetic oligonucleotide
  Antisense strand to SEQ ID NO: 2413520
cuucuacauaaagaguucu

SEQ ID NO: 2413522 - RNA, 19 nt, Artificial Sequence
  Description of Artificial Sequence: Synthetic oligonucleotide
  Sense strand starting at position 3045 of SEQ ID NO: 1886494
uuuccauggaaggguaauu

SEQ ID NO: 2413523 - RNA, 19 nt, Artificial Sequence
  Description of Artificial Sequence: Synthetic oligonucleotide
  Antisense strand to SEQ ID NO: 2413522
aauuacccuuccauggaaa

SEQ ID NO: 2413524 - RNA, 19 nt, Artificial Sequence
  Description of Artificial Sequence: Synthetic oligonucleotide
  Sense strand starting at position 3195 of SEQ ID NO: 1886494
agaguuugaguugagucuu

SEQ ID NO: 2413525 - RNA, 19 nt, Artificial Sequence
  Description of Artificial Sequence: Synthetic oligonucleotide
  Antisense strand to SEQ ID NO: 2413524
aagacucaacucaaacucu

SEQ ID NO: 2413526 - RNA, 19 nt, Artificial Sequence
  Description of Artificial Sequence: Synthetic oligonucleotide
  Sense strand starting at position 3258 of SEQ ID NO: 1886494
ggguacucugaucauguuu

SEQ ID NO: 2413527 - RNA, 19 nt, Artificial Sequence
  Description of Artificial Sequence: Synthetic oligonucleotide
  Antisense strand to SEQ ID NO: 2413526
aaacaugaucagaguaccc

SEQ ID NO: 2413528 - RNA, 19 nt, Artificial Sequence
  Description of Artificial Sequence: Synthetic oligonucleotide
  Sense strand starting at position 3401 of SEQ ID NO: 1886494
gggacaagauguuuaaucu

SEQ ID NO: 2413529 - RNA, 19 nt, Artificial Sequence
  Description of Artificial Sequence: Synthetic oligonucleotide
  Antisense strand to SEQ ID NO: 2413528
agauuaaacaucuuguccc

SEQ ID NO: 2413530 - RNA, 19 nt, Artificial Sequence
  Description of Artificial Sequence: Synthetic oligonucleotide
  Sense strand starting at position 3433 of SEQ ID NO: 1886494
uuccuacaucuguaaagug

SEQ ID NO: 2413531 - RNA, 19 nt, Artificial Sequence
  Description of Artificial Sequence: Synthetic oligonucleotide
  Antisense strand to SEQ ID NO: 2413530
cacuuuacagauguaggaa

SEQ ID NO: 2413532 - RNA, 19 nt, Artificial Sequence
  Description of Artificial Sequence: Synthetic oligonucleotide
  Sense strand starting at position 3438 of SEQ ID NO: 1886494
acaucuguaaagugagguu

SEQ ID NO: 2413533 - RNA, 19 nt, Artificial Sequence
  Description of Artificial Sequence: Synthetic oligonucleotide
  Antisense strand to SEQ ID NO: 2413532
aaccucacuuuacagaugu

SEQ ID NO: 2413534 - RNA, 19 nt, Artificial Sequence
  Description of Artificial Sequence: Synthetic oligonucleotide
  Sense strand starting at position 3552 of SEQ ID NO: 1886494
uucaaaggguuguuaggaa

SEQ ID NO: 2413535 - RNA, 19 nt, Artificial Sequence
  Description of Artificial Sequence: Synthetic oligonucleotide
  Antisense strand to SEQ ID NO: 2413534
uuccuaacaacccuuugaa

SEQ ID NO: 2413536 - RNA, 19 nt, Artificial Sequence
  Description of Artificial Sequence: Synthetic oligonucleotide
  Sense strand starting at position 3848 of SEQ ID NO: 1886494
gcccuccagccugaaauau

SEQ ID NO: 2413537 - RNA, 19 nt, Artificial Sequence
  Description of Artificial Sequence: Synthetic oligonucleotide
  Antisense strand to SEQ ID NO: 2413536
auauuucaggcuggagggc

SEQ ID NO: 2413538 - RNA, 19 nt, Artificial Sequence
  Description of Artificial Sequence: Synthetic oligonucleotide
  Sense strand starting at position 3934 of SEQ ID NO: 1886494
acgugauaugucuauuugc

SEQ ID NO: 2413539 - RNA, 19 nt, Artificial Sequence
  Description of Artificial Sequence: Synthetic oligonucleotide
  Antisense strand to SEQ ID NO: 2413538
gcaaauagacauaucacgu

SEQ ID NO: 2413540 - RNA, 19 nt, Artificial Sequence
  Description of Artificial Sequence: Synthetic oligonucleotide
  Sense strand starting at position 22 of SEQ ID NO: 1886495
auuagaagaauugguaagu

SEQ ID NO: 2413541 - RNA, 19 nt, Artificial Sequence
  Description of Artificial Sequence: Synthetic oligonucleotide
  Antisense strand to SEQ ID NO: 2413540
acuuaccaauucuucuaau

SEQ ID NO: 2413542 - RNA, 19 nt, Artificial Sequence
  Description of Artificial Sequence: Synthetic oligonucleotide
  Sense strand starting at position 23 of SEQ ID NO: 1886495
uuagaagaauugguaagua

SEQ ID NO: 2413543 - RNA, 19 nt, Artificial Sequence
  Description of Artificial Sequence: Synthetic oligonucleotide
  Antisense strand to SEQ ID NO: 2413542
uacuuaccaauucuucuaa

SEQ ID NO: 2413544 - RNA, 19 nt, Artificial Sequence
  Description of Artificial Sequence: Synthetic oligonucleotide
  Sense strand starting at position 31 of SEQ ID NO: 1886495
auugguaaguaauccaaau

SEQ ID NO: 2413545 - RNA, 19 nt, Artificial Sequence
  Description of Artificial Sequence: Synthetic oligonucleotide
  Antisense strand to SEQ ID NO: 2413544
auuuggauuacuuaccaau

SEQ ID NO: 2413546 - RNA, 19 nt, Artificial Sequence
  Description of Artificial Sequence: Synthetic oligonucleotide
  Sense strand starting at position 93 of SEQ ID NO: 1886495
cugugacugcugcauuaga

SEQ ID NO: 2413547 - RNA, 19 nt, Artificial Sequence
  Description of Artificial Sequence: Synthetic oligonucleotide
  Antisense strand to SEQ ID NO: 2413546
ucuaaugcagcagucacag

SEQ ID NO: 2413548 - RNA, 19 nt, Artificial Sequence
  Description of Artificial Sequence: Synthetic oligonucleotide
  Sense strand starting at position 101 of SEQ ID NO: 1886495
gcugcauuagaauggacau

SEQ ID NO: 2413549 - RNA, 19 nt, Artificial Sequence
  Description of Artificial Sequence: Synthetic oligonucleotide
  Antisense strand to SEQ ID NO: 2413548
auguccauucuaaugcagc

SEQ ID NO: 2413550 - RNA, 19 nt, Artificial Sequence
  Description of Artificial Sequence: Synthetic oligonucleotide
  Sense strand starting at position 132 of SEQ ID NO: 1886495
gaaacucgacagggugaau

SEQ ID NO: 2413551 - RNA, 19 nt, Artificial Sequence
  Description of Artificial Sequence: Synthetic oligonucleotide
  Antisense strand to SEQ ID NO: 2413550
auucacccugucgaguuuc

SEQ ID NO: 2413552 - RNA, 19 nt, Artificial Sequence
  Description of Artificial Sequence: Synthetic oligonucleotide
  Sense strand starting at position 177 of SEQ ID NO: 1886495
ugugguauuuguguagguu

SEQ ID NO: 2413553 - RNA, 19 nt, Artificial Sequence
  Description of Artificial Sequence: Synthetic oligonucleotide
  Antisense strand to SEQ ID NO: 2413552
aaccuacacaaauaccaca

SEQ ID NO: 2413554 - RNA, 19 nt, Artificial Sequence
  Description of Artificial Sequence: Synthetic oligonucleotide
  Sense strand starting at position 178 of SEQ ID NO: 1886495
gugguauuuguguagguua

SEQ ID NO: 2413555 - RNA, 19 nt, Artificial Sequence
  Description of Artificial Sequence: Synthetic oligonucleotide
  Antisense strand to SEQ ID NO: 2413554
uaaccuacacaaauaccac

SEQ ID NO: 2413556 - RNA, 19 nt, Artificial Sequence
  Description of Artificial Sequence: Synthetic oligonucleotide
  Sense strand starting at position 180 of SEQ ID NO: 1886495
gguauuuguguagguuaaa

SEQ ID NO: 2413557 - RNA, 19 nt, Artificial Sequence
  Description of Artificial Sequence: Synthetic oligonucleotide
  Antisense strand to SEQ ID NO: 2413556
uuuaaccuacacaaauacc

SEQ ID NO: 2413558 - RNA, 19 nt, Artificial Sequence
  Description of Artificial Sequence: Synthetic oligonucleotide
  Sense strand starting at position 181 of SEQ ID NO: 1886495
guauuuguguagguuaaac

SEQ ID NO: 2413559 - RNA, 19 nt, Artificial Sequence
  Description of Artificial Sequence: Synthetic oligonucleotide
  Antisense strand to SEQ ID NO: 2413558
guuuaaccuacacaaauac

SEQ ID NO: 2413560 - RNA, 19 nt, Artificial Sequence
  Description of Artificial Sequence: Synthetic oligonucleotide
  Sense strand starting at position 554 of SEQ ID NO: 1886495
aaggcuagaugugcuauaa

SEQ ID NO: 2413561 - RNA, 19 nt, Artificial Sequence
  Description of Artificial Sequence: Synthetic oligonucleotide
  Antisense strand to SEQ ID NO: 2413560
uuauagcacaucuagccuu

SEQ ID NO: 2413562 - RNA, 19 nt, Artificial Sequence
  Description of Artificial Sequence: Synthetic oligonucleotide
  Sense strand starting at position 558 of SEQ ID NO: 1886495
cuagaugugcuauaaagug

SEQ ID NO: 2413563 - RNA, 19 nt, Artificial Sequence
  Description of Artificial Sequence: Synthetic oligonucleotide
  Antisense strand to SEQ ID NO: 2413562
cacuuuauagcacaucuag

SEQ ID NO: 2413564 - RNA, 19 nt, Artificial Sequence
  Description of Artificial Sequence: Synthetic oligonucleotide
  Sense strand starting at position 567 of SEQ ID NO: 1886495
cuauaaagugcuuauuaug

SEQ ID NO: 2413565 - RNA, 19 nt, Artificial Sequence
  Description of Artificial Sequence: Synthetic oligonucleotide
  Antisense strand to SEQ ID NO: 2413564
cauaauaagcacuuuauag

SEQ ID NO: 2413566 - RNA, 19 nt, Artificial Sequence
  Description of Artificial Sequence: Synthetic oligonucleotide
  Sense strand starting at position 577 of SEQ ID NO: 1886495
cuuauuaugccugacuuga

SEQ ID NO: 2413567 - RNA, 19 nt, Artificial Sequence
  Description of Artificial Sequence: Synthetic oligonucleotide
  Antisense strand to SEQ ID NO: 2413566
ucaagucaggcauaauaag

SEQ ID NO: 2413568 - RNA, 19 nt, Artificial Sequence
  Description of Artificial Sequence: Synthetic oligonucleotide
  Sense strand starting at position 601 of SEQ ID NO: 1886495
cagugucuugcugaaccaa

SEQ ID NO: 2413569 - RNA, 19 nt, Artificial Sequence
  Description of Artificial Sequence: Synthetic oligonucleotide
  Antisense strand to SEQ ID NO: 2413568
uugguucagcaagacacug

SEQ ID NO: 2413570 - RNA, 19 nt, Artificial Sequence
  Description of Artificial Sequence: Synthetic oligonucleotide
  Sense strand starting at position 624 of SEQ ID NO: 1886495
uuucgcuauccuuauauag

SEQ ID NO: 2413571 - RNA, 19 nt, Artificial Sequence
  Description of Artificial Sequence: Synthetic oligonucleotide
  Antisense strand to SEQ ID NO: 2413570
cuauauaaggauagcgaaa

SEQ ID NO: 2413572 - RNA, 19 nt, Artificial Sequence
  Description of Artificial Sequence: Synthetic oligonucleotide
  Sense strand starting at position 645 of SEQ ID NO: 1886495
cuagaaacuugacaaagaa

SEQ ID NO: 2413573 - RNA, 19 nt, Artificial Sequence
  Description of Artificial Sequence: Synthetic oligonucleotide
  Antisense strand to SEQ ID NO: 2413572
uucuuugucaaguuucuag

SEQ ID NO: 2413574 - RNA, 19 nt, Artificial Sequence
  Description of Artificial Sequence: Synthetic oligonucleotide
  Sense strand starting at position 799 of SEQ ID NO: 1886495
augucaggaugaggauuua

SEQ ID NO: 2413575 - RNA, 19 nt, Artificial Sequence
  Description of Artificial Sequence: Synthetic oligonucleotide
  Antisense strand to SEQ ID NO: 2413574
uaaauccucauccugacau

SEQ ID NO: 2413576 - RNA, 19 nt, Artificial Sequence
  Description of Artificial Sequence: Synthetic oligonucleotide
  Sense strand starting at position 827 of SEQ ID NO: 1886495
guuuguauugccuagaaau

SEQ ID NO: 2413577 - RNA, 19 nt, Artificial Sequence
  Description of Artificial Sequence: Synthetic oligonucleotide
  Antisense strand to SEQ ID NO: 2413576
auuucuaggcaauacaaac

SEQ ID NO: 2413578 - RNA, 19 nt, Artificial Sequence
  Description of Artificial Sequence: Synthetic oligonucleotide
  Sense strand starting at position 829 of SEQ ID NO: 1886495
uuguauugccuagaaaugu

SEQ ID NO: 2413579 - RNA, 19 nt, Artificial Sequence
  Description of Artificial Sequence: Synthetic oligonucleotide
  Antisense strand to SEQ ID NO: 2413578
acauuucuaggcaauacaa

SEQ ID NO: 2413580 - RNA, 19 nt, Artificial Sequence
  Description of Artificial Sequence: Synthetic oligonucleotide
  Sense strand starting at position 849 of SEQ ID NO: 1886495
cugacagugucauuaagua

SEQ ID NO: 2413581 - RNA, 19 nt, Artificial Sequence
  Description of Artificial Sequence: Synthetic oligonucleotide
  Antisense strand to SEQ ID NO: 2413580
uacuuaaugacacugucag

SEQ ID NO: 2413582 - RNA, 19 nt, Artificial Sequence
  Description of Artificial Sequence: Synthetic oligonucleotide
  Sense strand starting at position 2050 of SEQ ID NO: 1886495
ugugcauugcuggaaggaa

SEQ ID NO: 2413583 - RNA, 19 nt, Artificial Sequence
  Description of Artificial Sequence: Synthetic oligonucleotide
  Antisense strand to SEQ ID NO: 2413582
uuccuuccagcaaugcaca

SEQ ID NO: 2413584 - RNA, 19 nt, Artificial Sequence
  Description of Artificial Sequence: Synthetic oligonucleotide
  Sense strand starting at position 2131 of SEQ ID NO: 1886495
ccuguugucuuagucauuu

SEQ ID NO: 2413585 - RNA, 19 nt, Artificial Sequence
  Description of Artificial Sequence: Synthetic oligonucleotide
  Antisense strand to SEQ ID NO: 2413584
aaaugacuaagacaacagg

SEQ ID NO: 2413586 - RNA, 19 nt, Artificial Sequence
  Description of Artificial Sequence: Synthetic oligonucleotide
  Sense strand starting at position 2133 of SEQ ID NO: 1886495
uguugucuuagucauuugu

SEQ ID NO: 2413587 - RNA, 19 nt, Artificial Sequence
  Description of Artificial Sequence: Synthetic oligonucleotide
  Antisense strand to SEQ ID NO: 2413586
acaaaugacuaagacaaca

SEQ ID NO: 2413588 - RNA, 19 nt, Artificial Sequence
  Description of Artificial Sequence: Synthetic oligonucleotide
  Sense strand starting at position 2135 of SEQ ID NO: 1886495
uugucuuagucauuugugu

SEQ ID NO: 2413589 - RNA, 19 nt, Artificial Sequence
  Description of Artificial Sequence: Synthetic oligonucleotide
  Antisense strand to SEQ ID NO: 2413588
acacaaaugacuaagacaa

SEQ ID NO: 2413590 - RNA, 19 nt, Artificial Sequence
  Description of Artificial Sequence: Synthetic oligonucleotide
  Sense strand starting at position 2137 of SEQ ID NO: 1886495
gucuuagucauuuguguua

SEQ ID NO: 2413591 - RNA, 19 nt, Artificial Sequence
  Description of Artificial Sequence: Synthetic oligonucleotide
  Antisense strand to SEQ ID NO: 2413590
uaacacaaaugacuaagac

SEQ ID NO: 2413592 - RNA, 19 nt, Artificial Sequence
  Description of Artificial Sequence: Synthetic oligonucleotide
  Sense strand starting at position 2148 of SEQ ID NO: 1886495
uuguguuaaccguaacaga

SEQ ID NO: 2413593 - RNA, 19 nt, Artificial Sequence
  Description of Artificial Sequence: Synthetic oligonucleotide
  Antisense strand to SEQ ID NO: 2413592
ucuguuacgguuaacacaa

SEQ ID NO: 2413594 - RNA, 19 nt, Artificial Sequence
  Description of Artificial Sequence: Synthetic oligonucleotide
  Sense strand starting at position 2345 of SEQ ID NO: 1886495
ggagguaauugguucccuu

SEQ ID NO: 2413595 - RNA, 19 nt, Artificial Sequence
  Description of Artificial Sequence: Synthetic oligonucleotide
  Antisense strand to SEQ ID NO: 2413594
aagggaaccaauuaccucc

SEQ ID NO: 2413596 - RNA, 19 nt, Artificial Sequence
  Description of Artificial Sequence: Synthetic oligonucleotide
  Sense strand starting at position 2489 of SEQ ID NO: 1886495
cagaccuuagcauauguga

SEQ ID NO: 2413597 - RNA, 19 nt, Artificial Sequence
  Description of Artificial Sequence: Synthetic oligonucleotide
  Antisense strand to SEQ ID NO: 2413596
ucacauaugcuaaggucug

SEQ ID NO: 2413598 - RNA, 19 nt, Artificial Sequence
  Description of Artificial Sequence: Synthetic oligonucleotide
  Sense strand starting at position 2498 of SEQ ID NO: 1886495
gcauaugugaucuaguagu

SEQ ID NO: 2413599 - RNA, 19 nt, Artificial Sequence
  Description of Artificial Sequence: Synthetic oligonucleotide
  Antisense strand to SEQ ID NO: 2413598
acuacuagaucacauaugc

SEQ ID NO: 2413600 - RNA, 19 nt, Artificial Sequence
  Description of Artificial Sequence: Synthetic oligonucleotide
  Sense strand starting at position 2517 of SEQ ID NO: 1886495
ucugcuccuggauauguau

SEQ ID NO: 2413601 - RNA, 19 nt, Artificial Sequence
  Description of Artificial Sequence: Synthetic oligonucleotide
  Antisense strand to SEQ ID NO: 2413600
auacauauccaggagcaga

SEQ ID NO: 2413602 - RNA, 19 nt, Artificial Sequence
  Description of Artificial Sequence: Synthetic oligonucleotide
  Sense strand starting at position 2524 of SEQ ID NO: 1886495
cuggauauguaucccuaaa

SEQ ID NO: 2413603 - RNA, 19 nt, Artificial Sequence
  Description of Artificial Sequence: Synthetic oligonucleotide
  Antisense strand to SEQ ID NO: 2413602
uuuagggauacauauccag

SEQ ID NO: 2413604 - RNA, 19 nt, Artificial Sequence
  Description of Artificial Sequence: Synthetic oligonucleotide
  Sense strand starting at position 2526 of SEQ ID NO: 1886495
ggauauguaucccuaaagg

SEQ ID NO: 2413605 - RNA, 19 nt, Artificial Sequence
  Description of Artificial Sequence: Synthetic oligonucleotide
  Antisense strand to SEQ ID NO: 2413604
ccuuuagggauacauaucc

SEQ ID NO: 2413606 - RNA, 19 nt, Artificial Sequence
  Description of Artificial Sequence: Synthetic oligonucleotide
  Sense strand starting at position 2643 of SEQ ID NO: 1886495
ccaaaugcggucuauggau

SEQ ID NO: 2413607 - RNA, 19 nt, Artificial Sequence
  Description of Artificial Sequence: Synthetic oligonucleotide
  Antisense strand to SEQ ID NO: 2413606
auccauagaccgcauuugg

SEQ ID NO: 2413608 - RNA, 19 nt, Artificial Sequence
  Description of Artificial Sequence: Synthetic oligonucleotide
  Sense strand starting at position 2645 of SEQ ID NO: 1886495
aaaugcggucuauggauau

SEQ ID NO: 2413609 - RNA, 19 nt, Artificial Sequence
  Description of Artificial Sequence: Synthetic oligonucleotide
  Antisense strand to SEQ ID NO: 2413608
auauccauagaccgcauuu

SEQ ID NO: 2413610 - RNA, 19 nt, Artificial Sequence
  Description of Artificial Sequence: Synthetic oligonucleotide
  Sense strand starting at position 2655 of SEQ ID NO: 1886495
uauggauauagugguguau

SEQ ID NO: 2413611 - RNA, 19 nt, Artificial Sequence
  Description of Artificial Sequence: Synthetic oligonucleotide
  Antisense strand to SEQ ID NO: 2413610
auacaccacuauauccaua

SEQ ID NO: 2413612 - RNA, 19 nt, Artificial Sequence
  Description of Artificial Sequence: Synthetic oligonucleotide
  Sense strand starting at position 2659 of SEQ ID NO: 1886495
gauauagugguguauuauu

SEQ ID NO: 2413613 - RNA, 19 nt, Artificial Sequence
  Description of Artificial Sequence: Synthetic oligonucleotide
  Antisense strand to SEQ ID NO: 2413612
aauaauacaccacuauauc

SEQ ID NO: 2413614 - RNA, 19 nt, Artificial Sequence
  Description of Artificial Sequence: Synthetic oligonucleotide
  Sense strand starting at position 2830 of SEQ ID NO: 1886495
gaguuccuuugagcuaaag

SEQ ID NO: 2413615 - RNA, 19 nt, Artificial Sequence
  Description of Artificial Sequence: Synthetic oligonucleotide
  Antisense strand to SEQ ID NO: 2413614
cuuuagcucaaaggaacuc

SEQ ID NO: 2413616 - RNA, 19 nt, Artificial Sequence
  Description of Artificial Sequence: Synthetic oligonucleotide
  Sense strand starting at position 2997 of SEQ ID NO: 1886495
uggcuugcuaaguaagaau

SEQ ID NO: 2413617 - RNA, 19 nt, Artificial Sequence
  Description of Artificial Sequence: Synthetic oligonucleotide
  Antisense strand to SEQ ID NO: 2413616
auucuuacuuagcaagcca

SEQ ID NO: 2413618 - RNA, 19 nt, Artificial Sequence
  Description of Artificial Sequence: Synthetic oligonucleotide
  Sense strand starting at position 3029 of SEQ ID NO: 1886495
ggacaacucuuguuugauc

SEQ ID NO: 2413619 - RNA, 19 nt, Artificial Sequence
  Description of Artificial Sequence: Synthetic oligonucleotide
  Antisense strand to SEQ ID NO: 2413618
gaucaaacaagaguugucc

SEQ ID NO: 2413620 - RNA, 19 nt, Artificial Sequence
  Description of Artificial Sequence: Synthetic oligonucleotide
  Sense strand starting at position 227 of SEQ ID NO: 1886496
ccuguucuucugcuguauu

SEQ ID NO: 2413621 - RNA, 19 nt, Artificial Sequence
  Description of Artificial Sequence: Synthetic oligonucleotide
  Antisense strand to SEQ ID NO: 2413620
aauacagcagaagaacagg

SEQ ID NO: 2413622 - RNA, 19 nt, Artificial Sequence
  Description of Artificial Sequence: Synthetic oligonucleotide
  Sense strand starting at position 237 of SEQ ID NO: 1886496
ugcuguauuccaggacaca

SEQ ID NO: 2413623 - RNA, 19 nt, Artificial Sequence
  Description of Artificial Sequence: Synthetic oligonucleotide
  Antisense strand to SEQ ID NO: 2413622
uguguccuggaauacagca

SEQ ID NO: 2413624 - RNA, 19 nt, Artificial Sequence
  Description of Artificial Sequence: Synthetic oligonucleotide
  Sense strand starting at position 238 of SEQ ID NO: 1886496
gcuguauuccaggacacaa

SEQ ID NO: 2413625 - RNA, 19 nt, Artificial Sequence
  Description of Artificial Sequence: Synthetic oligonucleotide
  Antisense strand to SEQ ID NO: 2413624
uuguguccuggaauacagc

SEQ ID NO: 2413626 - RNA, 19 nt, Artificial Sequence
  Description of Artificial Sequence: Synthetic oligonucleotide
  Sense strand starting at position 647 of SEQ ID NO: 1886496
aauccuugagcucagguaa

SEQ ID NO: 2413627 - RNA, 19 nt, Artificial Sequence
  Description of Artificial Sequence: Synthetic oligonucleotide
  Antisense strand to SEQ ID NO: 2413626
uuaccugagcucaaggauu

SEQ ID NO: 2413628 - RNA, 19 nt, Artificial Sequence
  Description of Artificial Sequence: Synthetic oligonucleotide
  Sense strand starting at position 689 of SEQ ID NO: 1886496
aggcuagacaauugugacu

SEQ ID NO: 2413629 - RNA, 19 nt, Artificial Sequence
  Description of Artificial Sequence: Synthetic oligonucleotide
  Antisense strand to SEQ ID NO: 2413628
agucacaauugucuagccu

SEQ ID NO: 2413630 - RNA, 19 nt, Artificial Sequence
  Description of Artificial Sequence: Synthetic oligonucleotide
  Sense strand starting at position 1302 of SEQ ID NO: 1886496
aggagugucccauaucaau

SEQ ID NO: 2413631 - RNA, 19 nt, Artificial Sequence
  Description of Artificial Sequence: Synthetic oligonucleotide
  Antisense strand to SEQ ID NO: 2413630
auugauaugggacacuccu

SEQ ID NO: 2413632 - RNA, 19 nt, Artificial Sequence
  Description of Artificial Sequence: Synthetic oligonucleotide
  Sense strand starting at position 1388 of SEQ ID NO: 1886496
agcuucuugaaucagggua

SEQ ID NO: 2413633 - RNA, 19 nt, Artificial Sequence
  Description of Artificial Sequence: Synthetic oligonucleotide
  Antisense strand to SEQ ID NO: 2413632
uacccugauucaagaagcu

SEQ ID NO: 2413634 - RNA, 19 nt, Artificial Sequence
  Description of Artificial Sequence: Synthetic oligonucleotide
  Sense strand starting at position 1405 of SEQ ID NO: 1886496
uacggagagcucuauggua

SEQ ID NO: 2413635 - RNA, 19 nt, Artificial Sequence
  Description of Artificial Sequence: Synthetic oligonucleotide
  Antisense strand to SEQ ID NO: 2413634
uaccauagagcucuccgua

SEQ ID NO: 2413636 - RNA, 19 nt, Artificial Sequence
  Description of Artificial Sequence: Synthetic oligonucleotide
  Sense strand starting at position 1626 of SEQ ID NO: 1886496
ugugucuuaccucagauuc

SEQ ID NO: 2413637 - RNA, 19 nt, Artificial Sequence
  Description of Artificial Sequence: Synthetic oligonucleotide
  Antisense strand to SEQ ID NO: 2413636
gaaucugagguaagacaca

SEQ ID NO: 2413638 - RNA, 19 nt, Artificial Sequence
  Description of Artificial Sequence: Synthetic oligonucleotide
  Sense strand starting at position 2159 of SEQ ID NO: 1886496
uggguuaaugacgacugua

SEQ ID NO: 2413639 - RNA, 19 nt, Artificial Sequence
  Description of Artificial Sequence: Synthetic oligonucleotide
  Antisense strand to SEQ ID NO: 2413638
uacagucgucauuaaccca

SEQ ID NO: 2413640 - RNA, 19 nt, Artificial Sequence
  Description of Artificial Sequence: Synthetic oligonucleotide
  Sense strand starting at position 2162 of SEQ ID NO: 1886496
guuaaugacgacuguauac

SEQ ID NO: 2413641 - RNA, 19 nt, Artificial Sequence
  Description of Artificial Sequence: Synthetic oligonucleotide
  Antisense strand to SEQ ID NO: 2413640
guauacagucgucauuaac

SEQ ID NO: 2413642 - RNA, 19 nt, Artificial Sequence
  Description of Artificial Sequence: Synthetic oligonucleotide
  Sense strand starting at position 2190 of SEQ ID NO: 1886496
gaaggagucuaagagaaga

SEQ ID NO: 2413643 - RNA, 19 nt, Artificial Sequence
  Description of Artificial Sequence: Synthetic oligonucleotide
  Antisense strand to SEQ ID NO: 2413642
ucuucucuuagacuccuuc

SEQ ID NO: 2413644 - RNA, 19 nt, Artificial Sequence
  Description of Artificial Sequence: Synthetic oligonucleotide
  Sense strand starting at position 2299 of SEQ ID NO: 1886496
cucauaaggucuuuauaag

SEQ ID NO: 2413645 - RNA, 19 nt, Artificial Sequence
  Description of Artificial Sequence: Synthetic oligonucleotide
  Antisense strand to SEQ ID NO: 2413644
cuuauaaagaccuuaugag

SEQ ID NO: 2413646 - RNA, 19 nt, Artificial Sequence
  Description of Artificial Sequence: Synthetic oligonucleotide
  Sense strand starting at position 2334 of SEQ ID NO: 1886496
acaugugcugagcauguaa

SEQ ID NO: 2413647 - RNA, 19 nt, Artificial Sequence
  Description of Artificial Sequence: Synthetic oligonucleotide
  Antisense strand to SEQ ID NO: 2413646
uuacaugcucagcacaugu

SEQ ID NO: 2413648 - RNA, 19 nt, Artificial Sequence
  Description of Artificial Sequence: Synthetic oligonucleotide
  Sense strand starting at position 2446 of SEQ ID NO: 1886496
gaggguuugaaucagguuu

SEQ ID NO: 2413649 - RNA, 19 nt, Artificial Sequence
  Description of Artificial Sequence: Synthetic oligonucleotide
  Antisense strand to SEQ ID NO: 2413648
aaaccugauucaaacccuc

SEQ ID NO: 2413650 - RNA, 19 nt, Artificial Sequence
  Description of Artificial Sequence: Synthetic oligonucleotide
  Sense strand starting at position 2547 of SEQ ID NO: 1886496
cuacauagauuaucaguga

SEQ ID NO: 2413651 - RNA, 19 nt, Artificial Sequence
  Description of Artificial Sequence: Synthetic oligonucleotide
  Antisense strand to SEQ ID NO: 2413650
ucacugauaaucuauguag

SEQ ID NO: 2413652 - RNA, 19 nt, Artificial Sequence
  Description of Artificial Sequence: Synthetic oligonucleotide
  Sense strand starting at position 2611 of SEQ ID NO: 1886496
gcauuagugcccuugucua

SEQ ID NO: 2413653 - RNA, 19 nt, Artificial Sequence
  Description of Artificial Sequence: Synthetic oligonucleotide
  Antisense strand to SEQ ID NO: 2413652
uagacaagggcacuaaugc

SEQ ID NO: 2413654 - RNA, 19 nt, Artificial Sequence
  Description of Artificial Sequence: Synthetic oligonucleotide
  Sense strand starting at position 2660 of SEQ ID NO: 1886496
guguaaccacaguaggaua

SEQ ID NO: 2413655 - RNA, 19 nt, Artificial Sequence
  Description of Artificial Sequence: Synthetic oligonucleotide
  Antisense strand to SEQ ID NO: 2413654
uauccuacugugguuacac

SEQ ID NO: 2413656 - RNA, 19 nt, Artificial Sequence
  Description of Artificial Sequence: Synthetic oligonucleotide
  Sense strand starting at position 2807 of SEQ ID NO: 1886496
ccacgugguaaugaucaga

SEQ ID NO: 2413657 - RNA, 19 nt, Artificial Sequence
  Description of Artificial Sequence: Synthetic oligonucleotide
  Antisense strand to SEQ ID NO: 2413656
ucugaucauuaccacgugg

SEQ ID NO: 2413658 - RNA, 19 nt, Artificial Sequence
  Description of Artificial Sequence: Synthetic oligonucleotide
  Sense strand starting at position 2810 of SEQ ID NO: 1886496
cgugguaaugaucagaaac

SEQ ID NO: 2413659 - RNA, 19 nt, Artificial Sequence
  Description of Artificial Sequence: Synthetic oligonucleotide
  Antisense strand to SEQ ID NO: 2413658
guuucugaucauuaccacg

SEQ ID NO: 2413660 - RNA, 19 nt, Artificial Sequence
  Description of Artificial Sequence: Synthetic oligonucleotide
  Sense strand starting at position 2835 of SEQ ID NO: 1886496
cccacaacugugugaguga

SEQ ID NO: 2413661 - RNA, 19 nt, Artificial Sequence
  Description of Artificial Sequence: Synthetic oligonucleotide
  Antisense strand to SEQ ID NO: 2413660
ucacucacacaguuguggg

SEQ ID NO: 2413662 - RNA, 19 nt, Artificial Sequence
  Description of Artificial Sequence: Synthetic oligonucleotide
  Sense strand starting at position 3027 of SEQ ID NO: 1886496
gcuaccaggcuuugggaua

SEQ ID NO: 2413663 - RNA, 19 nt, Artificial Sequence
  Description of Artificial Sequence: Synthetic oligonucleotide
  Antisense strand to SEQ ID NO: 2413662
uaucccaaagccugguagc

SEQ ID NO: 2413664 - RNA, 19 nt, Artificial Sequence
  Description of Artificial Sequence: Synthetic oligonucleotide
  Sense strand starting at position 3039 of SEQ ID NO: 1886496
ugggauaauugguuaugca

SEQ ID NO: 2413665 - RNA, 19 nt, Artificial Sequence
  Description of Artificial Sequence: Synthetic oligonucleotide
  Antisense strand to SEQ ID NO: 2413664
ugcauaaccaauuauccca

SEQ ID NO: 2413666 - RNA, 19 nt, Artificial Sequence
  Description of Artificial Sequence: Synthetic oligonucleotide
  Sense strand starting at position 3047 of SEQ ID NO: 1886496
uugguuaugcagcaaugga

SEQ ID NO: 2413667 - RNA, 19 nt, Artificial Sequence
  Description of Artificial Sequence: Synthetic oligonucleotide
  Antisense strand to SEQ ID NO: 2413666
uccauugcugcauaaccaa

SEQ ID NO: 2413668 - RNA, 19 nt, Artificial Sequence
  Description of Artificial Sequence: Synthetic oligonucleotide
  Sense strand starting at position 3071 of SEQ ID NO: 1886496
gauacagugccuuaaugug

SEQ ID NO: 2413669 - RNA, 19 nt, Artificial Sequence
  Description of Artificial Sequence: Synthetic oligonucleotide
  Antisense strand to SEQ ID NO: 2413668
cacauuaaggcacuguauc

SEQ ID NO: 2413670 - RNA, 19 nt, Artificial Sequence
  Description of Artificial Sequence: Synthetic oligonucleotide
  Sense strand starting at position 3193 of SEQ ID NO: 1886496
acuuauggagcuuacugau

SEQ ID NO: 2413671 - RNA, 19 nt, Artificial Sequence
  Description of Artificial Sequence: Synthetic oligonucleotide
  Antisense strand to SEQ ID NO: 2413670
aucaguaagcuccauaagu

SEQ ID NO: 2413672 - RNA, 19 nt, Artificial Sequence
  Description of Artificial Sequence: Synthetic oligonucleotide
  Sense strand starting at position 3245 of SEQ ID NO: 1886496
acaucauugccucagugaa

SEQ ID NO: 2413673 - RNA, 19 nt, Artificial Sequence
  Description of Artificial Sequence: Synthetic oligonucleotide
  Antisense strand to SEQ ID NO: 2413672
uucacugaggcaaugaugu

SEQ ID NO: 2413674 - RNA, 19 nt, Artificial Sequence
  Description of Artificial Sequence: Synthetic oligonucleotide
  Sense strand starting at position 3247 of SEQ ID NO: 1886496
aucauugccucagugaaau

SEQ ID NO: 2413675 - RNA, 19 nt, Artificial Sequence
  Description of Artificial Sequence: Synthetic oligonucleotide
  Antisense strand to SEQ ID NO: 2413674
auuucacugaggcaaugau

SEQ ID NO: 2413676 - RNA, 19 nt, Artificial Sequence
  Description of Artificial Sequence: Synthetic oligonucleotide
  Sense strand starting at position 3257 of SEQ ID NO: 1886496
cagugaaauucuccguaga

SEQ ID NO: 2413677 - RNA, 19 nt, Artificial Sequence
  Description of Artificial Sequence: Synthetic oligonucleotide
  Antisense strand to SEQ ID NO: 2413676
ucuacggagaauuucacug

SEQ ID NO: 2413678 - RNA, 19 nt, Artificial Sequence
  Description of Artificial Sequence: Synthetic oligonucleotide
  Sense strand starting at position 3258 of SEQ ID NO: 1886496
agugaaauucuccguagaa

SEQ ID NO: 2413679 - RNA, 19 nt, Artificial Sequence
  Description of Artificial Sequence: Synthetic oligonucleotide
  Antisense strand to SEQ ID NO: 2413678
uucuacggagaauuucacu

SEQ ID NO: 2413680 - RNA, 19 nt, Artificial Sequence
  Description of Artificial Sequence: Synthetic oligonucleotide
  Sense strand starting at position 3259 of SEQ ID NO: 1886496
gugaaauucuccguagaaa

SEQ ID NO: 2413681 - RNA, 19 nt, Artificial Sequence
  Description of Artificial Sequence: Synthetic oligonucleotide
  Antisense strand to SEQ ID NO: 2413680
uuucuacggagaauuucac

SEQ ID NO: 2413682 - RNA, 19 nt, Artificial Sequence
  Description of Artificial Sequence: Synthetic oligonucleotide
  Sense strand starting at position 3260 of SEQ ID NO: 1886496
ugaaauucuccguagaaau

SEQ ID NO: 2413683 - RNA, 19 nt, Artificial Sequence
  Description of Artificial Sequence: Synthetic oligonucleotide
  Antisense strand to SEQ ID NO: 2413682
auuucuacggagaauuuca

SEQ ID NO: 2413684 - RNA, 19 nt, Artificial Sequence
  Description of Artificial Sequence: Synthetic oligonucleotide
  Sense strand starting at position 3280 of SEQ ID NO: 1886496
ccguguaacagguacuauu

SEQ ID NO: 2413685 - RNA, 19 nt, Artificial Sequence
  Description of Artificial Sequence: Synthetic oligonucleotide
  Antisense strand to SEQ ID NO: 2413684
aauaguaccuguuacacgg

SEQ ID NO: 2413686 - RNA, 19 nt, Artificial Sequence
  Description of Artificial Sequence: Synthetic oligonucleotide
  Sense strand starting at position 3392 of SEQ ID NO: 1886496
guggcuuugggugaauuau

SEQ ID NO: 2413687 - RNA, 19 nt, Artificial Sequence
  Description of Artificial Sequence: Synthetic oligonucleotide
  Antisense strand to SEQ ID NO: 2413686
auaauucacccaaagccac

SEQ ID NO: 2413688 - RNA, 19 nt, Artificial Sequence
  Description of Artificial Sequence: Synthetic oligonucleotide
  Sense strand starting at position 3403 of SEQ ID NO: 1886496
ugaauuauaucucccugag

SEQ ID NO: 2413689 - RNA, 19 nt, Artificial Sequence
  Description of Artificial Sequence: Synthetic oligonucleotide
  Antisense strand to SEQ ID NO: 2413688
cucagggagauauaauuca

SEQ ID NO: 2413690 - RNA, 19 nt, Artificial Sequence
  Description of Artificial Sequence: Synthetic oligonucleotide
  Sense strand starting at position 3424 of SEQ ID NO: 1886496
gccguuucuccagcugcaa

SEQ ID NO: 2413691 - RNA, 19 nt, Artificial Sequence
  Description of Artificial Sequence: Synthetic oligonucleotide
  Antisense strand to SEQ ID NO: 2413690
uugcagcuggagaaacggc

SEQ ID NO: 2413692 - RNA, 19 nt, Artificial Sequence
  Description of Artificial Sequence: Synthetic oligonucleotide
  Sense strand starting at position 3443 of SEQ ID NO: 1886496
aauggagguaauuguagua

SEQ ID NO: 2413693 - RNA, 19 nt, Artificial Sequence
  Description of Artificial Sequence: Synthetic oligonucleotide
  Antisense strand to SEQ ID NO: 2413692
uacuacaauuaccuccauu

SEQ ID NO: 2413694 - RNA, 19 nt, Artificial Sequence
  Description of Artificial Sequence: Synthetic oligonucleotide
  Sense strand starting at position 3467 of SEQ ID NO: 1886496
cucauaggaccuuguaaag

SEQ ID NO: 2413695 - RNA, 19 nt, Artificial Sequence
  Description of Artificial Sequence: Synthetic oligonucleotide
  Antisense strand to SEQ ID NO: 2413694
cuuuacaagguccuaugag

SEQ ID NO: 2413696 - RNA, 19 nt, Artificial Sequence
  Description of Artificial Sequence: Synthetic oligonucleotide
  Sense strand starting at position 3542 of SEQ ID NO: 1886496
uaugauuauuuacagagga

SEQ ID NO: 2413697 - RNA, 19 nt, Artificial Sequence
  Description of Artificial Sequence: Synthetic oligonucleotide
  Antisense strand to SEQ ID NO: 2413696
uccucuguaaauaaucaua

SEQ ID NO: 2413698 - RNA, 19 nt, Artificial Sequence
  Description of Artificial Sequence: Synthetic oligonucleotide
  Sense strand starting at position 3691 of SEQ ID NO: 1886496
ugccauguacgucauuuaa

SEQ ID NO: 2413699 - RNA, 19 nt, Artificial Sequence
  Description of Artificial Sequence: Synthetic oligonucleotide
  Antisense strand to SEQ ID NO: 2413698
uuaaaugacguacauggca

SEQ ID NO: 2413700 - RNA, 19 nt, Artificial Sequence
  Description of Artificial Sequence: Synthetic oligonucleotide
  Sense strand starting at position 519 of SEQ ID NO: 1886497
cugacucucccauauggua

SEQ ID NO: 2413701 - RNA, 19 nt, Artificial Sequence
  Description of Artificial Sequence: Synthetic oligonucleotide
  Antisense strand to SEQ ID NO: 2413700
uaccauaugggagagucag

SEQ ID NO: 2413702 - RNA, 19 nt, Artificial Sequence
  Description of Artificial Sequence: Synthetic oligonucleotide
  Sense strand starting at position 543 of SEQ ID NO: 1886497
uggcacacauguuuauaga

SEQ ID NO: 2413703 - RNA, 19 nt, Artificial Sequence
  Description of Artificial Sequence: Synthetic oligonucleotide
  Antisense strand to SEQ ID NO: 2413702
ucuauaaacaugugugcca

SEQ ID NO: 2413704 - RNA, 19 nt, Artificial Sequence
  Description of Artificial Sequence: Synthetic oligonucleotide
  Sense strand starting at position 544 of SEQ ID NO: 1886497
ggcacacauguuuauagaa

SEQ ID NO: 2413705 - RNA, 19 nt, Artificial Sequence
  Description of Artificial Sequence: Synthetic oligonucleotide
  Antisense strand to SEQ ID NO: 2413704
uucuauaaacaugugugcc

SEQ ID NO: 2413706 - RNA, 19 nt, Artificial Sequence
  Description of Artificial Sequence: Synthetic oligonucleotide
  Sense strand starting at position 967 of SEQ ID NO: 1886497
guccucauugcagaaaguu

SEQ ID NO: 2413707 - RNA, 19 nt, Artificial Sequence
  Description of Artificial Sequence: Synthetic oligonucleotide
  Antisense strand to SEQ ID NO: 2413706
aacuuucugcaaugaggac

SEQ ID NO: 2413708 - RNA, 19 nt, Artificial Sequence
  Description of Artificial Sequence: Synthetic oligonucleotide
  Sense strand starting at position 1076 of SEQ ID NO: 1886497
ugagaugaucuaugcacac

SEQ ID NO: 2413709 - RNA, 19 nt, Artificial Sequence
  Description of Artificial Sequence: Synthetic oligonucleotide
  Antisense strand to SEQ ID NO: 2413708
gugugcauagaucaucuca

SEQ ID NO: 2413710 - RNA, 19 nt, Artificial Sequence
  Description of Artificial Sequence: Synthetic oligonucleotide
  Sense strand starting at position 1154 of SEQ ID NO: 1886497
caaauugcuguguaauagu

SEQ ID NO: 2413711 - RNA, 19 nt, Artificial Sequence
  Description of Artificial Sequence: Synthetic oligonucleotide
  Antisense strand to SEQ ID NO: 2413710
acuauuacacagcaauuug

SEQ ID NO: 2413712 - RNA, 19 nt, Artificial Sequence
  Description of Artificial Sequence: Synthetic oligonucleotide
  Sense strand starting at position 1165 of SEQ ID NO: 1886497
guaauaguccguggaaugg

SEQ ID NO: 2413713 - RNA, 19 nt, Artificial Sequence
  Description of Artificial Sequence: Synthetic oligonucleotide
  Antisense strand to SEQ ID NO: 2413712
ccauuccacggacuauuac

SEQ ID NO: 2413714 - RNA, 19 nt, Artificial Sequence
  Description of Artificial Sequence: Synthetic oligonucleotide
  Sense strand starting at position 1264 of SEQ ID NO: 1886497
accauucucucugcagagu

SEQ ID NO: 2413715 - RNA, 19 nt, Artificial Sequence
  Description of Artificial Sequence: Synthetic oligonucleotide
  Antisense strand to SEQ ID NO: 2413714
acucugcagagagaauggu

SEQ ID NO: 2413716 - RNA, 19 nt, Artificial Sequence
  Description of Artificial Sequence: Synthetic oligonucleotide
  Sense strand starting at position 1265 of SEQ ID NO: 1886497
ccauucucucugcagagua

SEQ ID NO: 2413717 - RNA, 19 nt, Artificial Sequence
  Description of Artificial Sequence: Synthetic oligonucleotide
  Antisense strand to SEQ ID NO: 2413716
uacucugcagagagaaugg

SEQ ID NO: 2413718 - RNA, 19 nt, Artificial Sequence
  Description of Artificial Sequence: Synthetic oligonucleotide
  Sense strand starting at position 1267 of SEQ ID NO: 1886497
auucucucugcagaguaaa

SEQ ID NO: 2413719 - RNA, 19 nt, Artificial Sequence
  Description of Artificial Sequence: Synthetic oligonucleotide
  Antisense strand to SEQ ID NO: 2413718
uuuacucugcagagagaau

SEQ ID NO: 2413720 - RNA, 19 nt, Artificial Sequence
  Description of Artificial Sequence: Synthetic oligonucleotide
  Sense strand starting at position 1518 of SEQ ID NO: 1886497
ucuuauucugugcagugau

SEQ ID NO: 2413721 - RNA, 19 nt, Artificial Sequence
  Description of Artificial Sequence: Synthetic oligonucleotide
  Antisense strand to SEQ ID NO: 2413720
aucacugcacagaauaaga

SEQ ID NO: 2413722 - RNA, 19 nt, Artificial Sequence
  Description of Artificial Sequence: Synthetic oligonucleotide
  Sense strand starting at position 1656 of SEQ ID NO: 1886497
uugugaagacgaggucuua

SEQ ID NO: 2413723 - RNA, 19 nt, Artificial Sequence
  Description of Artificial Sequence: Synthetic oligonucleotide
  Antisense strand to SEQ ID NO: 2413722
uaagaccucgucuucacaa

SEQ ID NO: 2413724 - RNA, 19 nt, Artificial Sequence
  Description of Artificial Sequence: Synthetic oligonucleotide
  Sense strand starting at position 2105 of SEQ ID NO: 1886497
agcuuuagacuugauccca

SEQ ID NO: 2413725 - RNA, 19 nt, Artificial Sequence
  Description of Artificial Sequence: Synthetic oligonucleotide
  Antisense strand to SEQ ID NO: 2413724
ugggaucaagucuaaagcu

SEQ ID NO: 2413726 - RNA, 19 nt, Artificial Sequence
  Description of Artificial Sequence: Synthetic oligonucleotide
  Sense strand starting at position 2149 of SEQ ID NO: 1886497
ggcaguggaucuccugauu

SEQ ID NO: 2413727 - RNA, 19 nt, Artificial Sequence
  Description of Artificial Sequence: Synthetic oligonucleotide
  Antisense strand to SEQ ID NO: 2413726
aaucaggagauccacugcc

SEQ ID NO: 2413728 - RNA, 19 nt, Artificial Sequence
  Description of Artificial Sequence: Synthetic oligonucleotide
  Sense strand starting at position 2177 of SEQ ID NO: 1886497
uuuccagugucuucucaga

SEQ ID NO: 2413729 - RNA, 19 nt, Artificial Sequence
  Description of Artificial Sequence: Synthetic oligonucleotide
  Antisense strand to SEQ ID NO: 2413728
ucugagaagacacuggaaa

SEQ ID NO: 2413730 - RNA, 19 nt, Artificial Sequence
  Description of Artificial Sequence: Synthetic oligonucleotide
  Sense strand starting at position 2479 of SEQ ID NO: 1886497
ggaaauguuugccuuugga

SEQ ID NO: 2413731 - RNA, 19 nt, Artificial Sequence
  Description of Artificial Sequence: Synthetic oligonucleotide
  Antisense strand to SEQ ID NO: 2413730
uccaaaggcaaacauuucc

SEQ ID NO: 2413732 - RNA, 19 nt, Artificial Sequence
  Description of Artificial Sequence: Synthetic oligonucleotide
  Sense strand starting at position 2482 of SEQ ID NO: 1886497
aauguuugccuuuggagaa

SEQ ID NO: 2413733 - RNA, 19 nt, Artificial Sequence
  Description of Artificial Sequence: Synthetic oligonucleotide
  Antisense strand to SEQ ID NO: 2413732
uucuccaaaggcaaacauu

SEQ ID NO: 2413734 - RNA, 19 nt, Artificial Sequence
  Description of Artificial Sequence: Synthetic oligonucleotide
  Sense strand starting at position 2496 of SEQ ID NO: 1886497
gagaaauucuaguuccguc

SEQ ID NO: 2413735 - RNA, 19 nt, Artificial Sequence
  Description of Artificial Sequence: Synthetic oligonucleotide
  Antisense strand to SEQ ID NO: 2413734
gacggaacuagaauuucuc

SEQ ID NO: 2413736 - RNA, 19 nt, Artificial Sequence
  Description of Artificial Sequence: Synthetic oligonucleotide
  Sense strand starting at position 2545 of SEQ ID NO: 1886497
gccggaacuccggaacuuu

SEQ ID NO: 2413737 - RNA, 19 nt, Artificial Sequence
  Description of Artificial Sequence: Synthetic oligonucleotide
  Antisense strand to SEQ ID NO: 2413736
aaaguuccggaguuccggc

SEQ ID NO: 2413738 - RNA, 19 nt, Artificial Sequence
  Description of Artificial Sequence: Synthetic oligonucleotide
  Sense strand starting at position 2599 of SEQ ID NO: 1886497
ucaaguccucuguaaccca

SEQ ID NO: 2413739 - RNA, 19 nt, Artificial Sequence
  Description of Artificial Sequence: Synthetic oligonucleotide
  Antisense strand to SEQ ID NO: 2413738
uggguuacagaggacuuga

SEQ ID NO: 2413740 - RNA, 19 nt, Artificial Sequence
  Description of Artificial Sequence: Synthetic oligonucleotide
  Sense strand starting at position 2602 of SEQ ID NO: 1886497
aguccucuguaacccaaua

SEQ ID NO: 2413741 - RNA, 19 nt, Artificial Sequence
  Description of Artificial Sequence: Synthetic oligonucleotide
  Antisense strand to SEQ ID NO: 2413740
uauuggguuacagaggacu

SEQ ID NO: 2413742 - RNA, 19 nt, Artificial Sequence
  Description of Artificial Sequence: Synthetic oligonucleotide
  Sense strand starting at position 2638 of SEQ ID NO: 1886497
ggcagaugagcucaugaau

SEQ ID NO: 2413743 - RNA, 19 nt, Artificial Sequence
  Description of Artificial Sequence: Synthetic oligonucleotide
  Antisense strand to SEQ ID NO: 2413742
auucaugagcucaucugcc

SEQ ID NO: 2413744 - RNA, 19 nt, Artificial Sequence
  Description of Artificial Sequence: Synthetic oligonucleotide
  Sense strand starting at position 2656 of SEQ ID NO: 1886497
uacgaagucccagagcuua

SEQ ID NO: 2413745 - RNA, 19 nt, Artificial Sequence
  Description of Artificial Sequence: Synthetic oligonucleotide
  Antisense strand to SEQ ID NO: 2413744
uaagcucugggacuucgua

SEQ ID NO: 2413746 - RNA, 19 nt, Artificial Sequence
  Description of Artificial Sequence: Synthetic oligonucleotide
  Sense strand starting at position 2840 of SEQ ID NO: 1886497
cugcaaaguguuccgguuu

SEQ ID NO: 2413747 - RNA, 19 nt, Artificial Sequence
  Description of Artificial Sequence: Synthetic oligonucleotide
  Antisense strand to SEQ ID NO: 2413746
aaaccggaacacuuugcag

SEQ ID NO: 2413748 - RNA, 19 nt, Artificial Sequence
  Description of Artificial Sequence: Synthetic oligonucleotide
  Sense strand starting at position 2851 of SEQ ID NO: 1886497
uccgguuugggugagaaau

SEQ ID NO: 2413749 - RNA, 19 nt, Artificial Sequence
  Description of Artificial Sequence: Synthetic oligonucleotide
  Antisense strand to SEQ ID NO: 2413748
auuucucacccaaaccgga

SEQ ID NO: 2413750 - RNA, 19 nt, Artificial Sequence
  Description of Artificial Sequence: Synthetic oligonucleotide
  Sense strand starting at position 3028 of SEQ ID NO: 1886497
ggagaagggugugucugua

SEQ ID NO: 2413751 - RNA, 19 nt, Artificial Sequence
  Description of Artificial Sequence: Synthetic oligonucleotide
  Antisense strand to SEQ ID NO: 2413750
uacagacacacccuucucc

SEQ ID NO: 2413752 - RNA, 19 nt, Artificial Sequence
  Description of Artificial Sequence: Synthetic oligonucleotide
  Sense strand starting at position 3042 of SEQ ID NO: 1886497
cuguauauucgugugugca

SEQ ID NO: 2413753 - RNA, 19 nt, Artificial Sequence
  Description of Artificial Sequence: Synthetic oligonucleotide
  Antisense strand to SEQ ID NO: 2413752
ugcacacacgaauauacag

SEQ ID NO: 2413754 - RNA, 19 nt, Artificial Sequence
  Description of Artificial Sequence: Synthetic oligonucleotide
  Sense strand starting at position 3164 of SEQ ID NO: 1886497
guacauacauucguauaua

SEQ ID NO: 2413755 - RNA, 19 nt, Artificial Sequence
  Description of Artificial Sequence: Synthetic oligonucleotide
  Antisense strand to SEQ ID NO: 2413754
uauauacgaauguauguac

SEQ ID NO: 2413756 - RNA, 19 nt, Artificial Sequence
  Description of Artificial Sequence: Synthetic oligonucleotide
  Sense strand starting at position 3194 of SEQ ID NO: 1886497
guacacaugucuguacaga

SEQ ID NO: 2413757 - RNA, 19 nt, Artificial Sequence
  Description of Artificial Sequence: Synthetic oligonucleotide
  Antisense strand to SEQ ID NO: 2413756
ucuguacagacauguguac

SEQ ID NO: 2413758 - RNA, 19 nt, Artificial Sequence
  Description of Artificial Sequence: Synthetic oligonucleotide
  Sense strand starting at position 3355 of SEQ ID NO: 1886497
guggacauaucuguacaca

SEQ ID NO: 2413759 - RNA, 19 nt, Artificial Sequence
  Description of Artificial Sequence: Synthetic oligonucleotide
  Antisense strand to SEQ ID NO: 2413758
uguguacagauauguccac

SEQ ID NO: 2413760 - RNA, 19 nt, Artificial Sequence
  Description of Artificial Sequence: Synthetic oligonucleotide
  Sense strand starting at position 3473 of SEQ ID NO: 1886497
guagacacaucuguauaua

SEQ ID NO: 2413761 - RNA, 19 nt, Artificial Sequence
  Description of Artificial Sequence: Synthetic oligonucleotide
  Antisense strand to SEQ ID NO: 2413760
uauauacagaugugucuac

SEQ ID NO: 2413762 - RNA, 19 nt, Artificial Sequence
  Description of Artificial Sequence: Synthetic oligonucleotide
  Sense strand starting at position 3476 of SEQ ID NO: 1886497
gacacaucuguauauacgu

SEQ ID NO: 2413763 - RNA, 19 nt, Artificial Sequence
  Description of Artificial Sequence: Synthetic oligonucleotide
  Antisense strand to SEQ ID NO: 2413762
acguauauacagauguguc

SEQ ID NO: 2413764 - RNA, 19 nt, Artificial Sequence
  Description of Artificial Sequence: Synthetic oligonucleotide
  Sense strand starting at position 3622 of SEQ ID NO: 1886497
guagacauaucuguaugca

SEQ ID NO: 2413765 - RNA, 19 nt, Artificial Sequence
  Description of Artificial Sequence: Synthetic oligonucleotide
  Antisense strand to SEQ ID NO: 2413764
ugcauacagauaugucuac

SEQ ID NO: 2413766 - RNA, 19 nt, Artificial Sequence
  Description of Artificial Sequence: Synthetic oligonucleotide
  Sense strand starting at position 3626 of SEQ ID NO: 1886497
acauaucuguaugcauaca

SEQ ID NO: 2413767 - RNA, 19 nt, Artificial Sequence
  Description of Artificial Sequence: Synthetic oligonucleotide
  Antisense strand to SEQ ID NO: 2413766
uguaugcauacagauaugu

SEQ ID NO: 2413768 - RNA, 19 nt, Artificial Sequence
  Description of Artificial Sequence: Synthetic oligonucleotide
  Sense strand starting at position 3676 of SEQ ID NO: 1886497
cuuuacacauccguauaca

SEQ ID NO: 2413769 - RNA, 19 nt, Artificial Sequence
  Description of Artificial Sequence: Synthetic oligonucleotide
  Antisense strand to SEQ ID NO: 2413768
uguauacggauguguaaag

SEQ ID NO: 2413770 - RNA, 19 nt, Artificial Sequence
  Description of Artificial Sequence: Synthetic oligonucleotide
  Sense strand starting at position 3677 of SEQ ID NO: 1886497
uuuacacauccguauacau

SEQ ID NO: 2413771 - RNA, 19 nt, Artificial Sequence
  Description of Artificial Sequence: Synthetic oligonucleotide
  Antisense strand to SEQ ID NO: 2413770
auguauacggauguguaaa

SEQ ID NO: 2413772 - RNA, 19 nt, Artificial Sequence
  Description of Artificial Sequence: Synthetic oligonucleotide
  Sense strand starting at position 3710 of SEQ ID NO: 1886497
guccauacaugucuacaua

SEQ ID NO: 2413773 - RNA, 19 nt, Artificial Sequence
  Description of Artificial Sequence: Synthetic oligonucleotide
  Antisense strand to SEQ ID NO: 2413772
uauguagacauguauggac

SEQ ID NO: 2413774 - RNA, 19 nt, Artificial Sequence
  Description of Artificial Sequence: Synthetic oligonucleotide
  Sense strand starting at position 3772 of SEQ ID NO: 1886497
ccacaugucuguguacaua

SEQ ID NO: 2413775 - RNA, 19 nt, Artificial Sequence
  Description of Artificial Sequence: Synthetic oligonucleotide
  Antisense strand to SEQ ID NO: 2413774
uauguacacagacaugugg

SEQ ID NO: 2413776 - RNA, 19 nt, Artificial Sequence
  Description of Artificial Sequence: Synthetic oligonucleotide
  Sense strand starting at position 3834 of SEQ ID NO: 1886497
acagauacaucuguacaca

SEQ ID NO: 2413777 - RNA, 19 nt, Artificial Sequence
  Description of Artificial Sequence: Synthetic oligonucleotide
  Antisense strand to SEQ ID NO: 2413776
uguguacagauguaucugu

SEQ ID NO: 2413778 - RNA, 19 nt, Artificial Sequence
  Description of Artificial Sequence: Synthetic oligonucleotide
  Sense strand starting at position 3931 of SEQ ID NO: 1886497
ugugguaauagugagucuu

SEQ ID NO: 2413779 - RNA, 19 nt, Artificial Sequence
  Description of Artificial Sequence: Synthetic oligonucleotide
  Antisense strand to SEQ ID NO: 2413778
aagacucacuauuaccaca

SEQ ID NO: 2413780 - RNA, 19 nt, Artificial Sequence
  Description of Artificial Sequence: Synthetic oligonucleotide
  Sense strand starting at position 31 of SEQ ID NO: 1886498
uuacucaguugagcucaaa

SEQ ID NO: 2413781 - RNA, 19 nt, Artificial Sequence
  Description of Artificial Sequence: Synthetic oligonucleotide
  Antisense strand to SEQ ID NO: 2413780
uuugagcucaacugaguaa

SEQ ID NO: 2413782 - RNA, 19 nt, Artificial Sequence
  Description of Artificial Sequence: Synthetic oligonucleotide
  Sense strand starting at position 34 of SEQ ID NO: 1886498
cucaguugagcucaaaugu

SEQ ID NO: 2413783 - RNA, 19 nt, Artificial Sequence
  Description of Artificial Sequence: Synthetic oligonucleotide
  Antisense strand to SEQ ID NO: 2413782
acauuugagcucaacugag

SEQ ID NO: 2413784 - RNA, 19 nt, Artificial Sequence
  Description of Artificial Sequence: Synthetic oligonucleotide
  Sense strand starting at position 54 of SEQ ID NO: 1886498
cuaccauugcuugaaagca

SEQ ID NO: 2413785 - RNA, 19 nt, Artificial Sequence
  Description of Artificial Sequence: Synthetic oligonucleotide
  Antisense strand to SEQ ID NO: 2413784
ugcuuucaagcaaugguag

SEQ ID NO: 2413786 - RNA, 19 nt, Artificial Sequence
  Description of Artificial Sequence: Synthetic oligonucleotide
  Sense strand starting at position 185 of SEQ ID NO: 1886498
agacuuccugauugucuau

SEQ ID NO: 2413787 - RNA, 19 nt, Artificial Sequence
  Description of Artificial Sequence: Synthetic oligonucleotide
  Antisense strand to SEQ ID NO: 2413786
auagacaaucaggaagucu

SEQ ID NO: 2413788 - RNA, 19 nt, Artificial Sequence
  Description of Artificial Sequence: Synthetic oligonucleotide
  Sense strand starting at position 187 of SEQ ID NO: 1886498
acuuccugauugucuauau

SEQ ID NO: 2413789 - RNA, 19 nt, Artificial Sequence
  Description of Artificial Sequence: Synthetic oligonucleotide
  Antisense strand to SEQ ID NO: 2413788
auauagacaaucaggaagu

SEQ ID NO: 2413790 - RNA, 19 nt, Artificial Sequence
  Description of Artificial Sequence: Synthetic oligonucleotide
  Sense strand starting at position 188 of SEQ ID NO: 1886498
cuuccugauugucuauaua

SEQ ID NO: 2413791 - RNA, 19 nt, Artificial Sequence
  Description of Artificial Sequence: Synthetic oligonucleotide
  Antisense strand to SEQ ID NO: 2413790
uauauagacaaucaggaag

SEQ ID NO: 2413792 - RNA, 19 nt, Artificial Sequence
  Description of Artificial Sequence: Synthetic oligonucleotide
  Sense strand starting at position 347 of SEQ ID NO: 1886498
uacauaugccagugaugac

SEQ ID NO: 2413793 - RNA, 19 nt, Artificial Sequence
  Description of Artificial Sequence: Synthetic oligonucleotide
  Antisense strand to SEQ ID NO: 2413792
gucaucacuggcauaugua

SEQ ID NO: 2413794 - RNA, 19 nt, Artificial Sequence
  Description of Artificial Sequence: Synthetic oligonucleotide
  Sense strand starting at position 2007 of SEQ ID NO: 1886498
gugcuagacgcuaggguua

SEQ ID NO: 2413795 - RNA, 19 nt, Artificial Sequence
  Description of Artificial Sequence: Synthetic oligonucleotide
  Antisense strand to SEQ ID NO: 2413794
uaacccuagcgucuagcac

SEQ ID NO: 2413796 - RNA, 19 nt, Artificial Sequence
  Description of Artificial Sequence: Synthetic oligonucleotide
  Sense strand starting at position 2073 of SEQ ID NO: 1886498
ucugcaugcugaucaggaa

SEQ ID NO: 2413797 - RNA, 19 nt, Artificial Sequence
  Description of Artificial Sequence: Synthetic oligonucleotide
  Antisense strand to SEQ ID NO: 2413796
uuccugaucagcaugcaga

SEQ ID NO: 2413798 - RNA, 19 nt, Artificial Sequence
  Description of Artificial Sequence: Synthetic oligonucleotide
  Sense strand starting at position 2074 of SEQ ID NO: 1886498
cugcaugcugaucaggaau

SEQ ID NO: 2413799 - RNA, 19 nt, Artificial Sequence
  Description of Artificial Sequence: Synthetic oligonucleotide
  Antisense strand to SEQ ID NO: 2413798
auuccugaucagcaugcag

SEQ ID NO: 2413800 - RNA, 19 nt, Artificial Sequence
  Description of Artificial Sequence: Synthetic oligonucleotide
  Sense strand starting at position 2119 of SEQ ID NO: 1886498
acccaucuaccuugaguca

SEQ ID NO: 2413801 - RNA, 19 nt, Artificial Sequence
  Description of Artificial Sequence: Synthetic oligonucleotide
  Antisense strand to SEQ ID NO: 2413800
ugacucaagguagaugggu

SEQ ID NO: 2413802 - RNA, 19 nt, Artificial Sequence
  Description of Artificial Sequence: Synthetic oligonucleotide
  Sense strand starting at position 2138 of SEQ ID NO: 1886498
gguccuucagagugaucug

SEQ ID NO: 2413803 - RNA, 19 nt, Artificial Sequence
  Description of Artificial Sequence: Synthetic oligonucleotide
  Antisense strand to SEQ ID NO: 2413802
cagaucacucugaaggacc

SEQ ID NO: 2413804 - RNA, 19 nt, Artificial Sequence
  Description of Artificial Sequence: Synthetic oligonucleotide
  Sense strand starting at position 2202 of SEQ ID NO: 1886498
gucauagcuccuuuguugu

SEQ ID NO: 2413805 - RNA, 19 nt, Artificial Sequence
  Description of Artificial Sequence: Synthetic oligonucleotide
  Antisense strand to SEQ ID NO: 2413804
acaacaaaggagcuaugac

SEQ ID NO: 2413806 - RNA, 19 nt, Artificial Sequence
  Description of Artificial Sequence: Synthetic oligonucleotide
  Sense strand starting at position 2550 of SEQ ID NO: 1886498
ccuguuucccuuuagagag

SEQ ID NO: 2413807 - RNA, 19 nt, Artificial Sequence
  Description of Artificial Sequence: Synthetic oligonucleotide
  Antisense strand to SEQ ID NO: 2413806
cucucuaaagggaaacagg

SEQ ID NO: 2413808 - RNA, 19 nt, Artificial Sequence
  Description of Artificial Sequence: Synthetic oligonucleotide
  Sense strand starting at position 2560 of SEQ ID NO: 1886498
uuuagagagguuuauagug

SEQ ID NO: 2413809 - RNA, 19 nt, Artificial Sequence
  Description of Artificial Sequence: Synthetic oligonucleotide
  Antisense strand to SEQ ID NO: 2413808
cacuauaaaccucucuaaa

SEQ ID NO: 2413810 - RNA, 19 nt, Artificial Sequence
  Description of Artificial Sequence: Synthetic oligonucleotide
  Sense strand starting at position 2566 of SEQ ID NO: 1886498
gagguuuauaguggucaag

SEQ ID NO: 2413811 - RNA, 19 nt, Artificial Sequence
  Description of Artificial Sequence: Synthetic oligonucleotide
  Antisense strand to SEQ ID NO: 2413810
cuugaccacuauaaaccuc

SEQ ID NO: 2413812 - RNA, 19 nt, Artificial Sequence
  Description of Artificial Sequence: Synthetic oligonucleotide
  Sense strand starting at position 2568 of SEQ ID NO: 1886498
gguuuauaguggucaagac

SEQ ID NO: 2413813 - RNA, 19 nt, Artificial Sequence
  Description of Artificial Sequence: Synthetic oligonucleotide
  Antisense strand to SEQ ID NO: 2413812
gucuugaccacuauaaacc

SEQ ID NO: 2413814 - RNA, 19 nt, Artificial Sequence
  Description of Artificial Sequence: Synthetic oligonucleotide
  Sense strand starting at position 2569 of SEQ ID NO: 1886498
guuuauaguggucaagacu

SEQ ID NO: 2413815 - RNA, 19 nt, Artificial Sequence
  Description of Artificial Sequence: Synthetic oligonucleotide
  Antisense strand to SEQ ID NO: 2413814
agucuugaccacuauaaac

SEQ ID NO: 2413816 - RNA, 19 nt, Artificial Sequence
  Description of Artificial Sequence: Synthetic oligonucleotide
  Sense strand starting at position 2572 of SEQ ID NO: 1886498
uauaguggucaagacucuu

SEQ ID NO: 2413817 - RNA, 19 nt, Artificial Sequence
  Description of Artificial Sequence: Synthetic oligonucleotide
  Antisense strand to SEQ ID NO: 2413816
aagagucuugaccacuaua

SEQ ID NO: 2413818 - RNA, 19 nt, Artificial Sequence
  Description of Artificial Sequence: Synthetic oligonucleotide
  Sense strand starting at position 2581 of SEQ ID NO: 1886498
caagacucuuggguacaga

SEQ ID NO: 2413819 - RNA, 19 nt, Artificial Sequence
  Description of Artificial Sequence: Synthetic oligonucleotide
  Antisense strand to SEQ ID NO: 2413818
ucuguacccaagagucuug

SEQ ID NO: 2413820 - RNA, 19 nt, Artificial Sequence
  Description of Artificial Sequence: Synthetic oligonucleotide
  Sense strand starting at position 2620 of SEQ ID NO: 1886498
uugaccuaagcaugaaaga

SEQ ID NO: 2413821 - RNA, 19 nt, Artificial Sequence
  Description of Artificial Sequence: Synthetic oligonucleotide
  Antisense strand to SEQ ID NO: 2413820
ucuuucaugcuuaggucaa

SEQ ID NO: 2413822 - RNA, 19 nt, Artificial Sequence
  Description of Artificial Sequence: Synthetic oligonucleotide
  Sense strand starting at position 2777 of SEQ ID NO: 1886498
gaaggauggcuugagccau

SEQ ID NO: 2413823 - RNA, 19 nt, Artificial Sequence
  Description of Artificial Sequence: Synthetic oligonucleotide
  Antisense strand to SEQ ID NO: 2413822
auggcucaagccauccuuc

SEQ ID NO: 2413824 - RNA, 19 nt, Artificial Sequence
  Description of Artificial Sequence: Synthetic oligonucleotide
  Sense strand starting at position 2781 of SEQ ID NO: 1886498
gauggcuugagccaugagu

SEQ ID NO: 2413825 - RNA, 19 nt, Artificial Sequence
  Description of Artificial Sequence: Synthetic oligonucleotide
  Antisense strand to SEQ ID NO: 2413824
acucauggcucaagccauc

SEQ ID NO: 2413826 - RNA, 19 nt, Artificial Sequence
  Description of Artificial Sequence: Synthetic oligonucleotide
  Sense strand starting at position 3182 of SEQ ID NO: 1886498
auauguauagcuggacaua

SEQ ID NO: 2413827 - RNA, 19 nt, Artificial Sequence
  Description of Artificial Sequence: Synthetic oligonucleotide
  Antisense strand to SEQ ID NO: 2413826
uauguccagcuauacauau

SEQ ID NO: 2413828 - RNA, 19 nt, Artificial Sequence
  Description of Artificial Sequence: Synthetic oligonucleotide
  Sense strand starting at position 3183 of SEQ ID NO: 1886498
uauguauagcuggacauau

SEQ ID NO: 2413829 - RNA, 19 nt, Artificial Sequence
  Description of Artificial Sequence: Synthetic oligonucleotide
  Antisense strand to SEQ ID NO: 2413828
auauguccagcuauacaua

SEQ ID NO: 2413830 - RNA, 19 nt, Artificial Sequence
  Description of Artificial Sequence: Synthetic oligonucleotide
  Sense strand starting at position 3185 of SEQ ID NO: 1886498
uguauagcuggacauauau

SEQ ID NO: 2413831 - RNA, 19 nt, Artificial Sequence
  Description of Artificial Sequence: Synthetic oligonucleotide
  Antisense strand to SEQ ID NO: 2413830
auauauguccagcuauaca

SEQ ID NO: 2413832 - RNA, 19 nt, Artificial Sequence
  Description of Artificial Sequence: Synthetic oligonucleotide
  Sense strand starting at position 3288 of SEQ ID NO: 1886498
ugagguuugcuuuacuaau

SEQ ID NO: 2413833 - RNA, 19 nt, Artificial Sequence
  Description of Artificial Sequence: Synthetic oligonucleotide
  Antisense strand to SEQ ID NO: 2413832
auuaguaaagcaaaccuca

SEQ ID NO: 2413834 - RNA, 19 nt, Artificial Sequence
  Description of Artificial Sequence: Synthetic oligonucleotide
  Sense strand starting at position 3432 of SEQ ID NO: 1886498
gcuguuauugacuacuaug

SEQ ID NO: 2413835 - RNA, 19 nt, Artificial Sequence
  Description of Artificial Sequence: Synthetic oligonucleotide
  Antisense strand to SEQ ID NO: 2413834
cauaguagucaauaacagc

SEQ ID NO: 2413836 - RNA, 19 nt, Artificial Sequence
  Description of Artificial Sequence: Synthetic oligonucleotide
  Sense strand starting at position 3450 of SEQ ID NO: 1886498
gugccaagucuuuaacuau

SEQ ID NO: 2413837 - RNA, 19 nt, Artificial Sequence
  Description of Artificial Sequence: Synthetic oligonucleotide
  Antisense strand to SEQ ID NO: 2413836
auaguuaaagacuuggcac

SEQ ID NO: 2413838 - RNA, 19 nt, Artificial Sequence
  Description of Artificial Sequence: Synthetic oligonucleotide
  Sense strand starting at position 3601 of SEQ ID NO: 1886498
ggcucaguucuccaggacu

SEQ ID NO: 2413839 - RNA, 19 nt, Artificial Sequence
  Description of Artificial Sequence: Synthetic oligonucleotide
  Antisense strand to SEQ ID NO: 2413838
aguccuggagaacugagcc

SEQ ID NO: 2413840 - RNA, 19 nt, Artificial Sequence
  Description of Artificial Sequence: Synthetic oligonucleotide
  Sense strand starting at position 3619 of SEQ ID NO: 1886498
ucccuaucagagugccaaa

SEQ ID NO: 2413841 - RNA, 19 nt, Artificial Sequence
  Description of Artificial Sequence: Synthetic oligonucleotide
  Antisense strand to SEQ ID NO: 2413840
uuuggcacucugauaggga

SEQ ID NO: 2413842 - RNA, 19 nt, Artificial Sequence
  Description of Artificial Sequence: Synthetic oligonucleotide
  Sense strand starting at position 3727 of SEQ ID NO: 1886498
gcagucacagguuaugacu

SEQ ID NO: 2413843 - RNA, 19 nt, Artificial Sequence
  Description of Artificial Sequence: Synthetic oligonucleotide
  Antisense strand to SEQ ID NO: 2413842
agucauaaccugugacugc

SEQ ID NO: 2413844 - RNA, 19 nt, Artificial Sequence
  Description of Artificial Sequence: Synthetic oligonucleotide
  Sense strand starting at position 3747 of SEQ ID NO: 1886498
gaagauuccugggacauuu

SEQ ID NO: 2413845 - RNA, 19 nt, Artificial Sequence
  Description of Artificial Sequence: Synthetic oligonucleotide
  Antisense strand to SEQ ID NO: 2413844
aaaugucccaggaaucuuc

SEQ ID NO: 2413846 - RNA, 19 nt, Artificial Sequence
  Description of Artificial Sequence: Synthetic oligonucleotide
  Sense strand starting at position 3813 of SEQ ID NO: 1886498
ggaaacccaccugguaaua

SEQ ID NO: 2413847 - RNA, 19 nt, Artificial Sequence
  Description of Artificial Sequence: Synthetic oligonucleotide
  Antisense strand to SEQ ID NO: 2413846
uauuaccagguggguuucc

SEQ ID NO: 2413848 - RNA, 19 nt, Artificial Sequence
  Description of Artificial Sequence: Synthetic oligonucleotide
  Sense strand starting at position 3839 of SEQ ID NO: 1886498
ggacccuggucucuugaga

SEQ ID NO: 2413849 - RNA, 19 nt, Artificial Sequence
  Description of Artificial Sequence: Synthetic oligonucleotide
  Antisense strand to SEQ ID NO: 2413848
ucucaagagaccagggucc

SEQ ID NO: 2413850 - RNA, 19 nt, Artificial Sequence
  Description of Artificial Sequence: Synthetic oligonucleotide
  Sense strand starting at position 3859 of SEQ ID NO: 1886498
acacauggcucaucuggua

SEQ ID NO: 2413851 - RNA, 19 nt, Artificial Sequence
  Description of Artificial Sequence: Synthetic oligonucleotide
  Antisense strand to SEQ ID NO: 2413850
uaccagaugagccaugugu

SEQ ID NO: 2413852 - RNA, 19 nt, Artificial Sequence
  Description of Artificial Sequence: Synthetic oligonucleotide
  Sense strand starting at position 3873 of SEQ ID NO: 1886498
ugguaauucuggguaguag

SEQ ID NO: 2413853 - RNA, 19 nt, Artificial Sequence
  Description of Artificial Sequence: Synthetic oligonucleotide
  Antisense strand to SEQ ID NO: 2413852
cuacuacccagaauuacca

SEQ ID NO: 2413854 - RNA, 19 nt, Artificial Sequence
  Description of Artificial Sequence: Synthetic oligonucleotide
  Sense strand starting at position 3874 of SEQ ID NO: 1886498
gguaauucuggguaguaga

SEQ ID NO: 2413855 - RNA, 19 nt, Artificial Sequence
  Description of Artificial Sequence: Synthetic oligonucleotide
  Antisense strand to SEQ ID NO: 2413854
ucuacuacccagaauuacc

SEQ ID NO: 2413856 - RNA, 19 nt, Artificial Sequence
  Description of Artificial Sequence: Synthetic oligonucleotide
  Sense strand starting at position 3961 of SEQ ID NO: 1886498
gucuaccaucuagguaaga

SEQ ID NO: 2413857 - RNA, 19 nt, Artificial Sequence
  Description of Artificial Sequence: Synthetic oligonucleotide
  Antisense strand to SEQ ID NO: 2413856
ucuuaccuagaugguagac

SEQ ID NO: 2413858 - RNA, 19 nt, Artificial Sequence
  Description of Artificial Sequence: Synthetic oligonucleotide
  Sense strand starting at position 3962 of SEQ ID NO: 1886498
ucuaccaucuagguaagau

SEQ ID NO: 2413859 - RNA, 19 nt, Artificial Sequence
  Description of Artificial Sequence: Synthetic oligonucleotide
  Antisense strand to SEQ ID NO: 2413858
aucuuaccuagaugguaga

SEQ ID NO: 2413860 - RNA, 19 nt, Artificial Sequence
  Description of Artificial Sequence: Synthetic oligonucleotide
  Sense strand starting at position 175 of SEQ ID NO: 1886499
uggaacaaguccuugaauu

SEQ ID NO: 2413861 - RNA, 19 nt, Artificial Sequence
  Description of Artificial Sequence: Synthetic oligonucleotide
  Antisense strand to SEQ ID NO: 2413860
aauucaaggacuuguucca

SEQ ID NO: 2413862 - RNA, 19 nt, Artificial Sequence
  Description of Artificial Sequence: Synthetic oligonucleotide
  Sense strand starting at position 176 of SEQ ID NO: 1886499
ggaacaaguccuugaauuc

SEQ ID NO: 2413863 - RNA, 19 nt, Artificial Sequence
  Description of Artificial Sequence: Synthetic oligonucleotide
  Antisense strand to SEQ ID NO: 2413862
gaauucaaggacuuguucc

SEQ ID NO: 2413864 - RNA, 19 nt, Artificial Sequence
  Description of Artificial Sequence: Synthetic oligonucleotide
  Sense strand starting at position 315 of SEQ ID NO: 1886499
ggacuuuagagugguggca

SEQ ID NO: 2413865 - RNA, 19 nt, Artificial Sequence
  Description of Artificial Sequence: Synthetic oligonucleotide
  Antisense strand to SEQ ID NO: 2413864
ugccaccacucuaaagucc

SEQ ID NO: 2413866 - RNA, 19 nt, Artificial Sequence
  Description of Artificial Sequence: Synthetic oligonucleotide
  Sense strand starting at position 331 of SEQ ID NO: 1886499
gcagcugggacugaacauu

SEQ ID NO: 2413867 - RNA, 19 nt, Artificial Sequence
  Description of Artificial Sequence: Synthetic oligonucleotide
  Antisense strand to SEQ ID NO: 2413866
aauguucagucccagcugc

SEQ ID NO: 2413868 - RNA, 19 nt, Artificial Sequence
  Description of Artificial Sequence: Synthetic oligonucleotide
  Sense strand starting at position 417 of SEQ ID NO: 1886499
gauggagccuuguuaggaa

SEQ ID NO: 2413869 - RNA, 19 nt, Artificial Sequence
  Description of Artificial Sequence: Synthetic oligonucleotide
  Antisense strand to SEQ ID NO: 2413868
uuccuaacaaggcuccauc

SEQ ID NO: 2413870 - RNA, 19 nt, Artificial Sequence
  Description of Artificial Sequence: Synthetic oligonucleotide
  Sense strand starting at position 511 of SEQ ID NO: 1886499
aggugacucuuaccugcau

SEQ ID NO: 2413871 - RNA, 19 nt, Artificial Sequence
  Description of Artificial Sequence: Synthetic oligonucleotide
  Antisense strand to SEQ ID NO: 2413870
augcagguaagagucaccu

SEQ ID NO: 2413872 - RNA, 19 nt, Artificial Sequence
  Description of Artificial Sequence: Synthetic oligonucleotide
  Sense strand starting at position 512 of SEQ ID NO: 1886499
ggugacucuuaccugcaua

SEQ ID NO: 2413873 - RNA, 19 nt, Artificial Sequence
  Description of Artificial Sequence: Synthetic oligonucleotide
  Antisense strand to SEQ ID NO: 2413872
uaugcagguaagagucacc

SEQ ID NO: 2413874 - RNA, 19 nt, Artificial Sequence
  Description of Artificial Sequence: Synthetic oligonucleotide
  Sense strand starting at position 538 of SEQ ID NO: 1886499
gguugagaagcccaguguu

SEQ ID NO: 2413875 - RNA, 19 nt, Artificial Sequence
  Description of Artificial Sequence: Synthetic oligonucleotide
  Antisense strand to SEQ ID NO: 2413874
aacacugggcuucucaacc

SEQ ID NO: 2413876 - RNA, 19 nt, Artificial Sequence
  Description of Artificial Sequence: Synthetic oligonucleotide
  Sense strand starting at position 541 of SEQ ID NO: 1886499
ugagaagcccaguguugaa

SEQ ID NO: 2413877 - RNA, 19 nt, Artificial Sequence
  Description of Artificial Sequence: Synthetic oligonucleotide
  Antisense strand to SEQ ID NO: 2413876
uucaacacugggcuucuca

SEQ ID NO: 2413878 - RNA, 19 nt, Artificial Sequence
  Description of Artificial Sequence: Synthetic oligonucleotide
  Sense strand starting at position 837 of SEQ ID NO: 1886499
uccacuuugagcugggauu

SEQ ID NO: 2413879 - RNA, 19 nt, Artificial Sequence
  Description of Artificial Sequence: Synthetic oligonucleotide
  Antisense strand to SEQ ID NO: 2413878
aaucccagcucaaagugga

SEQ ID NO: 2413880 - RNA, 19 nt, Artificial Sequence
  Description of Artificial Sequence: Synthetic oligonucleotide
  Sense strand starting at position 838 of SEQ ID NO: 1886499
ccacuuugagcugggauua

SEQ ID NO: 2413881 - RNA, 19 nt, Artificial Sequence
  Description of Artificial Sequence: Synthetic oligonucleotide
  Antisense strand to SEQ ID NO: 2413880
uaaucccagcucaaagugg

SEQ ID NO: 2413882 - RNA, 19 nt, Artificial Sequence
  Description of Artificial Sequence: Synthetic oligonucleotide
  Sense strand starting at position 999 of SEQ ID NO: 1886499
cauugauagcaccgucacu

SEQ ID NO: 2413883 - RNA, 19 nt, Artificial Sequence
  Description of Artificial Sequence: Synthetic oligonucleotide
  Antisense strand to SEQ ID NO: 2413882
agugacggugcuaucaaug

SEQ ID NO: 2413884 - RNA, 19 nt, Artificial Sequence
  Description of Artificial Sequence: Synthetic oligonucleotide
  Sense strand starting at position 1017 of SEQ ID NO: 1886499
uccagcucugcuugggaca

SEQ ID NO: 2413885 - RNA, 19 nt, Artificial Sequence
  Description of Artificial Sequence: Synthetic oligonucleotide
  Antisense strand to SEQ ID NO: 2413884
ugucccaagcagagcugga

SEQ ID NO: 2413886 - RNA, 19 nt, Artificial Sequence
  Description of Artificial Sequence: Synthetic oligonucleotide
  Sense strand starting at position 1018 of SEQ ID NO: 1886499
ccagcucugcuugggacau

SEQ ID NO: 2413887 - RNA, 19 nt, Artificial Sequence
  Description of Artificial Sequence: Synthetic oligonucleotide
  Antisense strand to SEQ ID NO: 2413886
augucccaagcagagcugg

SEQ ID NO: 2413888 - RNA, 19 nt, Artificial Sequence
  Description of Artificial Sequence: Synthetic oligonucleotide
  Sense strand starting at position 1067 of SEQ ID NO: 1886499
ugugaucauuuguaacauu

SEQ ID NO: 2413889 - RNA, 19 nt, Artificial Sequence
  Description of Artificial Sequence: Synthetic oligonucleotide
  Antisense strand to SEQ ID NO: 2413888
aauguuacaaaugaucaca

SEQ ID NO: 2413890 - RNA, 19 nt, Artificial Sequence
  Description of Artificial Sequence: Synthetic oligonucleotide
  Sense strand starting at position 1250 of SEQ ID NO: 1886499
cgaaauggguccuugauau

SEQ ID NO: 2413891 - RNA, 19 nt, Artificial Sequence
  Description of Artificial Sequence: Synthetic oligonucleotide
  Antisense strand to SEQ ID NO: 2413890
auaucaaggacccauuucg

SEQ ID NO: 2413892 - RNA, 19 nt, Artificial Sequence
  Description of Artificial Sequence: Synthetic oligonucleotide
  Sense strand starting at position 1282 of SEQ ID NO: 1886499
gguggucaccuccaaaucu

SEQ ID NO: 2413893 - RNA, 19 nt, Artificial Sequence
  Description of Artificial Sequence: Synthetic oligonucleotide
  Antisense strand to SEQ ID NO: 2413892
agauuuggaggugaccacc

SEQ ID NO: 2413894 - RNA, 19 nt, Artificial Sequence
  Description of Artificial Sequence: Synthetic oligonucleotide
  Sense strand starting at position 1416 of SEQ ID NO: 1886499
ucacucuguuaguuuacau

SEQ ID NO: 2413895 - RNA, 19 nt, Artificial Sequence
  Description of Artificial Sequence: Synthetic oligonucleotide
  Antisense strand to SEQ ID NO: 2413894
auguaaacuaacagaguga

SEQ ID NO: 2413896 - RNA, 19 nt, Artificial Sequence
  Description of Artificial Sequence: Synthetic oligonucleotide
  Sense strand starting at position 1665 of SEQ ID NO: 1886499
cugacacgccuuuaaagau

SEQ ID NO: 2413897 - RNA, 19 nt, Artificial Sequence
  Description of Artificial Sequence: Synthetic oligonucleotide
  Antisense strand to SEQ ID NO: 2413896
aucuuuaaaggcgugucag

SEQ ID NO: 2413898 - RNA, 19 nt, Artificial Sequence
  Description of Artificial Sequence: Synthetic oligonucleotide
  Sense strand starting at position 1690 of SEQ ID NO: 1886499
acucaccucuguuuacaga

SEQ ID NO: 2413899 - RNA, 19 nt, Artificial Sequence
  Description of Artificial Sequence: Synthetic oligonucleotide
  Antisense strand to SEQ ID NO: 2413898
ucuguaaacagaggugagu

SEQ ID NO: 2413900 - RNA, 19 nt, Artificial Sequence
  Description of Artificial Sequence: Synthetic oligonucleotide
  Sense strand starting at position 1691 of SEQ ID NO: 1886499
cucaccucuguuuacagau

SEQ ID NO: 2413901 - RNA, 19 nt, Artificial Sequence
  Description of Artificial Sequence: Synthetic oligonucleotide
  Antisense strand to SEQ ID NO: 2413900
aucuguaaacagaggugag

SEQ ID NO: 2413902 - RNA, 19 nt, Artificial Sequence
  Description of Artificial Sequence: Synthetic oligonucleotide
  Sense strand starting at position 1992 of SEQ ID NO: 1886499
cuagaaugcccuuagcucu

SEQ ID NO: 2413903 - RNA, 19 nt, Artificial Sequence
  Description of Artificial Sequence: Synthetic oligonucleotide
  Antisense strand to SEQ ID NO: 2413902
agagcuaagggcauucuag

SEQ ID NO: 2413904 - RNA, 19 nt, Artificial Sequence
  Description of Artificial Sequence: Synthetic oligonucleotide
  Sense strand starting at position 2113 of SEQ ID NO: 1886499
ggccucucuugggcucaaa

SEQ ID NO: 2413905 - RNA, 19 nt, Artificial Sequence
  Description of Artificial Sequence: Synthetic oligonucleotide
  Antisense strand to SEQ ID NO: 2413904
uuugagcccaagagaggcc

SEQ ID NO: 2413906 - RNA, 19 nt, Artificial Sequence
  Description of Artificial Sequence: Synthetic oligonucleotide
  Sense strand starting at position 2192 of SEQ ID NO: 1886499
uuagcugccuucccagaau

SEQ ID NO: 2413907 - RNA, 19 nt, Artificial Sequence
  Description of Artificial Sequence: Synthetic oligonucleotide
  Antisense strand to SEQ ID NO: 2413906
auucugggaaggcagcuaa

SEQ ID NO: 2413908 - RNA, 19 nt, Artificial Sequence
  Description of Artificial Sequence: Synthetic oligonucleotide
  Sense strand starting at position 2409 of SEQ ID NO: 1886499
aaugaaaccgaucacuguu

SEQ ID NO: 2413909 - RNA, 19 nt, Artificial Sequence
  Description of Artificial Sequence: Synthetic oligonucleotide
  Antisense strand to SEQ ID NO: 2413908
aacagugaucgguuucauu

SEQ ID NO: 2413910 - RNA, 19 nt, Artificial Sequence
  Description of Artificial Sequence: Synthetic oligonucleotide
  Sense strand starting at position 2412 of SEQ ID NO: 1886499
gaaaccgaucacuguuauu

SEQ ID NO: 2413911 - RNA, 19 nt, Artificial Sequence
  Description of Artificial Sequence: Synthetic oligonucleotide
  Antisense strand to SEQ ID NO: 2413910
aauaacagugaucgguuuc

SEQ ID NO: 2413912 - RNA, 19 nt, Artificial Sequence
  Description of Artificial Sequence: Synthetic oligonucleotide
  Sense strand starting at position 2548 of SEQ ID NO: 1886499
agcugagacuucucuuuga

SEQ ID NO: 2413913 - RNA, 19 nt, Artificial Sequence
  Description of Artificial Sequence: Synthetic oligonucleotide
  Antisense strand to SEQ ID NO: 2413912
ucaaagagaagucucagcu

SEQ ID NO: 2413914 - RNA, 19 nt, Artificial Sequence
  Description of Artificial Sequence: Synthetic oligonucleotide
  Sense strand starting at position 2563 of SEQ ID NO: 1886499
uugauuuacucagaaggac

SEQ ID NO: 2413915 - RNA, 19 nt, Artificial Sequence
  Description of Artificial Sequence: Synthetic oligonucleotide
  Antisense strand to SEQ ID NO: 2413914
guccuucugaguaaaucaa

SEQ ID NO: 2413916 - RNA, 19 nt, Artificial Sequence
  Description of Artificial Sequence: Synthetic oligonucleotide
  Sense strand starting at position 2604 of SEQ ID NO: 1886499
ggagguaaguuucucacca

SEQ ID NO: 2413917 - RNA, 19 nt, Artificial Sequence
  Description of Artificial Sequence: Synthetic oligonucleotide
  Antisense strand to SEQ ID NO: 2413916
uggugagaaacuuaccucc

SEQ ID NO: 2413918 - RNA, 19 nt, Artificial Sequence
  Description of Artificial Sequence: Synthetic oligonucleotide
  Sense strand starting at position 2605 of SEQ ID NO: 1886499
gagguaaguuucucaccac

SEQ ID NO: 2413919 - RNA, 19 nt, Artificial Sequence
  Description of Artificial Sequence: Synthetic oligonucleotide
  Antisense strand to SEQ ID NO: 2413918
guggugagaaacuuaccuc

SEQ ID NO: 2413920 - RNA, 19 nt, Artificial Sequence
  Description of Artificial Sequence: Synthetic oligonucleotide
  Sense strand starting at position 2608 of SEQ ID NO: 1886499
guaaguuucucaccacgua

SEQ ID NO: 2413921 - RNA, 19 nt, Artificial Sequence
  Description of Artificial Sequence: Synthetic oligonucleotide
  Antisense strand to SEQ ID NO: 2413920
uacguggugagaaacuuac

SEQ ID NO: 2413922 - RNA, 19 nt, Artificial Sequence
  Description of Artificial Sequence: Synthetic oligonucleotide
  Sense strand starting at position 2706 of SEQ ID NO: 1886499
cugguuuccuggucaccaa

SEQ ID NO: 2413923 - RNA, 19 nt, Artificial Sequence
  Description of Artificial Sequence: Synthetic oligonucleotide
  Antisense strand to SEQ ID NO: 2413922
uuggugaccaggaaaccag

SEQ ID NO: 2413924 - RNA, 19 nt, Artificial Sequence
  Description of Artificial Sequence: Synthetic oligonucleotide
  Sense strand starting at position 2742 of SEQ ID NO: 1886499
gugugcucuccagcuccua

SEQ ID NO: 2413925 - RNA, 19 nt, Artificial Sequence
  Description of Artificial Sequence: Synthetic oligonucleotide
  Antisense strand to SEQ ID NO: 2413924
uaggagcuggagagcacac

SEQ ID NO: 2413926 - RNA, 19 nt, Artificial Sequence
  Description of Artificial Sequence: Synthetic oligonucleotide
  Sense strand starting at position 3168 of SEQ ID NO: 1886499
gggcuaaguugacucccaa

SEQ ID NO: 2413927 - RNA, 19 nt, Artificial Sequence
  Description of Artificial Sequence: Synthetic oligonucleotide
  Antisense strand to SEQ ID NO: 2413926
uugggagucaacuuagccc

SEQ ID NO: 2413928 - RNA, 19 nt, Artificial Sequence
  Description of Artificial Sequence: Synthetic oligonucleotide
  Sense strand starting at position 3244 of SEQ ID NO: 1886499
accaaagaucccuggcacu

SEQ ID NO: 2413929 - RNA, 19 nt, Artificial Sequence
  Description of Artificial Sequence: Synthetic oligonucleotide
  Antisense strand to SEQ ID NO: 2413928
agugccagggaucuuuggu

SEQ ID NO: 2413930 - RNA, 19 nt, Artificial Sequence
  Description of Artificial Sequence: Synthetic oligonucleotide
  Sense strand starting at position 3386 of SEQ ID NO: 1886499
gaaugauguccucagccag

SEQ ID NO: 2413931 - RNA, 19 nt, Artificial Sequence
  Description of Artificial Sequence: Synthetic oligonucleotide
  Antisense strand to SEQ ID NO: 2413930
cuggcugaggacaucauuc

SEQ ID NO: 2413932 - RNA, 19 nt, Artificial Sequence
  Description of Artificial Sequence: Synthetic oligonucleotide
  Sense strand starting at position 3572 of SEQ ID NO: 1886499
cugguuugcacccagaaag

SEQ ID NO: 2413933 - RNA, 19 nt, Artificial Sequence
  Description of Artificial Sequence: Synthetic oligonucleotide
  Antisense strand to SEQ ID NO: 2413932
cuuucugggugcaaaccag

SEQ ID NO: 2413934 - RNA, 19 nt, Artificial Sequence
  Description of Artificial Sequence: Synthetic oligonucleotide
  Sense strand starting at position 3610 of SEQ ID NO: 1886499
cccggacugaugugucaca

SEQ ID NO: 2413935 - RNA, 19 nt, Artificial Sequence
  Description of Artificial Sequence: Synthetic oligonucleotide
  Antisense strand to SEQ ID NO: 2413934
ugugacacaucaguccggg

SEQ ID NO: 2413936 - RNA, 19 nt, Artificial Sequence
  Description of Artificial Sequence: Synthetic oligonucleotide
  Sense strand starting at position 3813 of SEQ ID NO: 1886499
gaaggaauuuauuaucugu

SEQ ID NO: 2413937 - RNA, 19 nt, Artificial Sequence
  Description of Artificial Sequence: Synthetic oligonucleotide
  Antisense strand to SEQ ID NO: 2413936
acagauaauaaauuccuuc

SEQ ID NO: 2413938 - RNA, 19 nt, Artificial Sequence
  Description of Artificial Sequence: Synthetic oligonucleotide
  Sense strand starting at position 3955 of SEQ ID NO: 1886499
cugugccuucgcucucaga

SEQ ID NO: 2413939 - RNA, 19 nt, Artificial Sequence
  Description of Artificial Sequence: Synthetic oligonucleotide
  Antisense strand to SEQ ID NO: 2413938
ucugagagcgaaggcacag

SEQ ID NO: 2413940 - RNA, 19 nt, Artificial Sequence
  Description of Artificial Sequence: Synthetic oligonucleotide
  Sense strand starting at position 131 of SEQ ID NO: 1886500
uaaauaaaucacgguguuu

SEQ ID NO: 2413941 - RNA, 19 nt, Artificial Sequence
  Description of Artificial Sequence: Synthetic oligonucleotide
  Antisense strand to SEQ ID NO: 2413940
aaacaccgugauuuauuua

SEQ ID NO: 2413942 - RNA, 19 nt, Artificial Sequence
  Description of Artificial Sequence: Synthetic oligonucleotide
  Sense strand starting at position 993 of SEQ ID NO: 1886500
aggacaguuaucgaggcua

SEQ ID NO: 2413943 - RNA, 19 nt, Artificial Sequence
  Description of Artificial Sequence: Synthetic oligonucleotide
  Antisense strand to SEQ ID NO: 2413942
uagccucgauaacuguccu

SEQ ID NO: 2413944 - RNA, 19 nt, Artificial Sequence
  Description of Artificial Sequence: Synthetic oligonucleotide
  Sense strand starting at position 1095 of SEQ ID NO: 1886500
auauaaaguuucccuggga

SEQ ID NO: 2413945 - RNA, 19 nt, Artificial Sequence
  Description of Artificial Sequence: Synthetic oligonucleotide
  Antisense strand to SEQ ID NO: 2413944
ucccagggaaacuuuauau

SEQ ID NO: 2413946 - RNA, 19 nt, Artificial Sequence
  Description of Artificial Sequence: Synthetic oligonucleotide
  Sense strand starting at position 1096 of SEQ ID NO: 1886500
uauaaaguuucccugggaa

SEQ ID NO: 2413947 - RNA, 19 nt, Artificial Sequence
  Description of Artificial Sequence: Synthetic oligonucleotide
  Antisense strand to SEQ ID NO: 2413946
uucccagggaaacuuuaua

SEQ ID NO: 2413948 - RNA, 19 nt, Artificial Sequence
  Description of Artificial Sequence: Synthetic oligonucleotide
  Sense strand starting at position 1098 of SEQ ID NO: 1886500
uaaaguuucccugggaaag

SEQ ID NO: 2413949 - RNA, 19 nt, Artificial Sequence
  Description of Artificial Sequence: Synthetic oligonucleotide
  Antisense strand to SEQ ID NO: 2413948
cuuucccagggaaacuuua

SEQ ID NO: 2413950 - RNA, 19 nt, Artificial Sequence
  Description of Artificial Sequence: Synthetic oligonucleotide
  Sense strand starting at position 1113 of SEQ ID NO: 1886500
aaagaaauguaaguguaag

SEQ ID NO: 2413951 - RNA, 19 nt, Artificial Sequence
  Description of Artificial Sequence: Synthetic oligonucleotide
  Antisense strand to SEQ ID NO: 2413950
cuuacacuuacauuucuuu

SEQ ID NO: 2413952 - RNA, 19 nt, Artificial Sequence
  Description of Artificial Sequence: Synthetic oligonucleotide
  Sense strand starting at position 1251 of SEQ ID NO: 1886500
ggacuauccgcuuagaguu

SEQ ID NO: 2413953 - RNA, 19 nt, Artificial Sequence
  Description of Artificial Sequence: Synthetic oligonucleotide
  Antisense strand to SEQ ID NO: 2413952
aacucuaagcggauagucc

SEQ ID NO: 2413954 - RNA, 19 nt, Artificial Sequence
  Description of Artificial Sequence: Synthetic oligonucleotide
  Sense strand starting at position 1257 of SEQ ID NO: 1886500
uccgcuuagaguucuguuu

SEQ ID NO: 2413955 - RNA, 19 nt, Artificial Sequence
  Description of Artificial Sequence: Synthetic oligonucleotide
  Antisense strand to SEQ ID NO: 2413954
aaacagaacucuaagcgga

SEQ ID NO: 2413956 - RNA, 19 nt, Artificial Sequence
  Description of Artificial Sequence: Synthetic oligonucleotide
  Sense strand starting at position 1263 of SEQ ID NO: 1886500
uagaguucuguuugaccag

SEQ ID NO: 2413957 - RNA, 19 nt, Artificial Sequence
  Description of Artificial Sequence: Synthetic oligonucleotide
  Antisense strand to SEQ ID NO: 2413956
cuggucaaacagaacucua

SEQ ID NO: 2413958 - RNA, 19 nt, Artificial Sequence
  Description of Artificial Sequence: Synthetic oligonucleotide
  Sense strand starting at position 1514 of SEQ ID NO: 1886500
gccguauuccuagccgaau

SEQ ID NO: 2413959 - RNA, 19 nt, Artificial Sequence
  Description of Artificial Sequence: Synthetic oligonucleotide
  Antisense strand to SEQ ID NO: 2413958
auucggcuaggaauacggc

SEQ ID NO: 2413960 - RNA, 19 nt, Artificial Sequence
  Description of Artificial Sequence: Synthetic oligonucleotide
  Sense strand starting at position 1607 of SEQ ID NO: 1886500
ccgagaagaguucgaaacu

SEQ ID NO: 2413961 - RNA, 19 nt, Artificial Sequence
  Description of Artificial Sequence: Synthetic oligonucleotide
  Antisense strand to SEQ ID NO: 2413960
aguuucgaacucuucucgg

SEQ ID NO: 2413962 - RNA, 19 nt, Artificial Sequence
  Description of Artificial Sequence: Synthetic oligonucleotide
  Sense strand starting at position 1737 of SEQ ID NO: 1886500
gagacugugugauccuuaa

SEQ ID NO: 2413963 - RNA, 19 nt, Artificial Sequence
  Description of Artificial Sequence: Synthetic oligonucleotide
  Antisense strand to SEQ ID NO: 2413962
uuaaggaucacacagucuc

SEQ ID NO: 2413964 - RNA, 19 nt, Artificial Sequence
  Description of Artificial Sequence: Synthetic oligonucleotide
  Sense strand starting at position 1741 of SEQ ID NO: 1886500
cugugugauccuuaaagau

SEQ ID NO: 2413965 - RNA, 19 nt, Artificial Sequence
  Description of Artificial Sequence: Synthetic oligonucleotide
  Antisense strand to SEQ ID NO: 2413964
aucuuuaaggaucacacag

SEQ ID NO: 2413966 - RNA, 19 nt, Artificial Sequence
  Description of Artificial Sequence: Synthetic oligonucleotide
  Sense strand starting at position 1815 of SEQ ID NO: 1886500
ugggcuuucccagaagguu

SEQ ID NO: 2413967 - RNA, 19 nt, Artificial Sequence
  Description of Artificial Sequence: Synthetic oligonucleotide
  Antisense strand to SEQ ID NO: 2413966
aaccuucugggaaagccca

SEQ ID NO: 2413968 - RNA, 19 nt, Artificial Sequence
  Description of Artificial Sequence: Synthetic oligonucleotide
  Sense strand starting at position 1824 of SEQ ID NO: 1886500
ccagaagguucuguacuua

SEQ ID NO: 2413969 - RNA, 19 nt, Artificial Sequence
  Description of Artificial Sequence: Synthetic oligonucleotide
  Antisense strand to SEQ ID NO: 2413968
uaaguacagaaccuucugg

SEQ ID NO: 2413970 - RNA, 19 nt, Artificial Sequence
  Description of Artificial Sequence: Synthetic oligonucleotide
  Sense strand starting at position 2130 of SEQ ID NO: 1886500
gacucauaggaaugcuguu

SEQ ID NO: 2413971 - RNA, 19 nt, Artificial Sequence
  Description of Artificial Sequence: Synthetic oligonucleotide
  Antisense strand to SEQ ID NO: 2413970
aacagcauuccuaugaguc

SEQ ID NO: 2413972 - RNA, 19 nt, Artificial Sequence
  Description of Artificial Sequence: Synthetic oligonucleotide
  Sense strand starting at position 2176 of SEQ ID NO: 1886500
gugggagcucuguagaaag

SEQ ID NO: 2413973 - RNA, 19 nt, Artificial Sequence
  Description of Artificial Sequence: Synthetic oligonucleotide
  Antisense strand to SEQ ID NO: 2413972
cuuucuacagagcucccac

SEQ ID NO: 2413974 - RNA, 19 nt, Artificial Sequence
  Description of Artificial Sequence: Synthetic oligonucleotide
  Sense strand starting at position 2178 of SEQ ID NO: 1886500
gggagcucuguagaaaguu

SEQ ID NO: 2413975 - RNA, 19 nt, Artificial Sequence
  Description of Artificial Sequence: Synthetic oligonucleotide
  Antisense strand to SEQ ID NO: 2413974
aacuuucuacagagcuccc

SEQ ID NO: 2413976 - RNA, 19 nt, Artificial Sequence
  Description of Artificial Sequence: Synthetic oligonucleotide
  Sense strand starting at position 2195 of SEQ ID NO: 1886500
uuagaagagucaucucgga

SEQ ID NO: 2413977 - RNA, 19 nt, Artificial Sequence
  Description of Artificial Sequence: Synthetic oligonucleotide
  Antisense strand to SEQ ID NO: 2413976
uccgagaugacucuucuaa

SEQ ID NO: 2413978 - RNA, 19 nt, Artificial Sequence
  Description of Artificial Sequence: Synthetic oligonucleotide
  Sense strand starting at position 2202 of SEQ ID NO: 1886500
agucaucucggaugugaaa

SEQ ID NO: 2413979 - RNA, 19 nt, Artificial Sequence
  Description of Artificial Sequence: Synthetic oligonucleotide
  Antisense strand to SEQ ID NO: 2413978
uuucacauccgagaugacu

SEQ ID NO: 2413980 - RNA, 19 nt, Artificial Sequence
  Description of Artificial Sequence: Synthetic oligonucleotide
  Sense strand starting at position 2281 of SEQ ID NO: 1886500
gaauaaggcuccucccagu

SEQ ID NO: 2413981 - RNA, 19 nt, Artificial Sequence
  Description of Artificial Sequence: Synthetic oligonucleotide
  Antisense strand to SEQ ID NO: 2413980
acugggaggagccuuauuc

SEQ ID NO: 2413982 - RNA, 19 nt, Artificial Sequence
  Description of Artificial Sequence: Synthetic oligonucleotide
  Sense strand starting at position 2409 of SEQ ID NO: 1886500
ucaguaacuaucgaugaug

SEQ ID NO: 2413983 - RNA, 19 nt, Artificial Sequence
  Description of Artificial Sequence: Synthetic oligonucleotide
  Antisense strand to SEQ ID NO: 2413982
caucaucgauaguuacuga

SEQ ID NO: 2413984 - RNA, 19 nt, Artificial Sequence
  Description of Artificial Sequence: Synthetic oligonucleotide
  Sense strand starting at position 2411 of SEQ ID NO: 1886500
aguaacuaucgaugaugga

SEQ ID NO: 2413985 - RNA, 19 nt, Artificial Sequence
  Description of Artificial Sequence: Synthetic oligonucleotide
  Antisense strand to SEQ ID NO: 2413984
uccaucaucgauaguuacu

SEQ ID NO: 2413986 - RNA, 19 nt, Artificial Sequence
  Description of Artificial Sequence: Synthetic oligonucleotide
  Sense strand starting at position 2415 of SEQ ID NO: 1886500
acuaucgaugauggauauu

SEQ ID NO: 2413987 - RNA, 19 nt, Artificial Sequence
  Description of Artificial Sequence: Synthetic oligonucleotide
  Antisense strand to SEQ ID NO: 2413986
aauauccaucaucgauagu

SEQ ID NO: 2413988 - RNA, 19 nt, Artificial Sequence
  Description of Artificial Sequence: Synthetic oligonucleotide
  Sense strand starting at position 2454 of SEQ ID NO: 1886500
cuuaaaggacucugaccua

SEQ ID NO: 2413989 - RNA, 19 nt, Artificial Sequence
  Description of Artificial Sequence: Synthetic oligonucleotide
  Antisense strand to SEQ ID NO: 2413988
uaggucagaguccuuuaag

SEQ ID NO: 2413990 - RNA, 19 nt, Artificial Sequence
  Description of Artificial Sequence: Synthetic oligonucleotide
  Sense strand starting at position 2820 of SEQ ID NO: 1886500
gguauugauuggcuccaga

SEQ ID NO: 2413991 - RNA, 19 nt, Artificial Sequence
  Description of Artificial Sequence: Synthetic oligonucleotide
  Antisense strand to SEQ ID NO: 2413990
ucuggagccaaucaauacc

SEQ ID NO: 2413992 - RNA, 19 nt, Artificial Sequence
  Description of Artificial Sequence: Synthetic oligonucleotide
  Sense strand starting at position 2823 of SEQ ID NO: 1886500
auugauuggcuccagaugu

SEQ ID NO: 2413993 - RNA, 19 nt, Artificial Sequence
  Description of Artificial Sequence: Synthetic oligonucleotide
  Antisense strand to SEQ ID NO: 2413992
acaucuggagccaaucaau

SEQ ID NO: 2413994 - RNA, 19 nt, Artificial Sequence
  Description of Artificial Sequence: Synthetic oligonucleotide
  Sense strand starting at position 2891 of SEQ ID NO: 1886500
auaagcaauugguuuaacu

SEQ ID NO: 2413995 - RNA, 19 nt, Artificial Sequence
  Description of Artificial Sequence: Synthetic oligonucleotide
  Antisense strand to SEQ ID NO: 2413994
aguuaaaccaauugcuuau

SEQ ID NO: 2413996 - RNA, 19 nt, Artificial Sequence
  Description of Artificial Sequence: Synthetic oligonucleotide
  Sense strand starting at position 2903 of SEQ ID NO: 1886500
uuuaacucugaguauguca

SEQ ID NO: 2413997 - RNA, 19 nt, Artificial Sequence
  Description of Artificial Sequence: Synthetic oligonucleotide
  Antisense strand to SEQ ID NO: 2413996
ugacauacucagaguuaaa

SEQ ID NO: 2413998 - RNA, 19 nt, Artificial Sequence
  Description of Artificial Sequence: Synthetic oligonucleotide
  Sense strand starting at position 2910 of SEQ ID NO: 1886500
cugaguaugucauuuaguu

SEQ ID NO: 2413999 - RNA, 19 nt, Artificial Sequence
  Description of Artificial Sequence: Synthetic oligonucleotide
  Antisense strand to SEQ ID NO: 2413998
aacuaaaugacauacucag

SEQ ID NO: 2414000 - RNA, 19 nt, Artificial Sequence
  Description of Artificial Sequence: Synthetic oligonucleotide
  Sense strand starting at position 2925 of SEQ ID NO: 1886500
aguuuaggccaaugagaug

SEQ ID NO: 2414001 - RNA, 19 nt, Artificial Sequence
  Description of Artificial Sequence: Synthetic oligonucleotide
  Antisense strand to SEQ ID NO: 2414000
caucucauuggccuaaacu

SEQ ID NO: 2414002 - RNA, 19 nt, Artificial Sequence
  Description of Artificial Sequence: Synthetic oligonucleotide
  Sense strand starting at position 3003 of SEQ ID NO: 1886500
gcuugauauugggccaaag

SEQ ID NO: 2414003 - RNA, 19 nt, Artificial Sequence
  Description of Artificial Sequence: Synthetic oligonucleotide
  Antisense strand to SEQ ID NO: 2414002
cuuuggcccaauaucaagc

SEQ ID NO: 2414004 - RNA, 19 nt, Artificial Sequence
  Description of Artificial Sequence: Synthetic oligonucleotide
  Sense strand starting at position 3005 of SEQ ID NO: 1886500
uugauauugggccaaagcu

SEQ ID NO: 2414005 - RNA, 19 nt, Artificial Sequence
  Description of Artificial Sequence: Synthetic oligonucleotide
  Antisense strand to SEQ ID NO: 2414004
agcuuuggcccaauaucaa

SEQ ID NO: 2414006 - RNA, 19 nt, Artificial Sequence
  Description of Artificial Sequence: Synthetic oligonucleotide
  Sense strand starting at position 3374 of SEQ ID NO: 1886500
gagaauggccugcagcaaa

SEQ ID NO: 2414007 - RNA, 19 nt, Artificial Sequence
  Description of Artificial Sequence: Synthetic oligonucleotide
  Antisense strand to SEQ ID NO: 2414006
uuugcugcaggccauucuc

SEQ ID NO: 2414008 - RNA, 19 nt, Artificial Sequence
  Description of Artificial Sequence: Synthetic oligonucleotide
  Sense strand starting at position 3412 of SEQ ID NO: 1886500
uggaaacagaguugugauu

SEQ ID NO: 2414009 - RNA, 19 nt, Artificial Sequence
  Description of Artificial Sequence: Synthetic oligonucleotide
  Antisense strand to SEQ ID NO: 2414008
aaucacaacucuguuucca

SEQ ID NO: 2414010 - RNA, 19 nt, Artificial Sequence
  Description of Artificial Sequence: Synthetic oligonucleotide
  Sense strand starting at position 3434 of SEQ ID NO: 1886500
uuacuugagcucuggaauc

SEQ ID NO: 2414011 - RNA, 19 nt, Artificial Sequence
  Description of Artificial Sequence: Synthetic oligonucleotide
  Antisense strand to SEQ ID NO: 2414010
gauuccagagcucaaguaa

SEQ ID NO: 2414012 - RNA, 19 nt, Artificial Sequence
  Description of Artificial Sequence: Synthetic oligonucleotide
  Sense strand starting at position 3436 of SEQ ID NO: 1886500
acuugagcucuggaaucca

SEQ ID NO: 2414013 - RNA, 19 nt, Artificial Sequence
  Description of Artificial Sequence: Synthetic oligonucleotide
  Antisense strand to SEQ ID NO: 2414012
uggauuccagagcucaagu

SEQ ID NO: 2414014 - RNA, 19 nt, Artificial Sequence
  Description of Artificial Sequence: Synthetic oligonucleotide
  Sense strand starting at position 3501 of SEQ ID NO: 1886500
guguuuguucgugugaaac

SEQ ID NO: 2414015 - RNA, 19 nt, Artificial Sequence
  Description of Artificial Sequence: Synthetic oligonucleotide
  Antisense strand to SEQ ID NO: 2414014
guuucacacgaacaaacac

SEQ ID NO: 2414016 - RNA, 19 nt, Artificial Sequence
  Description of Artificial Sequence: Synthetic oligonucleotide
  Sense strand starting at position 3511 of SEQ ID NO: 1886500
gugugaaaccucuauggua

SEQ ID NO: 2414017 - RNA, 19 nt, Artificial Sequence
  Description of Artificial Sequence: Synthetic oligonucleotide
  Antisense strand to SEQ ID NO: 2414016
uaccauagagguuucacac

SEQ ID NO: 2414018 - RNA, 19 nt, Artificial Sequence
  Description of Artificial Sequence: Synthetic oligonucleotide
  Sense strand starting at position 3513 of SEQ ID NO: 1886500
gugaaaccucuaugguaug

SEQ ID NO: 2414019 - RNA, 19 nt, Artificial Sequence
  Description of Artificial Sequence: Synthetic oligonucleotide
  Antisense strand to SEQ ID NO: 2414018
cauaccauagagguuucac

SEQ ID NO: 2414020 - RNA, 19 nt, Artificial Sequence
  Description of Artificial Sequence: Synthetic oligonucleotide
  Sense strand starting at position 2 of SEQ ID NO: 1886501
ugagaaauaugcucaauca

SEQ ID NO: 2414021 - RNA, 19 nt, Artificial Sequence
  Description of Artificial Sequence: Synthetic oligonucleotide
  Antisense strand to SEQ ID NO: 2414020
ugauugagcauauuucuca

SEQ ID NO: 2414022 - RNA, 19 nt, Artificial Sequence
  Description of Artificial Sequence: Synthetic oligonucleotide
  Sense strand starting at position 144 of SEQ ID NO: 1886501
ggagaagacgcauagcuga

SEQ ID NO: 2414023 - RNA, 19 nt, Artificial Sequence
  Description of Artificial Sequence: Synthetic oligonucleotide
  Antisense strand to SEQ ID NO: 2414022
ucagcuaugcgucuucucc

SEQ ID NO: 2414024 - RNA, 19 nt, Artificial Sequence
  Description of Artificial Sequence: Synthetic oligonucleotide
  Sense strand starting at position 149 of SEQ ID NO: 1886501
agacgcauagcugaucaaa

SEQ ID NO: 2414025 - RNA, 19 nt, Artificial Sequence
  Description of Artificial Sequence: Synthetic oligonucleotide
  Antisense strand to SEQ ID NO: 2414024
uuugaucagcuaugcgucu

SEQ ID NO: 2414026 - RNA, 19 nt, Artificial Sequence
  Description of Artificial Sequence: Synthetic oligonucleotide
  Sense strand starting at position 152 of SEQ ID NO: 1886501
cgcauagcugaucaaacau

SEQ ID NO: 2414027 - RNA, 19 nt, Artificial Sequence
  Description of Artificial Sequence: Synthetic oligonucleotide
  Antisense strand to SEQ ID NO: 2414026
auguuugaucagcuaugcg

SEQ ID NO: 2414028 - RNA, 19 nt, Artificial Sequence
  Description of Artificial Sequence: Synthetic oligonucleotide
  Sense strand starting at position 202 of SEQ ID NO: 1886501
cugagaaugcucgggagga

SEQ ID NO: 2414029 - RNA, 19 nt, Artificial Sequence
  Description of Artificial Sequence: Synthetic oligonucleotide
  Antisense strand to SEQ ID NO: 2414028
uccucccgagcauucucag

SEQ ID NO: 2414030 - RNA, 19 nt, Artificial Sequence
  Description of Artificial Sequence: Synthetic oligonucleotide
  Sense strand starting at position 379 of SEQ ID NO: 1886501
ugaaguauccaagggcuua

SEQ ID NO: 2414031 - RNA, 19 nt, Artificial Sequence
  Description of Artificial Sequence: Synthetic oligonucleotide
  Antisense strand to SEQ ID NO: 2414030
uaagcccuuggauacuuca

SEQ ID NO: 2414032 - RNA, 19 nt, Artificial Sequence
  Description of Artificial Sequence: Synthetic oligonucleotide
  Sense strand starting at position 564 of SEQ ID NO: 1886501
guaagaacucccugaggau

SEQ ID NO: 2414033 - RNA, 19 nt, Artificial Sequence
  Description of Artificial Sequence: Synthetic oligonucleotide
  Antisense strand to SEQ ID NO: 2414032
auccucagggaguucuuac

SEQ ID NO: 2414034 - RNA, 19 nt, Artificial Sequence
  Description of Artificial Sequence: Synthetic oligonucleotide
  Sense strand starting at position 601 of SEQ ID NO: 1886501
aagagauggucaccaugca

SEQ ID NO: 2414035 - RNA, 19 nt, Artificial Sequence
  Description of Artificial Sequence: Synthetic oligonucleotide
  Antisense strand to SEQ ID NO: 2414034
ugcauggugaccaucucuu

SEQ ID NO: 2414036 - RNA, 19 nt, Artificial Sequence
  Description of Artificial Sequence: Synthetic oligonucleotide
  Sense strand starting at position 684 of SEQ ID NO: 1886501
gauugauuacagcacuugu

SEQ ID NO: 2414037 - RNA, 19 nt, Artificial Sequence
  Description of Artificial Sequence: Synthetic oligonucleotide
  Antisense strand to SEQ ID NO: 2414036
acaagugcuguaaucaauc

SEQ ID NO: 2414038 - RNA, 19 nt, Artificial Sequence
  Description of Artificial Sequence: Synthetic oligonucleotide
  Sense strand starting at position 1214 of SEQ ID NO: 1886501
agacucuacuuucuggauu

SEQ ID NO: 2414039 - RNA, 19 nt, Artificial Sequence
  Description of Artificial Sequence: Synthetic oligonucleotide
  Antisense strand to SEQ ID NO: 2414038
aauccagaaaguagagucu

SEQ ID NO: 2414040 - RNA, 19 nt, Artificial Sequence
  Description of Artificial Sequence: Synthetic oligonucleotide
  Sense strand starting at position 1217 of SEQ ID NO: 1886501
cucuacuuucuggauuagu

SEQ ID NO: 2414041 - RNA, 19 nt, Artificial Sequence
  Description of Artificial Sequence: Synthetic oligonucleotide
  Antisense strand to SEQ ID NO: 2414040
acuaauccagaaaguagag

SEQ ID NO: 2414042 - RNA, 19 nt, Artificial Sequence
  Description of Artificial Sequence: Synthetic oligonucleotide
  Sense strand starting at position 1222 of SEQ ID NO: 1886501
cuuucuggauuagucacaa

SEQ ID NO: 2414043 - RNA, 19 nt, Artificial Sequence
  Description of Artificial Sequence: Synthetic oligonucleotide
  Antisense strand to SEQ ID NO: 2414042
uugugacuaauccagaaag

SEQ ID NO: 2414044 - RNA, 19 nt, Artificial Sequence
  Description of Artificial Sequence: Synthetic oligonucleotide
  Sense strand starting at position 1251 of SEQ ID NO: 1886501
uggaucauugaaugaguuu

SEQ ID NO: 2414045 - RNA, 19 nt, Artificial Sequence
  Description of Artificial Sequence: Synthetic oligonucleotide
  Antisense strand to SEQ ID NO: 2414044
aaacucauucaaugaucca

SEQ ID NO: 2414046 - RNA, 19 nt, Artificial Sequence
  Description of Artificial Sequence: Synthetic oligonucleotide
  Sense strand starting at position 1332 of SEQ ID NO: 1886501
gauacagagccaggguuau

SEQ ID NO: 2414047 - RNA, 19 nt, Artificial Sequence
  Description of Artificial Sequence: Synthetic oligonucleotide
  Antisense strand to SEQ ID NO: 2414046
auaacccuggcucuguauc

SEQ ID NO: 2414048 - RNA, 19 nt, Artificial Sequence
  Description of Artificial Sequence: Synthetic oligonucleotide
  Sense strand starting at position 1343 of SEQ ID NO: 1886501
aggguuauaccaugcugga

SEQ ID NO: 2414049 - RNA, 19 nt, Artificial Sequence
  Description of Artificial Sequence: Synthetic oligonucleotide
  Antisense strand to SEQ ID NO: 2414048
uccagcaugguauaacccu

SEQ ID NO: 2414050 - RNA, 19 nt, Artificial Sequence
  Description of Artificial Sequence: Synthetic oligonucleotide
  Sense strand starting at position 1373 of SEQ ID NO: 1886501
augggaauaguuuggcaga

SEQ ID NO: 2414051 - RNA, 19 nt, Artificial Sequence
  Description of Artificial Sequence: Synthetic oligonucleotide
  Antisense strand to SEQ ID NO: 2414050
ucugccaaacuauucccau

SEQ ID NO: 2414052 - RNA, 19 nt, Artificial Sequence
  Description of Artificial Sequence: Synthetic oligonucleotide
  Sense strand starting at position 1375 of SEQ ID NO: 1886501
gggaauaguuuggcagaau

SEQ ID NO: 2414053 - RNA, 19 nt, Artificial Sequence
  Description of Artificial Sequence: Synthetic oligonucleotide
  Antisense strand to SEQ ID NO: 2414052
auucugccaaacuauuccc

SEQ ID NO: 2414054 - RNA, 19 nt, Artificial Sequence
  Description of Artificial Sequence: Synthetic oligonucleotide
  Sense strand starting at position 1499 of SEQ ID NO: 1886501
gcagaaacucuacagcuua

SEQ ID NO: 2414055 - RNA, 19 nt, Artificial Sequence
  Description of Artificial Sequence: Synthetic oligonucleotide
  Antisense strand to SEQ ID NO: 2414054
uaagcuguagaguuucugc

SEQ ID NO: 2414056 - RNA, 19 nt, Artificial Sequence
  Description of Artificial Sequence: Synthetic oligonucleotide
  Sense strand starting at position 1529 of SEQ ID NO: 1886501
gggcuaaacuguccauaga

SEQ ID NO: 2414057 - RNA, 19 nt, Artificial Sequence
  Description of Artificial Sequence: Synthetic oligonucleotide
  Antisense strand to SEQ ID NO: 2414056
ucuauggacaguuuagccc

SEQ ID NO: 2414058 - RNA, 19 nt, Artificial Sequence
  Description of Artificial Sequence: Synthetic oligonucleotide
  Sense strand starting at position 1530 of SEQ ID NO: 1886501
ggcuaaacuguccauagac

SEQ ID NO: 2414059 - RNA, 19 nt, Artificial Sequence
  Description of Artificial Sequence: Synthetic oligonucleotide
  Antisense strand to SEQ ID NO: 2414058
gucuauggacaguuuagcc

SEQ ID NO: 2414060 - RNA, 19 nt, Artificial Sequence
  Description of Artificial Sequence: Synthetic oligonucleotide
  Sense strand starting at position 1739 of SEQ ID NO: 1886501
cuugccuuagagcaacaua

SEQ ID NO: 2414061 - RNA, 19 nt, Artificial Sequence
  Description of Artificial Sequence: Synthetic oligonucleotide
  Antisense strand to SEQ ID NO: 2414060
uauguugcucuaaggcaag

SEQ ID NO: 2414062 - RNA, 19 nt, Artificial Sequence
  Description of Artificial Sequence: Synthetic oligonucleotide
  Sense strand starting at position 2060 of SEQ ID NO: 1886501
ugaucaaggcuauacagua

SEQ ID NO: 2414063 - RNA, 19 nt, Artificial Sequence
  Description of Artificial Sequence: Synthetic oligonucleotide
  Antisense strand to SEQ ID NO: 2414062
uacuguauagccuugauca

SEQ ID NO: 2414064 - RNA, 19 nt, Artificial Sequence
  Description of Artificial Sequence: Synthetic oligonucleotide
  Sense strand starting at position 2103 of SEQ ID NO: 1886501
cucaaagaugggugcugau

SEQ ID NO: 2414065 - RNA, 19 nt, Artificial Sequence
  Description of Artificial Sequence: Synthetic oligonucleotide
  Antisense strand to SEQ ID NO: 2414064
aucagcacccaucuuugag

SEQ ID NO: 2414066 - RNA, 19 nt, Artificial Sequence
  Description of Artificial Sequence: Synthetic oligonucleotide
  Sense strand starting at position 2116 of SEQ ID NO: 1886501
gcugauucuauagaauggu

SEQ ID NO: 2414067 - RNA, 19 nt, Artificial Sequence
  Description of Artificial Sequence: Synthetic oligonucleotide
  Antisense strand to SEQ ID NO: 2414066
accauucuauagaaucagc

SEQ ID NO: 2414068 - RNA, 19 nt, Artificial Sequence
  Description of Artificial Sequence: Synthetic oligonucleotide
  Sense strand starting at position 2119 of SEQ ID NO: 1886501
gauucuauagaaugguuaa

SEQ ID NO: 2414069 - RNA, 19 nt, Artificial Sequence
  Description of Artificial Sequence: Synthetic oligonucleotide
  Antisense strand to SEQ ID NO: 2414068
uuaaccauucuauagaauc

SEQ ID NO: 2414070 - RNA, 19 nt, Artificial Sequence
  Description of Artificial Sequence: Synthetic oligonucleotide
  Sense strand starting at position 2151 of SEQ ID NO: 1886501
ggaauuaccuggccaagau

SEQ ID NO: 2414071 - RNA, 19 nt, Artificial Sequence
  Description of Artificial Sequence: Synthetic oligonucleotide
  Antisense strand to SEQ ID NO: 2414070
aucuuggccagguaauucc

SEQ ID NO: 2414072 - RNA, 19 nt, Artificial Sequence
  Description of Artificial Sequence: Synthetic oligonucleotide
  Sense strand starting at position 2199 of SEQ ID NO: 1886501
uugugacuuaugcaaguga

SEQ ID NO: 2414073 - RNA, 19 nt, Artificial Sequence
  Description of Artificial Sequence: Synthetic oligonucleotide
  Antisense strand to SEQ ID NO: 2414072
ucacuugcauaagucacaa

SEQ ID NO: 2414074 - RNA, 19 nt, Artificial Sequence
  Description of Artificial Sequence: Synthetic oligonucleotide
  Sense strand starting at position 2297 of SEQ ID NO: 1886501
gaguuaauucgugauaccu

SEQ ID NO: 2414075 - RNA, 19 nt, Artificial Sequence
  Description of Artificial Sequence: Synthetic oligonucleotide
  Antisense strand to SEQ ID NO: 2414074
agguaucacgaauuaacuc

SEQ ID NO: 2414076 - RNA, 19 nt, Artificial Sequence
  Description of Artificial Sequence: Synthetic oligonucleotide
  Sense strand starting at position 2326 of SEQ ID NO: 1886501
agguacugagcacauguua

SEQ ID NO: 2414077 - RNA, 19 nt, Artificial Sequence
  Description of Artificial Sequence: Synthetic oligonucleotide
  Antisense strand to SEQ ID NO: 2414076
uaacaugugcucaguaccu

SEQ ID NO: 2414078 - RNA, 19 nt, Artificial Sequence
  Description of Artificial Sequence: Synthetic oligonucleotide
  Sense strand starting at position 2393 of SEQ ID NO: 1886501
cuaaacuucuggcuugaac

SEQ ID NO: 2414079 - RNA, 19 nt, Artificial Sequence
  Description of Artificial Sequence: Synthetic oligonucleotide
  Antisense strand to SEQ ID NO: 2414078
guucaagccagaaguuuag

SEQ ID NO: 2414080 - RNA, 19 nt, Artificial Sequence
  Description of Artificial Sequence: Synthetic oligonucleotide
  Sense strand starting at position 2417 of SEQ ID NO: 1886501
cugaguugggaugguauau

SEQ ID NO: 2414081 - RNA, 19 nt, Artificial Sequence
  Description of Artificial Sequence: Synthetic oligonucleotide
  Antisense strand to SEQ ID NO: 2414080
auauaccaucccaacucag

SEQ ID NO: 2414082 - RNA, 19 nt, Artificial Sequence
  Description of Artificial Sequence: Synthetic oligonucleotide
  Sense strand starting at position 2463 of SEQ ID NO: 1886501
ucuugagagcagggaauau

SEQ ID NO: 2414083 - RNA, 19 nt, Artificial Sequence
  Description of Artificial Sequence: Synthetic oligonucleotide
  Antisense strand to SEQ ID NO: 2414082
auauucccugcucucaaga

SEQ ID NO: 2414084 - RNA, 19 nt, Artificial Sequence
  Description of Artificial Sequence: Synthetic oligonucleotide
  Sense strand starting at position 2543 of SEQ ID NO: 1886501
augcuuacugguuaauuga

SEQ ID NO: 2414085 - RNA, 19 nt, Artificial Sequence
  Description of Artificial Sequence: Synthetic oligonucleotide
  Antisense strand to SEQ ID NO: 2414084
ucaauuaaccaguaagcau

SEQ ID NO: 2414086 - RNA, 19 nt, Artificial Sequence
  Description of Artificial Sequence: Synthetic oligonucleotide
  Sense strand starting at position 2551 of SEQ ID NO: 1886501
ugguuaauugaagguggaa

SEQ ID NO: 2414087 - RNA, 19 nt, Artificial Sequence
  Description of Artificial Sequence: Synthetic oligonucleotide
  Antisense strand to SEQ ID NO: 2414086
uuccaccuucaauuaacca

SEQ ID NO: 2414088 - RNA, 19 nt, Artificial Sequence
  Description of Artificial Sequence: Synthetic oligonucleotide
  Sense strand starting at position 2553 of SEQ ID NO: 1886501
guuaauugaagguggaauu

SEQ ID NO: 2414089 - RNA, 19 nt, Artificial Sequence
  Description of Artificial Sequence: Synthetic oligonucleotide
  Antisense strand to SEQ ID NO: 2414088
aauuccaccuucaauuaac

SEQ ID NO: 2414090 - RNA, 19 nt, Artificial Sequence
  Description of Artificial Sequence: Synthetic oligonucleotide
  Sense strand starting at position 3078 of SEQ ID NO: 1886501
ggcagaaugagcuaaugug

SEQ ID NO: 2414091 - RNA, 19 nt, Artificial Sequence
  Description of Artificial Sequence: Synthetic oligonucleotide
  Antisense strand to SEQ ID NO: 2414090
cacauuagcucauucugcc

SEQ ID NO: 2414092 - RNA, 19 nt, Artificial Sequence
  Description of Artificial Sequence: Synthetic oligonucleotide
  Sense strand starting at position 3226 of SEQ ID NO: 1886501
aagauucuguggguugauu

SEQ ID NO: 2414093 - RNA, 19 nt, Artificial Sequence
  Description of Artificial Sequence: Synthetic oligonucleotide
  Antisense strand to SEQ ID NO: 2414092
aaucaacccacagaaucuu

SEQ ID NO: 2414094 - RNA, 19 nt, Artificial Sequence
  Description of Artificial Sequence: Synthetic oligonucleotide
  Sense strand starting at position 3580 of SEQ ID NO: 1886501
aagaauuaguggucaucuu

SEQ ID NO: 2414095 - RNA, 19 nt, Artificial Sequence
  Description of Artificial Sequence: Synthetic oligonucleotide
  Antisense strand to SEQ ID NO: 2414094
aagaugaccacuaauucuu

SEQ ID NO: 2414096 - RNA, 19 nt, Artificial Sequence
  Description of Artificial Sequence: Synthetic oligonucleotide
  Sense strand starting at position 3581 of SEQ ID NO: 1886501
agaauuaguggucaucuuu

SEQ ID NO: 2414097 - RNA, 19 nt, Artificial Sequence
  Description of Artificial Sequence: Synthetic oligonucleotide
  Antisense strand to SEQ ID NO: 2414096
aaagaugaccacuaauucu

SEQ ID NO: 2414098 - RNA, 19 nt, Artificial Sequence
  Description of Artificial Sequence: Synthetic oligonucleotide
  Sense strand starting at position 3772 of SEQ ID NO: 1886501
aggccugaaggaugguauu

SEQ ID NO: 2414099 - RNA, 19 nt, Artificial Sequence
  Description of Artificial Sequence: Synthetic oligonucleotide
  Antisense strand to SEQ ID NO: 2414098
aauaccauccuucaggccu

SEQ ID NO: 2414100 - RNA, 19 nt, Artificial Sequence
  Description of Artificial Sequence: Synthetic oligonucleotide
  Sense strand starting at position 134 of SEQ ID NO: 1886502
cguugauuccuggaucugu

SEQ ID NO: 2414101 - RNA, 19 nt, Artificial Sequence
  Description of Artificial Sequence: Synthetic oligonucleotide
  Antisense strand to SEQ ID NO: 2414100
acagauccaggaaucaacg

SEQ ID NO: 2414102 - RNA, 19 nt, Artificial Sequence
  Description of Artificial Sequence: Synthetic oligonucleotide
  Sense strand starting at position 573 of SEQ ID NO: 1886502
guccuauuuccaggugagu

SEQ ID NO: 2414103 - RNA, 19 nt, Artificial Sequence
  Description of Artificial Sequence: Synthetic oligonucleotide
  Antisense strand to SEQ ID NO: 2414102
acucaccuggaaauaggac

SEQ ID NO: 2414104 - RNA, 19 nt, Artificial Sequence
  Description of Artificial Sequence: Synthetic oligonucleotide
  Sense strand starting at position 586 of SEQ ID NO: 1886502
gugaguuggcccagugagu

SEQ ID NO: 2414105 - RNA, 19 nt, Artificial Sequence
  Description of Artificial Sequence: Synthetic oligonucleotide
  Antisense strand to SEQ ID NO: 2414104
acucacugggccaacucac

SEQ ID NO: 2414106 - RNA, 19 nt, Artificial Sequence
  Description of Artificial Sequence: Synthetic oligonucleotide
  Sense strand starting at position 678 of SEQ ID NO: 1886502
gcgaacagcguuaaucgau

SEQ ID NO: 2414107 - RNA, 19 nt, Artificial Sequence
  Description of Artificial Sequence: Synthetic oligonucleotide
  Antisense strand to SEQ ID NO: 2414106
aucgauuaacgcuguucgc

SEQ ID NO: 2414108 - RNA, 19 nt, Artificial Sequence
  Description of Artificial Sequence: Synthetic oligonucleotide
  Sense strand starting at position 794 of SEQ ID NO: 1886502
ggaguaagaugggacaaau

SEQ ID NO: 2414109 - RNA, 19 nt, Artificial Sequence
  Description of Artificial Sequence: Synthetic oligonucleotide
  Antisense strand to SEQ ID NO: 2414108
auuugucccaucuuacucc

SEQ ID NO: 2414110 - RNA, 19 nt, Artificial Sequence
  Description of Artificial Sequence: Synthetic oligonucleotide
  Sense strand starting at position 850 of SEQ ID NO: 1886502
uugauugcgguugaacuau

SEQ ID NO: 2414111 - RNA, 19 nt, Artificial Sequence
  Description of Artificial Sequence: Synthetic oligonucleotide
  Antisense strand to SEQ ID NO: 2414110
auaguucaaccgcaaucaa

SEQ ID NO: 2414112 - RNA, 19 nt, Artificial Sequence
  Description of Artificial Sequence: Synthetic oligonucleotide
  Sense strand starting at position 940 of SEQ ID NO: 1886502
aguaccuaagcaugugaua

SEQ ID NO: 2414113 - RNA, 19 nt, Artificial Sequence
  Description of Artificial Sequence: Synthetic oligonucleotide
  Antisense strand to SEQ ID NO: 2414112
uaucacaugcuuagguacu

SEQ ID NO: 2414114 - RNA, 19 nt, Artificial Sequence
  Description of Artificial Sequence: Synthetic oligonucleotide
  Sense strand starting at position 975 of SEQ ID NO: 1886502
cuuuaugagcuuuaaagua

SEQ ID NO: 2414115 - RNA, 19 nt, Artificial Sequence
  Description of Artificial Sequence: Synthetic oligonucleotide
  Antisense strand to SEQ ID NO: 2414114
uacuuuaaagcucauaaag

SEQ ID NO: 2414116 - RNA, 19 nt, Artificial Sequence
  Description of Artificial Sequence: Synthetic oligonucleotide
  Sense strand starting at position 1150 of SEQ ID NO: 1886502
gcaagcauccuugaccuuu

SEQ ID NO: 2414117 - RNA, 19 nt, Artificial Sequence
  Description of Artificial Sequence: Synthetic oligonucleotide
  Antisense strand to SEQ ID NO: 2414116
aaaggucaaggaugcuugc

SEQ ID NO: 2414118 - RNA, 19 nt, Artificial Sequence
  Description of Artificial Sequence: Synthetic oligonucleotide
  Sense strand starting at position 1259 of SEQ ID NO: 1886502
ugucguguagucuuucauu

SEQ ID NO: 2414119 - RNA, 19 nt, Artificial Sequence
  Description of Artificial Sequence: Synthetic oligonucleotide
  Antisense strand to SEQ ID NO: 2414118
aaugaaagacuacacgaca

SEQ ID NO: 2414120 - RNA, 19 nt, Artificial Sequence
  Description of Artificial Sequence: Synthetic oligonucleotide
  Sense strand starting at position 1360 of SEQ ID NO: 1886502
cccaguauucuugaagcuu

SEQ ID NO: 2414121 - RNA, 19 nt, Artificial Sequence
  Description of Artificial Sequence: Synthetic oligonucleotide
  Antisense strand to SEQ ID NO: 2414120
aagcuucaagaauacuggg

SEQ ID NO: 2414122 - RNA, 19 nt, Artificial Sequence
  Description of Artificial Sequence: Synthetic oligonucleotide
  Sense strand starting at position 1371 of SEQ ID NO: 1886502
ugaagcuuauagccaaauu

SEQ ID NO: 2414123 - RNA, 19 nt, Artificial Sequence
  Description of Artificial Sequence: Synthetic oligonucleotide
  Antisense strand to SEQ ID NO: 2414122
aauuuggcuauaagcuuca

SEQ ID NO: 2414124 - RNA, 19 nt, Artificial Sequence
  Description of Artificial Sequence: Synthetic oligonucleotide
  Sense strand starting at position 1552 of SEQ ID NO: 1886502
gcauucuuggcacaaggaa

SEQ ID NO: 2414125 - RNA, 19 nt, Artificial Sequence
  Description of Artificial Sequence: Synthetic oligonucleotide
  Antisense strand to SEQ ID NO: 2414124
uuccuugugccaagaaugc

SEQ ID NO: 2414126 - RNA, 19 nt, Artificial Sequence
  Description of Artificial Sequence: Synthetic oligonucleotide
  Sense strand starting at position 1611 of SEQ ID NO: 1886502
acggcagcuccagaugaaa

SEQ ID NO: 2414127 - RNA, 19 nt, Artificial Sequence
  Description of Artificial Sequence: Synthetic oligonucleotide
  Antisense strand to SEQ ID NO: 2414126
uuucaucuggagcugccgu

SEQ ID NO: 2414128 - RNA, 19 nt, Artificial Sequence
  Description of Artificial Sequence: Synthetic oligonucleotide
  Sense strand starting at position 1613 of SEQ ID NO: 1886502
ggcagcuccagaugaaauu

SEQ ID NO: 2414129 - RNA, 19 nt, Artificial Sequence
  Description of Artificial Sequence: Synthetic oligonucleotide
  Antisense strand to SEQ ID NO: 2414128
aauuucaucuggagcugcc

SEQ ID NO: 2414130 - RNA, 19 nt, Artificial Sequence
  Description of Artificial Sequence: Synthetic oligonucleotide
  Sense strand starting at position 1614 of SEQ ID NO: 1886502
gcagcuccagaugaaauua

SEQ ID NO: 2414131 - RNA, 19 nt, Artificial Sequence
  Description of Artificial Sequence: Synthetic oligonucleotide
  Antisense strand to SEQ ID NO: 2414130
uaauuucaucuggagcugc

SEQ ID NO: 2414132 - RNA, 19 nt, Artificial Sequence
  Description of Artificial Sequence: Synthetic oligonucleotide
  Sense strand starting at position 1802 of SEQ ID NO: 1886502
gugggaaacuccucugguu

SEQ ID NO: 2414133 - RNA, 19 nt, Artificial Sequence
  Description of Artificial Sequence: Synthetic oligonucleotide
  Antisense strand to SEQ ID NO: 2414132
aaccagaggaguuucccac

SEQ ID NO: 2414134 - RNA, 19 nt, Artificial Sequence
  Description of Artificial Sequence: Synthetic oligonucleotide
  Sense strand starting at position 1953 of SEQ ID NO: 1886502
gugguaugucaguggagga

SEQ ID NO: 2414135 - RNA, 19 nt, Artificial Sequence
  Description of Artificial Sequence: Synthetic oligonucleotide
  Antisense strand to SEQ ID NO: 2414134
uccuccacugacauaccac

SEQ ID NO: 2414136 - RNA, 19 nt, Artificial Sequence
  Description of Artificial Sequence: Synthetic oligonucleotide
  Sense strand starting at position 2041 of SEQ ID NO: 1886502
ccguuuguuaugucacagu

SEQ ID NO: 2414137 - RNA, 19 nt, Artificial Sequence
  Description of Artificial Sequence: Synthetic oligonucleotide
  Antisense strand to SEQ ID NO: 2414136
acugugacauaacaaacgg

SEQ ID NO: 2414138 - RNA, 19 nt, Artificial Sequence
  Description of Artificial Sequence: Synthetic oligonucleotide
  Sense strand starting at position 2118 of SEQ ID NO: 1886502
ucacaaggauaagaucaau

SEQ ID NO: 2414139 - RNA, 19 nt, Artificial Sequence
  Description of Artificial Sequence: Synthetic oligonucleotide
  Antisense strand to SEQ ID NO: 2414138
auugaucuuauccuuguga

SEQ ID NO: 2414140 - RNA, 19 nt, Artificial Sequence
  Description of Artificial Sequence: Synthetic oligonucleotide
  Sense strand starting at position 2130 of SEQ ID NO: 1886502
gaucaaucuguuggcagga

SEQ ID NO: 2414141 - RNA, 19 nt, Artificial Sequence
  Description of Artificial Sequence: Synthetic oligonucleotide
  Antisense strand to SEQ ID NO: 2414140
uccugccaacagauugauc

SEQ ID NO: 2414142 - RNA, 19 nt, Artificial Sequence
  Description of Artificial Sequence: Synthetic oligonucleotide
  Sense strand starting at position 2164 of SEQ ID NO: 1886502
aauuaaguuguuggcugaa

SEQ ID NO: 2414143 - RNA, 19 nt, Artificial Sequence
  Description of Artificial Sequence: Synthetic oligonucleotide
  Antisense strand to SEQ ID NO: 2414142
uucagccaacaacuuaauu

SEQ ID NO: 2414144 - RNA, 19 nt, Artificial Sequence
  Description of Artificial Sequence: Synthetic oligonucleotide
  Sense strand starting at position 2614 of SEQ ID NO: 1886502
ugaguuacuuuaccuggaa

SEQ ID NO: 2414145 - RNA, 19 nt, Artificial Sequence
  Description of Artificial Sequence: Synthetic oligonucleotide
  Antisense strand to SEQ ID NO: 2414144
uuccagguaaaguaacuca

SEQ ID NO: 2414146 - RNA, 19 nt, Artificial Sequence
  Description of Artificial Sequence: Synthetic oligonucleotide
  Sense strand starting at position 2615 of SEQ ID NO: 1886502
gaguuacuuuaccuggaau

SEQ ID NO: 2414147 - RNA, 19 nt, Artificial Sequence
  Description of Artificial Sequence: Synthetic oligonucleotide
  Antisense strand to SEQ ID NO: 2414146
auuccagguaaaguaacuc

SEQ ID NO: 2414148 - RNA, 19 nt, Artificial Sequence
  Description of Artificial Sequence: Synthetic oligonucleotide
  Sense strand starting at position 2617 of SEQ ID NO: 1886502
guuacuuuaccuggaauaa

SEQ ID NO: 2414149 - RNA, 19 nt, Artificial Sequence
  Description of Artificial Sequence: Synthetic oligonucleotide
  Antisense strand to SEQ ID NO: 2414148
uuauuccagguaaaguaac

SEQ ID NO: 2414150 - RNA, 19 nt, Artificial Sequence
  Description of Artificial Sequence: Synthetic oligonucleotide
  Sense strand starting at position 2880 of SEQ ID NO: 1886502
aaugguagauuccuuaaag

SEQ ID NO: 2414151 - RNA, 19 nt, Artificial Sequence
  Description of Artificial Sequence: Synthetic oligonucleotide
  Antisense strand to SEQ ID NO: 2414150
cuuuaaggaaucuaccauu

SEQ ID NO: 2414152 - RNA, 19 nt, Artificial Sequence
  Description of Artificial Sequence: Synthetic oligonucleotide
  Sense strand starting at position 2881 of SEQ ID NO: 1886502
augguagauuccuuaaaga

SEQ ID NO: 2414153 - RNA, 19 nt, Artificial Sequence
  Description of Artificial Sequence: Synthetic oligonucleotide
  Antisense strand to SEQ ID NO: 2414152
ucuuuaaggaaucuaccau

SEQ ID NO: 2414154 - RNA, 19 nt, Artificial Sequence
  Description of Artificial Sequence: Synthetic oligonucleotide
  Sense strand starting at position 2906 of SEQ ID NO: 1886502
aguagaacucucugacuuc

SEQ ID NO: 2414155 - RNA, 19 nt, Artificial Sequence
  Description of Artificial Sequence: Synthetic oligonucleotide
  Antisense strand to SEQ ID NO: 2414154
gaagucagagaguucuacu

SEQ ID NO: 2414156 - RNA, 19 nt, Artificial Sequence
  Description of Artificial Sequence: Synthetic oligonucleotide
  Sense strand starting at position 2951 of SEQ ID NO: 1886502
cagagaaaguucucugccu

SEQ ID NO: 2414157 - RNA, 19 nt, Artificial Sequence
  Description of Artificial Sequence: Synthetic oligonucleotide
  Antisense strand to SEQ ID NO: 2414156
aggcagagaacuuucucug

SEQ ID NO: 2414158 - RNA, 19 nt, Artificial Sequence
  Description of Artificial Sequence: Synthetic oligonucleotide
  Sense strand starting at position 2952 of SEQ ID NO: 1886502
agagaaaguucucugccuu

SEQ ID NO: 2414159 - RNA, 19 nt, Artificial Sequence
  Description of Artificial Sequence: Synthetic oligonucleotide
  Antisense strand to SEQ ID NO: 2414158
aaggcagagaacuuucucu

SEQ ID NO: 2414160 - RNA, 19 nt, Artificial Sequence
  Description of Artificial Sequence: Synthetic oligonucleotide
  Sense strand starting at position 2986 of SEQ ID NO: 1886502
uuauguugggcccaccaaa

SEQ ID NO: 2414161 - RNA, 19 nt, Artificial Sequence
  Description of Artificial Sequence: Synthetic oligonucleotide
  Antisense strand to SEQ ID NO: 2414160
uuuggugggcccaacauaa

SEQ ID NO: 2414162 - RNA, 19 nt, Artificial Sequence
  Description of Artificial Sequence: Synthetic oligonucleotide
  Sense strand starting at position 3101 of SEQ ID NO: 1886502
gcuaguagagucuacaugu

SEQ ID NO: 2414163 - RNA, 19 nt, Artificial Sequence
  Description of Artificial Sequence: Synthetic oligonucleotide
  Antisense strand to SEQ ID NO: 2414162
acauguagacucuacuagc

SEQ ID NO: 2414164 - RNA, 19 nt, Artificial Sequence
  Description of Artificial Sequence: Synthetic oligonucleotide
  Sense strand starting at position 3108 of SEQ ID NO: 1886502
gagucuacauguguuugga

SEQ ID NO: 2414165 - RNA, 19 nt, Artificial Sequence
  Description of Artificial Sequence: Synthetic oligonucleotide
  Antisense strand to SEQ ID NO: 2414164
uccaaacacauguagacuc

SEQ ID NO: 2414166 - RNA, 19 nt, Artificial Sequence
  Description of Artificial Sequence: Synthetic oligonucleotide
  Sense strand starting at position 3197 of SEQ ID NO: 1886502
cuguaauugugagcaaauc

SEQ ID NO: 2414167 - RNA, 19 nt, Artificial Sequence
  Description of Artificial Sequence: Synthetic oligonucleotide
  Antisense strand to SEQ ID NO: 2414166
gauuugcucacaauuacag

SEQ ID NO: 2414168 - RNA, 19 nt, Artificial Sequence
  Description of Artificial Sequence: Synthetic oligonucleotide
  Sense strand starting at position 3206 of SEQ ID NO: 1886502
ugagcaaaucccugaguuc

SEQ ID NO: 2414169 - RNA, 19 nt, Artificial Sequence
  Description of Artificial Sequence: Synthetic oligonucleotide
  Antisense strand to SEQ ID NO: 2414168
gaacucagggauuugcuca

SEQ ID NO: 2414170 - RNA, 19 nt, Artificial Sequence
  Description of Artificial Sequence: Synthetic oligonucleotide
  Sense strand starting at position 3207 of SEQ ID NO: 1886502
gagcaaaucccugaguucu

SEQ ID NO: 2414171 - RNA, 19 nt, Artificial Sequence
  Description of Artificial Sequence: Synthetic oligonucleotide
  Antisense strand to SEQ ID NO: 2414170
agaacucagggauuugcuc

SEQ ID NO: 2414172 - RNA, 19 nt, Artificial Sequence
  Description of Artificial Sequence: Synthetic oligonucleotide
  Sense strand starting at position 3209 of SEQ ID NO: 1886502
gcaaaucccugaguucuaa

SEQ ID NO: 2414173 - RNA, 19 nt, Artificial Sequence
  Description of Artificial Sequence: Synthetic oligonucleotide
  Antisense strand to SEQ ID NO: 2414172
uuagaacucagggauuugc

SEQ ID NO: 2414174 - RNA, 19 nt, Artificial Sequence
  Description of Artificial Sequence: Synthetic oligonucleotide
  Sense strand starting at position 3228 of SEQ ID NO: 1886502
uuccuaucucugcagagga

SEQ ID NO: 2414175 - RNA, 19 nt, Artificial Sequence
  Description of Artificial Sequence: Synthetic oligonucleotide
  Antisense strand to SEQ ID NO: 2414174
uccucugcagagauaggaa

SEQ ID NO: 2414176 - RNA, 19 nt, Artificial Sequence
  Description of Artificial Sequence: Synthetic oligonucleotide
  Sense strand starting at position 3524 of SEQ ID NO: 1886502
uggccaggaugaucaagau

SEQ ID NO: 2414177 - RNA, 19 nt, Artificial Sequence
  Description of Artificial Sequence: Synthetic oligonucleotide
  Antisense strand to SEQ ID NO: 2414176
aucuugaucauccuggcca

SEQ ID NO: 2414178 - RNA, 19 nt, Artificial Sequence
  Description of Artificial Sequence: Synthetic oligonucleotide
  Sense strand starting at position 3533 of SEQ ID NO: 1886502
ugaucaagauggucucaau

SEQ ID NO: 2414179 - RNA, 19 nt, Artificial Sequence
  Description of Artificial Sequence: Synthetic oligonucleotide
  Antisense strand to SEQ ID NO: 2414178
auugagaccaucuugauca

SEQ ID NO: 2414180 - RNA, 19 nt, Artificial Sequence
  Description of Artificial Sequence: Synthetic oligonucleotide
  Sense strand starting at position 116 of SEQ ID NO: 1886503
gcaaauaaccuagguaaac

SEQ ID NO: 2414181 - RNA, 19 nt, Artificial Sequence
  Description of Artificial Sequence: Synthetic oligonucleotide
  Antisense strand to SEQ ID NO: 2414180
guuuaccuagguuauuugc

SEQ ID NO: 2414182 - RNA, 19 nt, Artificial Sequence
  Description of Artificial Sequence: Synthetic oligonucleotide
  Sense strand starting at position 216 of SEQ ID NO: 1886503
gauacuaaguuucugggua

SEQ ID NO: 2414183 - RNA, 19 nt, Artificial Sequence
  Description of Artificial Sequence: Synthetic oligonucleotide
  Antisense strand to SEQ ID NO: 2414182
uacccagaaacuuaguauc

SEQ ID NO: 2414184 - RNA, 19 nt, Artificial Sequence
  Description of Artificial Sequence: Synthetic oligonucleotide
  Sense strand starting at position 438 of SEQ ID NO: 1886503
guuaucaaauuacugggaa

SEQ ID NO: 2414185 - RNA, 19 nt, Artificial Sequence
  Description of Artificial Sequence: Synthetic oligonucleotide
  Antisense strand to SEQ ID NO: 2414184
uucccaguaauuugauaac

SEQ ID NO: 2414186 - RNA, 19 nt, Artificial Sequence
  Description of Artificial Sequence: Synthetic oligonucleotide
  Sense strand starting at position 532 of SEQ ID NO: 1886503
agagccauuuauuaaguaa

SEQ ID NO: 2414187 - RNA, 19 nt, Artificial Sequence
  Description of Artificial Sequence: Synthetic oligonucleotide
  Antisense strand to SEQ ID NO: 2414186
uuacuuaauaaauggcucu

SEQ ID NO: 2414188 - RNA, 19 nt, Artificial Sequence
  Description of Artificial Sequence: Synthetic oligonucleotide
  Sense strand starting at position 554 of SEQ ID NO: 1886503
ucaucucuguuaccuuaga

SEQ ID NO: 2414189 - RNA, 19 nt, Artificial Sequence
  Description of Artificial Sequence: Synthetic oligonucleotide
  Antisense strand to SEQ ID NO: 2414188
ucuaagguaacagagauga

SEQ ID NO: 2414190 - RNA, 19 nt, Artificial Sequence
  Description of Artificial Sequence: Synthetic oligonucleotide
  Sense strand starting at position 876 of SEQ ID NO: 1886503
ggcagauuaauagguguua

SEQ ID NO: 2414191 - RNA, 19 nt, Artificial Sequence
  Description of Artificial Sequence: Synthetic oligonucleotide
  Antisense strand to SEQ ID NO: 2414190
uaacaccuauuaaucugcc

SEQ ID NO: 2414192 - RNA, 19 nt, Artificial Sequence
  Description of Artificial Sequence: Synthetic oligonucleotide
  Sense strand starting at position 877 of SEQ ID NO: 1886503
gcagauuaauagguguuaa

SEQ ID NO: 2414193 - RNA, 19 nt, Artificial Sequence
  Description of Artificial Sequence: Synthetic oligonucleotide
  Antisense strand to SEQ ID NO: 2414192
uuaacaccuauuaaucugc

SEQ ID NO: 2414194 - RNA, 19 nt, Artificial Sequence
  Description of Artificial Sequence: Synthetic oligonucleotide
  Sense strand starting at position 924 of SEQ ID NO: 1886503
ggaaguauggccuaaaggu

SEQ ID NO: 2414195 - RNA, 19 nt, Artificial Sequence
  Description of Artificial Sequence: Synthetic oligonucleotide
  Antisense strand to SEQ ID NO: 2414194
accuuuaggccauacuucc

SEQ ID NO: 2414196 - RNA, 19 nt, Artificial Sequence
  Description of Artificial Sequence: Synthetic oligonucleotide
  Sense strand starting at position 974 of SEQ ID NO: 1886503
auaaaugcgcuguaacuca

SEQ ID NO: 2414197 - RNA, 19 nt, Artificial Sequence
  Description of Artificial Sequence: Synthetic oligonucleotide
  Antisense strand to SEQ ID NO: 2414196
ugaguuacagcgcauuuau

SEQ ID NO: 2414198 - RNA, 19 nt, Artificial Sequence
  Description of Artificial Sequence: Synthetic oligonucleotide
  Sense strand starting at position 996 of SEQ ID NO: 1886503
uguacuaaucaucaagugu

SEQ ID NO: 2414199 - RNA, 19 nt, Artificial Sequence
  Description of Artificial Sequence: Synthetic oligonucleotide
  Antisense strand to SEQ ID NO: 2414198
acacuugaugauuaguaca

SEQ ID NO: 2414200 - RNA, 19 nt, Artificial Sequence
  Description of Artificial Sequence: Synthetic oligonucleotide
  Sense strand starting at position 1176 of SEQ ID NO: 1886503
gguauaggcugcuugauuu

SEQ ID NO: 2414201 - RNA, 19 nt, Artificial Sequence
  Description of Artificial Sequence: Synthetic oligonucleotide
  Antisense strand to SEQ ID NO: 2414200
aaaucaagcagccuauacc

SEQ ID NO: 2414202 - RNA, 19 nt, Artificial Sequence
  Description of Artificial Sequence: Synthetic oligonucleotide
  Sense strand starting at position 1182 of SEQ ID NO: 1886503
ggcugcuugauuugcaaau

SEQ ID NO: 2414203 - RNA, 19 nt, Artificial Sequence
  Description of Artificial Sequence: Synthetic oligonucleotide
  Antisense strand to SEQ ID NO: 2414202
auuugcaaaucaagcagcc

SEQ ID NO: 2414204 - RNA, 19 nt, Artificial Sequence
  Description of Artificial Sequence: Synthetic oligonucleotide
  Sense strand starting at position 1183 of SEQ ID NO: 1886503
gcugcuugauuugcaaauu

SEQ ID NO: 2414205 - RNA, 19 nt, Artificial Sequence
  Description of Artificial Sequence: Synthetic oligonucleotide
  Antisense strand to SEQ ID NO: 2414204
aauuugcaaaucaagcagc

SEQ ID NO: 2414206 - RNA, 19 nt, Artificial Sequence
  Description of Artificial Sequence: Synthetic oligonucleotide
  Sense strand starting at position 1492 of SEQ ID NO: 1886503
caaccuauuggagguauua

SEQ ID NO: 2414207 - RNA, 19 nt, Artificial Sequence
  Description of Artificial Sequence: Synthetic oligonucleotide
  Antisense strand to SEQ ID NO: 2414206
uaauaccuccaauagguug

SEQ ID NO: 2414208 - RNA, 19 nt, Artificial Sequence
  Description of Artificial Sequence: Synthetic oligonucleotide
  Sense strand starting at position 1577 of SEQ ID NO: 1886503
gguugaagguaaucuuuga

SEQ ID NO: 2414209 - RNA, 19 nt, Artificial Sequence
  Description of Artificial Sequence: Synthetic oligonucleotide
  Antisense strand to SEQ ID NO: 2414208
ucaaagauuaccuucaacc

SEQ ID NO: 2414210 - RNA, 19 nt, Artificial Sequence
  Description of Artificial Sequence: Synthetic oligonucleotide
  Sense strand starting at position 1581 of SEQ ID NO: 1886503
gaagguaaucuuugaguaa

SEQ ID NO: 2414211 - RNA, 19 nt, Artificial Sequence
  Description of Artificial Sequence: Synthetic oligonucleotide
  Antisense strand to SEQ ID NO: 2414210
uuacucaaagauuaccuuc

SEQ ID NO: 2414212 - RNA, 19 nt, Artificial Sequence
  Description of Artificial Sequence: Synthetic oligonucleotide
  Sense strand starting at position 1584 of SEQ ID NO: 1886503
gguaaucuuugaguaauau

SEQ ID NO: 2414213 - RNA, 19 nt, Artificial Sequence
  Description of Artificial Sequence: Synthetic oligonucleotide
  Antisense strand to SEQ ID NO: 2414212
auauuacucaaagauuacc

SEQ ID NO: 2414214 - RNA, 19 nt, Artificial Sequence
  Description of Artificial Sequence: Synthetic oligonucleotide
  Sense strand starting at position 1593 of SEQ ID NO: 1886503
ugaguaauauagcucaaua

SEQ ID NO: 2414215 - RNA, 19 nt, Artificial Sequence
  Description of Artificial Sequence: Synthetic oligonucleotide
  Antisense strand to SEQ ID NO: 2414214
uauugagcuauauuacuca

SEQ ID NO: 2414216 - RNA, 19 nt, Artificial Sequence
  Description of Artificial Sequence: Synthetic oligonucleotide
  Sense strand starting at position 1788 of SEQ ID NO: 1886503
uugugcuaaccugaaacuu

SEQ ID NO: 2414217 - RNA, 19 nt, Artificial Sequence
  Description of Artificial Sequence: Synthetic oligonucleotide
  Antisense strand to SEQ ID NO: 2414216
aaguuucagguuagcacaa

SEQ ID NO: 2414218 - RNA, 19 nt, Artificial Sequence
  Description of Artificial Sequence: Synthetic oligonucleotide
  Sense strand starting at position 2039 of SEQ ID NO: 1886503
gcucacaguuaucuuauga

SEQ ID NO: 2414219 - RNA, 19 nt, Artificial Sequence
  Description of Artificial Sequence: Synthetic oligonucleotide
  Antisense strand to SEQ ID NO: 2414218
ucauaagauaacugugagc

SEQ ID NO: 2414220 - RNA, 19 nt, Artificial Sequence
  Description of Artificial Sequence: Synthetic oligonucleotide
  Sense strand starting at position 2090 of SEQ ID NO: 1886503
cggugucagcauuaaauac

SEQ ID NO: 2414221 - RNA, 19 nt, Artificial Sequence
  Description of Artificial Sequence: Synthetic oligonucleotide
  Antisense strand to SEQ ID NO: 2414220
guauuuaaugcugacaccg

SEQ ID NO: 2414222 - RNA, 19 nt, Artificial Sequence
  Description of Artificial Sequence: Synthetic oligonucleotide
  Sense strand starting at position 2146 of SEQ ID NO: 1886503
uuugaauauguguaaccaa

SEQ ID NO: 2414223 - RNA, 19 nt, Artificial Sequence
  Description of Artificial Sequence: Synthetic oligonucleotide
  Antisense strand to SEQ ID NO: 2414222
uugguuacacauauucaaa

SEQ ID NO: 2414224 - RNA, 19 nt, Artificial Sequence
  Description of Artificial Sequence: Synthetic oligonucleotide
  Sense strand starting at position 2164 of SEQ ID NO: 1886503
aaaucucauugucugagga

SEQ ID NO: 2414225 - RNA, 19 nt, Artificial Sequence
  Description of Artificial Sequence: Synthetic oligonucleotide
  Antisense strand to SEQ ID NO: 2414224
uccucagacaaugagauuu

SEQ ID NO: 2414226 - RNA, 19 nt, Artificial Sequence
  Description of Artificial Sequence: Synthetic oligonucleotide
  Sense strand starting at position 2165 of SEQ ID NO: 1886503
aaucucauugucugaggaa

SEQ ID NO: 2414227 - RNA, 19 nt, Artificial Sequence
  Description of Artificial Sequence: Synthetic oligonucleotide
  Antisense strand to SEQ ID NO: 2414226
uuccucagacaaugagauu

SEQ ID NO: 2414228 - RNA, 19 nt, Artificial Sequence
  Description of Artificial Sequence: Synthetic oligonucleotide
  Sense strand starting at position 2178 of SEQ ID NO: 1886503
gaggaacauucuuccuagu

SEQ ID NO: 2414229 - RNA, 19 nt, Artificial Sequence
  Description of Artificial Sequence: Synthetic oligonucleotide
  Antisense strand to SEQ ID NO: 2414228
acuaggaagaauguuccuc

SEQ ID NO: 2414230 - RNA, 19 nt, Artificial Sequence
  Description of Artificial Sequence: Synthetic oligonucleotide
  Sense strand starting at position 2234 of SEQ ID NO: 1886503
cuaggaugguucucaguuc

SEQ ID NO: 2414231 - RNA, 19 nt, Artificial Sequence
  Description of Artificial Sequence: Synthetic oligonucleotide
  Antisense strand to SEQ ID NO: 2414230
gaacugagaaccauccuag

SEQ ID NO: 2414232 - RNA, 19 nt, Artificial Sequence
  Description of Artificial Sequence: Synthetic oligonucleotide
  Sense strand starting at position 2380 of SEQ ID NO: 1886503
cuugcauaggcauauuaag

SEQ ID NO: 2414233 - RNA, 19 nt, Artificial Sequence
  Description of Artificial Sequence: Synthetic oligonucleotide
  Antisense strand to SEQ ID NO: 2414232
cuuaauaugccuaugcaag

SEQ ID NO: 2414234 - RNA, 19 nt, Artificial Sequence
  Description of Artificial Sequence: Synthetic oligonucleotide
  Sense strand starting at position 2556 of SEQ ID NO: 1886503
gagaaauaacgccaucugu

SEQ ID NO: 2414235 - RNA, 19 nt, Artificial Sequence
  Description of Artificial Sequence: Synthetic oligonucleotide
  Antisense strand to SEQ ID NO: 2414234
acagauggcguuauuucuc

SEQ ID NO: 2414236 - RNA, 19 nt, Artificial Sequence
  Description of Artificial Sequence: Synthetic oligonucleotide
  Sense strand starting at position 2577 of SEQ ID NO: 1886503
aagugacaccagugggaua

SEQ ID NO: 2414237 - RNA, 19 nt, Artificial Sequence
  Description of Artificial Sequence: Synthetic oligonucleotide
  Antisense strand to SEQ ID NO: 2414236
uaucccacuggugucacuu

SEQ ID NO: 2414238 - RNA, 19 nt, Artificial Sequence
  Description of Artificial Sequence: Synthetic oligonucleotide
  Sense strand starting at position 2882 of SEQ ID NO: 1886503
auacgaauguucccagaac

SEQ ID NO: 2414239 - RNA, 19 nt, Artificial Sequence
  Description of Artificial Sequence: Synthetic oligonucleotide
  Antisense strand to SEQ ID NO: 2414238
guucugggaacauucguau

SEQ ID NO: 2414240 - RNA, 19 nt, Artificial Sequence
  Description of Artificial Sequence: Synthetic oligonucleotide
  Sense strand starting at position 3005 of SEQ ID NO: 1886503
ugugguugugaggauuguu

SEQ ID NO: 2414241 - RNA, 19 nt, Artificial Sequence
  Description of Artificial Sequence: Synthetic oligonucleotide
  Antisense strand to SEQ ID NO: 2414240
aacaauccucacaaccaca

SEQ ID NO: 2414242 - RNA, 19 nt, Artificial Sequence
  Description of Artificial Sequence: Synthetic oligonucleotide
  Sense strand starting at position 3008 of SEQ ID NO: 1886503
gguugugaggauuguuaug

SEQ ID NO: 2414243 - RNA, 19 nt, Artificial Sequence
  Description of Artificial Sequence: Synthetic oligonucleotide
  Antisense strand to SEQ ID NO: 2414242
cauaacaauccucacaacc

SEQ ID NO: 2414244 - RNA, 19 nt, Artificial Sequence
  Description of Artificial Sequence: Synthetic oligonucleotide
  Sense strand starting at position 3014 of SEQ ID NO: 1886503
gaggauuguuaugugauaa

SEQ ID NO: 2414245 - RNA, 19 nt, Artificial Sequence
  Description of Artificial Sequence: Synthetic oligonucleotide
  Antisense strand to SEQ ID NO: 2414244
uuaucacauaacaauccuc

SEQ ID NO: 2414246 - RNA, 19 nt, Artificial Sequence
  Description of Artificial Sequence: Synthetic oligonucleotide
  Sense strand starting at position 3015 of SEQ ID NO: 1886503
aggauuguuaugugauaau

SEQ ID NO: 2414247 - RNA, 19 nt, Artificial Sequence
  Description of Artificial Sequence: Synthetic oligonucleotide
  Antisense strand to SEQ ID NO: 2414246
auuaucacauaacaauccu

SEQ ID NO: 2414248 - RNA, 19 nt, Artificial Sequence
  Description of Artificial Sequence: Synthetic oligonucleotide
  Sense strand starting at position 3024 of SEQ ID NO: 1886503
augugauaauuggucacau

SEQ ID NO: 2414249 - RNA, 19 nt, Artificial Sequence
  Description of Artificial Sequence: Synthetic oligonucleotide
  Antisense strand to SEQ ID NO: 2414248
augugaccaauuaucacau

SEQ ID NO: 2414250 - RNA, 19 nt, Artificial Sequence
  Description of Artificial Sequence: Synthetic oligonucleotide
  Sense strand starting at position 3025 of SEQ ID NO: 1886503
ugugauaauuggucacaug

SEQ ID NO: 2414251 - RNA, 19 nt, Artificial Sequence
  Description of Artificial Sequence: Synthetic oligonucleotide
  Antisense strand to SEQ ID NO: 2414250
caugugaccaauuaucaca

SEQ ID NO: 2414252 - RNA, 19 nt, Artificial Sequence
  Description of Artificial Sequence: Synthetic oligonucleotide
  Sense strand starting at position 3033 of SEQ ID NO: 1886503
uuggucacaugcuuaacau

SEQ ID NO: 2414253 - RNA, 19 nt, Artificial Sequence
  Description of Artificial Sequence: Synthetic oligonucleotide
  Antisense strand to SEQ ID NO: 2414252
auguuaagcaugugaccaa

SEQ ID NO: 2414254 - RNA, 19 nt, Artificial Sequence
  Description of Artificial Sequence: Synthetic oligonucleotide
  Sense strand starting at position 3034 of SEQ ID NO: 1886503
uggucacaugcuuaacaua

SEQ ID NO: 2414255 - RNA, 19 nt, Artificial Sequence
  Description of Artificial Sequence: Synthetic oligonucleotide
  Antisense strand to SEQ ID NO: 2414254
uauguuaagcaugugacca

SEQ ID NO: 2414256 - RNA, 19 nt, Artificial Sequence
  Description of Artificial Sequence: Synthetic oligonucleotide
  Sense strand starting at position 3398 of SEQ ID NO: 1886503
aguacucccuguuuauaau

SEQ ID NO: 2414257 - RNA, 19 nt, Artificial Sequence
  Description of Artificial Sequence: Synthetic oligonucleotide
  Antisense strand to SEQ ID NO: 2414256
auuauaaacagggaguacu

SEQ ID NO: 2414258 - RNA, 19 nt, Artificial Sequence
  Description of Artificial Sequence: Synthetic oligonucleotide
  Sense strand starting at position 3618 of SEQ ID NO: 1886503
gaaaguaugguuugaaauc

SEQ ID NO: 2414259 - RNA, 19 nt, Artificial Sequence
  Description of Artificial Sequence: Synthetic oligonucleotide
  Antisense strand to SEQ ID NO: 2414258
gauuucaaaccauacuuuc

SEQ ID NO: 2414260 - RNA, 19 nt, Artificial Sequence
  Description of Artificial Sequence: Synthetic oligonucleotide
  Sense strand starting at position 125 of SEQ ID NO: 1886504
ugauuauuauugccauaga

SEQ ID NO: 2414261 - RNA, 19 nt, Artificial Sequence
  Description of Artificial Sequence: Synthetic oligonucleotide
  Antisense strand to SEQ ID NO: 2414260
ucuauggcaauaauaauca

SEQ ID NO: 2414262 - RNA, 19 nt, Artificial Sequence
  Description of Artificial Sequence: Synthetic oligonucleotide
  Sense strand starting at position 163 of SEQ ID NO: 1886504
ggaugacuccuuuacccuu

SEQ ID NO: 2414263 - RNA, 19 nt, Artificial Sequence
  Description of Artificial Sequence: Synthetic oligonucleotide
  Antisense strand to SEQ ID NO: 2414262
aaggguaaaggagucaucc

SEQ ID NO: 2414264 - RNA, 19 nt, Artificial Sequence
  Description of Artificial Sequence: Synthetic oligonucleotide
  Sense strand starting at position 437 of SEQ ID NO: 1886504
aagugcgucacugaggaaa

SEQ ID NO: 2414265 - RNA, 19 nt, Artificial Sequence
  Description of Artificial Sequence: Synthetic oligonucleotide
  Antisense strand to SEQ ID NO: 2414264
uuuccucagugacgcacuu

SEQ ID NO: 2414266 - RNA, 19 nt, Artificial Sequence
  Description of Artificial Sequence: Synthetic oligonucleotide
  Sense strand starting at position 620 of SEQ ID NO: 1886504
ggaaauguagacuguaucu

SEQ ID NO: 2414267 - RNA, 19 nt, Artificial Sequence
  Description of Artificial Sequence: Synthetic oligonucleotide
  Antisense strand to SEQ ID NO: 2414266
agauacagucuacauuucc

SEQ ID NO: 2414268 - RNA, 19 nt, Artificial Sequence
  Description of Artificial Sequence: Synthetic oligonucleotide
  Sense strand starting at position 625 of SEQ ID NO: 1886504
uguagacuguaucuagaaa

SEQ ID NO: 2414269 - RNA, 19 nt, Artificial Sequence
  Description of Artificial Sequence: Synthetic oligonucleotide
  Antisense strand to SEQ ID NO: 2414268
uuucuagauacagucuaca

SEQ ID NO: 2414270 - RNA, 19 nt, Artificial Sequence
  Description of Artificial Sequence: Synthetic oligonucleotide
  Sense strand starting at position 715 of SEQ ID NO: 1886504
agggcucugcaauaaauga

SEQ ID NO: 2414271 - RNA, 19 nt, Artificial Sequence
  Description of Artificial Sequence: Synthetic oligonucleotide
  Antisense strand to SEQ ID NO: 2414270
ucauuuauugcagagcccu

SEQ ID NO: 2414272 - RNA, 19 nt, Artificial Sequence
  Description of Artificial Sequence: Synthetic oligonucleotide
  Sense strand starting at position 726 of SEQ ID NO: 1886504
auaaaugaacugcaguuua

SEQ ID NO: 2414273 - RNA, 19 nt, Artificial Sequence
  Description of Artificial Sequence: Synthetic oligonucleotide
  Antisense strand to SEQ ID NO: 2414272
uaaacugcaguucauuuau

SEQ ID NO: 2414274 - RNA, 19 nt, Artificial Sequence
  Description of Artificial Sequence: Synthetic oligonucleotide
  Sense strand starting at position 854 of SEQ ID NO: 1886504
aguauucugccugaaucca

SEQ ID NO: 2414275 - RNA, 19 nt, Artificial Sequence
  Description of Artificial Sequence: Synthetic oligonucleotide
  Antisense strand to SEQ ID NO: 2414274
uggauucaggcagaauacu

SEQ ID NO: 2414276 - RNA, 19 nt, Artificial Sequence
  Description of Artificial Sequence: Synthetic oligonucleotide
  Sense strand starting at position 1092 of SEQ ID NO: 1886504
uggcuaagagcauaguaua

SEQ ID NO: 2414277 - RNA, 19 nt, Artificial Sequence
  Description of Artificial Sequence: Synthetic oligonucleotide
  Antisense strand to SEQ ID NO: 2414276
uauacuaugcucuuagcca

SEQ ID NO: 2414278 - RNA, 19 nt, Artificial Sequence
  Description of Artificial Sequence: Synthetic oligonucleotide
  Sense strand starting at position 1169 of SEQ ID NO: 1886504
gugagauacugauccacau

SEQ ID NO: 2414279 - RNA, 19 nt, Artificial Sequence
  Description of Artificial Sequence: Synthetic oligonucleotide
  Antisense strand to SEQ ID NO: 2414278
auguggaucaguaucucac

SEQ ID NO: 2414280 - RNA, 19 nt, Artificial Sequence
  Description of Artificial Sequence: Synthetic oligonucleotide
  Sense strand starting at position 1346 of SEQ ID NO: 1886504
ccugguagcuuucucauuu

SEQ ID NO: 2414281 - RNA, 19 nt, Artificial Sequence
  Description of Artificial Sequence: Synthetic oligonucleotide
  Antisense strand to SEQ ID NO: 2414280
aaaugagaaagcuaccagg

SEQ ID NO: 2414282 - RNA, 19 nt, Artificial Sequence
  Description of Artificial Sequence: Synthetic oligonucleotide
  Sense strand starting at position 1425 of SEQ ID NO: 1886504
uguuccuucggagaaguaa

SEQ ID NO: 2414283 - RNA, 19 nt, Artificial Sequence
  Description of Artificial Sequence: Synthetic oligonucleotide
  Antisense strand to SEQ ID NO: 2414282
uuacuucuccgaaggaaca

SEQ ID NO: 2414284 - RNA, 19 nt, Artificial Sequence
  Description of Artificial Sequence: Synthetic oligonucleotide
  Sense strand starting at position 1485 of SEQ ID NO: 1886504
gaaagcuuacugugagaag

SEQ ID NO: 2414285 - RNA, 19 nt, Artificial Sequence
  Description of Artificial Sequence: Synthetic oligonucleotide
  Antisense strand to SEQ ID NO: 2414284
cuucucacaguaagcuuuc

SEQ ID NO: 2414286 - RNA, 19 nt, Artificial Sequence
  Description of Artificial Sequence: Synthetic oligonucleotide
  Sense strand starting at position 1517 of SEQ ID NO: 1886504
gccucaggaauguaagguu

SEQ ID NO: 2414287 - RNA, 19 nt, Artificial Sequence
  Description of Artificial Sequence: Synthetic oligonucleotide
  Antisense strand to SEQ ID NO: 2414286
aaccuuacauuccugaggc

SEQ ID NO: 2414288 - RNA, 19 nt, Artificial Sequence
  Description of Artificial Sequence: Synthetic oligonucleotide
  Sense strand starting at position 1544 of SEQ ID NO: 1886504
ugcacucuggaauggaaau

SEQ ID NO: 2414289 - RNA, 19 nt, Artificial Sequence
  Description of Artificial Sequence: Synthetic oligonucleotide
  Antisense strand to SEQ ID NO: 2414288
auuuccauuccagagugca

SEQ ID NO: 2414290 - RNA, 19 nt, Artificial Sequence
  Description of Artificial Sequence: Synthetic oligonucleotide
  Sense strand starting at position 1657 of SEQ ID NO: 1886504
cauaguaguguugauggga

SEQ ID NO: 2414291 - RNA, 19 nt, Artificial Sequence
  Description of Artificial Sequence: Synthetic oligonucleotide
  Antisense strand to SEQ ID NO: 2414290
ucccaucaacacuacuaug

SEQ ID NO: 2414292 - RNA, 19 nt, Artificial Sequence
  Description of Artificial Sequence: Synthetic oligonucleotide
  Sense strand starting at position 1683 of SEQ ID NO: 1886504
agaugaugugcuggaaaua

SEQ ID NO: 2414293 - RNA, 19 nt, Artificial Sequence
  Description of Artificial Sequence: Synthetic oligonucleotide
  Antisense strand to SEQ ID NO: 2414292
uauuuccagcacaucaucu

SEQ ID NO: 2414294 - RNA, 19 nt, Artificial Sequence
  Description of Artificial Sequence: Synthetic oligonucleotide
  Sense strand starting at position 1732 of SEQ ID NO: 1886504
cauuguggucuggaaacca

SEQ ID NO: 2414295 - RNA, 19 nt, Artificial Sequence
  Description of Artificial Sequence: Synthetic oligonucleotide
  Antisense strand to SEQ ID NO: 2414294
ugguuuccagaccacaaug

SEQ ID NO: 2414296 - RNA, 19 nt, Artificial Sequence
  Description of Artificial Sequence: Synthetic oligonucleotide
  Sense strand starting at position 1931 of SEQ ID NO: 1886504
uuugcuuuagaccaaguga

SEQ ID NO: 2414297 - RNA, 19 nt, Artificial Sequence
  Description of Artificial Sequence: Synthetic oligonucleotide
  Antisense strand to SEQ ID NO: 2414296
ucacuuggucuaaagcaaa

SEQ ID NO: 2414298 - RNA, 19 nt, Artificial Sequence
  Description of Artificial Sequence: Synthetic oligonucleotide
  Sense strand starting at position 2308 of SEQ ID NO: 1886504
acgucuucucuggaagaca

SEQ ID NO: 2414299 - RNA, 19 nt, Artificial Sequence
  Description of Artificial Sequence: Synthetic oligonucleotide
  Antisense strand to SEQ ID NO: 2414298
ugucuuccagagaagacgu

SEQ ID NO: 2414300 - RNA, 19 nt, Artificial Sequence
  Description of Artificial Sequence: Synthetic oligonucleotide
  Sense strand starting at position 2383 of SEQ ID NO: 1886504
cauaguugugguuaggaag

SEQ ID NO: 2414301 - RNA, 19 nt, Artificial Sequence
  Description of Artificial Sequence: Synthetic oligonucleotide
  Antisense strand to SEQ ID NO: 2414300
cuuccuaaccacaacuaug

SEQ ID NO: 2414302 - RNA, 19 nt, Artificial Sequence
  Description of Artificial Sequence: Synthetic oligonucleotide
  Sense strand starting at position 2403 of SEQ ID NO: 1886504
agagaagacgccgauucau

SEQ ID NO: 2414303 - RNA, 19 nt, Artificial Sequence
  Description of Artificial Sequence: Synthetic oligonucleotide
  Antisense strand to SEQ ID NO: 2414302
augaaucggcgucuucucu

SEQ ID NO: 2414304 - RNA, 19 nt, Artificial Sequence
  Description of Artificial Sequence: Synthetic oligonucleotide
  Sense strand starting at position 2461 of SEQ ID NO: 1886504
agagguaccuuuccuuaac

SEQ ID NO: 2414305 - RNA, 19 nt, Artificial Sequence
  Description of Artificial Sequence: Synthetic oligonucleotide
  Antisense strand to SEQ ID NO: 2414304
guuaaggaaagguaccucu

SEQ ID NO: 2414306 - RNA, 19 nt, Artificial Sequence
  Description of Artificial Sequence: Synthetic oligonucleotide
  Sense strand starting at position 2579 of SEQ ID NO: 1886504
auggaagccugaguuggau

SEQ ID NO: 2414307 - RNA, 19 nt, Artificial Sequence
  Description of Artificial Sequence: Synthetic oligonucleotide
  Antisense strand to SEQ ID NO: 2414306
auccaacucaggcuuccau

SEQ ID NO: 2414308 - RNA, 19 nt, Artificial Sequence
  Description of Artificial Sequence: Synthetic oligonucleotide
  Sense strand starting at position 2581 of SEQ ID NO: 1886504
ggaagccugaguuggauaa

SEQ ID NO: 2414309 - RNA, 19 nt, Artificial Sequence
  Description of Artificial Sequence: Synthetic oligonucleotide
  Antisense strand to SEQ ID NO: 2414308
uuauccaacucaggcuucc

SEQ ID NO: 2414310 - RNA, 19 nt, Artificial Sequence
  Description of Artificial Sequence: Synthetic oligonucleotide
  Sense strand starting at position 2582 of SEQ ID NO: 1886504
gaagccugaguuggauaau

SEQ ID NO: 2414311 - RNA, 19 nt, Artificial Sequence
  Description of Artificial Sequence: Synthetic oligonucleotide
  Antisense strand to SEQ ID NO: 2414310
auuauccaacucaggcuuc

SEQ ID NO: 2414312 - RNA, 19 nt, Artificial Sequence
  Description of Artificial Sequence: Synthetic oligonucleotide
  Sense strand starting at position 2935 of SEQ ID NO: 1886504
ugucauaaucucugaaaug

SEQ ID NO: 2414313 - RNA, 19 nt, Artificial Sequence
  Description of Artificial Sequence: Synthetic oligonucleotide
  Antisense strand to SEQ ID NO: 2414312
cauuucagagauuaugaca

SEQ ID NO: 2414314 - RNA, 19 nt, Artificial Sequence
  Description of Artificial Sequence: Synthetic oligonucleotide
  Sense strand starting at position 3014 of SEQ ID NO: 1886504
gugucuuucccauauaaga

SEQ ID NO: 2414315 - RNA, 19 nt, Artificial Sequence
  Description of Artificial Sequence: Synthetic oligonucleotide
  Antisense strand to SEQ ID NO: 2414314
ucuuauaugggaaagacac

SEQ ID NO: 2414316 - RNA, 19 nt, Artificial Sequence
  Description of Artificial Sequence: Synthetic oligonucleotide
  Sense strand starting at position 3069 of SEQ ID NO: 1886504
gccaaucauguugauauag

SEQ ID NO: 2414317 - RNA, 19 nt, Artificial Sequence
  Description of Artificial Sequence: Synthetic oligonucleotide
  Antisense strand to SEQ ID NO: 2414316
cuauaucaacaugauuggc

SEQ ID NO: 2414318 - RNA, 19 nt, Artificial Sequence
  Description of Artificial Sequence: Synthetic oligonucleotide
  Sense strand starting at position 3314 of SEQ ID NO: 1886504
guaggaugguacuccaaga

SEQ ID NO: 2414319 - RNA, 19 nt, Artificial Sequence
  Description of Artificial Sequence: Synthetic oligonucleotide
  Antisense strand to SEQ ID NO: 2414318
ucuuggaguaccauccuac

SEQ ID NO: 2414320 - RNA, 19 nt, Artificial Sequence
  Description of Artificial Sequence: Synthetic oligonucleotide
  Sense strand starting at position 3377 of SEQ ID NO: 1886504
ucagaauaauugccaauag

SEQ ID NO: 2414321 - RNA, 19 nt, Artificial Sequence
  Description of Artificial Sequence: Synthetic oligonucleotide
  Antisense strand to SEQ ID NO: 2414320
cuauuggcaauuauucuga

SEQ ID NO: 2414322 - RNA, 19 nt, Artificial Sequence
  Description of Artificial Sequence: Synthetic oligonucleotide
  Sense strand starting at position 3424 of SEQ ID NO: 1886504
gcuccagccucagugauuu

SEQ ID NO: 2414323 - RNA, 19 nt, Artificial Sequence
  Description of Artificial Sequence: Synthetic oligonucleotide
  Antisense strand to SEQ ID NO: 2414322
aaaucacugaggcuggagc

SEQ ID NO: 2414324 - RNA, 19 nt, Artificial Sequence
  Description of Artificial Sequence: Synthetic oligonucleotide
  Sense strand starting at position 3695 of SEQ ID NO: 1886504
aggugaguucgguacaaga

SEQ ID NO: 2414325 - RNA, 19 nt, Artificial Sequence
  Description of Artificial Sequence: Synthetic oligonucleotide
  Antisense strand to SEQ ID NO: 2414324
ucuuguaccgaacucaccu

SEQ ID NO: 2414326 - RNA, 19 nt, Artificial Sequence
  Description of Artificial Sequence: Synthetic oligonucleotide
  Sense strand starting at position 3697 of SEQ ID NO: 1886504
gugaguucgguacaagaac

SEQ ID NO: 2414327 - RNA, 19 nt, Artificial Sequence
  Description of Artificial Sequence: Synthetic oligonucleotide
  Antisense strand to SEQ ID NO: 2414326
guucuuguaccgaacucac

SEQ ID NO: 2414328 - RNA, 19 nt, Artificial Sequence
  Description of Artificial Sequence: Synthetic oligonucleotide
  Sense strand starting at position 3755 of SEQ ID NO: 1886504
gaaucaugacugggagcca

SEQ ID NO: 2414329 - RNA, 19 nt, Artificial Sequence
  Description of Artificial Sequence: Synthetic oligonucleotide
  Antisense strand to SEQ ID NO: 2414328
uggcucccagucaugauuc

SEQ ID NO: 2414330 - RNA, 19 nt, Artificial Sequence
  Description of Artificial Sequence: Synthetic oligonucleotide
  Sense strand starting at position 3784 of SEQ ID NO: 1886504
augagaucagcaggaaugu

SEQ ID NO: 2414331 - RNA, 19 nt, Artificial Sequence
  Description of Artificial Sequence: Synthetic oligonucleotide
  Antisense strand to SEQ ID NO: 2414330
acauuccugcugaucucau

SEQ ID NO: 2414332 - RNA, 19 nt, Artificial Sequence
  Description of Artificial Sequence: Synthetic oligonucleotide
  Sense strand starting at position 3812 of SEQ ID NO: 1886504
aauacaguccugcagggau

SEQ ID NO: 2414333 - RNA, 19 nt, Artificial Sequence
  Description of Artificial Sequence: Synthetic oligonucleotide
  Antisense strand to SEQ ID NO: 2414332
aucccugcaggacuguauu

SEQ ID NO: 2414334 - RNA, 19 nt, Artificial Sequence
  Description of Artificial Sequence: Synthetic oligonucleotide
  Sense strand starting at position 3944 of SEQ ID NO: 1886504
cuaauuagugcuuaaugga

SEQ ID NO: 2414335 - RNA, 19 nt, Artificial Sequence
  Description of Artificial Sequence: Synthetic oligonucleotide
  Antisense strand to SEQ ID NO: 2414334
uccauuaagcacuaauuag

SEQ ID NO: 2414336 - RNA, 19 nt, Artificial Sequence
  Description of Artificial Sequence: Synthetic oligonucleotide
  Sense strand starting at position 3960 of SEQ ID NO: 1886504
ggaaucgauuagguaauga

SEQ ID NO: 2414337 - RNA, 19 nt, Artificial Sequence
  Description of Artificial Sequence: Synthetic oligonucleotide
  Antisense strand to SEQ ID NO: 2414336
ucauuaccuaaucgauucc

SEQ ID NO: 2414338 - RNA, 19 nt, Artificial Sequence
  Description of Artificial Sequence: Synthetic oligonucleotide
  Sense strand starting at position 3981 of SEQ ID NO: 1886504
gcaggucaucagggaauca

SEQ ID NO: 2414339 - RNA, 19 nt, Artificial Sequence
  Description of Artificial Sequence: Synthetic oligonucleotide
  Antisense strand to SEQ ID NO: 2414338
ugauucccugaugaccugc

SEQ ID NO: 2414340 - RNA, 19 nt, Artificial Sequence
  Description of Artificial Sequence: Synthetic oligonucleotide
  Sense strand starting at position 18 of SEQ ID NO: 1886505
guguuuggugguuauuaua

SEQ ID NO: 2414341 - RNA, 19 nt, Artificial Sequence
  Description of Artificial Sequence: Synthetic oligonucleotide
  Antisense strand to SEQ ID NO: 2414340
uauaauaaccaccaaacac

SEQ ID NO: 2414342 - RNA, 19 nt, Artificial Sequence
  Description of Artificial Sequence: Synthetic oligonucleotide
  Sense strand starting at position 25 of SEQ ID NO: 1886505
gugguuauuauagaguauu

SEQ ID NO: 2414343 - RNA, 19 nt, Artificial Sequence
  Description of Artificial Sequence: Synthetic oligonucleotide
  Antisense strand to SEQ ID NO: 2414342
aauacucuauaauaaccac

SEQ ID NO: 2414344 - RNA, 19 nt, Artificial Sequence
  Description of Artificial Sequence: Synthetic oligonucleotide
  Sense strand starting at position 71 of SEQ ID NO: 1886505
aggccagcugcucagauau

SEQ ID NO: 2414345 - RNA, 19 nt, Artificial Sequence
  Description of Artificial Sequence: Synthetic oligonucleotide
  Antisense strand to SEQ ID NO: 2414344
auaucugagcagcuggccu

SEQ ID NO: 2414346 - RNA, 19 nt, Artificial Sequence
  Description of Artificial Sequence: Synthetic oligonucleotide
  Sense strand starting at position 462 of SEQ ID NO: 1886505
ccacuagagguuugaacua

SEQ ID NO: 2414347 - RNA, 19 nt, Artificial Sequence
  Description of Artificial Sequence: Synthetic oligonucleotide
  Antisense strand to SEQ ID NO: 2414346
uaguucaaaccucuagugg

SEQ ID NO: 2414348 - RNA, 19 nt, Artificial Sequence
  Description of Artificial Sequence: Synthetic oligonucleotide
  Sense strand starting at position 517 of SEQ ID NO: 1886505
ggaagcagucagggaguau

SEQ ID NO: 2414349 - RNA, 19 nt, Artificial Sequence
  Description of Artificial Sequence: Synthetic oligonucleotide
  Antisense strand to SEQ ID NO: 2414348
auacucccugacugcuucc

SEQ ID NO: 2414350 - RNA, 19 nt, Artificial Sequence
  Description of Artificial Sequence: Synthetic oligonucleotide
  Sense strand starting at position 518 of SEQ ID NO: 1886505
gaagcagucagggaguaua

SEQ ID NO: 2414351 - RNA, 19 nt, Artificial Sequence
  Description of Artificial Sequence: Synthetic oligonucleotide
  Antisense strand to SEQ ID NO: 2414350
uauacucccugacugcuuc

SEQ ID NO: 2414352 - RNA, 19 nt, Artificial Sequence
  Description of Artificial Sequence: Synthetic oligonucleotide
  Sense strand starting at position 528 of SEQ ID NO: 1886505
gggaguauauuggaaagag

SEQ ID NO: 2414353 - RNA, 19 nt, Artificial Sequence
  Description of Artificial Sequence: Synthetic oligonucleotide
  Antisense strand to SEQ ID NO: 2414352
cucuuuccaauauacuccc

SEQ ID NO: 2414354 - RNA, 19 nt, Artificial Sequence
  Description of Artificial Sequence: Synthetic oligonucleotide
  Sense strand starting at position 615 of SEQ ID NO: 1886505
gcaacaagauauccuuguu

SEQ ID NO: 2414355 - RNA, 19 nt, Artificial Sequence
  Description of Artificial Sequence: Synthetic oligonucleotide
  Antisense strand to SEQ ID NO: 2414354
aacaaggauaucuuguugc

SEQ ID NO: 2414356 - RNA, 19 nt, Artificial Sequence
  Description of Artificial Sequence: Synthetic oligonucleotide
  Sense strand starting at position 618 of SEQ ID NO: 1886505
acaagauauccuuguuagc

SEQ ID NO: 2414357 - RNA, 19 nt, Artificial Sequence
  Description of Artificial Sequence: Synthetic oligonucleotide
  Antisense strand to SEQ ID NO: 2414356
gcuaacaaggauaucuugu

SEQ ID NO: 2414358 - RNA, 19 nt, Artificial Sequence
  Description of Artificial Sequence: Synthetic oligonucleotide
  Sense strand starting at position 985 of SEQ ID NO: 1886505
aaagcuguuggguaaggaa

SEQ ID NO: 2414359 - RNA, 19 nt, Artificial Sequence
  Description of Artificial Sequence: Synthetic oligonucleotide
  Antisense strand to SEQ ID NO: 2414358
uuccuuacccaacagcuuu

SEQ ID NO: 2414360 - RNA, 19 nt, Artificial Sequence
  Description of Artificial Sequence: Synthetic oligonucleotide
  Sense strand starting at position 1062 of SEQ ID NO: 1886505
augugcaacgcugaauuaa

SEQ ID NO: 2414361 - RNA, 19 nt, Artificial Sequence
  Description of Artificial Sequence: Synthetic oligonucleotide
  Antisense strand to SEQ ID NO: 2414360
uuaauucagcguugcacau

SEQ ID NO: 2414362 - RNA, 19 nt, Artificial Sequence
  Description of Artificial Sequence: Synthetic oligonucleotide
  Sense strand starting at position 1186 of SEQ ID NO: 1886505
uagggacucccacgaaaug

SEQ ID NO: 2414363 - RNA, 19 nt, Artificial Sequence
  Description of Artificial Sequence: Synthetic oligonucleotide
  Antisense strand to SEQ ID NO: 2414362
cauuucgugggagucccua

SEQ ID NO: 2414364 - RNA, 19 nt, Artificial Sequence
  Description of Artificial Sequence: Synthetic oligonucleotide
  Sense strand starting at position 1197 of SEQ ID NO: 1886505
acgaaauguuacuccuuaa

SEQ ID NO: 2414365 - RNA, 19 nt, Artificial Sequence
  Description of Artificial Sequence: Synthetic oligonucleotide
  Antisense strand to SEQ ID NO: 2414364
uuaaggaguaacauuucgu

SEQ ID NO: 2414366 - RNA, 19 nt, Artificial Sequence
  Description of Artificial Sequence: Synthetic oligonucleotide
  Sense strand starting at position 1210 of SEQ ID NO: 1886505
ccuuaauuguggcuuggau

SEQ ID NO: 2414367 - RNA, 19 nt, Artificial Sequence
  Description of Artificial Sequence: Synthetic oligonucleotide
  Antisense strand to SEQ ID NO: 2414366
auccaagccacaauuaagg

SEQ ID NO: 2414368 - RNA, 19 nt, Artificial Sequence
  Description of Artificial Sequence: Synthetic oligonucleotide
  Sense strand starting at position 1212 of SEQ ID NO: 1886505
uuaauuguggcuuggauaa

SEQ ID NO: 2414369 - RNA, 19 nt, Artificial Sequence
  Description of Artificial Sequence: Synthetic oligonucleotide
  Antisense strand to SEQ ID NO: 2414368
uuauccaagccacaauuaa

SEQ ID NO: 2414370 - RNA, 19 nt, Artificial Sequence
  Description of Artificial Sequence: Synthetic oligonucleotide
  Sense strand starting at position 1332 of SEQ ID NO: 1886505
guuaaacacugcucccaga

SEQ ID NO: 2414371 - RNA, 19 nt, Artificial Sequence
  Description of Artificial Sequence: Synthetic oligonucleotide
  Antisense strand to SEQ ID NO: 2414370
ucugggagcaguguuuaac

SEQ ID NO: 2414372 - RNA, 19 nt, Artificial Sequence
  Description of Artificial Sequence: Synthetic oligonucleotide
  Sense strand starting at position 1685 of SEQ ID NO: 1886505
auucgucuccgggaagaac

SEQ ID NO: 2414373 - RNA, 19 nt, Artificial Sequence
  Description of Artificial Sequence: Synthetic oligonucleotide
  Antisense strand to SEQ ID NO: 2414372
guucuucccggagacgaau

SEQ ID NO: 2414374 - RNA, 19 nt, Artificial Sequence
  Description of Artificial Sequence: Synthetic oligonucleotide
  Sense strand starting at position 1796 of SEQ ID NO: 1886505
ggaugagggucgagaggua

SEQ ID NO: 2414375 - RNA, 19 nt, Artificial Sequence
  Description of Artificial Sequence: Synthetic oligonucleotide
  Antisense strand to SEQ ID NO: 2414374
uaccucucgacccucaucc

SEQ ID NO: 2414376 - RNA, 19 nt, Artificial Sequence
  Description of Artificial Sequence: Synthetic oligonucleotide
  Sense strand starting at position 1902 of SEQ ID NO: 1886505
gcaguuaccgccuucggaa

SEQ ID NO: 2414377 - RNA, 19 nt, Artificial Sequence
  Description of Artificial Sequence: Synthetic oligonucleotide
  Antisense strand to SEQ ID NO: 2414376
uuccgaaggcgguaacugc

SEQ ID NO: 2414378 - RNA, 19 nt, Artificial Sequence
  Description of Artificial Sequence: Synthetic oligonucleotide
  Sense strand starting at position 2960 of SEQ ID NO: 1886505
cguugaaucccagaacgua

SEQ ID NO: 2414379 - RNA, 19 nt, Artificial Sequence
  Description of Artificial Sequence: Synthetic oligonucleotide
  Antisense strand to SEQ ID NO: 2414378
uacguucugggauucaacg

SEQ ID NO: 2414380 - RNA, 19 nt, Artificial Sequence
  Description of Artificial Sequence: Synthetic oligonucleotide
  Sense strand starting at position 3133 of SEQ ID NO: 1886505
ccuuuaaacuuggauuuag

SEQ ID NO: 2414381 - RNA, 19 nt, Artificial Sequence
  Description of Artificial Sequence: Synthetic oligonucleotide
  Antisense strand to SEQ ID NO: 2414380
cuaaauccaaguuuaaagg

SEQ ID NO: 2414382 - RNA, 19 nt, Artificial Sequence
  Description of Artificial Sequence: Synthetic oligonucleotide
  Sense strand starting at position 3183 of SEQ ID NO: 1886505
gaggaagauuaugcaaguu

SEQ ID NO: 2414383 - RNA, 19 nt, Artificial Sequence
  Description of Artificial Sequence: Synthetic oligonucleotide
  Antisense strand to SEQ ID NO: 2414382
aacuugcauaaucuuccuc

SEQ ID NO: 2414384 - RNA, 19 nt, Artificial Sequence
  Description of Artificial Sequence: Synthetic oligonucleotide
  Sense strand starting at position 3300 of SEQ ID NO: 1886505
cucagucuugcgccacuua

SEQ ID NO: 2414385 - RNA, 19 nt, Artificial Sequence
  Description of Artificial Sequence: Synthetic oligonucleotide
  Antisense strand to SEQ ID NO: 2414384
uaaguggcgcaagacugag

SEQ ID NO: 2414386 - RNA, 19 nt, Artificial Sequence
  Description of Artificial Sequence: Synthetic oligonucleotide
  Sense strand starting at position 3336 of SEQ ID NO: 1886505
uguagaauuaagugagaua

SEQ ID NO: 2414387 - RNA, 19 nt, Artificial Sequence
  Description of Artificial Sequence: Synthetic oligonucleotide
  Antisense strand to SEQ ID NO: 2414386
uaucucacuuaauucuaca

SEQ ID NO: 2414388 - RNA, 19 nt, Artificial Sequence
  Description of Artificial Sequence: Synthetic oligonucleotide
  Sense strand starting at position 3348 of SEQ ID NO: 1886505
ugagauauuucguauauga

SEQ ID NO: 2414389 - RNA, 19 nt, Artificial Sequence
  Description of Artificial Sequence: Synthetic oligonucleotide
  Antisense strand to SEQ ID NO: 2414388
ucauauacgaaauaucuca

SEQ ID NO: 2414390 - RNA, 19 nt, Artificial Sequence
  Description of Artificial Sequence: Synthetic oligonucleotide
  Sense strand starting at position 3358 of SEQ ID NO: 1886505
cguauaugaccuuaacaua

SEQ ID NO: 2414391 - RNA, 19 nt, Artificial Sequence
  Description of Artificial Sequence: Synthetic oligonucleotide
  Antisense strand to SEQ ID NO: 2414390
uauguuaaggucauauacg

SEQ ID NO: 2414392 - RNA, 19 nt, Artificial Sequence
  Description of Artificial Sequence: Synthetic oligonucleotide
  Sense strand starting at position 3374 of SEQ ID NO: 1886505
auaguuugcaguuaauguu

SEQ ID NO: 2414393 - RNA, 19 nt, Artificial Sequence
  Description of Artificial Sequence: Synthetic oligonucleotide
  Antisense strand to SEQ ID NO: 2414392
aacauuaacugcaaacuau

SEQ ID NO: 2414394 - RNA, 19 nt, Artificial Sequence
  Description of Artificial Sequence: Synthetic oligonucleotide
  Sense strand starting at position 3415 of SEQ ID NO: 1886505
ugaacucugccagaguguu

SEQ ID NO: 2414395 - RNA, 19 nt, Artificial Sequence
  Description of Artificial Sequence: Synthetic oligonucleotide
  Antisense strand to SEQ ID NO: 2414394
aacacucuggcagaguuca

SEQ ID NO: 2414396 - RNA, 19 nt, Artificial Sequence
  Description of Artificial Sequence: Synthetic oligonucleotide
  Sense strand starting at position 3557 of SEQ ID NO: 1886505
augccagguguucagagaa

SEQ ID NO: 2414397 - RNA, 19 nt, Artificial Sequence
  Description of Artificial Sequence: Synthetic oligonucleotide
  Antisense strand to SEQ ID NO: 2414396
uucucugaacaccuggcau

SEQ ID NO: 2414398 - RNA, 19 nt, Artificial Sequence
  Description of Artificial Sequence: Synthetic oligonucleotide
  Sense strand starting at position 3609 of SEQ ID NO: 1886505
aggguagagaauugucuaa

SEQ ID NO: 2414399 - RNA, 19 nt, Artificial Sequence
  Description of Artificial Sequence: Synthetic oligonucleotide
  Antisense strand to SEQ ID NO: 2414398
uuagacaauucucuacccu

SEQ ID NO: 2414400 - RNA, 19 nt, Artificial Sequence
  Description of Artificial Sequence: Synthetic oligonucleotide
  Sense strand starting at position 3611 of SEQ ID NO: 1886505
gguagagaauugucuaaga

SEQ ID NO: 2414401 - RNA, 19 nt, Artificial Sequence
  Description of Artificial Sequence: Synthetic oligonucleotide
  Antisense strand to SEQ ID NO: 2414400
ucuuagacaauucucuacc

SEQ ID NO: 2414402 - RNA, 19 nt, Artificial Sequence
  Description of Artificial Sequence: Synthetic oligonucleotide
  Sense strand starting at position 3761 of SEQ ID NO: 1886505
ggugcaauaucaguaucau

SEQ ID NO: 2414403 - RNA, 19 nt, Artificial Sequence
  Description of Artificial Sequence: Synthetic oligonucleotide
  Antisense strand to SEQ ID NO: 2414402
augauacugauauugcacc

SEQ ID NO: 2414404 - RNA, 19 nt, Artificial Sequence
  Description of Artificial Sequence: Synthetic oligonucleotide
  Sense strand starting at position 3762 of SEQ ID NO: 1886505
gugcaauaucaguaucauu

SEQ ID NO: 2414405 - RNA, 19 nt, Artificial Sequence
  Description of Artificial Sequence: Synthetic oligonucleotide
  Antisense strand to SEQ ID NO: 2414404
aaugauacugauauugcac

SEQ ID NO: 2414406 - RNA, 19 nt, Artificial Sequence
  Description of Artificial Sequence: Synthetic oligonucleotide
  Sense strand starting at position 3767 of SEQ ID NO: 1886505
auaucaguaucauugauca

SEQ ID NO: 2414407 - RNA, 19 nt, Artificial Sequence
  Description of Artificial Sequence: Synthetic oligonucleotide
  Antisense strand to SEQ ID NO: 2414406
ugaucaaugauacugauau

SEQ ID NO: 2414408 - RNA, 19 nt, Artificial Sequence
  Description of Artificial Sequence: Synthetic oligonucleotide
  Sense strand starting at position 3780 of SEQ ID NO: 1886505
ugaucacuuguaugauaug

SEQ ID NO: 2414409 - RNA, 19 nt, Artificial Sequence
  Description of Artificial Sequence: Synthetic oligonucleotide
  Antisense strand to SEQ ID NO: 2414408
cauaucauacaagugauca

SEQ ID NO: 2414410 - RNA, 19 nt, Artificial Sequence
  Description of Artificial Sequence: Synthetic oligonucleotide
  Sense strand starting at position 3785 of SEQ ID NO: 1886505
acuuguaugauaugguuag

SEQ ID NO: 2414411 - RNA, 19 nt, Artificial Sequence
  Description of Artificial Sequence: Synthetic oligonucleotide
  Antisense strand to SEQ ID NO: 2414410
cuaaccauaucauacaagu

SEQ ID NO: 2414412 - RNA, 19 nt, Artificial Sequence
  Description of Artificial Sequence: Synthetic oligonucleotide
  Sense strand starting at position 3795 of SEQ ID NO: 1886505
uaugguuaggaauguaugu

SEQ ID NO: 2414413 - RNA, 19 nt, Artificial Sequence
  Description of Artificial Sequence: Synthetic oligonucleotide
  Antisense strand to SEQ ID NO: 2414412
acauacauuccuaaccaua

SEQ ID NO: 2414414 - RNA, 19 nt, Artificial Sequence
  Description of Artificial Sequence: Synthetic oligonucleotide
  Sense strand starting at position 3797 of SEQ ID NO: 1886505
ugguuaggaauguauguaa

SEQ ID NO: 2414415 - RNA, 19 nt, Artificial Sequence
  Description of Artificial Sequence: Synthetic oligonucleotide
  Antisense strand to SEQ ID NO: 2414414
uuacauacauuccuaacca

SEQ ID NO: 2414416 - RNA, 19 nt, Artificial Sequence
  Description of Artificial Sequence: Synthetic oligonucleotide
  Sense strand starting at position 3800 of SEQ ID NO: 1886505
uuaggaauguauguaaacu

SEQ ID NO: 2414417 - RNA, 19 nt, Artificial Sequence
  Description of Artificial Sequence: Synthetic oligonucleotide
  Antisense strand to SEQ ID NO: 2414416
aguuuacauacauuccuaa

SEQ ID NO: 2414418 - RNA, 19 nt, Artificial Sequence
  Description of Artificial Sequence: Synthetic oligonucleotide
  Sense strand starting at position 3907 of SEQ ID NO: 1886505
acuguacaguuaccagaau

SEQ ID NO: 2414419 - RNA, 19 nt, Artificial Sequence
  Description of Artificial Sequence: Synthetic oligonucleotide
  Antisense strand to SEQ ID NO: 2414418
auucugguaacuguacagu

SEQ ID NO: 2414420 - RNA, 19 nt, Artificial Sequence
  Description of Artificial Sequence: Synthetic oligonucleotide
  Sense strand starting at position 49 of SEQ ID NO: 1886506
agugauucuccugaguaga

SEQ ID NO: 2414421 - RNA, 19 nt, Artificial Sequence
  Description of Artificial Sequence: Synthetic oligonucleotide
  Antisense strand to SEQ ID NO: 2414420
ucuacucaggagaaucacu

SEQ ID NO: 2414422 - RNA, 19 nt, Artificial Sequence
  Description of Artificial Sequence: Synthetic oligonucleotide
  Sense strand starting at position 51 of SEQ ID NO: 1886506
ugauucuccugaguagaga

SEQ ID NO: 2414423 - RNA, 19 nt, Artificial Sequence
  Description of Artificial Sequence: Synthetic oligonucleotide
  Antisense strand to SEQ ID NO: 2414422
ucucuacucaggagaauca

SEQ ID NO: 2414424 - RNA, 19 nt, Artificial Sequence
  Description of Artificial Sequence: Synthetic oligonucleotide
  Sense strand starting at position 191 of SEQ ID NO: 1886506
aagauuauaccgugauaga

SEQ ID NO: 2414425 - RNA, 19 nt, Artificial Sequence
  Description of Artificial Sequence: Synthetic oligonucleotide
  Antisense strand to SEQ ID NO: 2414424
ucuaucacgguauaaucuu

SEQ ID NO: 2414426 - RNA, 19 nt, Artificial Sequence
  Description of Artificial Sequence: Synthetic oligonucleotide
  Sense strand starting at position 284 of SEQ ID NO: 1886506
auacauaucuccguagaga

SEQ ID NO: 2414427 - RNA, 19 nt, Artificial Sequence
  Description of Artificial Sequence: Synthetic oligonucleotide
  Antisense strand to SEQ ID NO: 2414426
ucucuacggagauauguau

SEQ ID NO: 2414428 - RNA, 19 nt, Artificial Sequence
  Description of Artificial Sequence: Synthetic oligonucleotide
  Sense strand starting at position 285 of SEQ ID NO: 1886506
uacauaucuccguagagaa

SEQ ID NO: 2414429 - RNA, 19 nt, Artificial Sequence
  Description of Artificial Sequence: Synthetic oligonucleotide
  Antisense strand to SEQ ID NO: 2414428
uucucuacggagauaugua

SEQ ID NO: 2414430 - RNA, 19 nt, Artificial Sequence
  Description of Artificial Sequence: Synthetic oligonucleotide
  Sense strand starting at position 287 of SEQ ID NO: 1886506
cauaucuccguagagaauu

SEQ ID NO: 2414431 - RNA, 19 nt, Artificial Sequence
  Description of Artificial Sequence: Synthetic oligonucleotide
  Antisense strand to SEQ ID NO: 2414430
aauucucuacggagauaug

SEQ ID NO: 2414432 - RNA, 19 nt, Artificial Sequence
  Description of Artificial Sequence: Synthetic oligonucleotide
  Sense strand starting at position 295 of SEQ ID NO: 1886506
cguagagaauuugaagaau

SEQ ID NO: 2414433 - RNA, 19 nt, Artificial Sequence
  Description of Artificial Sequence: Synthetic oligonucleotide
  Antisense strand to SEQ ID NO: 2414432
auucuucaaauucucuacg

SEQ ID NO: 2414434 - RNA, 19 nt, Artificial Sequence
  Description of Artificial Sequence: Synthetic oligonucleotide
  Sense strand starting at position 307 of SEQ ID NO: 1886506
gaagaauauugagaaguau

SEQ ID NO: 2414435 - RNA, 19 nt, Artificial Sequence
  Description of Artificial Sequence: Synthetic oligonucleotide
  Antisense strand to SEQ ID NO: 2414434
auacuucucaauauucuuc

SEQ ID NO: 2414436 - RNA, 19 nt, Artificial Sequence
  Description of Artificial Sequence: Synthetic oligonucleotide
  Sense strand starting at position 342 of SEQ ID NO: 1886506
accugagcuugacuuugaa

SEQ ID NO: 2414437 - RNA, 19 nt, Artificial Sequence
  Description of Artificial Sequence: Synthetic oligonucleotide
  Antisense strand to SEQ ID NO: 2414436
uucaaagucaagcucaggu

SEQ ID NO: 2414438 - RNA, 19 nt, Artificial Sequence
  Description of Artificial Sequence: Synthetic oligonucleotide
  Sense strand starting at position 345 of SEQ ID NO: 1886506
ugagcuugacuuugaagaa

SEQ ID NO: 2414439 - RNA, 19 nt, Artificial Sequence
  Description of Artificial Sequence: Synthetic oligonucleotide
  Antisense strand to SEQ ID NO: 2414438
uucuucaaagucaagcuca

SEQ ID NO: 2414440 - RNA, 19 nt, Artificial Sequence
  Description of Artificial Sequence: Synthetic oligonucleotide
  Sense strand starting at position 440 of SEQ ID NO: 1886506
agguguuugcgguugcuca

SEQ ID NO: 2414441 - RNA, 19 nt, Artificial Sequence
  Description of Artificial Sequence: Synthetic oligonucleotide
  Antisense strand to SEQ ID NO: 2414440
ugagcaaccgcaaacaccu

SEQ ID NO: 2414442 - RNA, 19 nt, Artificial Sequence
  Description of Artificial Sequence: Synthetic oligonucleotide
  Sense strand starting at position 683 of SEQ ID NO: 1886506
acugcaucacgauguacaa

SEQ ID NO: 2414443 - RNA, 19 nt, Artificial Sequence
  Description of Artificial Sequence: Synthetic oligonucleotide
  Antisense strand to SEQ ID NO: 2414442
uuguacaucgugaugcagu

SEQ ID NO: 2414444 - RNA, 19 nt, Artificial Sequence
  Description of Artificial Sequence: Synthetic oligonucleotide
  Sense strand starting at position 727 of SEQ ID NO: 1886506
gugacuucugcacaccaga

SEQ ID NO: 2414445 - RNA, 19 nt, Artificial Sequence
  Description of Artificial Sequence: Synthetic oligonucleotide
  Antisense strand to SEQ ID NO: 2414444
ucuggugugcagaagucac

SEQ ID NO: 2414446 - RNA, 19 nt, Artificial Sequence
  Description of Artificial Sequence: Synthetic oligonucleotide
  Sense strand starting at position 740 of SEQ ID NO: 1886506
accagacugagguguaaau

SEQ ID NO: 2414447 - RNA, 19 nt, Artificial Sequence
  Description of Artificial Sequence: Synthetic oligonucleotide
  Antisense strand to SEQ ID NO: 2414446
auuuacaccucagucuggu

SEQ ID NO: 2414448 - RNA, 19 nt, Artificial Sequence
  Description of Artificial Sequence: Synthetic oligonucleotide
  Sense strand starting at position 753 of SEQ ID NO: 1886506
guaaauaagugaccagaug

SEQ ID NO: 2414449 - RNA, 19 nt, Artificial Sequence
  Description of Artificial Sequence: Synthetic oligonucleotide
  Antisense strand to SEQ ID NO: 2414448
caucuggucacuuauuuac

SEQ ID NO: 2414450 - RNA, 19 nt, Artificial Sequence
  Description of Artificial Sequence: Synthetic oligonucleotide
  Sense strand starting at position 831 of SEQ ID NO: 1886506
ggagauaauuaaguuguua

SEQ ID NO: 2414451 - RNA, 19 nt, Artificial Sequence
  Description of Artificial Sequence: Synthetic oligonucleotide
  Antisense strand to SEQ ID NO: 2414450
uaacaacuuaauuaucucc

SEQ ID NO: 2414452 - RNA, 19 nt, Artificial Sequence
  Description of Artificial Sequence: Synthetic oligonucleotide
  Sense strand starting at position 1107 of SEQ ID NO: 1886506
gugggaacauugucucuga

SEQ ID NO: 2414453 - RNA, 19 nt, Artificial Sequence
  Description of Artificial Sequence: Synthetic oligonucleotide
  Antisense strand to SEQ ID NO: 2414452
ucagagacaauguucccac

SEQ ID NO: 2414454 - RNA, 19 nt, Artificial Sequence
  Description of Artificial Sequence: Synthetic oligonucleotide
  Sense strand starting at position 1108 of SEQ ID NO: 1886506
ugggaacauugucucugau

SEQ ID NO: 2414455 - RNA, 19 nt, Artificial Sequence
  Description of Artificial Sequence: Synthetic oligonucleotide
  Antisense strand to SEQ ID NO: 2414454
aucagagacaauguuccca

SEQ ID NO: 2414456 - RNA, 19 nt, Artificial Sequence
  Description of Artificial Sequence: Synthetic oligonucleotide
  Sense strand starting at position 1110 of SEQ ID NO: 1886506
ggaacauugucucugauug

SEQ ID NO: 2414457 - RNA, 19 nt, Artificial Sequence
  Description of Artificial Sequence: Synthetic oligonucleotide
  Antisense strand to SEQ ID NO: 2414456
caaucagagacaauguucc

SEQ ID NO: 2414458 - RNA, 19 nt, Artificial Sequence
  Description of Artificial Sequence: Synthetic oligonucleotide
  Sense strand starting at position 1111 of SEQ ID NO: 1886506
gaacauugucucugauuga

SEQ ID NO: 2414459 - RNA, 19 nt, Artificial Sequence
  Description of Artificial Sequence: Synthetic oligonucleotide
  Antisense strand to SEQ ID NO: 2414458
ucaaucagagacaauguuc

SEQ ID NO: 2414460 - RNA, 19 nt, Artificial Sequence
  Description of Artificial Sequence: Synthetic oligonucleotide
  Sense strand starting at position 1114 of SEQ ID NO: 1886506
cauugucucugauugacag

SEQ ID NO: 2414461 - RNA, 19 nt, Artificial Sequence
  Description of Artificial Sequence: Synthetic oligonucleotide
  Antisense strand to SEQ ID NO: 2414460
cugucaaucagagacaaug

SEQ ID NO: 2414462 - RNA, 19 nt, Artificial Sequence
  Description of Artificial Sequence: Synthetic oligonucleotide
  Sense strand starting at position 1115 of SEQ ID NO: 1886506
auugucucugauugacagu

SEQ ID NO: 2414463 - RNA, 19 nt, Artificial Sequence
  Description of Artificial Sequence: Synthetic oligonucleotide
  Antisense strand to SEQ ID NO: 2414462
acugucaaucagagacaau

SEQ ID NO: 2414464 - RNA, 19 nt, Artificial Sequence
  Description of Artificial Sequence: Synthetic oligonucleotide
  Sense strand starting at position 1130 of SEQ ID NO: 1886506
cagugucucuaguuggaca

SEQ ID NO: 2414465 - RNA, 19 nt, Artificial Sequence
  Description of Artificial Sequence: Synthetic oligonucleotide
  Antisense strand to SEQ ID NO: 2414464
uguccaacuagagacacug

SEQ ID NO: 2414466 - RNA, 19 nt, Artificial Sequence
  Description of Artificial Sequence: Synthetic oligonucleotide
  Sense strand starting at position 1131 of SEQ ID NO: 1886506
agugucucuaguuggacau

SEQ ID NO: 2414467 - RNA, 19 nt, Artificial Sequence
  Description of Artificial Sequence: Synthetic oligonucleotide
  Antisense strand to SEQ ID NO: 2414466
auguccaacuagagacacu

SEQ ID NO: 2414468 - RNA, 19 nt, Artificial Sequence
  Description of Artificial Sequence: Synthetic oligonucleotide
  Sense strand starting at position 1284 of SEQ ID NO: 1886506
agauguagcaagugaaaca

SEQ ID NO: 2414469 - RNA, 19 nt, Artificial Sequence
  Description of Artificial Sequence: Synthetic oligonucleotide
  Antisense strand to SEQ ID NO: 2414468
uguuucacuugcuacaucu

SEQ ID NO: 2414470 - RNA, 19 nt, Artificial Sequence
  Description of Artificial Sequence: Synthetic oligonucleotide
  Sense strand starting at position 1355 of SEQ ID NO: 1886506
ggaagagagugguuuguag

SEQ ID NO: 2414471 - RNA, 19 nt, Artificial Sequence
  Description of Artificial Sequence: Synthetic oligonucleotide
  Antisense strand to SEQ ID NO: 2414470
cuacaaaccacucucuucc

SEQ ID NO: 2414472 - RNA, 19 nt, Artificial Sequence
  Description of Artificial Sequence: Synthetic oligonucleotide
  Sense strand starting at position 1357 of SEQ ID NO: 1886506
aagagagugguuuguaggu

SEQ ID NO: 2414473 - RNA, 19 nt, Artificial Sequence
  Description of Artificial Sequence: Synthetic oligonucleotide
  Antisense strand to SEQ ID NO: 2414472
accuacaaaccacucucuu

SEQ ID NO: 2414474 - RNA, 19 nt, Artificial Sequence
  Description of Artificial Sequence: Synthetic oligonucleotide
  Sense strand starting at position 1416 of SEQ ID NO: 1886506
uguuccauguuucucacaa

SEQ ID NO: 2414475 - RNA, 19 nt, Artificial Sequence
  Description of Artificial Sequence: Synthetic oligonucleotide
  Antisense strand to SEQ ID NO: 2414474
uugugagaaacauggaaca

SEQ ID NO: 2414476 - RNA, 19 nt, Artificial Sequence
  Description of Artificial Sequence: Synthetic oligonucleotide
  Sense strand starting at position 1417 of SEQ ID NO: 1886506
guuccauguuucucacaag

SEQ ID NO: 2414477 - RNA, 19 nt, Artificial Sequence
  Description of Artificial Sequence: Synthetic oligonucleotide
  Antisense strand to SEQ ID NO: 2414476
cuugugagaaacauggaac

SEQ ID NO: 2414478 - RNA, 19 nt, Artificial Sequence
  Description of Artificial Sequence: Synthetic oligonucleotide
  Sense strand starting at position 1993 of SEQ ID NO: 1886506
cuuugugaugcaggaggaa

SEQ ID NO: 2414479 - RNA, 19 nt, Artificial Sequence
  Description of Artificial Sequence: Synthetic oligonucleotide
  Antisense strand to SEQ ID NO: 2414478
uuccuccugcaucacaaag

SEQ ID NO: 2414480 - RNA, 19 nt, Artificial Sequence
  Description of Artificial Sequence: Synthetic oligonucleotide
  Sense strand starting at position 2082 of SEQ ID NO: 1886506
gucauaugugaggagcaaa

SEQ ID NO: 2414481 - RNA, 19 nt, Artificial Sequence
  Description of Artificial Sequence: Synthetic oligonucleotide
  Antisense strand to SEQ ID NO: 2414480
uuugcuccucacauaugac

SEQ ID NO: 2414482 - RNA, 19 nt, Artificial Sequence
  Description of Artificial Sequence: Synthetic oligonucleotide
  Sense strand starting at position 2290 of SEQ ID NO: 1886506
ugaccuuuguccuuguuaa

SEQ ID NO: 2414483 - RNA, 19 nt, Artificial Sequence
  Description of Artificial Sequence: Synthetic oligonucleotide
  Antisense strand to SEQ ID NO: 2414482
uuaacaaggacaaagguca

SEQ ID NO: 2414484 - RNA, 19 nt, Artificial Sequence
  Description of Artificial Sequence: Synthetic oligonucleotide
  Sense strand starting at position 2342 of SEQ ID NO: 1886506
gagcgugagaguugagaau

SEQ ID NO: 2414485 - RNA, 19 nt, Artificial Sequence
  Description of Artificial Sequence: Synthetic oligonucleotide
  Antisense strand to SEQ ID NO: 2414484
auucucaacucucacgcuc

SEQ ID NO: 2414486 - RNA, 19 nt, Artificial Sequence
  Description of Artificial Sequence: Synthetic oligonucleotide
  Sense strand starting at position 2420 of SEQ ID NO: 1886506
acgacugagcgugagaguu

SEQ ID NO: 2414487 - RNA, 19 nt, Artificial Sequence
  Description of Artificial Sequence: Synthetic oligonucleotide
  Antisense strand to SEQ ID NO: 2414486
aacucucacgcucagucgu

SEQ ID NO: 2414488 - RNA, 19 nt, Artificial Sequence
  Description of Artificial Sequence: Synthetic oligonucleotide
  Sense strand starting at position 2630 of SEQ ID NO: 1886506
acgacugagccugagaguu

SEQ ID NO: 2414489 - RNA, 19 nt, Artificial Sequence
  Description of Artificial Sequence: Synthetic oligonucleotide
  Antisense strand to SEQ ID NO: 2414488
aacucucaggcucagucgu

SEQ ID NO: 2414490 - RNA, 19 nt, Artificial Sequence
  Description of Artificial Sequence: Synthetic oligonucleotide
  Sense strand starting at position 2636 of SEQ ID NO: 1886506
gagccugagaguugagagu

SEQ ID NO: 2414491 - RNA, 19 nt, Artificial Sequence
  Description of Artificial Sequence: Synthetic oligonucleotide
  Antisense strand to SEQ ID NO: 2414490
acucucaacucucaggcuc

SEQ ID NO: 2414492 - RNA, 19 nt, Artificial Sequence
  Description of Artificial Sequence: Synthetic oligonucleotide
  Sense strand starting at position 2714 of SEQ ID NO: 1886506
acgucugagccugagaguu

SEQ ID NO: 2414493 - RNA, 19 nt, Artificial Sequence
  Description of Artificial Sequence: Synthetic oligonucleotide
  Antisense strand to SEQ ID NO: 2414492
aacucucaggcucagacgu

SEQ ID NO: 2414494 - RNA, 19 nt, Artificial Sequence
  Description of Artificial Sequence: Synthetic oligonucleotide
  Sense strand starting at position 3031 of SEQ ID NO: 1886506
guaccugcuguguacuaga

SEQ ID NO: 2414495 - RNA, 19 nt, Artificial Sequence
  Description of Artificial Sequence: Synthetic oligonucleotide
  Antisense strand to SEQ ID NO: 2414494
ucuaguacacagcagguac

SEQ ID NO: 2414496 - RNA, 19 nt, Artificial Sequence
  Description of Artificial Sequence: Synthetic oligonucleotide
  Sense strand starting at position 3923 of SEQ ID NO: 1886506
gauguugggcuguacaaau

SEQ ID NO: 2414497 - RNA, 19 nt, Artificial Sequence
  Description of Artificial Sequence: Synthetic oligonucleotide
  Antisense strand to SEQ ID NO: 2414496
auuuguacagcccaacauc

SEQ ID NO: 2414498 - RNA, 19 nt, Artificial Sequence
  Description of Artificial Sequence: Synthetic oligonucleotide
  Sense strand starting at position 3938 of SEQ ID NO: 1886506
aaaucauugugggcucaca

SEQ ID NO: 2414499 - RNA, 19 nt, Artificial Sequence
  Description of Artificial Sequence: Synthetic oligonucleotide
  Antisense strand to SEQ ID NO: 2414498
ugugagcccacaaugauuu

SEQ ID NO: 2414500 - RNA, 19 nt, Artificial Sequence
  Description of Artificial Sequence: Synthetic oligonucleotide
  Sense strand starting at position 1 of SEQ ID NO: 1886507
gauggacaaccguguuaag

SEQ ID NO: 2414501 - RNA, 19 nt, Artificial Sequence
  Description of Artificial Sequence: Synthetic oligonucleotide
  Antisense strand to SEQ ID NO: 2414500
cuuaacacgguuguccauc

SEQ ID NO: 2414502 - RNA, 19 nt, Artificial Sequence
  Description of Artificial Sequence: Synthetic oligonucleotide
  Sense strand starting at position 412 of SEQ ID NO: 1886507
uuccaaguuuaggaaauuu

SEQ ID NO: 2414503 - RNA, 19 nt, Artificial Sequence
  Description of Artificial Sequence: Synthetic oligonucleotide
  Antisense strand to SEQ ID NO: 2414502
aaauuuccuaaacuuggaa

SEQ ID NO: 2414504 - RNA, 19 nt, Artificial Sequence
  Description of Artificial Sequence: Synthetic oligonucleotide
  Sense strand starting at position 675 of SEQ ID NO: 1886507
aggagaaguuucuuuagau

SEQ ID NO: 2414505 - RNA, 19 nt, Artificial Sequence
  Description of Artificial Sequence: Synthetic oligonucleotide
  Antisense strand to SEQ ID NO: 2414504
aucuaaagaaacuucuccu

SEQ ID NO: 2414506 - RNA, 19 nt, Artificial Sequence
  Description of Artificial Sequence: Synthetic oligonucleotide
  Sense strand starting at position 676 of SEQ ID NO: 1886507
ggagaaguuucuuuagaug

SEQ ID NO: 2414507 - RNA, 19 nt, Artificial Sequence
  Description of Artificial Sequence: Synthetic oligonucleotide
  Antisense strand to SEQ ID NO: 2414506
caucuaaagaaacuucucc

SEQ ID NO: 2414508 - RNA, 19 nt, Artificial Sequence
  Description of Artificial Sequence: Synthetic oligonucleotide
  Sense strand starting at position 1215 of SEQ ID NO: 1886507
cuagaauugugacuguauu

SEQ ID NO: 2414509 - RNA, 19 nt, Artificial Sequence
  Description of Artificial Sequence: Synthetic oligonucleotide
  Antisense strand to SEQ ID NO: 2414508
aauacagucacaauucuag

SEQ ID NO: 2414510 - RNA, 19 nt, Artificial Sequence
  Description of Artificial Sequence: Synthetic oligonucleotide
  Sense strand starting at position 1216 of SEQ ID NO: 1886507
uagaauugugacuguauuc

SEQ ID NO: 2414511 - RNA, 19 nt, Artificial Sequence
  Description of Artificial Sequence: Synthetic oligonucleotide
  Antisense strand to SEQ ID NO: 2414510
gaauacagucacaauucua

SEQ ID NO: 2414512 - RNA, 19 nt, Artificial Sequence
  Description of Artificial Sequence: Synthetic oligonucleotide
  Sense strand starting at position 1428 of SEQ ID NO: 1886507
agcuucucccuccagaaga

SEQ ID NO: 2414513 - RNA, 19 nt, Artificial Sequence
  Description of Artificial Sequence: Synthetic oligonucleotide
  Antisense strand to SEQ ID NO: 2414512
ucuucuggagggagaagcu

SEQ ID NO: 2414514 - RNA, 19 nt, Artificial Sequence
  Description of Artificial Sequence: Synthetic oligonucleotide
  Sense strand starting at position 1473 of SEQ ID NO: 1886507
ggucccuuccaugggaaca

SEQ ID NO: 2414515 - RNA, 19 nt, Artificial Sequence
  Description of Artificial Sequence: Synthetic oligonucleotide
  Antisense strand to SEQ ID NO: 2414514
uguucccauggaagggacc

SEQ ID NO: 2414516 - RNA, 19 nt, Artificial Sequence
  Description of Artificial Sequence: Synthetic oligonucleotide
  Sense strand starting at position 1903 of SEQ ID NO: 1886507
accauuucuugaugggaag

SEQ ID NO: 2414517 - RNA, 19 nt, Artificial Sequence
  Description of Artificial Sequence: Synthetic oligonucleotide
  Antisense strand to SEQ ID NO: 2414516
cuucccaucaagaaauggu

SEQ ID NO: 2414518 - RNA, 19 nt, Artificial Sequence
  Description of Artificial Sequence: Synthetic oligonucleotide
  Sense strand starting at position 2084 of SEQ ID NO: 1886507
uguaaaugguuccucuaaa

SEQ ID NO: 2414519 - RNA, 19 nt, Artificial Sequence
  Description of Artificial Sequence: Synthetic oligonucleotide
  Antisense strand to SEQ ID NO: 2414518
uuuagaggaaccauuuaca

SEQ ID NO: 2414520 - RNA, 19 nt, Artificial Sequence
  Description of Artificial Sequence: Synthetic oligonucleotide
  Sense strand starting at position 2238 of SEQ ID NO: 1886507
uuuagaucccaguaguucu

SEQ ID NO: 2414521 - RNA, 19 nt, Artificial Sequence
  Description of Artificial Sequence: Synthetic oligonucleotide
  Antisense strand to SEQ ID NO: 2414520
agaacuacugggaucuaaa

SEQ ID NO: 2414522 - RNA, 19 nt, Artificial Sequence
  Description of Artificial Sequence: Synthetic oligonucleotide
  Sense strand starting at position 2369 of SEQ ID NO: 1886507
cccucugagcgaugacaga

SEQ ID NO: 2414523 - RNA, 19 nt, Artificial Sequence
  Description of Artificial Sequence: Synthetic oligonucleotide
  Antisense strand to SEQ ID NO: 2414522
ucugucaucgcucagaggg

SEQ ID NO: 2414524 - RNA, 19 nt, Artificial Sequence
  Description of Artificial Sequence: Synthetic oligonucleotide
  Sense strand starting at position 2387 of SEQ ID NO: 1886507
aagugauaccugcaaacug

SEQ ID NO: 2414525 - RNA, 19 nt, Artificial Sequence
  Description of Artificial Sequence: Synthetic oligonucleotide
  Antisense strand to SEQ ID NO: 2414524
caguuugcagguaucacuu

SEQ ID NO: 2414526 - RNA, 19 nt, Artificial Sequence
  Description of Artificial Sequence: Synthetic oligonucleotide
  Sense strand starting at position 2642 of SEQ ID NO: 1886507
gugugcauuuaugacauuu

SEQ ID NO: 2414527 - RNA, 19 nt, Artificial Sequence
  Description of Artificial Sequence: Synthetic oligonucleotide
  Antisense strand to SEQ ID NO: 2414526
aaaugucauaaaugcacac

SEQ ID NO: 2414528 - RNA, 19 nt, Artificial Sequence
  Description of Artificial Sequence: Synthetic oligonucleotide
  Sense strand starting at position 2644 of SEQ ID NO: 1886507
gugcauuuaugacauuuac

SEQ ID NO: 2414529 - RNA, 19 nt, Artificial Sequence
  Description of Artificial Sequence: Synthetic oligonucleotide
  Antisense strand to SEQ ID NO: 2414528
guaaaugucauaaaugcac

SEQ ID NO: 2414530 - RNA, 19 nt, Artificial Sequence
  Description of Artificial Sequence: Synthetic oligonucleotide
  Sense strand starting at position 2716 of SEQ ID NO: 1886507
cagaguccucacuacgaaa

SEQ ID NO: 2414531 - RNA, 19 nt, Artificial Sequence
  Description of Artificial Sequence: Synthetic oligonucleotide
  Antisense strand to SEQ ID NO: 2414530
uuucguagugaggacucug

SEQ ID NO: 2414532 - RNA, 19 nt, Artificial Sequence
  Description of Artificial Sequence: Synthetic oligonucleotide
  Sense strand starting at position 2884 of SEQ ID NO: 1886507
gaguaucggcgcuagauuu

SEQ ID NO: 2414533 - RNA, 19 nt, Artificial Sequence
  Description of Artificial Sequence: Synthetic oligonucleotide
  Antisense strand to SEQ ID NO: 2414532
aaaucuagcgccgauacuc

SEQ ID NO: 2414534 - RNA, 19 nt, Artificial Sequence
  Description of Artificial Sequence: Synthetic oligonucleotide
  Sense strand starting at position 2947 of SEQ ID NO: 1886507
augcuaagcagugaugaaa

SEQ ID NO: 2414535 - RNA, 19 nt, Artificial Sequence
  Description of Artificial Sequence: Synthetic oligonucleotide
  Antisense strand to SEQ ID NO: 2414534
uuucaucacugcuuagcau

SEQ ID NO: 2414536 - RNA, 19 nt, Artificial Sequence
  Description of Artificial Sequence: Synthetic oligonucleotide
  Sense strand starting at position 2976 of SEQ ID NO: 1886507
augcaucucugaucacaga

SEQ ID NO: 2414537 - RNA, 19 nt, Artificial Sequence
  Description of Artificial Sequence: Synthetic oligonucleotide
  Antisense strand to SEQ ID NO: 2414536
ucugugaucagagaugcau

SEQ ID NO: 2414538 - RNA, 19 nt, Artificial Sequence
  Description of Artificial Sequence: Synthetic oligonucleotide
  Sense strand starting at position 2977 of SEQ ID NO: 1886507
ugcaucucugaucacagaa

SEQ ID NO: 2414539 - RNA, 19 nt, Artificial Sequence
  Description of Artificial Sequence: Synthetic oligonucleotide
  Antisense strand to SEQ ID NO: 2414538
uucugugaucagagaugca

SEQ ID NO: 2414540 - RNA, 19 nt, Artificial Sequence
  Description of Artificial Sequence: Synthetic oligonucleotide
  Sense strand starting at position 3018 of SEQ ID NO: 1886507
ucaggaggcaucugacuuu

SEQ ID NO: 2414541 - RNA, 19 nt, Artificial Sequence
  Description of Artificial Sequence: Synthetic oligonucleotide
  Antisense strand to SEQ ID NO: 2414540
aaagucagaugccuccuga

SEQ ID NO: 2414542 - RNA, 19 nt, Artificial Sequence
  Description of Artificial Sequence: Synthetic oligonucleotide
  Sense strand starting at position 3108 of SEQ ID NO: 1886507
cuaguugugccuguucuau

SEQ ID NO: 2414543 - RNA, 19 nt, Artificial Sequence
  Description of Artificial Sequence: Synthetic oligonucleotide
  Antisense strand to SEQ ID NO: 2414542
auagaacaggcacaacuag

SEQ ID NO: 2414544 - RNA, 19 nt, Artificial Sequence
  Description of Artificial Sequence: Synthetic oligonucleotide
  Sense strand starting at position 3183 of SEQ ID NO: 1886507
ccacacugucaugggaaga

SEQ ID NO: 2414545 - RNA, 19 nt, Artificial Sequence
  Description of Artificial Sequence: Synthetic oligonucleotide
  Antisense strand to SEQ ID NO: 2414544
ucuucccaugacagugugg

SEQ ID NO: 2414546 - RNA, 19 nt, Artificial Sequence
  Description of Artificial Sequence: Synthetic oligonucleotide
  Sense strand starting at position 3194 of SEQ ID NO: 1886507
ugggaagaguuucuaucag

SEQ ID NO: 2414547 - RNA, 19 nt, Artificial Sequence
  Description of Artificial Sequence: Synthetic oligonucleotide
  Antisense strand to SEQ ID NO: 2414546
cugauagaaacucuuccca

SEQ ID NO: 2414548 - RNA, 19 nt, Artificial Sequence
  Description of Artificial Sequence: Synthetic oligonucleotide
  Sense strand starting at position 3223 of SEQ ID NO: 1886507
ucuuaacaccaagaguguu

SEQ ID NO: 2414549 - RNA, 19 nt, Artificial Sequence
  Description of Artificial Sequence: Synthetic oligonucleotide
  Antisense strand to SEQ ID NO: 2414548
aacacucuugguguuaaga

SEQ ID NO: 2414550 - RNA, 19 nt, Artificial Sequence
  Description of Artificial Sequence: Synthetic oligonucleotide
  Sense strand starting at position 3229 of SEQ ID NO: 1886507
caccaagaguguuuauaug

SEQ ID NO: 2414551 - RNA, 19 nt, Artificial Sequence
  Description of Artificial Sequence: Synthetic oligonucleotide
  Antisense strand to SEQ ID NO: 2414550
cauauaaacacucuuggug

SEQ ID NO: 2414552 - RNA, 19 nt, Artificial Sequence
  Description of Artificial Sequence: Synthetic oligonucleotide
  Sense strand starting at position 3240 of SEQ ID NO: 1886507
uuuauaugugaucaugcau

SEQ ID NO: 2414553 - RNA, 19 nt, Artificial Sequence
  Description of Artificial Sequence: Synthetic oligonucleotide
  Antisense strand to SEQ ID NO: 2414552
augcaugaucacauauaaa

SEQ ID NO: 2414554 - RNA, 19 nt, Artificial Sequence
  Description of Artificial Sequence: Synthetic oligonucleotide
  Sense strand starting at position 3258 of SEQ ID NO: 1886507
uguuuauaugaagagcagu

SEQ ID NO: 2414555 - RNA, 19 nt, Artificial Sequence
  Description of Artificial Sequence: Synthetic oligonucleotide
  Antisense strand to SEQ ID NO: 2414554
acugcucuucauauaaaca

SEQ ID NO: 2414556 - RNA, 19 nt, Artificial Sequence
  Description of Artificial Sequence: Synthetic oligonucleotide
  Sense strand starting at position 3286 of SEQ ID NO: 1886507
guaugcacacuuuaaggaa

SEQ ID NO: 2414557 - RNA, 19 nt, Artificial Sequence
  Description of Artificial Sequence: Synthetic oligonucleotide
  Antisense strand to SEQ ID NO: 2414556
uuccuuaaagugugcauac

SEQ ID NO: 2414558 - RNA, 19 nt, Artificial Sequence
  Description of Artificial Sequence: Synthetic oligonucleotide
  Sense strand starting at position 3531 of SEQ ID NO: 1886507
uguagugagcuacaaucau

SEQ ID NO: 2414559 - RNA, 19 nt, Artificial Sequence
  Description of Artificial Sequence: Synthetic oligonucleotide
  Antisense strand to SEQ ID NO: 2414558
augauuguagcucacuaca

SEQ ID NO: 2414560 - RNA, 19 nt, Artificial Sequence
  Description of Artificial Sequence: Synthetic oligonucleotide
  Sense strand starting at position 3691 of SEQ ID NO: 1886507
acuccauuauagucacuga

SEQ ID NO: 2414561 - RNA, 19 nt, Artificial Sequence
  Description of Artificial Sequence: Synthetic oligonucleotide
  Antisense strand to SEQ ID NO: 2414560
ucagugacuauaauggagu

SEQ ID NO: 2414562 - RNA, 19 nt, Artificial Sequence
  Description of Artificial Sequence: Synthetic oligonucleotide
  Sense strand starting at position 3694 of SEQ ID NO: 1886507
ccauuauagucacugaaag

SEQ ID NO: 2414563 - RNA, 19 nt, Artificial Sequence
  Description of Artificial Sequence: Synthetic oligonucleotide
  Antisense strand to SEQ ID NO: 2414562
cuuucagugacuauaaugg

SEQ ID NO: 2414564 - RNA, 19 nt, Artificial Sequence
  Description of Artificial Sequence: Synthetic oligonucleotide
  Sense strand starting at position 3695 of SEQ ID NO: 1886507
cauuauagucacugaaagg

SEQ ID NO: 2414565 - RNA, 19 nt, Artificial Sequence
  Description of Artificial Sequence: Synthetic oligonucleotide
  Antisense strand to SEQ ID NO: 2414564
ccuuucagugacuauaaug

SEQ ID NO: 2414566 - RNA, 19 nt, Artificial Sequence
  Description of Artificial Sequence: Synthetic oligonucleotide
  Sense strand starting at position 3832 of SEQ ID NO: 1886507
ccaucuauagaugagugua

SEQ ID NO: 2414567 - RNA, 19 nt, Artificial Sequence
  Description of Artificial Sequence: Synthetic oligonucleotide
  Antisense strand to SEQ ID NO: 2414566
uacacucaucuauagaugg

SEQ ID NO: 2414568 - RNA, 19 nt, Artificial Sequence
  Description of Artificial Sequence: Synthetic oligonucleotide
  Sense strand starting at position 3909 of SEQ ID NO: 1886507
ugauuaagaugcccagaga

SEQ ID NO: 2414569 - RNA, 19 nt, Artificial Sequence
  Description of Artificial Sequence: Synthetic oligonucleotide
  Antisense strand to SEQ ID NO: 2414568
ucucugggcaucuuaauca

SEQ ID NO: 2414570 - RNA, 19 nt, Artificial Sequence
  Description of Artificial Sequence: Synthetic oligonucleotide
  Sense strand starting at position 3950 of SEQ ID NO: 1886507
auguuauacuuggucauaa

SEQ ID NO: 2414571 - RNA, 19 nt, Artificial Sequence
  Description of Artificial Sequence: Synthetic oligonucleotide
  Antisense strand to SEQ ID NO: 2414570
uuaugaccaaguauaacau

SEQ ID NO: 2414572 - RNA, 19 nt, Artificial Sequence
  Description of Artificial Sequence: Synthetic oligonucleotide
  Sense strand starting at position 3951 of SEQ ID NO: 1886507
uguuauacuuggucauaau

SEQ ID NO: 2414573 - RNA, 19 nt, Artificial Sequence
  Description of Artificial Sequence: Synthetic oligonucleotide
  Antisense strand to SEQ ID NO: 2414572
auuaugaccaaguauaaca

SEQ ID NO: 2414574 - RNA, 19 nt, Artificial Sequence
  Description of Artificial Sequence: Synthetic oligonucleotide
  Sense strand starting at position 3952 of SEQ ID NO: 1886507
guuauacuuggucauaauc

SEQ ID NO: 2414575 - RNA, 19 nt, Artificial Sequence
  Description of Artificial Sequence: Synthetic oligonucleotide
  Antisense strand to SEQ ID NO: 2414574
gauuaugaccaaguauaac

SEQ ID NO: 2414576 - RNA, 19 nt, Artificial Sequence
  Description of Artificial Sequence: Synthetic oligonucleotide
  Sense strand starting at position 3960 of SEQ ID NO: 1886507
uggucauaaucaguaguga

SEQ ID NO: 2414577 - RNA, 19 nt, Artificial Sequence
  Description of Artificial Sequence: Synthetic oligonucleotide
  Antisense strand to SEQ ID NO: 2414576
ucacuacugauuaugacca

SEQ ID NO: 2414578 - RNA, 19 nt, Artificial Sequence
  Description of Artificial Sequence: Synthetic oligonucleotide
  Sense strand starting at position 3961 of SEQ ID NO: 1886507
ggucauaaucaguagugac

SEQ ID NO: 2414579 - RNA, 19 nt, Artificial Sequence
  Description of Artificial Sequence: Synthetic oligonucleotide
  Antisense strand to SEQ ID NO: 2414578
gucacuacugauuaugacc

SEQ ID NO: 2414580 - RNA, 19 nt, Artificial Sequence
  Description of Artificial Sequence: Synthetic oligonucleotide
  Sense strand starting at position 58 of SEQ ID NO: 1886508
gaaagacauugucuccuag

SEQ ID NO: 2414581 - RNA, 19 nt, Artificial Sequence
  Description of Artificial Sequence: Synthetic oligonucleotide
  Antisense strand to SEQ ID NO: 2414580
cuaggagacaaugucuuuc

SEQ ID NO: 2414582 - RNA, 19 nt, Artificial Sequence
  Description of Artificial Sequence: Synthetic oligonucleotide
  Sense strand starting at position 133 of SEQ ID NO: 1886508
ugugcuagaccuggaucua

SEQ ID NO: 2414583 - RNA, 19 nt, Artificial Sequence
  Description of Artificial Sequence: Synthetic oligonucleotide
  Antisense strand to SEQ ID NO: 2414582
uagauccaggucuagcaca

SEQ ID NO: 2414584 - RNA, 19 nt, Artificial Sequence
  Description of Artificial Sequence: Synthetic oligonucleotide
  Sense strand starting at position 239 of SEQ ID NO: 1886508
gugaacucauccucacaga

SEQ ID NO: 2414585 - RNA, 19 nt, Artificial Sequence
  Description of Artificial Sequence: Synthetic oligonucleotide
  Antisense strand to SEQ ID NO: 2414584
ucugugaggaugaguucac

SEQ ID NO: 2414586 - RNA, 19 nt, Artificial Sequence
  Description of Artificial Sequence: Synthetic oligonucleotide
  Sense strand starting at position 307 of SEQ ID NO: 1886508
uccugacacuaaguuguua

SEQ ID NO: 2414587 - RNA, 19 nt, Artificial Sequence
  Description of Artificial Sequence: Synthetic oligonucleotide
  Antisense strand to SEQ ID NO: 2414586
uaacaacuuagugucagga

SEQ ID NO: 2414588 - RNA, 19 nt, Artificial Sequence
  Description of Artificial Sequence: Synthetic oligonucleotide
  Sense strand starting at position 424 of SEQ ID NO: 1886508
ccuugauggcaagagucau

SEQ ID NO: 2414589 - RNA, 19 nt, Artificial Sequence
  Description of Artificial Sequence: Synthetic oligonucleotide
  Antisense strand to SEQ ID NO: 2414588
augacucuugccaucaagg

SEQ ID NO: 2414590 - RNA, 19 nt, Artificial Sequence
  Description of Artificial Sequence: Synthetic oligonucleotide
  Sense strand starting at position 464 of SEQ ID NO: 1886508
ucaugcuagcaauagcauu

SEQ ID NO: 2414591 - RNA, 19 nt, Artificial Sequence
  Description of Artificial Sequence: Synthetic oligonucleotide
  Antisense strand to SEQ ID NO: 2414590
aaugcuauugcuagcauga

SEQ ID NO: 2414592 - RNA, 19 nt, Artificial Sequence
  Description of Artificial Sequence: Synthetic oligonucleotide
  Sense strand starting at position 674 of SEQ ID NO: 1886508
acuggucuuagauaggcaa

SEQ ID NO: 2414593 - RNA, 19 nt, Artificial Sequence
  Description of Artificial Sequence: Synthetic oligonucleotide
  Antisense strand to SEQ ID NO: 2414592
uugccuaucuaagaccagu

SEQ ID NO: 2414594 - RNA, 19 nt, Artificial Sequence
  Description of Artificial Sequence: Synthetic oligonucleotide
  Sense strand starting at position 676 of SEQ ID NO: 1886508
uggucuuagauaggcaaga

SEQ ID NO: 2414595 - RNA, 19 nt, Artificial Sequence
  Description of Artificial Sequence: Synthetic oligonucleotide
  Antisense strand to SEQ ID NO: 2414594
ucuugccuaucuaagacca

SEQ ID NO: 2414596 - RNA, 19 nt, Artificial Sequence
  Description of Artificial Sequence: Synthetic oligonucleotide
  Sense strand starting at position 677 of SEQ ID NO: 1886508
ggucuuagauaggcaagaa

SEQ ID NO: 2414597 - RNA, 19 nt, Artificial Sequence
  Description of Artificial Sequence: Synthetic oligonucleotide
  Antisense strand to SEQ ID NO: 2414596
uucuugccuaucuaagacc

SEQ ID NO: 2414598 - RNA, 19 nt, Artificial Sequence
  Description of Artificial Sequence: Synthetic oligonucleotide
  Sense strand starting at position 737 of SEQ ID NO: 1886508
cuaaaugggcugcaacauu

SEQ ID NO: 2414599 - RNA, 19 nt, Artificial Sequence
  Description of Artificial Sequence: Synthetic oligonucleotide
  Antisense strand to SEQ ID NO: 2414598
aauguugcagcccauuuag

SEQ ID NO: 2414600 - RNA, 19 nt, Artificial Sequence
  Description of Artificial Sequence: Synthetic oligonucleotide
  Sense strand starting at position 771 of SEQ ID NO: 1886508
guugcuguuagagacaaau

SEQ ID NO: 2414601 - RNA, 19 nt, Artificial Sequence
  Description of Artificial Sequence: Synthetic oligonucleotide
  Antisense strand to SEQ ID NO: 2414600
auuugucucuaacagcaac

SEQ ID NO: 2414602 - RNA, 19 nt, Artificial Sequence
  Description of Artificial Sequence: Synthetic oligonucleotide
  Sense strand starting at position 816 of SEQ ID NO: 1886508
auaugcauugcuuauguga

SEQ ID NO: 2414603 - RNA, 19 nt, Artificial Sequence
  Description of Artificial Sequence: Synthetic oligonucleotide
  Antisense strand to SEQ ID NO: 2414602
ucacauaagcaaugcauau

SEQ ID NO: 2414604 - RNA, 19 nt, Artificial Sequence
  Description of Artificial Sequence: Synthetic oligonucleotide
  Sense strand starting at position 930 of SEQ ID NO: 1886508
auaaguuucuuaccaguca

SEQ ID NO: 2414605 - RNA, 19 nt, Artificial Sequence
  Description of Artificial Sequence: Synthetic oligonucleotide
  Antisense strand to SEQ ID NO: 2414604
ugacugguaagaaacuuau

SEQ ID NO: 2414606 - RNA, 19 nt, Artificial Sequence
  Description of Artificial Sequence: Synthetic oligonucleotide
  Sense strand starting at position 937 of SEQ ID NO: 1886508
ucuuaccagucaguauuaa

SEQ ID NO: 2414607 - RNA, 19 nt, Artificial Sequence
  Description of Artificial Sequence: Synthetic oligonucleotide
  Antisense strand to SEQ ID NO: 2414606
uuaauacugacugguaaga

SEQ ID NO: 2414608 - RNA, 19 nt, Artificial Sequence
  Description of Artificial Sequence: Synthetic oligonucleotide
  Sense strand starting at position 938 of SEQ ID NO: 1886508
cuuaccagucaguauuaaa

SEQ ID NO: 2414609 - RNA, 19 nt, Artificial Sequence
  Description of Artificial Sequence: Synthetic oligonucleotide
  Antisense strand to SEQ ID NO: 2414608
uuuaauacugacugguaag

SEQ ID NO: 2414610 - RNA, 19 nt, Artificial Sequence
  Description of Artificial Sequence: Synthetic oligonucleotide
  Sense strand starting at position 1056 of SEQ ID NO: 1886508
ugaauugaauuacaagaca

SEQ ID NO: 2414611 - RNA, 19 nt, Artificial Sequence
  Description of Artificial Sequence: Synthetic oligonucleotide
  Antisense strand to SEQ ID NO: 2414610
ugucuuguaauucaauuca

SEQ ID NO: 2414612 - RNA, 19 nt, Artificial Sequence
  Description of Artificial Sequence: Synthetic oligonucleotide
  Sense strand starting at position 1076 of SEQ ID NO: 1886508
ccugauacuuaggcacauu

SEQ ID NO: 2414613 - RNA, 19 nt, Artificial Sequence
  Description of Artificial Sequence: Synthetic oligonucleotide
  Antisense strand to SEQ ID NO: 2414612
aaugugccuaaguaucagg

SEQ ID NO: 2414614 - RNA, 19 nt, Artificial Sequence
  Description of Artificial Sequence: Synthetic oligonucleotide
  Sense strand starting at position 1190 of SEQ ID NO: 1886508
gagucaauauaucuggaua

SEQ ID NO: 2414615 - RNA, 19 nt, Artificial Sequence
  Description of Artificial Sequence: Synthetic oligonucleotide
  Antisense strand to SEQ ID NO: 2414614
uauccagauauauugacuc

SEQ ID NO: 2414616 - RNA, 19 nt, Artificial Sequence
  Description of Artificial Sequence: Synthetic oligonucleotide
  Sense strand starting at position 1274 of SEQ ID NO: 1886508
acaagaaagguauguguau

SEQ ID NO: 2414617 - RNA, 19 nt, Artificial Sequence
  Description of Artificial Sequence: Synthetic oligonucleotide
  Antisense strand to SEQ ID NO: 2414616
auacacauaccuuucuugu

SEQ ID NO: 2414618 - RNA, 19 nt, Artificial Sequence
  Description of Artificial Sequence: Synthetic oligonucleotide
  Sense strand starting at position 1275 of SEQ ID NO: 1886508
caagaaagguauguguaua

SEQ ID NO: 2414619 - RNA, 19 nt, Artificial Sequence
  Description of Artificial Sequence: Synthetic oligonucleotide
  Antisense strand to SEQ ID NO: 2414618
uauacacauaccuuucuug

SEQ ID NO: 2414620 - RNA, 19 nt, Artificial Sequence
  Description of Artificial Sequence: Synthetic oligonucleotide
  Sense strand starting at position 1520 of SEQ ID NO: 1886508
agugacaugcuauauguaa

SEQ ID NO: 2414621 - RNA, 19 nt, Artificial Sequence
  Description of Artificial Sequence: Synthetic oligonucleotide
  Antisense strand to SEQ ID NO: 2414620
uuacauauagcaugucacu

SEQ ID NO: 2414622 - RNA, 19 nt, Artificial Sequence
  Description of Artificial Sequence: Synthetic oligonucleotide
  Sense strand starting at position 1559 of SEQ ID NO: 1886508
acagcugucuuccuagaag

SEQ ID NO: 2414623 - RNA, 19 nt, Artificial Sequence
  Description of Artificial Sequence: Synthetic oligonucleotide
  Antisense strand to SEQ ID NO: 2414622
cuucuaggaagacagcugu

SEQ ID NO: 2414624 - RNA, 19 nt, Artificial Sequence
  Description of Artificial Sequence: Synthetic oligonucleotide
  Sense strand starting at position 1562 of SEQ ID NO: 1886508
gcugucuuccuagaagaca

SEQ ID NO: 2414625 - RNA, 19 nt, Artificial Sequence
  Description of Artificial Sequence: Synthetic oligonucleotide
  Antisense strand to SEQ ID NO: 2414624
ugucuucuaggaagacagc

SEQ ID NO: 2414626 - RNA, 19 nt, Artificial Sequence
  Description of Artificial Sequence: Synthetic oligonucleotide
  Sense strand starting at position 1722 of SEQ ID NO: 1886508
aguauuguguaaguuaaag

SEQ ID NO: 2414627 - RNA, 19 nt, Artificial Sequence
  Description of Artificial Sequence: Synthetic oligonucleotide
  Antisense strand to SEQ ID NO: 2414626
cuuuaacuuacacaauacu

SEQ ID NO: 2414628 - RNA, 19 nt, Artificial Sequence
  Description of Artificial Sequence: Synthetic oligonucleotide
  Sense strand starting at position 2062 of SEQ ID NO: 1886508
agcaucuugugaguuagaa

SEQ ID NO: 2414629 - RNA, 19 nt, Artificial Sequence
  Description of Artificial Sequence: Synthetic oligonucleotide
  Antisense strand to SEQ ID NO: 2414628
uucuaacucacaagaugcu

SEQ ID NO: 2414630 - RNA, 19 nt, Artificial Sequence
  Description of Artificial Sequence: Synthetic oligonucleotide
  Sense strand starting at position 2239 of SEQ ID NO: 1886508
agacuaguacucuggcuaa

SEQ ID NO: 2414631 - RNA, 19 nt, Artificial Sequence
  Description of Artificial Sequence: Synthetic oligonucleotide
  Antisense strand to SEQ ID NO: 2414630
uuagccagaguacuagucu

SEQ ID NO: 2414632 - RNA, 19 nt, Artificial Sequence
  Description of Artificial Sequence: Synthetic oligonucleotide
  Sense strand starting at position 2242 of SEQ ID NO: 1886508
cuaguacucuggcuaacau

SEQ ID NO: 2414633 - RNA, 19 nt, Artificial Sequence
  Description of Artificial Sequence: Synthetic oligonucleotide
  Antisense strand to SEQ ID NO: 2414632
auguuagccagaguacuag

SEQ ID NO: 2414634 - RNA, 19 nt, Artificial Sequence
  Description of Artificial Sequence: Synthetic oligonucleotide
  Sense strand starting at position 2479 of SEQ ID NO: 1886508
ugaguagacuaauuaugau

SEQ ID NO: 2414635 - RNA, 19 nt, Artificial Sequence
  Description of Artificial Sequence: Synthetic oligonucleotide
  Antisense strand to SEQ ID NO: 2414634
aucauaauuagucuacuca

SEQ ID NO: 2414636 - RNA, 19 nt, Artificial Sequence
  Description of Artificial Sequence: Synthetic oligonucleotide
  Sense strand starting at position 2565 of SEQ ID NO: 1886508
cugguuaaauguuuaacuu

SEQ ID NO: 2414637 - RNA, 19 nt, Artificial Sequence
  Description of Artificial Sequence: Synthetic oligonucleotide
  Antisense strand to SEQ ID NO: 2414636
aaguuaaacauuuaaccag

SEQ ID NO: 2414638 - RNA, 19 nt, Artificial Sequence
  Description of Artificial Sequence: Synthetic oligonucleotide
  Sense strand starting at position 2566 of SEQ ID NO: 1886508
ugguuaaauguuuaacuug

SEQ ID NO: 2414639 - RNA, 19 nt, Artificial Sequence
  Description of Artificial Sequence: Synthetic oligonucleotide
  Antisense strand to SEQ ID NO: 2414638
caaguuaaacauuuaacca

SEQ ID NO: 2414640 - RNA, 19 nt, Artificial Sequence
  Description of Artificial Sequence: Synthetic oligonucleotide
  Sense strand starting at position 2578 of SEQ ID NO: 1886508
uaacuugggugucccauua

SEQ ID NO: 2414641 - RNA, 19 nt, Artificial Sequence
  Description of Artificial Sequence: Synthetic oligonucleotide
  Antisense strand to SEQ ID NO: 2414640
uaaugggacacccaaguua

SEQ ID NO: 2414642 - RNA, 19 nt, Artificial Sequence
  Description of Artificial Sequence: Synthetic oligonucleotide
  Sense strand starting at position 3214 of SEQ ID NO: 1886508
aucugcuuuccagagucuu

SEQ ID NO: 2414643 - RNA, 19 nt, Artificial Sequence
  Description of Artificial Sequence: Synthetic oligonucleotide
  Antisense strand to SEQ ID NO: 2414642
aagacucuggaaagcagau

SEQ ID NO: 2414644 - RNA, 19 nt, Artificial Sequence
  Description of Artificial Sequence: Synthetic oligonucleotide
  Sense strand starting at position 3220 of SEQ ID NO: 1886508
uuuccagagucuuugggaa

SEQ ID NO: 2414645 - RNA, 19 nt, Artificial Sequence
  Description of Artificial Sequence: Synthetic oligonucleotide
  Antisense strand to SEQ ID NO: 2414644
uucccaaagacucuggaaa

SEQ ID NO: 2414646 - RNA, 19 nt, Artificial Sequence
  Description of Artificial Sequence: Synthetic oligonucleotide
  Sense strand starting at position 3240 of SEQ ID NO: 1886508
aggcuaaacucuuuaguau

SEQ ID NO: 2414647 - RNA, 19 nt, Artificial Sequence
  Description of Artificial Sequence: Synthetic oligonucleotide
  Antisense strand to SEQ ID NO: 2414646
auacuaaagaguuuagccu

SEQ ID NO: 2414648 - RNA, 19 nt, Artificial Sequence
  Description of Artificial Sequence: Synthetic oligonucleotide
  Sense strand starting at position 3241 of SEQ ID NO: 1886508
ggcuaaacucuuuaguaua

SEQ ID NO: 2414649 - RNA, 19 nt, Artificial Sequence
  Description of Artificial Sequence: Synthetic oligonucleotide
  Antisense strand to SEQ ID NO: 2414648
uauacuaaagaguuuagcc

SEQ ID NO: 2414650 - RNA, 19 nt, Artificial Sequence
  Description of Artificial Sequence: Synthetic oligonucleotide
  Sense strand starting at position 3335 of SEQ ID NO: 1886508
aggguuacgcaucacuuau

SEQ ID NO: 2414651 - RNA, 19 nt, Artificial Sequence
  Description of Artificial Sequence: Synthetic oligonucleotide
  Antisense strand to SEQ ID NO: 2414650
auaagugaugcguaacccu

SEQ ID NO: 2414652 - RNA, 19 nt, Artificial Sequence
  Description of Artificial Sequence: Synthetic oligonucleotide
  Sense strand starting at position 3367 of SEQ ID NO: 1886508
gcauucugcaucguugauu

SEQ ID NO: 2414653 - RNA, 19 nt, Artificial Sequence
  Description of Artificial Sequence: Synthetic oligonucleotide
  Antisense strand to SEQ ID NO: 2414652
aaucaacgaugcagaaugc

SEQ ID NO: 2414654 - RNA, 19 nt, Artificial Sequence
  Description of Artificial Sequence: Synthetic oligonucleotide
  Sense strand starting at position 3420 of SEQ ID NO: 1886508
ugaaguaauacacgaagca

SEQ ID NO: 2414655 - RNA, 19 nt, Artificial Sequence
  Description of Artificial Sequence: Synthetic oligonucleotide
  Antisense strand to SEQ ID NO: 2414654
ugcuucguguauuacuuca

SEQ ID NO: 2414656 - RNA, 19 nt, Artificial Sequence
  Description of Artificial Sequence: Synthetic oligonucleotide
  Sense strand starting at position 3835 of SEQ ID NO: 1886508
ucugaaagguaucuauaga

SEQ ID NO: 2414657 - RNA, 19 nt, Artificial Sequence
  Description of Artificial Sequence: Synthetic oligonucleotide
  Antisense strand to SEQ ID NO: 2414656
ucuauagauaccuuucaga

SEQ ID NO: 2414658 - RNA, 19 nt, Artificial Sequence
  Description of Artificial Sequence: Synthetic oligonucleotide
  Sense strand starting at position 3938 of SEQ ID NO: 1886508
cuguuucucccacaaggga

SEQ ID NO: 2414659 - RNA, 19 nt, Artificial Sequence
  Description of Artificial Sequence: Synthetic oligonucleotide
  Antisense strand to SEQ ID NO: 2414658
ucccuugugggagaaacag

SEQ ID NO: 2414660 - RNA, 19 nt, Artificial Sequence
  Description of Artificial Sequence: Synthetic oligonucleotide
  Sense strand starting at position 37 of SEQ ID NO: 1886509
uuggcaaaucagugaaaga

SEQ ID NO: 2414661 - RNA, 19 nt, Artificial Sequence
  Description of Artificial Sequence: Synthetic oligonucleotide
  Antisense strand to SEQ ID NO: 2414660
ucuuucacugauuugccaa

SEQ ID NO: 2414662 - RNA, 19 nt, Artificial Sequence
  Description of Artificial Sequence: Synthetic oligonucleotide
  Sense strand starting at position 46 of SEQ ID NO: 1886509
cagugaaagaugggcagau

SEQ ID NO: 2414663 - RNA, 19 nt, Artificial Sequence
  Description of Artificial Sequence: Synthetic oligonucleotide
  Antisense strand to SEQ ID NO: 2414662
aucugcccaucuuucacug

SEQ ID NO: 2414664 - RNA, 19 nt, Artificial Sequence
  Description of Artificial Sequence: Synthetic oligonucleotide
  Sense strand starting at position 58 of SEQ ID NO: 1886509
ggcagauaaguauggugaa

SEQ ID NO: 2414665 - RNA, 19 nt, Artificial Sequence
  Description of Artificial Sequence: Synthetic oligonucleotide
  Antisense strand to SEQ ID NO: 2414664
uucaccauacuuaucugcc

SEQ ID NO: 2414666 - RNA, 19 nt, Artificial Sequence
  Description of Artificial Sequence: Synthetic oligonucleotide
  Sense strand starting at position 107 of SEQ ID NO: 1886509
uggaguuauagaggcagau

SEQ ID NO: 2414667 - RNA, 19 nt, Artificial Sequence
  Description of Artificial Sequence: Synthetic oligonucleotide
  Antisense strand to SEQ ID NO: 2414666
aucugccucuauaacucca

SEQ ID NO: 2414668 - RNA, 19 nt, Artificial Sequence
  Description of Artificial Sequence: Synthetic oligonucleotide
  Sense strand starting at position 109 of SEQ ID NO: 1886509
gaguuauagaggcagaugu

SEQ ID NO: 2414669 - RNA, 19 nt, Artificial Sequence
  Description of Artificial Sequence: Synthetic oligonucleotide
  Antisense strand to SEQ ID NO: 2414668
acaucugccucuauaacuc

SEQ ID NO: 2414670 - RNA, 19 nt, Artificial Sequence
  Description of Artificial Sequence: Synthetic oligonucleotide
  Sense strand starting at position 162 of SEQ ID NO: 1886509
cguccauagacugaguaau

SEQ ID NO: 2414671 - RNA, 19 nt, Artificial Sequence
  Description of Artificial Sequence: Synthetic oligonucleotide
  Antisense strand to SEQ ID NO: 2414670
auuacucagucuauggacg

SEQ ID NO: 2414672 - RNA, 19 nt, Artificial Sequence
  Description of Artificial Sequence: Synthetic oligonucleotide
  Sense strand starting at position 483 of SEQ ID NO: 1886509
cgaguaaugaagggcagau

SEQ ID NO: 2414673 - RNA, 19 nt, Artificial Sequence
  Description of Artificial Sequence: Synthetic oligonucleotide
  Antisense strand to SEQ ID NO: 2414672
aucugcccuucauuacucg

SEQ ID NO: 2414674 - RNA, 19 nt, Artificial Sequence
  Description of Artificial Sequence: Synthetic oligonucleotide
  Sense strand starting at position 631 of SEQ ID NO: 1886509
ugaagacuccauugucuca

SEQ ID NO: 2414675 - RNA, 19 nt, Artificial Sequence
  Description of Artificial Sequence: Synthetic oligonucleotide
  Antisense strand to SEQ ID NO: 2414674
ugagacaauggagucuuca

SEQ ID NO: 2414676 - RNA, 19 nt, Artificial Sequence
  Description of Artificial Sequence: Synthetic oligonucleotide
  Sense strand starting at position 668 of SEQ ID NO: 1886509
gugccaaagaccuaaguga

SEQ ID NO: 2414677 - RNA, 19 nt, Artificial Sequence
  Description of Artificial Sequence: Synthetic oligonucleotide
  Antisense strand to SEQ ID NO: 2414676
ucacuuaggucuuuggcac

SEQ ID NO: 2414678 - RNA, 19 nt, Artificial Sequence
  Description of Artificial Sequence: Synthetic oligonucleotide
  Sense strand starting at position 683 of SEQ ID NO: 1886509
gugagcccucuggauauua

SEQ ID NO: 2414679 - RNA, 19 nt, Artificial Sequence
  Description of Artificial Sequence: Synthetic oligonucleotide
  Antisense strand to SEQ ID NO: 2414678
uaauauccagagggcucac

SEQ ID NO: 2414680 - RNA, 19 nt, Artificial Sequence
  Description of Artificial Sequence: Synthetic oligonucleotide
  Sense strand starting at position 735 of SEQ ID NO: 1886509
gugaacuacuaaguuaauu

SEQ ID NO: 2414681 - RNA, 19 nt, Artificial Sequence
  Description of Artificial Sequence: Synthetic oligonucleotide
  Antisense strand to SEQ ID NO: 2414680
aauuaacuuaguaguucac

SEQ ID NO: 2414682 - RNA, 19 nt, Artificial Sequence
  Description of Artificial Sequence: Synthetic oligonucleotide
  Sense strand starting at position 997 of SEQ ID NO: 1886509
cucagacaagcauauaguu

SEQ ID NO: 2414683 - RNA, 19 nt, Artificial Sequence
  Description of Artificial Sequence: Synthetic oligonucleotide
  Antisense strand to SEQ ID NO: 2414682
aacuauaugcuugucugag

SEQ ID NO: 2414684 - RNA, 19 nt, Artificial Sequence
  Description of Artificial Sequence: Synthetic oligonucleotide
  Sense strand starting at position 1035 of SEQ ID NO: 1886509
uguguuaguaaucacugau

SEQ ID NO: 2414685 - RNA, 19 nt, Artificial Sequence
  Description of Artificial Sequence: Synthetic oligonucleotide
  Antisense strand to SEQ ID NO: 2414684
aucagugauuacuaacaca

SEQ ID NO: 2414686 - RNA, 19 nt, Artificial Sequence
  Description of Artificial Sequence: Synthetic oligonucleotide
  Sense strand starting at position 1137 of SEQ ID NO: 1886509
ccacaugucccaggaauau

SEQ ID NO: 2414687 - RNA, 19 nt, Artificial Sequence
  Description of Artificial Sequence: Synthetic oligonucleotide
  Antisense strand to SEQ ID NO: 2414686
auauuccugggacaugugg

SEQ ID NO: 2414688 - RNA, 19 nt, Artificial Sequence
  Description of Artificial Sequence: Synthetic oligonucleotide
  Sense strand starting at position 1169 of SEQ ID NO: 1886509
acuuauucuggguaaggca

SEQ ID NO: 2414689 - RNA, 19 nt, Artificial Sequence
  Description of Artificial Sequence: Synthetic oligonucleotide
  Antisense strand to SEQ ID NO: 2414688
ugccuuacccagaauaagu

SEQ ID NO: 2414690 - RNA, 19 nt, Artificial Sequence
  Description of Artificial Sequence: Synthetic oligonucleotide
  Sense strand starting at position 1224 of SEQ ID NO: 1886509
ugggaauccagucauguca

SEQ ID NO: 2414691 - RNA, 19 nt, Artificial Sequence
  Description of Artificial Sequence: Synthetic oligonucleotide
  Antisense strand to SEQ ID NO: 2414690
ugacaugacuggauuccca

SEQ ID NO: 2414692 - RNA, 19 nt, Artificial Sequence
  Description of Artificial Sequence: Synthetic oligonucleotide
  Sense strand starting at position 1334 of SEQ ID NO: 1886509
ucucgauuagugcagagga

SEQ ID NO: 2414693 - RNA, 19 nt, Artificial Sequence
  Description of Artificial Sequence: Synthetic oligonucleotide
  Antisense strand to SEQ ID NO: 2414692
uccucugcacuaaucgaga

SEQ ID NO: 2414694 - RNA, 19 nt, Artificial Sequence
  Description of Artificial Sequence: Synthetic oligonucleotide
  Sense strand starting at position 1493 of SEQ ID NO: 1886509
caggcaaugugauuuacgu

SEQ ID NO: 2414695 - RNA, 19 nt, Artificial Sequence
  Description of Artificial Sequence: Synthetic oligonucleotide
  Antisense strand to SEQ ID NO: 2414694
acguaaaucacauugccug

SEQ ID NO: 2414696 - RNA, 19 nt, Artificial Sequence
  Description of Artificial Sequence: Synthetic oligonucleotide
  Sense strand starting at position 1495 of SEQ ID NO: 1886509
ggcaaugugauuuacguuu

SEQ ID NO: 2414697 - RNA, 19 nt, Artificial Sequence
  Description of Artificial Sequence: Synthetic oligonucleotide
  Antisense strand to SEQ ID NO: 2414696
aaacguaaaucacauugcc

SEQ ID NO: 2414698 - RNA, 19 nt, Artificial Sequence
  Description of Artificial Sequence: Synthetic oligonucleotide
  Sense strand starting at position 1991 of SEQ ID NO: 1886509
ggaggauggcaucaucuuu

SEQ ID NO: 2414699 - RNA, 19 nt, Artificial Sequence
  Description of Artificial Sequence: Synthetic oligonucleotide
  Antisense strand to SEQ ID NO: 2414698
aaagaugaugccauccucc

SEQ ID NO: 2414700 - RNA, 19 nt, Artificial Sequence
  Description of Artificial Sequence: Synthetic oligonucleotide
  Sense strand starting at position 2146 of SEQ ID NO: 1886509
uggacuuacguucaggauu

SEQ ID NO: 2414701 - RNA, 19 nt, Artificial Sequence
  Description of Artificial Sequence: Synthetic oligonucleotide
  Antisense strand to SEQ ID NO: 2414700
aauccugaacguaagucca

SEQ ID NO: 2414702 - RNA, 19 nt, Artificial Sequence
  Description of Artificial Sequence: Synthetic oligonucleotide
  Sense strand starting at position 2898 of SEQ ID NO: 1886509
cuaccaagagugcauuauu

SEQ ID NO: 2414703 - RNA, 19 nt, Artificial Sequence
  Description of Artificial Sequence: Synthetic oligonucleotide
  Antisense strand to SEQ ID NO: 2414702
aauaaugcacucuugguag

SEQ ID NO: 2414704 - RNA, 19 nt, Artificial Sequence
  Description of Artificial Sequence: Synthetic oligonucleotide
  Sense strand starting at position 2901 of SEQ ID NO: 1886509
ccaagagugcauuauuaau

SEQ ID NO: 2414705 - RNA, 19 nt, Artificial Sequence
  Description of Artificial Sequence: Synthetic oligonucleotide
  Antisense strand to SEQ ID NO: 2414704
auuaauaaugcacucuugg

SEQ ID NO: 2414706 - RNA, 19 nt, Artificial Sequence
  Description of Artificial Sequence: Synthetic oligonucleotide
  Sense strand starting at position 2953 of SEQ ID NO: 1886509
uuagguauuacauggguca

SEQ ID NO: 2414707 - RNA, 19 nt, Artificial Sequence
  Description of Artificial Sequence: Synthetic oligonucleotide
  Antisense strand to SEQ ID NO: 2414706
ugacccauguaauaccuaa

SEQ ID NO: 2414708 - RNA, 19 nt, Artificial Sequence
  Description of Artificial Sequence: Synthetic oligonucleotide
  Sense strand starting at position 2955 of SEQ ID NO: 1886509
agguauuacaugggucaca

SEQ ID NO: 2414709 - RNA, 19 nt, Artificial Sequence
  Description of Artificial Sequence: Synthetic oligonucleotide
  Antisense strand to SEQ ID NO: 2414708
ugugacccauguaauaccu

SEQ ID NO: 2414710 - RNA, 19 nt, Artificial Sequence
  Description of Artificial Sequence: Synthetic oligonucleotide
  Sense strand starting at position 2956 of SEQ ID NO: 1886509
gguauuacaugggucacau

SEQ ID NO: 2414711 - RNA, 19 nt, Artificial Sequence
  Description of Artificial Sequence: Synthetic oligonucleotide
  Antisense strand to SEQ ID NO: 2414710
augugacccauguaauacc

SEQ ID NO: 2414712 - RNA, 19 nt, Artificial Sequence
  Description of Artificial Sequence: Synthetic oligonucleotide
  Sense strand starting at position 3117 of SEQ ID NO: 1886509
gccuuauguugauuuaucu

SEQ ID NO: 2414713 - RNA, 19 nt, Artificial Sequence
  Description of Artificial Sequence: Synthetic oligonucleotide
  Antisense strand to SEQ ID NO: 2414712
agauaaaucaacauaaggc

SEQ ID NO: 2414714 - RNA, 19 nt, Artificial Sequence
  Description of Artificial Sequence: Synthetic oligonucleotide
  Sense strand starting at position 3323 of SEQ ID NO: 1886509
gggucaaauaagugaucaa

SEQ ID NO: 2414715 - RNA, 19 nt, Artificial Sequence
  Description of Artificial Sequence: Synthetic oligonucleotide
  Antisense strand to SEQ ID NO: 2414714
uugaucacuuauuugaccc

SEQ ID NO: 2414716 - RNA, 19 nt, Artificial Sequence
  Description of Artificial Sequence: Synthetic oligonucleotide
  Sense strand starting at position 3355 of SEQ ID NO: 1886509
aucugaaagcaugguaauc

SEQ ID NO: 2414717 - RNA, 19 nt, Artificial Sequence
  Description of Artificial Sequence: Synthetic oligonucleotide
  Antisense strand to SEQ ID NO: 2414716
gauuaccaugcuuucagau

SEQ ID NO: 2414718 - RNA, 19 nt, Artificial Sequence
  Description of Artificial Sequence: Synthetic oligonucleotide
  Sense strand starting at position 3445 of SEQ ID NO: 1886509
aaacgauugugucuauaaa

SEQ ID NO: 2414719 - RNA, 19 nt, Artificial Sequence
  Description of Artificial Sequence: Synthetic oligonucleotide
  Antisense strand to SEQ ID NO: 2414718
uuuauagacacaaucguuu

SEQ ID NO: 2414720 - RNA, 19 nt, Artificial Sequence
  Description of Artificial Sequence: Synthetic oligonucleotide
  Sense strand starting at position 3446 of SEQ ID NO: 1886509
aacgauugugucuauaaac

SEQ ID NO: 2414721 - RNA, 19 nt, Artificial Sequence
  Description of Artificial Sequence: Synthetic oligonucleotide
  Antisense strand to SEQ ID NO: 2414720
guuuauagacacaaucguu

SEQ ID NO: 2414722 - RNA, 19 nt, Artificial Sequence
  Description of Artificial Sequence: Synthetic oligonucleotide
  Sense strand starting at position 3453 of SEQ ID NO: 1886509
gugucuauaaacugagaga

SEQ ID NO: 2414723 - RNA, 19 nt, Artificial Sequence
  Description of Artificial Sequence: Synthetic oligonucleotide
  Antisense strand to SEQ ID NO: 2414722
ucucucaguuuauagacac

SEQ ID NO: 2414724 - RNA, 19 nt, Artificial Sequence
  Description of Artificial Sequence: Synthetic oligonucleotide
  Sense strand starting at position 3580 of SEQ ID NO: 1886509
cauuaucuaggaugagagu

SEQ ID NO: 2414725 - RNA, 19 nt, Artificial Sequence
  Description of Artificial Sequence: Synthetic oligonucleotide
  Antisense strand to SEQ ID NO: 2414724
acucucauccuagauaaug

SEQ ID NO: 2414726 - RNA, 19 nt, Artificial Sequence
  Description of Artificial Sequence: Synthetic oligonucleotide
  Sense strand starting at position 3697 of SEQ ID NO: 1886509
ggaaauaauuucuagcaaa

SEQ ID NO: 2414727 - RNA, 19 nt, Artificial Sequence
  Description of Artificial Sequence: Synthetic oligonucleotide
  Antisense strand to SEQ ID NO: 2414726
uuugcuagaaauuauuucc

SEQ ID NO: 2414728 - RNA, 19 nt, Artificial Sequence
  Description of Artificial Sequence: Synthetic oligonucleotide
  Sense strand starting at position 3729 of SEQ ID NO: 1886509
guauguuuccacugaaagg

SEQ ID NO: 2414729 - RNA, 19 nt, Artificial Sequence
  Description of Artificial Sequence: Synthetic oligonucleotide
  Antisense strand to SEQ ID NO: 2414728
ccuuucaguggaaacauac

SEQ ID NO: 2414730 - RNA, 19 nt, Artificial Sequence
  Description of Artificial Sequence: Synthetic oligonucleotide
  Sense strand starting at position 3788 of SEQ ID NO: 1886509
ggcacugauuaaccucauu

SEQ ID NO: 2414731 - RNA, 19 nt, Artificial Sequence
  Description of Artificial Sequence: Synthetic oligonucleotide
  Antisense strand to SEQ ID NO: 2414730
aaugagguuaaucagugcc

SEQ ID NO: 2414732 - RNA, 19 nt, Artificial Sequence
  Description of Artificial Sequence: Synthetic oligonucleotide
  Sense strand starting at position 3809 of SEQ ID NO: 1886509
ggacaugacuuccucauac

SEQ ID NO: 2414733 - RNA, 19 nt, Artificial Sequence
  Description of Artificial Sequence: Synthetic oligonucleotide
  Antisense strand to SEQ ID NO: 2414732
guaugaggaagucaugucc

SEQ ID NO: 2414734 - RNA, 19 nt, Artificial Sequence
  Description of Artificial Sequence: Synthetic oligonucleotide
  Sense strand starting at position 3828 of SEQ ID NO: 1886509
uuuaauaggaagugguaaa

SEQ ID NO: 2414735 - RNA, 19 nt, Artificial Sequence
  Description of Artificial Sequence: Synthetic oligonucleotide
  Antisense strand to SEQ ID NO: 2414734
uuuaccacuuccuauuaaa

SEQ ID NO: 2414736 - RNA, 19 nt, Artificial Sequence
  Description of Artificial Sequence: Synthetic oligonucleotide
  Sense strand starting at position 3955 of SEQ ID NO: 1886509
ugaagagcuuggccugaaa

SEQ ID NO: 2414737 - RNA, 19 nt, Artificial Sequence
  Description of Artificial Sequence: Synthetic oligonucleotide
  Antisense strand to SEQ ID NO: 2414736
uuucaggccaagcucuuca

SEQ ID NO: 2414738 - RNA, 19 nt, Artificial Sequence
  Description of Artificial Sequence: Synthetic oligonucleotide
  Sense strand starting at position 3958 of SEQ ID NO: 1886509
agagcuuggccugaaauca

SEQ ID NO: 2414739 - RNA, 19 nt, Artificial Sequence
  Description of Artificial Sequence: Synthetic oligonucleotide
  Antisense strand to SEQ ID NO: 2414738
ugauuucaggccaagcucu

SEQ ID NO: 2414740 - RNA, 19 nt, Artificial Sequence
  Description of Artificial Sequence: Synthetic oligonucleotide
  Sense strand starting at position 42 of SEQ ID NO: 1886510
uguauaucaugauuacagu

SEQ ID NO: 2414741 - RNA, 19 nt, Artificial Sequence
  Description of Artificial Sequence: Synthetic oligonucleotide
  Antisense strand to SEQ ID NO: 2414740
acuguaaucaugauauaca

SEQ ID NO: 2414742 - RNA, 19 nt, Artificial Sequence
  Description of Artificial Sequence: Synthetic oligonucleotide
  Sense strand starting at position 79 of SEQ ID NO: 1886510
uucugagugccauauagug

SEQ ID NO: 2414743 - RNA, 19 nt, Artificial Sequence
  Description of Artificial Sequence: Synthetic oligonucleotide
  Antisense strand to SEQ ID NO: 2414742
cacuauauggcacucagaa

SEQ ID NO: 2414744 - RNA, 19 nt, Artificial Sequence
  Description of Artificial Sequence: Synthetic oligonucleotide
  Sense strand starting at position 341 of SEQ ID NO: 1886510
gcagguagaacugauccau

SEQ ID NO: 2414745 - RNA, 19 nt, Artificial Sequence
  Description of Artificial Sequence: Synthetic oligonucleotide
  Antisense strand to SEQ ID NO: 2414744
auggaucaguucuaccugc

SEQ ID NO: 2414746 - RNA, 19 nt, Artificial Sequence
  Description of Artificial Sequence: Synthetic oligonucleotide
  Sense strand starting at position 686 of SEQ ID NO: 1886510
gaauuaaguuaugucagau

SEQ ID NO: 2414747 - RNA, 19 nt, Artificial Sequence
  Description of Artificial Sequence: Synthetic oligonucleotide
  Antisense strand to SEQ ID NO: 2414746
aucugacauaacuuaauuc

SEQ ID NO: 2414748 - RNA, 19 nt, Artificial Sequence
  Description of Artificial Sequence: Synthetic oligonucleotide
  Sense strand starting at position 825 of SEQ ID NO: 1886510
agugguagacccugacacu

SEQ ID NO: 2414749 - RNA, 19 nt, Artificial Sequence
  Description of Artificial Sequence: Synthetic oligonucleotide
  Antisense strand to SEQ ID NO: 2414748
agugucagggucuaccacu

SEQ ID NO: 2414750 - RNA, 19 nt, Artificial Sequence
  Description of Artificial Sequence: Synthetic oligonucleotide
  Sense strand starting at position 826 of SEQ ID NO: 1886510
gugguagacccugacacua

SEQ ID NO: 2414751 - RNA, 19 nt, Artificial Sequence
  Description of Artificial Sequence: Synthetic oligonucleotide
  Antisense strand to SEQ ID NO: 2414750
uagugucagggucuaccac

SEQ ID NO: 2414752 - RNA, 19 nt, Artificial Sequence
  Description of Artificial Sequence: Synthetic oligonucleotide
  Sense strand starting at position 866 of SEQ ID NO: 1886510
uguauauuucuaugggcuu

SEQ ID NO: 2414753 - RNA, 19 nt, Artificial Sequence
  Description of Artificial Sequence: Synthetic oligonucleotide
  Antisense strand to SEQ ID NO: 2414752
aagcccauagaaauauaca

SEQ ID NO: 2414754 - RNA, 19 nt, Artificial Sequence
  Description of Artificial Sequence: Synthetic oligonucleotide
  Sense strand starting at position 919 of SEQ ID NO: 1886510
cuaugagauagcuagugua

SEQ ID NO: 2414755 - RNA, 19 nt, Artificial Sequence
  Description of Artificial Sequence: Synthetic oligonucleotide
  Antisense strand to SEQ ID NO: 2414754
uacacuagcuaucucauag

SEQ ID NO: 2414756 - RNA, 19 nt, Artificial Sequence
  Description of Artificial Sequence: Synthetic oligonucleotide
  Sense strand starting at position 1198 of SEQ ID NO: 1886510
uuccaaugaugaguaauua

SEQ ID NO: 2414757 - RNA, 19 nt, Artificial Sequence
  Description of Artificial Sequence: Synthetic oligonucleotide
  Antisense strand to SEQ ID NO: 2414756
uaauuacucaucauuggaa

SEQ ID NO: 2414758 - RNA, 19 nt, Artificial Sequence
  Description of Artificial Sequence: Synthetic oligonucleotide
  Sense strand starting at position 1202 of SEQ ID NO: 1886510
aaugaugaguaauuaggua

SEQ ID NO: 2414759 - RNA, 19 nt, Artificial Sequence
  Description of Artificial Sequence: Synthetic oligonucleotide
  Antisense strand to SEQ ID NO: 2414758
uaccuaauuacucaucauu

SEQ ID NO: 2414760 - RNA, 19 nt, Artificial Sequence
  Description of Artificial Sequence: Synthetic oligonucleotide
  Sense strand starting at position 1721 of SEQ ID NO: 1886510
cuugaaagguagcucuaga

SEQ ID NO: 2414761 - RNA, 19 nt, Artificial Sequence
  Description of Artificial Sequence: Synthetic oligonucleotide
  Antisense strand to SEQ ID NO: 2414760
ucuagagcuaccuuucaag

SEQ ID NO: 2414762 - RNA, 19 nt, Artificial Sequence
  Description of Artificial Sequence: Synthetic oligonucleotide
  Sense strand starting at position 1726 of SEQ ID NO: 1886510
aagguagcucuagaaugua

SEQ ID NO: 2414763 - RNA, 19 nt, Artificial Sequence
  Description of Artificial Sequence: Synthetic oligonucleotide
  Antisense strand to SEQ ID NO: 2414762
uacauucuagagcuaccuu

SEQ ID NO: 2414764 - RNA, 19 nt, Artificial Sequence
  Description of Artificial Sequence: Synthetic oligonucleotide
  Sense strand starting at position 2175 of SEQ ID NO: 1886510
gccucuguaucauuuguuu

SEQ ID NO: 2414765 - RNA, 19 nt, Artificial Sequence
  Description of Artificial Sequence: Synthetic oligonucleotide
  Antisense strand to SEQ ID NO: 2414764
aaacaaaugauacagaggc

SEQ ID NO: 2414766 - RNA, 19 nt, Artificial Sequence
  Description of Artificial Sequence: Synthetic oligonucleotide
  Sense strand starting at position 2225 of SEQ ID NO: 1886510
aaaggaguguauccagacu

SEQ ID NO: 2414767 - RNA, 19 nt, Artificial Sequence
  Description of Artificial Sequence: Synthetic oligonucleotide
  Antisense strand to SEQ ID NO: 2414766
agucuggauacacuccuuu

SEQ ID NO: 2414768 - RNA, 19 nt, Artificial Sequence
  Description of Artificial Sequence: Synthetic oligonucleotide
  Sense strand starting at position 2242 of SEQ ID NO: 1886510
cuuccaucccucgaugaga

SEQ ID NO: 2414769 - RNA, 19 nt, Artificial Sequence
  Description of Artificial Sequence: Synthetic oligonucleotide
  Antisense strand to SEQ ID NO: 2414768
ucucaucgagggauggaag

SEQ ID NO: 2414770 - RNA, 19 nt, Artificial Sequence
  Description of Artificial Sequence: Synthetic oligonucleotide
  Sense strand starting at position 2244 of SEQ ID NO: 1886510
uccaucccucgaugagauu

SEQ ID NO: 2414771 - RNA, 19 nt, Artificial Sequence
  Description of Artificial Sequence: Synthetic oligonucleotide
  Antisense strand to SEQ ID NO: 2414770
aaucucaucgagggaugga

SEQ ID NO: 2414772 - RNA, 19 nt, Artificial Sequence
  Description of Artificial Sequence: Synthetic oligonucleotide
  Sense strand starting at position 2348 of SEQ ID NO: 1886510
ccagaugguuaagccuaua

SEQ ID NO: 2414773 - RNA, 19 nt, Artificial Sequence
  Description of Artificial Sequence: Synthetic oligonucleotide
  Antisense strand to SEQ ID NO: 2414772
uauaggcuuaaccaucugg

SEQ ID NO: 2414774 - RNA, 19 nt, Artificial Sequence
  Description of Artificial Sequence: Synthetic oligonucleotide
  Sense strand starting at position 2351 of SEQ ID NO: 1886510
gaugguuaagccuauaauc

SEQ ID NO: 2414775 - RNA, 19 nt, Artificial Sequence
  Description of Artificial Sequence: Synthetic oligonucleotide
  Antisense strand to SEQ ID NO: 2414774
gauuauaggcuuaaccauc

SEQ ID NO: 2414776 - RNA, 19 nt, Artificial Sequence
  Description of Artificial Sequence: Synthetic oligonucleotide
  Sense strand starting at position 2353 of SEQ ID NO: 1886510
ugguuaagccuauaaucac

SEQ ID NO: 2414777 - RNA, 19 nt, Artificial Sequence
  Description of Artificial Sequence: Synthetic oligonucleotide
  Antisense strand to SEQ ID NO: 2414776
gugauuauaggcuuaacca

SEQ ID NO: 2414778 - RNA, 19 nt, Artificial Sequence
  Description of Artificial Sequence: Synthetic oligonucleotide
  Sense strand starting at position 2437 of SEQ ID NO: 1886510
guguacucaguccauagga

SEQ ID NO: 2414779 - RNA, 19 nt, Artificial Sequence
  Description of Artificial Sequence: Synthetic oligonucleotide
  Antisense strand to SEQ ID NO: 2414778
uccuauggacugaguacac

SEQ ID NO: 2414780 - RNA, 19 nt, Artificial Sequence
  Description of Artificial Sequence: Synthetic oligonucleotide
  Sense strand starting at position 2459 of SEQ ID NO: 1886510
gggaccuauucugucaaag

SEQ ID NO: 2414781 - RNA, 19 nt, Artificial Sequence
  Description of Artificial Sequence: Synthetic oligonucleotide
  Antisense strand to SEQ ID NO: 2414780
cuuugacagaauagguccc

SEQ ID NO: 2414782 - RNA, 19 nt, Artificial Sequence
  Description of Artificial Sequence: Synthetic oligonucleotide
  Sense strand starting at position 2590 of SEQ ID NO: 1886510
gaagaaggaugacaaagau

SEQ ID NO: 2414783 - RNA, 19 nt, Artificial Sequence
  Description of Artificial Sequence: Synthetic oligonucleotide
  Antisense strand to SEQ ID NO: 2414782
aucuuugucauccuucuuc

SEQ ID NO: 2414784 - RNA, 19 nt, Artificial Sequence
  Description of Artificial Sequence: Synthetic oligonucleotide
  Sense strand starting at position 2664 of SEQ ID NO: 1886510
uaugaagauuagccaaagu

SEQ ID NO: 2414785 - RNA, 19 nt, Artificial Sequence
  Description of Artificial Sequence: Synthetic oligonucleotide
  Antisense strand to SEQ ID NO: 2414784
acuuuggcuaaucuucaua

SEQ ID NO: 2414786 - RNA, 19 nt, Artificial Sequence
  Description of Artificial Sequence: Synthetic oligonucleotide
  Sense strand starting at position 2721 of SEQ ID NO: 1886510
guagcuuaguuagcuauuu

SEQ ID NO: 2414787 - RNA, 19 nt, Artificial Sequence
  Description of Artificial Sequence: Synthetic oligonucleotide
  Antisense strand to SEQ ID NO: 2414786
aaauagcuaacuaagcuac

SEQ ID NO: 2414788 - RNA, 19 nt, Artificial Sequence
  Description of Artificial Sequence: Synthetic oligonucleotide
  Sense strand starting at position 2767 of SEQ ID NO: 1886510
cugcguagcaugucucaua

SEQ ID NO: 2414789 - RNA, 19 nt, Artificial Sequence
  Description of Artificial Sequence: Synthetic oligonucleotide
  Antisense strand to SEQ ID NO: 2414788
uaugagacaugcuacgcag

SEQ ID NO: 2414790 - RNA, 19 nt, Artificial Sequence
  Description of Artificial Sequence: Synthetic oligonucleotide
  Sense strand starting at position 2804 of SEQ ID NO: 1886510
gagagaccuugcucugaaa

SEQ ID NO: 2414791 - RNA, 19 nt, Artificial Sequence
  Description of Artificial Sequence: Synthetic oligonucleotide
  Antisense strand to SEQ ID NO: 2414790
uuucagagcaaggucucuc

SEQ ID NO: 2414792 - RNA, 19 nt, Artificial Sequence
  Description of Artificial Sequence: Synthetic oligonucleotide
  Sense strand starting at position 2816 of SEQ ID NO: 1886510
ucugaaauccagcauguuc

SEQ ID NO: 2414793 - RNA, 19 nt, Artificial Sequence
  Description of Artificial Sequence: Synthetic oligonucleotide
  Antisense strand to SEQ ID NO: 2414792
gaacaugcuggauuucaga

SEQ ID NO: 2414794 - RNA, 19 nt, Artificial Sequence
  Description of Artificial Sequence: Synthetic oligonucleotide
  Sense strand starting at position 3042 of SEQ ID NO: 1886510
guaguaugccaguaaauau

SEQ ID NO: 2414795 - RNA, 19 nt, Artificial Sequence
  Description of Artificial Sequence: Synthetic oligonucleotide
  Antisense strand to SEQ ID NO: 2414794
auauuuacuggcauacuac

SEQ ID NO: 2414796 - RNA, 19 nt, Artificial Sequence
  Description of Artificial Sequence: Synthetic oligonucleotide
  Sense strand starting at position 3098 of SEQ ID NO: 1886510
auuuguaauguuggccaau

SEQ ID NO: 2414797 - RNA, 19 nt, Artificial Sequence
  Description of Artificial Sequence: Synthetic oligonucleotide
  Antisense strand to SEQ ID NO: 2414796
auuggccaacauuacaaau

SEQ ID NO: 2414798 - RNA, 19 nt, Artificial Sequence
  Description of Artificial Sequence: Synthetic oligonucleotide
  Sense strand starting at position 3369 of SEQ ID NO: 1886510
aaggacuugugggucaaga

SEQ ID NO: 2414799 - RNA, 19 nt, Artificial Sequence
  Description of Artificial Sequence: Synthetic oligonucleotide
  Antisense strand to SEQ ID NO: 2414798
ucuugacccacaaguccuu

SEQ ID NO: 2414800 - RNA, 19 nt, Artificial Sequence
  Description of Artificial Sequence: Synthetic oligonucleotide
  Sense strand starting at position 3371 of SEQ ID NO: 1886510
ggacuugugggucaagagu

SEQ ID NO: 2414801 - RNA, 19 nt, Artificial Sequence
  Description of Artificial Sequence: Synthetic oligonucleotide
  Antisense strand to SEQ ID NO: 2414800
acucuugacccacaagucc

SEQ ID NO: 2414802 - RNA, 19 nt, Artificial Sequence
  Description of Artificial Sequence: Synthetic oligonucleotide
  Sense strand starting at position 3451 of SEQ ID NO: 1886510
cccagucucccuggaagau

SEQ ID NO: 2414803 - RNA, 19 nt, Artificial Sequence
  Description of Artificial Sequence: Synthetic oligonucleotide
  Antisense strand to SEQ ID NO: 2414802
aucuuccagggagacuggg

SEQ ID NO: 2414804 - RNA, 19 nt, Artificial Sequence
  Description of Artificial Sequence: Synthetic oligonucleotide
  Sense strand starting at position 3471 of SEQ ID NO: 1886510
aggccaaaguuaucucaau

SEQ ID NO: 2414805 - RNA, 19 nt, Artificial Sequence
  Description of Artificial Sequence: Synthetic oligonucleotide
  Antisense strand to SEQ ID NO: 2414804
auugagauaacuuuggccu

SEQ ID NO: 2414806 - RNA, 19 nt, Artificial Sequence
  Description of Artificial Sequence: Synthetic oligonucleotide
  Sense strand starting at position 3472 of SEQ ID NO: 1886510
ggccaaaguuaucucaaug

SEQ ID NO: 2414807 - RNA, 19 nt, Artificial Sequence
  Description of Artificial Sequence: Synthetic oligonucleotide
  Antisense strand to SEQ ID NO: 2414806
cauugagauaacuuuggcc

SEQ ID NO: 2414808 - RNA, 19 nt, Artificial Sequence
  Description of Artificial Sequence: Synthetic oligonucleotide
  Sense strand starting at position 3487 of SEQ ID NO: 1886510
aauggaacuucgcuugaga

SEQ ID NO: 2414809 - RNA, 19 nt, Artificial Sequence
  Description of Artificial Sequence: Synthetic oligonucleotide
  Antisense strand to SEQ ID NO: 2414808
ucucaagcgaaguuccauu

SEQ ID NO: 2414810 - RNA, 19 nt, Artificial Sequence
  Description of Artificial Sequence: Synthetic oligonucleotide
  Sense strand starting at position 3490 of SEQ ID NO: 1886510
ggaacuucgcuugagauga

SEQ ID NO: 2414811 - RNA, 19 nt, Artificial Sequence
  Description of Artificial Sequence: Synthetic oligonucleotide
  Antisense strand to SEQ ID NO: 2414810
ucaucucaagcgaaguucc

SEQ ID NO: 2414812 - RNA, 19 nt, Artificial Sequence
  Description of Artificial Sequence: Synthetic oligonucleotide
  Sense strand starting at position 3790 of SEQ ID NO: 1886510
gaggaagagucguugagug

SEQ ID NO: 2414813 - RNA, 19 nt, Artificial Sequence
  Description of Artificial Sequence: Synthetic oligonucleotide
  Antisense strand to SEQ ID NO: 2414812
cacucaacgacucuuccuc

SEQ ID NO: 2414814 - RNA, 19 nt, Artificial Sequence
  Description of Artificial Sequence: Synthetic oligonucleotide
  Sense strand starting at position 3832 of SEQ ID NO: 1886510
uaaugcugacggcagaaua

SEQ ID NO: 2414815 - RNA, 19 nt, Artificial Sequence
  Description of Artificial Sequence: Synthetic oligonucleotide
  Antisense strand to SEQ ID NO: 2414814
uauucugccgucagcauua

SEQ ID NO: 2414816 - RNA, 19 nt, Artificial Sequence
  Description of Artificial Sequence: Synthetic oligonucleotide
  Sense strand starting at position 3909 of SEQ ID NO: 1886510
cagucauauuggguccaau

SEQ ID NO: 2414817 - RNA, 19 nt, Artificial Sequence
  Description of Artificial Sequence: Synthetic oligonucleotide
  Antisense strand to SEQ ID NO: 2414816
auuggacccaauaugacug

SEQ ID NO: 2414818 - RNA, 19 nt, Artificial Sequence
  Description of Artificial Sequence: Synthetic oligonucleotide
  Sense strand starting at position 3972 of SEQ ID NO: 1886510
uggaaaguuuauguacaca

SEQ ID NO: 2414819 - RNA, 19 nt, Artificial Sequence
  Description of Artificial Sequence: Synthetic oligonucleotide
  Antisense strand to SEQ ID NO: 2414818
uguguacauaaacuuucca

SEQ ID NO: 2414820 - RNA, 19 nt, Artificial Sequence
  Description of Artificial Sequence: Synthetic oligonucleotide
  Sense strand starting at position 221 of SEQ ID NO: 1886511
ggguaauaacgagggcaaa

SEQ ID NO: 2414821 - RNA, 19 nt, Artificial Sequence
  Description of Artificial Sequence: Synthetic oligonucleotide
  Antisense strand to SEQ ID NO: 2414820
uuugcccucguuauuaccc

SEQ ID NO: 2414822 - RNA, 19 nt, Artificial Sequence
  Description of Artificial Sequence: Synthetic oligonucleotide
  Sense strand starting at position 315 of SEQ ID NO: 1886511
cacagaucuugucugagga

SEQ ID NO: 2414823 - RNA, 19 nt, Artificial Sequence
  Description of Artificial Sequence: Synthetic oligonucleotide
  Antisense strand to SEQ ID NO: 2414822
uccucagacaagaucugug

SEQ ID NO: 2414824 - RNA, 19 nt, Artificial Sequence
  Description of Artificial Sequence: Synthetic oligonucleotide
  Sense strand starting at position 316 of SEQ ID NO: 1886511
acagaucuugucugaggag

SEQ ID NO: 2414825 - RNA, 19 nt, Artificial Sequence
  Description of Artificial Sequence: Synthetic oligonucleotide
  Antisense strand to SEQ ID NO: 2414824
cuccucagacaagaucugu

SEQ ID NO: 2414826 - RNA, 19 nt, Artificial Sequence
  Description of Artificial Sequence: Synthetic oligonucleotide
  Sense strand starting at position 402 of SEQ ID NO: 1886511
ucaagaucuuuccugagca

SEQ ID NO: 2414827 - RNA, 19 nt, Artificial Sequence
  Description of Artificial Sequence: Synthetic oligonucleotide
  Antisense strand to SEQ ID NO: 2414826
ugcucaggaaagaucuuga

SEQ ID NO: 2414828 - RNA, 19 nt, Artificial Sequence
  Description of Artificial Sequence: Synthetic oligonucleotide
  Sense strand starting at position 591 of SEQ ID NO: 1886511
agggcucucuuggcagaga

SEQ ID NO: 2414829 - RNA, 19 nt, Artificial Sequence
  Description of Artificial Sequence: Synthetic oligonucleotide
  Antisense strand to SEQ ID NO: 2414828
ucucugccaagagagcccu

SEQ ID NO: 2414830 - RNA, 19 nt, Artificial Sequence
  Description of Artificial Sequence: Synthetic oligonucleotide
  Sense strand starting at position 1131 of SEQ ID NO: 1886511
ggucuaccuccaugaaguu

SEQ ID NO: 2414831 - RNA, 19 nt, Artificial Sequence
  Description of Artificial Sequence: Synthetic oligonucleotide
  Antisense strand to SEQ ID NO: 2414830
aacuucauggagguagacc

SEQ ID NO: 2414832 - RNA, 19 nt, Artificial Sequence
  Description of Artificial Sequence: Synthetic oligonucleotide
  Sense strand starting at position 1241 of SEQ ID NO: 1886511
guaagagugaaucaauguc

SEQ ID NO: 2414833 - RNA, 19 nt, Artificial Sequence
  Description of Artificial Sequence: Synthetic oligonucleotide
  Antisense strand to SEQ ID NO: 2414832
gacauugauucacucuuac

SEQ ID NO: 2414834 - RNA, 19 nt, Artificial Sequence
  Description of Artificial Sequence: Synthetic oligonucleotide
  Sense strand starting at position 1253 of SEQ ID NO: 1886511
caaugucaugcauguagga

SEQ ID NO: 2414835 - RNA, 19 nt, Artificial Sequence
  Description of Artificial Sequence: Synthetic oligonucleotide
  Antisense strand to SEQ ID NO: 2414834
uccuacaugcaugacauug

SEQ ID NO: 2414836 - RNA, 19 nt, Artificial Sequence
  Description of Artificial Sequence: Synthetic oligonucleotide
  Sense strand starting at position 1266 of SEQ ID NO: 1886511
guaggaugucuguggaaca

SEQ ID NO: 2414837 - RNA, 19 nt, Artificial Sequence
  Description of Artificial Sequence: Synthetic oligonucleotide
  Antisense strand to SEQ ID NO: 2414836
uguuccacagacauccuac

SEQ ID NO: 2414838 - RNA, 19 nt, Artificial Sequence
  Description of Artificial Sequence: Synthetic oligonucleotide
  Sense strand starting at position 1303 of SEQ ID NO: 1886511
gugaauaguaacuaucguu

SEQ ID NO: 2414839 - RNA, 19 nt, Artificial Sequence
  Description of Artificial Sequence: Synthetic oligonucleotide
  Antisense strand to SEQ ID NO: 2414838
aacgauaguuacuauucac

SEQ ID NO: 2414840 - RNA, 19 nt, Artificial Sequence
  Description of Artificial Sequence: Synthetic oligonucleotide
  Sense strand starting at position 1342 of SEQ ID NO: 1886511
aucagucauuugcuugagu

SEQ ID NO: 2414841 - RNA, 19 nt, Artificial Sequence
  Description of Artificial Sequence: Synthetic oligonucleotide
  Antisense strand to SEQ ID NO: 2414840
acucaagcaaaugacugau

SEQ ID NO: 2414842 - RNA, 19 nt, Artificial Sequence
  Description of Artificial Sequence: Synthetic oligonucleotide
  Sense strand starting at position 1390 of SEQ ID NO: 1886511
acugaaucacugcaguuaa

SEQ ID NO: 2414843 - RNA, 19 nt, Artificial Sequence
  Description of Artificial Sequence: Synthetic oligonucleotide
  Antisense strand to SEQ ID NO: 2414842
uuaacugcagugauucagu

SEQ ID NO: 2414844 - RNA, 19 nt, Artificial Sequence
  Description of Artificial Sequence: Synthetic oligonucleotide
  Sense strand starting at position 1603 of SEQ ID NO: 1886511
cugggugguacugaguaau

SEQ ID NO: 2414845 - RNA, 19 nt, Artificial Sequence
  Description of Artificial Sequence: Synthetic oligonucleotide
  Antisense strand to SEQ ID NO: 2414844
auuacucaguaccacccag

SEQ ID NO: 2414846 - RNA, 19 nt, Artificial Sequence
  Description of Artificial Sequence: Synthetic oligonucleotide
  Sense strand starting at position 1606 of SEQ ID NO: 1886511
ggugguacugaguaauuau

SEQ ID NO: 2414847 - RNA, 19 nt, Artificial Sequence
  Description of Artificial Sequence: Synthetic oligonucleotide
  Antisense strand to SEQ ID NO: 2414846
auaauuacucaguaccacc

SEQ ID NO: 2414848 - RNA, 19 nt, Artificial Sequence
  Description of Artificial Sequence: Synthetic oligonucleotide
  Sense strand starting at position 1647 of SEQ ID NO: 1886511
gguauucugcugcagaaac

SEQ ID NO: 2414849 - RNA, 19 nt, Artificial Sequence
  Description of Artificial Sequence: Synthetic oligonucleotide
  Antisense strand to SEQ ID NO: 2414848
guuucugcagcagaauacc

SEQ ID NO: 2414850 - RNA, 19 nt, Artificial Sequence
  Description of Artificial Sequence: Synthetic oligonucleotide
  Sense strand starting at position 1670 of SEQ ID NO: 1886511
cguguaugaguuagcuagu

SEQ ID NO: 2414851 - RNA, 19 nt, Artificial Sequence
  Description of Artificial Sequence: Synthetic oligonucleotide
  Antisense strand to SEQ ID NO: 2414850
acuagcuaacucauacacg

SEQ ID NO: 2414852 - RNA, 19 nt, Artificial Sequence
  Description of Artificial Sequence: Synthetic oligonucleotide
  Sense strand starting at position 1705 of SEQ ID NO: 1886511
uacugagacucagcaguuu

SEQ ID NO: 2414853 - RNA, 19 nt, Artificial Sequence
  Description of Artificial Sequence: Synthetic oligonucleotide
  Antisense strand to SEQ ID NO: 2414852
aaacugcugagucucagua

SEQ ID NO: 2414854 - RNA, 19 nt, Artificial Sequence
  Description of Artificial Sequence: Synthetic oligonucleotide
  Sense strand starting at position 1832 of SEQ ID NO: 1886511
gcugcaauccaggauugca

SEQ ID NO: 2414855 - RNA, 19 nt, Artificial Sequence
  Description of Artificial Sequence: Synthetic oligonucleotide
  Antisense strand to SEQ ID NO: 2414854
ugcaauccuggauugcagc

SEQ ID NO: 2414856 - RNA, 19 nt, Artificial Sequence
  Description of Artificial Sequence: Synthetic oligonucleotide
  Sense strand starting at position 2042 of SEQ ID NO: 1886511
ugaccuaaucuuggaagua

SEQ ID NO: 2414857 - RNA, 19 nt, Artificial Sequence
  Description of Artificial Sequence: Synthetic oligonucleotide
  Antisense strand to SEQ ID NO: 2414856
uacuuccaagauuagguca

SEQ ID NO: 2414858 - RNA, 19 nt, Artificial Sequence
  Description of Artificial Sequence: Synthetic oligonucleotide
  Sense strand starting at position 2066 of SEQ ID NO: 1886511
gcaucacuucugcagauuc

SEQ ID NO: 2414859 - RNA, 19 nt, Artificial Sequence
  Description of Artificial Sequence: Synthetic oligonucleotide
  Antisense strand to SEQ ID NO: 2414858
gaaucugcagaagugaugc

SEQ ID NO: 2414860 - RNA, 19 nt, Artificial Sequence
  Description of Artificial Sequence: Synthetic oligonucleotide
  Sense strand starting at position 2079 of SEQ ID NO: 1886511
agauucuauuggucacaca

SEQ ID NO: 2414861 - RNA, 19 nt, Artificial Sequence
  Description of Artificial Sequence: Synthetic oligonucleotide
  Antisense strand to SEQ ID NO: 2414860
ugugugaccaauagaaucu

SEQ ID NO: 2414862 - RNA, 19 nt, Artificial Sequence
  Description of Artificial Sequence: Synthetic oligonucleotide
  Sense strand starting at position 2186 of SEQ ID NO: 1886511
ccacgacaugucugagauc

SEQ ID NO: 2414863 - RNA, 19 nt, Artificial Sequence
  Description of Artificial Sequence: Synthetic oligonucleotide
  Antisense strand to SEQ ID NO: 2414862
gaucucagacaugucgugg

SEQ ID NO: 2414864 - RNA, 19 nt, Artificial Sequence
  Description of Artificial Sequence: Synthetic oligonucleotide
  Sense strand starting at position 2198 of SEQ ID NO: 1886511
ugagaucaguucccaagga

SEQ ID NO: 2414865 - RNA, 19 nt, Artificial Sequence
  Description of Artificial Sequence: Synthetic oligonucleotide
  Antisense strand to SEQ ID NO: 2414864
uccuugggaacugaucuca

SEQ ID NO: 2414866 - RNA, 19 nt, Artificial Sequence
  Description of Artificial Sequence: Synthetic oligonucleotide
  Sense strand starting at position 2279 of SEQ ID NO: 1886511
guggcugccauccauuaga

SEQ ID NO: 2414867 - RNA, 19 nt, Artificial Sequence
  Description of Artificial Sequence: Synthetic oligonucleotide
  Antisense strand to SEQ ID NO: 2414866
ucuaauggauggcagccac

SEQ ID NO: 2414868 - RNA, 19 nt, Artificial Sequence
  Description of Artificial Sequence: Synthetic oligonucleotide
  Sense strand starting at position 2282 of SEQ ID NO: 1886511
gcugccauccauuagaauc

SEQ ID NO: 2414869 - RNA, 19 nt, Artificial Sequence
  Description of Artificial Sequence: Synthetic oligonucleotide
  Antisense strand to SEQ ID NO: 2414868
gauucuaauggauggcagc

SEQ ID NO: 2414870 - RNA, 19 nt, Artificial Sequence
  Description of Artificial Sequence: Synthetic oligonucleotide
  Sense strand starting at position 2360 of SEQ ID NO: 1886511
gggagguuggugcguauuu

SEQ ID NO: 2414871 - RNA, 19 nt, Artificial Sequence
  Description of Artificial Sequence: Synthetic oligonucleotide
  Antisense strand to SEQ ID NO: 2414870
aaauacgcaccaaccuccc

SEQ ID NO: 2414872 - RNA, 19 nt, Artificial Sequence
  Description of Artificial Sequence: Synthetic oligonucleotide
  Sense strand starting at position 2782 of SEQ ID NO: 1886511
acuguuuccagagguagac

SEQ ID NO: 2414873 - RNA, 19 nt, Artificial Sequence
  Description of Artificial Sequence: Synthetic oligonucleotide
  Antisense strand to SEQ ID NO: 2414872
gucuaccucuggaaacagu

SEQ ID NO: 2414874 - RNA, 19 nt, Artificial Sequence
  Description of Artificial Sequence: Synthetic oligonucleotide
  Sense strand starting at position 2881 of SEQ ID NO: 1886511
cagugacuuggguagcaaa

SEQ ID NO: 2414875 - RNA, 19 nt, Artificial Sequence
  Description of Artificial Sequence: Synthetic oligonucleotide
  Antisense strand to SEQ ID NO: 2414874
uuugcuacccaagucacug

SEQ ID NO: 2414876 - RNA, 19 nt, Artificial Sequence
  Description of Artificial Sequence: Synthetic oligonucleotide
  Sense strand starting at position 2942 of SEQ ID NO: 1886511
ucacaucuacaccgugaga

SEQ ID NO: 2414877 - RNA, 19 nt, Artificial Sequence
  Description of Artificial Sequence: Synthetic oligonucleotide
  Antisense strand to SEQ ID NO: 2414876
ucucacgguguagauguga

SEQ ID NO: 2414878 - RNA, 19 nt, Artificial Sequence
  Description of Artificial Sequence: Synthetic oligonucleotide
  Sense strand starting at position 3556 of SEQ ID NO: 1886511
uacauagaugcguggauga

SEQ ID NO: 2414879 - RNA, 19 nt, Artificial Sequence
  Description of Artificial Sequence: Synthetic oligonucleotide
  Antisense strand to SEQ ID NO: 2414878
ucauccacgcaucuaugua

SEQ ID NO: 2414880 - RNA, 19 nt, Artificial Sequence
  Description of Artificial Sequence: Synthetic oligonucleotide
  Sense strand starting at position 3558 of SEQ ID NO: 1886511
cauagaugcguggaugagu

SEQ ID NO: 2414881 - RNA, 19 nt, Artificial Sequence
  Description of Artificial Sequence: Synthetic oligonucleotide
  Antisense strand to SEQ ID NO: 2414880
acucauccacgcaucuaug

SEQ ID NO: 2414882 - RNA, 19 nt, Artificial Sequence
  Description of Artificial Sequence: Synthetic oligonucleotide
  Sense strand starting at position 3572 of SEQ ID NO: 1886511
ugagucaaucaguaggugu

SEQ ID NO: 2414883 - RNA, 19 nt, Artificial Sequence
  Description of Artificial Sequence: Synthetic oligonucleotide
  Antisense strand to SEQ ID NO: 2414882
acaccuacugauugacuca

SEQ ID NO: 2414884 - RNA, 19 nt, Artificial Sequence
  Description of Artificial Sequence: Synthetic oligonucleotide
  Sense strand starting at position 3612 of SEQ ID NO: 1886511
gaaugaguggcugggugaa

SEQ ID NO: 2414885 - RNA, 19 nt, Artificial Sequence
  Description of Artificial Sequence: Synthetic oligonucleotide
  Antisense strand to SEQ ID NO: 2414884
uucacccagccacucauuc

SEQ ID NO: 2414886 - RNA, 19 nt, Artificial Sequence
  Description of Artificial Sequence: Synthetic oligonucleotide
  Sense strand starting at position 3623 of SEQ ID NO: 1886511
ugggugaaugggugaguau

SEQ ID NO: 2414887 - RNA, 19 nt, Artificial Sequence
  Description of Artificial Sequence: Synthetic oligonucleotide
  Antisense strand to SEQ ID NO: 2414886
auacucacccauucaccca

SEQ ID NO: 2414888 - RNA, 19 nt, Artificial Sequence
  Description of Artificial Sequence: Synthetic oligonucleotide
  Sense strand starting at position 3630 of SEQ ID NO: 1886511
augggugaguauguggaua

SEQ ID NO: 2414889 - RNA, 19 nt, Artificial Sequence
  Description of Artificial Sequence: Synthetic oligonucleotide
  Antisense strand to SEQ ID NO: 2414888
uauccacauacucacccau

SEQ ID NO: 2414890 - RNA, 19 nt, Artificial Sequence
  Description of Artificial Sequence: Synthetic oligonucleotide
  Sense strand starting at position 3740 of SEQ ID NO: 1886511
gugugagugaauggauaaa

SEQ ID NO: 2414891 - RNA, 19 nt, Artificial Sequence
  Description of Artificial Sequence: Synthetic oligonucleotide
  Antisense strand to SEQ ID NO: 2414890
uuuauccauucacucacac

SEQ ID NO: 2414892 - RNA, 19 nt, Artificial Sequence
  Description of Artificial Sequence: Synthetic oligonucleotide
  Sense strand starting at position 3781 of SEQ ID NO: 1886511
ggugaguagguggguaaau

SEQ ID NO: 2414893 - RNA, 19 nt, Artificial Sequence
  Description of Artificial Sequence: Synthetic oligonucleotide
  Antisense strand to SEQ ID NO: 2414892
auuuacccaccuacucacc

SEQ ID NO: 2414894 - RNA, 19 nt, Artificial Sequence
  Description of Artificial Sequence: Synthetic oligonucleotide
  Sense strand starting at position 3846 of SEQ ID NO: 1886511
cgaguugauggacgaguga

SEQ ID NO: 2414895 - RNA, 19 nt, Artificial Sequence
  Description of Artificial Sequence: Synthetic oligonucleotide
  Antisense strand to SEQ ID NO: 2414894
ucacucguccaucaacucg

SEQ ID NO: 2414896 - RNA, 19 nt, Artificial Sequence
  Description of Artificial Sequence: Synthetic oligonucleotide
  Sense strand starting at position 3855 of SEQ ID NO: 1886511
ggacgagugauagguagau

SEQ ID NO: 2414897 - RNA, 19 nt, Artificial Sequence
  Description of Artificial Sequence: Synthetic oligonucleotide
  Antisense strand to SEQ ID NO: 2414896
aucuaccuaucacucgucc

SEQ ID NO: 2414898 - RNA, 19 nt, Artificial Sequence
  Description of Artificial Sequence: Synthetic oligonucleotide
  Sense strand starting at position 3901 of SEQ ID NO: 1886511
gggugaaugggucagugga

SEQ ID NO: 2414899 - RNA, 19 nt, Artificial Sequence
  Description of Artificial Sequence: Synthetic oligonucleotide
  Antisense strand to SEQ ID NO: 2414898
uccacugacccauucaccc

SEQ ID NO: 2414900 - RNA, 19 nt, Artificial Sequence
  Description of Artificial Sequence: Synthetic oligonucleotide
  Sense strand starting at position 125 of SEQ ID NO: 1886512
cauggaagucuugggaguu

SEQ ID NO: 2414901 - RNA, 19 nt, Artificial Sequence
  Description of Artificial Sequence: Synthetic oligonucleotide
  Antisense strand to SEQ ID NO: 2414900
aacucccaagacuuccaug

SEQ ID NO: 2414902 - RNA, 19 nt, Artificial Sequence
  Description of Artificial Sequence: Synthetic oligonucleotide
  Sense strand starting at position 152 of SEQ ID NO: 1886512
ucccaugaaugagugacau

SEQ ID NO: 2414903 - RNA, 19 nt, Artificial Sequence
  Description of Artificial Sequence: Synthetic oligonucleotide
  Antisense strand to SEQ ID NO: 2414902
augucacucauucauggga

SEQ ID NO: 2414904 - RNA, 19 nt, Artificial Sequence
  Description of Artificial Sequence: Synthetic oligonucleotide
  Sense strand starting at position 162 of SEQ ID NO: 1886512
gagugacauugaguaccua

SEQ ID NO: 2414905 - RNA, 19 nt, Artificial Sequence
  Description of Artificial Sequence: Synthetic oligonucleotide
  Antisense strand to SEQ ID NO: 2414904
uagguacucaaugucacuc

SEQ ID NO: 2414906 - RNA, 19 nt, Artificial Sequence
  Description of Artificial Sequence: Synthetic oligonucleotide
  Sense strand starting at position 163 of SEQ ID NO: 1886512
agugacauugaguaccuau

SEQ ID NO: 2414907 - RNA, 19 nt, Artificial Sequence
  Description of Artificial Sequence: Synthetic oligonucleotide
  Antisense strand to SEQ ID NO: 2414906
auagguacucaaugucacu

SEQ ID NO: 2414908 - RNA, 19 nt, Artificial Sequence
  Description of Artificial Sequence: Synthetic oligonucleotide
  Sense strand starting at position 197 of SEQ ID NO: 1886512
cuauauuucucagugcuuc

SEQ ID NO: 2414909 - RNA, 19 nt, Artificial Sequence
  Description of Artificial Sequence: Synthetic oligonucleotide
  Antisense strand to SEQ ID NO: 2414908
gaagcacugagaaauauag

SEQ ID NO: 2414910 - RNA, 19 nt, Artificial Sequence
  Description of Artificial Sequence: Synthetic oligonucleotide
  Sense strand starting at position 213 of SEQ ID NO: 1886512
uuccacuuccgugauuaag

SEQ ID NO: 2414911 - RNA, 19 nt, Artificial Sequence
  Description of Artificial Sequence: Synthetic oligonucleotide
  Antisense strand to SEQ ID NO: 2414910
cuuaaucacggaaguggaa

SEQ ID NO: 2414912 - RNA, 19 nt, Artificial Sequence
  Description of Artificial Sequence: Synthetic oligonucleotide
  Sense strand starting at position 882 of SEQ ID NO: 1886512
gguacauggaaauguggaa

SEQ ID NO: 2414913 - RNA, 19 nt, Artificial Sequence
  Description of Artificial Sequence: Synthetic oligonucleotide
  Antisense strand to SEQ ID NO: 2414912
uuccacauuuccauguacc

SEQ ID NO: 2414914 - RNA, 19 nt, Artificial Sequence
  Description of Artificial Sequence: Synthetic oligonucleotide
  Sense strand starting at position 921 of SEQ ID NO: 1886512
gcccgaggauaauuaaauc

SEQ ID NO: 2414915 - RNA, 19 nt, Artificial Sequence
  Description of Artificial Sequence: Synthetic oligonucleotide
  Antisense strand to SEQ ID NO: 2414914
gauuuaauuauccucgggc

SEQ ID NO: 2414916 - RNA, 19 nt, Artificial Sequence
  Description of Artificial Sequence: Synthetic oligonucleotide
  Sense strand starting at position 1266 of SEQ ID NO: 1886512
ucauuuggcugcccugaga

SEQ ID NO: 2414917 - RNA, 19 nt, Artificial Sequence
  Description of Artificial Sequence: Synthetic oligonucleotide
  Antisense strand to SEQ ID NO: 2414916
ucucagggcagccaaauga

SEQ ID NO: 2414918 - RNA, 19 nt, Artificial Sequence
  Description of Artificial Sequence: Synthetic oligonucleotide
  Sense strand starting at position 1333 of SEQ ID NO: 1886512
ggacaugcucaaugaauac

SEQ ID NO: 2414919 - RNA, 19 nt, Artificial Sequence
  Description of Artificial Sequence: Synthetic oligonucleotide
  Antisense strand to SEQ ID NO: 2414918
guauucauugagcaugucc

SEQ ID NO: 2414920 - RNA, 19 nt, Artificial Sequence
  Description of Artificial Sequence: Synthetic oligonucleotide
  Sense strand starting at position 1376 of SEQ ID NO: 1886512
gaggauucguuucuaggau

SEQ ID NO: 2414921 - RNA, 19 nt, Artificial Sequence
  Description of Artificial Sequence: Synthetic oligonucleotide
  Antisense strand to SEQ ID NO: 2414920
auccuagaaacgaauccuc

SEQ ID NO: 2414922 - RNA, 19 nt, Artificial Sequence
  Description of Artificial Sequence: Synthetic oligonucleotide
  Sense strand starting at position 1527 of SEQ ID NO: 1886512
auccaaugugcugagucua

SEQ ID NO: 2414923 - RNA, 19 nt, Artificial Sequence
  Description of Artificial Sequence: Synthetic oligonucleotide
  Antisense strand to SEQ ID NO: 2414922
uagacucagcacauuggau

SEQ ID NO: 2414924 - RNA, 19 nt, Artificial Sequence
  Description of Artificial Sequence: Synthetic oligonucleotide
  Sense strand starting at position 1532 of SEQ ID NO: 1886512
augugcugagucuauggau

SEQ ID NO: 2414925 - RNA, 19 nt, Artificial Sequence
  Description of Artificial Sequence: Synthetic oligonucleotide
  Antisense strand to SEQ ID NO: 2414924
auccauagacucagcacau

SEQ ID NO: 2414926 - RNA, 19 nt, Artificial Sequence
  Description of Artificial Sequence: Synthetic oligonucleotide
  Sense strand starting at position 1541 of SEQ ID NO: 1886512
gucuauggauuacugagua

SEQ ID NO: 2414927 - RNA, 19 nt, Artificial Sequence
  Description of Artificial Sequence: Synthetic oligonucleotide
  Antisense strand to SEQ ID NO: 2414926
uacucaguaauccauagac

SEQ ID NO: 2414928 - RNA, 19 nt, Artificial Sequence
  Description of Artificial Sequence: Synthetic oligonucleotide
  Sense strand starting at position 1545 of SEQ ID NO: 1886512
auggauuacugaguaagca

SEQ ID NO: 2414929 - RNA, 19 nt, Artificial Sequence
  Description of Artificial Sequence: Synthetic oligonucleotide
  Antisense strand to SEQ ID NO: 2414928
ugcuuacucaguaauccau

SEQ ID NO: 2414930 - RNA, 19 nt, Artificial Sequence
  Description of Artificial Sequence: Synthetic oligonucleotide
  Sense strand starting at position 1546 of SEQ ID NO: 1886512
uggauuacugaguaagcau

SEQ ID NO: 2414931 - RNA, 19 nt, Artificial Sequence
  Description of Artificial Sequence: Synthetic oligonucleotide
  Antisense strand to SEQ ID NO: 2414930
augcuuacucaguaaucca

SEQ ID NO: 2414932 - RNA, 19 nt, Artificial Sequence
  Description of Artificial Sequence: Synthetic oligonucleotide
  Sense strand starting at position 1706 of SEQ ID NO: 1886512
ugaucugccuaaucucaga

SEQ ID NO: 2414933 - RNA, 19 nt, Artificial Sequence
  Description of Artificial Sequence: Synthetic oligonucleotide
  Antisense strand to SEQ ID NO: 2414932
ucugagauuaggcagauca

SEQ ID NO: 2414934 - RNA, 19 nt, Artificial Sequence
  Description of Artificial Sequence: Synthetic oligonucleotide
  Sense strand starting at position 1752 of SEQ ID NO: 1886512
gggaaauacuuucuuuccu

SEQ ID NO: 2414935 - RNA, 19 nt, Artificial Sequence
  Description of Artificial Sequence: Synthetic oligonucleotide
  Antisense strand to SEQ ID NO: 2414934
aggaaagaaaguauuuccc

SEQ ID NO: 2414936 - RNA, 19 nt, Artificial Sequence
  Description of Artificial Sequence: Synthetic oligonucleotide
  Sense strand starting at position 1869 of SEQ ID NO: 1886512
uggccuuucugaguaagga

SEQ ID NO: 2414937 - RNA, 19 nt, Artificial Sequence
  Description of Artificial Sequence: Synthetic oligonucleotide
  Antisense strand to SEQ ID NO: 2414936
uccuuacucagaaaggcca

SEQ ID NO: 2414938 - RNA, 19 nt, Artificial Sequence
  Description of Artificial Sequence: Synthetic oligonucleotide
  Sense strand starting at position 2201 of SEQ ID NO: 1886512
gcaaacagucgacagguaa

SEQ ID NO: 2414939 - RNA, 19 nt, Artificial Sequence
  Description of Artificial Sequence: Synthetic oligonucleotide
  Antisense strand to SEQ ID NO: 2414938
uuaccugucgacuguuugc

SEQ ID NO: 2414940 - RNA, 19 nt, Artificial Sequence
  Description of Artificial Sequence: Synthetic oligonucleotide
  Sense strand starting at position 2380 of SEQ ID NO: 1886512
gggcaugugacccaguauc

SEQ ID NO: 2414941 - RNA, 19 nt, Artificial Sequence
  Description of Artificial Sequence: Synthetic oligonucleotide
  Antisense strand to SEQ ID NO: 2414940
gauacugggucacaugccc

SEQ ID NO: 2414942 - RNA, 19 nt, Artificial Sequence
  Description of Artificial Sequence: Synthetic oligonucleotide
  Sense strand starting at position 2392 of SEQ ID NO: 1886512
caguaucagccaugagauc

SEQ ID NO: 2414943 - RNA, 19 nt, Artificial Sequence
  Description of Artificial Sequence: Synthetic oligonucleotide
  Antisense strand to SEQ ID NO: 2414942
gaucucauggcugauacug

SEQ ID NO: 2414944 - RNA, 19 nt, Artificial Sequence
  Description of Artificial Sequence: Synthetic oligonucleotide
  Sense strand starting at position 2393 of SEQ ID NO: 1886512
aguaucagccaugagauca

SEQ ID NO: 2414945 - RNA, 19 nt, Artificial Sequence
  Description of Artificial Sequence: Synthetic oligonucleotide
  Antisense strand to SEQ ID NO: 2414944
ugaucucauggcugauacu

SEQ ID NO: 2414946 - RNA, 19 nt, Artificial Sequence
  Description of Artificial Sequence: Synthetic oligonucleotide
  Sense strand starting at position 2464 of SEQ ID NO: 1886512
gaagcuaaggcuggaagau

SEQ ID NO: 2414947 - RNA, 19 nt, Artificial Sequence
  Description of Artificial Sequence: Synthetic oligonucleotide
  Antisense strand to SEQ ID NO: 2414946
aucuuccagccuuagcuuc

SEQ ID NO: 2414948 - RNA, 19 nt, Artificial Sequence
  Description of Artificial Sequence: Synthetic oligonucleotide
  Sense strand starting at position 2527 of SEQ ID NO: 1886512
uugcgauugguccagagau

SEQ ID NO: 2414949 - RNA, 19 nt, Artificial Sequence
  Description of Artificial Sequence: Synthetic oligonucleotide
  Antisense strand to SEQ ID NO: 2414948
aucucuggaccaaucgcaa

SEQ ID NO: 2414950 - RNA, 19 nt, Artificial Sequence
  Description of Artificial Sequence: Synthetic oligonucleotide
  Sense strand starting at position 2632 of SEQ ID NO: 1886512
auugcugaacugugaggau

SEQ ID NO: 2414951 - RNA, 19 nt, Artificial Sequence
  Description of Artificial Sequence: Synthetic oligonucleotide
  Antisense strand to SEQ ID NO: 2414950
auccucacaguucagcaau

SEQ ID NO: 2414952 - RNA, 19 nt, Artificial Sequence
  Description of Artificial Sequence: Synthetic oligonucleotide
  Sense strand starting at position 2745 of SEQ ID NO: 1886512
agaccaagauuuggagaca

SEQ ID NO: 2414953 - RNA, 19 nt, Artificial Sequence
  Description of Artificial Sequence: Synthetic oligonucleotide
  Antisense strand to SEQ ID NO: 2414952
ugucuccaaaucuuggucu

SEQ ID NO: 2414954 - RNA, 19 nt, Artificial Sequence
  Description of Artificial Sequence: Synthetic oligonucleotide
  Sense strand starting at position 2874 of SEQ ID NO: 1886512
guuaauacaggucacauau

SEQ ID NO: 2414955 - RNA, 19 nt, Artificial Sequence
  Description of Artificial Sequence: Synthetic oligonucleotide
  Antisense strand to SEQ ID NO: 2414954
auaugugaccuguauuaac

SEQ ID NO: 2414956 - RNA, 19 nt, Artificial Sequence
  Description of Artificial Sequence: Synthetic oligonucleotide
  Sense strand starting at position 2914 of SEQ ID NO: 1886512
caugaaauugcuuagucag

SEQ ID NO: 2414957 - RNA, 19 nt, Artificial Sequence
  Description of Artificial Sequence: Synthetic oligonucleotide
  Antisense strand to SEQ ID NO: 2414956
cugacuaagcaauuucaug

SEQ ID NO: 2414958 - RNA, 19 nt, Artificial Sequence
  Description of Artificial Sequence: Synthetic oligonucleotide
  Sense strand starting at position 2916 of SEQ ID NO: 1886512
ugaaauugcuuagucagau

SEQ ID NO: 2414959 - RNA, 19 nt, Artificial Sequence
  Description of Artificial Sequence: Synthetic oligonucleotide
  Antisense strand to SEQ ID NO: 2414958
aucugacuaagcaauuuca

SEQ ID NO: 2414960 - RNA, 19 nt, Artificial Sequence
  Description of Artificial Sequence: Synthetic oligonucleotide
  Sense strand starting at position 2917 of SEQ ID NO: 1886512
gaaauugcuuagucagauu

SEQ ID NO: 2414961 - RNA, 19 nt, Artificial Sequence
  Description of Artificial Sequence: Synthetic oligonucleotide
  Antisense strand to SEQ ID NO: 2414960
aaucugacuaagcaauuuc

SEQ ID NO: 2414962 - RNA, 19 nt, Artificial Sequence
  Description of Artificial Sequence: Synthetic oligonucleotide
  Sense strand starting at position 2940 of SEQ ID NO: 1886512
accagaaucuuauugcgaa

SEQ ID NO: 2414963 - RNA, 19 nt, Artificial Sequence
  Description of Artificial Sequence: Synthetic oligonucleotide
  Antisense strand to SEQ ID NO: 2414962
uucgcaauaagauucuggu

SEQ ID NO: 2414964 - RNA, 19 nt, Artificial Sequence
  Description of Artificial Sequence: Synthetic oligonucleotide
  Sense strand starting at position 3204 of SEQ ID NO: 1886512
acagguaauuaaguuuaga

SEQ ID NO: 2414965 - RNA, 19 nt, Artificial Sequence
  Description of Artificial Sequence: Synthetic oligonucleotide
  Antisense strand to SEQ ID NO: 2414964
ucuaaacuuaauuaccugu

SEQ ID NO: 2414966 - RNA, 19 nt, Artificial Sequence
  Description of Artificial Sequence: Synthetic oligonucleotide
  Sense strand starting at position 3242 of SEQ ID NO: 1886512
ccucuaugauggguuuaau

SEQ ID NO: 2414967 - RNA, 19 nt, Artificial Sequence
  Description of Artificial Sequence: Synthetic oligonucleotide
  Antisense strand to SEQ ID NO: 2414966
auuaaacccaucauagagg

SEQ ID NO: 2414968 - RNA, 19 nt, Artificial Sequence
  Description of Artificial Sequence: Synthetic oligonucleotide
  Sense strand starting at position 3245 of SEQ ID NO: 1886512
cuaugauggguuuaauguc

SEQ ID NO: 2414969 - RNA, 19 nt, Artificial Sequence
  Description of Artificial Sequence: Synthetic oligonucleotide
  Antisense strand to SEQ ID NO: 2414968
gacauuaaacccaucauag

SEQ ID NO: 2414970 - RNA, 19 nt, Artificial Sequence
  Description of Artificial Sequence: Synthetic oligonucleotide
  Sense strand starting at position 3254 of SEQ ID NO: 1886512
guuuaaugucaguauagga

SEQ ID NO: 2414971 - RNA, 19 nt, Artificial Sequence
  Description of Artificial Sequence: Synthetic oligonucleotide
  Antisense strand to SEQ ID NO: 2414970
uccuauacugacauuaaac

SEQ ID NO: 2414972 - RNA, 19 nt, Artificial Sequence
  Description of Artificial Sequence: Synthetic oligonucleotide
  Sense strand starting at position 3393 of SEQ ID NO: 1886512
gggagauguagccaucuac

SEQ ID NO: 2414973 - RNA, 19 nt, Artificial Sequence
  Description of Artificial Sequence: Synthetic oligonucleotide
  Antisense strand to SEQ ID NO: 2414972
guagauggcuacaucuccc

SEQ ID NO: 2414974 - RNA, 19 nt, Artificial Sequence
  Description of Artificial Sequence: Synthetic oligonucleotide
  Sense strand starting at position 3544 of SEQ ID NO: 1886512
gccugagaagaccgaaaua

SEQ ID NO: 2414975 - RNA, 19 nt, Artificial Sequence
  Description of Artificial Sequence: Synthetic oligonucleotide
  Antisense strand to SEQ ID NO: 2414974
uauuucggucuucucaggc

SEQ ID NO: 2414976 - RNA, 19 nt, Artificial Sequence
  Description of Artificial Sequence: Synthetic oligonucleotide
  Sense strand starting at position 3555 of SEQ ID NO: 1886512
ccgaaauagucaccaucau

SEQ ID NO: 2414977 - RNA, 19 nt, Artificial Sequence
  Description of Artificial Sequence: Synthetic oligonucleotide
  Antisense strand to SEQ ID NO: 2414976
augauggugacuauuucgg

SEQ ID NO: 2414978 - RNA, 19 nt, Artificial Sequence
  Description of Artificial Sequence: Synthetic oligonucleotide
  Sense strand starting at position 3556 of SEQ ID NO: 1886512
cgaaauagucaccaucauu

SEQ ID NO: 2414979 - RNA, 19 nt, Artificial Sequence
  Description of Artificial Sequence: Synthetic oligonucleotide
  Antisense strand to SEQ ID NO: 2414978
aaugauggugacuauuucg

SEQ ID NO: 2414980 - RNA, 19 nt, Artificial Sequence
  Description of Artificial Sequence: Synthetic oligonucleotide
  Sense strand starting at position 63 of SEQ ID NO: 1886513
gcccucuccuuaugaggga

SEQ ID NO: 2414981 - RNA, 19 nt, Artificial Sequence
  Description of Artificial Sequence: Synthetic oligonucleotide
  Antisense strand to SEQ ID NO: 2414980
ucccucauaaggagagggc

SEQ ID NO: 2414982 - RNA, 19 nt, Artificial Sequence
  Description of Artificial Sequence: Synthetic oligonucleotide
  Sense strand starting at position 221 of SEQ ID NO: 1886513
ucauauuuguugugaacug

SEQ ID NO: 2414983 - RNA, 19 nt, Artificial Sequence
  Description of Artificial Sequence: Synthetic oligonucleotide
  Antisense strand to SEQ ID NO: 2414982
caguucacaacaaauauga

SEQ ID NO: 2414984 - RNA, 19 nt, Artificial Sequence
  Description of Artificial Sequence: Synthetic oligonucleotide
  Sense strand starting at position 662 of SEQ ID NO: 1886513
uucuguaucuuguaaggac

SEQ ID NO: 2414985 - RNA, 19 nt, Artificial Sequence
  Description of Artificial Sequence: Synthetic oligonucleotide
  Antisense strand to SEQ ID NO: 2414984
guccuuacaagauacagaa

SEQ ID NO: 2414986 - RNA, 19 nt, Artificial Sequence
  Description of Artificial Sequence: Synthetic oligonucleotide
  Sense strand starting at position 676 of SEQ ID NO: 1886513
aggacagucucauugcaug

SEQ ID NO: 2414987 - RNA, 19 nt, Artificial Sequence
  Description of Artificial Sequence: Synthetic oligonucleotide
  Antisense strand to SEQ ID NO: 2414986
caugcaaugagacuguccu

SEQ ID NO: 2414988 - RNA, 19 nt, Artificial Sequence
  Description of Artificial Sequence: Synthetic oligonucleotide
  Sense strand starting at position 690 of SEQ ID NO: 1886513
gcauguagggcucaccuua

SEQ ID NO: 2414989 - RNA, 19 nt, Artificial Sequence
  Description of Artificial Sequence: Synthetic oligonucleotide
  Antisense strand to SEQ ID NO: 2414988
uaaggugagcccuacaugc

SEQ ID NO: 2414990 - RNA, 19 nt, Artificial Sequence
  Description of Artificial Sequence: Synthetic oligonucleotide
  Sense strand starting at position 835 of SEQ ID NO: 1886513
gccauuaaaucacaaagag

SEQ ID NO: 2414991 - RNA, 19 nt, Artificial Sequence
  Description of Artificial Sequence: Synthetic oligonucleotide
  Antisense strand to SEQ ID NO: 2414990
cucuuugugauuuaauggc

SEQ ID NO: 2414992 - RNA, 19 nt, Artificial Sequence
  Description of Artificial Sequence: Synthetic oligonucleotide
  Sense strand starting at position 998 of SEQ ID NO: 1886513
cuggcugucuucuacagau

SEQ ID NO: 2414993 - RNA, 19 nt, Artificial Sequence
  Description of Artificial Sequence: Synthetic oligonucleotide
  Antisense strand to SEQ ID NO: 2414992
aucuguagaagacagccag

SEQ ID NO: 2414994 - RNA, 19 nt, Artificial Sequence
  Description of Artificial Sequence: Synthetic oligonucleotide
  Sense strand starting at position 1000 of SEQ ID NO: 1886513
ggcugucuucuacagauga

SEQ ID NO: 2414995 - RNA, 19 nt, Artificial Sequence
  Description of Artificial Sequence: Synthetic oligonucleotide
  Antisense strand to SEQ ID NO: 2414994
ucaucuguagaagacagcc

SEQ ID NO: 2414996 - RNA, 19 nt, Artificial Sequence
  Description of Artificial Sequence: Synthetic oligonucleotide
  Sense strand starting at position 1004 of SEQ ID NO: 1886513
gucuucuacagaugaggaa

SEQ ID NO: 2414997 - RNA, 19 nt, Artificial Sequence
  Description of Artificial Sequence: Synthetic oligonucleotide
  Antisense strand to SEQ ID NO: 2414996
uuccucaucuguagaagac

SEQ ID NO: 2414998 - RNA, 19 nt, Artificial Sequence
  Description of Artificial Sequence: Synthetic oligonucleotide
  Sense strand starting at position 1085 of SEQ ID NO: 1886513
ggagcucacuugguaccaa

SEQ ID NO: 2414999 - RNA, 19 nt, Artificial Sequence
  Description of Artificial Sequence: Synthetic oligonucleotide
  Antisense strand to SEQ ID NO: 2414998
uugguaccaagugagcucc

SEQ ID NO: 2415000 - RNA, 19 nt, Artificial Sequence
  Description of Artificial Sequence: Synthetic oligonucleotide
  Sense strand starting at position 1086 of SEQ ID NO: 1886513
gagcucacuugguaccaaa

SEQ ID NO: 2415001 - RNA, 19 nt, Artificial Sequence
  Description of Artificial Sequence: Synthetic oligonucleotide
  Antisense strand to SEQ ID NO: 2415000
uuugguaccaagugagcuc

SEQ ID NO: 2415002 - RNA, 19 nt, Artificial Sequence
  Description of Artificial Sequence: Synthetic oligonucleotide
  Sense strand starting at position 1181 of SEQ ID NO: 1886513
aucuuucuccaaggagcuu

SEQ ID NO: 2415003 - RNA, 19 nt, Artificial Sequence
  Description of Artificial Sequence: Synthetic oligonucleotide
  Antisense strand to SEQ ID NO: 2415002
aagcuccuuggagaaagau

SEQ ID NO: 2415004 - RNA, 19 nt, Artificial Sequence
  Description of Artificial Sequence: Synthetic oligonucleotide
  Sense strand starting at position 1192 of SEQ ID NO: 1886513
aggagcuugcuuuaucaau

SEQ ID NO: 2415005 - RNA, 19 nt, Artificial Sequence
  Description of Artificial Sequence: Synthetic oligonucleotide
  Antisense strand to SEQ ID NO: 2415004
auugauaaagcaagcuccu

SEQ ID NO: 2415006 - RNA, 19 nt, Artificial Sequence
  Description of Artificial Sequence: Synthetic oligonucleotide
  Sense strand starting at position 1517 of SEQ ID NO: 1886513
cagccaaacugucuugaug

SEQ ID NO: 2415007 - RNA, 19 nt, Artificial Sequence
  Description of Artificial Sequence: Synthetic oligonucleotide
  Antisense strand to SEQ ID NO: 2415006
caucaagacaguuuggcug

SEQ ID NO: 2415008 - RNA, 19 nt, Artificial Sequence
  Description of Artificial Sequence: Synthetic oligonucleotide
  Sense strand starting at position 1519 of SEQ ID NO: 1886513
gccaaacugucuugauguu

SEQ ID NO: 2415009 - RNA, 19 nt, Artificial Sequence
  Description of Artificial Sequence: Synthetic oligonucleotide
  Antisense strand to SEQ ID NO: 2415008
aacaucaagacaguuuggc

SEQ ID NO: 2415010 - RNA, 19 nt, Artificial Sequence
  Description of Artificial Sequence: Synthetic oligonucleotide
  Sense strand starting at position 1576 of SEQ ID NO: 1886513
guggccaguucccuggaau

SEQ ID NO: 2415011 - RNA, 19 nt, Artificial Sequence
  Description of Artificial Sequence: Synthetic oligonucleotide
  Antisense strand to SEQ ID NO: 2415010
auuccagggaacuggccac

SEQ ID NO: 2415012 - RNA, 19 nt, Artificial Sequence
  Description of Artificial Sequence: Synthetic oligonucleotide
  Sense strand starting at position 1577 of SEQ ID NO: 1886513
uggccaguucccuggaauc

SEQ ID NO: 2415013 - RNA, 19 nt, Artificial Sequence
  Description of Artificial Sequence: Synthetic oligonucleotide
  Antisense strand to SEQ ID NO: 2415012
gauuccagggaacuggcca

SEQ ID NO: 2415014 - RNA, 19 nt, Artificial Sequence
  Description of Artificial Sequence: Synthetic oligonucleotide
  Sense strand starting at position 1650 of SEQ ID NO: 1886513
ucagccuagaccugggaaa

SEQ ID NO: 2415015 - RNA, 19 nt, Artificial Sequence
  Description of Artificial Sequence: Synthetic oligonucleotide
  Antisense strand to SEQ ID NO: 2415014
uuucccaggucuaggcuga

SEQ ID NO: 2415016 - RNA, 19 nt, Artificial Sequence
  Description of Artificial Sequence: Synthetic oligonucleotide
  Sense strand starting at position 1651 of SEQ ID NO: 1886513
cagccuagaccugggaaau

SEQ ID NO: 2415017 - RNA, 19 nt, Artificial Sequence
  Description of Artificial Sequence: Synthetic oligonucleotide
  Antisense strand to SEQ ID NO: 2415016
auuucccaggucuaggcug

SEQ ID NO: 2415018 - RNA, 19 nt, Artificial Sequence
  Description of Artificial Sequence: Synthetic oligonucleotide
  Sense strand starting at position 1652 of SEQ ID NO: 1886513
agccuagaccugggaaaua

SEQ ID NO: 2415019 - RNA, 19 nt, Artificial Sequence
  Description of Artificial Sequence: Synthetic oligonucleotide
  Antisense strand to SEQ ID NO: 2415018
uauuucccaggucuaggcu

SEQ ID NO: 2415020 - RNA, 19 nt, Artificial Sequence
  Description of Artificial Sequence: Synthetic oligonucleotide
  Sense strand starting at position 1787 of SEQ ID NO: 1886513
agggaaaugugcccaaggu

SEQ ID NO: 2415021 - RNA, 19 nt, Artificial Sequence
  Description of Artificial Sequence: Synthetic oligonucleotide
  Antisense strand to SEQ ID NO: 2415020
accuugggcacauuucccu

SEQ ID NO: 2415022 - RNA, 19 nt, Artificial Sequence
  Description of Artificial Sequence: Synthetic oligonucleotide
  Sense strand starting at position 1788 of SEQ ID NO: 1886513
gggaaaugugcccaaggug

SEQ ID NO: 2415023 - RNA, 19 nt, Artificial Sequence
  Description of Artificial Sequence: Synthetic oligonucleotide
  Antisense strand to SEQ ID NO: 2415022
caccuugggcacauuuccc

SEQ ID NO: 2415024 - RNA, 19 nt, Artificial Sequence
  Description of Artificial Sequence: Synthetic oligonucleotide
  Sense strand starting at position 2036 of SEQ ID NO: 1886513
gccagauucggcugaagag

SEQ ID NO: 2415025 - RNA, 19 nt, Artificial Sequence
  Description of Artificial Sequence: Synthetic oligonucleotide
  Antisense strand to SEQ ID NO: 2415024
cucuucagccgaaucuggc

SEQ ID NO: 2415026 - RNA, 19 nt, Artificial Sequence
  Description of Artificial Sequence: Synthetic oligonucleotide
  Sense strand starting at position 2037 of SEQ ID NO: 1886513
ccagauucggcugaagagu

SEQ ID NO: 2415027 - RNA, 19 nt, Artificial Sequence
  Description of Artificial Sequence: Synthetic oligonucleotide
  Antisense strand to SEQ ID NO: 2415026
acucuucagccgaaucugg

SEQ ID NO: 2415028 - RNA, 19 nt, Artificial Sequence
  Description of Artificial Sequence: Synthetic oligonucleotide
  Sense strand starting at position 2149 of SEQ ID NO: 1886513
guguaagcuccacagggua

SEQ ID NO: 2415029 - RNA, 19 nt, Artificial Sequence
  Description of Artificial Sequence: Synthetic oligonucleotide
  Antisense strand to SEQ ID NO: 2415028
uacccuguggagcuuacac

SEQ ID NO: 2415030 - RNA, 19 nt, Artificial Sequence
  Description of Artificial Sequence: Synthetic oligonucleotide
  Sense strand starting at position 2237 of SEQ ID NO: 1886513
cccguucuagaucaacaga

SEQ ID NO: 2415031 - RNA, 19 nt, Artificial Sequence
  Description of Artificial Sequence: Synthetic oligonucleotide
  Antisense strand to SEQ ID NO: 2415030
ucuguugaucuagaacggg

SEQ ID NO: 2415032 - RNA, 19 nt, Artificial Sequence
  Description of Artificial Sequence: Synthetic oligonucleotide
  Sense strand starting at position 2320 of SEQ ID NO: 1886513
cuucuaugccuguguguaa

SEQ ID NO: 2415033 - RNA, 19 nt, Artificial Sequence
  Description of Artificial Sequence: Synthetic oligonucleotide
  Antisense strand to SEQ ID NO: 2415032
uuacacacaggcauagaag

SEQ ID NO: 2415034 - RNA, 19 nt, Artificial Sequence
  Description of Artificial Sequence: Synthetic oligonucleotide
  Sense strand starting at position 2331 of SEQ ID NO: 1886513
guguguaaguggugggauu

SEQ ID NO: 2415035 - RNA, 19 nt, Artificial Sequence
  Description of Artificial Sequence: Synthetic oligonucleotide
  Antisense strand to SEQ ID NO: 2415034
aaucccaccacuuacacac

SEQ ID NO: 2415036 - RNA, 19 nt, Artificial Sequence
  Description of Artificial Sequence: Synthetic oligonucleotide
  Sense strand starting at position 2332 of SEQ ID NO: 1886513
uguguaaguggugggauuu

SEQ ID NO: 2415037 - RNA, 19 nt, Artificial Sequence
  Description of Artificial Sequence: Synthetic oligonucleotide
  Antisense strand to SEQ ID NO: 2415036
aaaucccaccacuuacaca

SEQ ID NO: 2415038 - RNA, 19 nt, Artificial Sequence
  Description of Artificial Sequence: Synthetic oligonucleotide
  Sense strand starting at position 2383 of SEQ ID NO: 1886513
ccugcaauccggugccaau

SEQ ID NO: 2415039 - RNA, 19 nt, Artificial Sequence
  Description of Artificial Sequence: Synthetic oligonucleotide
  Antisense strand to SEQ ID NO: 2415038
auuggcaccggauugcagg

SEQ ID NO: 2415040 - RNA, 19 nt, Artificial Sequence
  Description of Artificial Sequence: Synthetic oligonucleotide
  Sense strand starting at position 2501 of SEQ ID NO: 1886513
ugaaguagccgcggaaaga

SEQ ID NO: 2415041 - RNA, 19 nt, Artificial Sequence
  Description of Artificial Sequence: Synthetic oligonucleotide
  Antisense strand to SEQ ID NO: 2415040
ucuuuccgcggcuacuuca

SEQ ID NO: 2415042 - RNA, 19 nt, Artificial Sequence
  Description of Artificial Sequence: Synthetic oligonucleotide
  Sense strand starting at position 2663 of SEQ ID NO: 1886513
gguuauuauuacccucuuu

SEQ ID NO: 2415043 - RNA, 19 nt, Artificial Sequence
  Description of Artificial Sequence: Synthetic oligonucleotide
  Antisense strand to SEQ ID NO: 2415042
aaagaggguaauaauaacc

SEQ ID NO: 2415044 - RNA, 19 nt, Artificial Sequence
  Description of Artificial Sequence: Synthetic oligonucleotide
  Sense strand starting at position 2789 of SEQ ID NO: 1886513
gcggccguuucucgaagau

SEQ ID NO: 2415045 - RNA, 19 nt, Artificial Sequence
  Description of Artificial Sequence: Synthetic oligonucleotide
  Antisense strand to SEQ ID NO: 2415044
aucuucgagaaacggccgc

SEQ ID NO: 2415046 - RNA, 19 nt, Artificial Sequence
  Description of Artificial Sequence: Synthetic oligonucleotide
  Sense strand starting at position 2888 of SEQ ID NO: 1886513
acgcaaauuugcgggaaca

SEQ ID NO: 2415047 - RNA, 19 nt, Artificial Sequence
  Description of Artificial Sequence: Synthetic oligonucleotide
  Antisense strand to SEQ ID NO: 2415046
uguucccgcaaauuugcgu

SEQ ID NO: 2415048 - RNA, 19 nt, Artificial Sequence
  Description of Artificial Sequence: Synthetic oligonucleotide
  Sense strand starting at position 2889 of SEQ ID NO: 1886513
cgcaaauuugcgggaacaa

SEQ ID NO: 2415049 - RNA, 19 nt, Artificial Sequence
  Description of Artificial Sequence: Synthetic oligonucleotide
  Antisense strand to SEQ ID NO: 2415048
uuguucccgcaaauuugcg

SEQ ID NO: 2415050 - RNA, 19 nt, Artificial Sequence
  Description of Artificial Sequence: Synthetic oligonucleotide
  Sense strand starting at position 2943 of SEQ ID NO: 1886513
uccgauuccgcggaccaau

SEQ ID NO: 2415051 - RNA, 19 nt, Artificial Sequence
  Description of Artificial Sequence: Synthetic oligonucleotide
  Antisense strand to SEQ ID NO: 2415050
auugguccgcggaaucgga

SEQ ID NO: 2415052 - RNA, 19 nt, Artificial Sequence
  Description of Artificial Sequence: Synthetic oligonucleotide
  Sense strand starting at position 54 of SEQ ID NO: 1886514
gguagaugcugucccgaca

SEQ ID NO: 2415053 - RNA, 19 nt, Artificial Sequence
  Description of Artificial Sequence: Synthetic oligonucleotide
  Antisense strand to SEQ ID NO: 2415052
ugucgggacagcaucuacc

SEQ ID NO: 2415054 - RNA, 19 nt, Artificial Sequence
  Description of Artificial Sequence: Synthetic oligonucleotide
  Sense strand starting at position 141 of SEQ ID NO: 1886514
gccucaguuucgccaccua

SEQ ID NO: 2415055 - RNA, 19 nt, Artificial Sequence
  Description of Artificial Sequence: Synthetic oligonucleotide
  Antisense strand to SEQ ID NO: 2415054
uagguggcgaaacugaggc

SEQ ID NO: 2415056 - RNA, 19 nt, Artificial Sequence
  Description of Artificial Sequence: Synthetic oligonucleotide
  Sense strand starting at position 197 of SEQ ID NO: 1886514
uguccaaaugcagauggau

SEQ ID NO: 2415057 - RNA, 19 nt, Artificial Sequence
  Description of Artificial Sequence: Synthetic oligonucleotide
  Antisense strand to SEQ ID NO: 2415056
auccaucugcauuuggaca

SEQ ID NO: 2415058 - RNA, 19 nt, Artificial Sequence
  Description of Artificial Sequence: Synthetic oligonucleotide
  Sense strand starting at position 210 of SEQ ID NO: 1886514
auggauaagucagagcaca

SEQ ID NO: 2415059 - RNA, 19 nt, Artificial Sequence
  Description of Artificial Sequence: Synthetic oligonucleotide
  Antisense strand to SEQ ID NO: 2415058
ugugcucugacuuauccau

SEQ ID NO: 2415060 - RNA, 19 nt, Artificial Sequence
  Description of Artificial Sequence: Synthetic oligonucleotide
  Sense strand starting at position 253 of SEQ ID NO: 1886514
acugauguggccugagaua

SEQ ID NO: 2415061 - RNA, 19 nt, Artificial Sequence
  Description of Artificial Sequence: Synthetic oligonucleotide
  Antisense strand to SEQ ID NO: 2415060
uaucucaggccacaucagu

SEQ ID NO: 2415062 - RNA, 19 nt, Artificial Sequence
  Description of Artificial Sequence: Synthetic oligonucleotide
  Sense strand starting at position 258 of SEQ ID NO: 1886514
uguggccugagauaucaga

SEQ ID NO: 2415063 - RNA, 19 nt, Artificial Sequence
  Description of Artificial Sequence: Synthetic oligonucleotide
  Antisense strand to SEQ ID NO: 2415062
ucugauaucucaggccaca

SEQ ID NO: 2415064 - RNA, 19 nt, Artificial Sequence
  Description of Artificial Sequence: Synthetic oligonucleotide
  Sense strand starting at position 265 of SEQ ID NO: 1886514
ugagauaucagaugucugu

SEQ ID NO: 2415065 - RNA, 19 nt, Artificial Sequence
  Description of Artificial Sequence: Synthetic oligonucleotide
  Antisense strand to SEQ ID NO: 2415064
acagacaucugauaucuca

SEQ ID NO: 2415066 - RNA, 19 nt, Artificial Sequence
  Description of Artificial Sequence: Synthetic oligonucleotide
  Sense strand starting at position 269 of SEQ ID NO: 1886514
auaucagaugucuguggau

SEQ ID NO: 2415067 - RNA, 19 nt, Artificial Sequence
  Description of Artificial Sequence: Synthetic oligonucleotide
  Antisense strand to SEQ ID NO: 2415066
auccacagacaucugauau

SEQ ID NO: 2415068 - RNA, 19 nt, Artificial Sequence
  Description of Artificial Sequence: Synthetic oligonucleotide
  Sense strand starting at position 271 of SEQ ID NO: 1886514
aucagaugucuguggauca

SEQ ID NO: 2415069 - RNA, 19 nt, Artificial Sequence
  Description of Artificial Sequence: Synthetic oligonucleotide
  Antisense strand to SEQ ID NO: 2415068
ugauccacagacaucugau

SEQ ID NO: 2415070 - RNA, 19 nt, Artificial Sequence
  Description of Artificial Sequence: Synthetic oligonucleotide
  Sense strand starting at position 297 of SEQ ID NO: 1886514
gccuccucugggcagaaua

SEQ ID NO: 2415071 - RNA, 19 nt, Artificial Sequence
  Description of Artificial Sequence: Synthetic oligonucleotide
  Antisense strand to SEQ ID NO: 2415070
uauucugcccagaggaggc

SEQ ID NO: 2415072 - RNA, 19 nt, Artificial Sequence
  Description of Artificial Sequence: Synthetic oligonucleotide
  Sense strand starting at position 308 of SEQ ID NO: 1886514
gcagaauaauuccaguuuc

SEQ ID NO: 2415073 - RNA, 19 nt, Artificial Sequence
  Description of Artificial Sequence: Synthetic oligonucleotide
  Antisense strand to SEQ ID NO: 2415072
gaaacuggaauuauucugc

SEQ ID NO: 2415074 - RNA, 19 nt, Artificial Sequence
  Description of Artificial Sequence: Synthetic oligonucleotide
  Sense strand starting at position 331 of SEQ ID NO: 1886514
guuaaucaucuugggagca

SEQ ID NO: 2415075 - RNA, 19 nt, Artificial Sequence
  Description of Artificial Sequence: Synthetic oligonucleotide
  Antisense strand to SEQ ID NO: 2415074
ugcucccaagaugauuaac

SEQ ID NO: 2415076 - RNA, 19 nt, Artificial Sequence
  Description of Artificial Sequence: Synthetic oligonucleotide
  Sense strand starting at position 332 of SEQ ID NO: 1886514
uuaaucaucuugggagcaa

SEQ ID NO: 2415077 - RNA, 19 nt, Artificial Sequence
  Description of Artificial Sequence: Synthetic oligonucleotide
  Antisense strand to SEQ ID NO: 2415076
uugcucccaagaugauuaa

SEQ ID NO: 2415078 - RNA, 19 nt, Artificial Sequence
  Description of Artificial Sequence: Synthetic oligonucleotide
  Sense strand starting at position 333 of SEQ ID NO: 1886514
uaaucaucuugggagcaag

SEQ ID NO: 2415079 - RNA, 19 nt, Artificial Sequence
  Description of Artificial Sequence: Synthetic oligonucleotide
  Antisense strand to SEQ ID NO: 2415078
cuugcucccaagaugauua

SEQ ID NO: 2415080 - RNA, 19 nt, Artificial Sequence
  Description of Artificial Sequence: Synthetic oligonucleotide
  Sense strand starting at position 344 of SEQ ID NO: 1886514
ggagcaagugucugggcau

SEQ ID NO: 2415081 - RNA, 19 nt, Artificial Sequence
  Description of Artificial Sequence: Synthetic oligonucleotide
  Antisense strand to SEQ ID NO: 2415080
augcccagacacuugcucc

SEQ ID NO: 2415082 - RNA, 19 nt, Artificial Sequence
  Description of Artificial Sequence: Synthetic oligonucleotide
  Sense strand starting at position 347 of SEQ ID NO: 1886514
gcaagugucugggcaucaa

SEQ ID NO: 2415083 - RNA, 19 nt, Artificial Sequence
  Description of Artificial Sequence: Synthetic oligonucleotide
  Antisense strand to SEQ ID NO: 2415082
uugaugcccagacacuugc

SEQ ID NO: 2415084 - RNA, 19 nt, Artificial Sequence
  Description of Artificial Sequence: Synthetic oligonucleotide
  Sense strand starting at position 374 of SEQ ID NO: 1886514
cgguguugucucuggagcu

SEQ ID NO: 2415085 - RNA, 19 nt, Artificial Sequence
  Description of Artificial Sequence: Synthetic oligonucleotide
  Antisense strand to SEQ ID NO: 2415084
agcuccagagacaacaccg

SEQ ID NO: 2415086 - RNA, 19 nt, Artificial Sequence
  Description of Artificial Sequence: Synthetic oligonucleotide
  Sense strand starting at position 700 of SEQ ID NO: 1886514
ccaagacacguccaacuuu

SEQ ID NO: 2415087 - RNA, 19 nt, Artificial Sequence
  Description of Artificial Sequence: Synthetic oligonucleotide
  Antisense strand to SEQ ID NO: 2415086
aaaguuggacgugucuugg

SEQ ID NO: 2415088 - RNA, 19 nt, Artificial Sequence
  Description of Artificial Sequence: Synthetic oligonucleotide
  Sense strand starting at position 848 of SEQ ID NO: 1886514
agcagauuaucagugugaa

SEQ ID NO: 2415089 - RNA, 19 nt, Artificial Sequence
  Description of Artificial Sequence: Synthetic oligonucleotide
  Antisense strand to SEQ ID NO: 2415088
uucacacugauaaucugcu

SEQ ID NO: 2415090 - RNA, 19 nt, Artificial Sequence
  Description of Artificial Sequence: Synthetic oligonucleotide
  Sense strand starting at position 849 of SEQ ID NO: 1886514
gcagauuaucagugugaac

SEQ ID NO: 2415091 - RNA, 19 nt, Artificial Sequence
  Description of Artificial Sequence: Synthetic oligonucleotide
  Antisense strand to SEQ ID NO: 2415090
guucacacugauaaucugc

SEQ ID NO: 2415092 - RNA, 19 nt, Artificial Sequence
  Description of Artificial Sequence: Synthetic oligonucleotide
  Sense strand starting at position 851 of SEQ ID NO: 1886514
agauuaucagugugaacug

SEQ ID NO: 2415093 - RNA, 19 nt, Artificial Sequence
  Description of Artificial Sequence: Synthetic oligonucleotide
  Antisense strand to SEQ ID NO: 2415092
caguucacacugauaaucu

SEQ ID NO: 2415094 - RNA, 19 nt, Artificial Sequence
  Description of Artificial Sequence: Synthetic oligonucleotide
  Sense strand starting at position 852 of SEQ ID NO: 1886514
gauuaucagugugaacuga

SEQ ID NO: 2415095 - RNA, 19 nt, Artificial Sequence
  Description of Artificial Sequence: Synthetic oligonucleotide
  Antisense strand to SEQ ID NO: 2415094
ucaguucacacugauaauc

SEQ ID NO: 2415096 - RNA, 19 nt, Artificial Sequence
  Description of Artificial Sequence: Synthetic oligonucleotide
  Sense strand starting at position 863 of SEQ ID NO: 1886514
ugaacugaaucauggauuu

SEQ ID NO: 2415097 - RNA, 19 nt, Artificial Sequence
  Description of Artificial Sequence: Synthetic oligonucleotide
  Antisense strand to SEQ ID NO: 2415096
aaauccaugauucaguuca

SEQ ID NO: 2415098 - RNA, 19 nt, Artificial Sequence
  Description of Artificial Sequence: Synthetic oligonucleotide
  Sense strand starting at position 953 of SEQ ID NO: 1886514
ggucaugcauguccagaaa

SEQ ID NO: 2415099 - RNA, 19 nt, Artificial Sequence
  Description of Artificial Sequence: Synthetic oligonucleotide
  Antisense strand to SEQ ID NO: 2415098
uuucuggacaugcaugacc

SEQ ID NO: 2415100 - RNA, 19 nt, Artificial Sequence
  Description of Artificial Sequence: Synthetic oligonucleotide
  Sense strand starting at position 1199 of SEQ ID NO: 1886514
ugcguuucccgucagaucu

SEQ ID NO: 2415101 - RNA, 19 nt, Artificial Sequence
  Description of Artificial Sequence: Synthetic oligonucleotide
  Antisense strand to SEQ ID NO: 2415100
agaucugacgggaaacgca

SEQ ID NO: 2415102 - RNA, 19 nt, Artificial Sequence
  Description of Artificial Sequence: Synthetic oligonucleotide
  Sense strand starting at position 1281 of SEQ ID NO: 1886514
cccagaguucuccgaacuc

SEQ ID NO: 2415103 - RNA, 19 nt, Artificial Sequence
  Description of Artificial Sequence: Synthetic oligonucleotide
  Antisense strand to SEQ ID NO: 2415102
gaguucggagaacucuggg

SEQ ID NO: 2415104 - RNA, 19 nt, Artificial Sequence
  Description of Artificial Sequence: Synthetic oligonucleotide
  Sense strand starting at position 1324 of SEQ ID NO: 1886514
acgcaugagggcugaagaa

SEQ ID NO: 2415105 - RNA, 19 nt, Artificial Sequence
  Description of Artificial Sequence: Synthetic oligonucleotide
  Antisense strand to SEQ ID NO: 2415104
uucuucagcccucaugcgu

SEQ ID NO: 2415106 - RNA, 19 nt, Artificial Sequence
  Description of Artificial Sequence: Synthetic oligonucleotide
  Sense strand starting at position 1557 of SEQ ID NO: 1886514
aggcaagucaauugacaug

SEQ ID NO: 2415107 - RNA, 19 nt, Artificial Sequence
  Description of Artificial Sequence: Synthetic oligonucleotide
  Antisense strand to SEQ ID NO: 2415106
caugucaauugacuugccu

SEQ ID NO: 2415108 - RNA, 19 nt, Artificial Sequence
  Description of Artificial Sequence: Synthetic oligonucleotide
  Sense strand starting at position 2243 of SEQ ID NO: 1886514
cgcugaggccugaguguuu

SEQ ID NO: 2415109 - RNA, 19 nt, Artificial Sequence
  Description of Artificial Sequence: Synthetic oligonucleotide
  Antisense strand to SEQ ID NO: 2415108
aaacacucaggccucagcg

SEQ ID NO: 2415110 - RNA, 19 nt, Artificial Sequence
  Description of Artificial Sequence: Synthetic oligonucleotide
  Sense strand starting at position 2356 of SEQ ID NO: 1886514
gcccucauuaaugggauga

SEQ ID NO: 2415111 - RNA, 19 nt, Artificial Sequence
  Description of Artificial Sequence: Synthetic oligonucleotide
  Antisense strand to SEQ ID NO: 2415110
ucaucccauuaaugagggc

SEQ ID NO: 2415112 - RNA, 19 nt, Artificial Sequence
  Description of Artificial Sequence: Synthetic oligonucleotide
  Sense strand starting at position 2358 of SEQ ID NO: 1886514
ccucauuaaugggaugagu

SEQ ID NO: 2415113 - RNA, 19 nt, Artificial Sequence
  Description of Artificial Sequence: Synthetic oligonucleotide
  Antisense strand to SEQ ID NO: 2415112
acucaucccauuaaugagg

SEQ ID NO: 2415114 - RNA, 19 nt, Artificial Sequence
  Description of Artificial Sequence: Synthetic oligonucleotide
  Sense strand starting at position 2426 of SEQ ID NO: 1886514
ggcgcaguaaguuaaccau

SEQ ID NO: 2415115 - RNA, 19 nt, Artificial Sequence
  Description of Artificial Sequence: Synthetic oligonucleotide
  Antisense strand to SEQ ID NO: 2415114
augguuaacuuacugcgcc

SEQ ID NO: 2415116 - RNA, 19 nt, Artificial Sequence
  Description of Artificial Sequence: Synthetic oligonucleotide
  Sense strand starting at position 2429 of SEQ ID NO: 1886514
gcaguaaguuaaccaucua

SEQ ID NO: 2415117 - RNA, 19 nt, Artificial Sequence
  Description of Artificial Sequence: Synthetic oligonucleotide
  Antisense strand to SEQ ID NO: 2415116
uagaugguuaacuuacugc

SEQ ID NO: 2415118 - RNA, 19 nt, Artificial Sequence
  Description of Artificial Sequence: Synthetic oligonucleotide
  Sense strand starting at position 2437 of SEQ ID NO: 1886514
uuaaccaucuaugaggaaa

SEQ ID NO: 2415119 - RNA, 19 nt, Artificial Sequence
  Description of Artificial Sequence: Synthetic oligonucleotide
  Antisense strand to SEQ ID NO: 2415118
uuuccucauagaugguuaa

SEQ ID NO: 2415120 - RNA, 19 nt, Artificial Sequence
  Description of Artificial Sequence: Synthetic oligonucleotide
  Sense strand starting at position 2473 of SEQ ID NO: 1886514
ugucucuacugagaucuua

SEQ ID NO: 2415121 - RNA, 19 nt, Artificial Sequence
  Description of Artificial Sequence: Synthetic oligonucleotide
  Antisense strand to SEQ ID NO: 2415120
uaagaucucaguagagaca

SEQ ID NO: 2415122 - RNA, 19 nt, Artificial Sequence
  Description of Artificial Sequence: Synthetic oligonucleotide
  Sense strand starting at position 2481 of SEQ ID NO: 1886514
cugagaucuuaaucuugga

SEQ ID NO: 2415123 - RNA, 19 nt, Artificial Sequence
  Description of Artificial Sequence: Synthetic oligonucleotide
  Antisense strand to SEQ ID NO: 2415122
uccaagauuaagaucucag

SEQ ID NO: 2415124 - RNA, 19 nt, Artificial Sequence
  Description of Artificial Sequence: Synthetic oligonucleotide
  Sense strand starting at position 2484 of SEQ ID NO: 1886514
agaucuuaaucuuggacuu

SEQ ID NO: 2415125 - RNA, 19 nt, Artificial Sequence
  Description of Artificial Sequence: Synthetic oligonucleotide
  Antisense strand to SEQ ID NO: 2415124
aaguccaagauuaagaucu

SEQ ID NO: 2415126 - RNA, 19 nt, Artificial Sequence
  Description of Artificial Sequence: Synthetic oligonucleotide
  Sense strand starting at position 2864 of SEQ ID NO: 1886514
ccuccaauuuacgguauuu

SEQ ID NO: 2415127 - RNA, 19 nt, Artificial Sequence
  Description of Artificial Sequence: Synthetic oligonucleotide
  Antisense strand to SEQ ID NO: 2415126
aaauaccguaaauuggagg

SEQ ID NO: 2415128 - RNA, 19 nt, Artificial Sequence
  Description of Artificial Sequence: Synthetic oligonucleotide
  Sense strand starting at position 3715 of SEQ ID NO: 1886514
ccuguauucuuugucucuu

SEQ ID NO: 2415129 - RNA, 19 nt, Artificial Sequence
  Description of Artificial Sequence: Synthetic oligonucleotide
  Antisense strand to SEQ ID NO: 2415128
aagagacaaagaauacagg

SEQ ID NO: 2415130 - RNA, 19 nt, Artificial Sequence
  Description of Artificial Sequence: Synthetic oligonucleotide
  Sense strand starting at position 3766 of SEQ ID NO: 1886514
agguguuguagagacacuu

SEQ ID NO: 2415131 - RNA, 19 nt, Artificial Sequence
  Description of Artificial Sequence: Synthetic oligonucleotide
  Antisense strand to SEQ ID NO: 2415130
aagugucucuacaacaccu

SEQ ID NO: 2415132 - RNA, 19 nt, Artificial Sequence
  Description of Artificial Sequence: Synthetic oligonucleotide
  Sense strand starting at position 794 of SEQ ID NO: 1886515
gccagcuuccgcucaacau

SEQ ID NO: 2415133 - RNA, 19 nt, Artificial Sequence
  Description of Artificial Sequence: Synthetic oligonucleotide
  Antisense strand to SEQ ID NO: 2415132
auguugagcggaagcuggc

SEQ ID NO: 2415134 - RNA, 19 nt, Artificial Sequence
  Description of Artificial Sequence: Synthetic oligonucleotide
  Sense strand starting at position 1110 of SEQ ID NO: 1886515
aggccaaagaucgaccuua

SEQ ID NO: 2415135 - RNA, 19 nt, Artificial Sequence
  Description of Artificial Sequence: Synthetic oligonucleotide
  Antisense strand to SEQ ID NO: 2415134
uaaggucgaucuuuggccu

SEQ ID NO: 2415136 - RNA, 19 nt, Artificial Sequence
  Description of Artificial Sequence: Synthetic oligonucleotide
  Sense strand starting at position 1290 of SEQ ID NO: 1886515
cagccuguccaaugugaca

SEQ ID NO: 2415137 - RNA, 19 nt, Artificial Sequence
  Description of Artificial Sequence: Synthetic oligonucleotide
  Antisense strand to SEQ ID NO: 2415136
ugucacauuggacaggcug

SEQ ID NO: 2415138 - RNA, 19 nt, Artificial Sequence
  Description of Artificial Sequence: Synthetic oligonucleotide
  Sense strand starting at position 1511 of SEQ ID NO: 1886515
gccuucgggugccugaaua

SEQ ID NO: 2415139 - RNA, 19 nt, Artificial Sequence
  Description of Artificial Sequence: Synthetic oligonucleotide
  Antisense strand to SEQ ID NO: 2415138
uauucaggcacccgaaggc

SEQ ID NO: 2415140 - RNA, 19 nt, Artificial Sequence
  Description of Artificial Sequence: Synthetic oligonucleotide
  Sense strand starting at position 1835 of SEQ ID NO: 1886515
ucagcagaucacuguguga

SEQ ID NO: 2415141 - RNA, 19 nt, Artificial Sequence
  Description of Artificial Sequence: Synthetic oligonucleotide
  Antisense strand to SEQ ID NO: 2415140
ucacacagugaucugcuga

SEQ ID NO: 2415142 - RNA, 19 nt, Artificial Sequence
  Description of Artificial Sequence: Synthetic oligonucleotide
  Sense strand starting at position 1837 of SEQ ID NO: 1886515
agcagaucacugugugaca

SEQ ID NO: 2415143 - RNA, 19 nt, Artificial Sequence
  Description of Artificial Sequence: Synthetic oligonucleotide
  Antisense strand to SEQ ID NO: 2415142
ugucacacagugaucugcu

SEQ ID NO: 2415144 - RNA, 19 nt, Artificial Sequence
  Description of Artificial Sequence: Synthetic oligonucleotide
  Sense strand starting at position 1838 of SEQ ID NO: 1886515
gcagaucacugugugacaa

SEQ ID NO: 2415145 - RNA, 19 nt, Artificial Sequence
  Description of Artificial Sequence: Synthetic oligonucleotide
  Antisense strand to SEQ ID NO: 2415144
uugucacacagugaucugc

SEQ ID NO: 2415146 - RNA, 19 nt, Artificial Sequence
  Description of Artificial Sequence: Synthetic oligonucleotide
  Sense strand starting at position 1840 of SEQ ID NO: 1886515
agaucacugugugacaagu

SEQ ID NO: 2415147 - RNA, 19 nt, Artificial Sequence
  Description of Artificial Sequence: Synthetic oligonucleotide
  Antisense strand to SEQ ID NO: 2415146
acuugucacacagugaucu

SEQ ID NO: 2415148 - RNA, 19 nt, Artificial Sequence
  Description of Artificial Sequence: Synthetic oligonucleotide
  Sense strand starting at position 2033 of SEQ ID NO: 1886515
cccucuuuguccgaaggga

SEQ ID NO: 2415149 - RNA, 19 nt, Artificial Sequence
  Description of Artificial Sequence: Synthetic oligonucleotide
  Antisense strand to SEQ ID NO: 2415148
ucccuucggacaaagaggg

SEQ ID NO: 2415150 - RNA, 19 nt, Artificial Sequence
  Description of Artificial Sequence: Synthetic oligonucleotide
  Sense strand starting at position 2478 of SEQ ID NO: 1886515
agagaugaguguggcaaca

SEQ ID NO: 2415151 - RNA, 19 nt, Artificial Sequence
  Description of Artificial Sequence: Synthetic oligonucleotide
  Antisense strand to SEQ ID NO: 2415150
uguugccacacucaucucu

SEQ ID NO: 2415152 - RNA, 19 nt, Artificial Sequence
  Description of Artificial Sequence: Synthetic oligonucleotide
  Sense strand starting at position 2480 of SEQ ID NO: 1886515
agaugaguguggcaacacu

SEQ ID NO: 2415153 - RNA, 19 nt, Artificial Sequence
  Description of Artificial Sequence: Synthetic oligonucleotide
  Antisense strand to SEQ ID NO: 2415152
aguguugccacacucaucu

SEQ ID NO: 2415154 - RNA, 19 nt, Artificial Sequence
  Description of Artificial Sequence: Synthetic oligonucleotide
  Sense strand starting at position 2729 of SEQ ID NO: 1886515
guguguauccugggaggga

SEQ ID NO: 2415155 - RNA, 19 nt, Artificial Sequence
  Description of Artificial Sequence: Synthetic oligonucleotide
  Antisense strand to SEQ ID NO: 2415154
ucccucccaggauacacac

SEQ ID NO: 2415156 - RNA, 19 nt, Artificial Sequence
  Description of Artificial Sequence: Synthetic oligonucleotide
  Sense strand starting at position 3113 of SEQ ID NO: 1886515
gggcuuaccuggcuucuga

SEQ ID NO: 2415157 - RNA, 19 nt, Artificial Sequence
  Description of Artificial Sequence: Synthetic oligonucleotide
  Antisense strand to SEQ ID NO: 2415156
ucagaagccagguaagccc

SEQ ID NO: 2415158 - RNA, 19 nt, Artificial Sequence
  Description of Artificial Sequence: Synthetic oligonucleotide
  Sense strand starting at position 3157 of SEQ ID NO: 1886515
gagagaugcgaguagguga

SEQ ID NO: 2415159 - RNA, 19 nt, Artificial Sequence
  Description of Artificial Sequence: Synthetic oligonucleotide
  Antisense strand to SEQ ID NO: 2415158
ucaccuacucgcaucucuc

SEQ ID NO: 2415160 - RNA, 19 nt, Artificial Sequence
  Description of Artificial Sequence: Synthetic oligonucleotide
  Sense strand starting at position 3597 of SEQ ID NO: 1886515
uugggauucuagcuaagga

SEQ ID NO: 2415161 - RNA, 19 nt, Artificial Sequence
  Description of Artificial Sequence: Synthetic oligonucleotide
  Antisense strand to SEQ ID NO: 2415160
uccuuagcuagaaucccaa

SEQ ID NO: 2415162 - RNA, 19 nt, Artificial Sequence
  Description of Artificial Sequence: Synthetic oligonucleotide
  Sense strand starting at position 3896 of SEQ ID NO: 1886515
caaauagccuggugaagag

SEQ ID NO: 2415163 - RNA, 19 nt, Artificial Sequence
  Description of Artificial Sequence: Synthetic oligonucleotide
  Antisense strand to SEQ ID NO: 2415162
cucuucaccaggcuauuug

SEQ ID NO: 2415164 - RNA, 19 nt, Artificial Sequence
  Description of Artificial Sequence: Synthetic oligonucleotide
  Sense strand starting at position 35 of SEQ ID NO: 1886516
augaauaaccaguacuugu

SEQ ID NO: 2415165 - RNA, 19 nt, Artificial Sequence
  Description of Artificial Sequence: Synthetic oligonucleotide
  Antisense strand to SEQ ID NO: 2415164
acaaguacugguuauucau

SEQ ID NO: 2415166 - RNA, 19 nt, Artificial Sequence
  Description of Artificial Sequence: Synthetic oligonucleotide
  Sense strand starting at position 90 of SEQ ID NO: 1886516
agacauagcuaaucaagca

SEQ ID NO: 2415167 - RNA, 19 nt, Artificial Sequence
  Description of Artificial Sequence: Synthetic oligonucleotide
  Antisense strand to SEQ ID NO: 2415166
ugcuugauuagcuaugucu

SEQ ID NO: 2415168 - RNA, 19 nt, Artificial Sequence
  Description of Artificial Sequence: Synthetic oligonucleotide
  Sense strand starting at position 143 of SEQ ID NO: 1886516
cagaauauuucucaaggug

SEQ ID NO: 2415169 - RNA, 19 nt, Artificial Sequence
  Description of Artificial Sequence: Synthetic oligonucleotide
  Antisense strand to SEQ ID NO: 2415168
caccuugagaaauauucug

SEQ ID NO: 2415170 - RNA, 19 nt, Artificial Sequence
  Description of Artificial Sequence: Synthetic oligonucleotide
  Sense strand starting at position 178 of SEQ ID NO: 1886516
cuaucaguugaucagaguu

SEQ ID NO: 2415171 - RNA, 19 nt, Artificial Sequence
  Description of Artificial Sequence: Synthetic oligonucleotide
  Antisense strand to SEQ ID NO: 2415170
aacucugaucaacugauag

SEQ ID NO: 2415172 - RNA, 19 nt, Artificial Sequence
  Description of Artificial Sequence: Synthetic oligonucleotide
  Sense strand starting at position 191 of SEQ ID NO: 1886516
agaguugcaaugcaagaua

SEQ ID NO: 2415173 - RNA, 19 nt, Artificial Sequence
  Description of Artificial Sequence: Synthetic oligonucleotide
  Antisense strand to SEQ ID NO: 2415172
uaucuugcauugcaacucu

SEQ ID NO: 2415174 - RNA, 19 nt, Artificial Sequence
  Description of Artificial Sequence: Synthetic oligonucleotide
  Sense strand starting at position 194 of SEQ ID NO: 1886516
guugcaaugcaagauaaga

SEQ ID NO: 2415175 - RNA, 19 nt, Artificial Sequence
  Description of Artificial Sequence: Synthetic oligonucleotide
  Antisense strand to SEQ ID NO: 2415174
ucuuaucuugcauugcaac

SEQ ID NO: 2415176 - RNA, 19 nt, Artificial Sequence
  Description of Artificial Sequence: Synthetic oligonucleotide
  Sense strand starting at position 263 of SEQ ID NO: 1886516
uaggaugaguggccagaua

SEQ ID NO: 2415177 - RNA, 19 nt, Artificial Sequence
  Description of Artificial Sequence: Synthetic oligonucleotide
  Antisense strand to SEQ ID NO: 2415176
uaucuggccacucauccua

SEQ ID NO: 2415178 - RNA, 19 nt, Artificial Sequence
  Description of Artificial Sequence: Synthetic oligonucleotide
  Sense strand starting at position 454 of SEQ ID NO: 1886516
cucugcauuccucaaggau

SEQ ID NO: 2415179 - RNA, 19 nt, Artificial Sequence
  Description of Artificial Sequence: Synthetic oligonucleotide
  Antisense strand to SEQ ID NO: 2415178
auccuugaggaaugcagag

SEQ ID NO: 2415180 - RNA, 19 nt, Artificial Sequence
  Description of Artificial Sequence: Synthetic oligonucleotide
  Sense strand starting at position 528 of SEQ ID NO: 1886516
agccaugguaggcagaauu

SEQ ID NO: 2415181 - RNA, 19 nt, Artificial Sequence
  Description of Artificial Sequence: Synthetic oligonucleotide
  Antisense strand to SEQ ID NO: 2415180
aauucugccuaccauggcu

SEQ ID NO: 2415182 - RNA, 19 nt, Artificial Sequence
  Description of Artificial Sequence: Synthetic oligonucleotide
  Sense strand starting at position 607 of SEQ ID NO: 1886516
gguugcauacuaugauaaa

SEQ ID NO: 2415183 - RNA, 19 nt, Artificial Sequence
  Description of Artificial Sequence: Synthetic oligonucleotide
  Antisense strand to SEQ ID NO: 2415182
uuuaucauaguaugcaacc

SEQ ID NO: 2415184 - RNA, 19 nt, Artificial Sequence
  Description of Artificial Sequence: Synthetic oligonucleotide
  Sense strand starting at position 631 of SEQ ID NO: 1886516
agggauucuguggacguaa

SEQ ID NO: 2415185 - RNA, 19 nt, Artificial Sequence
  Description of Artificial Sequence: Synthetic oligonucleotide
  Antisense strand to SEQ ID NO: 2415184
uuacguccacagaaucccu

SEQ ID NO: 2415186 - RNA, 19 nt, Artificial Sequence
  Description of Artificial Sequence: Synthetic oligonucleotide
  Sense strand starting at position 706 of SEQ ID NO: 1886516
ggucucaucuaaucaaaug

SEQ ID NO: 2415187 - RNA, 19 nt, Artificial Sequence
  Description of Artificial Sequence: Synthetic oligonucleotide
  Antisense strand to SEQ ID NO: 2415186
cauuugauuagaugagacc

SEQ ID NO: 2415188 - RNA, 19 nt, Artificial Sequence
  Description of Artificial Sequence: Synthetic oligonucleotide
  Sense strand starting at position 848 of SEQ ID NO: 1886516
ccucuagcugcugagagaa

SEQ ID NO: 2415189 - RNA, 19 nt, Artificial Sequence
  Description of Artificial Sequence: Synthetic oligonucleotide
  Antisense strand to SEQ ID NO: 2415188
uucucucagcagcuagagg

SEQ ID NO: 2415190 - RNA, 19 nt, Artificial Sequence
  Description of Artificial Sequence: Synthetic oligonucleotide
  Sense strand starting at position 860 of SEQ ID NO: 1886516
gagagaagucccuggccaa

SEQ ID NO: 2415191 - RNA, 19 nt, Artificial Sequence
  Description of Artificial Sequence: Synthetic oligonucleotide
  Antisense strand to SEQ ID NO: 2415190
uuggccagggacuucucuc

SEQ ID NO: 2415192 - RNA, 19 nt, Artificial Sequence
  Description of Artificial Sequence: Synthetic oligonucleotide
  Sense strand starting at position 970 of SEQ ID NO: 1886516
cugguuggucuccagauga

SEQ ID NO: 2415193 - RNA, 19 nt, Artificial Sequence
  Description of Artificial Sequence: Synthetic oligonucleotide
  Antisense strand to SEQ ID NO: 2415192
ucaucuggagaccaaccag

SEQ ID NO: 2415194 - RNA, 19 nt, Artificial Sequence
  Description of Artificial Sequence: Synthetic oligonucleotide
  Sense strand starting at position 981 of SEQ ID NO: 1886516
ccagaugauuauguaaaug

SEQ ID NO: 2415195 - RNA, 19 nt, Artificial Sequence
  Description of Artificial Sequence: Synthetic oligonucleotide
  Antisense strand to SEQ ID NO: 2415194
cauuuacauaaucaucugg

SEQ ID NO: 2415196 - RNA, 19 nt, Artificial Sequence
  Description of Artificial Sequence: Synthetic oligonucleotide
  Sense strand starting at position 1420 of SEQ ID NO: 1886516
ugaaaucccugccuuagga

SEQ ID NO: 2415197 - RNA, 19 nt, Artificial Sequence
  Description of Artificial Sequence: Synthetic oligonucleotide
  Antisense strand to SEQ ID NO: 2415196
uccuaaggcagggauuuca

SEQ ID NO: 2415198 - RNA, 19 nt, Artificial Sequence
  Description of Artificial Sequence: Synthetic oligonucleotide
  Sense strand starting at position 1436 of SEQ ID NO: 1886516
ggaaauacccaguggugau

SEQ ID NO: 2415199 - RNA, 19 nt, Artificial Sequence
  Description of Artificial Sequence: Synthetic oligonucleotide
  Antisense strand to SEQ ID NO: 2415198
aucaccacuggguauuucc

SEQ ID NO: 2415200 - RNA, 19 nt, Artificial Sequence
  Description of Artificial Sequence: Synthetic oligonucleotide
  Sense strand starting at position 1437 of SEQ ID NO: 1886516
gaaauacccaguggugaug

SEQ ID NO: 2415201 - RNA, 19 nt, Artificial Sequence
  Description of Artificial Sequence: Synthetic oligonucleotide
  Antisense strand to SEQ ID NO: 2415200
caucaccacuggguauuuc

SEQ ID NO: 2415202 - RNA, 19 nt, Artificial Sequence
  Description of Artificial Sequence: Synthetic oligonucleotide
  Sense strand starting at position 1449 of SEQ ID NO: 1886516
ggugauguaaggugagacu

SEQ ID NO: 2415203 - RNA, 19 nt, Artificial Sequence
  Description of Artificial Sequence: Synthetic oligonucleotide
  Antisense strand to SEQ ID NO: 2415202
agucucaccuuacaucacc

SEQ ID NO: 2415204 - RNA, 19 nt, Artificial Sequence
  Description of Artificial Sequence: Synthetic oligonucleotide
  Sense strand starting at position 1458 of SEQ ID NO: 1886516
aggugagacuugucuuaga

SEQ ID NO: 2415205 - RNA, 19 nt, Artificial Sequence
  Description of Artificial Sequence: Synthetic oligonucleotide
  Antisense strand to SEQ ID NO: 2415204
ucuaagacaagucucaccu

SEQ ID NO: 2415206 - RNA, 19 nt, Artificial Sequence
  Description of Artificial Sequence: Synthetic oligonucleotide
  Sense strand starting at position 2228 of SEQ ID NO: 1886516
gguugagaucaggagcagu

SEQ ID NO: 2415207 - RNA, 19 nt, Artificial Sequence
  Description of Artificial Sequence: Synthetic oligonucleotide
  Antisense strand to SEQ ID NO: 2415206
acugcuccugaucucaacc

SEQ ID NO: 2415208 - RNA, 19 nt, Artificial Sequence
  Description of Artificial Sequence: Synthetic oligonucleotide
  Sense strand starting at position 2303 of SEQ ID NO: 1886516
aauagaguagaugguuaua

SEQ ID NO: 2415209 - RNA, 19 nt, Artificial Sequence
  Description of Artificial Sequence: Synthetic oligonucleotide
  Antisense strand to SEQ ID NO: 2415208
uauaaccaucuacucuauu

SEQ ID NO: 2415210 - RNA, 19 nt, Artificial Sequence
  Description of Artificial Sequence: Synthetic oligonucleotide
  Sense strand starting at position 2305 of SEQ ID NO: 1886516
uagaguagaugguuauaaa

SEQ ID NO: 2415211 - RNA, 19 nt, Artificial Sequence
  Description of Artificial Sequence: Synthetic oligonucleotide
  Antisense strand to SEQ ID NO: 2415210
uuuauaaccaucuacucua

SEQ ID NO: 2415212 - RNA, 19 nt, Artificial Sequence
  Description of Artificial Sequence: Synthetic oligonucleotide
  Sense strand starting at position 2350 of SEQ ID NO: 1886516
gagagucccaguugaugau

SEQ ID NO: 2415213 - RNA, 19 nt, Artificial Sequence
  Description of Artificial Sequence: Synthetic oligonucleotide
  Antisense strand to SEQ ID NO: 2415212
aucaucaacugggacucuc

SEQ ID NO: 2415214 - RNA, 19 nt, Artificial Sequence
  Description of Artificial Sequence: Synthetic oligonucleotide
  Sense strand starting at position 2354 of SEQ ID NO: 1886516
gucccaguugaugaugaau

SEQ ID NO: 2415215 - RNA, 19 nt, Artificial Sequence
  Description of Artificial Sequence: Synthetic oligonucleotide
  Antisense strand to SEQ ID NO: 2415214
auucaucaucaacugggac

SEQ ID NO: 2415216 - RNA, 19 nt, Artificial Sequence
  Description of Artificial Sequence: Synthetic oligonucleotide
  Sense strand starting at position 2367 of SEQ ID NO: 1886516
augaauaccaugggauguu

SEQ ID NO: 2415217 - RNA, 19 nt, Artificial Sequence
  Description of Artificial Sequence: Synthetic oligonucleotide
  Antisense strand to SEQ ID NO: 2415216
aacaucccaugguauucau

SEQ ID NO: 2415218 - RNA, 19 nt, Artificial Sequence
  Description of Artificial Sequence: Synthetic oligonucleotide
  Sense strand starting at position 2386 of SEQ ID NO: 1886516
gguauuggguacuuagaag

SEQ ID NO: 2415219 - RNA, 19 nt, Artificial Sequence
  Description of Artificial Sequence: Synthetic oligonucleotide
  Antisense strand to SEQ ID NO: 2415218
cuucuaaguacccaauacc

SEQ ID NO: 2415220 - RNA, 19 nt, Artificial Sequence
  Description of Artificial Sequence: Synthetic oligonucleotide
  Sense strand starting at position 2418 of SEQ ID NO: 1886516
aaagaauuaugggcuuagu

SEQ ID NO: 2415221 - RNA, 19 nt, Artificial Sequence
  Description of Artificial Sequence: Synthetic oligonucleotide
  Antisense strand to SEQ ID NO: 2415220
acuaagcccauaauucuuu

SEQ ID NO: 2415222 - RNA, 19 nt, Artificial Sequence
  Description of Artificial Sequence: Synthetic oligonucleotide
  Sense strand starting at position 2421 of SEQ ID NO: 1886516
gaauuaugggcuuagucag

SEQ ID NO: 2415223 - RNA, 19 nt, Artificial Sequence
  Description of Artificial Sequence: Synthetic oligonucleotide
  Antisense strand to SEQ ID NO: 2415222
cugacuaagcccauaauuc

SEQ ID NO: 2415224 - RNA, 19 nt, Artificial Sequence
  Description of Artificial Sequence: Synthetic oligonucleotide
  Sense strand starting at position 2734 of SEQ ID NO: 1886516
gucagaagcauccgauuuc

SEQ ID NO: 2415225 - RNA, 19 nt, Artificial Sequence
  Description of Artificial Sequence: Synthetic oligonucleotide
  Antisense strand to SEQ ID NO: 2415224
gaaaucggaugcuucugac

SEQ ID NO: 2415226 - RNA, 19 nt, Artificial Sequence
  Description of Artificial Sequence: Synthetic oligonucleotide
  Sense strand starting at position 2874 of SEQ ID NO: 1886516
gaaggauuugaacgcguuc

SEQ ID NO: 2415227 - RNA, 19 nt, Artificial Sequence
  Description of Artificial Sequence: Synthetic oligonucleotide
  Antisense strand to SEQ ID NO: 2415226
gaacgcguucaaauccuuc

SEQ ID NO: 2415228 - RNA, 19 nt, Artificial Sequence
  Description of Artificial Sequence: Synthetic oligonucleotide
  Sense strand starting at position 3107 of SEQ ID NO: 1886516
uuuccuaacgagugaagau

SEQ ID NO: 2415229 - RNA, 19 nt, Artificial Sequence
  Description of Artificial Sequence: Synthetic oligonucleotide
  Antisense strand to SEQ ID NO: 2415228
aucuucacucguuaggaaa

SEQ ID NO: 2415230 - RNA, 19 nt, Artificial Sequence
  Description of Artificial Sequence: Synthetic oligonucleotide
  Sense strand starting at position 3167 of SEQ ID NO: 1886516
gacacuuccggccauauau

SEQ ID NO: 2415231 - RNA, 19 nt, Artificial Sequence
  Description of Artificial Sequence: Synthetic oligonucleotide
  Antisense strand to SEQ ID NO: 2415230
auauauggccggaaguguc

SEQ ID NO: 2415232 - RNA, 19 nt, Artificial Sequence
  Description of Artificial Sequence: Synthetic oligonucleotide
  Sense strand starting at position 3187 of SEQ ID NO: 1886516
aaagcauuguugguaagag

SEQ ID NO: 2415233 - RNA, 19 nt, Artificial Sequence
  Description of Artificial Sequence: Synthetic oligonucleotide
  Antisense strand to SEQ ID NO: 2415232
cucuuaccaacaaugcuuu

SEQ ID NO: 2415234 - RNA, 19 nt, Artificial Sequence
  Description of Artificial Sequence: Synthetic oligonucleotide
  Sense strand starting at position 3217 of SEQ ID NO: 1886516
ugacaugcuccugggaaau

SEQ ID NO: 2415235 - RNA, 19 nt, Artificial Sequence
  Description of Artificial Sequence: Synthetic oligonucleotide
  Antisense strand to SEQ ID NO: 2415234
auuucccaggagcauguca

SEQ ID NO: 2415236 - RNA, 19 nt, Artificial Sequence
  Description of Artificial Sequence: Synthetic oligonucleotide
  Sense strand starting at position 3314 of SEQ ID NO: 1886516
aaguuugugguccagaauu

SEQ ID NO: 2415237 - RNA, 19 nt, Artificial Sequence
  Description of Artificial Sequence: Synthetic oligonucleotide
  Antisense strand to SEQ ID NO: 2415236
aauucuggaccacaaacuu

SEQ ID NO: 2415238 - RNA, 19 nt, Artificial Sequence
  Description of Artificial Sequence: Synthetic oligonucleotide
  Sense strand starting at position 3620 of SEQ ID NO: 1886516
ggaaucuucuaaucaugua

SEQ ID NO: 2415239 - RNA, 19 nt, Artificial Sequence
  Description of Artificial Sequence: Synthetic oligonucleotide
  Antisense strand to SEQ ID NO: 2415238
uacaugauuagaagauucc

SEQ ID NO: 2415240 - RNA, 19 nt, Artificial Sequence
  Description of Artificial Sequence: Synthetic oligonucleotide
  Sense strand starting at position 3678 of SEQ ID NO: 1886516
gcuaccagucacuauacau

SEQ ID NO: 2415241 - RNA, 19 nt, Artificial Sequence
  Description of Artificial Sequence: Synthetic oligonucleotide
  Antisense strand to SEQ ID NO: 2415240
auguauagugacugguagc

SEQ ID NO: 2415242 - RNA, 19 nt, Artificial Sequence
  Description of Artificial Sequence: Synthetic oligonucleotide
  Sense strand starting at position 3833 of SEQ ID NO: 1886516
ugacuuauuauggguagag

SEQ ID NO: 2415243 - RNA, 19 nt, Artificial Sequence
  Description of Artificial Sequence: Synthetic oligonucleotide
  Antisense strand to SEQ ID NO: 2415242
cucuacccauaauaaguca

SEQ ID NO: 2415244 - RNA, 19 nt, Artificial Sequence
  Description of Artificial Sequence: Synthetic oligonucleotide
  Sense strand starting at position 36 of SEQ ID NO: 1886517
ggcgauacugucuuguguu

SEQ ID NO: 2415245 - RNA, 19 nt, Artificial Sequence
  Description of Artificial Sequence: Synthetic oligonucleotide
  Antisense strand to SEQ ID NO: 2415244
aacacaagacaguaucgcc

SEQ ID NO: 2415246 - RNA, 19 nt, Artificial Sequence
  Description of Artificial Sequence: Synthetic oligonucleotide
  Sense strand starting at position 138 of SEQ ID NO: 1886517
ggucuucuccugcugcgaa

SEQ ID NO: 2415247 - RNA, 19 nt, Artificial Sequence
  Description of Artificial Sequence: Synthetic oligonucleotide
  Antisense strand to SEQ ID NO: 2415246
uucgcagcaggagaagacc

SEQ ID NO: 2415248 - RNA, 19 nt, Artificial Sequence
  Description of Artificial Sequence: Synthetic oligonucleotide
  Sense strand starting at position 462 of SEQ ID NO: 1886517
guaaauggauaacuuguaa

SEQ ID NO: 2415249 - RNA, 19 nt, Artificial Sequence
  Description of Artificial Sequence: Synthetic oligonucleotide
  Antisense strand to SEQ ID NO: 2415248
uuacaaguuauccauuuac

SEQ ID NO: 2415250 - RNA, 19 nt, Artificial Sequence
  Description of Artificial Sequence: Synthetic oligonucleotide
  Sense strand starting at position 534 of SEQ ID NO: 1886517
ggaagaaucugugcuccaa

SEQ ID NO: 2415251 - RNA, 19 nt, Artificial Sequence
  Description of Artificial Sequence: Synthetic oligonucleotide
  Antisense strand to SEQ ID NO: 2415250
uuggagcacagauucuucc

SEQ ID NO: 2415252 - RNA, 19 nt, Artificial Sequence
  Description of Artificial Sequence: Synthetic oligonucleotide
  Sense strand starting at position 630 of SEQ ID NO: 1886517
gggauaauucugcaugcca

SEQ ID NO: 2415253 - RNA, 19 nt, Artificial Sequence
  Description of Artificial Sequence: Synthetic oligonucleotide
  Antisense strand to SEQ ID NO: 2415252
uggcaugcagaauuauccc

SEQ ID NO: 2415254 - RNA, 19 nt, Artificial Sequence
  Description of Artificial Sequence: Synthetic oligonucleotide
  Sense strand starting at position 777 of SEQ ID NO: 1886517
uuagaaucacagugacuuc

SEQ ID NO: 2415255 - RNA, 19 nt, Artificial Sequence
  Description of Artificial Sequence: Synthetic oligonucleotide
  Antisense strand to SEQ ID NO: 2415254
gaagucacugugauucuaa

SEQ ID NO: 2415256 - RNA, 19 nt, Artificial Sequence
  Description of Artificial Sequence: Synthetic oligonucleotide
  Sense strand starting at position 887 of SEQ ID NO: 1886517
cugucucacagauguggga

SEQ ID NO: 2415257 - RNA, 19 nt, Artificial Sequence
  Description of Artificial Sequence: Synthetic oligonucleotide
  Antisense strand to SEQ ID NO: 2415256
ucccacaucugugagacag

SEQ ID NO: 2415258 - RNA, 19 nt, Artificial Sequence
  Description of Artificial Sequence: Synthetic oligonucleotide
  Sense strand starting at position 900 of SEQ ID NO: 1886517
gugggaagugaccagcuuu

SEQ ID NO: 2415259 - RNA, 19 nt, Artificial Sequence
  Description of Artificial Sequence: Synthetic oligonucleotide
  Antisense strand to SEQ ID NO: 2415258
aaagcuggucacuucccac

SEQ ID NO: 2415260 - RNA, 19 nt, Artificial Sequence
  Description of Artificial Sequence: Synthetic oligonucleotide
  Sense strand starting at position 910 of SEQ ID NO: 1886517
accagcuuugaucagagua

SEQ ID NO: 2415261 - RNA, 19 nt, Artificial Sequence
  Description of Artificial Sequence: Synthetic oligonucleotide
  Antisense strand to SEQ ID NO: 2415260
uacucugaucaaagcuggu

SEQ ID NO: 2415262 - RNA, 19 nt, Artificial Sequence
  Description of Artificial Sequence: Synthetic oligonucleotide
  Sense strand starting at position 915 of SEQ ID NO: 1886517
cuuugaucagaguagccuu

SEQ ID NO: 2415263 - RNA, 19 nt, Artificial Sequence
  Description of Artificial Sequence: Synthetic oligonucleotide
  Antisense strand to SEQ ID NO: 2415262
aaggcuacucugaucaaag

SEQ ID NO: 2415264 - RNA, 19 nt, Artificial Sequence
  Description of Artificial Sequence: Synthetic oligonucleotide
  Sense strand starting at position 918 of SEQ ID NO: 1886517
ugaucagaguagccuugau

SEQ ID NO: 2415265 - RNA, 19 nt, Artificial Sequence
  Description of Artificial Sequence: Synthetic oligonucleotide
  Antisense strand to SEQ ID NO: 2415264
aucaaggcuacucugauca

SEQ ID NO: 2415266 - RNA, 19 nt, Artificial Sequence
  Description of Artificial Sequence: Synthetic oligonucleotide
  Sense strand starting at position 1135 of SEQ ID NO: 1886517
gggugauaaacaugcucau

SEQ ID NO: 2415267 - RNA, 19 nt, Artificial Sequence
  Description of Artificial Sequence: Synthetic oligonucleotide
  Antisense strand to SEQ ID NO: 2415266
augagcauguuuaucaccc

SEQ ID NO: 2415268 - RNA, 19 nt, Artificial Sequence
  Description of Artificial Sequence: Synthetic oligonucleotide
  Sense strand starting at position 1153 of SEQ ID NO: 1886517
uucugagaauugguaguua

SEQ ID NO: 2415269 - RNA, 19 nt, Artificial Sequence
  Description of Artificial Sequence: Synthetic oligonucleotide
  Antisense strand to SEQ ID NO: 2415268
uaacuaccaauucucagaa

SEQ ID NO: 2415270 - RNA, 19 nt, Artificial Sequence
  Description of Artificial Sequence: Synthetic oligonucleotide
  Sense strand starting at position 1157 of SEQ ID NO: 1886517
gagaauugguaguuaugca

SEQ ID NO: 2415271 - RNA, 19 nt, Artificial Sequence
  Description of Artificial Sequence: Synthetic oligonucleotide
  Antisense strand to SEQ ID NO: 2415270
ugcauaacuaccaauucuc

SEQ ID NO: 2415272 - RNA, 19 nt, Artificial Sequence
  Description of Artificial Sequence: Synthetic oligonucleotide
  Sense strand starting at position 1158 of SEQ ID NO: 1886517
agaauugguaguuaugcau

SEQ ID NO: 2415273 - RNA, 19 nt, Artificial Sequence
  Description of Artificial Sequence: Synthetic oligonucleotide
  Antisense strand to SEQ ID NO: 2415272
augcauaacuaccaauucu

SEQ ID NO: 2415274 - RNA, 19 nt, Artificial Sequence
  Description of Artificial Sequence: Synthetic oligonucleotide
  Sense strand starting at position 1162 of SEQ ID NO: 1886517
uugguaguuaugcauagga

SEQ ID NO: 2415275 - RNA, 19 nt, Artificial Sequence
  Description of Artificial Sequence: Synthetic oligonucleotide
  Antisense strand to SEQ ID NO: 2415274
uccuaugcauaacuaccaa

SEQ ID NO: 2415276 - RNA, 19 nt, Artificial Sequence
  Description of Artificial Sequence: Synthetic oligonucleotide
  Sense strand starting at position 1164 of SEQ ID NO: 1886517
gguaguuaugcauaggacu

SEQ ID NO: 2415277 - RNA, 19 nt, Artificial Sequence
  Description of Artificial Sequence: Synthetic oligonucleotide
  Antisense strand to SEQ ID NO: 2415276
aguccuaugcauaacuacc

SEQ ID NO: 2415278 - RNA, 19 nt, Artificial Sequence
  Description of Artificial Sequence: Synthetic oligonucleotide
  Sense strand starting at position 1210 of SEQ ID NO: 1886517
guagguucuacugagaccu

SEQ ID NO: 2415279 - RNA, 19 nt, Artificial Sequence
  Description of Artificial Sequence: Synthetic oligonucleotide
  Antisense strand to SEQ ID NO: 2415278
aggucucaguagaaccuac

SEQ ID NO: 2415280 - RNA, 19 nt, Artificial Sequence
  Description of Artificial Sequence: Synthetic oligonucleotide
  Sense strand starting at position 1352 of SEQ ID NO: 1886517
ugcucagugccucuguuua

SEQ ID NO: 2415281 - RNA, 19 nt, Artificial Sequence
  Description of Artificial Sequence: Synthetic oligonucleotide
  Antisense strand to SEQ ID NO: 2415280
uaaacagaggcacugagca

SEQ ID NO: 2415282 - RNA, 19 nt, Artificial Sequence
  Description of Artificial Sequence: Synthetic oligonucleotide
  Sense strand starting at position 1396 of SEQ ID NO: 1886517
aggauuaagcauggcaacu

SEQ ID NO: 2415283 - RNA, 19 nt, Artificial Sequence
  Description of Artificial Sequence: Synthetic oligonucleotide
  Antisense strand to SEQ ID NO: 2415282
aguugccaugcuuaauccu

SEQ ID NO: 2415284 - RNA, 19 nt, Artificial Sequence
  Description of Artificial Sequence: Synthetic oligonucleotide
  Sense strand starting at position 1577 of SEQ ID NO: 1886517
gugcuaaaugcucccgcau

SEQ ID NO: 2415285 - RNA, 19 nt, Artificial Sequence
  Description of Artificial Sequence: Synthetic oligonucleotide
  Antisense strand to SEQ ID NO: 2415284
augcgggagcauuuagcac

SEQ ID NO: 2415286 - RNA, 19 nt, Artificial Sequence
  Description of Artificial Sequence: Synthetic oligonucleotide
  Sense strand starting at position 2242 of SEQ ID NO: 1886517
gaaacuuggcugcggagaa

SEQ ID NO: 2415287 - RNA, 19 nt, Artificial Sequence
  Description of Artificial Sequence: Synthetic oligonucleotide
  Antisense strand to SEQ ID NO: 2415286
uucuccgcagccaaguuuc

SEQ ID NO: 2415288 - RNA, 19 nt, Artificial Sequence
  Description of Artificial Sequence: Synthetic oligonucleotide
  Sense strand starting at position 2571 of SEQ ID NO: 1886517
uugaacugaucugcaagau

SEQ ID NO: 2415289 - RNA, 19 nt, Artificial Sequence
  Description of Artificial Sequence: Synthetic oligonucleotide
  Antisense strand to SEQ ID NO: 2415288
aucuugcagaucaguucaa

SEQ ID NO: 2415290 - RNA, 19 nt, Artificial Sequence
  Description of Artificial Sequence: Synthetic oligonucleotide
  Sense strand starting at position 2773 of SEQ ID NO: 1886517
cagagaaauucuguuagua

SEQ ID NO: 2415291 - RNA, 19 nt, Artificial Sequence
  Description of Artificial Sequence: Synthetic oligonucleotide
  Antisense strand to SEQ ID NO: 2415290
uacuaacagaauuucucug

SEQ ID NO: 2415292 - RNA, 19 nt, Artificial Sequence
  Description of Artificial Sequence: Synthetic oligonucleotide
  Sense strand starting at position 2777 of SEQ ID NO: 1886517
gaaauucuguuaguacaug

SEQ ID NO: 2415293 - RNA, 19 nt, Artificial Sequence
  Description of Artificial Sequence: Synthetic oligonucleotide
  Antisense strand to SEQ ID NO: 2415292
cauguacuaacagaauuuc

SEQ ID NO: 2415294 - RNA, 19 nt, Artificial Sequence
  Description of Artificial Sequence: Synthetic oligonucleotide
  Sense strand starting at position 2949 of SEQ ID NO: 1886517
agacgugcuacauagagaa

SEQ ID NO: 2415295 - RNA, 19 nt, Artificial Sequence
  Description of Artificial Sequence: Synthetic oligonucleotide
  Antisense strand to SEQ ID NO: 2415294
uucucuauguagcacgucu

SEQ ID NO: 2415296 - RNA, 19 nt, Artificial Sequence
  Description of Artificial Sequence: Synthetic oligonucleotide
  Sense strand starting at position 2953 of SEQ ID NO: 1886517
gugcuacauagagaagcua

SEQ ID NO: 2415297 - RNA, 19 nt, Artificial Sequence
  Description of Artificial Sequence: Synthetic oligonucleotide
  Antisense strand to SEQ ID NO: 2415296
uagcuucucuauguagcac

SEQ ID NO: 2415298 - RNA, 19 nt, Artificial Sequence
  Description of Artificial Sequence: Synthetic oligonucleotide
  Sense strand starting at position 3083 of SEQ ID NO: 1886517
aaacuuaagcccggguaaa

SEQ ID NO: 2415299 - RNA, 19 nt, Artificial Sequence
  Description of Artificial Sequence: Synthetic oligonucleotide
  Antisense strand to SEQ ID NO: 2415298
uuuacccgggcuuaaguuu

SEQ ID NO: 2415300 - RNA, 19 nt, Artificial Sequence
  Description of Artificial Sequence: Synthetic oligonucleotide
  Sense strand starting at position 3207 of SEQ ID NO: 1886517
uccuguuaauuucuuguca

SEQ ID NO: 2415301 - RNA, 19 nt, Artificial Sequence
  Description of Artificial Sequence: Synthetic oligonucleotide
  Antisense strand to SEQ ID NO: 2415300
ugacaagaaauuaacagga

SEQ ID NO: 2415302 - RNA, 19 nt, Artificial Sequence
  Description of Artificial Sequence: Synthetic oligonucleotide
  Sense strand starting at position 3266 of SEQ ID NO: 1886517
guuugaacuuuccuaaaga

SEQ ID NO: 2415303 - RNA, 19 nt, Artificial Sequence
  Description of Artificial Sequence: Synthetic oligonucleotide
  Antisense strand to SEQ ID NO: 2415302
ucuuuaggaaaguucaaac

SEQ ID NO: 2415304 - RNA, 19 nt, Artificial Sequence
  Description of Artificial Sequence: Synthetic oligonucleotide
  Sense strand starting at position 3282 of SEQ ID NO: 1886517
agaaaugguguauauugca

SEQ ID NO: 2415305 - RNA, 19 nt, Artificial Sequence
  Description of Artificial Sequence: Synthetic oligonucleotide
  Antisense strand to SEQ ID NO: 2415304
ugcaauauacaccauuucu

SEQ ID NO: 2415306 - RNA, 19 nt, Artificial Sequence
  Description of Artificial Sequence: Synthetic oligonucleotide
  Sense strand starting at position 3380 of SEQ ID NO: 1886517
cagauucuguacuuagaag

SEQ ID NO: 2415307 - RNA, 19 nt, Artificial Sequence
  Description of Artificial Sequence: Synthetic oligonucleotide
  Antisense strand to SEQ ID NO: 2415306
cuucuaaguacagaaucug

SEQ ID NO: 2415308 - RNA, 19 nt, Artificial Sequence
  Description of Artificial Sequence: Synthetic oligonucleotide
  Sense strand starting at position 3386 of SEQ ID NO: 1886517
cuguacuuagaaggucuua

SEQ ID NO: 2415309 - RNA, 19 nt, Artificial Sequence
  Description of Artificial Sequence: Synthetic oligonucleotide
  Antisense strand to SEQ ID NO: 2415308
uaagaccuucuaaguacag

SEQ ID NO: 2415310 - RNA, 19 nt, Artificial Sequence
  Description of Artificial Sequence: Synthetic oligonucleotide
  Sense strand starting at position 3444 of SEQ ID NO: 1886517
uuaauacgauuugaagaag

SEQ ID NO: 2415311 - RNA, 19 nt, Artificial Sequence
  Description of Artificial Sequence: Synthetic oligonucleotide
  Antisense strand to SEQ ID NO: 2415310
cuucuucaaaucguauuaa

SEQ ID NO: 2415312 - RNA, 19 nt, Artificial Sequence
  Description of Artificial Sequence: Synthetic oligonucleotide
  Sense strand starting at position 3528 of SEQ ID NO: 1886517
auuuaaaugucccagagga

SEQ ID NO: 2415313 - RNA, 19 nt, Artificial Sequence
  Description of Artificial Sequence: Synthetic oligonucleotide
  Antisense strand to SEQ ID NO: 2415312
uccucugggacauuuaaau

SEQ ID NO: 2415314 - RNA, 19 nt, Artificial Sequence
  Description of Artificial Sequence: Synthetic oligonucleotide
  Sense strand starting at position 3692 of SEQ ID NO: 1886517
gucuauuaaaugggagugu

SEQ ID NO: 2415315 - RNA, 19 nt, Artificial Sequence
  Description of Artificial Sequence: Synthetic oligonucleotide
  Antisense strand to SEQ ID NO: 2415314
acacucccauuuaauagac

SEQ ID NO: 2415316 - RNA, 19 nt, Artificial Sequence
  Description of Artificial Sequence: Synthetic oligonucleotide
  Sense strand starting at position 3696 of SEQ ID NO: 1886517
auuaaaugggaguguauau

SEQ ID NO: 2415317 - RNA, 19 nt, Artificial Sequence
  Description of Artificial Sequence: Synthetic oligonucleotide
  Antisense strand to SEQ ID NO: 2415316
auauacacucccauuuaau

SEQ ID NO: 2415318 - RNA, 19 nt, Artificial Sequence
  Description of Artificial Sequence: Synthetic oligonucleotide
  Sense strand starting at position 3712 of SEQ ID NO: 1886517
uauauuuauggcuguguuu

SEQ ID NO: 2415319 - RNA, 19 nt, Artificial Sequence
  Description of Artificial Sequence: Synthetic oligonucleotide
  Antisense strand to SEQ ID NO: 2415318
aaacacagccauaaauaua

SEQ ID NO: 2415320 - RNA, 19 nt, Artificial Sequence
  Description of Artificial Sequence: Synthetic oligonucleotide
  Sense strand starting at position 3714 of SEQ ID NO: 1886517
uauuuauggcuguguuuau

SEQ ID NO: 2415321 - RNA, 19 nt, Artificial Sequence
  Description of Artificial Sequence: Synthetic oligonucleotide
  Antisense strand to SEQ ID NO: 2415320
auaaacacagccauaaaua

SEQ ID NO: 2415322 - RNA, 19 nt, Artificial Sequence
  Description of Artificial Sequence: Synthetic oligonucleotide
  Sense strand starting at position 3951 of SEQ ID NO: 1886517
cggcuaucccuggagggaa

SEQ ID NO: 2415323 - RNA, 19 nt, Artificial Sequence
  Description of Artificial Sequence: Synthetic oligonucleotide
  Antisense strand to SEQ ID NO: 2415322
uucccuccagggauagccg

SEQ ID NO: 2415324 - RNA, 19 nt, Artificial Sequence
  Description of Artificial Sequence: Synthetic oligonucleotide
  Sense strand starting at position 88 of SEQ ID NO: 1886518
guugcuuugcaugaauaaa

SEQ ID NO: 2415325 - RNA, 19 nt, Artificial Sequence
  Description of Artificial Sequence: Synthetic oligonucleotide
  Antisense strand to SEQ ID NO: 2415324
uuuauucaugcaaagcaac

SEQ ID NO: 2415326 - RNA, 19 nt, Artificial Sequence
  Description of Artificial Sequence: Synthetic oligonucleotide
  Sense strand starting at position 726 of SEQ ID NO: 1886518
gugacuguugcacaacaaa

SEQ ID NO: 2415327 - RNA, 19 nt, Artificial Sequence
  Description of Artificial Sequence: Synthetic oligonucleotide
  Antisense strand to SEQ ID NO: 2415326
uuuguugugcaacagucac

SEQ ID NO: 2415328 - RNA, 19 nt, Artificial Sequence
  Description of Artificial Sequence: Synthetic oligonucleotide
  Sense strand starting at position 738 of SEQ ID NO: 1886518
caacaaagugaguguaguu

SEQ ID NO: 2415329 - RNA, 19 nt, Artificial Sequence
  Description of Artificial Sequence: Synthetic oligonucleotide
  Antisense strand to SEQ ID NO: 2415328
aacuacacucacuuuguug

SEQ ID NO: 2415330 - RNA, 19 nt, Artificial Sequence
  Description of Artificial Sequence: Synthetic oligonucleotide
  Sense strand starting at position 753 of SEQ ID NO: 1886518
aguuaaagccacugaauua

SEQ ID NO: 2415331 - RNA, 19 nt, Artificial Sequence
  Description of Artificial Sequence: Synthetic oligonucleotide
  Antisense strand to SEQ ID NO: 2415330
uaauucaguggcuuuaacu

SEQ ID NO: 2415332 - RNA, 19 nt, Artificial Sequence
  Description of Artificial Sequence: Synthetic oligonucleotide
  Sense strand starting at position 922 of SEQ ID NO: 1886518
ugccaagauguguaaguua

SEQ ID NO: 2415333 - RNA, 19 nt, Artificial Sequence
  Description of Artificial Sequence: Synthetic oligonucleotide
  Antisense strand to SEQ ID NO: 2415332
uaacuuacacaucuuggca

SEQ ID NO: 2415334 - RNA, 19 nt, Artificial Sequence
  Description of Artificial Sequence: Synthetic oligonucleotide
  Sense strand starting at position 925 of SEQ ID NO: 1886518
caagauguguaaguuacaa

SEQ ID NO: 2415335 - RNA, 19 nt, Artificial Sequence
  Description of Artificial Sequence: Synthetic oligonucleotide
  Antisense strand to SEQ ID NO: 2415334
uuguaacuuacacaucuug

SEQ ID NO: 2415336 - RNA, 19 nt, Artificial Sequence
  Description of Artificial Sequence: Synthetic oligonucleotide
  Sense strand starting at position 953 of SEQ ID NO: 1886518
gcaucuuuaucuguauuua

SEQ ID NO: 2415337 - RNA, 19 nt, Artificial Sequence
  Description of Artificial Sequence: Synthetic oligonucleotide
  Antisense strand to SEQ ID NO: 2415336
uaaauacagauaaagaugc

SEQ ID NO: 2415338 - RNA, 19 nt, Artificial Sequence
  Description of Artificial Sequence: Synthetic oligonucleotide
  Sense strand starting at position 964 of SEQ ID NO: 1886518
uguauuuaguucuuccagu

SEQ ID NO: 2415339 - RNA, 19 nt, Artificial Sequence
  Description of Artificial Sequence: Synthetic oligonucleotide
  Antisense strand to SEQ ID NO: 2415338
acuggaagaacuaaauaca

SEQ ID NO: 2415340 - RNA, 19 nt, Artificial Sequence
  Description of Artificial Sequence: Synthetic oligonucleotide
  Sense strand starting at position 965 of SEQ ID NO: 1886518
guauuuaguucuuccagua

SEQ ID NO: 2415341 - RNA, 19 nt, Artificial Sequence
  Description of Artificial Sequence: Synthetic oligonucleotide
  Antisense strand to SEQ ID NO: 2415340
uacuggaagaacuaaauac

SEQ ID NO: 2415342 - RNA, 19 nt, Artificial Sequence
  Description of Artificial Sequence: Synthetic oligonucleotide
  Sense strand starting at position 983 of SEQ ID NO: 1886518
aaguauauggucuguugga

SEQ ID NO: 2415343 - RNA, 19 nt, Artificial Sequence
  Description of Artificial Sequence: Synthetic oligonucleotide
  Antisense strand to SEQ ID NO: 2415342
uccaacagaccauauacuu

SEQ ID NO: 2415344 - RNA, 19 nt, Artificial Sequence
  Description of Artificial Sequence: Synthetic oligonucleotide
  Sense strand starting at position 984 of SEQ ID NO: 1886518
aguauauggucuguuggaa

SEQ ID NO: 2415345 - RNA, 19 nt, Artificial Sequence
  Description of Artificial Sequence: Synthetic oligonucleotide
  Antisense strand to SEQ ID NO: 2415344
uuccaacagaccauauacu

SEQ ID NO: 2415346 - RNA, 19 nt, Artificial Sequence
  Description of Artificial Sequence: Synthetic oligonucleotide
  Sense strand starting at position 1114 of SEQ ID NO: 1886518
uuugguguaucaccuaaga

SEQ ID NO: 2415347 - RNA, 19 nt, Artificial Sequence
  Description of Artificial Sequence: Synthetic oligonucleotide
  Antisense strand to SEQ ID NO: 2415346
ucuuaggugauacaccaaa

SEQ ID NO: 2415348 - RNA, 19 nt, Artificial Sequence
  Description of Artificial Sequence: Synthetic oligonucleotide
  Sense strand starting at position 1127 of SEQ ID NO: 1886518
cuaagaagugaguaugucu

SEQ ID NO: 2415349 - RNA, 19 nt, Artificial Sequence
  Description of Artificial Sequence: Synthetic oligonucleotide
  Antisense strand to SEQ ID NO: 2415348
agacauacucacuucuuag

SEQ ID NO: 2415350 - RNA, 19 nt, Artificial Sequence
  Description of Artificial Sequence: Synthetic oligonucleotide
  Sense strand starting at position 1130 of SEQ ID NO: 1886518
agaagugaguaugucucau

SEQ ID NO: 2415351 - RNA, 19 nt, Artificial Sequence
  Description of Artificial Sequence: Synthetic oligonucleotide
  Antisense strand to SEQ ID NO: 2415350
augagacauacucacuucu

SEQ ID NO: 2415352 - RNA, 19 nt, Artificial Sequence
  Description of Artificial Sequence: Synthetic oligonucleotide
  Sense strand starting at position 1139 of SEQ ID NO: 1886518
uaugucucaugguuaagaa

SEQ ID NO: 2415353 - RNA, 19 nt, Artificial Sequence
  Description of Artificial Sequence: Synthetic oligonucleotide
  Antisense strand to SEQ ID NO: 2415352
uucuuaaccaugagacaua

SEQ ID NO: 2415354 - RNA, 19 nt, Artificial Sequence
  Description of Artificial Sequence: Synthetic oligonucleotide
  Sense strand starting at position 1140 of SEQ ID NO: 1886518
augucucaugguuaagaau

SEQ ID NO: 2415355 - RNA, 19 nt, Artificial Sequence
  Description of Artificial Sequence: Synthetic oligonucleotide
  Antisense strand to SEQ ID NO: 2415354
auucuuaaccaugagacau

SEQ ID NO: 2415356 - RNA, 19 nt, Artificial Sequence
  Description of Artificial Sequence: Synthetic oligonucleotide
  Sense strand starting at position 1187 of SEQ ID NO: 1886518
acgaaugucccggaguaac

SEQ ID NO: 2415357 - RNA, 19 nt, Artificial Sequence
  Description of Artificial Sequence: Synthetic oligonucleotide
  Antisense strand to SEQ ID NO: 2415356
guuacuccgggacauucgu

SEQ ID NO: 2415358 - RNA, 19 nt, Artificial Sequence
  Description of Artificial Sequence: Synthetic oligonucleotide
  Sense strand starting at position 1409 of SEQ ID NO: 1886518
uccauuuaugcacgcgaug

SEQ ID NO: 2415359 - RNA, 19 nt, Artificial Sequence
  Description of Artificial Sequence: Synthetic oligonucleotide
  Antisense strand to SEQ ID NO: 2415358
caucgcgugcauaaaugga

SEQ ID NO: 2415360 - RNA, 19 nt, Artificial Sequence
  Description of Artificial Sequence: Synthetic oligonucleotide
  Sense strand starting at position 1433 of SEQ ID NO: 1886518
cuuauuaaggcacguggaa

SEQ ID NO: 2415361 - RNA, 19 nt, Artificial Sequence
  Description of Artificial Sequence: Synthetic oligonucleotide
  Antisense strand to SEQ ID NO: 2415360
uuccacgugccuuaauaag

SEQ ID NO: 2415362 - RNA, 19 nt, Artificial Sequence
  Description of Artificial Sequence: Synthetic oligonucleotide
  Sense strand starting at position 1477 of SEQ ID NO: 1886518
aacauugaccuuugagugu

SEQ ID NO: 2415363 - RNA, 19 nt, Artificial Sequence
  Description of Artificial Sequence: Synthetic oligonucleotide
  Antisense strand to SEQ ID NO: 2415362
acacucaaaggucaauguu

SEQ ID NO: 2415364 - RNA, 19 nt, Artificial Sequence
  Description of Artificial Sequence: Synthetic oligonucleotide
  Sense strand starting at position 1484 of SEQ ID NO: 1886518
accuuugaguguucccaac

SEQ ID NO: 2415365 - RNA, 19 nt, Artificial Sequence
  Description of Artificial Sequence: Synthetic oligonucleotide
  Antisense strand to SEQ ID NO: 2415364
guugggaacacucaaaggu

SEQ ID NO: 2415366 - RNA, 19 nt, Artificial Sequence
  Description of Artificial Sequence: Synthetic oligonucleotide
  Sense strand starting at position 1486 of SEQ ID NO: 1886518
cuuugaguguucccaacag

SEQ ID NO: 2415367 - RNA, 19 nt, Artificial Sequence
  Description of Artificial Sequence: Synthetic oligonucleotide
  Antisense strand to SEQ ID NO: 2415366
cuguugggaacacucaaag

SEQ ID NO: 2415368 - RNA, 19 nt, Artificial Sequence
  Description of Artificial Sequence: Synthetic oligonucleotide
  Sense strand starting at position 1490 of SEQ ID NO: 1886518
gaguguucccaacaggaug

SEQ ID NO: 2415369 - RNA, 19 nt, Artificial Sequence
  Description of Artificial Sequence: Synthetic oligonucleotide
  Antisense strand to SEQ ID NO: 2415368
cauccuguugggaacacuc

SEQ ID NO: 2415370 - RNA, 19 nt, Artificial Sequence
  Description of Artificial Sequence: Synthetic oligonucleotide
  Sense strand starting at position 2756 of SEQ ID NO: 1886518
ggcuuauuacugccgccau

SEQ ID NO: 2415371 - RNA, 19 nt, Artificial Sequence
  Description of Artificial Sequence: Synthetic oligonucleotide
  Antisense strand to SEQ ID NO: 2415370
auggcggcaguaauaagcc

SEQ ID NO: 2415372 - RNA, 19 nt, Artificial Sequence
  Description of Artificial Sequence: Synthetic oligonucleotide
  Sense strand starting at position 2951 of SEQ ID NO: 1886518
ggguauucuguugaagaac

SEQ ID NO: 2415373 - RNA, 19 nt, Artificial Sequence
  Description of Artificial Sequence: Synthetic oligonucleotide
  Antisense strand to SEQ ID NO: 2415372
guucuucaacagaauaccc

SEQ ID NO: 2415374 - RNA, 19 nt, Artificial Sequence
  Description of Artificial Sequence: Synthetic oligonucleotide
  Sense strand starting at position 3046 of SEQ ID NO: 1886518
cgacuacagacugagcuua

SEQ ID NO: 2415375 - RNA, 19 nt, Artificial Sequence
  Description of Artificial Sequence: Synthetic oligonucleotide
  Antisense strand to SEQ ID NO: 2415374
uaagcucagucuguagucg

SEQ ID NO: 2415376 - RNA, 19 nt, Artificial Sequence
  Description of Artificial Sequence: Synthetic oligonucleotide
  Sense strand starting at position 3087 of SEQ ID NO: 1886518
cugggauauccgcacugua

SEQ ID NO: 2415377 - RNA, 19 nt, Artificial Sequence
  Description of Artificial Sequence: Synthetic oligonucleotide
  Antisense strand to SEQ ID NO: 2415376
uacagugcggauaucccag

SEQ ID NO: 2415378 - RNA, 19 nt, Artificial Sequence
  Description of Artificial Sequence: Synthetic oligonucleotide
  Sense strand starting at position 3275 of SEQ ID NO: 1886518
uuuccuguugcucacacau

SEQ ID NO: 2415379 - RNA, 19 nt, Artificial Sequence
  Description of Artificial Sequence: Synthetic oligonucleotide
  Antisense strand to SEQ ID NO: 2415378
augugugagcaacaggaaa

SEQ ID NO: 2415380 - RNA, 19 nt, Artificial Sequence
  Description of Artificial Sequence: Synthetic oligonucleotide
  Sense strand starting at position 3364 of SEQ ID NO: 1886518
guucuaccuccagacugua

SEQ ID NO: 2415381 - RNA, 19 nt, Artificial Sequence
  Description of Artificial Sequence: Synthetic oligonucleotide
  Antisense strand to SEQ ID NO: 2415380
uacagucuggagguagaac

SEQ ID NO: 2415382 - RNA, 19 nt, Artificial Sequence
  Description of Artificial Sequence: Synthetic oligonucleotide
  Sense strand starting at position 3579 of SEQ ID NO: 1886518
acccuugagcccuguagaa

SEQ ID NO: 2415383 - RNA, 19 nt, Artificial Sequence
  Description of Artificial Sequence: Synthetic oligonucleotide
  Antisense strand to SEQ ID NO: 2415382
uucuacagggcucaagggu

SEQ ID NO: 2415384 - RNA, 19 nt, Artificial Sequence
  Description of Artificial Sequence: Synthetic oligonucleotide
  Sense strand starting at position 3581 of SEQ ID NO: 1886518
ccuugagcccuguagaauu

SEQ ID NO: 2415385 - RNA, 19 nt, Artificial Sequence
  Description of Artificial Sequence: Synthetic oligonucleotide
  Antisense strand to SEQ ID NO: 2415384
aauucuacagggcucaagg

SEQ ID NO: 2415386 - RNA, 19 nt, Artificial Sequence
  Description of Artificial Sequence: Synthetic oligonucleotide
  Sense strand starting at position 3757 of SEQ ID NO: 1886518
agacuauccuuaucuguag

SEQ ID NO: 2415387 - RNA, 19 nt, Artificial Sequence
  Description of Artificial Sequence: Synthetic oligonucleotide
  Antisense strand to SEQ ID NO: 2415386
cuacagauaaggauagucu

SEQ ID NO: 2415388 - RNA, 19 nt, Artificial Sequence
  Description of Artificial Sequence: Synthetic oligonucleotide
  Sense strand starting at position 3830 of SEQ ID NO: 1886518
agcaaauguugaucacuga

SEQ ID NO: 2415389 - RNA, 19 nt, Artificial Sequence
  Description of Artificial Sequence: Synthetic oligonucleotide
  Antisense strand to SEQ ID NO: 2415388
ucagugaucaacauuugcu

SEQ ID NO: 2415390 - RNA, 19 nt, Artificial Sequence
  Description of Artificial Sequence: Synthetic oligonucleotide
  Sense strand starting at position 3831 of SEQ ID NO: 1886518
gcaaauguugaucacugaa

SEQ ID NO: 2415391 - RNA, 19 nt, Artificial Sequence
  Description of Artificial Sequence: Synthetic oligonucleotide
  Antisense strand to SEQ ID NO: 2415390
uucagugaucaacauuugc

SEQ ID NO: 2415392 - RNA, 19 nt, Artificial Sequence
  Description of Artificial Sequence: Synthetic oligonucleotide
  Sense strand starting at position 3863 of SEQ ID NO: 1886518
gaaugaauggaguggugua

SEQ ID NO: 2415393 - RNA, 19 nt, Artificial Sequence
  Description of Artificial Sequence: Synthetic oligonucleotide
  Antisense strand to SEQ ID NO: 2415392
uacaccacuccauucauuc

SEQ ID NO: 2415394 - RNA, 19 nt, Artificial Sequence
  Description of Artificial Sequence: Synthetic oligonucleotide
  Sense strand starting at position 3864 of SEQ ID NO: 1886518
aaugaauggagugguguau

SEQ ID NO: 2415395 - RNA, 19 nt, Artificial Sequence
  Description of Artificial Sequence: Synthetic oligonucleotide
  Antisense strand to SEQ ID NO: 2415394
auacaccacuccauucauu

SEQ ID NO: 2415396 - RNA, 19 nt, Artificial Sequence
  Description of Artificial Sequence: Synthetic oligonucleotide
  Sense strand starting at position 3868 of SEQ ID NO: 1886518
aauggagugguguauaaua

SEQ ID NO: 2415397 - RNA, 19 nt, Artificial Sequence
  Description of Artificial Sequence: Synthetic oligonucleotide
  Antisense strand to SEQ ID NO: 2415396
uauuauacaccacuccauu

SEQ ID NO: 2415398 - RNA, 19 nt, Artificial Sequence
  Description of Artificial Sequence: Synthetic oligonucleotide
  Sense strand starting at position 3870 of SEQ ID NO: 1886518
uggagugguguauaauaua

SEQ ID NO: 2415399 - RNA, 19 nt, Artificial Sequence
  Description of Artificial Sequence: Synthetic oligonucleotide
  Antisense strand to SEQ ID NO: 2415398
uauauuauacaccacucca

SEQ ID NO: 2415400 - RNA, 19 nt, Artificial Sequence
  Description of Artificial Sequence: Synthetic oligonucleotide
  Sense strand starting at position 3875 of SEQ ID NO: 1886518
ugguguauaauauagcaga

SEQ ID NO: 2415401 - RNA, 19 nt, Artificial Sequence
  Description of Artificial Sequence: Synthetic oligonucleotide
  Antisense strand to SEQ ID NO: 2415400
ucugcuauauuauacacca

SEQ ID NO: 2415402 - RNA, 19 nt, Artificial Sequence
  Description of Artificial Sequence: Synthetic oligonucleotide
  Sense strand starting at position 3885 of SEQ ID NO: 1886518
uauagcagaguugauaauu

SEQ ID NO: 2415403 - RNA, 19 nt, Artificial Sequence
  Description of Artificial Sequence: Synthetic oligonucleotide
  Antisense strand to SEQ ID NO: 2415402
aauuaucaacucugcuaua

SEQ ID NO: 2415404 - RNA, 19 nt, Artificial Sequence
  Description of Artificial Sequence: Synthetic oligonucleotide
  Sense strand starting at position 293 of SEQ ID NO: 1886520
ugggcacaucuauaaaucu

SEQ ID NO: 2415405 - RNA, 19 nt, Artificial Sequence
  Description of Artificial Sequence: Synthetic oligonucleotide
  Antisense strand to SEQ ID NO: 2415404
agauuuauagaugugccca

SEQ ID NO: 2415406 - RNA, 19 nt, Artificial Sequence
  Description of Artificial Sequence: Synthetic oligonucleotide
  Sense strand starting at position 651 of SEQ ID NO: 1886520
gagaccuagaagugguauu

SEQ ID NO: 2415407 - RNA, 19 nt, Artificial Sequence
  Description of Artificial Sequence: Synthetic oligonucleotide
  Antisense strand to SEQ ID NO: 2415406
aauaccacuucuaggucuc

SEQ ID NO: 2415408 - RNA, 19 nt, Artificial Sequence
  Description of Artificial Sequence: Synthetic oligonucleotide
  Sense strand starting at position 652 of SEQ ID NO: 1886520
agaccuagaagugguauua

SEQ ID NO: 2415409 - RNA, 19 nt, Artificial Sequence
  Description of Artificial Sequence: Synthetic oligonucleotide
  Antisense strand to SEQ ID NO: 2415408
uaauaccacuucuaggucu

SEQ ID NO: 2415410 - RNA, 19 nt, Artificial Sequence
  Description of Artificial Sequence: Synthetic oligonucleotide
  Sense strand starting at position 729 of SEQ ID NO: 1886520
uuuacaugagagugcuaca

SEQ ID NO: 2415411 - RNA, 19 nt, Artificial Sequence
  Description of Artificial Sequence: Synthetic oligonucleotide
  Antisense strand to SEQ ID NO: 2415410
uguagcacucucauguaaa

SEQ ID NO: 2415412 - RNA, 19 nt, Artificial Sequence
  Description of Artificial Sequence: Synthetic oligonucleotide
  Sense strand starting at position 734 of SEQ ID NO: 1886520
augagagugcuacaacauc

SEQ ID NO: 2415413 - RNA, 19 nt, Artificial Sequence
  Description of Artificial Sequence: Synthetic oligonucleotide
  Antisense strand to SEQ ID NO: 2415412
gauguuguagcacucucau

SEQ ID NO: 2415414 - RNA, 19 nt, Artificial Sequence
  Description of Artificial Sequence: Synthetic oligonucleotide
  Sense strand starting at position 798 of SEQ ID NO: 1886520
gugugucaauuugaacacu

SEQ ID NO: 2415415 - RNA, 19 nt, Artificial Sequence
  Description of Artificial Sequence: Synthetic oligonucleotide
  Antisense strand to SEQ ID NO: 2415414
aguguucaaauugacacac

SEQ ID NO: 2415416 - RNA, 19 nt, Artificial Sequence
  Description of Artificial Sequence: Synthetic oligonucleotide
  Sense strand starting at position 885 of SEQ ID NO: 1886520
augguaaacuuggauaaag

SEQ ID NO: 2415417 - RNA, 19 nt, Artificial Sequence
  Description of Artificial Sequence: Synthetic oligonucleotide
  Antisense strand to SEQ ID NO: 2415416
cuuuauccaaguuuaccau

SEQ ID NO: 2415418 - RNA, 19 nt, Artificial Sequence
  Description of Artificial Sequence: Synthetic oligonucleotide
  Sense strand starting at position 908 of SEQ ID NO: 1886520
uaaauaauccaagggugua

SEQ ID NO: 2415419 - RNA, 19 nt, Artificial Sequence
  Description of Artificial Sequence: Synthetic oligonucleotide
  Antisense strand to SEQ ID NO: 2415418
uacacccuuggauuauuua

SEQ ID NO: 2415420 - RNA, 19 nt, Artificial Sequence
  Description of Artificial Sequence: Synthetic oligonucleotide
  Sense strand starting at position 968 of SEQ ID NO: 1886520
ugauguugccaauauuaaa

SEQ ID NO: 2415421 - RNA, 19 nt, Artificial Sequence
  Description of Artificial Sequence: Synthetic oligonucleotide
  Antisense strand to SEQ ID NO: 2415420
uuuaauauuggcaacauca

SEQ ID NO: 2415422 - RNA, 19 nt, Artificial Sequence
  Description of Artificial Sequence: Synthetic oligonucleotide
  Sense strand starting at position 988 of SEQ ID NO: 1886520
guuguauauccuugcagac

SEQ ID NO: 2415423 - RNA, 19 nt, Artificial Sequence
  Description of Artificial Sequence: Synthetic oligonucleotide
  Antisense strand to SEQ ID NO: 2415422
gucugcaaggauauacaac

SEQ ID NO: 2415424 - RNA, 19 nt, Artificial Sequence
  Description of Artificial Sequence: Synthetic oligonucleotide
  Sense strand starting at position 1052 of SEQ ID NO: 1886520
uuauuucguugaguagauu

SEQ ID NO: 2415425 - RNA, 19 nt, Artificial Sequence
  Description of Artificial Sequence: Synthetic oligonucleotide
  Antisense strand to SEQ ID NO: 2415424
aaucuacucaacgaaauaa

SEQ ID NO: 2415426 - RNA, 19 nt, Artificial Sequence
  Description of Artificial Sequence: Synthetic oligonucleotide
  Sense strand starting at position 1078 of SEQ ID NO: 1886520
guaagacugcuguauuaua

SEQ ID NO: 2415427 - RNA, 19 nt, Artificial Sequence
  Description of Artificial Sequence: Synthetic oligonucleotide
  Antisense strand to SEQ ID NO: 2415426
uauaauacagcagucuuac

SEQ ID NO: 2415428 - RNA, 19 nt, Artificial Sequence
  Description of Artificial Sequence: Synthetic oligonucleotide
  Sense strand starting at position 1245 of SEQ ID NO: 1886520
cgggaagaaguuuaaaguu

SEQ ID NO: 2415429 - RNA, 19 nt, Artificial Sequence
  Description of Artificial Sequence: Synthetic oligonucleotide
  Antisense strand to SEQ ID NO: 2415428
aacuuuaaacuucuucccg

SEQ ID NO: 2415430 - RNA, 19 nt, Artificial Sequence
  Description of Artificial Sequence: Synthetic oligonucleotide
  Sense strand starting at position 1318 of SEQ ID NO: 1886520
gcauguaauuuagauauac

SEQ ID NO: 2415431 - RNA, 19 nt, Artificial Sequence
  Description of Artificial Sequence: Synthetic oligonucleotide
  Antisense strand to SEQ ID NO: 2415430
guauaucuaaauuacaugc

SEQ ID NO: 2415432 - RNA, 19 nt, Artificial Sequence
  Description of Artificial Sequence: Synthetic oligonucleotide
  Sense strand starting at position 1615 of SEQ ID NO: 1886520
gaaauaccgugccuuguua

SEQ ID NO: 2415433 - RNA, 19 nt, Artificial Sequence
  Description of Artificial Sequence: Synthetic oligonucleotide
  Antisense strand to SEQ ID NO: 2415432
uaacaaggcacgguauuuc

SEQ ID NO: 2415434 - RNA, 19 nt, Artificial Sequence
  Description of Artificial Sequence: Synthetic oligonucleotide
  Sense strand starting at position 1666 of SEQ ID NO: 1886520
gaacuugggugagaaauca

SEQ ID NO: 2415435 - RNA, 19 nt, Artificial Sequence
  Description of Artificial Sequence: Synthetic oligonucleotide
  Antisense strand to SEQ ID NO: 2415434
ugauuucucacccaaguuc

SEQ ID NO: 2415436 - RNA, 19 nt, Artificial Sequence
  Description of Artificial Sequence: Synthetic oligonucleotide
  Sense strand starting at position 1758 of SEQ ID NO: 1886520
uggucuuccgagugauuga

SEQ ID NO: 2415437 - RNA, 19 nt, Artificial Sequence
  Description of Artificial Sequence: Synthetic oligonucleotide
  Antisense strand to SEQ ID NO: 2415436
ucaaucacucggaagacca

SEQ ID NO: 2415438 - RNA, 19 nt, Artificial Sequence
  Description of Artificial Sequence: Synthetic oligonucleotide
  Sense strand starting at position 1759 of SEQ ID NO: 1886520
ggucuuccgagugauugac

SEQ ID NO: 2415439 - RNA, 19 nt, Artificial Sequence
  Description of Artificial Sequence: Synthetic oligonucleotide
  Antisense strand to SEQ ID NO: 2415438
gucaaucacucggaagacc

SEQ ID NO: 2415440 - RNA, 19 nt, Artificial Sequence
  Description of Artificial Sequence: Synthetic oligonucleotide
  Sense strand starting at position 1808 of SEQ ID NO: 1886520
ugucguaucuaaccaaucu

SEQ ID NO: 2415441 - RNA, 19 nt, Artificial Sequence
  Description of Artificial Sequence: Synthetic oligonucleotide
  Antisense strand to SEQ ID NO: 2415440
agauugguuagauacgaca

SEQ ID NO: 2415442 - RNA, 19 nt, Artificial Sequence
  Description of Artificial Sequence: Synthetic oligonucleotide
  Sense strand starting at position 1870 of SEQ ID NO: 1886520
gcgagcugagccuuccuua

SEQ ID NO: 2415443 - RNA, 19 nt, Artificial Sequence
  Description of Artificial Sequence: Synthetic oligonucleotide
  Antisense strand to SEQ ID NO: 2415442
uaaggaaggcucagcucgc

SEQ ID NO: 2415444 - RNA, 19 nt, Artificial Sequence
  Description of Artificial Sequence: Synthetic oligonucleotide
  Sense strand starting at position 2107 of SEQ ID NO: 1886520
ugagguuugggucgaagag

SEQ ID NO: 2415445 - RNA, 19 nt, Artificial Sequence
  Description of Artificial Sequence: Synthetic oligonucleotide
  Antisense strand to SEQ ID NO: 2415444
cucuucgacccaaaccuca

SEQ ID NO: 2415446 - RNA, 19 nt, Artificial Sequence
  Description of Artificial Sequence: Synthetic oligonucleotide
  Sense strand starting at position 2109 of SEQ ID NO: 1886520
agguuugggucgaagaggu

SEQ ID NO: 2415447 - RNA, 19 nt, Artificial Sequence
  Description of Artificial Sequence: Synthetic oligonucleotide
  Antisense strand to SEQ ID NO: 2415446
accucuucgacccaaaccu

SEQ ID NO: 2415448 - RNA, 19 nt, Artificial Sequence
  Description of Artificial Sequence: Synthetic oligonucleotide
  Sense strand starting at position 2342 of SEQ ID NO: 1886520
gacaguuggcgacacugaa

SEQ ID NO: 2415449 - RNA, 19 nt, Artificial Sequence
  Description of Artificial Sequence: Synthetic oligonucleotide
  Antisense strand to SEQ ID NO: 2415448
uucagugucgccaacuguc

SEQ ID NO: 2415450 - RNA, 19 nt, Artificial Sequence
  Description of Artificial Sequence: Synthetic oligonucleotide
  Sense strand starting at position 2461 of SEQ ID NO: 1886520
gcucgcuagaaauacagau

SEQ ID NO: 2415451 - RNA, 19 nt, Artificial Sequence
  Description of Artificial Sequence: Synthetic oligonucleotide
  Antisense strand to SEQ ID NO: 2415450
aucuguauuucuagcgagc

SEQ ID NO: 2415452 - RNA, 19 nt, Artificial Sequence
  Description of Artificial Sequence: Synthetic oligonucleotide
  Sense strand starting at position 2508 of SEQ ID NO: 1886520
cgguaucugugaucuguga

SEQ ID NO: 2415453 - RNA, 19 nt, Artificial Sequence
  Description of Artificial Sequence: Synthetic oligonucleotide
  Antisense strand to SEQ ID NO: 2415452
ucacagaucacagauaccg

SEQ ID NO: 2415454 - RNA, 19 nt, Artificial Sequence
  Description of Artificial Sequence: Synthetic oligonucleotide
  Sense strand starting at position 2510 of SEQ ID NO: 1886520
guaucugugaucugugaac

SEQ ID NO: 2415455 - RNA, 19 nt, Artificial Sequence
  Description of Artificial Sequence: Synthetic oligonucleotide
  Antisense strand to SEQ ID NO: 2415454
guucacagaucacagauac

SEQ ID NO: 2415456 - RNA, 19 nt, Artificial Sequence
  Description of Artificial Sequence: Synthetic oligonucleotide
  Sense strand starting at position 2512 of SEQ ID NO: 1886520
aucugugaucugugaacag

SEQ ID NO: 2415457 - RNA, 19 nt, Artificial Sequence
  Description of Artificial Sequence: Synthetic oligonucleotide
  Antisense strand to SEQ ID NO: 2415456
cuguucacagaucacagau

SEQ ID NO: 2415458 - RNA, 19 nt, Artificial Sequence
  Description of Artificial Sequence: Synthetic oligonucleotide
  Sense strand starting at position 2538 of SEQ ID NO: 1886520
aggugauuugcaugcacug

SEQ ID NO: 2415459 - RNA, 19 nt, Artificial Sequence
  Description of Artificial Sequence: Synthetic oligonucleotide
  Antisense strand to SEQ ID NO: 2415458
cagugcaugcaaaucaccu

SEQ ID NO: 2415460 - RNA, 19 nt, Artificial Sequence
  Description of Artificial Sequence: Synthetic oligonucleotide
  Sense strand starting at position 2540 of SEQ ID NO: 1886520
gugauuugcaugcacugua

SEQ ID NO: 2415461 - RNA, 19 nt, Artificial Sequence
  Description of Artificial Sequence: Synthetic oligonucleotide
  Antisense strand to SEQ ID NO: 2415460
uacagugcaugcaaaucac

SEQ ID NO: 2415462 - RNA, 19 nt, Artificial Sequence
  Description of Artificial Sequence: Synthetic oligonucleotide
  Sense strand starting at position 2562 of SEQ ID NO: 1886520
ugugaaagccaucagugua

SEQ ID NO: 2415463 - RNA, 19 nt, Artificial Sequence
  Description of Artificial Sequence: Synthetic oligonucleotide
  Antisense strand to SEQ ID NO: 2415462
uacacugauggcuuucaca

SEQ ID NO: 2415464 - RNA, 19 nt, Artificial Sequence
  Description of Artificial Sequence: Synthetic oligonucleotide
  Sense strand starting at position 2897 of SEQ ID NO: 1886520
auugcuuugaggcgagauu

SEQ ID NO: 2415465 - RNA, 19 nt, Artificial Sequence
  Description of Artificial Sequence: Synthetic oligonucleotide
  Antisense strand to SEQ ID NO: 2415464
aaucucgccucaaagcaau

SEQ ID NO: 2415466 - RNA, 19 nt, Artificial Sequence
  Description of Artificial Sequence: Synthetic oligonucleotide
  Sense strand starting at position 3054 of SEQ ID NO: 1886520
ggcaguacugcuugaacuu

SEQ ID NO: 2415467 - RNA, 19 nt, Artificial Sequence
  Description of Artificial Sequence: Synthetic oligonucleotide
  Antisense strand to SEQ ID NO: 2415466
aaguucaagcaguacugcc

SEQ ID NO: 2415468 - RNA, 19 nt, Artificial Sequence
  Description of Artificial Sequence: Synthetic oligonucleotide
  Sense strand starting at position 3055 of SEQ ID NO: 1886520
gcaguacugcuugaacuuu

SEQ ID NO: 2415469 - RNA, 19 nt, Artificial Sequence
  Description of Artificial Sequence: Synthetic oligonucleotide
  Antisense strand to SEQ ID NO: 2415468
aaaguucaagcaguacugc

SEQ ID NO: 2415470 - RNA, 19 nt, Artificial Sequence
  Description of Artificial Sequence: Synthetic oligonucleotide
  Sense strand starting at position 3177 of SEQ ID NO: 1886520
gccacaaaugggugaguaa

SEQ ID NO: 2415471 - RNA, 19 nt, Artificial Sequence
  Description of Artificial Sequence: Synthetic oligonucleotide
  Antisense strand to SEQ ID NO: 2415470
uuacucacccauuuguggc

SEQ ID NO: 2415472 - RNA, 19 nt, Artificial Sequence
  Description of Artificial Sequence: Synthetic oligonucleotide
  Sense strand starting at position 3180 of SEQ ID NO: 1886520
acaaaugggugaguaauca

SEQ ID NO: 2415473 - RNA, 19 nt, Artificial Sequence
  Description of Artificial Sequence: Synthetic oligonucleotide
  Antisense strand to SEQ ID NO: 2415472
ugauuacucacccauuugu

SEQ ID NO: 2415474 - RNA, 19 nt, Artificial Sequence
  Description of Artificial Sequence: Synthetic oligonucleotide
  Sense strand starting at position 3184 of SEQ ID NO: 1886520
augggugaguaaucauuaa

SEQ ID NO: 2415475 - RNA, 19 nt, Artificial Sequence
  Description of Artificial Sequence: Synthetic oligonucleotide
  Antisense strand to SEQ ID NO: 2415474
uuaaugauuacucacccau

SEQ ID NO: 2415476 - RNA, 19 nt, Artificial Sequence
  Description of Artificial Sequence: Synthetic oligonucleotide
  Sense strand starting at position 3315 of SEQ ID NO: 1886520
ggaguuaucuuccuuaaug

SEQ ID NO: 2415477 - RNA, 19 nt, Artificial Sequence
  Description of Artificial Sequence: Synthetic oligonucleotide
  Antisense strand to SEQ ID NO: 2415476
cauuaaggaagauaacucc

SEQ ID NO: 2415478 - RNA, 19 nt, Artificial Sequence
  Description of Artificial Sequence: Synthetic oligonucleotide
  Sense strand starting at position 3387 of SEQ ID NO: 1886520
gcugcauauccauaagcca

SEQ ID NO: 2415479 - RNA, 19 nt, Artificial Sequence
  Description of Artificial Sequence: Synthetic oligonucleotide
  Antisense strand to SEQ ID NO: 2415478
uggcuuauggauaugcagc

SEQ ID NO: 2415480 - RNA, 19 nt, Artificial Sequence
  Description of Artificial Sequence: Synthetic oligonucleotide
  Sense strand starting at position 3459 of SEQ ID NO: 1886520
gacauaaagugaugcauuu

SEQ ID NO: 2415481 - RNA, 19 nt, Artificial Sequence
  Description of Artificial Sequence: Synthetic oligonucleotide
  Antisense strand to SEQ ID NO: 2415480
aaaugcaucacuuuauguc

SEQ ID NO: 2415482 - RNA, 19 nt, Artificial Sequence
  Description of Artificial Sequence: Synthetic oligonucleotide
  Sense strand starting at position 3539 of SEQ ID NO: 1886520
aggguuguugaaugugaau

SEQ ID NO: 2415483 - RNA, 19 nt, Artificial Sequence
  Description of Artificial Sequence: Synthetic oligonucleotide
  Antisense strand to SEQ ID NO: 2415482
auucacauucaacaacccu

SEQ ID NO: 2415484 - RNA, 19 nt, Artificial Sequence
  Description of Artificial Sequence: Synthetic oligonucleotide
  Sense strand starting at position 13 of SEQ ID NO: 1886519
gaaagaacuuugguauucu

SEQ ID NO: 2415485 - RNA, 19 nt, Artificial Sequence
  Description of Artificial Sequence: Synthetic oligonucleotide
  Antisense strand to SEQ ID NO: 2415484
agaauaccaaaguucuuuc

SEQ ID NO: 2415486 - RNA, 19 nt, Artificial Sequence
  Description of Artificial Sequence: Synthetic oligonucleotide
  Sense strand starting at position 161 of SEQ ID NO: 1886519
gccagagucuaggucuauc

SEQ ID NO: 2415487 - RNA, 19 nt, Artificial Sequence
  Description of Artificial Sequence: Synthetic oligonucleotide
  Antisense strand to SEQ ID NO: 2415486
gauagaccuagacucuggc

SEQ ID NO: 2415488 - RNA, 19 nt, Artificial Sequence
  Description of Artificial Sequence: Synthetic oligonucleotide
  Sense strand starting at position 501 of SEQ ID NO: 1886519
ugggcacaucuauaaaucu

SEQ ID NO: 2415489 - RNA, 19 nt, Artificial Sequence
  Description of Artificial Sequence: Synthetic oligonucleotide
  Antisense strand to SEQ ID NO: 2415488
agauuuauagaugugccca

SEQ ID NO: 2415490 - RNA, 19 nt, Artificial Sequence
  Description of Artificial Sequence: Synthetic oligonucleotide
  Sense strand starting at position 859 of SEQ ID NO: 1886519
gagaccuagaagugguauu

SEQ ID NO: 2415491 - RNA, 19 nt, Artificial Sequence
  Description of Artificial Sequence: Synthetic oligonucleotide
  Antisense strand to SEQ ID NO: 2415490
aauaccacuucuaggucuc

SEQ ID NO: 2415492 - RNA, 19 nt, Artificial Sequence
  Description of Artificial Sequence: Synthetic oligonucleotide
  Sense strand starting at position 860 of SEQ ID NO: 1886519
agaccuagaagugguauua

SEQ ID NO: 2415493 - RNA, 19 nt, Artificial Sequence
  Description of Artificial Sequence: Synthetic oligonucleotide
  Antisense strand to SEQ ID NO: 2415492
uaauaccacuucuaggucu

SEQ ID NO: 2415494 - RNA, 19 nt, Artificial Sequence
  Description of Artificial Sequence: Synthetic oligonucleotide
  Sense strand starting at position 937 of SEQ ID NO: 1886519
uuuacaugagagugcuaca

SEQ ID NO: 2415495 - RNA, 19 nt, Artificial Sequence
  Description of Artificial Sequence: Synthetic oligonucleotide
  Antisense strand to SEQ ID NO: 2415494
uguagcacucucauguaaa

SEQ ID NO: 2415496 - RNA, 19 nt, Artificial Sequence
  Description of Artificial Sequence: Synthetic oligonucleotide
  Sense strand starting at position 942 of SEQ ID NO: 1886519
augagagugcuacaacauc

SEQ ID NO: 2415497 - RNA, 19 nt, Artificial Sequence
  Description of Artificial Sequence: Synthetic oligonucleotide
  Antisense strand to SEQ ID NO: 2415496
gauguuguagcacucucau

SEQ ID NO: 2415498 - RNA, 19 nt, Artificial Sequence
  Description of Artificial Sequence: Synthetic oligonucleotide
  Sense strand starting at position 1006 of SEQ ID NO: 1886519
gugugucaauuugaacacu

SEQ ID NO: 2415499 - RNA, 19 nt, Artificial Sequence
  Description of Artificial Sequence: Synthetic oligonucleotide
  Antisense strand to SEQ ID NO: 2415498
aguguucaaauugacacac

SEQ ID NO: 2415500 - RNA, 19 nt, Artificial Sequence
  Description of Artificial Sequence: Synthetic oligonucleotide
  Sense strand starting at position 1093 of SEQ ID NO: 1886519
augguaaacuuggauaaag

SEQ ID NO: 2415501 - RNA, 19 nt, Artificial Sequence
  Description of Artificial Sequence: Synthetic oligonucleotide
  Antisense strand to SEQ ID NO: 2415500
cuuuauccaaguuuaccau

SEQ ID NO: 2415502 - RNA, 19 nt, Artificial Sequence
  Description of Artificial Sequence: Synthetic oligonucleotide
  Sense strand starting at position 1116 of SEQ ID NO: 1886519
uaaauaauccaagggugua

SEQ ID NO: 2415503 - RNA, 19 nt, Artificial Sequence
  Description of Artificial Sequence: Synthetic oligonucleotide
  Antisense strand to SEQ ID NO: 2415502
uacacccuuggauuauuua

SEQ ID NO: 2415504 - RNA, 19 nt, Artificial Sequence
  Description of Artificial Sequence: Synthetic oligonucleotide
  Sense strand starting at position 1176 of SEQ ID NO: 1886519
ugauguugccaauauuaaa

SEQ ID NO: 2415505 - RNA, 19 nt, Artificial Sequence
  Description of Artificial Sequence: Synthetic oligonucleotide
  Antisense strand to SEQ ID NO: 2415504
uuuaauauuggcaacauca

SEQ ID NO: 2415506 - RNA, 19 nt, Artificial Sequence
  Description of Artificial Sequence: Synthetic oligonucleotide
  Sense strand starting at position 1196 of SEQ ID NO: 1886519
guuguauauccuugcagac

SEQ ID NO: 2415507 - RNA, 19 nt, Artificial Sequence
  Description of Artificial Sequence: Synthetic oligonucleotide
  Antisense strand to SEQ ID NO: 2415506
gucugcaaggauauacaac

SEQ ID NO: 2415508 - RNA, 19 nt, Artificial Sequence
  Description of Artificial Sequence: Synthetic oligonucleotide
  Sense strand starting at position 1260 of SEQ ID NO: 1886519
uuauuucguugaguagauu

SEQ ID NO: 2415509 - RNA, 19 nt, Artificial Sequence
  Description of Artificial Sequence: Synthetic oligonucleotide
  Antisense strand to SEQ ID NO: 2415508
aaucuacucaacgaaauaa

SEQ ID NO: 2415510 - RNA, 19 nt, Artificial Sequence
  Description of Artificial Sequence: Synthetic oligonucleotide
  Sense strand starting at position 1286 of SEQ ID NO: 1886519
guaagacugcuguauuaua

SEQ ID NO: 2415511 - RNA, 19 nt, Artificial Sequence
  Description of Artificial Sequence: Synthetic oligonucleotide
  Antisense strand to SEQ ID NO: 2415510
uauaauacagcagucuuac

SEQ ID NO: 2415512 - RNA, 19 nt, Artificial Sequence
  Description of Artificial Sequence: Synthetic oligonucleotide
  Sense strand starting at position 1453 of SEQ ID NO: 1886519
cgggaagaaguuuaaaguu

SEQ ID NO: 2415513 - RNA, 19 nt, Artificial Sequence
  Description of Artificial Sequence: Synthetic oligonucleotide
  Antisense strand to SEQ ID NO: 2415512
aacuuuaaacuucuucccg

SEQ ID NO: 2415514 - RNA, 19 nt, Artificial Sequence
  Description of Artificial Sequence: Synthetic oligonucleotide
  Sense strand starting at position 1526 of SEQ ID NO: 1886519
gcauguaauuuagauauac

SEQ ID NO: 2415515 - RNA, 19 nt, Artificial Sequence
  Description of Artificial Sequence: Synthetic oligonucleotide
  Antisense strand to SEQ ID NO: 2415514
guauaucuaaauuacaugc

SEQ ID NO: 2415516 - RNA, 19 nt, Artificial Sequence
  Description of Artificial Sequence: Synthetic oligonucleotide
  Sense strand starting at position 1874 of SEQ ID NO: 1886519
gaacuugggugagaaauca

SEQ ID NO: 2415517 - RNA, 19 nt, Artificial Sequence
  Description of Artificial Sequence: Synthetic oligonucleotide
  Antisense strand to SEQ ID NO: 2415516
ugauuucucacccaaguuc

SEQ ID NO: 2415518 - RNA, 19 nt, Artificial Sequence
  Description of Artificial Sequence: Synthetic oligonucleotide
  Sense strand starting at position 1966 of SEQ ID NO: 1886519
uggucuuccgagugauuga

SEQ ID NO: 2415519 - RNA, 19 nt, Artificial Sequence
  Description of Artificial Sequence: Synthetic oligonucleotide
  Antisense strand to SEQ ID NO: 2415518
ucaaucacucggaagacca

SEQ ID NO: 2415520 - RNA, 19 nt, Artificial Sequence
  Description of Artificial Sequence: Synthetic oligonucleotide
  Sense strand starting at position 1967 of SEQ ID NO: 1886519
ggucuuccgagugauugac

SEQ ID NO: 2415521 - RNA, 19 nt, Artificial Sequence
  Description of Artificial Sequence: Synthetic oligonucleotide
  Antisense strand to SEQ ID NO: 2415520
gucaaucacucggaagacc

SEQ ID NO: 2415522 - RNA, 19 nt, Artificial Sequence
  Description of Artificial Sequence: Synthetic oligonucleotide
  Sense strand starting at position 2016 of SEQ ID NO: 1886519
ugucguaucuaaccaaucu

SEQ ID NO: 2415523 - RNA, 19 nt, Artificial Sequence
  Description of Artificial Sequence: Synthetic oligonucleotide
  Antisense strand to SEQ ID NO: 2415522
agauugguuagauacgaca

SEQ ID NO: 2415524 - RNA, 19 nt, Artificial Sequence
  Description of Artificial Sequence: Synthetic oligonucleotide
  Sense strand starting at position 2078 of SEQ ID NO: 1886519
gcgagcugagccuuccuua

SEQ ID NO: 2415525 - RNA, 19 nt, Artificial Sequence
  Description of Artificial Sequence: Synthetic oligonucleotide
  Antisense strand to SEQ ID NO: 2415524
uaaggaaggcucagcucgc

SEQ ID NO: 2415526 - RNA, 19 nt, Artificial Sequence
  Description of Artificial Sequence: Synthetic oligonucleotide
  Sense strand starting at position 2315 of SEQ ID NO: 1886519
ugagguuugggucgaagag

SEQ ID NO: 2415527 - RNA, 19 nt, Artificial Sequence
  Description of Artificial Sequence: Synthetic oligonucleotide
  Antisense strand to SEQ ID NO: 2415526
cucuucgacccaaaccuca

SEQ ID NO: 2415528 - RNA, 19 nt, Artificial Sequence
  Description of Artificial Sequence: Synthetic oligonucleotide
  Sense strand starting at position 2317 of SEQ ID NO: 1886519
agguuugggucgaagaggu

SEQ ID NO: 2415529 - RNA, 19 nt, Artificial Sequence
  Description of Artificial Sequence: Synthetic oligonucleotide
  Antisense strand to SEQ ID NO: 2415528
accucuucgacccaaaccu

SEQ ID NO: 2415530 - RNA, 19 nt, Artificial Sequence
  Description of Artificial Sequence: Synthetic oligonucleotide
  Sense strand starting at position 2550 of SEQ ID NO: 1886519
gacaguuggcgacacugaa

SEQ ID NO: 2415531 - RNA, 19 nt, Artificial Sequence
  Description of Artificial Sequence: Synthetic oligonucleotide
  Antisense strand to SEQ ID NO: 2415530
uucagugucgccaacuguc

SEQ ID NO: 2415532 - RNA, 19 nt, Artificial Sequence
  Description of Artificial Sequence: Synthetic oligonucleotide
  Sense strand starting at position 2669 of SEQ ID NO: 1886519
gcucgcuagaaauacagau

SEQ ID NO: 2415533 - RNA, 19 nt, Artificial Sequence
  Description of Artificial Sequence: Synthetic oligonucleotide
  Antisense strand to SEQ ID NO: 2415532
aucuguauuucuagcgagc

SEQ ID NO: 2415534 - RNA, 19 nt, Artificial Sequence
  Description of Artificial Sequence: Synthetic oligonucleotide
  Sense strand starting at position 2718 of SEQ ID NO: 1886519
guaucugugaucugugaac

SEQ ID NO: 2415535 - RNA, 19 nt, Artificial Sequence
  Description of Artificial Sequence: Synthetic oligonucleotide
  Antisense strand to SEQ ID NO: 2415534
guucacagaucacagauac

SEQ ID NO: 2415536 - RNA, 19 nt, Artificial Sequence
  Description of Artificial Sequence: Synthetic oligonucleotide
  Sense strand starting at position 2720 of SEQ ID NO: 1886519
aucugugaucugugaacag

SEQ ID NO: 2415537 - RNA, 19 nt, Artificial Sequence
  Description of Artificial Sequence: Synthetic oligonucleotide
  Antisense strand to SEQ ID NO: 2415536
cuguucacagaucacagau

SEQ ID NO: 2415538 - RNA, 19 nt, Artificial Sequence
  Description of Artificial Sequence: Synthetic oligonucleotide
  Sense strand starting at position 2746 of SEQ ID NO: 1886519
aggugauuugcaugcacug

SEQ ID NO: 2415539 - RNA, 19 nt, Artificial Sequence
  Description of Artificial Sequence: Synthetic oligonucleotide
  Antisense strand to SEQ ID NO: 2415538
cagugcaugcaaaucaccu

SEQ ID NO: 2415540 - RNA, 19 nt, Artificial Sequence
  Description of Artificial Sequence: Synthetic oligonucleotide
  Sense strand starting at position 2748 of SEQ ID NO: 1886519
gugauuugcaugcacugua

SEQ ID NO: 2415541 - RNA, 19 nt, Artificial Sequence
  Description of Artificial Sequence: Synthetic oligonucleotide
  Antisense strand to SEQ ID NO: 2415540
uacagugcaugcaaaucac

SEQ ID NO: 2415542 - RNA, 19 nt, Artificial Sequence
  Description of Artificial Sequence: Synthetic oligonucleotide
  Sense strand starting at position 2770 of SEQ ID NO: 1886519
ugugaaagccaucagugua

SEQ ID NO: 2415543 - RNA, 19 nt, Artificial Sequence
  Description of Artificial Sequence: Synthetic oligonucleotide
  Antisense strand to SEQ ID NO: 2415542
uacacugauggcuuucaca

SEQ ID NO: 2415544 - RNA, 19 nt, Artificial Sequence
  Description of Artificial Sequence: Synthetic oligonucleotide
  Sense strand starting at position 3105 of SEQ ID NO: 1886519
auugcuuugaggcgagauu

SEQ ID NO: 2415545 - RNA, 19 nt, Artificial Sequence
  Description of Artificial Sequence: Synthetic oligonucleotide
  Antisense strand to SEQ ID NO: 2415544
aaucucgccucaaagcaau

SEQ ID NO: 2415546 - RNA, 19 nt, Artificial Sequence
  Description of Artificial Sequence: Synthetic oligonucleotide
  Sense strand starting at position 3262 of SEQ ID NO: 1886519
ggcaguacugcuugaacuu

SEQ ID NO: 2415547 - RNA, 19 nt, Artificial Sequence
  Description of Artificial Sequence: Synthetic oligonucleotide
  Antisense strand to SEQ ID NO: 2415546
aaguucaagcaguacugcc

SEQ ID NO: 2415548 - RNA, 19 nt, Artificial Sequence
  Description of Artificial Sequence: Synthetic oligonucleotide
  Sense strand starting at position 3263 of SEQ ID NO: 1886519
gcaguacugcuugaacuuu

SEQ ID NO: 2415549 - RNA, 19 nt, Artificial Sequence
  Description of Artificial Sequence: Synthetic oligonucleotide
  Antisense strand to SEQ ID NO: 2415548
aaaguucaagcaguacugc

SEQ ID NO: 2415550 - RNA, 19 nt, Artificial Sequence
  Description of Artificial Sequence: Synthetic oligonucleotide
  Sense strand starting at position 3385 of SEQ ID NO: 1886519
gccacaaaugggugaguaa

SEQ ID NO: 2415551 - RNA, 19 nt, Artificial Sequence
  Description of Artificial Sequence: Synthetic oligonucleotide
  Antisense strand to SEQ ID NO: 2415550
uuacucacccauuuguggc

SEQ ID NO: 2415552 - RNA, 19 nt, Artificial Sequence
  Description of Artificial Sequence: Synthetic oligonucleotide
  Sense strand starting at position 3388 of SEQ ID NO: 1886519
acaaaugggugaguaauca

SEQ ID NO: 2415553 - RNA, 19 nt, Artificial Sequence
  Description of Artificial Sequence: Synthetic oligonucleotide
  Antisense strand to SEQ ID NO: 2415552
ugauuacucacccauuugu

SEQ ID NO: 2415554 - RNA, 19 nt, Artificial Sequence
  Description of Artificial Sequence: Synthetic oligonucleotide
  Sense strand starting at position 3392 of SEQ ID NO: 1886519
augggugaguaaucauuaa

SEQ ID NO: 2415555 - RNA, 19 nt, Artificial Sequence
  Description of Artificial Sequence: Synthetic oligonucleotide
  Antisense strand to SEQ ID NO: 2415554
uuaaugauuacucacccau

SEQ ID NO: 2415556 - RNA, 19 nt, Artificial Sequence
  Description of Artificial Sequence: Synthetic oligonucleotide
  Sense strand starting at position 3523 of SEQ ID NO: 1886519
ggaguuaucuuccuuaaug

SEQ ID NO: 2415557 - RNA, 19 nt, Artificial Sequence
  Description of Artificial Sequence: Synthetic oligonucleotide
  Antisense strand to SEQ ID NO: 2415556
cauuaaggaagauaacucc

SEQ ID NO: 2415558 - RNA, 19 nt, Artificial Sequence
  Description of Artificial Sequence: Synthetic oligonucleotide
  Sense strand starting at position 3595 of SEQ ID NO: 1886519
gcugcauauccauaagcca

SEQ ID NO: 2415559 - RNA, 19 nt, Artificial Sequence
  Description of Artificial Sequence: Synthetic oligonucleotide
  Antisense strand to SEQ ID NO: 2415558
uggcuuauggauaugcagc

SEQ ID NO: 2415560 - RNA, 19 nt, Artificial Sequence
  Description of Artificial Sequence: Synthetic oligonucleotide
  Sense strand starting at position 3667 of SEQ ID NO: 1886519
gacauaaagugaugcauuu

SEQ ID NO: 2415561 - RNA, 19 nt, Artificial Sequence
  Description of Artificial Sequence: Synthetic oligonucleotide
  Antisense strand to SEQ ID NO: 2415560
aaaugcaucacuuuauguc

SEQ ID NO: 2415562 - RNA, 19 nt, Artificial Sequence
  Description of Artificial Sequence: Synthetic oligonucleotide
  Sense strand starting at position 3747 of SEQ ID NO: 1886519
aggguuguugaaugugaau

SEQ ID NO: 2415563 - RNA, 19 nt, Artificial Sequence
  Description of Artificial Sequence: Synthetic oligonucleotide
  Antisense strand to SEQ ID NO: 2415562
auucacauucaacaacccu

SEQ ID NO: 2415564 - RNA, 19 nt, Artificial Sequence
  Description of Artificial Sequence: Synthetic oligonucleotide
  Sense strand starting at position 27 of SEQ ID NO: 1886521
cagaacuacugaguucuga

SEQ ID NO: 2415565 - RNA, 19 nt, Artificial Sequence
  Description of Artificial Sequence: Synthetic oligonucleotide
  Antisense strand to SEQ ID NO: 2415564
ucagaacucaguaguucug

SEQ ID NO: 2415566 - RNA, 19 nt, Artificial Sequence
  Description of Artificial Sequence: Synthetic oligonucleotide
  Sense strand starting at position 187 of SEQ ID NO: 1886521
ugggaagucuacucuuuga

SEQ ID NO: 2415567 - RNA, 19 nt, Artificial Sequence
  Description of Artificial Sequence: Synthetic oligonucleotide
  Antisense strand to SEQ ID NO: 2415566
ucaaagaguagacuuccca

SEQ ID NO: 2415568 - RNA, 19 nt, Artificial Sequence
  Description of Artificial Sequence: Synthetic oligonucleotide
  Sense strand starting at position 217 of SEQ ID NO: 1886521
ucagaaaguuuccuagaua

SEQ ID NO: 2415569 - RNA, 19 nt, Artificial Sequence
  Description of Artificial Sequence: Synthetic oligonucleotide
  Antisense strand to SEQ ID NO: 2415568
uaucuaggaaacuuucuga

SEQ ID NO: 2415570 - RNA, 19 nt, Artificial Sequence
  Description of Artificial Sequence: Synthetic oligonucleotide
  Sense strand starting at position 247 of SEQ ID NO: 1886521
cucuaaucagaaugguucu

SEQ ID NO: 2415571 - RNA, 19 nt, Artificial Sequence
  Description of Artificial Sequence: Synthetic oligonucleotide
  Antisense strand to SEQ ID NO: 2415570
agaaccauucugauuagag

SEQ ID NO: 2415572 - RNA, 19 nt, Artificial Sequence
  Description of Artificial Sequence: Synthetic oligonucleotide
  Sense strand starting at position 270 of SEQ ID NO: 1886521
cucagagaagguggucuua

SEQ ID NO: 2415573 - RNA, 19 nt, Artificial Sequence
  Description of Artificial Sequence: Synthetic oligonucleotide
  Antisense strand to SEQ ID NO: 2415572
uaagaccaccuucucugag

SEQ ID NO: 2415574 - RNA, 19 nt, Artificial Sequence
  Description of Artificial Sequence: Synthetic oligonucleotide
  Sense strand starting at position 480 of SEQ ID NO: 1886521
aguaaaggagucuaugcuu

SEQ ID NO: 2415575 - RNA, 19 nt, Artificial Sequence
  Description of Artificial Sequence: Synthetic oligonucleotide
  Antisense strand to SEQ ID NO: 2415574
aagcauagacuccuuuacu

SEQ ID NO: 2415576 - RNA, 19 nt, Artificial Sequence
  Description of Artificial Sequence: Synthetic oligonucleotide
  Sense strand starting at position 549 of SEQ ID NO: 1886521
ccuggcaggccuuauuaau

SEQ ID NO: 2415577 - RNA, 19 nt, Artificial Sequence
  Description of Artificial Sequence: Synthetic oligonucleotide
  Antisense strand to SEQ ID NO: 2415576
auuaauaaggccugccagg

SEQ ID NO: 2415578 - RNA, 19 nt, Artificial Sequence
  Description of Artificial Sequence: Synthetic oligonucleotide
  Sense strand starting at position 814 of SEQ ID NO: 1886521
agggacacaugcuuuaaau

SEQ ID NO: 2415579 - RNA, 19 nt, Artificial Sequence
  Description of Artificial Sequence: Synthetic oligonucleotide
  Antisense strand to SEQ ID NO: 2415578
auuuaaagcaugugucccu

SEQ ID NO: 2415580 - RNA, 19 nt, Artificial Sequence
  Description of Artificial Sequence: Synthetic oligonucleotide
  Sense strand starting at position 1026 of SEQ ID NO: 1886521
uguguuugugggcauauuu

SEQ ID NO: 2415581 - RNA, 19 nt, Artificial Sequence
  Description of Artificial Sequence: Synthetic oligonucleotide
  Antisense strand to SEQ ID NO: 2415580
aaauaugcccacaaacaca

SEQ ID NO: 2415582 - RNA, 19 nt, Artificial Sequence
  Description of Artificial Sequence: Synthetic oligonucleotide
  Sense strand starting at position 1284 of SEQ ID NO: 1886521
agugauuucugcgugagug

SEQ ID NO: 2415583 - RNA, 19 nt, Artificial Sequence
  Description of Artificial Sequence: Synthetic oligonucleotide
  Antisense strand to SEQ ID NO: 2415582
cacucacgcagaaaucacu

SEQ ID NO: 2415584 - RNA, 19 nt, Artificial Sequence
  Description of Artificial Sequence: Synthetic oligonucleotide
  Sense strand starting at position 1364 of SEQ ID NO: 1886521
uuuguauugaggcaugaca

SEQ ID NO: 2415585 - RNA, 19 nt, Artificial Sequence
  Description of Artificial Sequence: Synthetic oligonucleotide
  Antisense strand to SEQ ID NO: 2415584
ugucaugccucaauacaaa

SEQ ID NO: 2415586 - RNA, 19 nt, Artificial Sequence
  Description of Artificial Sequence: Synthetic oligonucleotide
  Sense strand starting at position 1366 of SEQ ID NO: 1886521
uguauugaggcaugacaug

SEQ ID NO: 2415587 - RNA, 19 nt, Artificial Sequence
  Description of Artificial Sequence: Synthetic oligonucleotide
  Antisense strand to SEQ ID NO: 2415586
caugucaugccucaauaca

SEQ ID NO: 2415588 - RNA, 19 nt, Artificial Sequence
  Description of Artificial Sequence: Synthetic oligonucleotide
  Sense strand starting at position 1371 of SEQ ID NO: 1886521
ugaggcaugacaugcauau

SEQ ID NO: 2415589 - RNA, 19 nt, Artificial Sequence
  Description of Artificial Sequence: Synthetic oligonucleotide
  Antisense strand to SEQ ID NO: 2415588
auaugcaugucaugccuca

SEQ ID NO: 2415590 - RNA, 19 nt, Artificial Sequence
  Description of Artificial Sequence: Synthetic oligonucleotide
  Sense strand starting at position 1375 of SEQ ID NO: 1886521
gcaugacaugcauauaaag

SEQ ID NO: 2415591 - RNA, 19 nt, Artificial Sequence
  Description of Artificial Sequence: Synthetic oligonucleotide
  Antisense strand to SEQ ID NO: 2415590
cuuuauaugcaugucaugc

SEQ ID NO: 2415592 - RNA, 19 nt, Artificial Sequence
  Description of Artificial Sequence: Synthetic oligonucleotide
  Sense strand starting at position 1409 of SEQ ID NO: 1886521
aguaccuagcuugagcaau

SEQ ID NO: 2415593 - RNA, 19 nt, Artificial Sequence
  Description of Artificial Sequence: Synthetic oligonucleotide
  Antisense strand to SEQ ID NO: 2415592
auugcucaagcuagguacu

SEQ ID NO: 2415594 - RNA, 19 nt, Artificial Sequence
  Description of Artificial Sequence: Synthetic oligonucleotide
  Sense strand starting at position 1439 of SEQ ID NO: 1886521
gaaacuauucgugaaccca

SEQ ID NO: 2415595 - RNA, 19 nt, Artificial Sequence
  Description of Artificial Sequence: Synthetic oligonucleotide
  Antisense strand to SEQ ID NO: 2415594
uggguucacgaauaguuuc

SEQ ID NO: 2415596 - RNA, 19 nt, Artificial Sequence
  Description of Artificial Sequence: Synthetic oligonucleotide
  Sense strand starting at position 1681 of SEQ ID NO: 1886521
cauauuaugcuggagccau

SEQ ID NO: 2415597 - RNA, 19 nt, Artificial Sequence
  Description of Artificial Sequence: Synthetic oligonucleotide
  Antisense strand to SEQ ID NO: 2415596
auggcuccagcauaauaug

SEQ ID NO: 2415598 - RNA, 19 nt, Artificial Sequence
  Description of Artificial Sequence: Synthetic oligonucleotide
  Sense strand starting at position 1780 of SEQ ID NO: 1886521
cagagaagucaaugcuuuc

SEQ ID NO: 2415599 - RNA, 19 nt, Artificial Sequence
  Description of Artificial Sequence: Synthetic oligonucleotide
  Antisense strand to SEQ ID NO: 2415598
gaaagcauugacuucucug

SEQ ID NO: 2415600 - RNA, 19 nt, Artificial Sequence
  Description of Artificial Sequence: Synthetic oligonucleotide
  Sense strand starting at position 1826 of SEQ ID NO: 1886521
ccagcaaucucaguggaaa

SEQ ID NO: 2415601 - RNA, 19 nt, Artificial Sequence
  Description of Artificial Sequence: Synthetic oligonucleotide
  Antisense strand to SEQ ID NO: 2415600
uuuccacugagauugcugg

SEQ ID NO: 2415602 - RNA, 19 nt, Artificial Sequence
  Description of Artificial Sequence: Synthetic oligonucleotide
  Sense strand starting at position 2264 of SEQ ID NO: 1886521
aggucucggccugaaauca

SEQ ID NO: 2415603 - RNA, 19 nt, Artificial Sequence
  Description of Artificial Sequence: Synthetic oligonucleotide
  Antisense strand to SEQ ID NO: 2415602
ugauuucaggccgagaccu

SEQ ID NO: 2415604 - RNA, 19 nt, Artificial Sequence
  Description of Artificial Sequence: Synthetic oligonucleotide
  Sense strand starting at position 2345 of SEQ ID NO: 1886521
gggaguuccuccuuaauaa

SEQ ID NO: 2415605 - RNA, 19 nt, Artificial Sequence
  Description of Artificial Sequence: Synthetic oligonucleotide
  Antisense strand to SEQ ID NO: 2415604
uuauuaaggaggaacuccc

SEQ ID NO: 2415606 - RNA, 19 nt, Artificial Sequence
  Description of Artificial Sequence: Synthetic oligonucleotide
  Sense strand starting at position 2733 of SEQ ID NO: 1886521
uccgauguucccuaaagau

SEQ ID NO: 2415607 - RNA, 19 nt, Artificial Sequence
  Description of Artificial Sequence: Synthetic oligonucleotide
  Antisense strand to SEQ ID NO: 2415606
aucuuuagggaacaucgga

SEQ ID NO: 2415608 - RNA, 19 nt, Artificial Sequence
  Description of Artificial Sequence: Synthetic oligonucleotide
  Sense strand starting at position 2757 of SEQ ID NO: 1886521
caagguaaacauggauagu

SEQ ID NO: 2415609 - RNA, 19 nt, Artificial Sequence
  Description of Artificial Sequence: Synthetic oligonucleotide
  Antisense strand to SEQ ID NO: 2415608
acuauccauguuuaccuug

SEQ ID NO: 2415610 - RNA, 19 nt, Artificial Sequence
  Description of Artificial Sequence: Synthetic oligonucleotide
  Sense strand starting at position 2767 of SEQ ID NO: 1886521
auggauaguuguguauaaa

SEQ ID NO: 2415611 - RNA, 19 nt, Artificial Sequence
  Description of Artificial Sequence: Synthetic oligonucleotide
  Antisense strand to SEQ ID NO: 2415610
uuuauacacaacuauccau

SEQ ID NO: 2415612 - RNA, 19 nt, Artificial Sequence
  Description of Artificial Sequence: Synthetic oligonucleotide
  Sense strand starting at position 2768 of SEQ ID NO: 1886521
uggauaguuguguauaaau

SEQ ID NO: 2415613 - RNA, 19 nt, Artificial Sequence
  Description of Artificial Sequence: Synthetic oligonucleotide
  Antisense strand to SEQ ID NO: 2415612
auuuauacacaacuaucca

SEQ ID NO: 2415614 - RNA, 19 nt, Artificial Sequence
  Description of Artificial Sequence: Synthetic oligonucleotide
  Sense strand starting at position 2770 of SEQ ID NO: 1886521
gauaguuguguauaaauca

SEQ ID NO: 2415615 - RNA, 19 nt, Artificial Sequence
  Description of Artificial Sequence: Synthetic oligonucleotide
  Antisense strand to SEQ ID NO: 2415614
ugauuuauacacaacuauc

SEQ ID NO: 2415616 - RNA, 19 nt, Artificial Sequence
  Description of Artificial Sequence: Synthetic oligonucleotide
  Sense strand starting at position 2950 of SEQ ID NO: 1886521
cuuaucucucccugaagag

SEQ ID NO: 2415617 - RNA, 19 nt, Artificial Sequence
  Description of Artificial Sequence: Synthetic oligonucleotide
  Antisense strand to SEQ ID NO: 2415616
cucuucagggagagauaag

SEQ ID NO: 2415618 - RNA, 19 nt, Artificial Sequence
  Description of Artificial Sequence: Synthetic oligonucleotide
  Sense strand starting at position 2951 of SEQ ID NO: 1886521
uuaucucucccugaagagu

SEQ ID NO: 2415619 - RNA, 19 nt, Artificial Sequence
  Description of Artificial Sequence: Synthetic oligonucleotide
  Antisense strand to SEQ ID NO: 2415618
acucuucagggagagauaa

SEQ ID NO: 2415620 - RNA, 19 nt, Artificial Sequence
  Description of Artificial Sequence: Synthetic oligonucleotide
  Sense strand starting at position 3074 of SEQ ID NO: 1886521
cugugaagagcggauauua

SEQ ID NO: 2415621 - RNA, 19 nt, Artificial Sequence
  Description of Artificial Sequence: Synthetic oligonucleotide
  Antisense strand to SEQ ID NO: 2415620
uaauauccgcucuucacag

SEQ ID NO: 2415622 - RNA, 19 nt, Artificial Sequence
  Description of Artificial Sequence: Synthetic oligonucleotide
  Sense strand starting at position 3252 of SEQ ID NO: 1886521
gagggcuaccugcaccaua

SEQ ID NO: 2415623 - RNA, 19 nt, Artificial Sequence
  Description of Artificial Sequence: Synthetic oligonucleotide
  Antisense strand to SEQ ID NO: 2415622
uauggugcagguagcccuc

SEQ ID NO: 2415624 - RNA, 19 nt, Artificial Sequence
  Description of Artificial Sequence: Synthetic oligonucleotide
  Sense strand starting at position 3313 of SEQ ID NO: 1886521
auagcaaacgcggaauuau

SEQ ID NO: 2415625 - RNA, 19 nt, Artificial Sequence
  Description of Artificial Sequence: Synthetic oligonucleotide
  Antisense strand to SEQ ID NO: 2415624
auaauuccgcguuugcuau

SEQ ID NO: 2415626 - RNA, 19 nt, Artificial Sequence
  Description of Artificial Sequence: Synthetic oligonucleotide
  Sense strand starting at position 3377 of SEQ ID NO: 1886521
ggcacugaucuguauucua

SEQ ID NO: 2415627 - RNA, 19 nt, Artificial Sequence
  Description of Artificial Sequence: Synthetic oligonucleotide
  Antisense strand to SEQ ID NO: 2415626
uagaauacagaucagugcc

SEQ ID NO: 2415628 - RNA, 19 nt, Artificial Sequence
  Description of Artificial Sequence: Synthetic oligonucleotide
  Sense strand starting at position 3380 of SEQ ID NO: 1886521
acugaucuguauucuaaga

SEQ ID NO: 2415629 - RNA, 19 nt, Artificial Sequence
  Description of Artificial Sequence: Synthetic oligonucleotide
  Antisense strand to SEQ ID NO: 2415628
ucuuagaauacagaucagu

SEQ ID NO: 2415630 - RNA, 19 nt, Artificial Sequence
  Description of Artificial Sequence: Synthetic oligonucleotide
  Sense strand starting at position 3388 of SEQ ID NO: 1886521
guauucuaagagcagguuu

SEQ ID NO: 2415631 - RNA, 19 nt, Artificial Sequence
  Description of Artificial Sequence: Synthetic oligonucleotide
  Antisense strand to SEQ ID NO: 2415630
aaaccugcucuuagaauac

SEQ ID NO: 2415632 - RNA, 19 nt, Artificial Sequence
  Description of Artificial Sequence: Synthetic oligonucleotide
  Sense strand starting at position 3505 of SEQ ID NO: 1886521
ccucuaaauguuuaacagu

SEQ ID NO: 2415633 - RNA, 19 nt, Artificial Sequence
  Description of Artificial Sequence: Synthetic oligonucleotide
  Antisense strand to SEQ ID NO: 2415632
acuguuaaacauuuagagg

SEQ ID NO: 2415634 - RNA, 19 nt, Artificial Sequence
  Description of Artificial Sequence: Synthetic oligonucleotide
  Sense strand starting at position 3514 of SEQ ID NO: 1886521
guuuaacagucuuugaaga

SEQ ID NO: 2415635 - RNA, 19 nt, Artificial Sequence
  Description of Artificial Sequence: Synthetic oligonucleotide
  Antisense strand to SEQ ID NO: 2415634
ucuucaaagacuguuaaac

SEQ ID NO: 2415636 - RNA, 19 nt, Artificial Sequence
  Description of Artificial Sequence: Synthetic oligonucleotide
  Sense strand starting at position 3515 of SEQ ID NO: 1886521
uuuaacagucuuugaagaa

SEQ ID NO: 2415637 - RNA, 19 nt, Artificial Sequence
  Description of Artificial Sequence: Synthetic oligonucleotide
  Antisense strand to SEQ ID NO: 2415636
uucuucaaagacuguuaaa

SEQ ID NO: 2415638 - RNA, 19 nt, Artificial Sequence
  Description of Artificial Sequence: Synthetic oligonucleotide
  Sense strand starting at position 3519 of SEQ ID NO: 1886521
acagucuuugaagaagcua

SEQ ID NO: 2415639 - RNA, 19 nt, Artificial Sequence
  Description of Artificial Sequence: Synthetic oligonucleotide
  Antisense strand to SEQ ID NO: 2415638
uagcuucuucaaagacugu

SEQ ID NO: 2415640 - RNA, 19 nt, Artificial Sequence
  Description of Artificial Sequence: Synthetic oligonucleotide
  Sense strand starting at position 3567 of SEQ ID NO: 1886521
uggagaugucaaggaggua

SEQ ID NO: 2415641 - RNA, 19 nt, Artificial Sequence
  Description of Artificial Sequence: Synthetic oligonucleotide
  Antisense strand to SEQ ID NO: 2415640
uaccuccuugacaucucca

SEQ ID NO: 2415642 - RNA, 19 nt, Artificial Sequence
  Description of Artificial Sequence: Synthetic oligonucleotide
  Sense strand starting at position 3675 of SEQ ID NO: 1886521
cagagcuauggccaggaau

SEQ ID NO: 2415643 - RNA, 19 nt, Artificial Sequence
  Description of Artificial Sequence: Synthetic oligonucleotide
  Antisense strand to SEQ ID NO: 2415642
auuccuggccauagcucug

SEQ ID NO: 2415644 - RNA, 19 nt, Artificial Sequence
  Description of Artificial Sequence: Synthetic oligonucleotide
  Sense strand starting at position 153 of SEQ ID NO: 1886522
cacgacuacuaagugauau

SEQ ID NO: 2415645 - RNA, 19 nt, Artificial Sequence
  Description of Artificial Sequence: Synthetic oligonucleotide
  Antisense strand to SEQ ID NO: 2415644
auaucacuuaguagucgug

SEQ ID NO: 2415646 - RNA, 19 nt, Artificial Sequence
  Description of Artificial Sequence: Synthetic oligonucleotide
  Sense strand starting at position 154 of SEQ ID NO: 1886522
acgacuacuaagugauaug

SEQ ID NO: 2415647 - RNA, 19 nt, Artificial Sequence
  Description of Artificial Sequence: Synthetic oligonucleotide
  Antisense strand to SEQ ID NO: 2415646
cauaucacuuaguagucgu

SEQ ID NO: 2415648 - RNA, 19 nt, Artificial Sequence
  Description of Artificial Sequence: Synthetic oligonucleotide
  Sense strand starting at position 236 of SEQ ID NO: 1886522
ggaacaaacugugucauca

SEQ ID NO: 2415649 - RNA, 19 nt, Artificial Sequence
  Description of Artificial Sequence: Synthetic oligonucleotide
  Antisense strand to SEQ ID NO: 2415648
ugaugacacaguuuguucc

SEQ ID NO: 2415650 - RNA, 19 nt, Artificial Sequence
  Description of Artificial Sequence: Synthetic oligonucleotide
  Sense strand starting at position 254 of SEQ ID NO: 1886522
acaaacaaugcaugaaagu

SEQ ID NO: 2415651 - RNA, 19 nt, Artificial Sequence
  Description of Artificial Sequence: Synthetic oligonucleotide
  Antisense strand to SEQ ID NO: 2415650
acuuucaugcauuguuugu

SEQ ID NO: 2415652 - RNA, 19 nt, Artificial Sequence
  Description of Artificial Sequence: Synthetic oligonucleotide
  Sense strand starting at position 281 of SEQ ID NO: 1886522
cuaagcaaguugucaauga

SEQ ID NO: 2415653 - RNA, 19 nt, Artificial Sequence
  Description of Artificial Sequence: Synthetic oligonucleotide
  Antisense strand to SEQ ID NO: 2415652
ucauugacaacuugcuuag

SEQ ID NO: 2415654 - RNA, 19 nt, Artificial Sequence
  Description of Artificial Sequence: Synthetic oligonucleotide
  Sense strand starting at position 328 of SEQ ID NO: 1886522
uugcaaaucuggucuauaa

SEQ ID NO: 2415655 - RNA, 19 nt, Artificial Sequence
  Description of Artificial Sequence: Synthetic oligonucleotide
  Antisense strand to SEQ ID NO: 2415654
uuauagaccagauuugcaa

SEQ ID NO: 2415656 - RNA, 19 nt, Artificial Sequence
  Description of Artificial Sequence: Synthetic oligonucleotide
  Sense strand starting at position 330 of SEQ ID NO: 1886522
gcaaaucuggucuauaaga

SEQ ID NO: 2415657 - RNA, 19 nt, Artificial Sequence
  Description of Artificial Sequence: Synthetic oligonucleotide
  Antisense strand to SEQ ID NO: 2415656
ucuuauagaccagauuugc

SEQ ID NO: 2415658 - RNA, 19 nt, Artificial Sequence
  Description of Artificial Sequence: Synthetic oligonucleotide
  Sense strand starting at position 367 of SEQ ID NO: 1886522
ggcagucugucuccaggaa

SEQ ID NO: 2415659 - RNA, 19 nt, Artificial Sequence
  Description of Artificial Sequence: Synthetic oligonucleotide
  Antisense strand to SEQ ID NO: 2415658
uuccuggagacagacugcc

SEQ ID NO: 2415660 - RNA, 19 nt, Artificial Sequence
  Description of Artificial Sequence: Synthetic oligonucleotide
  Sense strand starting at position 368 of SEQ ID NO: 1886522
gcagucugucuccaggaaa

SEQ ID NO: 2415661 - RNA, 19 nt, Artificial Sequence
  Description of Artificial Sequence: Synthetic oligonucleotide
  Antisense strand to SEQ ID NO: 2415660
uuuccuggagacagacugc

SEQ ID NO: 2415662 - RNA, 19 nt, Artificial Sequence
  Description of Artificial Sequence: Synthetic oligonucleotide
  Sense strand starting at position 387 of SEQ ID NO: 1886522
cugcuaguuuggguaaaua

SEQ ID NO: 2415663 - RNA, 19 nt, Artificial Sequence
  Description of Artificial Sequence: Synthetic oligonucleotide
  Antisense strand to SEQ ID NO: 2415662
uauuuacccaaacuagcag

SEQ ID NO: 2415664 - RNA, 19 nt, Artificial Sequence
  Description of Artificial Sequence: Synthetic oligonucleotide
  Sense strand starting at position 590 of SEQ ID NO: 1886522
guuuguuguuguuugauuu

SEQ ID NO: 2415665 - RNA, 19 nt, Artificial Sequence
  Description of Artificial Sequence: Synthetic oligonucleotide
  Antisense strand to SEQ ID NO: 2415664
aaaucaaacaacaacaaac

SEQ ID NO: 2415666 - RNA, 19 nt, Artificial Sequence
  Description of Artificial Sequence: Synthetic oligonucleotide
  Sense strand starting at position 628 of SEQ ID NO: 1886522
aagagaccuccuugugcuu

SEQ ID NO: 2415667 - RNA, 19 nt, Artificial Sequence
  Description of Artificial Sequence: Synthetic oligonucleotide
  Antisense strand to SEQ ID NO: 2415666
aagcacaaggaggucucuu

SEQ ID NO: 2415668 - RNA, 19 nt, Artificial Sequence
  Description of Artificial Sequence: Synthetic oligonucleotide
  Sense strand starting at position 762 of SEQ ID NO: 1886522
guguuucuagauuaaaucu

SEQ ID NO: 2415669 - RNA, 19 nt, Artificial Sequence
  Description of Artificial Sequence: Synthetic oligonucleotide
  Antisense strand to SEQ ID NO: 2415668
agauuuaaucuagaaacac

SEQ ID NO: 2415670 - RNA, 19 nt, Artificial Sequence
  Description of Artificial Sequence: Synthetic oligonucleotide
  Sense strand starting at position 780 of SEQ ID NO: 1886522
ugccguucugugucuguaa

SEQ ID NO: 2415671 - RNA, 19 nt, Artificial Sequence
  Description of Artificial Sequence: Synthetic oligonucleotide
  Antisense strand to SEQ ID NO: 2415670
uuacagacacagaacggca

SEQ ID NO: 2415672 - RNA, 19 nt, Artificial Sequence
  Description of Artificial Sequence: Synthetic oligonucleotide
  Sense strand starting at position 805 of SEQ ID NO: 1886522
ccuaccuuugcuuggauga

SEQ ID NO: 2415673 - RNA, 19 nt, Artificial Sequence
  Description of Artificial Sequence: Synthetic oligonucleotide
  Antisense strand to SEQ ID NO: 2415672
ucauccaagcaaagguagg

SEQ ID NO: 2415674 - RNA, 19 nt, Artificial Sequence
  Description of Artificial Sequence: Synthetic oligonucleotide
  Sense strand starting at position 806 of SEQ ID NO: 1886522
cuaccuuugcuuggaugau

SEQ ID NO: 2415675 - RNA, 19 nt, Artificial Sequence
  Description of Artificial Sequence: Synthetic oligonucleotide
  Antisense strand to SEQ ID NO: 2415674
aucauccaagcaaagguag

SEQ ID NO: 2415676 - RNA, 19 nt, Artificial Sequence
  Description of Artificial Sequence: Synthetic oligonucleotide
  Sense strand starting at position 1126 of SEQ ID NO: 1886522
aagggaauaucgucccuau

SEQ ID NO: 2415677 - RNA, 19 nt, Artificial Sequence
  Description of Artificial Sequence: Synthetic oligonucleotide
  Antisense strand to SEQ ID NO: 2415676
auagggacgauauucccuu

SEQ ID NO: 2415678 - RNA, 19 nt, Artificial Sequence
  Description of Artificial Sequence: Synthetic oligonucleotide
  Sense strand starting at position 1308 of SEQ ID NO: 1886522
gguagcucauaccuaucaa

SEQ ID NO: 2415679 - RNA, 19 nt, Artificial Sequence
  Description of Artificial Sequence: Synthetic oligonucleotide
  Antisense strand to SEQ ID NO: 2415678
uugauagguaugagcuacc

SEQ ID NO: 2415680 - RNA, 19 nt, Artificial Sequence
  Description of Artificial Sequence: Synthetic oligonucleotide
  Sense strand starting at position 1432 of SEQ ID NO: 1886522
agauuagacaagcguaaug

SEQ ID NO: 2415681 - RNA, 19 nt, Artificial Sequence
  Description of Artificial Sequence: Synthetic oligonucleotide
  Antisense strand to SEQ ID NO: 2415680
cauuacgcuugucuaaucu

SEQ ID NO: 2415682 - RNA, 19 nt, Artificial Sequence
  Description of Artificial Sequence: Synthetic oligonucleotide
  Sense strand starting at position 1455 of SEQ ID NO: 1886522
auaccugucgcaggaggau

SEQ ID NO: 2415683 - RNA, 19 nt, Artificial Sequence
  Description of Artificial Sequence: Synthetic oligonucleotide
  Antisense strand to SEQ ID NO: 2415682
auccuccugcgacagguau

SEQ ID NO: 2415684 - RNA, 19 nt, Artificial Sequence
  Description of Artificial Sequence: Synthetic oligonucleotide
  Sense strand starting at position 1481 of SEQ ID NO: 1886522
gucugagagguugagguua

SEQ ID NO: 2415685 - RNA, 19 nt, Artificial Sequence
  Description of Artificial Sequence: Synthetic oligonucleotide
  Antisense strand to SEQ ID NO: 2415684
uaaccucaaccucucagac

SEQ ID NO: 2415686 - RNA, 19 nt, Artificial Sequence
  Description of Artificial Sequence: Synthetic oligonucleotide
  Sense strand starting at position 1619 of SEQ ID NO: 1886522
ccaguaucacuuggaauac

SEQ ID NO: 2415687 - RNA, 19 nt, Artificial Sequence
  Description of Artificial Sequence: Synthetic oligonucleotide
  Antisense strand to SEQ ID NO: 2415686
guauuccaagugauacugg

SEQ ID NO: 2415688 - RNA, 19 nt, Artificial Sequence
  Description of Artificial Sequence: Synthetic oligonucleotide
  Sense strand starting at position 1699 of SEQ ID NO: 1886522
gcuggauacuaugucuacu

SEQ ID NO: 2415689 - RNA, 19 nt, Artificial Sequence
  Description of Artificial Sequence: Synthetic oligonucleotide
  Antisense strand to SEQ ID NO: 2415688
aguagacauaguauccagc

SEQ ID NO: 2415690 - RNA, 19 nt, Artificial Sequence
  Description of Artificial Sequence: Synthetic oligonucleotide
  Sense strand starting at position 1701 of SEQ ID NO: 1886522
uggauacuaugucuacuua

SEQ ID NO: 2415691 - RNA, 19 nt, Artificial Sequence
  Description of Artificial Sequence: Synthetic oligonucleotide
  Antisense strand to SEQ ID NO: 2415690
uaaguagacauaguaucca

SEQ ID NO: 2415692 - RNA, 19 nt, Artificial Sequence
  Description of Artificial Sequence: Synthetic oligonucleotide
  Sense strand starting at position 1728 of SEQ ID NO: 1886522
guaugaaacucucuguauu

SEQ ID NO: 2415693 - RNA, 19 nt, Artificial Sequence
  Description of Artificial Sequence: Synthetic oligonucleotide
  Antisense strand to SEQ ID NO: 2415692
aauacagagaguuucauac

SEQ ID NO: 2415694 - RNA, 19 nt, Artificial Sequence
  Description of Artificial Sequence: Synthetic oligonucleotide
  Sense strand starting at position 1810 of SEQ ID NO: 1886522
ucugcuugucaggaucacu

SEQ ID NO: 2415695 - RNA, 19 nt, Artificial Sequence
  Description of Artificial Sequence: Synthetic oligonucleotide
  Antisense strand to SEQ ID NO: 2415694
agugauccugacaagcaga

SEQ ID NO: 2415696 - RNA, 19 nt, Artificial Sequence
  Description of Artificial Sequence: Synthetic oligonucleotide
  Sense strand starting at position 1813 of SEQ ID NO: 1886522
gcuugucaggaucacucaa

SEQ ID NO: 2415697 - RNA, 19 nt, Artificial Sequence
  Description of Artificial Sequence: Synthetic oligonucleotide
  Antisense strand to SEQ ID NO: 2415696
uugagugauccugacaagc

SEQ ID NO: 2415698 - RNA, 19 nt, Artificial Sequence
  Description of Artificial Sequence: Synthetic oligonucleotide
  Sense strand starting at position 1853 of SEQ ID NO: 1886522
augaaugucaaccguguga

SEQ ID NO: 2415699 - RNA, 19 nt, Artificial Sequence
  Description of Artificial Sequence: Synthetic oligonucleotide
  Antisense strand to SEQ ID NO: 2415698
ucacacgguugacauucau

SEQ ID NO: 2415700 - RNA, 19 nt, Artificial Sequence
  Description of Artificial Sequence: Synthetic oligonucleotide
  Sense strand starting at position 1987 of SEQ ID NO: 1886522
aguccuuccuuucuagaag

SEQ ID NO: 2415701 - RNA, 19 nt, Artificial Sequence
  Description of Artificial Sequence: Synthetic oligonucleotide
  Antisense strand to SEQ ID NO: 2415700
cuucuagaaaggaaggacu

SEQ ID NO: 2415702 - RNA, 19 nt, Artificial Sequence
  Description of Artificial Sequence: Synthetic oligonucleotide
  Sense strand starting at position 2223 of SEQ ID NO: 1886522
gucucucugccuuagacaa

SEQ ID NO: 2415703 - RNA, 19 nt, Artificial Sequence
  Description of Artificial Sequence: Synthetic oligonucleotide
  Antisense strand to SEQ ID NO: 2415702
uugucuaaggcagagagac

SEQ ID NO: 2415704 - RNA, 19 nt, Artificial Sequence
  Description of Artificial Sequence: Synthetic oligonucleotide
  Sense strand starting at position 2284 of SEQ ID NO: 1886522
cagaaaggaucguuagcua

SEQ ID NO: 2415705 - RNA, 19 nt, Artificial Sequence
  Description of Artificial Sequence: Synthetic oligonucleotide
  Antisense strand to SEQ ID NO: 2415704
uagcuaacgauccuuucug

SEQ ID NO: 2415706 - RNA, 19 nt, Artificial Sequence
  Description of Artificial Sequence: Synthetic oligonucleotide
  Sense strand starting at position 2424 of SEQ ID NO: 1886522
gggauaaaguccuggauuu

SEQ ID NO: 2415707 - RNA, 19 nt, Artificial Sequence
  Description of Artificial Sequence: Synthetic oligonucleotide
  Antisense strand to SEQ ID NO: 2415706
aaauccaggacuuuauccc

SEQ ID NO: 2415708 - RNA, 19 nt, Artificial Sequence
  Description of Artificial Sequence: Synthetic oligonucleotide
  Sense strand starting at position 2849 of SEQ ID NO: 1886522
gggauagaucucggcucac

SEQ ID NO: 2415709 - RNA, 19 nt, Artificial Sequence
  Description of Artificial Sequence: Synthetic oligonucleotide
  Antisense strand to SEQ ID NO: 2415708
gugagccgagaucuauccc

SEQ ID NO: 2415710 - RNA, 19 nt, Artificial Sequence
  Description of Artificial Sequence: Synthetic oligonucleotide
  Sense strand starting at position 3224 of SEQ ID NO: 1886522
acaugcaauuaaucuagga

SEQ ID NO: 2415711 - RNA, 19 nt, Artificial Sequence
  Description of Artificial Sequence: Synthetic oligonucleotide
  Antisense strand to SEQ ID NO: 2415710
uccuagauuaauugcaugu

SEQ ID NO: 2415712 - RNA, 19 nt, Artificial Sequence
  Description of Artificial Sequence: Synthetic oligonucleotide
  Sense strand starting at position 3425 of SEQ ID NO: 1886522
gaguaugucagccaugagu

SEQ ID NO: 2415713 - RNA, 19 nt, Artificial Sequence
  Description of Artificial Sequence: Synthetic oligonucleotide
  Antisense strand to SEQ ID NO: 2415712
acucauggcugacauacuc

SEQ ID NO: 2415714 - RNA, 19 nt, Artificial Sequence
  Description of Artificial Sequence: Synthetic oligonucleotide
  Sense strand starting at position 3428 of SEQ ID NO: 1886522
uaugucagccaugaguaua

SEQ ID NO: 2415715 - RNA, 19 nt, Artificial Sequence
  Description of Artificial Sequence: Synthetic oligonucleotide
  Antisense strand to SEQ ID NO: 2415714
uauacucauggcugacaua

SEQ ID NO: 2415716 - RNA, 19 nt, Artificial Sequence
  Description of Artificial Sequence: Synthetic oligonucleotide
  Sense strand starting at position 3431 of SEQ ID NO: 1886522
gucagccaugaguauaaau

SEQ ID NO: 2415717 - RNA, 19 nt, Artificial Sequence
  Description of Artificial Sequence: Synthetic oligonucleotide
  Antisense strand to SEQ ID NO: 2415716
auuuauacucauggcugac

SEQ ID NO: 2415718 - RNA, 19 nt, Artificial Sequence
  Description of Artificial Sequence: Synthetic oligonucleotide
  Sense strand starting at position 3508 of SEQ ID NO: 1886522
gcauacugccugucuguuu

SEQ ID NO: 2415719 - RNA, 19 nt, Artificial Sequence
  Description of Artificial Sequence: Synthetic oligonucleotide
  Antisense strand to SEQ ID NO: 2415718
aaacagacaggcaguaugc

SEQ ID NO: 2415720 - RNA, 19 nt, Artificial Sequence
  Description of Artificial Sequence: Synthetic oligonucleotide
  Sense strand starting at position 3634 of SEQ ID NO: 1886522
acaagugucuuaccagaaa

SEQ ID NO: 2415721 - RNA, 19 nt, Artificial Sequence
  Description of Artificial Sequence: Synthetic oligonucleotide
  Antisense strand to SEQ ID NO: 2415720
uuucugguaagacacuugu

SEQ ID NO: 2415722 - RNA, 19 nt, Artificial Sequence
  Description of Artificial Sequence: Synthetic oligonucleotide
  Sense strand starting at position 3767 of SEQ ID NO: 1886522
gugggagucccagggauug

SEQ ID NO: 2415723 - RNA, 19 nt, Artificial Sequence
  Description of Artificial Sequence: Synthetic oligonucleotide
  Antisense strand to SEQ ID NO: 2415722
caaucccugggacucccac

SEQ ID NO: 2415724 - RNA, 19 nt, Artificial Sequence
  Description of Artificial Sequence: Synthetic oligonucleotide
  Sense strand starting at position 74 of SEQ ID NO: 1886523
ccucaaguguucccuggau

SEQ ID NO: 2415725 - RNA, 19 nt, Artificial Sequence
  Description of Artificial Sequence: Synthetic oligonucleotide
  Antisense strand to SEQ ID NO: 2415724
auccagggaacacuugagg

SEQ ID NO: 2415726 - RNA, 19 nt, Artificial Sequence
  Description of Artificial Sequence: Synthetic oligonucleotide
  Sense strand starting at position 76 of SEQ ID NO: 1886523
ucaaguguucccuggauau

SEQ ID NO: 2415727 - RNA, 19 nt, Artificial Sequence
  Description of Artificial Sequence: Synthetic oligonucleotide
  Antisense strand to SEQ ID NO: 2415726
auauccagggaacacuuga

SEQ ID NO: 2415728 - RNA, 19 nt, Artificial Sequence
  Description of Artificial Sequence: Synthetic oligonucleotide
  Sense strand starting at position 97 of SEQ ID NO: 1886523
ggaaauuguugacuaacga

SEQ ID NO: 2415729 - RNA, 19 nt, Artificial Sequence
  Description of Artificial Sequence: Synthetic oligonucleotide
  Antisense strand to SEQ ID NO: 2415728
ucguuagucaacaauuucc

SEQ ID NO: 2415730 - RNA, 19 nt, Artificial Sequence
  Description of Artificial Sequence: Synthetic oligonucleotide
  Sense strand starting at position 107 of SEQ ID NO: 1886523
gacuaacgacuuuauaagu

SEQ ID NO: 2415731 - RNA, 19 nt, Artificial Sequence
  Description of Artificial Sequence: Synthetic oligonucleotide
  Antisense strand to SEQ ID NO: 2415730
acuuauaaagucguuaguc

SEQ ID NO: 2415732 - RNA, 19 nt, Artificial Sequence
  Description of Artificial Sequence: Synthetic oligonucleotide
  Sense strand starting at position 116 of SEQ ID NO: 1886523
cuuuauaagucauggacau

SEQ ID NO: 2415733 - RNA, 19 nt, Artificial Sequence
  Description of Artificial Sequence: Synthetic oligonucleotide
  Antisense strand to SEQ ID NO: 2415732
auguccaugacuuauaaag

SEQ ID NO: 2415734 - RNA, 19 nt, Artificial Sequence
  Description of Artificial Sequence: Synthetic oligonucleotide
  Sense strand starting at position 117 of SEQ ID NO: 1886523
uuuauaagucauggacauu

SEQ ID NO: 2415735 - RNA, 19 nt, Artificial Sequence
  Description of Artificial Sequence: Synthetic oligonucleotide
  Antisense strand to SEQ ID NO: 2415734
aauguccaugacuuauaaa

SEQ ID NO: 2415736 - RNA, 19 nt, Artificial Sequence
  Description of Artificial Sequence: Synthetic oligonucleotide
  Sense strand starting at position 458 of SEQ ID NO: 1886523
ccgcaaacgucugcuauca

SEQ ID NO: 2415737 - RNA, 19 nt, Artificial Sequence
  Description of Artificial Sequence: Synthetic oligonucleotide
  Antisense strand to SEQ ID NO: 2415736
ugauagcagacguuugcgg

SEQ ID NO: 2415738 - RNA, 19 nt, Artificial Sequence
  Description of Artificial Sequence: Synthetic oligonucleotide
  Sense strand starting at position 466 of SEQ ID NO: 1886523
gucugcuaucagggauaug

SEQ ID NO: 2415739 - RNA, 19 nt, Artificial Sequence
  Description of Artificial Sequence: Synthetic oligonucleotide
  Antisense strand to SEQ ID NO: 2415738
cauaucccugauagcagac

SEQ ID NO: 2415740 - RNA, 19 nt, Artificial Sequence
  Description of Artificial Sequence: Synthetic oligonucleotide
  Sense strand starting at position 467 of SEQ ID NO: 1886523
ucugcuaucagggauaugu

SEQ ID NO: 2415741 - RNA, 19 nt, Artificial Sequence
  Description of Artificial Sequence: Synthetic oligonucleotide
  Antisense strand to SEQ ID NO: 2415740
acauaucccugauagcaga

SEQ ID NO: 2415742 - RNA, 19 nt, Artificial Sequence
  Description of Artificial Sequence: Synthetic oligonucleotide
  Sense strand starting at position 469 of SEQ ID NO: 1886523
ugcuaucagggauauguaa

SEQ ID NO: 2415743 - RNA, 19 nt, Artificial Sequence
  Description of Artificial Sequence: Synthetic oligonucleotide
  Antisense strand to SEQ ID NO: 2415742
uuacauaucccugauagca

SEQ ID NO: 2415744 - RNA, 19 nt, Artificial Sequence
  Description of Artificial Sequence: Synthetic oligonucleotide
  Sense strand starting at position 489 of SEQ ID NO: 1886523
cucuaacagccaugagaag

SEQ ID NO: 2415745 - RNA, 19 nt, Artificial Sequence
  Description of Artificial Sequence: Synthetic oligonucleotide
  Antisense strand to SEQ ID NO: 2415744
cuucucauggcuguuagag

SEQ ID NO: 2415746 - RNA, 19 nt, Artificial Sequence
  Description of Artificial Sequence: Synthetic oligonucleotide
  Sense strand starting at position 586 of SEQ ID NO: 1886523
ucaugucagucaugauuua

SEQ ID NO: 2415747 - RNA, 19 nt, Artificial Sequence
  Description of Artificial Sequence: Synthetic oligonucleotide
  Antisense strand to SEQ ID NO: 2415746
uaaaucaugacugacauga

SEQ ID NO: 2415748 - RNA, 19 nt, Artificial Sequence
  Description of Artificial Sequence: Synthetic oligonucleotide
  Sense strand starting at position 682 of SEQ ID NO: 1886523
cccgccuuccaggaaguau

SEQ ID NO: 2415749 - RNA, 19 nt, Artificial Sequence
  Description of Artificial Sequence: Synthetic oligonucleotide
  Antisense strand to SEQ ID NO: 2415748
auacuuccuggaaggcggg

SEQ ID NO: 2415750 - RNA, 19 nt, Artificial Sequence
  Description of Artificial Sequence: Synthetic oligonucleotide
  Sense strand starting at position 795 of SEQ ID NO: 1886523
gaugcuguugccuaggcaa

SEQ ID NO: 2415751 - RNA, 19 nt, Artificial Sequence
  Description of Artificial Sequence: Synthetic oligonucleotide
  Antisense strand to SEQ ID NO: 2415750
uugccuaggcaacagcauc

SEQ ID NO: 2415752 - RNA, 19 nt, Artificial Sequence
  Description of Artificial Sequence: Synthetic oligonucleotide
  Sense strand starting at position 865 of SEQ ID NO: 1886523
gacggagaugcggauaauu

SEQ ID NO: 2415753 - RNA, 19 nt, Artificial Sequence
  Description of Artificial Sequence: Synthetic oligonucleotide
  Antisense strand to SEQ ID NO: 2415752
aauuauccgcaucuccguc

SEQ ID NO: 2415754 - RNA, 19 nt, Artificial Sequence
  Description of Artificial Sequence: Synthetic oligonucleotide
  Sense strand starting at position 867 of SEQ ID NO: 1886523
cggagaugcggauaauuca

SEQ ID NO: 2415755 - RNA, 19 nt, Artificial Sequence
  Description of Artificial Sequence: Synthetic oligonucleotide
  Antisense strand to SEQ ID NO: 2415754
ugaauuauccgcaucuccg

SEQ ID NO: 2415756 - RNA, 19 nt, Artificial Sequence
  Description of Artificial Sequence: Synthetic oligonucleotide
  Sense strand starting at position 963 of SEQ ID NO: 1886523
gcguuuccacauuaacauu

SEQ ID NO: 2415757 - RNA, 19 nt, Artificial Sequence
  Description of Artificial Sequence: Synthetic oligonucleotide
  Antisense strand to SEQ ID NO: 2415756
aauguuaauguggaaacgc

SEQ ID NO: 2415758 - RNA, 19 nt, Artificial Sequence
  Description of Artificial Sequence: Synthetic oligonucleotide
  Sense strand starting at position 1035 of SEQ ID NO: 1886523
ugacuagacuugcugcauu

SEQ ID NO: 2415759 - RNA, 19 nt, Artificial Sequence
  Description of Artificial Sequence: Synthetic oligonucleotide
  Antisense strand to SEQ ID NO: 2415758
aaugcagcaagucuaguca

SEQ ID NO: 2415760 - RNA, 19 nt, Artificial Sequence
  Description of Artificial Sequence: Synthetic oligonucleotide
  Sense strand starting at position 1054 of SEQ ID NO: 1886523
ucuaaauuaccagguacga

SEQ ID NO: 2415761 - RNA, 19 nt, Artificial Sequence
  Description of Artificial Sequence: Synthetic oligonucleotide
  Antisense strand to SEQ ID NO: 2415760
ucguaccugguaauuuaga

SEQ ID NO: 2415762 - RNA, 19 nt, Artificial Sequence
  Description of Artificial Sequence: Synthetic oligonucleotide
  Sense strand starting at position 1178 of SEQ ID NO: 1886523
gccaauacauuccuuggua

SEQ ID NO: 2415763 - RNA, 19 nt, Artificial Sequence
  Description of Artificial Sequence: Synthetic oligonucleotide
  Antisense strand to SEQ ID NO: 2415762
uaccaaggaauguauuggc

SEQ ID NO: 2415764 - RNA, 19 nt, Artificial Sequence
  Description of Artificial Sequence: Synthetic oligonucleotide
  Sense strand starting at position 1182 of SEQ ID NO: 1886523
auacauuccuugguaauag

SEQ ID NO: 2415765 - RNA, 19 nt, Artificial Sequence
  Description of Artificial Sequence: Synthetic oligonucleotide
  Antisense strand to SEQ ID NO: 2415764
cuauuaccaaggaauguau

SEQ ID NO: 2415766 - RNA, 19 nt, Artificial Sequence
  Description of Artificial Sequence: Synthetic oligonucleotide
  Sense strand starting at position 1877 of SEQ ID NO: 1886523
gagacauggucccaccaga

SEQ ID NO: 2415767 - RNA, 19 nt, Artificial Sequence
  Description of Artificial Sequence: Synthetic oligonucleotide
  Antisense strand to SEQ ID NO: 2415766
ucuggugggaccaugucuc

SEQ ID NO: 2415768 - RNA, 19 nt, Artificial Sequence
  Description of Artificial Sequence: Synthetic oligonucleotide
  Sense strand starting at position 1901 of SEQ ID NO: 1886523
gaccgagccucggagaaau

SEQ ID NO: 2415769 - RNA, 19 nt, Artificial Sequence
  Description of Artificial Sequence: Synthetic oligonucleotide
  Antisense strand to SEQ ID NO: 2415768
auuucuccgaggcucgguc

SEQ ID NO: 2415770 - RNA, 19 nt, Artificial Sequence
  Description of Artificial Sequence: Synthetic oligonucleotide
  Sense strand starting at position 1911 of SEQ ID NO: 1886523
cggagaaaugaacguccua

SEQ ID NO: 2415771 - RNA, 19 nt, Artificial Sequence
  Description of Artificial Sequence: Synthetic oligonucleotide
  Antisense strand to SEQ ID NO: 2415770
uaggacguucauuucuccg

SEQ ID NO: 2415772 - RNA, 19 nt, Artificial Sequence
  Description of Artificial Sequence: Synthetic oligonucleotide
  Sense strand starting at position 1995 of SEQ ID NO: 1886523
caggaagccugaggcauua

SEQ ID NO: 2415773 - RNA, 19 nt, Artificial Sequence
  Description of Artificial Sequence: Synthetic oligonucleotide
  Antisense strand to SEQ ID NO: 2415772
uaaugccucaggcuuccug

SEQ ID NO: 2415774 - RNA, 19 nt, Artificial Sequence
  Description of Artificial Sequence: Synthetic oligonucleotide
  Sense strand starting at position 1997 of SEQ ID NO: 1886523
ggaagccugaggcauuauu

SEQ ID NO: 2415775 - RNA, 19 nt, Artificial Sequence
  Description of Artificial Sequence: Synthetic oligonucleotide
  Antisense strand to SEQ ID NO: 2415774
aauaaugccucaggcuucc

SEQ ID NO: 2415776 - RNA, 19 nt, Artificial Sequence
  Description of Artificial Sequence: Synthetic oligonucleotide
  Sense strand starting at position 2149 of SEQ ID NO: 1886523
gcaguaugcgaagguugca

SEQ ID NO: 2415777 - RNA, 19 nt, Artificial Sequence
  Description of Artificial Sequence: Synthetic oligonucleotide
  Antisense strand to SEQ ID NO: 2415776
ugcaaccuucgcauacugc

SEQ ID NO: 2415778 - RNA, 19 nt, Artificial Sequence
  Description of Artificial Sequence: Synthetic oligonucleotide
  Sense strand starting at position 2230 of SEQ ID NO: 1886523
ggcaaagcccuuugucaac

SEQ ID NO: 2415779 - RNA, 19 nt, Artificial Sequence
  Description of Artificial Sequence: Synthetic oligonucleotide
  Antisense strand to SEQ ID NO: 2415778
guugacaaagggcuuugcc

SEQ ID NO: 2415780 - RNA, 19 nt, Artificial Sequence
  Description of Artificial Sequence: Synthetic oligonucleotide
  Sense strand starting at position 2394 of SEQ ID NO: 1886523
gaagcaaugucccgaaauc

SEQ ID NO: 2415781 - RNA, 19 nt, Artificial Sequence
  Description of Artificial Sequence: Synthetic oligonucleotide
  Antisense strand to SEQ ID NO: 2415780
gauuucgggacauugcuuc

SEQ ID NO: 2415782 - RNA, 19 nt, Artificial Sequence
  Description of Artificial Sequence: Synthetic oligonucleotide
  Sense strand starting at position 2431 of SEQ ID NO: 1886523
ccaggucaauaauguacaa

SEQ ID NO: 2415783 - RNA, 19 nt, Artificial Sequence
  Description of Artificial Sequence: Synthetic oligonucleotide
  Antisense strand to SEQ ID NO: 2415782
uuguacauuauugaccugg

SEQ ID NO: 2415784 - RNA, 19 nt, Artificial Sequence
  Description of Artificial Sequence: Synthetic oligonucleotide
  Sense strand starting at position 3097 of SEQ ID NO: 1886523
acauucuuguuccaaaguu

SEQ ID NO: 2415785 - RNA, 19 nt, Artificial Sequence
  Description of Artificial Sequence: Synthetic oligonucleotide
  Antisense strand to SEQ ID NO: 2415784
aacuuuggaacaagaaugu

SEQ ID NO: 2415786 - RNA, 19 nt, Artificial Sequence
  Description of Artificial Sequence: Synthetic oligonucleotide
  Sense strand starting at position 3123 of SEQ ID NO: 1886523
gggacuuuggugcagacau

SEQ ID NO: 2415787 - RNA, 19 nt, Artificial Sequence
  Description of Artificial Sequence: Synthetic oligonucleotide
  Antisense strand to SEQ ID NO: 2415786
augucugcaccaaaguccc

SEQ ID NO: 2415788 - RNA, 19 nt, Artificial Sequence
  Description of Artificial Sequence: Synthetic oligonucleotide
  Sense strand starting at position 3171 of SEQ ID NO: 1886523
aagaaauaguaccugguau

SEQ ID NO: 2415789 - RNA, 19 nt, Artificial Sequence
  Description of Artificial Sequence: Synthetic oligonucleotide
  Antisense strand to SEQ ID NO: 2415788
auaccagguacuauuucuu

SEQ ID NO: 2415790 - RNA, 19 nt, Artificial Sequence
  Description of Artificial Sequence: Synthetic oligonucleotide
  Sense strand starting at position 3173 of SEQ ID NO: 1886523
gaaauaguaccugguauuc

SEQ ID NO: 2415791 - RNA, 19 nt, Artificial Sequence
  Description of Artificial Sequence: Synthetic oligonucleotide
  Antisense strand to SEQ ID NO: 2415790
gaauaccagguacuauuuc

SEQ ID NO: 2415792 - RNA, 19 nt, Artificial Sequence
  Description of Artificial Sequence: Synthetic oligonucleotide
  Sense strand starting at position 3466 of SEQ ID NO: 1886523
gacuguuugcuccacuguu

SEQ ID NO: 2415793 - RNA, 19 nt, Artificial Sequence
  Description of Artificial Sequence: Synthetic oligonucleotide
  Antisense strand to SEQ ID NO: 2415792
aacaguggagcaaacaguc

SEQ ID NO: 2415794 - RNA, 19 nt, Artificial Sequence
  Description of Artificial Sequence: Synthetic oligonucleotide
  Sense strand starting at position 3472 of SEQ ID NO: 1886523
uugcuccacuguucugaaa

SEQ ID NO: 2415795 - RNA, 19 nt, Artificial Sequence
  Description of Artificial Sequence: Synthetic oligonucleotide
  Antisense strand to SEQ ID NO: 2415794
uuucagaacaguggagcaa

SEQ ID NO: 2415796 - RNA, 19 nt, Artificial Sequence
  Description of Artificial Sequence: Synthetic oligonucleotide
  Sense strand starting at position 3521 of SEQ ID NO: 1886523
cuuccugccuggugagaga

SEQ ID NO: 2415797 - RNA, 19 nt, Artificial Sequence
  Description of Artificial Sequence: Synthetic oligonucleotide
  Antisense strand to SEQ ID NO: 2415796
ucucucaccaggcaggaag

SEQ ID NO: 2415798 - RNA, 19 nt, Artificial Sequence
  Description of Artificial Sequence: Synthetic oligonucleotide
  Sense strand starting at position 3599 of SEQ ID NO: 1886523
gguggucaucuucaaagga

SEQ ID NO: 2415799 - RNA, 19 nt, Artificial Sequence
  Description of Artificial Sequence: Synthetic oligonucleotide
  Antisense strand to SEQ ID NO: 2415798
uccuuugaagaugaccacc

SEQ ID NO: 2415800 - RNA, 19 nt, Artificial Sequence
  Description of Artificial Sequence: Synthetic oligonucleotide
  Sense strand starting at position 3783 of SEQ ID NO: 1886523
ggagcuauuuccuguggcu

SEQ ID NO: 2415801 - RNA, 19 nt, Artificial Sequence
  Description of Artificial Sequence: Synthetic oligonucleotide
  Antisense strand to SEQ ID NO: 2415800
agccacaggaaauagcucc

SEQ ID NO: 2415802 - RNA, 19 nt, Artificial Sequence
  Description of Artificial Sequence: Synthetic oligonucleotide
  Sense strand starting at position 3785 of SEQ ID NO: 1886523
agcuauuuccuguggcuuu

SEQ ID NO: 2415803 - RNA, 19 nt, Artificial Sequence
  Description of Artificial Sequence: Synthetic oligonucleotide
  Antisense strand to SEQ ID NO: 2415802
aaagccacaggaaauagcu

SEQ ID NO: 2415804 - RNA, 19 nt, Artificial Sequence
  Description of Artificial Sequence: Synthetic oligonucleotide
  Sense strand starting at position 7 of SEQ ID NO: 1886524
gguauucuagucuauggau

SEQ ID NO: 2415805 - RNA, 19 nt, Artificial Sequence
  Description of Artificial Sequence: Synthetic oligonucleotide
  Antisense strand to SEQ ID NO: 2415804
auccauagacuagaauacc

SEQ ID NO: 2415806 - RNA, 19 nt, Artificial Sequence
  Description of Artificial Sequence: Synthetic oligonucleotide
  Sense strand starting at position 13 of SEQ ID NO: 1886524
cuagucuauggauggauaa

SEQ ID NO: 2415807 - RNA, 19 nt, Artificial Sequence
  Description of Artificial Sequence: Synthetic oligonucleotide
  Antisense strand to SEQ ID NO: 2415806
uuauccauccauagacuag

SEQ ID NO: 2415808 - RNA, 19 nt, Artificial Sequence
  Description of Artificial Sequence: Synthetic oligonucleotide
  Sense strand starting at position 121 of SEQ ID NO: 1886524
gcauguucgggcagaucug

SEQ ID NO: 2415809 - RNA, 19 nt, Artificial Sequence
  Description of Artificial Sequence: Synthetic oligonucleotide
  Antisense strand to SEQ ID NO: 2415808
cagaucugcccgaacaugc

SEQ ID NO: 2415810 - RNA, 19 nt, Artificial Sequence
  Description of Artificial Sequence: Synthetic oligonucleotide
  Sense strand starting at position 128 of SEQ ID NO: 1886524
cgggcagaucuguagaagu

SEQ ID NO: 2415811 - RNA, 19 nt, Artificial Sequence
  Description of Artificial Sequence: Synthetic oligonucleotide
  Antisense strand to SEQ ID NO: 2415810
acuucuacagaucugcccg

SEQ ID NO: 2415812 - RNA, 19 nt, Artificial Sequence
  Description of Artificial Sequence: Synthetic oligonucleotide
  Sense strand starting at position 130 of SEQ ID NO: 1886524
ggcagaucuguagaaguaa

SEQ ID NO: 2415813 - RNA, 19 nt, Artificial Sequence
  Description of Artificial Sequence: Synthetic oligonucleotide
  Antisense strand to SEQ ID NO: 2415812
uuacuucuacagaucugcc

SEQ ID NO: 2415814 - RNA, 19 nt, Artificial Sequence
  Description of Artificial Sequence: Synthetic oligonucleotide
  Sense strand starting at position 347 of SEQ ID NO: 1886524
cggagaaaucauggccucu

SEQ ID NO: 2415815 - RNA, 19 nt, Artificial Sequence
  Description of Artificial Sequence: Synthetic oligonucleotide
  Antisense strand to SEQ ID NO: 2415814
agaggccaugauuucuccg

SEQ ID NO: 2415816 - RNA, 19 nt, Artificial Sequence
  Description of Artificial Sequence: Synthetic oligonucleotide
  Sense strand starting at position 373 of SEQ ID NO: 1886524
augaaauauuaugcugcaa

SEQ ID NO: 2415817 - RNA, 19 nt, Artificial Sequence
  Description of Artificial Sequence: Synthetic oligonucleotide
  Antisense strand to SEQ ID NO: 2415816
uugcagcauaauauuucau

SEQ ID NO: 2415818 - RNA, 19 nt, Artificial Sequence
  Description of Artificial Sequence: Synthetic oligonucleotide
  Sense strand starting at position 428 of SEQ ID NO: 1886524
ggaaucuccuaggcggauu

SEQ ID NO: 2415819 - RNA, 19 nt, Artificial Sequence
  Description of Artificial Sequence: Synthetic oligonucleotide
  Antisense strand to SEQ ID NO: 2415818
aauccgccuaggagauucc

SEQ ID NO: 2415820 - RNA, 19 nt, Artificial Sequence
  Description of Artificial Sequence: Synthetic oligonucleotide
  Sense strand starting at position 440 of SEQ ID NO: 1886524
gcggauugaugagugaaag

SEQ ID NO: 2415821 - RNA, 19 nt, Artificial Sequence
  Description of Artificial Sequence: Synthetic oligonucleotide
  Antisense strand to SEQ ID NO: 2415820
cuuucacucaucaauccgc

SEQ ID NO: 2415822 - RNA, 19 nt, Artificial Sequence
  Description of Artificial Sequence: Synthetic oligonucleotide
  Sense strand starting at position 441 of SEQ ID NO: 1886524
cggauugaugagugaaaga

SEQ ID NO: 2415823 - RNA, 19 nt, Artificial Sequence
  Description of Artificial Sequence: Synthetic oligonucleotide
  Antisense strand to SEQ ID NO: 2415822
ucuuucacucaucaauccg

SEQ ID NO: 2415824 - RNA, 19 nt, Artificial Sequence
  Description of Artificial Sequence: Synthetic oligonucleotide
  Sense strand starting at position 486 of SEQ ID NO: 1886524
caugauuucugugauauga

SEQ ID NO: 2415825 - RNA, 19 nt, Artificial Sequence
  Description of Artificial Sequence: Synthetic oligonucleotide
  Antisense strand to SEQ ID NO: 2415824
ucauaucacagaaaucaug

SEQ ID NO: 2415826 - RNA, 19 nt, Artificial Sequence
  Description of Artificial Sequence: Synthetic oligonucleotide
  Sense strand starting at position 488 of SEQ ID NO: 1886524
ugauuucugugauaugacu

SEQ ID NO: 2415827 - RNA, 19 nt, Artificial Sequence
  Description of Artificial Sequence: Synthetic oligonucleotide
  Antisense strand to SEQ ID NO: 2415826
agucauaucacagaaauca

SEQ ID NO: 2415828 - RNA, 19 nt, Artificial Sequence
  Description of Artificial Sequence: Synthetic oligonucleotide
  Sense strand starting at position 623 of SEQ ID NO: 1886524
gagugauagcuguaugggu

SEQ ID NO: 2415829 - RNA, 19 nt, Artificial Sequence
  Description of Artificial Sequence: Synthetic oligonucleotide
  Antisense strand to SEQ ID NO: 2415828
acccauacagcuaucacuc

SEQ ID NO: 2415830 - RNA, 19 nt, Artificial Sequence
  Description of Artificial Sequence: Synthetic oligonucleotide
  Sense strand starting at position 672 of SEQ ID NO: 1886524
gugcacuuuacugauggaa

SEQ ID NO: 2415831 - RNA, 19 nt, Artificial Sequence
  Description of Artificial Sequence: Synthetic oligonucleotide
  Antisense strand to SEQ ID NO: 2415830
uuccaucaguaaagugcac

SEQ ID NO: 2415832 - RNA, 19 nt, Artificial Sequence
  Description of Artificial Sequence: Synthetic oligonucleotide
  Sense strand starting at position 675 of SEQ ID NO: 1886524
cacuuuacugauggaaguu

SEQ ID NO: 2415833 - RNA, 19 nt, Artificial Sequence
  Description of Artificial Sequence: Synthetic oligonucleotide
  Antisense strand to SEQ ID NO: 2415832
aacuuccaucaguaaagug

SEQ ID NO: 2415834 - RNA, 19 nt, Artificial Sequence
  Description of Artificial Sequence: Synthetic oligonucleotide
  Sense strand starting at position 1078 of SEQ ID NO: 1886524
gcagcugccuggcuauuua

SEQ ID NO: 2415835 - RNA, 19 nt, Artificial Sequence
  Description of Artificial Sequence: Synthetic oligonucleotide
  Antisense strand to SEQ ID NO: 2415834
uaaauagccaggcagcugc

SEQ ID NO: 2415836 - RNA, 19 nt, Artificial Sequence
  Description of Artificial Sequence: Synthetic oligonucleotide
  Sense strand starting at position 1092 of SEQ ID NO: 1886524
auuuauagccucugucauc

SEQ ID NO: 2415837 - RNA, 19 nt, Artificial Sequence
  Description of Artificial Sequence: Synthetic oligonucleotide
  Antisense strand to SEQ ID NO: 2415836
gaugacagaggcuauaaau

SEQ ID NO: 2415838 - RNA, 19 nt, Artificial Sequence
  Description of Artificial Sequence: Synthetic oligonucleotide
  Sense strand starting at position 1345 of SEQ ID NO: 1886524
ugaucucaacuguguccau

SEQ ID NO: 2415839 - RNA, 19 nt, Artificial Sequence
  Description of Artificial Sequence: Synthetic oligonucleotide
  Antisense strand to SEQ ID NO: 2415838
auggacacaguugagauca

SEQ ID NO: 2415840 - RNA, 19 nt, Artificial Sequence
  Description of Artificial Sequence: Synthetic oligonucleotide
  Sense strand starting at position 1378 of SEQ ID NO: 1886524
gugagacgaacuuaauucu

SEQ ID NO: 2415841 - RNA, 19 nt, Artificial Sequence
  Description of Artificial Sequence: Synthetic oligonucleotide
  Antisense strand to SEQ ID NO: 2415840
agaauuaaguucgucucac

SEQ ID NO: 2415842 - RNA, 19 nt, Artificial Sequence
  Description of Artificial Sequence: Synthetic oligonucleotide
  Sense strand starting at position 1742 of SEQ ID NO: 1886524
gcauuugacuccuuccugu

SEQ ID NO: 2415843 - RNA, 19 nt, Artificial Sequence
  Description of Artificial Sequence: Synthetic oligonucleotide
  Antisense strand to SEQ ID NO: 2415842
acaggaaggagucaaaugc

SEQ ID NO: 2415844 - RNA, 19 nt, Artificial Sequence
  Description of Artificial Sequence: Synthetic oligonucleotide
  Sense strand starting at position 1838 of SEQ ID NO: 1886524
uccuuucucggugaaguga

SEQ ID NO: 2415845 - RNA, 19 nt, Artificial Sequence
  Description of Artificial Sequence: Synthetic oligonucleotide
  Antisense strand to SEQ ID NO: 2415844
ucacuucaccgagaaagga

SEQ ID NO: 2415846 - RNA, 19 nt, Artificial Sequence
  Description of Artificial Sequence: Synthetic oligonucleotide
  Sense strand starting at position 1860 of SEQ ID NO: 1886524
gucaccucucauuguggaa

SEQ ID NO: 2415847 - RNA, 19 nt, Artificial Sequence
  Description of Artificial Sequence: Synthetic oligonucleotide
  Antisense strand to SEQ ID NO: 2415846
uuccacaaugagaggugac

SEQ ID NO: 2415848 - RNA, 19 nt, Artificial Sequence
  Description of Artificial Sequence: Synthetic oligonucleotide
  Sense strand starting at position 2205 of SEQ ID NO: 1886524
agcggaaugagcuugcgua

SEQ ID NO: 2415849 - RNA, 19 nt, Artificial Sequence
  Description of Artificial Sequence: Synthetic oligonucleotide
  Antisense strand to SEQ ID NO: 2415848
uacgcaagcucauuccgcu

SEQ ID NO: 2415850 - RNA, 19 nt, Artificial Sequence
  Description of Artificial Sequence: Synthetic oligonucleotide
  Sense strand starting at position 2407 of SEQ ID NO: 1886524
gcacuuuccugggugacau

SEQ ID NO: 2415851 - RNA, 19 nt, Artificial Sequence
  Description of Artificial Sequence: Synthetic oligonucleotide
  Antisense strand to SEQ ID NO: 2415850
augucacccaggaaagugc

SEQ ID NO: 2415852 - RNA, 19 nt, Artificial Sequence
  Description of Artificial Sequence: Synthetic oligonucleotide
  Sense strand starting at position 2674 of SEQ ID NO: 1886524
uagaaugagugccucacaa

SEQ ID NO: 2415853 - RNA, 19 nt, Artificial Sequence
  Description of Artificial Sequence: Synthetic oligonucleotide
  Antisense strand to SEQ ID NO: 2415852
uugugaggcacucauucua

SEQ ID NO: 2415854 - RNA, 19 nt, Artificial Sequence
  Description of Artificial Sequence: Synthetic oligonucleotide
  Sense strand starting at position 2676 of SEQ ID NO: 1886524
gaaugagugccucacaaua

SEQ ID NO: 2415855 - RNA, 19 nt, Artificial Sequence
  Description of Artificial Sequence: Synthetic oligonucleotide
  Antisense strand to SEQ ID NO: 2415854
uauugugaggcacucauuc

SEQ ID NO: 2415856 - RNA, 19 nt, Artificial Sequence
  Description of Artificial Sequence: Synthetic oligonucleotide
  Sense strand starting at position 2783 of SEQ ID NO: 1886524
ugagaaugaugucccuaag

SEQ ID NO: 2415857 - RNA, 19 nt, Artificial Sequence
  Description of Artificial Sequence: Synthetic oligonucleotide
  Antisense strand to SEQ ID NO: 2415856
cuuagggacaucauucuca

SEQ ID NO: 2415858 - RNA, 19 nt, Artificial Sequence
  Description of Artificial Sequence: Synthetic oligonucleotide
  Sense strand starting at position 2786 of SEQ ID NO: 1886524
gaaugaugucccuaaguuu

SEQ ID NO: 2415859 - RNA, 19 nt, Artificial Sequence
  Description of Artificial Sequence: Synthetic oligonucleotide
  Antisense strand to SEQ ID NO: 2415858
aaacuuagggacaucauuc

SEQ ID NO: 2415860 - RNA, 19 nt, Artificial Sequence
  Description of Artificial Sequence: Synthetic oligonucleotide
  Sense strand starting at position 3149 of SEQ ID NO: 1886524
agggcacaauucuauuuaa

SEQ ID NO: 2415861 - RNA, 19 nt, Artificial Sequence
  Description of Artificial Sequence: Synthetic oligonucleotide
  Antisense strand to SEQ ID NO: 2415860
uuaaauagaauugugcccu

SEQ ID NO: 2415862 - RNA, 19 nt, Artificial Sequence
  Description of Artificial Sequence: Synthetic oligonucleotide
  Sense strand starting at position 3191 of SEQ ID NO: 1886524
caaguuugauaacuggaua

SEQ ID NO: 2415863 - RNA, 19 nt, Artificial Sequence
  Description of Artificial Sequence: Synthetic oligonucleotide
  Antisense strand to SEQ ID NO: 2415862
uauccaguuaucaaacuug

SEQ ID NO: 2415864 - RNA, 19 nt, Artificial Sequence
  Description of Artificial Sequence: Synthetic oligonucleotide
  Sense strand starting at position 3424 of SEQ ID NO: 1886524
aguacaaccucucuuugua

SEQ ID NO: 2415865 - RNA, 19 nt, Artificial Sequence
  Description of Artificial Sequence: Synthetic oligonucleotide
  Antisense strand to SEQ ID NO: 2415864
uacaaagagagguuguacu

SEQ ID NO: 2415866 - RNA, 19 nt, Artificial Sequence
  Description of Artificial Sequence: Synthetic oligonucleotide
  Sense strand starting at position 3493 of SEQ ID NO: 1886524
aaagucagacuccgaguua

SEQ ID NO: 2415867 - RNA, 19 nt, Artificial Sequence
  Description of Artificial Sequence: Synthetic oligonucleotide
  Antisense strand to SEQ ID NO: 2415866
uaacucggagucugacuuu

SEQ ID NO: 2415868 - RNA, 19 nt, Artificial Sequence
  Description of Artificial Sequence: Synthetic oligonucleotide
  Sense strand starting at position 3507 of SEQ ID NO: 1886524
aguuaagcgauguacacau

SEQ ID NO: 2415869 - RNA, 19 nt, Artificial Sequence
  Description of Artificial Sequence: Synthetic oligonucleotide
  Antisense strand to SEQ ID NO: 2415868
auguguacaucgcuuaacu

SEQ ID NO: 2415870 - RNA, 19 nt, Artificial Sequence
  Description of Artificial Sequence: Synthetic oligonucleotide
  Sense strand starting at position 3528 of SEQ ID NO: 1886524
caguuugugcuggaaaucu

SEQ ID NO: 2415871 - RNA, 19 nt, Artificial Sequence
  Description of Artificial Sequence: Synthetic oligonucleotide
  Antisense strand to SEQ ID NO: 2415870
agauuuccagcacaaacug

SEQ ID NO: 2415872 - RNA, 19 nt, Artificial Sequence
  Description of Artificial Sequence: Synthetic oligonucleotide
  Sense strand starting at position 3537 of SEQ ID NO: 1886524
cuggaaaucugauccaagc

SEQ ID NO: 2415873 - RNA, 19 nt, Artificial Sequence
  Description of Artificial Sequence: Synthetic oligonucleotide
  Antisense strand to SEQ ID NO: 2415872
gcuuggaucagauuuccag

SEQ ID NO: 2415874 - RNA, 19 nt, Artificial Sequence
  Description of Artificial Sequence: Synthetic oligonucleotide
  Sense strand starting at position 3636 of SEQ ID NO: 1886524
uggcaaucauacuucuaag

SEQ ID NO: 2415875 - RNA, 19 nt, Artificial Sequence
  Description of Artificial Sequence: Synthetic oligonucleotide
  Antisense strand to SEQ ID NO: 2415874
cuuagaaguaugauugcca

SEQ ID NO: 2415876 - RNA, 19 nt, Artificial Sequence
  Description of Artificial Sequence: Synthetic oligonucleotide
  Sense strand starting at position 3696 of SEQ ID NO: 1886524
uuggaucugcacuauugau

SEQ ID NO: 2415877 - RNA, 19 nt, Artificial Sequence
  Description of Artificial Sequence: Synthetic oligonucleotide
  Antisense strand to SEQ ID NO: 2415876
aucaauagugcagauccaa

SEQ ID NO: 2415878 - RNA, 19 nt, Artificial Sequence
  Description of Artificial Sequence: Synthetic oligonucleotide
  Sense strand starting at position 3811 of SEQ ID NO: 1886524
gagcucaguguugaacaaa

SEQ ID NO: 2415879 - RNA, 19 nt, Artificial Sequence
  Description of Artificial Sequence: Synthetic oligonucleotide
  Antisense strand to SEQ ID NO: 2415878
uuuguucaacacugagcuc

SEQ ID NO: 2415880 - RNA, 19 nt, Artificial Sequence
  Description of Artificial Sequence: Synthetic oligonucleotide
  Sense strand starting at position 3859 of SEQ ID NO: 1886524
ccagauuugcagcgcucua

SEQ ID NO: 2415881 - RNA, 19 nt, Artificial Sequence
  Description of Artificial Sequence: Synthetic oligonucleotide
  Antisense strand to SEQ ID NO: 2415880
uagagcgcugcaaaucugg

SEQ ID NO: 2415882 - RNA, 19 nt, Artificial Sequence
  Description of Artificial Sequence: Synthetic oligonucleotide
  Sense strand starting at position 3866 of SEQ ID NO: 1886524
ugcagcgcucuaucucaua

SEQ ID NO: 2415883 - RNA, 19 nt, Artificial Sequence
  Description of Artificial Sequence: Synthetic oligonucleotide
  Antisense strand to SEQ ID NO: 2415882
uaugagauagagcgcugca

SEQ ID NO: 2415884 - RNA, 19 nt, Artificial Sequence
  Description of Artificial Sequence: Synthetic oligonucleotide
  Sense strand starting at position 24 of SEQ ID NO: 1886525
gaugaaugcucagugccca

SEQ ID NO: 2415885 - RNA, 19 nt, Artificial Sequence
  Description of Artificial Sequence: Synthetic oligonucleotide
  Antisense strand to SEQ ID NO: 2415884
ugggcacugagcauucauc

SEQ ID NO: 2415886 - RNA, 19 nt, Artificial Sequence
  Description of Artificial Sequence: Synthetic oligonucleotide
  Sense strand starting at position 110 of SEQ ID NO: 1886525
agagauguccuuugcugau

SEQ ID NO: 2415887 - RNA, 19 nt, Artificial Sequence
  Description of Artificial Sequence: Synthetic oligonucleotide
  Antisense strand to SEQ ID NO: 2415886
aucagcaaaggacaucucu

SEQ ID NO: 2415888 - RNA, 19 nt, Artificial Sequence
  Description of Artificial Sequence: Synthetic oligonucleotide
  Sense strand starting at position 229 of SEQ ID NO: 1886525
accaucuguccugaaagug

SEQ ID NO: 2415889 - RNA, 19 nt, Artificial Sequence
  Description of Artificial Sequence: Synthetic oligonucleotide
  Antisense strand to SEQ ID NO: 2415888
cacuuucaggacagauggu

SEQ ID NO: 2415890 - RNA, 19 nt, Artificial Sequence
  Description of Artificial Sequence: Synthetic oligonucleotide
  Sense strand starting at position 280 of SEQ ID NO: 1886525
gugguccucugauuggaaa

SEQ ID NO: 2415891 - RNA, 19 nt, Artificial Sequence
  Description of Artificial Sequence: Synthetic oligonucleotide
  Antisense strand to SEQ ID NO: 2415890
uuuccaaucagaggaccac

SEQ ID NO: 2415892 - RNA, 19 nt, Artificial Sequence
  Description of Artificial Sequence: Synthetic oligonucleotide
  Sense strand starting at position 281 of SEQ ID NO: 1886525
ugguccucugauuggaaau

SEQ ID NO: 2415893 - RNA, 19 nt, Artificial Sequence
  Description of Artificial Sequence: Synthetic oligonucleotide
  Antisense strand to SEQ ID NO: 2415892
auuuccaaucagaggacca

SEQ ID NO: 2415894 - RNA, 19 nt, Artificial Sequence
  Description of Artificial Sequence: Synthetic oligonucleotide
  Sense strand starting at position 282 of SEQ ID NO: 1886525
gguccucugauuggaaaug

SEQ ID NO: 2415895 - RNA, 19 nt, Artificial Sequence
  Description of Artificial Sequence: Synthetic oligonucleotide
  Antisense strand to SEQ ID NO: 2415894
cauuuccaaucagaggacc

SEQ ID NO: 2415896 - RNA, 19 nt, Artificial Sequence
  Description of Artificial Sequence: Synthetic oligonucleotide
  Sense strand starting at position 503 of SEQ ID NO: 1886525
gggagggcucccggaguaa

SEQ ID NO: 2415897 - RNA, 19 nt, Artificial Sequence
  Description of Artificial Sequence: Synthetic oligonucleotide
  Antisense strand to SEQ ID NO: 2415896
uuacuccgggagcccuccc

SEQ ID NO: 2415898 - RNA, 19 nt, Artificial Sequence
  Description of Artificial Sequence: Synthetic oligonucleotide
  Sense strand starting at position 514 of SEQ ID NO: 1886525
cggaguaaagccugaggaa

SEQ ID NO: 2415899 - RNA, 19 nt, Artificial Sequence
  Description of Artificial Sequence: Synthetic oligonucleotide
  Antisense strand to SEQ ID NO: 2415898
uuccucaggcuuuacuccg

SEQ ID NO: 2415900 - RNA, 19 nt, Artificial Sequence
  Description of Artificial Sequence: Synthetic oligonucleotide
  Sense strand starting at position 818 of SEQ ID NO: 1886525
caugaauugagucaggguu

SEQ ID NO: 2415901 - RNA, 19 nt, Artificial Sequence
  Description of Artificial Sequence: Synthetic oligonucleotide
  Antisense strand to SEQ ID NO: 2415900
aacccugacucaauucaug

SEQ ID NO: 2415902 - RNA, 19 nt, Artificial Sequence
  Description of Artificial Sequence: Synthetic oligonucleotide
  Sense strand starting at position 830 of SEQ ID NO: 1886525
caggguucccucugaucau

SEQ ID NO: 2415903 - RNA, 19 nt, Artificial Sequence
  Description of Artificial Sequence: Synthetic oligonucleotide
  Antisense strand to SEQ ID NO: 2415902
augaucagagggaacccug

SEQ ID NO: 2415904 - RNA, 19 nt, Artificial Sequence
  Description of Artificial Sequence: Synthetic oligonucleotide
  Sense strand starting at position 885 of SEQ ID NO: 1886525
ggcaaugauaauugugcuu

SEQ ID NO: 2415905 - RNA, 19 nt, Artificial Sequence
  Description of Artificial Sequence: Synthetic oligonucleotide
  Antisense strand to SEQ ID NO: 2415904
aagcacaauuaucauugcc

SEQ ID NO: 2415906 - RNA, 19 nt, Artificial Sequence
  Description of Artificial Sequence: Synthetic oligonucleotide
  Sense strand starting at position 1466 of SEQ ID NO: 1886525
guggguuucagaggaggga

SEQ ID NO: 2415907 - RNA, 19 nt, Artificial Sequence
  Description of Artificial Sequence: Synthetic oligonucleotide
  Antisense strand to SEQ ID NO: 2415906
ucccuccucugaaacccac

SEQ ID NO: 2415908 - RNA, 19 nt, Artificial Sequence
  Description of Artificial Sequence: Synthetic oligonucleotide
  Sense strand starting at position 1544 of SEQ ID NO: 1886525
ggagcgguucuggguaacu

SEQ ID NO: 2415909 - RNA, 19 nt, Artificial Sequence
  Description of Artificial Sequence: Synthetic oligonucleotide
  Antisense strand to SEQ ID NO: 2415908
aguuacccagaaccgcucc

SEQ ID NO: 2415910 - RNA, 19 nt, Artificial Sequence
  Description of Artificial Sequence: Synthetic oligonucleotide
  Sense strand starting at position 2126 of SEQ ID NO: 1886525
ggcggagucauaugaauca

SEQ ID NO: 2415911 - RNA, 19 nt, Artificial Sequence
  Description of Artificial Sequence: Synthetic oligonucleotide
  Antisense strand to SEQ ID NO: 2415910
ugauucauaugacuccgcc

SEQ ID NO: 2415912 - RNA, 19 nt, Artificial Sequence
  Description of Artificial Sequence: Synthetic oligonucleotide
  Sense strand starting at position 2137 of SEQ ID NO: 1886525
augaaucauccugaugcuu

SEQ ID NO: 2415913 - RNA, 19 nt, Artificial Sequence
  Description of Artificial Sequence: Synthetic oligonucleotide
  Antisense strand to SEQ ID NO: 2415912
aagcaucaggaugauucau

SEQ ID NO: 2415914 - RNA, 19 nt, Artificial Sequence
  Description of Artificial Sequence: Synthetic oligonucleotide
  Sense strand starting at position 2179 of SEQ ID NO: 1886525
cuggacauauuagaucaga

SEQ ID NO: 2415915 - RNA, 19 nt, Artificial Sequence
  Description of Artificial Sequence: Synthetic oligonucleotide
  Antisense strand to SEQ ID NO: 2415914
ucugaucuaauauguccag

SEQ ID NO: 2415916 - RNA, 19 nt, Artificial Sequence
  Description of Artificial Sequence: Synthetic oligonucleotide
  Sense strand starting at position 2288 of SEQ ID NO: 1886525
aguguucuaucuccagaca

SEQ ID NO: 2415917 - RNA, 19 nt, Artificial Sequence
  Description of Artificial Sequence: Synthetic oligonucleotide
  Antisense strand to SEQ ID NO: 2415916
ugucuggagauagaacacu

SEQ ID NO: 2415918 - RNA, 19 nt, Artificial Sequence
  Description of Artificial Sequence: Synthetic oligonucleotide
  Sense strand starting at position 2289 of SEQ ID NO: 1886525
guguucuaucuccagacau

SEQ ID NO: 2415919 - RNA, 19 nt, Artificial Sequence
  Description of Artificial Sequence: Synthetic oligonucleotide
  Antisense strand to SEQ ID NO: 2415918
augucuggagauagaacac

SEQ ID NO: 2415920 - RNA, 19 nt, Artificial Sequence
  Description of Artificial Sequence: Synthetic oligonucleotide
  Sense strand starting at position 2372 of SEQ ID NO: 1886525
uggugagguuagucucaaa

SEQ ID NO: 2415921 - RNA, 19 nt, Artificial Sequence
  Description of Artificial Sequence: Synthetic oligonucleotide
  Antisense strand to SEQ ID NO: 2415920
uuugagacuaaccucacca

SEQ ID NO: 2415922 - RNA, 19 nt, Artificial Sequence
  Description of Artificial Sequence: Synthetic oligonucleotide
  Sense strand starting at position 2462 of SEQ ID NO: 1886525
ggucuuuccgcuguccuau

SEQ ID NO: 2415923 - RNA, 19 nt, Artificial Sequence
  Description of Artificial Sequence: Synthetic oligonucleotide
  Antisense strand to SEQ ID NO: 2415922
auaggacagcggaaagacc

SEQ ID NO: 2415924 - RNA, 19 nt, Artificial Sequence
  Description of Artificial Sequence: Synthetic oligonucleotide
  Sense strand starting at position 2463 of SEQ ID NO: 1886525
gucuuuccgcuguccuauu

SEQ ID NO: 2415925 - RNA, 19 nt, Artificial Sequence
  Description of Artificial Sequence: Synthetic oligonucleotide
  Antisense strand to SEQ ID NO: 2415924
aauaggacagcggaaagac

SEQ ID NO: 2415926 - RNA, 19 nt, Artificial Sequence
  Description of Artificial Sequence: Synthetic oligonucleotide
  Sense strand starting at position 2544 of SEQ ID NO: 1886525
gcgcuuauagucuagagag

SEQ ID NO: 2415927 - RNA, 19 nt, Artificial Sequence
  Description of Artificial Sequence: Synthetic oligonucleotide
  Antisense strand to SEQ ID NO: 2415926
cucucuagacuauaagcgc

SEQ ID NO: 2415928 - RNA, 19 nt, Artificial Sequence
  Description of Artificial Sequence: Synthetic oligonucleotide
  Sense strand starting at position 2546 of SEQ ID NO: 1886525
gcuuauagucuagagagcu

SEQ ID NO: 2415929 - RNA, 19 nt, Artificial Sequence
  Description of Artificial Sequence: Synthetic oligonucleotide
  Antisense strand to SEQ ID NO: 2415928
agcucucuagacuauaagc

SEQ ID NO: 2415930 - RNA, 19 nt, Artificial Sequence
  Description of Artificial Sequence: Synthetic oligonucleotide
  Sense strand starting at position 2611 of SEQ ID NO: 1886525
ggaggaagguacuauuuau

SEQ ID NO: 2415931 - RNA, 19 nt, Artificial Sequence
  Description of Artificial Sequence: Synthetic oligonucleotide
  Antisense strand to SEQ ID NO: 2415930
auaaauaguaccuuccucc

SEQ ID NO: 2415932 - RNA, 19 nt, Artificial Sequence
  Description of Artificial Sequence: Synthetic oligonucleotide
  Sense strand starting at position 2790 of SEQ ID NO: 1886525
gggacuuugugcuuccaua

SEQ ID NO: 2415933 - RNA, 19 nt, Artificial Sequence
  Description of Artificial Sequence: Synthetic oligonucleotide
  Antisense strand to SEQ ID NO: 2415932
uauggaagcacaaaguccc

SEQ ID NO: 2415934 - RNA, 19 nt, Artificial Sequence
  Description of Artificial Sequence: Synthetic oligonucleotide
  Sense strand starting at position 3075 of SEQ ID NO: 1886525
agcugauggcuuuggaaca

SEQ ID NO: 2415935 - RNA, 19 nt, Artificial Sequence
  Description of Artificial Sequence: Synthetic oligonucleotide
  Antisense strand to SEQ ID NO: 2415934
uguuccaaagccaucagcu

SEQ ID NO: 2415936 - RNA, 19 nt, Artificial Sequence
  Description of Artificial Sequence: Synthetic oligonucleotide
  Sense strand starting at position 3205 of SEQ ID NO: 1886525
cucauauacucuccagguu

SEQ ID NO: 2415937 - RNA, 19 nt, Artificial Sequence
  Description of Artificial Sequence: Synthetic oligonucleotide
  Antisense strand to SEQ ID NO: 2415936
aaccuggagaguauaugag

SEQ ID NO: 2415938 - RNA, 19 nt, Artificial Sequence
  Description of Artificial Sequence: Synthetic oligonucleotide
  Sense strand starting at position 3206 of SEQ ID NO: 1886525
ucauauacucuccagguuu

SEQ ID NO: 2415939 - RNA, 19 nt, Artificial Sequence
  Description of Artificial Sequence: Synthetic oligonucleotide
  Antisense strand to SEQ ID NO: 2415938
aaaccuggagaguauauga

SEQ ID NO: 2415940 - RNA, 19 nt, Artificial Sequence
  Description of Artificial Sequence: Synthetic oligonucleotide
  Sense strand starting at position 3402 of SEQ ID NO: 1886525
gguugugaguugaauggaa

SEQ ID NO: 2415941 - RNA, 19 nt, Artificial Sequence
  Description of Artificial Sequence: Synthetic oligonucleotide
  Antisense strand to SEQ ID NO: 2415940
uuccauucaacucacaacc

SEQ ID NO: 2415942 - RNA, 19 nt, Artificial Sequence
  Description of Artificial Sequence: Synthetic oligonucleotide
  Sense strand starting at position 3404 of SEQ ID NO: 1886525
uugugaguugaauggaaug

SEQ ID NO: 2415943 - RNA, 19 nt, Artificial Sequence
  Description of Artificial Sequence: Synthetic oligonucleotide
  Antisense strand to SEQ ID NO: 2415942
cauuccauucaacucacaa

SEQ ID NO: 2415944 - RNA, 19 nt, Artificial Sequence
  Description of Artificial Sequence: Synthetic oligonucleotide
  Sense strand starting at position 3434 of SEQ ID NO: 1886525
ggagguguccgcuauggau

SEQ ID NO: 2415945 - RNA, 19 nt, Artificial Sequence
  Description of Artificial Sequence: Synthetic oligonucleotide
  Antisense strand to SEQ ID NO: 2415944
auccauagcggacaccucc

SEQ ID NO: 2415946 - RNA, 19 nt, Artificial Sequence
  Description of Artificial Sequence: Synthetic oligonucleotide
  Sense strand starting at position 3488 of SEQ ID NO: 1886525
uuuaucagauuccuccgaa

SEQ ID NO: 2415947 - RNA, 19 nt, Artificial Sequence
  Description of Artificial Sequence: Synthetic oligonucleotide
  Antisense strand to SEQ ID NO: 2415946
uucggaggaaucugauaaa

SEQ ID NO: 2415948 - RNA, 19 nt, Artificial Sequence
  Description of Artificial Sequence: Synthetic oligonucleotide
  Sense strand starting at position 3489 of SEQ ID NO: 1886525
uuaucagauuccuccgaaa

SEQ ID NO: 2415949 - RNA, 19 nt, Artificial Sequence
  Description of Artificial Sequence: Synthetic oligonucleotide
  Antisense strand to SEQ ID NO: 2415948
uuucggaggaaucugauaa

SEQ ID NO: 2415950 - RNA, 19 nt, Artificial Sequence
  Description of Artificial Sequence: Synthetic oligonucleotide
  Sense strand starting at position 3491 of SEQ ID NO: 1886525
aucagauuccuccgaaaug

SEQ ID NO: 2415951 - RNA, 19 nt, Artificial Sequence
  Description of Artificial Sequence: Synthetic oligonucleotide
  Antisense strand to SEQ ID NO: 2415950
cauuucggaggaaucugau

SEQ ID NO: 2415952 - RNA, 19 nt, Artificial Sequence
  Description of Artificial Sequence: Synthetic oligonucleotide
  Sense strand starting at position 3502 of SEQ ID NO: 1886525
ccgaaaugccaagaacugu

SEQ ID NO: 2415953 - RNA, 19 nt, Artificial Sequence
  Description of Artificial Sequence: Synthetic oligonucleotide
  Antisense strand to SEQ ID NO: 2415952
acaguucuuggcauuucgg

SEQ ID NO: 2415954 - RNA, 19 nt, Artificial Sequence
  Description of Artificial Sequence: Synthetic oligonucleotide
  Sense strand starting at position 3555 of SEQ ID NO: 1886525
ucaugacaauccuaugaag

SEQ ID NO: 2415955 - RNA, 19 nt, Artificial Sequence
  Description of Artificial Sequence: Synthetic oligonucleotide
  Antisense strand to SEQ ID NO: 2415954
cuucauaggauugucauga

SEQ ID NO: 2415956 - RNA, 19 nt, Artificial Sequence
  Description of Artificial Sequence: Synthetic oligonucleotide
  Sense strand starting at position 3634 of SEQ ID NO: 1886525
uugcgcuggcucuuuaaga

SEQ ID NO: 2415957 - RNA, 19 nt, Artificial Sequence
  Description of Artificial Sequence: Synthetic oligonucleotide
  Antisense strand to SEQ ID NO: 2415956
ucuuaaagagccagcgcaa

SEQ ID NO: 2415958 - RNA, 19 nt, Artificial Sequence
  Description of Artificial Sequence: Synthetic oligonucleotide
  Sense strand starting at position 3725 of SEQ ID NO: 1886525
cugaguucuaguuggccaa

SEQ ID NO: 2415959 - RNA, 19 nt, Artificial Sequence
  Description of Artificial Sequence: Synthetic oligonucleotide
  Antisense strand to SEQ ID NO: 2415958
uuggccaacuagaacucag

SEQ ID NO: 2415960 - RNA, 19 nt, Artificial Sequence
  Description of Artificial Sequence: Synthetic oligonucleotide
  Sense strand starting at position 3727 of SEQ ID NO: 1886525
gaguucuaguuggccaacu

SEQ ID NO: 2415961 - RNA, 19 nt, Artificial Sequence
  Description of Artificial Sequence: Synthetic oligonucleotide
  Antisense strand to SEQ ID NO: 2415960
aguuggccaacuagaacuc

SEQ ID NO: 2415962 - RNA, 19 nt, Artificial Sequence
  Description of Artificial Sequence: Synthetic oligonucleotide
  Sense strand starting at position 3729 of SEQ ID NO: 1886525
guucuaguuggccaacuuu

SEQ ID NO: 2415963 - RNA, 19 nt, Artificial Sequence
  Description of Artificial Sequence: Synthetic oligonucleotide
  Antisense strand to SEQ ID NO: 2415962
aaaguuggccaacuagaac

SEQ ID NO: 2415964 - RNA, 19 nt, Artificial Sequence
  Description of Artificial Sequence: Synthetic oligonucleotide
  Sense strand starting at position 7 of SEQ ID NO: 1886526
cucuguaagcuguaaagca

SEQ ID NO: 2415965 - RNA, 19 nt, Artificial Sequence
  Description of Artificial Sequence: Synthetic oligonucleotide
  Antisense strand to SEQ ID NO: 2415964
ugcuuuacagcuuacagag

SEQ ID NO: 2415966 - RNA, 19 nt, Artificial Sequence
  Description of Artificial Sequence: Synthetic oligonucleotide
  Sense strand starting at position 33 of SEQ ID NO: 1886526
gaugaagcggauuauuauu

SEQ ID NO: 2415967 - RNA, 19 nt, Artificial Sequence
  Description of Artificial Sequence: Synthetic oligonucleotide
  Antisense strand to SEQ ID NO: 2415966
aauaauaauccgcuucauc

SEQ ID NO: 2415968 - RNA, 19 nt, Artificial Sequence
  Description of Artificial Sequence: Synthetic oligonucleotide
  Sense strand starting at position 38 of SEQ ID NO: 1886526
agcggauuauuauuagucu

SEQ ID NO: 2415969 - RNA, 19 nt, Artificial Sequence
  Description of Artificial Sequence: Synthetic oligonucleotide
  Antisense strand to SEQ ID NO: 2415968
agacuaauaauaauccgcu

SEQ ID NO: 2415970 - RNA, 19 nt, Artificial Sequence
  Description of Artificial Sequence: Synthetic oligonucleotide
  Sense strand starting at position 62 of SEQ ID NO: 1886526
gaagcccagcgauaaagau

SEQ ID NO: 2415971 - RNA, 19 nt, Artificial Sequence
  Description of Artificial Sequence: Synthetic oligonucleotide
  Antisense strand to SEQ ID NO: 2415970
aucuuuaucgcugggcuuc

SEQ ID NO: 2415972 - RNA, 19 nt, Artificial Sequence
  Description of Artificial Sequence: Synthetic oligonucleotide
  Sense strand starting at position 165 of SEQ ID NO: 1886526
guagguaggugcuuaauaa

SEQ ID NO: 2415973 - RNA, 19 nt, Artificial Sequence
  Description of Artificial Sequence: Synthetic oligonucleotide
  Antisense strand to SEQ ID NO: 2415972
uuauuaagcaccuaccuac

SEQ ID NO: 2415974 - RNA, 19 nt, Artificial Sequence
  Description of Artificial Sequence: Synthetic oligonucleotide
  Sense strand starting at position 166 of SEQ ID NO: 1886526
uagguaggugcuuaauaag

SEQ ID NO: 2415975 - RNA, 19 nt, Artificial Sequence
  Description of Artificial Sequence: Synthetic oligonucleotide
  Antisense strand to SEQ ID NO: 2415974
cuuauuaagcaccuaccua

SEQ ID NO: 2415976 - RNA, 19 nt, Artificial Sequence
  Description of Artificial Sequence: Synthetic oligonucleotide
  Sense strand starting at position 172 of SEQ ID NO: 1886526
ggugcuuaauaaguagagu

SEQ ID NO: 2415977 - RNA, 19 nt, Artificial Sequence
  Description of Artificial Sequence: Synthetic oligonucleotide
  Antisense strand to SEQ ID NO: 2415976
acucuacuuauuaagcacc

SEQ ID NO: 2415978 - RNA, 19 nt, Artificial Sequence
  Description of Artificial Sequence: Synthetic oligonucleotide
  Sense strand starting at position 178 of SEQ ID NO: 1886526
uaauaaguagagugaguaa

SEQ ID NO: 2415979 - RNA, 19 nt, Artificial Sequence
  Description of Artificial Sequence: Synthetic oligonucleotide
  Antisense strand to SEQ ID NO: 2415978
uuacucacucuacuuauua

SEQ ID NO: 2415980 - RNA, 19 nt, Artificial Sequence
  Description of Artificial Sequence: Synthetic oligonucleotide
  Sense strand starting at position 181 of SEQ ID NO: 1886526
uaaguagagugaguaaaga

SEQ ID NO: 2415981 - RNA, 19 nt, Artificial Sequence
  Description of Artificial Sequence: Synthetic oligonucleotide
  Antisense strand to SEQ ID NO: 2415980
ucuuuacucacucuacuua

SEQ ID NO: 2415982 - RNA, 19 nt, Artificial Sequence
  Description of Artificial Sequence: Synthetic oligonucleotide
  Sense strand starting at position 224 of SEQ ID NO: 1886526
ccaucauacuaggucugau

SEQ ID NO: 2415983 - RNA, 19 nt, Artificial Sequence
  Description of Artificial Sequence: Synthetic oligonucleotide
  Antisense strand to SEQ ID NO: 2415982
aucagaccuaguaugaugg

SEQ ID NO: 2415984 - RNA, 19 nt, Artificial Sequence
  Description of Artificial Sequence: Synthetic oligonucleotide
  Sense strand starting at position 262 of SEQ ID NO: 1886526
accuaaggucaaugauagu

SEQ ID NO: 2415985 - RNA, 19 nt, Artificial Sequence
  Description of Artificial Sequence: Synthetic oligonucleotide
  Antisense strand to SEQ ID NO: 2415984
acuaucauugaccuuaggu

SEQ ID NO: 2415986 - RNA, 19 nt, Artificial Sequence
  Description of Artificial Sequence: Synthetic oligonucleotide
  Sense strand starting at position 350 of SEQ ID NO: 1886526
agagcauggaaacgugaaa

SEQ ID NO: 2415987 - RNA, 19 nt, Artificial Sequence
  Description of Artificial Sequence: Synthetic oligonucleotide
  Antisense strand to SEQ ID NO: 2415986
uuucacguuuccaugcucu

SEQ ID NO: 2415988 - RNA, 19 nt, Artificial Sequence
  Description of Artificial Sequence: Synthetic oligonucleotide
  Sense strand starting at position 362 of SEQ ID NO: 1886526
cgugaaaugugacccggaa

SEQ ID NO: 2415989 - RNA, 19 nt, Artificial Sequence
  Description of Artificial Sequence: Synthetic oligonucleotide
  Antisense strand to SEQ ID NO: 2415988
uuccgggucacauuucacg

SEQ ID NO: 2415990 - RNA, 19 nt, Artificial Sequence
  Description of Artificial Sequence: Synthetic oligonucleotide
  Sense strand starting at position 364 of SEQ ID NO: 1886526
ugaaaugugacccggaauc

SEQ ID NO: 2415991 - RNA, 19 nt, Artificial Sequence
  Description of Artificial Sequence: Synthetic oligonucleotide
  Antisense strand to SEQ ID NO: 2415990
gauuccgggucacauuuca

SEQ ID NO: 2415992 - RNA, 19 nt, Artificial Sequence
  Description of Artificial Sequence: Synthetic oligonucleotide
  Sense strand starting at position 384 of SEQ ID NO: 1886526
gcaauuaaaucgguauauu

SEQ ID NO: 2415993 - RNA, 19 nt, Artificial Sequence
  Description of Artificial Sequence: Synthetic oligonucleotide
  Antisense strand to SEQ ID NO: 2415992
aauauaccgauuuaauugc

SEQ ID NO: 2415994 - RNA, 19 nt, Artificial Sequence
  Description of Artificial Sequence: Synthetic oligonucleotide
  Sense strand starting at position 395 of SEQ ID NO: 1886526
gguauauucuuaccucuuc

SEQ ID NO: 2415995 - RNA, 19 nt, Artificial Sequence
  Description of Artificial Sequence: Synthetic oligonucleotide
  Antisense strand to SEQ ID NO: 2415994
gaagagguaagaauauacc

SEQ ID NO: 2415996 - RNA, 19 nt, Artificial Sequence
  Description of Artificial Sequence: Synthetic oligonucleotide
  Sense strand starting at position 426 of SEQ ID NO: 1886526
gcagucuugcagggauaca

SEQ ID NO: 2415997 - RNA, 19 nt, Artificial Sequence
  Description of Artificial Sequence: Synthetic oligonucleotide
  Antisense strand to SEQ ID NO: 2415996
uguaucccugcaagacugc

SEQ ID NO: 2415998 - RNA, 19 nt, Artificial Sequence
  Description of Artificial Sequence: Synthetic oligonucleotide
  Sense strand starting at position 534 of SEQ ID NO: 1886526
auagaauguuggguaccua

SEQ ID NO: 2415999 - RNA, 19 nt, Artificial Sequence
  Description of Artificial Sequence: Synthetic oligonucleotide
  Antisense strand to SEQ ID NO: 2415998
uagguacccaacauucuau

SEQ ID NO: 2416000 - RNA, 19 nt, Artificial Sequence
  Description of Artificial Sequence: Synthetic oligonucleotide
  Sense strand starting at position 722 of SEQ ID NO: 1886526
gucaguuuccuagacuaug

SEQ ID NO: 2416001 - RNA, 19 nt, Artificial Sequence
  Description of Artificial Sequence: Synthetic oligonucleotide
  Antisense strand to SEQ ID NO: 2416000
cauagucuaggaaacugac

SEQ ID NO: 2416002 - RNA, 19 nt, Artificial Sequence
  Description of Artificial Sequence: Synthetic oligonucleotide
  Sense strand starting at position 725 of SEQ ID NO: 1886526
aguuuccuagacuauguaa

SEQ ID NO: 2416003 - RNA, 19 nt, Artificial Sequence
  Description of Artificial Sequence: Synthetic oligonucleotide
  Antisense strand to SEQ ID NO: 2416002
uuacauagucuaggaaacu

SEQ ID NO: 2416004 - RNA, 19 nt, Artificial Sequence
  Description of Artificial Sequence: Synthetic oligonucleotide
  Sense strand starting at position 1051 of SEQ ID NO: 1886526
ggccgcuugccucucuuau

SEQ ID NO: 2416005 - RNA, 19 nt, Artificial Sequence
  Description of Artificial Sequence: Synthetic oligonucleotide
  Antisense strand to SEQ ID NO: 2416004
auaagagaggcaagcggcc

SEQ ID NO: 2416006 - RNA, 19 nt, Artificial Sequence
  Description of Artificial Sequence: Synthetic oligonucleotide
  Sense strand starting at position 1122 of SEQ ID NO: 1886526
gucugauggaacugauugu

SEQ ID NO: 2416007 - RNA, 19 nt, Artificial Sequence
  Description of Artificial Sequence: Synthetic oligonucleotide
  Antisense strand to SEQ ID NO: 2416006
acaaucaguuccaucagac

SEQ ID NO: 2416008 - RNA, 19 nt, Artificial Sequence
  Description of Artificial Sequence: Synthetic oligonucleotide
  Sense strand starting at position 1198 of SEQ ID NO: 1886526
augcccaaucuuuggcaaa

SEQ ID NO: 2416009 - RNA, 19 nt, Artificial Sequence
  Description of Artificial Sequence: Synthetic oligonucleotide
  Antisense strand to SEQ ID NO: 2416008
uuugccaaagauugggcau

SEQ ID NO: 2416010 - RNA, 19 nt, Artificial Sequence
  Description of Artificial Sequence: Synthetic oligonucleotide
  Sense strand starting at position 1200 of SEQ ID NO: 1886526
gcccaaucuuuggcaaaua

SEQ ID NO: 2416011 - RNA, 19 nt, Artificial Sequence
  Description of Artificial Sequence: Synthetic oligonucleotide
  Antisense strand to SEQ ID NO: 2416010
uauuugccaaagauugggc

SEQ ID NO: 2416012 - RNA, 19 nt, Artificial Sequence
  Description of Artificial Sequence: Synthetic oligonucleotide
  Sense strand starting at position 1223 of SEQ ID NO: 1886526
cugguuuccucaguauuug

SEQ ID NO: 2416013 - RNA, 19 nt, Artificial Sequence
  Description of Artificial Sequence: Synthetic oligonucleotide
  Antisense strand to SEQ ID NO: 2416012
caaauacugaggaaaccag

SEQ ID NO: 2416014 - RNA, 19 nt, Artificial Sequence
  Description of Artificial Sequence: Synthetic oligonucleotide
  Sense strand starting at position 1235 of SEQ ID NO: 1886526
guauuugacuagcuguaca

SEQ ID NO: 2416015 - RNA, 19 nt, Artificial Sequence
  Description of Artificial Sequence: Synthetic oligonucleotide
  Antisense strand to SEQ ID NO: 2416014
uguacagcuagucaaauac

SEQ ID NO: 2416016 - RNA, 19 nt, Artificial Sequence
  Description of Artificial Sequence: Synthetic oligonucleotide
  Sense strand starting at position 1275 of SEQ ID NO: 1886526
cugggucuuuaucugagaa

SEQ ID NO: 2416017 - RNA, 19 nt, Artificial Sequence
  Description of Artificial Sequence: Synthetic oligonucleotide
  Antisense strand to SEQ ID NO: 2416016
uucucagauaaagacccag

SEQ ID NO: 2416018 - RNA, 19 nt, Artificial Sequence
  Description of Artificial Sequence: Synthetic oligonucleotide
  Sense strand starting at position 1276 of SEQ ID NO: 1886526
ugggucuuuaucugagaag

SEQ ID NO: 2416019 - RNA, 19 nt, Artificial Sequence
  Description of Artificial Sequence: Synthetic oligonucleotide
  Antisense strand to SEQ ID NO: 2416018
cuucucagauaaagaccca

SEQ ID NO: 2416020 - RNA, 19 nt, Artificial Sequence
  Description of Artificial Sequence: Synthetic oligonucleotide
  Sense strand starting at position 1393 of SEQ ID NO: 1886526
aggagaauuuagugcaaag

SEQ ID NO: 2416021 - RNA, 19 nt, Artificial Sequence
  Description of Artificial Sequence: Synthetic oligonucleotide
  Antisense strand to SEQ ID NO: 2416020
cuuugcacuaaauucuccu

SEQ ID NO: 2416022 - RNA, 19 nt, Artificial Sequence
  Description of Artificial Sequence: Synthetic oligonucleotide
  Sense strand starting at position 1657 of SEQ ID NO: 1886526
cgcugcguuccucuucuua

SEQ ID NO: 2416023 - RNA, 19 nt, Artificial Sequence
  Description of Artificial Sequence: Synthetic oligonucleotide
  Antisense strand to SEQ ID NO: 2416022
uaagaagaggaacgcagcg

SEQ ID NO: 2416024 - RNA, 19 nt, Artificial Sequence
  Description of Artificial Sequence: Synthetic oligonucleotide
  Sense strand starting at position 3752 of SEQ ID NO: 1886526
gcgccuguaguuguaugaa

SEQ ID NO: 2416025 - RNA, 19 nt, Artificial Sequence
  Description of Artificial Sequence: Synthetic oligonucleotide
  Antisense strand to SEQ ID NO: 2416024
uucauacaacuacaggcgc

SEQ ID NO: 2416026 - RNA, 19 nt, Artificial Sequence
  Description of Artificial Sequence: Synthetic oligonucleotide
  Sense strand starting at position 3755 of SEQ ID NO: 1886526
ccuguaguuguaugaauga

SEQ ID NO: 2416027 - RNA, 19 nt, Artificial Sequence
  Description of Artificial Sequence: Synthetic oligonucleotide
  Antisense strand to SEQ ID NO: 2416026
ucauucauacaacuacagg

SEQ ID NO: 2416028 - RNA, 19 nt, Artificial Sequence
  Description of Artificial Sequence: Synthetic oligonucleotide
  Sense strand starting at position 3772 of SEQ ID NO: 1886526
gacaguguccgccauauug

SEQ ID NO: 2416029 - RNA, 19 nt, Artificial Sequence
  Description of Artificial Sequence: Synthetic oligonucleotide
  Antisense strand to SEQ ID NO: 2416028
caauauggcggacacuguc

SEQ ID NO: 2416030 - RNA, 19 nt, Artificial Sequence
  Description of Artificial Sequence: Synthetic oligonucleotide
  Sense strand starting at position 3778 of SEQ ID NO: 1886526
guccgccauauugaucaga

SEQ ID NO: 2416031 - RNA, 19 nt, Artificial Sequence
  Description of Artificial Sequence: Synthetic oligonucleotide
  Antisense strand to SEQ ID NO: 2416030
ucugaucaauauggcggac

SEQ ID NO: 2416032 - RNA, 19 nt, Artificial Sequence
  Description of Artificial Sequence: Synthetic oligonucleotide
  Sense strand starting at position 3780 of SEQ ID NO: 1886526
ccgccauauugaucagaac

SEQ ID NO: 2416033 - RNA, 19 nt, Artificial Sequence
  Description of Artificial Sequence: Synthetic oligonucleotide
  Antisense strand to SEQ ID NO: 2416032
guucugaucaauauggcgg

SEQ ID NO: 2416034 - RNA, 19 nt, Artificial Sequence
  Description of Artificial Sequence: Synthetic oligonucleotide
  Sense strand starting at position 3781 of SEQ ID NO: 1886526
cgccauauugaucagaaca

SEQ ID NO: 2416035 - RNA, 19 nt, Artificial Sequence
  Description of Artificial Sequence: Synthetic oligonucleotide
  Antisense strand to SEQ ID NO: 2416034
uguucugaucaauauggcg

SEQ ID NO: 2416036 - RNA, 19 nt, Artificial Sequence
  Description of Artificial Sequence: Synthetic oligonucleotide
  Sense strand starting at position 3802 of SEQ ID NO: 1886526
acacuauuggcaugauuau

SEQ ID NO: 2416037 - RNA, 19 nt, Artificial Sequence
  Description of Artificial Sequence: Synthetic oligonucleotide
  Antisense strand to SEQ ID NO: 2416036
auaaucaugccaauagugu

SEQ ID NO: 2416038 - RNA, 19 nt, Artificial Sequence
  Description of Artificial Sequence: Synthetic oligonucleotide
  Sense strand starting at position 3803 of SEQ ID NO: 1886526
cacuauuggcaugauuaug

SEQ ID NO: 2416039 - RNA, 19 nt, Artificial Sequence
  Description of Artificial Sequence: Synthetic oligonucleotide
  Antisense strand to SEQ ID NO: 2416038
cauaaucaugccaauagug

SEQ ID NO: 2416040 - RNA, 19 nt, Artificial Sequence
  Description of Artificial Sequence: Synthetic oligonucleotide
  Sense strand starting at position 3811 of SEQ ID NO: 1886526
gcaugauuaugaucauuac

SEQ ID NO: 2416041 - RNA, 19 nt, Artificial Sequence
  Description of Artificial Sequence: Synthetic oligonucleotide
  Antisense strand to SEQ ID NO: 2416040
guaaugaucauaaucaugc

SEQ ID NO: 2416042 - RNA, 19 nt, Artificial Sequence
  Description of Artificial Sequence: Synthetic oligonucleotide
  Sense strand starting at position 3825 of SEQ ID NO: 1886526
auuacucuugcuuguggaa

SEQ ID NO: 2416043 - RNA, 19 nt, Artificial Sequence
  Description of Artificial Sequence: Synthetic oligonucleotide
  Antisense strand to SEQ ID NO: 2416042
uuccacaagcaagaguaau

SEQ ID NO: 2416044 - RNA, 19 nt, Artificial Sequence
  Description of Artificial Sequence: Synthetic oligonucleotide
  Sense strand starting at position 335 of SEQ ID NO: 1886527
agcacaaacugauagcaaa

SEQ ID NO: 2416045 - RNA, 19 nt, Artificial Sequence
  Description of Artificial Sequence: Synthetic oligonucleotide
  Antisense strand to SEQ ID NO: 2416044
uuugcuaucaguuugugcu

SEQ ID NO: 2416046 - RNA, 19 nt, Artificial Sequence
  Description of Artificial Sequence: Synthetic oligonucleotide
  Sense strand starting at position 404 of SEQ ID NO: 1886527
agcacaucaucugguuuaa

SEQ ID NO: 2416047 - RNA, 19 nt, Artificial Sequence
  Description of Artificial Sequence: Synthetic oligonucleotide
  Antisense strand to SEQ ID NO: 2416046
uuaaaccagaugaugugcu

SEQ ID NO: 2416048 - RNA, 19 nt, Artificial Sequence
  Description of Artificial Sequence: Synthetic oligonucleotide
  Sense strand starting at position 460 of SEQ ID NO: 1886527
cguauaauauucucugcua

SEQ ID NO: 2416049 - RNA, 19 nt, Artificial Sequence
  Description of Artificial Sequence: Synthetic oligonucleotide
  Antisense strand to SEQ ID NO: 2416048
uagcagagaauauuauacg

SEQ ID NO: 2416050 - RNA, 19 nt, Artificial Sequence
  Description of Artificial Sequence: Synthetic oligonucleotide
  Sense strand starting at position 468 of SEQ ID NO: 1886527
auucucugcuaagaagaau

SEQ ID NO: 2416051 - RNA, 19 nt, Artificial Sequence
  Description of Artificial Sequence: Synthetic oligonucleotide
  Antisense strand to SEQ ID NO: 2416050
auucuucuuagcagagaau

SEQ ID NO: 2416052 - RNA, 19 nt, Artificial Sequence
  Description of Artificial Sequence: Synthetic oligonucleotide
  Sense strand starting at position 708 of SEQ ID NO: 1886527
gacagauucccacggucca

SEQ ID NO: 2416053 - RNA, 19 nt, Artificial Sequence
  Description of Artificial Sequence: Synthetic oligonucleotide
  Antisense strand to SEQ ID NO: 2416052
uggaccgugggaaucuguc

SEQ ID NO: 2416054 - RNA, 19 nt, Artificial Sequence
  Description of Artificial Sequence: Synthetic oligonucleotide
  Sense strand starting at position 750 of SEQ ID NO: 1886527
acgccagggagcuguauuu

SEQ ID NO: 2416055 - RNA, 19 nt, Artificial Sequence
  Description of Artificial Sequence: Synthetic oligonucleotide
  Antisense strand to SEQ ID NO: 2416054
aaauacagcucccuggcgu

SEQ ID NO: 2416056 - RNA, 19 nt, Artificial Sequence
  Description of Artificial Sequence: Synthetic oligonucleotide
  Sense strand starting at position 792 of SEQ ID NO: 1886527
acgcaaguuuaagaaauua

SEQ ID NO: 2416057 - RNA, 19 nt, Artificial Sequence
  Description of Artificial Sequence: Synthetic oligonucleotide
  Antisense strand to SEQ ID NO: 2416056
uaauuucuuaaacuugcgu

SEQ ID NO: 2416058 - RNA, 19 nt, Artificial Sequence
  Description of Artificial Sequence: Synthetic oligonucleotide
  Sense strand starting at position 800 of SEQ ID NO: 1886527
uuaagaaauuagcacaagu

SEQ ID NO: 2416059 - RNA, 19 nt, Artificial Sequence
  Description of Artificial Sequence: Synthetic oligonucleotide
  Antisense strand to SEQ ID NO: 2416058
acuugugcuaauuucuuaa

SEQ ID NO: 2416060 - RNA, 19 nt, Artificial Sequence
  Description of Artificial Sequence: Synthetic oligonucleotide
  Sense strand starting at position 1218 of SEQ ID NO: 1886527
cguuuacaugcaugcggaa

SEQ ID NO: 2416061 - RNA, 19 nt, Artificial Sequence
  Description of Artificial Sequence: Synthetic oligonucleotide
  Antisense strand to SEQ ID NO: 2416060
uuccgcaugcauguaaacg

SEQ ID NO: 2416062 - RNA, 19 nt, Artificial Sequence
  Description of Artificial Sequence: Synthetic oligonucleotide
  Sense strand starting at position 1293 of SEQ ID NO: 1886527
gucaaacauuaagaaggaa

SEQ ID NO: 2416063 - RNA, 19 nt, Artificial Sequence
  Description of Artificial Sequence: Synthetic oligonucleotide
  Antisense strand to SEQ ID NO: 2416062
uuccuucuuaauguuugac

SEQ ID NO: 2416064 - RNA, 19 nt, Artificial Sequence
  Description of Artificial Sequence: Synthetic oligonucleotide
  Sense strand starting at position 1340 of SEQ ID NO: 1886527
ggugacuucuuccuccgga

SEQ ID NO: 2416065 - RNA, 19 nt, Artificial Sequence
  Description of Artificial Sequence: Synthetic oligonucleotide
  Antisense strand to SEQ ID NO: 2416064
uccggaggaagaagucacc

SEQ ID NO: 2416066 - RNA, 19 nt, Artificial Sequence
  Description of Artificial Sequence: Synthetic oligonucleotide
  Sense strand starting at position 1371 of SEQ ID NO: 1886527
cuuacuaguucugaaagca

SEQ ID NO: 2416067 - RNA, 19 nt, Artificial Sequence
  Description of Artificial Sequence: Synthetic oligonucleotide
  Antisense strand to SEQ ID NO: 2416066
ugcuuucagaacuaguaag

SEQ ID NO: 2416068 - RNA, 19 nt, Artificial Sequence
  Description of Artificial Sequence: Synthetic oligonucleotide
  Sense strand starting at position 1401 of SEQ ID NO: 1886527
cacgucucaacgcgggaaa

SEQ ID NO: 2416069 - RNA, 19 nt, Artificial Sequence
  Description of Artificial Sequence: Synthetic oligonucleotide
  Antisense strand to SEQ ID NO: 2416068
uuucccgcguugagacgug

SEQ ID NO: 2416070 - RNA, 19 nt, Artificial Sequence
  Description of Artificial Sequence: Synthetic oligonucleotide
  Sense strand starting at position 2140 of SEQ ID NO: 1886527
uguggaagccuugacucuu

SEQ ID NO: 2416071 - RNA, 19 nt, Artificial Sequence
  Description of Artificial Sequence: Synthetic oligonucleotide
  Antisense strand to SEQ ID NO: 2416070
aagagucaaggcuuccaca

SEQ ID NO: 2416072 - RNA, 19 nt, Artificial Sequence
  Description of Artificial Sequence: Synthetic oligonucleotide
  Sense strand starting at position 2210 of SEQ ID NO: 1886527
accggaacaucugagauga

SEQ ID NO: 2416073 - RNA, 19 nt, Artificial Sequence
  Description of Artificial Sequence: Synthetic oligonucleotide
  Antisense strand to SEQ ID NO: 2416072
ucaucucagauguuccggu

SEQ ID NO: 2416074 - RNA, 19 nt, Artificial Sequence
  Description of Artificial Sequence: Synthetic oligonucleotide
  Sense strand starting at position 2212 of SEQ ID NO: 1886527
cggaacaucugagaugauc

SEQ ID NO: 2416075 - RNA, 19 nt, Artificial Sequence
  Description of Artificial Sequence: Synthetic oligonucleotide
  Antisense strand to SEQ ID NO: 2416074
gaucaucucagauguuccg

SEQ ID NO: 2416076 - RNA, 19 nt, Artificial Sequence
  Description of Artificial Sequence: Synthetic oligonucleotide
  Sense strand starting at position 2413 of SEQ ID NO: 1886527
cacagaguagaucggaaau

SEQ ID NO: 2416077 - RNA, 19 nt, Artificial Sequence
  Description of Artificial Sequence: Synthetic oligonucleotide
  Antisense strand to SEQ ID NO: 2416076
auuuccgaucuacucugug

SEQ ID NO: 2416078 - RNA, 19 nt, Artificial Sequence
  Description of Artificial Sequence: Synthetic oligonucleotide
  Sense strand starting at position 2544 of SEQ ID NO: 1886527
acugaagucucagagaagu

SEQ ID NO: 2416079 - RNA, 19 nt, Artificial Sequence
  Description of Artificial Sequence: Synthetic oligonucleotide
  Antisense strand to SEQ ID NO: 2416078
acuucucugagacuucagu

SEQ ID NO: 2416080 - RNA, 19 nt, Artificial Sequence
  Description of Artificial Sequence: Synthetic oligonucleotide
  Sense strand starting at position 2611 of SEQ ID NO: 1886527
agaagucaucacugacuca

SEQ ID NO: 2416081 - RNA, 19 nt, Artificial Sequence
  Description of Artificial Sequence: Synthetic oligonucleotide
  Antisense strand to SEQ ID NO: 2416080
ugagucagugaugacuucu

SEQ ID NO: 2416082 - RNA, 19 nt, Artificial Sequence
  Description of Artificial Sequence: Synthetic oligonucleotide
  Sense strand starting at position 2631 of SEQ ID NO: 1886527
ggauauaaguuugaugacu

SEQ ID NO: 2416083 - RNA, 19 nt, Artificial Sequence
  Description of Artificial Sequence: Synthetic oligonucleotide
  Antisense strand to SEQ ID NO: 2416082
agucaucaaacuuauaucc

SEQ ID NO: 2416084 - RNA, 19 nt, Artificial Sequence
  Description of Artificial Sequence: Synthetic oligonucleotide
  Sense strand starting at position 2633 of SEQ ID NO: 1886527
auauaaguuugaugacugu

SEQ ID NO: 2416085 - RNA, 19 nt, Artificial Sequence
  Description of Artificial Sequence: Synthetic oligonucleotide
  Antisense strand to SEQ ID NO: 2416084
acagucaucaaacuuauau

SEQ ID NO: 2416086 - RNA, 19 nt, Artificial Sequence
  Description of Artificial Sequence: Synthetic oligonucleotide
  Sense strand starting at position 2637 of SEQ ID NO: 1886527
aaguuugaugacugucuuu

SEQ ID NO: 2416087 - RNA, 19 nt, Artificial Sequence
  Description of Artificial Sequence: Synthetic oligonucleotide
  Antisense strand to SEQ ID NO: 2416086
aaagacagucaucaaacuu

SEQ ID NO: 2416088 - RNA, 19 nt, Artificial Sequence
  Description of Artificial Sequence: Synthetic oligonucleotide
  Sense strand starting at position 2670 of SEQ ID NO: 1886527
acgaucucugucgacagaa

SEQ ID NO: 2416089 - RNA, 19 nt, Artificial Sequence
  Description of Artificial Sequence: Synthetic oligonucleotide
  Antisense strand to SEQ ID NO: 2416088
uucugucgacagagaucgu

SEQ ID NO: 2416090 - RNA, 19 nt, Artificial Sequence
  Description of Artificial Sequence: Synthetic oligonucleotide
  Sense strand starting at position 2680 of SEQ ID NO: 1886527
ucgacagaaccuuagucuu

SEQ ID NO: 2416091 - RNA, 19 nt, Artificial Sequence
  Description of Artificial Sequence: Synthetic oligonucleotide
  Antisense strand to SEQ ID NO: 2416090
aagacuaagguucugucga

SEQ ID NO: 2416092 - RNA, 19 nt, Artificial Sequence
  Description of Artificial Sequence: Synthetic oligonucleotide
  Sense strand starting at position 2683 of SEQ ID NO: 1886527
acagaaccuuagucuuaug

SEQ ID NO: 2416093 - RNA, 19 nt, Artificial Sequence
  Description of Artificial Sequence: Synthetic oligonucleotide
  Antisense strand to SEQ ID NO: 2416092
cauaagacuaagguucugu

SEQ ID NO: 2416094 - RNA, 19 nt, Artificial Sequence
  Description of Artificial Sequence: Synthetic oligonucleotide
  Sense strand starting at position 2753 of SEQ ID NO: 1886527
auauuauaugcauaagggu

SEQ ID NO: 2416095 - RNA, 19 nt, Artificial Sequence
  Description of Artificial Sequence: Synthetic oligonucleotide
  Antisense strand to SEQ ID NO: 2416094
acccuuaugcauauaauau

SEQ ID NO: 2416096 - RNA, 19 nt, Artificial Sequence
  Description of Artificial Sequence: Synthetic oligonucleotide
  Sense strand starting at position 2901 of SEQ ID NO: 1886527
gagauaggcucacuguguu

SEQ ID NO: 2416097 - RNA, 19 nt, Artificial Sequence
  Description of Artificial Sequence: Synthetic oligonucleotide
  Antisense strand to SEQ ID NO: 2416096
aacacagugagccuaucuc

SEQ ID NO: 2416098 - RNA, 19 nt, Artificial Sequence
  Description of Artificial Sequence: Synthetic oligonucleotide
  Sense strand starting at position 3068 of SEQ ID NO: 1886527
gggauccagcaguguacaa

SEQ ID NO: 2416099 - RNA, 19 nt, Artificial Sequence
  Description of Artificial Sequence: Synthetic oligonucleotide
  Antisense strand to SEQ ID NO: 2416098
uuguacacugcuggauccc

SEQ ID NO: 2416100 - RNA, 19 nt, Artificial Sequence
  Description of Artificial Sequence: Synthetic oligonucleotide
  Sense strand starting at position 3072 of SEQ ID NO: 1886527
uccagcaguguacaagaaa

SEQ ID NO: 2416101 - RNA, 19 nt, Artificial Sequence
  Description of Artificial Sequence: Synthetic oligonucleotide
  Antisense strand to SEQ ID NO: 2416100
uuucuuguacacugcugga

SEQ ID NO: 2416102 - RNA, 19 nt, Artificial Sequence
  Description of Artificial Sequence: Synthetic oligonucleotide
  Sense strand starting at position 3214 of SEQ ID NO: 1886527
ccagaugaggucugccaga

SEQ ID NO: 2416103 - RNA, 19 nt, Artificial Sequence
  Description of Artificial Sequence: Synthetic oligonucleotide
  Antisense strand to SEQ ID NO: 2416102
ucuggcagaccucaucugg

SEQ ID NO: 2416104 - RNA, 19 nt, Artificial Sequence
  Description of Artificial Sequence: Synthetic oligonucleotide
  Sense strand starting at position 3253 of SEQ ID NO: 1886527
auaggcuccugugcuagau

SEQ ID NO: 2416105 - RNA, 19 nt, Artificial Sequence
  Description of Artificial Sequence: Synthetic oligonucleotide
  Antisense strand to SEQ ID NO: 2416104
aucuagcacaggagccuau

SEQ ID NO: 2416106 - RNA, 19 nt, Artificial Sequence
  Description of Artificial Sequence: Synthetic oligonucleotide
  Sense strand starting at position 3255 of SEQ ID NO: 1886527
aggcuccugugcuagauaa

SEQ ID NO: 2416107 - RNA, 19 nt, Artificial Sequence
  Description of Artificial Sequence: Synthetic oligonucleotide
  Antisense strand to SEQ ID NO: 2416106
uuaucuagcacaggagccu

SEQ ID NO: 2416108 - RNA, 19 nt, Artificial Sequence
  Description of Artificial Sequence: Synthetic oligonucleotide
  Sense strand starting at position 3257 of SEQ ID NO: 1886527
gcuccugugcuagauaaau

SEQ ID NO: 2416109 - RNA, 19 nt, Artificial Sequence
  Description of Artificial Sequence: Synthetic oligonucleotide
  Antisense strand to SEQ ID NO: 2416108
auuuaucuagcacaggagc

SEQ ID NO: 2416110 - RNA, 19 nt, Artificial Sequence
  Description of Artificial Sequence: Synthetic oligonucleotide
  Sense strand starting at position 3343 of SEQ ID NO: 1886527
ugaccaauuugagacauuc

SEQ ID NO: 2416111 - RNA, 19 nt, Artificial Sequence
  Description of Artificial Sequence: Synthetic oligonucleotide
  Antisense strand to SEQ ID NO: 2416110
gaaugucucaaauugguca

SEQ ID NO: 2416112 - RNA, 19 nt, Artificial Sequence
  Description of Artificial Sequence: Synthetic oligonucleotide
  Sense strand starting at position 3455 of SEQ ID NO: 1886527
gcacaugaauuugggagaa

SEQ ID NO: 2416113 - RNA, 19 nt, Artificial Sequence
  Description of Artificial Sequence: Synthetic oligonucleotide
  Antisense strand to SEQ ID NO: 2416112
uucucccaaauucaugugc

SEQ ID NO: 2416114 - RNA, 19 nt, Artificial Sequence
  Description of Artificial Sequence: Synthetic oligonucleotide
  Sense strand starting at position 3468 of SEQ ID NO: 1886527
ggagaaaccugguugucug

SEQ ID NO: 2416115 - RNA, 19 nt, Artificial Sequence
  Description of Artificial Sequence: Synthetic oligonucleotide
  Antisense strand to SEQ ID NO: 2416114
cagacaaccagguuucucc

SEQ ID NO: 2416116 - RNA, 19 nt, Artificial Sequence
  Description of Artificial Sequence: Synthetic oligonucleotide
  Sense strand starting at position 3475 of SEQ ID NO: 1886527
ccugguugucugcaggaga

SEQ ID NO: 2416117 - RNA, 19 nt, Artificial Sequence
  Description of Artificial Sequence: Synthetic oligonucleotide
  Antisense strand to SEQ ID NO: 2416116
ucuccugcagacaaccagg

SEQ ID NO: 2416118 - RNA, 19 nt, Artificial Sequence
  Description of Artificial Sequence: Synthetic oligonucleotide
  Sense strand starting at position 3536 of SEQ ID NO: 1886527
uucuguuuacgugcaguaa

SEQ ID NO: 2416119 - RNA, 19 nt, Artificial Sequence
  Description of Artificial Sequence: Synthetic oligonucleotide
  Antisense strand to SEQ ID NO: 2416118
uuacugcacguaaacagaa

SEQ ID NO: 2416120 - RNA, 19 nt, Artificial Sequence
  Description of Artificial Sequence: Synthetic oligonucleotide
  Sense strand starting at position 3537 of SEQ ID NO: 1886527
ucuguuuacgugcaguaaa

SEQ ID NO: 2416121 - RNA, 19 nt, Artificial Sequence
  Description of Artificial Sequence: Synthetic oligonucleotide
  Antisense strand to SEQ ID NO: 2416120
uuuacugcacguaaacaga

SEQ ID NO: 2416122 - RNA, 19 nt, Artificial Sequence
  Description of Artificial Sequence: Synthetic oligonucleotide
  Sense strand starting at position 3558 of SEQ ID NO: 1886527
gcaaacaaaugguauagau

SEQ ID NO: 2416123 - RNA, 19 nt, Artificial Sequence
  Description of Artificial Sequence: Synthetic oligonucleotide
  Antisense strand to SEQ ID NO: 2416122
aucuauaccauuuguuugc

SEQ ID NO: 2416124 - RNA, 19 nt, Artificial Sequence
  Description of Artificial Sequence: Synthetic oligonucleotide
  Sense strand starting at position 139 of SEQ ID NO: 1886528
agugacauccgagauguag

SEQ ID NO: 2416125 - RNA, 19 nt, Artificial Sequence
  Description of Artificial Sequence: Synthetic oligonucleotide
  Antisense strand to SEQ ID NO: 2416124
cuacaucucggaugucacu

SEQ ID NO: 2416126 - RNA, 19 nt, Artificial Sequence
  Description of Artificial Sequence: Synthetic oligonucleotide
  Sense strand starting at position 1227 of SEQ ID NO: 1886528
ggcagaugugguggugaca

SEQ ID NO: 2416127 - RNA, 19 nt, Artificial Sequence
  Description of Artificial Sequence: Synthetic oligonucleotide
  Antisense strand to SEQ ID NO: 2416126
ugucaccaccacaucugcc

SEQ ID NO: 2416128 - RNA, 19 nt, Artificial Sequence
  Description of Artificial Sequence: Synthetic oligonucleotide
  Sense strand starting at position 2028 of SEQ ID NO: 1886528
acagguauuugcuggauga

SEQ ID NO: 2416129 - RNA, 19 nt, Artificial Sequence
  Description of Artificial Sequence: Synthetic oligonucleotide
  Antisense strand to SEQ ID NO: 2416128
ucauccagcaaauaccugu

SEQ ID NO: 2416130 - RNA, 19 nt, Artificial Sequence
  Description of Artificial Sequence: Synthetic oligonucleotide
  Sense strand starting at position 2061 of SEQ ID NO: 1886528
ggugguuuccucugagccu

SEQ ID NO: 2416131 - RNA, 19 nt, Artificial Sequence
  Description of Artificial Sequence: Synthetic oligonucleotide
  Antisense strand to SEQ ID NO: 2416130
aggcucagaggaaaccacc

SEQ ID NO: 2416132 - RNA, 19 nt, Artificial Sequence
  Description of Artificial Sequence: Synthetic oligonucleotide
  Sense strand starting at position 2143 of SEQ ID NO: 1886528
ggcuccuugugacaagagu

SEQ ID NO: 2416133 - RNA, 19 nt, Artificial Sequence
  Description of Artificial Sequence: Synthetic oligonucleotide
  Antisense strand to SEQ ID NO: 2416132
acucuugucacaaggagcc

SEQ ID NO: 2416134 - RNA, 19 nt, Artificial Sequence
  Description of Artificial Sequence: Synthetic oligonucleotide
  Sense strand starting at position 2415 of SEQ ID NO: 1886528
uccagaucugccugcauau

SEQ ID NO: 2416135 - RNA, 19 nt, Artificial Sequence
  Description of Artificial Sequence: Synthetic oligonucleotide
  Antisense strand to SEQ ID NO: 2416134
auaugcaggcagaucugga

SEQ ID NO: 2416136 - RNA, 19 nt, Artificial Sequence
  Description of Artificial Sequence: Synthetic oligonucleotide
  Sense strand starting at position 2581 of SEQ ID NO: 1886528
cuggaugguccaggugaaa

SEQ ID NO: 2416137 - RNA, 19 nt, Artificial Sequence
  Description of Artificial Sequence: Synthetic oligonucleotide
  Antisense strand to SEQ ID NO: 2416136
uuucaccuggaccauccag

SEQ ID NO: 2416138 - RNA, 19 nt, Artificial Sequence
  Description of Artificial Sequence: Synthetic oligonucleotide
  Sense strand starting at position 2593 of SEQ ID NO: 1886528
ggugaaacgcuccagggau

SEQ ID NO: 2416139 - RNA, 19 nt, Artificial Sequence
  Description of Artificial Sequence: Synthetic oligonucleotide
  Antisense strand to SEQ ID NO: 2416138
aucccuggagcguuucacc

SEQ ID NO: 2416140 - RNA, 19 nt, Artificial Sequence
  Description of Artificial Sequence: Synthetic oligonucleotide
  Sense strand starting at position 2594 of SEQ ID NO: 1886528
gugaaacgcuccagggaug

SEQ ID NO: 2416141 - RNA, 19 nt, Artificial Sequence
  Description of Artificial Sequence: Synthetic oligonucleotide
  Antisense strand to SEQ ID NO: 2416140
caucccuggagcguuucac

SEQ ID NO: 2416142 - RNA, 19 nt, Artificial Sequence
  Description of Artificial Sequence: Synthetic oligonucleotide
  Sense strand starting at position 3312 of SEQ ID NO: 1886528
gugugucagggaggucauu

SEQ ID NO: 2416143 - RNA, 19 nt, Artificial Sequence
  Description of Artificial Sequence: Synthetic oligonucleotide
  Antisense strand to SEQ ID NO: 2416142
aaugaccucccugacacac

SEQ ID NO: 2416144 - RNA, 19 nt, Artificial Sequence
  Description of Artificial Sequence: Synthetic oligonucleotide
  Sense strand starting at position 3321 of SEQ ID NO: 1886528
ggaggucauucgagagcug

SEQ ID NO: 2416145 - RNA, 19 nt, Artificial Sequence
  Description of Artificial Sequence: Synthetic oligonucleotide
  Antisense strand to SEQ ID NO: 2416144
cagcucucgaaugaccucc

SEQ ID NO: 2416146 - RNA, 19 nt, Artificial Sequence
  Description of Artificial Sequence: Synthetic oligonucleotide
  Sense strand starting at position 3322 of SEQ ID NO: 1886528
gaggucauucgagagcugu

SEQ ID NO: 2416147 - RNA, 19 nt, Artificial Sequence
  Description of Artificial Sequence: Synthetic oligonucleotide
  Antisense strand to SEQ ID NO: 2416146
acagcucucgaaugaccuc

SEQ ID NO: 2416148 - RNA, 19 nt, Artificial Sequence
  Description of Artificial Sequence: Synthetic oligonucleotide
  Sense strand starting at position 2253 of SEQ ID NO: 1886531
gaccacaguuuggacaaau

SEQ ID NO: 2416149 - RNA, 19 nt, Artificial Sequence
  Description of Artificial Sequence: Synthetic oligonucleotide
  Antisense strand to SEQ ID NO: 2416148
auuuguccaaacugugguc

SEQ ID NO: 2416150 - RNA, 19 nt, Artificial Sequence
  Description of Artificial Sequence: Synthetic oligonucleotide
  Sense strand starting at position 1443 of SEQ ID NO: 1886532
cggagggugucagucagaa

SEQ ID NO: 2416151 - RNA, 19 nt, Artificial Sequence
  Description of Artificial Sequence: Synthetic oligonucleotide
  Antisense strand to SEQ ID NO: 2416150
uucugacugacacccuccg

SEQ ID NO: 2416152 - RNA, 19 nt, Artificial Sequence
  Description of Artificial Sequence: Synthetic oligonucleotide
  Sense strand starting at position 1445 of SEQ ID NO: 1886532
gagggugucagucagaaca

SEQ ID NO: 2416153 - RNA, 19 nt, Artificial Sequence
  Description of Artificial Sequence: Synthetic oligonucleotide
  Antisense strand to SEQ ID NO: 2416152
uguucugacugacacccuc

SEQ ID NO: 2416154 - RNA, 19 nt, Artificial Sequence
  Description of Artificial Sequence: Synthetic oligonucleotide
  Sense strand starting at position 1447 of SEQ ID NO: 1886532
gggugucagucagaacagu

SEQ ID NO: 2416155 - RNA, 19 nt, Artificial Sequence
  Description of Artificial Sequence: Synthetic oligonucleotide
  Antisense strand to SEQ ID NO: 2416154
acuguucugacugacaccc

SEQ ID NO: 2416156 - RNA, 19 nt, Artificial Sequence
  Description of Artificial Sequence: Synthetic oligonucleotide
  Sense strand starting at position 1453 of SEQ ID NO: 1886532
cagucagaacagugucaga

SEQ ID NO: 2416157 - RNA, 19 nt, Artificial Sequence
  Description of Artificial Sequence: Synthetic oligonucleotide
  Antisense strand to SEQ ID NO: 2416156
ucugacacuguucugacug

SEQ ID NO: 2416158 - RNA, 19 nt, Artificial Sequence
  Description of Artificial Sequence: Synthetic oligonucleotide
  Sense strand starting at position 2253 of SEQ ID NO: 1886532
gaccacgguuuggacaaau

SEQ ID NO: 2416159 - RNA, 19 nt, Artificial Sequence
  Description of Artificial Sequence: Synthetic oligonucleotide
  Antisense strand to SEQ ID NO: 2416158
auuuguccaaaccgugguc

SEQ ID NO: 2416160 - RNA, 19 nt, Artificial Sequence
  Description of Artificial Sequence: Synthetic oligonucleotide
  Sense strand starting at position 175 of SEQ ID NO: 1886533
caggcugucguguuacgua

SEQ ID NO: 2416161 - RNA, 19 nt, Artificial Sequence
  Description of Artificial Sequence: Synthetic oligonucleotide
  Antisense strand to SEQ ID NO: 2416160
uacguaacacgacagccug

SEQ ID NO: 2416162 - RNA, 19 nt, Artificial Sequence
  Description of Artificial Sequence: Synthetic oligonucleotide
  Sense strand starting at position 178 of SEQ ID NO: 1886533
gcugucguguuacguagaa

SEQ ID NO: 2416163 - RNA, 19 nt, Artificial Sequence
  Description of Artificial Sequence: Synthetic oligonucleotide
  Antisense strand to SEQ ID NO: 2416162
uucuacguaacacgacagc

SEQ ID NO: 2416164 - RNA, 19 nt, Artificial Sequence
  Description of Artificial Sequence: Synthetic oligonucleotide
  Sense strand starting at position 180 of SEQ ID NO: 1886533
ugucguguuacguagaauu

SEQ ID NO: 2416165 - RNA, 19 nt, Artificial Sequence
  Description of Artificial Sequence: Synthetic oligonucleotide
  Antisense strand to SEQ ID NO: 2416164
aauucuacguaacacgaca

SEQ ID NO: 2416166 - RNA, 19 nt, Artificial Sequence
  Description of Artificial Sequence: Synthetic oligonucleotide
  Sense strand starting at position 182 of SEQ ID NO: 1886533
ucguguuacguagaauuug

SEQ ID NO: 2416167 - RNA, 19 nt, Artificial Sequence
  Description of Artificial Sequence: Synthetic oligonucleotide
  Antisense strand to SEQ ID NO: 2416166
caaauucuacguaacacga

SEQ ID NO: 2416168 - RNA, 19 nt, Artificial Sequence
  Description of Artificial Sequence: Synthetic oligonucleotide
  Sense strand starting at position 271 of SEQ ID NO: 1886533
gggagguugggcuguccaa

SEQ ID NO: 2416169 - RNA, 19 nt, Artificial Sequence
  Description of Artificial Sequence: Synthetic oligonucleotide
  Antisense strand to SEQ ID NO: 2416168
uuggacagcccaaccuccc

SEQ ID NO: 2416170 - RNA, 19 nt, Artificial Sequence
  Description of Artificial Sequence: Synthetic oligonucleotide
  Sense strand starting at position 1791 of SEQ ID NO: 1886533
gcuggagaccggugggaau

SEQ ID NO: 2416171 - RNA, 19 nt, Artificial Sequence
  Description of Artificial Sequence: Synthetic oligonucleotide
  Antisense strand to SEQ ID NO: 2416170
auucccaccggucuccagc

SEQ ID NO: 2416172 - RNA, 19 nt, Artificial Sequence
  Description of Artificial Sequence: Synthetic oligonucleotide
  Sense strand starting at position 831 of SEQ ID NO: 1886534
gggucaacuggccauguuu

SEQ ID NO: 2416173 - RNA, 19 nt, Artificial Sequence
  Description of Artificial Sequence: Synthetic oligonucleotide
  Antisense strand to SEQ ID NO: 2416172
aaacauggccaguugaccc

SEQ ID NO: 2416174 - RNA, 19 nt, Artificial Sequence
  Description of Artificial Sequence: Synthetic oligonucleotide
  Sense strand starting at position 840 of SEQ ID NO: 1886534
ggccauguuugccauggaa

SEQ ID NO: 2416175 - RNA, 19 nt, Artificial Sequence
  Description of Artificial Sequence: Synthetic oligonucleotide
  Antisense strand to SEQ ID NO: 2416174
uuccauggcaaacauggcc

SEQ ID NO: 2416176 - RNA, 19 nt, Artificial Sequence
  Description of Artificial Sequence: Synthetic oligonucleotide
  Sense strand starting at position 2341 of SEQ ID NO: 1886534
ccaguuucugcucaccaga

SEQ ID NO: 2416177 - RNA, 19 nt, Artificial Sequence
  Description of Artificial Sequence: Synthetic oligonucleotide
  Antisense strand to SEQ ID NO: 2416176
ucuggugagcagaaacugg

SEQ ID NO: 2416178 - RNA, 19 nt, Artificial Sequence
  Description of Artificial Sequence: Synthetic oligonucleotide
  Sense strand starting at position 2987 of SEQ ID NO: 1886534
gcaccauuaugagcucuga

SEQ ID NO: 2416179 - RNA, 19 nt, Artificial Sequence
  Description of Artificial Sequence: Synthetic oligonucleotide
  Antisense strand to SEQ ID NO: 2416178
ucagagcucauaauggugc

SEQ ID NO: 2416180 - RNA, 19 nt, Artificial Sequence
  Description of Artificial Sequence: Synthetic oligonucleotide
  Sense strand starting at position 2991 of SEQ ID NO: 1886534
cauuaugagcucugaggag

SEQ ID NO: 2416181 - RNA, 19 nt, Artificial Sequence
  Description of Artificial Sequence: Synthetic oligonucleotide
  Antisense strand to SEQ ID NO: 2416180
cuccucagagcucauaaug

SEQ ID NO: 2416182 - RNA, 19 nt, Artificial Sequence
  Description of Artificial Sequence: Synthetic oligonucleotide
  Sense strand starting at position 3851 of SEQ ID NO: 1886534
ggcaucuuguugccacaga

SEQ ID NO: 2416183 - RNA, 19 nt, Artificial Sequence
  Description of Artificial Sequence: Synthetic oligonucleotide
  Antisense strand to SEQ ID NO: 2416182
ucuguggcaacaagaugcc

SEQ ID NO: 2416184 - RNA, 19 nt, Artificial Sequence
  Description of Artificial Sequence: Synthetic oligonucleotide
  Sense strand starting at position 15 of SEQ ID NO: 1886535
acaggacucggccaauauu

SEQ ID NO: 2416185 - RNA, 19 nt, Artificial Sequence
  Description of Artificial Sequence: Synthetic oligonucleotide
  Antisense strand to SEQ ID NO: 2416184
aauauuggccgaguccugu

SEQ ID NO: 2416186 - RNA, 19 nt, Artificial Sequence
  Description of Artificial Sequence: Synthetic oligonucleotide
  Sense strand starting at position 23 of SEQ ID NO: 1886535
cggccaauauuugagaaac

SEQ ID NO: 2416187 - RNA, 19 nt, Artificial Sequence
  Description of Artificial Sequence: Synthetic oligonucleotide
  Antisense strand to SEQ ID NO: 2416186
guuucucaaauauuggccg

SEQ ID NO: 2416188 - RNA, 19 nt, Artificial Sequence
  Description of Artificial Sequence: Synthetic oligonucleotide
  Sense strand starting at position 153 of SEQ ID NO: 1886535
caggcucuccuggagacau

SEQ ID NO: 2416189 - RNA, 19 nt, Artificial Sequence
  Description of Artificial Sequence: Synthetic oligonucleotide
  Antisense strand to SEQ ID NO: 2416188
augucuccaggagagccug

SEQ ID NO: 2416190 - RNA, 19 nt, Artificial Sequence
  Description of Artificial Sequence: Synthetic oligonucleotide
  Sense strand starting at position 165 of SEQ ID NO: 1886535
gagacauguuacccaguca

SEQ ID NO: 2416191 - RNA, 19 nt, Artificial Sequence
  Description of Artificial Sequence: Synthetic oligonucleotide
  Antisense strand to SEQ ID NO: 2416190
ugacuggguaacaugucuc

SEQ ID NO: 2416192 - RNA, 19 nt, Artificial Sequence
  Description of Artificial Sequence: Synthetic oligonucleotide
  Sense strand starting at position 496 of SEQ ID NO: 1886535
guugaaaugcuguggacac

SEQ ID NO: 2416193 - RNA, 19 nt, Artificial Sequence
  Description of Artificial Sequence: Synthetic oligonucleotide
  Antisense strand to SEQ ID NO: 2416192
guguccacagcauuucaac

SEQ ID NO: 2416194 - RNA, 19 nt, Artificial Sequence
  Description of Artificial Sequence: Synthetic oligonucleotide
  Sense strand starting at position 497 of SEQ ID NO: 1886535
uugaaaugcuguggacacu

SEQ ID NO: 2416195 - RNA, 19 nt, Artificial Sequence
  Description of Artificial Sequence: Synthetic oligonucleotide
  Antisense strand to SEQ ID NO: 2416194
aguguccacagcauuucaa

SEQ ID NO: 2416196 - RNA, 19 nt, Artificial Sequence
  Description of Artificial Sequence: Synthetic oligonucleotide
  Sense strand starting at position 1314 of SEQ ID NO: 1886535
gaagaaugagcaugcacau

SEQ ID NO: 2416197 - RNA, 19 nt, Artificial Sequence
  Description of Artificial Sequence: Synthetic oligonucleotide
  Antisense strand to SEQ ID NO: 2416196
augugcaugcucauucuuc

SEQ ID NO: 2416198 - RNA, 19 nt, Artificial Sequence
  Description of Artificial Sequence: Synthetic oligonucleotide
  Sense strand starting at position 1608 of SEQ ID NO: 1886535
uggccagaguguucccaga

SEQ ID NO: 2416199 - RNA, 19 nt, Artificial Sequence
  Description of Artificial Sequence: Synthetic oligonucleotide
  Antisense strand to SEQ ID NO: 2416198
ucugggaacacucuggcca

SEQ ID NO: 2416200 - RNA, 19 nt, Artificial Sequence
  Description of Artificial Sequence: Synthetic oligonucleotide
  Sense strand starting at position 1610 of SEQ ID NO: 1886535
gccagaguguucccagaug

SEQ ID NO: 2416201 - RNA, 19 nt, Artificial Sequence
  Description of Artificial Sequence: Synthetic oligonucleotide
  Antisense strand to SEQ ID NO: 2416200
caucugggaacacucuggc

SEQ ID NO: 2416202 - RNA, 19 nt, Artificial Sequence
  Description of Artificial Sequence: Synthetic oligonucleotide
  Sense strand starting at position 2163 of SEQ ID NO: 1886535
uggaguccuucccugagaa

SEQ ID NO: 2416203 - RNA, 19 nt, Artificial Sequence
  Description of Artificial Sequence: Synthetic oligonucleotide
  Antisense strand to SEQ ID NO: 2416202
uucucagggaaggacucca

SEQ ID NO: 2416204 - RNA, 19 nt, Artificial Sequence
  Description of Artificial Sequence: Synthetic oligonucleotide
  Sense strand starting at position 2164 of SEQ ID NO: 1886535
ggaguccuucccugagaau

SEQ ID NO: 2416205 - RNA, 19 nt, Artificial Sequence
  Description of Artificial Sequence: Synthetic oligonucleotide
  Antisense strand to SEQ ID NO: 2416204
auucucagggaaggacucc

SEQ ID NO: 2416206 - RNA, 19 nt, Artificial Sequence
  Description of Artificial Sequence: Synthetic oligonucleotide
  Sense strand starting at position 2167 of SEQ ID NO: 1886535
guccuucccugagaaugaa

SEQ ID NO: 2416207 - RNA, 19 nt, Artificial Sequence
  Description of Artificial Sequence: Synthetic oligonucleotide
  Antisense strand to SEQ ID NO: 2416206
uucauucucagggaaggac

SEQ ID NO: 2416208 - RNA, 19 nt, Artificial Sequence
  Description of Artificial Sequence: Synthetic oligonucleotide
  Sense strand starting at position 2183 of SEQ ID NO: 1886535
gaagaauguucccuccuga

SEQ ID NO: 2416209 - RNA, 19 nt, Artificial Sequence
  Description of Artificial Sequence: Synthetic oligonucleotide
  Antisense strand to SEQ ID NO: 2416208
ucaggagggaacauucuuc

SEQ ID NO: 2416210 - RNA, 19 nt, Artificial Sequence
  Description of Artificial Sequence: Synthetic oligonucleotide
  Sense strand starting at position 2322 of SEQ ID NO: 1886535
gcagggugaguuuaggaga

SEQ ID NO: 2416211 - RNA, 19 nt, Artificial Sequence
  Description of Artificial Sequence: Synthetic oligonucleotide
  Antisense strand to SEQ ID NO: 2416210
ucuccuaaacucacccugc

SEQ ID NO: 2416212 - RNA, 19 nt, Artificial Sequence
  Description of Artificial Sequence: Synthetic oligonucleotide
  Sense strand starting at position 2325 of SEQ ID NO: 1886535
gggugaguuuaggagaaga

SEQ ID NO: 2416213 - RNA, 19 nt, Artificial Sequence
  Description of Artificial Sequence: Synthetic oligonucleotide
  Antisense strand to SEQ ID NO: 2416212
ucuucuccuaaacucaccc

SEQ ID NO: 2416214 - RNA, 19 nt, Artificial Sequence
  Description of Artificial Sequence: Synthetic oligonucleotide
  Sense strand starting at position 2434 of SEQ ID NO: 1886535
cccagugaccuugaacauu

SEQ ID NO: 2416215 - RNA, 19 nt, Artificial Sequence
  Description of Artificial Sequence: Synthetic oligonucleotide
  Antisense strand to SEQ ID NO: 2416214
aauguucaaggucacuggg

SEQ ID NO: 2416216 - RNA, 19 nt, Artificial Sequence
  Description of Artificial Sequence: Synthetic oligonucleotide
  Sense strand starting at position 2555 of SEQ ID NO: 1886535
ggccgcuuucugcuuuaaa

SEQ ID NO: 2416217 - RNA, 19 nt, Artificial Sequence
  Description of Artificial Sequence: Synthetic oligonucleotide
  Antisense strand to SEQ ID NO: 2416216
uuuaaagcagaaagcggcc

SEQ ID NO: 2416218 - RNA, 19 nt, Artificial Sequence
  Description of Artificial Sequence: Synthetic oligonucleotide
  Sense strand starting at position 2608 of SEQ ID NO: 1886535
ggugccucccggcagagau

SEQ ID NO: 2416219 - RNA, 19 nt, Artificial Sequence
  Description of Artificial Sequence: Synthetic oligonucleotide
  Antisense strand to SEQ ID NO: 2416218
aucucugccgggaggcacc

SEQ ID NO: 2416220 - RNA, 19 nt, Artificial Sequence
  Description of Artificial Sequence: Synthetic oligonucleotide
  Sense strand starting at position 2813 of SEQ ID NO: 1886535
ugugauuuguggucguggu

SEQ ID NO: 2416221 - RNA, 19 nt, Artificial Sequence
  Description of Artificial Sequence: Synthetic oligonucleotide
  Antisense strand to SEQ ID NO: 2416220
accacgaccacaaaucaca

SEQ ID NO: 2416222 - RNA, 19 nt, Artificial Sequence
  Description of Artificial Sequence: Synthetic oligonucleotide
  Sense strand starting at position 2814 of SEQ ID NO: 1886535
gugauuuguggucgugguu

SEQ ID NO: 2416223 - RNA, 19 nt, Artificial Sequence
  Description of Artificial Sequence: Synthetic oligonucleotide
  Antisense strand to SEQ ID NO: 2416222
aaccacgaccacaaaucac

SEQ ID NO: 2416224 - RNA, 19 nt, Artificial Sequence
  Description of Artificial Sequence: Synthetic oligonucleotide
  Sense strand starting at position 2830 of SEQ ID NO: 1886535
guuucugugucucaggaca

SEQ ID NO: 2416225 - RNA, 19 nt, Artificial Sequence
  Description of Artificial Sequence: Synthetic oligonucleotide
  Antisense strand to SEQ ID NO: 2416224
uguccugagacacagaaac

SEQ ID NO: 2416226 - RNA, 19 nt, Artificial Sequence
  Description of Artificial Sequence: Synthetic oligonucleotide
  Sense strand starting at position 3260 of SEQ ID NO: 1886535
gggaaugccagaugugagu

SEQ ID NO: 2416227 - RNA, 19 nt, Artificial Sequence
  Description of Artificial Sequence: Synthetic oligonucleotide
  Antisense strand to SEQ ID NO: 2416226
acucacaucuggcauuccc

SEQ ID NO: 2416228 - RNA, 19 nt, Artificial Sequence
  Description of Artificial Sequence: Synthetic oligonucleotide
  Sense strand starting at position 3471 of SEQ ID NO: 1886535
cccagcugugaguggauau

SEQ ID NO: 2416229 - RNA, 19 nt, Artificial Sequence
  Description of Artificial Sequence: Synthetic oligonucleotide
  Antisense strand to SEQ ID NO: 2416228
auauccacucacagcuggg

SEQ ID NO: 2416230 - RNA, 19 nt, Artificial Sequence
  Description of Artificial Sequence: Synthetic oligonucleotide
  Sense strand starting at position 3482 of SEQ ID NO: 1886535
guggauaucuguccaccau

SEQ ID NO: 2416231 - RNA, 19 nt, Artificial Sequence
  Description of Artificial Sequence: Synthetic oligonucleotide
  Antisense strand to SEQ ID NO: 2416230
augguggacagauauccac

SEQ ID NO: 2416232 - RNA, 19 nt, Artificial Sequence
  Description of Artificial Sequence: Synthetic oligonucleotide
  Sense strand starting at position 3483 of SEQ ID NO: 1886535
uggauaucuguccaccaug

SEQ ID NO: 2416233 - RNA, 19 nt, Artificial Sequence
  Description of Artificial Sequence: Synthetic oligonucleotide
  Antisense strand to SEQ ID NO: 2416232
caugguggacagauaucca

SEQ ID NO: 2416234 - RNA, 19 nt, Artificial Sequence
  Description of Artificial Sequence: Synthetic oligonucleotide
  Sense strand starting at position 3486 of SEQ ID NO: 1886535
auaucuguccaccauguau

SEQ ID NO: 2416235 - RNA, 19 nt, Artificial Sequence
  Description of Artificial Sequence: Synthetic oligonucleotide
  Antisense strand to SEQ ID NO: 2416234
auacaugguggacagauau

SEQ ID NO: 2416236 - RNA, 19 nt, Artificial Sequence
  Description of Artificial Sequence: Synthetic oligonucleotide
  Sense strand starting at position 3537 of SEQ ID NO: 1886535
acagucuguccuggagaaa

SEQ ID NO: 2416237 - RNA, 19 nt, Artificial Sequence
  Description of Artificial Sequence: Synthetic oligonucleotide
  Antisense strand to SEQ ID NO: 2416236
uuucuccaggacagacugu

SEQ ID NO: 2416238 - RNA, 19 nt, Artificial Sequence
  Description of Artificial Sequence: Synthetic oligonucleotide
  Sense strand starting at position 3538 of SEQ ID NO: 1886535
cagucuguccuggagaaac

SEQ ID NO: 2416239 - RNA, 19 nt, Artificial Sequence
  Description of Artificial Sequence: Synthetic oligonucleotide
  Antisense strand to SEQ ID NO: 2416238
guuucuccaggacagacug

SEQ ID NO: 2416240 - RNA, 19 nt, Artificial Sequence
  Description of Artificial Sequence: Synthetic oligonucleotide
  Sense strand starting at position 3540 of SEQ ID NO: 1886535
gucuguccuggagaaacuu

SEQ ID NO: 2416241 - RNA, 19 nt, Artificial Sequence
  Description of Artificial Sequence: Synthetic oligonucleotide
  Antisense strand to SEQ ID NO: 2416240
aaguuucuccaggacagac

SEQ ID NO: 2416242 - RNA, 19 nt, Artificial Sequence
  Description of Artificial Sequence: Synthetic oligonucleotide
  Sense strand starting at position 3656 of SEQ ID NO: 1886535
uggauaguuuggagccgua

SEQ ID NO: 2416243 - RNA, 19 nt, Artificial Sequence
  Description of Artificial Sequence: Synthetic oligonucleotide
  Antisense strand to SEQ ID NO: 2416242
uacggcuccaaacuaucca

SEQ ID NO: 2416244 - RNA, 19 nt, Artificial Sequence
  Description of Artificial Sequence: Synthetic oligonucleotide
  Sense strand starting at position 3716 of SEQ ID NO: 1886535
gugcuuccuccagguguga

SEQ ID NO: 2416245 - RNA, 19 nt, Artificial Sequence
  Description of Artificial Sequence: Synthetic oligonucleotide
  Antisense strand to SEQ ID NO: 2416244
ucacaccuggaggaagcac

SEQ ID NO: 2416246 - RNA, 19 nt, Artificial Sequence
  Description of Artificial Sequence: Synthetic oligonucleotide
  Sense strand starting at position 3807 of SEQ ID NO: 1886535
aguggcugucccuguugaa

SEQ ID NO: 2416247 - RNA, 19 nt, Artificial Sequence
  Description of Artificial Sequence: Synthetic oligonucleotide
  Antisense strand to SEQ ID NO: 2416246
uucaacagggacagccacu

SEQ ID NO: 2416248 - RNA, 19 nt, Artificial Sequence
  Description of Artificial Sequence: Synthetic oligonucleotide
  Sense strand starting at position 3816 of SEQ ID NO: 1886535
cccuguugaaggcagauau

SEQ ID NO: 2416249 - RNA, 19 nt, Artificial Sequence
  Description of Artificial Sequence: Synthetic oligonucleotide
  Antisense strand to SEQ ID NO: 2416248
auaucugccuucaacaggg

SEQ ID NO: 2416250 - RNA, 19 nt, Artificial Sequence
  Description of Artificial Sequence: Synthetic oligonucleotide
  Sense strand starting at position 3827 of SEQ ID NO: 1886535
gcagauaugccugggcuca

SEQ ID NO: 2416251 - RNA, 19 nt, Artificial Sequence
  Description of Artificial Sequence: Synthetic oligonucleotide
  Antisense strand to SEQ ID NO: 2416250
ugagcccaggcauaucugc

SEQ ID NO: 2416252 - RNA, 19 nt, Artificial Sequence
  Description of Artificial Sequence: Synthetic oligonucleotide
  Sense strand starting at position 3828 of SEQ ID NO: 1886535
cagauaugccugggcucaa

SEQ ID NO: 2416253 - RNA, 19 nt, Artificial Sequence
  Description of Artificial Sequence: Synthetic oligonucleotide
  Antisense strand to SEQ ID NO: 2416252
uugagcccaggcauaucug

SEQ ID NO: 2416254 - RNA, 19 nt, Artificial Sequence
  Description of Artificial Sequence: Synthetic oligonucleotide
  Sense strand starting at position 3868 of SEQ ID NO: 1886535
gguacacucaguuguguga

SEQ ID NO: 2416255 - RNA, 19 nt, Artificial Sequence
  Description of Artificial Sequence: Synthetic oligonucleotide
  Antisense strand to SEQ ID NO: 2416254
ucacacaacugaguguacc

SEQ ID NO: 2416256 - RNA, 19 nt, Artificial Sequence
  Description of Artificial Sequence: Synthetic oligonucleotide
  Sense strand starting at position 3983 of SEQ ID NO: 1886535
uugccuguaggcuguuaua

SEQ ID NO: 2416257 - RNA, 19 nt, Artificial Sequence
  Description of Artificial Sequence: Synthetic oligonucleotide
  Antisense strand to SEQ ID NO: 2416256
uauaacagccuacaggcaa

SEQ ID NO: 2416258 - RNA, 19 nt, Artificial Sequence
  Description of Artificial Sequence: Synthetic oligonucleotide
  Sense strand starting at position 12 of SEQ ID NO: 1886536
ccagauguccuugggugga

SEQ ID NO: 2416259 - RNA, 19 nt, Artificial Sequence
  Description of Artificial Sequence: Synthetic oligonucleotide
  Antisense strand to SEQ ID NO: 2416258
uccacccaaggacaucugg

SEQ ID NO: 2416260 - RNA, 19 nt, Artificial Sequence
  Description of Artificial Sequence: Synthetic oligonucleotide
  Sense strand starting at position 184 of SEQ ID NO: 1886536
gcugcaucccugugacaug

SEQ ID NO: 2416261 - RNA, 19 nt, Artificial Sequence
  Description of Artificial Sequence: Synthetic oligonucleotide
  Antisense strand to SEQ ID NO: 2416260
caugucacagggaugcagc

SEQ ID NO: 2416262 - RNA, 19 nt, Artificial Sequence
  Description of Artificial Sequence: Synthetic oligonucleotide
  Sense strand starting at position 348 of SEQ ID NO: 1886536
ccuacagugucauacuuua

SEQ ID NO: 2416263 - RNA, 19 nt, Artificial Sequence
  Description of Artificial Sequence: Synthetic oligonucleotide
  Antisense strand to SEQ ID NO: 2416262
uaaaguaugacacuguagg

SEQ ID NO: 2416264 - RNA, 19 nt, Artificial Sequence
  Description of Artificial Sequence: Synthetic oligonucleotide
  Sense strand starting at position 369 of SEQ ID NO: 1886536
acauuaauuugaugugcag

SEQ ID NO: 2416265 - RNA, 19 nt, Artificial Sequence
  Description of Artificial Sequence: Synthetic oligonucleotide
  Antisense strand to SEQ ID NO: 2416264
cugcacaucaaauuaaugu

SEQ ID NO: 2416266 - RNA, 19 nt, Artificial Sequence
  Description of Artificial Sequence: Synthetic oligonucleotide
  Sense strand starting at position 1229 of SEQ ID NO: 1886536
aguagcuauuugugggcua

SEQ ID NO: 2416267 - RNA, 19 nt, Artificial Sequence
  Description of Artificial Sequence: Synthetic oligonucleotide
  Antisense strand to SEQ ID NO: 2416266
uagcccacaaauagcuacu

SEQ ID NO: 2416268 - RNA, 19 nt, Artificial Sequence
  Description of Artificial Sequence: Synthetic oligonucleotide
  Sense strand starting at position 1230 of SEQ ID NO: 1886536
guagcuauuugugggcuaa

SEQ ID NO: 2416269 - RNA, 19 nt, Artificial Sequence
  Description of Artificial Sequence: Synthetic oligonucleotide
  Antisense strand to SEQ ID NO: 2416268
uuagcccacaaauagcuac

SEQ ID NO: 2416270 - RNA, 19 nt, Artificial Sequence
  Description of Artificial Sequence: Synthetic oligonucleotide
  Sense strand starting at position 1231 of SEQ ID NO: 1886536
uagcuauuugugggcuaaa

SEQ ID NO: 2416271 - RNA, 19 nt, Artificial Sequence
  Description of Artificial Sequence: Synthetic oligonucleotide
  Antisense strand to SEQ ID NO: 2416270
uuuagcccacaaauagcua

SEQ ID NO: 2416272 - RNA, 19 nt, Artificial Sequence
  Description of Artificial Sequence: Synthetic oligonucleotide
  Sense strand starting at position 1232 of SEQ ID NO: 1886536
agcuauuugugggcuaaau

SEQ ID NO: 2416273 - RNA, 19 nt, Artificial Sequence
  Description of Artificial Sequence: Synthetic oligonucleotide
  Antisense strand to SEQ ID NO: 2416272
auuuagcccacaaauagcu

SEQ ID NO: 2416274 - RNA, 19 nt, Artificial Sequence
  Description of Artificial Sequence: Synthetic oligonucleotide
  Sense strand starting at position 1259 of SEQ ID NO: 1886536
ugauuaaauuccugugacu

SEQ ID NO: 2416275 - RNA, 19 nt, Artificial Sequence
  Description of Artificial Sequence: Synthetic oligonucleotide
  Antisense strand to SEQ ID NO: 2416274
agucacaggaauuuaauca

SEQ ID NO: 2416276 - RNA, 19 nt, Artificial Sequence
  Description of Artificial Sequence: Synthetic oligonucleotide
  Sense strand starting at position 1355 of SEQ ID NO: 1886536
ggcagaaucacugaugcac

SEQ ID NO: 2416277 - RNA, 19 nt, Artificial Sequence
  Description of Artificial Sequence: Synthetic oligonucleotide
  Antisense strand to SEQ ID NO: 2416276
gugcaucagugauucugcc

SEQ ID NO: 2416278 - RNA, 19 nt, Artificial Sequence
  Description of Artificial Sequence: Synthetic oligonucleotide
  Sense strand starting at position 1749 of SEQ ID NO: 1886536
guuccaguuuauggcgaaa

SEQ ID NO: 2416279 - RNA, 19 nt, Artificial Sequence
  Description of Artificial Sequence: Synthetic oligonucleotide
  Antisense strand to SEQ ID NO: 2416278
uuucgccauaaacuggaac

SEQ ID NO: 2416280 - RNA, 19 nt, Artificial Sequence
  Description of Artificial Sequence: Synthetic oligonucleotide
  Sense strand starting at position 1818 of SEQ ID NO: 1886536
gcuguugacgcagaagguu

SEQ ID NO: 2416281 - RNA, 19 nt, Artificial Sequence
  Description of Artificial Sequence: Synthetic oligonucleotide
  Antisense strand to SEQ ID NO: 2416280
aaccuucugcgucaacagc

SEQ ID NO: 2416282 - RNA, 19 nt, Artificial Sequence
  Description of Artificial Sequence: Synthetic oligonucleotide
  Sense strand starting at position 2289 of SEQ ID NO: 1886536
ugcuuuccaguugaugaua

SEQ ID NO: 2416283 - RNA, 19 nt, Artificial Sequence
  Description of Artificial Sequence: Synthetic oligonucleotide
  Antisense strand to SEQ ID NO: 2416282
uaucaucaacuggaaagca

SEQ ID NO: 2416284 - RNA, 19 nt, Artificial Sequence
  Description of Artificial Sequence: Synthetic oligonucleotide
  Sense strand starting at position 2301 of SEQ ID NO: 1886536
gaugauagggagugcugaa

SEQ ID NO: 2416285 - RNA, 19 nt, Artificial Sequence
  Description of Artificial Sequence: Synthetic oligonucleotide
  Antisense strand to SEQ ID NO: 2416284
uucagcacucccuaucauc

SEQ ID NO: 2416286 - RNA, 19 nt, Artificial Sequence
  Description of Artificial Sequence: Synthetic oligonucleotide
  Sense strand starting at position 2498 of SEQ ID NO: 1886536
gggauaugcuguggacaga

SEQ ID NO: 2416287 - RNA, 19 nt, Artificial Sequence
  Description of Artificial Sequence: Synthetic oligonucleotide
  Antisense strand to SEQ ID NO: 2416286
ucuguccacagcauauccc

SEQ ID NO: 2416288 - RNA, 19 nt, Artificial Sequence
  Description of Artificial Sequence: Synthetic oligonucleotide
  Sense strand starting at position 2535 of SEQ ID NO: 1886536
uuguuaaacgugcaucuca

SEQ ID NO: 2416289 - RNA, 19 nt, Artificial Sequence
  Description of Artificial Sequence: Synthetic oligonucleotide
  Antisense strand to SEQ ID NO: 2416288
ugagaugcacguuuaacaa

SEQ ID NO: 2416290 - RNA, 19 nt, Artificial Sequence
  Description of Artificial Sequence: Synthetic oligonucleotide
  Sense strand starting at position 2804 of SEQ ID NO: 1886536
aaagcugggccaugaauga

SEQ ID NO: 2416291 - RNA, 19 nt, Artificial Sequence
  Description of Artificial Sequence: Synthetic oligonucleotide
  Antisense strand to SEQ ID NO: 2416290
ucauucauggcccagcuuu

SEQ ID NO: 2416292 - RNA, 19 nt, Artificial Sequence
  Description of Artificial Sequence: Synthetic oligonucleotide
  Sense strand starting at position 2997 of SEQ ID NO: 1886536
ggacuuaagcgacggaaca

SEQ ID NO: 2416293 - RNA, 19 nt, Artificial Sequence
  Description of Artificial Sequence: Synthetic oligonucleotide
  Antisense strand to SEQ ID NO: 2416292
uguuccgucgcuuaagucc

SEQ ID NO: 2416294 - RNA, 19 nt, Artificial Sequence
  Description of Artificial Sequence: Synthetic oligonucleotide
  Sense strand starting at position 3100 of SEQ ID NO: 1886536
uuacgcuuugugcagaaau

SEQ ID NO: 2416295 - RNA, 19 nt, Artificial Sequence
  Description of Artificial Sequence: Synthetic oligonucleotide
  Antisense strand to SEQ ID NO: 2416294
auuucugcacaaagcguaa

SEQ ID NO: 2416296 - RNA, 19 nt, Artificial Sequence
  Description of Artificial Sequence: Synthetic oligonucleotide
  Sense strand starting at position 3102 of SEQ ID NO: 1886536
acgcuuugugcagaaaucu

SEQ ID NO: 2416297 - RNA, 19 nt, Artificial Sequence
  Description of Artificial Sequence: Synthetic oligonucleotide
  Antisense strand to SEQ ID NO: 2416296
agauuucugcacaaagcgu

SEQ ID NO: 2416298 - RNA, 19 nt, Artificial Sequence
  Description of Artificial Sequence: Synthetic oligonucleotide
  Sense strand starting at position 3123 of SEQ ID NO: 1886536
cgugaucuaagauauuggu

SEQ ID NO: 2416299 - RNA, 19 nt, Artificial Sequence
  Description of Artificial Sequence: Synthetic oligonucleotide
  Antisense strand to SEQ ID NO: 2416298
accaauaucuuagaucacg

SEQ ID NO: 2416300 - RNA, 19 nt, Artificial Sequence
  Description of Artificial Sequence: Synthetic oligonucleotide
  Sense strand starting at position 3126 of SEQ ID NO: 1886536
gaucuaagauauuggugca

SEQ ID NO: 2416301 - RNA, 19 nt, Artificial Sequence
  Description of Artificial Sequence: Synthetic oligonucleotide
  Antisense strand to SEQ ID NO: 2416300
ugcaccaauaucuuagauc

SEQ ID NO: 2416302 - RNA, 19 nt, Artificial Sequence
  Description of Artificial Sequence: Synthetic oligonucleotide
  Sense strand starting at position 3129 of SEQ ID NO: 1886536
cuaagauauuggugcagaa

SEQ ID NO: 2416303 - RNA, 19 nt, Artificial Sequence
  Description of Artificial Sequence: Synthetic oligonucleotide
  Antisense strand to SEQ ID NO: 2416302
uucugcaccaauaucuuag

SEQ ID NO: 2416304 - RNA, 19 nt, Artificial Sequence
  Description of Artificial Sequence: Synthetic oligonucleotide
  Sense strand starting at position 3142 of SEQ ID NO: 1886536
gcagaauucccaugugcug

SEQ ID NO: 2416305 - RNA, 19 nt, Artificial Sequence
  Description of Artificial Sequence: Synthetic oligonucleotide
  Antisense strand to SEQ ID NO: 2416304
cagcacaugggaauucugc

SEQ ID NO: 2416306 - RNA, 19 nt, Artificial Sequence
  Description of Artificial Sequence: Synthetic oligonucleotide
  Sense strand starting at position 3319 of SEQ ID NO: 1886536
gucagaaguucguagagca

SEQ ID NO: 2416307 - RNA, 19 nt, Artificial Sequence
  Description of Artificial Sequence: Synthetic oligonucleotide
  Antisense strand to SEQ ID NO: 2416306
ugcucuacgaacuucugac

SEQ ID NO: 2416308 - RNA, 19 nt, Artificial Sequence
  Description of Artificial Sequence: Synthetic oligonucleotide
  Sense strand starting at position 3570 of SEQ ID NO: 1886536
gcuucuugcccagugugau

SEQ ID NO: 2416309 - RNA, 19 nt, Artificial Sequence
  Description of Artificial Sequence: Synthetic oligonucleotide
  Antisense strand to SEQ ID NO: 2416308
aucacacugggcaagaagc

SEQ ID NO: 2416310 - RNA, 19 nt, Artificial Sequence
  Description of Artificial Sequence: Synthetic oligonucleotide
  Sense strand starting at position 3576 of SEQ ID NO: 1886536
ugcccagugugauggcuua

SEQ ID NO: 2416311 - RNA, 19 nt, Artificial Sequence
  Description of Artificial Sequence: Synthetic oligonucleotide
  Antisense strand to SEQ ID NO: 2416310
uaagccaucacacugggca

SEQ ID NO: 2416312 - RNA, 19 nt, Artificial Sequence
  Description of Artificial Sequence: Synthetic oligonucleotide
  Sense strand starting at position 3704 of SEQ ID NO: 1886536
caaggaguguuucuuugca

SEQ ID NO: 2416313 - RNA, 19 nt, Artificial Sequence
  Description of Artificial Sequence: Synthetic oligonucleotide
  Antisense strand to SEQ ID NO: 2416312
ugcaaagaaacacuccuug

SEQ ID NO: 2416314 - RNA, 19 nt, Artificial Sequence
  Description of Artificial Sequence: Synthetic oligonucleotide
  Sense strand starting at position 3706 of SEQ ID NO: 1886536
aggaguguuucuuugcaga

SEQ ID NO: 2416315 - RNA, 19 nt, Artificial Sequence
  Description of Artificial Sequence: Synthetic oligonucleotide
  Antisense strand to SEQ ID NO: 2416314
ucugcaaagaaacacuccu

SEQ ID NO: 2416316 - RNA, 19 nt, Artificial Sequence
  Description of Artificial Sequence: Synthetic oligonucleotide
  Sense strand starting at position 3708 of SEQ ID NO: 1886536
gaguguuucuuugcagacg

SEQ ID NO: 2416317 - RNA, 19 nt, Artificial Sequence
  Description of Artificial Sequence: Synthetic oligonucleotide
  Antisense strand to SEQ ID NO: 2416316
cgucugcaaagaaacacuc

SEQ ID NO: 2416318 - RNA, 19 nt, Artificial Sequence
  Description of Artificial Sequence: Synthetic oligonucleotide
  Sense strand starting at position 3732 of SEQ ID NO: 1886536
cuuggauugggcugugaaa

SEQ ID NO: 2416319 - RNA, 19 nt, Artificial Sequence
  Description of Artificial Sequence: Synthetic oligonucleotide
  Antisense strand to SEQ ID NO: 2416318
uuucacagcccaauccaag

SEQ ID NO: 2416320 - RNA, 19 nt, Artificial Sequence
  Description of Artificial Sequence: Synthetic oligonucleotide
  Sense strand starting at position 3734 of SEQ ID NO: 1886536
uggauugggcugugaaaga

SEQ ID NO: 2416321 - RNA, 19 nt, Artificial Sequence
  Description of Artificial Sequence: Synthetic oligonucleotide
  Antisense strand to SEQ ID NO: 2416320
ucuuucacagcccaaucca

SEQ ID NO: 2416322 - RNA, 19 nt, Artificial Sequence
  Description of Artificial Sequence: Synthetic oligonucleotide
  Sense strand starting at position 3903 of SEQ ID NO: 1886536
gcagaaugcaugugcucau

SEQ ID NO: 2416323 - RNA, 19 nt, Artificial Sequence
  Description of Artificial Sequence: Synthetic oligonucleotide
  Antisense strand to SEQ ID NO: 2416322
augagcacaugcauucugc

SEQ ID NO: 2416324 - RNA, 19 nt, Artificial Sequence
  Description of Artificial Sequence: Synthetic oligonucleotide
  Sense strand starting at position 3922 of SEQ ID NO: 1886536
ggcuuugguuccucuggaa

SEQ ID NO: 2416325 - RNA, 19 nt, Artificial Sequence
  Description of Artificial Sequence: Synthetic oligonucleotide
  Antisense strand to SEQ ID NO: 2416324
uuccagaggaaccaaagcc

SEQ ID NO: 2416326 - RNA, 19 nt, Artificial Sequence
  Description of Artificial Sequence: Synthetic oligonucleotide
  Sense strand starting at position 3949 of SEQ ID NO: 1886536
ccaagaugaggguguucaa

SEQ ID NO: 2416327 - RNA, 19 nt, Artificial Sequence
  Description of Artificial Sequence: Synthetic oligonucleotide
  Antisense strand to SEQ ID NO: 2416326
uugaacacccucaucuugg

SEQ ID NO: 2416328 - RNA, 19 nt, Artificial Sequence
  Description of Artificial Sequence: Synthetic oligonucleotide
  Sense strand starting at position 298 of SEQ ID NO: 1886537
auucgagaagucuguuuaa

SEQ ID NO: 2416329 - RNA, 19 nt, Artificial Sequence
  Description of Artificial Sequence: Synthetic oligonucleotide
  Antisense strand to SEQ ID NO: 2416328
uuaaacagacuucucgaau

SEQ ID NO: 2416330 - RNA, 19 nt, Artificial Sequence
  Description of Artificial Sequence: Synthetic oligonucleotide
  Sense strand starting at position 359 of SEQ ID NO: 1886537
gacagacggacauguuaga

SEQ ID NO: 2416331 - RNA, 19 nt, Artificial Sequence
  Description of Artificial Sequence: Synthetic oligonucleotide
  Antisense strand to SEQ ID NO: 2416330
ucuaacauguccgucuguc

SEQ ID NO: 2416332 - RNA, 19 nt, Artificial Sequence
  Description of Artificial Sequence: Synthetic oligonucleotide
  Sense strand starting at position 1484 of SEQ ID NO: 1886537
gccucauuuggcugaaccu

SEQ ID NO: 2416333 - RNA, 19 nt, Artificial Sequence
  Description of Artificial Sequence: Synthetic oligonucleotide
  Antisense strand to SEQ ID NO: 2416332
agguucagccaaaugaggc

SEQ ID NO: 2416334 - RNA, 19 nt, Artificial Sequence
  Description of Artificial Sequence: Synthetic oligonucleotide
  Sense strand starting at position 2989 of SEQ ID NO: 1886537
cccagugucccugaaggua

SEQ ID NO: 2416335 - RNA, 19 nt, Artificial Sequence
  Description of Artificial Sequence: Synthetic oligonucleotide
  Antisense strand to SEQ ID NO: 2416334
uaccuucagggacacuggg

SEQ ID NO: 2416336 - RNA, 19 nt, Artificial Sequence
  Description of Artificial Sequence: Synthetic oligonucleotide
  Sense strand starting at position 3196 of SEQ ID NO: 1886537
caguucugaucccuggaca

SEQ ID NO: 2416337 - RNA, 19 nt, Artificial Sequence
  Description of Artificial Sequence: Synthetic oligonucleotide
  Antisense strand to SEQ ID NO: 2416336
uguccagggaucagaacug

SEQ ID NO: 2416338 - RNA, 19 nt, Artificial Sequence
  Description of Artificial Sequence: Synthetic oligonucleotide
  Sense strand starting at position 3197 of SEQ ID NO: 1886537
aguucugaucccuggacau

SEQ ID NO: 2416339 - RNA, 19 nt, Artificial Sequence
  Description of Artificial Sequence: Synthetic oligonucleotide
  Antisense strand to SEQ ID NO: 2416338
auguccagggaucagaacu

SEQ ID NO: 2416340 - RNA, 19 nt, Artificial Sequence
  Description of Artificial Sequence: Synthetic oligonucleotide
  Sense strand starting at position 3288 of SEQ ID NO: 1886537
ccagcauugcccuggguca

SEQ ID NO: 2416341 - RNA, 19 nt, Artificial Sequence
  Description of Artificial Sequence: Synthetic oligonucleotide
  Antisense strand to SEQ ID NO: 2416340
ugacccagggcaaugcugg

SEQ ID NO: 2416342 - RNA, 19 nt, Artificial Sequence
  Description of Artificial Sequence: Synthetic oligonucleotide
  Sense strand starting at position 3289 of SEQ ID NO: 1886537
cagcauugcccugggucau

SEQ ID NO: 2416343 - RNA, 19 nt, Artificial Sequence
  Description of Artificial Sequence: Synthetic oligonucleotide
  Antisense strand to SEQ ID NO: 2416342
augacccagggcaaugcug

SEQ ID NO: 2416344 - RNA, 19 nt, Artificial Sequence
  Description of Artificial Sequence: Synthetic oligonucleotide
  Sense strand starting at position 3290 of SEQ ID NO: 1886537
agcauugcccugggucauu

SEQ ID NO: 2416345 - RNA, 19 nt, Artificial Sequence
  Description of Artificial Sequence: Synthetic oligonucleotide
  Antisense strand to SEQ ID NO: 2416344
aaugacccagggcaaugcu

SEQ ID NO: 2416346 - RNA, 19 nt, Artificial Sequence
  Description of Artificial Sequence: Synthetic oligonucleotide
  Sense strand starting at position 3639 of SEQ ID NO: 1886537
gagacaaauuugggagcaa

SEQ ID NO: 2416347 - RNA, 19 nt, Artificial Sequence
  Description of Artificial Sequence: Synthetic oligonucleotide
  Antisense strand to SEQ ID NO: 2416346
uugcucccaaauuugucuc

SEQ ID NO: 2416348 - RNA, 19 nt, Artificial Sequence
  Description of Artificial Sequence: Synthetic oligonucleotide
  Sense strand starting at position 3640 of SEQ ID NO: 1886537
agacaaauuugggagcaaa

SEQ ID NO: 2416349 - RNA, 19 nt, Artificial Sequence
  Description of Artificial Sequence: Synthetic oligonucleotide
  Antisense strand to SEQ ID NO: 2416348
uuugcucccaaauuugucu

SEQ ID NO: 2416350 - RNA, 19 nt, Artificial Sequence
  Description of Artificial Sequence: Synthetic oligonucleotide
  Sense strand starting at position 3672 of SEQ ID NO: 1886537
ccguauaaaucacaguaac

SEQ ID NO: 2416351 - RNA, 19 nt, Artificial Sequence
  Description of Artificial Sequence: Synthetic oligonucleotide
  Antisense strand to SEQ ID NO: 2416350
guuacugugauuuauacgg

SEQ ID NO: 2416352 - RNA, 19 nt, Artificial Sequence
  Description of Artificial Sequence: Synthetic oligonucleotide
  Sense strand starting at position 3702 of SEQ ID NO: 1886537
uuaaaucagucgcuguaau

SEQ ID NO: 2416353 - RNA, 19 nt, Artificial Sequence
  Description of Artificial Sequence: Synthetic oligonucleotide
  Antisense strand to SEQ ID NO: 2416352
auuacagcgacugauuuaa

SEQ ID NO: 2416354 - RNA, 19 nt, Artificial Sequence
  Description of Artificial Sequence: Synthetic oligonucleotide
  Sense strand starting at position 3703 of SEQ ID NO: 1886537
uaaaucagucgcuguaaua

SEQ ID NO: 2416355 - RNA, 19 nt, Artificial Sequence
  Description of Artificial Sequence: Synthetic oligonucleotide
  Antisense strand to SEQ ID NO: 2416354
uauuacagcgacugauuua

SEQ ID NO: 2416356 - RNA, 19 nt, Artificial Sequence
  Description of Artificial Sequence: Synthetic oligonucleotide
  Sense strand starting at position 3710 of SEQ ID NO: 1886537
gucgcuguaauagaaucaa

SEQ ID NO: 2416357 - RNA, 19 nt, Artificial Sequence
  Description of Artificial Sequence: Synthetic oligonucleotide
  Antisense strand to SEQ ID NO: 2416356
uugauucuauuacagcgac

SEQ ID NO: 2416358 - RNA, 19 nt, Artificial Sequence
  Description of Artificial Sequence: Synthetic oligonucleotide
  Sense strand starting at position 3755 of SEQ ID NO: 1886537
cguuuaaucuccgucucca

SEQ ID NO: 2416359 - RNA, 19 nt, Artificial Sequence
  Description of Artificial Sequence: Synthetic oligonucleotide
  Antisense strand to SEQ ID NO: 2416358
uggagacggagauuaaacg

SEQ ID NO: 2416360 - RNA, 19 nt, Artificial Sequence
  Description of Artificial Sequence: Synthetic oligonucleotide
  Sense strand starting at position 56 of SEQ ID NO: 1886538
ccaacaagucaaugaggua

SEQ ID NO: 2416361 - RNA, 19 nt, Artificial Sequence
  Description of Artificial Sequence: Synthetic oligonucleotide
  Antisense strand to SEQ ID NO: 2416360
uaccucauugacuuguugg

SEQ ID NO: 2416362 - RNA, 19 nt, Artificial Sequence
  Description of Artificial Sequence: Synthetic oligonucleotide
  Sense strand starting at position 68 of SEQ ID NO: 1886538
ugagguaggaaaugucauu

SEQ ID NO: 2416363 - RNA, 19 nt, Artificial Sequence
  Description of Artificial Sequence: Synthetic oligonucleotide
  Antisense strand to SEQ ID NO: 2416362
aaugacauuuccuaccuca

SEQ ID NO: 2416364 - RNA, 19 nt, Artificial Sequence
  Description of Artificial Sequence: Synthetic oligonucleotide
  Sense strand starting at position 109 of SEQ ID NO: 1886538
aacugagucccugagaggu

SEQ ID NO: 2416365 - RNA, 19 nt, Artificial Sequence
  Description of Artificial Sequence: Synthetic oligonucleotide
  Antisense strand to SEQ ID NO: 2416364
accucucagggacucaguu

SEQ ID NO: 2416366 - RNA, 19 nt, Artificial Sequence
  Description of Artificial Sequence: Synthetic oligonucleotide
  Sense strand starting at position 119 of SEQ ID NO: 1886538
cugagagguugagugaaau

SEQ ID NO: 2416367 - RNA, 19 nt, Artificial Sequence
  Description of Artificial Sequence: Synthetic oligonucleotide
  Antisense strand to SEQ ID NO: 2416366
auuucacucaaccucucag

SEQ ID NO: 2416368 - RNA, 19 nt, Artificial Sequence
  Description of Artificial Sequence: Synthetic oligonucleotide
  Sense strand starting at position 185 of SEQ ID NO: 1886538
uugaauccaggcugucaga

SEQ ID NO: 2416369 - RNA, 19 nt, Artificial Sequence
  Description of Artificial Sequence: Synthetic oligonucleotide
  Antisense strand to SEQ ID NO: 2416368
ucugacagccuggauucaa

SEQ ID NO: 2416370 - RNA, 19 nt, Artificial Sequence
  Description of Artificial Sequence: Synthetic oligonucleotide
  Sense strand starting at position 357 of SEQ ID NO: 1886538
uuuacucucguuuacugau

SEQ ID NO: 2416371 - RNA, 19 nt, Artificial Sequence
  Description of Artificial Sequence: Synthetic oligonucleotide
  Antisense strand to SEQ ID NO: 2416370
aucaguaaacgagaguaaa

SEQ ID NO: 2416372 - RNA, 19 nt, Artificial Sequence
  Description of Artificial Sequence: Synthetic oligonucleotide
  Sense strand starting at position 367 of SEQ ID NO: 1886538
uuuacugaugaccgguaaa

SEQ ID NO: 2416373 - RNA, 19 nt, Artificial Sequence
  Description of Artificial Sequence: Synthetic oligonucleotide
  Antisense strand to SEQ ID NO: 2416372
uuuaccggucaucaguaaa

SEQ ID NO: 2416374 - RNA, 19 nt, Artificial Sequence
  Description of Artificial Sequence: Synthetic oligonucleotide
  Sense strand starting at position 377 of SEQ ID NO: 1886538
accgguaaauuccuuaaau

SEQ ID NO: 2416375 - RNA, 19 nt, Artificial Sequence
  Description of Artificial Sequence: Synthetic oligonucleotide
  Antisense strand to SEQ ID NO: 2416374
auuuaaggaauuuaccggu

SEQ ID NO: 2416376 - RNA, 19 nt, Artificial Sequence
  Description of Artificial Sequence: Synthetic oligonucleotide
  Sense strand starting at position 378 of SEQ ID NO: 1886538
ccgguaaauuccuuaaauu

SEQ ID NO: 2416377 - RNA, 19 nt, Artificial Sequence
  Description of Artificial Sequence: Synthetic oligonucleotide
  Antisense strand to SEQ ID NO: 2416376
aauuuaaggaauuuaccgg

SEQ ID NO: 2416378 - RNA, 19 nt, Artificial Sequence
  Description of Artificial Sequence: Synthetic oligonucleotide
  Sense strand starting at position 443 of SEQ ID NO: 1886538
cuuucuuucuggguuggga

SEQ ID NO: 2416379 - RNA, 19 nt, Artificial Sequence
  Description of Artificial Sequence: Synthetic oligonucleotide
  Antisense strand to SEQ ID NO: 2416378
ucccaacccagaaagaaag

SEQ ID NO: 2416380 - RNA, 19 nt, Artificial Sequence
  Description of Artificial Sequence: Synthetic oligonucleotide
  Sense strand starting at position 461 of SEQ ID NO: 1886538
aagacuugagcuugugaau

SEQ ID NO: 2416381 - RNA, 19 nt, Artificial Sequence
  Description of Artificial Sequence: Synthetic oligonucleotide
  Antisense strand to SEQ ID NO: 2416380
auucacaagcucaagucuu

SEQ ID NO: 2416382 - RNA, 19 nt, Artificial Sequence
  Description of Artificial Sequence: Synthetic oligonucleotide
  Sense strand starting at position 467 of SEQ ID NO: 1886538
ugagcuugugaaugaagga

SEQ ID NO: 2416383 - RNA, 19 nt, Artificial Sequence
  Description of Artificial Sequence: Synthetic oligonucleotide
  Antisense strand to SEQ ID NO: 2416382
uccuucauucacaagcuca

SEQ ID NO: 2416384 - RNA, 19 nt, Artificial Sequence
  Description of Artificial Sequence: Synthetic oligonucleotide
  Sense strand starting at position 505 of SEQ ID NO: 1886538
ugaauaaagggcugcauua

SEQ ID NO: 2416385 - RNA, 19 nt, Artificial Sequence
  Description of Artificial Sequence: Synthetic oligonucleotide
  Antisense strand to SEQ ID NO: 2416384
uaaugcagcccuuuauuca

SEQ ID NO: 2416386 - RNA, 19 nt, Artificial Sequence
  Description of Artificial Sequence: Synthetic oligonucleotide
  Sense strand starting at position 720 of SEQ ID NO: 1886538
ggcccaaagucaguacuga

SEQ ID NO: 2416387 - RNA, 19 nt, Artificial Sequence
  Description of Artificial Sequence: Synthetic oligonucleotide
  Antisense strand to SEQ ID NO: 2416386
ucaguacugacuuugggcc

SEQ ID NO: 2416388 - RNA, 19 nt, Artificial Sequence
  Description of Artificial Sequence: Synthetic oligonucleotide
  Sense strand starting at position 721 of SEQ ID NO: 1886538
gcccaaagucaguacugaa

SEQ ID NO: 2416389 - RNA, 19 nt, Artificial Sequence
  Description of Artificial Sequence: Synthetic oligonucleotide
  Antisense strand to SEQ ID NO: 2416388
uucaguacugacuuugggc

SEQ ID NO: 2416390 - RNA, 19 nt, Artificial Sequence
  Description of Artificial Sequence: Synthetic oligonucleotide
  Sense strand starting at position 734 of SEQ ID NO: 1886538
acugaaugaucguccacuu

SEQ ID NO: 2416391 - RNA, 19 nt, Artificial Sequence
  Description of Artificial Sequence: Synthetic oligonucleotide
  Antisense strand to SEQ ID NO: 2416390
aaguggacgaucauucagu

SEQ ID NO: 2416392 - RNA, 19 nt, Artificial Sequence
  Description of Artificial Sequence: Synthetic oligonucleotide
  Sense strand starting at position 933 of SEQ ID NO: 1886538
gucgcugaaggguaauuau

SEQ ID NO: 2416393 - RNA, 19 nt, Artificial Sequence
  Description of Artificial Sequence: Synthetic oligonucleotide
  Antisense strand to SEQ ID NO: 2416392
auaauuacccuucagcgac

SEQ ID NO: 2416394 - RNA, 19 nt, Artificial Sequence
  Description of Artificial Sequence: Synthetic oligonucleotide
  Sense strand starting at position 941 of SEQ ID NO: 1886538
aggguaauuaucugagugu

SEQ ID NO: 2416395 - RNA, 19 nt, Artificial Sequence
  Description of Artificial Sequence: Synthetic oligonucleotide
  Antisense strand to SEQ ID NO: 2416394
acacucagauaauuacccu

SEQ ID NO: 2416396 - RNA, 19 nt, Artificial Sequence
  Description of Artificial Sequence: Synthetic oligonucleotide
  Sense strand starting at position 989 of SEQ ID NO: 1886538
uguucuauccgagagcaua

SEQ ID NO: 2416397 - RNA, 19 nt, Artificial Sequence
  Description of Artificial Sequence: Synthetic oligonucleotide
  Antisense strand to SEQ ID NO: 2416396
uaugcucucggauagaaca

SEQ ID NO: 2416398 - RNA, 19 nt, Artificial Sequence
  Description of Artificial Sequence: Synthetic oligonucleotide
  Sense strand starting at position 1057 of SEQ ID NO: 1886538
gagugugaggguuaacuca

SEQ ID NO: 2416399 - RNA, 19 nt, Artificial Sequence
  Description of Artificial Sequence: Synthetic oligonucleotide
  Antisense strand to SEQ ID NO: 2416398
ugaguuaacccucacacuc

SEQ ID NO: 2416400 - RNA, 19 nt, Artificial Sequence
  Description of Artificial Sequence: Synthetic oligonucleotide
  Sense strand starting at position 1133 of SEQ ID NO: 1886538
gauguaagggugugacauu

SEQ ID NO: 2416401 - RNA, 19 nt, Artificial Sequence
  Description of Artificial Sequence: Synthetic oligonucleotide
  Antisense strand to SEQ ID NO: 2416400
aaugucacacccuuacauc

SEQ ID NO: 2416402 - RNA, 19 nt, Artificial Sequence
  Description of Artificial Sequence: Synthetic oligonucleotide
  Sense strand starting at position 1162 of SEQ ID NO: 1886538
aaggcaugagugugauaga

SEQ ID NO: 2416403 - RNA, 19 nt, Artificial Sequence
  Description of Artificial Sequence: Synthetic oligonucleotide
  Antisense strand to SEQ ID NO: 2416402
ucuaucacacucaugccuu

SEQ ID NO: 2416404 - RNA, 19 nt, Artificial Sequence
  Description of Artificial Sequence: Synthetic oligonucleotide
  Sense strand starting at position 1200 of SEQ ID NO: 1886538
aaaggaagcuuuguuucua

SEQ ID NO: 2416405 - RNA, 19 nt, Artificial Sequence
  Description of Artificial Sequence: Synthetic oligonucleotide
  Antisense strand to SEQ ID NO: 2416404
uagaaacaaagcuuccuuu

SEQ ID NO: 2416406 - RNA, 19 nt, Artificial Sequence
  Description of Artificial Sequence: Synthetic oligonucleotide
  Sense strand starting at position 1269 of SEQ ID NO: 1886538
gcugguugccguucaauca

SEQ ID NO: 2416407 - RNA, 19 nt, Artificial Sequence
  Description of Artificial Sequence: Synthetic oligonucleotide
  Antisense strand to SEQ ID NO: 2416406
ugauugaacggcaaccagc

SEQ ID NO: 2416408 - RNA, 19 nt, Artificial Sequence
  Description of Artificial Sequence: Synthetic oligonucleotide
  Sense strand starting at position 1339 of SEQ ID NO: 1886538
uagguuuaaggcuaugaac

SEQ ID NO: 2416409 - RNA, 19 nt, Artificial Sequence
  Description of Artificial Sequence: Synthetic oligonucleotide
  Antisense strand to SEQ ID NO: 2416408
guucauagccuuaaaccua

SEQ ID NO: 2416410 - RNA, 19 nt, Artificial Sequence
  Description of Artificial Sequence: Synthetic oligonucleotide
  Sense strand starting at position 1341 of SEQ ID NO: 1886538
gguuuaaggcuaugaacaa

SEQ ID NO: 2416411 - RNA, 19 nt, Artificial Sequence
  Description of Artificial Sequence: Synthetic oligonucleotide
  Antisense strand to SEQ ID NO: 2416410
uuguucauagccuuaaacc

SEQ ID NO: 2416412 - RNA, 19 nt, Artificial Sequence
  Description of Artificial Sequence: Synthetic oligonucleotide
  Sense strand starting at position 1519 of SEQ ID NO: 1886538
aaaggauuagccuggugua

SEQ ID NO: 2416413 - RNA, 19 nt, Artificial Sequence
  Description of Artificial Sequence: Synthetic oligonucleotide
  Antisense strand to SEQ ID NO: 2416412
uacaccaggcuaauccuuu

SEQ ID NO: 2416414 - RNA, 19 nt, Artificial Sequence
  Description of Artificial Sequence: Synthetic oligonucleotide
  Sense strand starting at position 1937 of SEQ ID NO: 1886538
acgacaucuugaccuuagu

SEQ ID NO: 2416415 - RNA, 19 nt, Artificial Sequence
  Description of Artificial Sequence: Synthetic oligonucleotide
  Antisense strand to SEQ ID NO: 2416414
acuaaggucaagaugucgu

SEQ ID NO: 2416416 - RNA, 19 nt, Artificial Sequence
  Description of Artificial Sequence: Synthetic oligonucleotide
  Sense strand starting at position 2439 of SEQ ID NO: 1886538
cccgaaauccgugaagauc

SEQ ID NO: 2416417 - RNA, 19 nt, Artificial Sequence
  Description of Artificial Sequence: Synthetic oligonucleotide
  Antisense strand to SEQ ID NO: 2416416
gaucuucacggauuucggg

SEQ ID NO: 2416418 - RNA, 19 nt, Artificial Sequence
  Description of Artificial Sequence: Synthetic oligonucleotide
  Sense strand starting at position 2526 of SEQ ID NO: 1886538
cuuguuuaauauucggaau

SEQ ID NO: 2416419 - RNA, 19 nt, Artificial Sequence
  Description of Artificial Sequence: Synthetic oligonucleotide
  Antisense strand to SEQ ID NO: 2416418
auuccgaauauuaaacaag

SEQ ID NO: 2416420 - RNA, 19 nt, Artificial Sequence
  Description of Artificial Sequence: Synthetic oligonucleotide
  Sense strand starting at position 2635 of SEQ ID NO: 1886538
ggccaagagucuccuugaa

SEQ ID NO: 2416421 - RNA, 19 nt, Artificial Sequence
  Description of Artificial Sequence: Synthetic oligonucleotide
  Antisense strand to SEQ ID NO: 2416420
uucaaggagacucuuggcc

SEQ ID NO: 2416422 - RNA, 19 nt, Artificial Sequence
  Description of Artificial Sequence: Synthetic oligonucleotide
  Sense strand starting at position 2637 of SEQ ID NO: 1886538
ccaagagucuccuugaaau

SEQ ID NO: 2416423 - RNA, 19 nt, Artificial Sequence
  Description of Artificial Sequence: Synthetic oligonucleotide
  Antisense strand to SEQ ID NO: 2416422
auuucaaggagacucuugg

SEQ ID NO: 2416424 - RNA, 19 nt, Artificial Sequence
  Description of Artificial Sequence: Synthetic oligonucleotide
  Sense strand starting at position 2974 of SEQ ID NO: 1886538
ucaguuaucugagcucaga

SEQ ID NO: 2416425 - RNA, 19 nt, Artificial Sequence
  Description of Artificial Sequence: Synthetic oligonucleotide
  Antisense strand to SEQ ID NO: 2416424
ucugagcucagauaacuga

SEQ ID NO: 2416426 - RNA, 19 nt, Artificial Sequence
  Description of Artificial Sequence: Synthetic oligonucleotide
  Sense strand starting at position 3206 of SEQ ID NO: 1886538
uggcuuccucaucaugaga

SEQ ID NO: 2416427 - RNA, 19 nt, Artificial Sequence
  Description of Artificial Sequence: Synthetic oligonucleotide
  Antisense strand to SEQ ID NO: 2416426
ucucaugaugaggaagcca

SEQ ID NO: 2416428 - RNA, 19 nt, Artificial Sequence
  Description of Artificial Sequence: Synthetic oligonucleotide
  Sense strand starting at position 3269 of SEQ ID NO: 1886538
agaggaguguggucacaug

SEQ ID NO: 2416429 - RNA, 19 nt, Artificial Sequence
  Description of Artificial Sequence: Synthetic oligonucleotide
  Antisense strand to SEQ ID NO: 2416428
caugugaccacacuccucu

SEQ ID NO: 2416430 - RNA, 19 nt, Artificial Sequence
  Description of Artificial Sequence: Synthetic oligonucleotide
  Sense strand starting at position 3493 of SEQ ID NO: 1886538
gggugcugugagcaugaga

SEQ ID NO: 2416431 - RNA, 19 nt, Artificial Sequence
  Description of Artificial Sequence: Synthetic oligonucleotide
  Antisense strand to SEQ ID NO: 2416430
ucucaugcucacagcaccc

SEQ ID NO: 2416432 - RNA, 19 nt, Artificial Sequence
  Description of Artificial Sequence: Synthetic oligonucleotide
  Sense strand starting at position 3522 of SEQ ID NO: 1886538
uugcaaugaugaguaguua

SEQ ID NO: 2416433 - RNA, 19 nt, Artificial Sequence
  Description of Artificial Sequence: Synthetic oligonucleotide
  Antisense strand to SEQ ID NO: 2416432
uaacuacucaucauugcaa

SEQ ID NO: 2416434 - RNA, 19 nt, Artificial Sequence
  Description of Artificial Sequence: Synthetic oligonucleotide
  Sense strand starting at position 3526 of SEQ ID NO: 1886538
aaugaugaguaguuacuga

SEQ ID NO: 2416435 - RNA, 19 nt, Artificial Sequence
  Description of Artificial Sequence: Synthetic oligonucleotide
  Antisense strand to SEQ ID NO: 2416434
ucaguaacuacucaucauu

SEQ ID NO: 2416436 - RNA, 19 nt, Artificial Sequence
  Description of Artificial Sequence: Synthetic oligonucleotide
  Sense strand starting at position 3799 of SEQ ID NO: 1886538
uggaaacuccguuguaaag

SEQ ID NO: 2416437 - RNA, 19 nt, Artificial Sequence
  Description of Artificial Sequence: Synthetic oligonucleotide
  Antisense strand to SEQ ID NO: 2416436
cuuuacaacggaguuucca

SEQ ID NO: 2416438 - RNA, 19 nt, Artificial Sequence
  Description of Artificial Sequence: Synthetic oligonucleotide
  Sense strand starting at position 3887 of SEQ ID NO: 1886538
uggacugugcacugaugaa

SEQ ID NO: 2416439 - RNA, 19 nt, Artificial Sequence
  Description of Artificial Sequence: Synthetic oligonucleotide
  Antisense strand to SEQ ID NO: 2416438
uucaucagugcacagucca

SEQ ID NO: 2416440 - RNA, 19 nt, Artificial Sequence
  Description of Artificial Sequence: Synthetic oligonucleotide
  Sense strand starting at position 350 of SEQ ID NO: 1886539
uggcacuaaguuugacaga

SEQ ID NO: 2416441 - RNA, 19 nt, Artificial Sequence
  Description of Artificial Sequence: Synthetic oligonucleotide
  Antisense strand to SEQ ID NO: 2416440
ucugucaaacuuagugcca

SEQ ID NO: 2416442 - RNA, 19 nt, Artificial Sequence
  Description of Artificial Sequence: Synthetic oligonucleotide
  Sense strand starting at position 355 of SEQ ID NO: 1886539
cuaaguuugacagaguuug

SEQ ID NO: 2416443 - RNA, 19 nt, Artificial Sequence
  Description of Artificial Sequence: Synthetic oligonucleotide
  Antisense strand to SEQ ID NO: 2416442
caaacucugucaaacuuag

SEQ ID NO: 2416444 - RNA, 19 nt, Artificial Sequence
  Description of Artificial Sequence: Synthetic oligonucleotide
  Sense strand starting at position 363 of SEQ ID NO: 1886539
gacagaguuugguuccaga

SEQ ID NO: 2416445 - RNA, 19 nt, Artificial Sequence
  Description of Artificial Sequence: Synthetic oligonucleotide
  Antisense strand to SEQ ID NO: 2416444
ucuggaaccaaacucuguc

SEQ ID NO: 2416446 - RNA, 19 nt, Artificial Sequence
  Description of Artificial Sequence: Synthetic oligonucleotide
  Sense strand starting at position 404 of SEQ ID NO: 1886539
cuuagucuccaggaaccua

SEQ ID NO: 2416447 - RNA, 19 nt, Artificial Sequence
  Description of Artificial Sequence: Synthetic oligonucleotide
  Antisense strand to SEQ ID NO: 2416446
uagguuccuggagacuaag

SEQ ID NO: 2416448 - RNA, 19 nt, Artificial Sequence
  Description of Artificial Sequence: Synthetic oligonucleotide
  Sense strand starting at position 504 of SEQ ID NO: 1886539
gaaggcauucuuugagauc

SEQ ID NO: 2416449 - RNA, 19 nt, Artificial Sequence
  Description of Artificial Sequence: Synthetic oligonucleotide
  Antisense strand to SEQ ID NO: 2416448
gaucucaaagaaugccuuc

SEQ ID NO: 2416450 - RNA, 19 nt, Artificial Sequence
  Description of Artificial Sequence: Synthetic oligonucleotide
  Sense strand starting at position 951 of SEQ ID NO: 1886539
uaaugacaccgcgguauuu

SEQ ID NO: 2416451 - RNA, 19 nt, Artificial Sequence
  Description of Artificial Sequence: Synthetic oligonucleotide
  Antisense strand to SEQ ID NO: 2416450
aaauaccgcggugucauua

SEQ ID NO: 2416452 - RNA, 19 nt, Artificial Sequence
  Description of Artificial Sequence: Synthetic oligonucleotide
  Sense strand starting at position 962 of SEQ ID NO: 1886539
cgguauuucucagugcaca

SEQ ID NO: 2416453 - RNA, 19 nt, Artificial Sequence
  Description of Artificial Sequence: Synthetic oligonucleotide
  Antisense strand to SEQ ID NO: 2416452
ugugcacugagaaauaccg

SEQ ID NO: 2416454 - RNA, 19 nt, Artificial Sequence
  Description of Artificial Sequence: Synthetic oligonucleotide
  Sense strand starting at position 963 of SEQ ID NO: 1886539
gguauuucucagugcacaa

SEQ ID NO: 2416455 - RNA, 19 nt, Artificial Sequence
  Description of Artificial Sequence: Synthetic oligonucleotide
  Antisense strand to SEQ ID NO: 2416454
uugugcacugagaaauacc

SEQ ID NO: 2416456 - RNA, 19 nt, Artificial Sequence
  Description of Artificial Sequence: Synthetic oligonucleotide
  Sense strand starting at position 2057 of SEQ ID NO: 1886539
ucgcucauugggcaauuau

SEQ ID NO: 2416457 - RNA, 19 nt, Artificial Sequence
  Description of Artificial Sequence: Synthetic oligonucleotide
  Antisense strand to SEQ ID NO: 2416456
auaauugcccaaugagcga

SEQ ID NO: 2416458 - RNA, 19 nt, Artificial Sequence
  Description of Artificial Sequence: Synthetic oligonucleotide
  Sense strand starting at position 2098 of SEQ ID NO: 1886539
guacucauuggauaaguuu

SEQ ID NO: 2416459 - RNA, 19 nt, Artificial Sequence
  Description of Artificial Sequence: Synthetic oligonucleotide
  Antisense strand to SEQ ID NO: 2416458
aaacuuauccaaugaguac

SEQ ID NO: 2416460 - RNA, 19 nt, Artificial Sequence
  Description of Artificial Sequence: Synthetic oligonucleotide
  Sense strand starting at position 2140 of SEQ ID NO: 1886539
gaaguuugccgacggagaa

SEQ ID NO: 2416461 - RNA, 19 nt, Artificial Sequence
  Description of Artificial Sequence: Synthetic oligonucleotide
  Antisense strand to SEQ ID NO: 2416460
uucuccgucggcaaacuuc

SEQ ID NO: 2416462 - RNA, 19 nt, Artificial Sequence
  Description of Artificial Sequence: Synthetic oligonucleotide
  Sense strand starting at position 2141 of SEQ ID NO: 1886539
aaguuugccgacggagaaa

SEQ ID NO: 2416463 - RNA, 19 nt, Artificial Sequence
  Description of Artificial Sequence: Synthetic oligonucleotide
  Antisense strand to SEQ ID NO: 2416462
uuucuccgucggcaaacuu

SEQ ID NO: 2416464 - RNA, 19 nt, Artificial Sequence
  Description of Artificial Sequence: Synthetic oligonucleotide
  Sense strand starting at position 2209 of SEQ ID NO: 1886539
agucuuaggugccuggaga

SEQ ID NO: 2416465 - RNA, 19 nt, Artificial Sequence
  Description of Artificial Sequence: Synthetic oligonucleotide
  Antisense strand to SEQ ID NO: 2416464
ucuccaggcaccuaagacu

SEQ ID NO: 2416466 - RNA, 19 nt, Artificial Sequence
  Description of Artificial Sequence: Synthetic oligonucleotide
  Sense strand starting at position 2244 of SEQ ID NO: 1886539
cugacucgucacggaauuu

SEQ ID NO: 2416467 - RNA, 19 nt, Artificial Sequence
  Description of Artificial Sequence: Synthetic oligonucleotide
  Antisense strand to SEQ ID NO: 2416466
aaauuccgugacgagucag

SEQ ID NO: 2416468 - RNA, 19 nt, Artificial Sequence
  Description of Artificial Sequence: Synthetic oligonucleotide
  Sense strand starting at position 2320 of SEQ ID NO: 1886539
guugucacucaacaguuua

SEQ ID NO: 2416469 - RNA, 19 nt, Artificial Sequence
  Description of Artificial Sequence: Synthetic oligonucleotide
  Antisense strand to SEQ ID NO: 2416468
uaaacuguugagugacaac

SEQ ID NO: 2416470 - RNA, 19 nt, Artificial Sequence
  Description of Artificial Sequence: Synthetic oligonucleotide
  Sense strand starting at position 2376 of SEQ ID NO: 1886539
ugcuaagagcuuuagagac

SEQ ID NO: 2416471 - RNA, 19 nt, Artificial Sequence
  Description of Artificial Sequence: Synthetic oligonucleotide
  Antisense strand to SEQ ID NO: 2416470
gucucuaaagcucuuagca

SEQ ID NO: 2416472 - RNA, 19 nt, Artificial Sequence
  Description of Artificial Sequence: Synthetic oligonucleotide
  Sense strand starting at position 2390 of SEQ ID NO: 1886539
gagacauaaucgccuuuga

SEQ ID NO: 2416473 - RNA, 19 nt, Artificial Sequence
  Description of Artificial Sequence: Synthetic oligonucleotide
  Antisense strand to SEQ ID NO: 2416472
ucaaaggcgauuaugucuc

SEQ ID NO: 2416474 - RNA, 19 nt, Artificial Sequence
  Description of Artificial Sequence: Synthetic oligonucleotide
  Sense strand starting at position 2519 of SEQ ID NO: 1886539
acgugauguucagugaaag

SEQ ID NO: 2416475 - RNA, 19 nt, Artificial Sequence
  Description of Artificial Sequence: Synthetic oligonucleotide
  Antisense strand to SEQ ID NO: 2416474
cuuucacugaacaucacgu

SEQ ID NO: 2416476 - RNA, 19 nt, Artificial Sequence
  Description of Artificial Sequence: Synthetic oligonucleotide
  Sense strand starting at position 2520 of SEQ ID NO: 1886539
cgugauguucagugaaaga

SEQ ID NO: 2416477 - RNA, 19 nt, Artificial Sequence
  Description of Artificial Sequence: Synthetic oligonucleotide
  Antisense strand to SEQ ID NO: 2416476
ucuuucacugaacaucacg

SEQ ID NO: 2416478 - RNA, 19 nt, Artificial Sequence
  Description of Artificial Sequence: Synthetic oligonucleotide
  Sense strand starting at position 2732 of SEQ ID NO: 1886539
auagacacauucucaguuu

SEQ ID NO: 2416479 - RNA, 19 nt, Artificial Sequence
  Description of Artificial Sequence: Synthetic oligonucleotide
  Antisense strand to SEQ ID NO: 2416478
aaacugagaaugugucuau

SEQ ID NO: 2416480 - RNA, 19 nt, Artificial Sequence
  Description of Artificial Sequence: Synthetic oligonucleotide
  Sense strand starting at position 2745 of SEQ ID NO: 1886539
caguuucucaggugggagu

SEQ ID NO: 2416481 - RNA, 19 nt, Artificial Sequence
  Description of Artificial Sequence: Synthetic oligonucleotide
  Antisense strand to SEQ ID NO: 2416480
acucccaccugagaaacug

SEQ ID NO: 2416482 - RNA, 19 nt, Artificial Sequence
  Description of Artificial Sequence: Synthetic oligonucleotide
  Sense strand starting at position 2760 of SEQ ID NO: 1886539
gagugaguucacguguguc

SEQ ID NO: 2416483 - RNA, 19 nt, Artificial Sequence
  Description of Artificial Sequence: Synthetic oligonucleotide
  Antisense strand to SEQ ID NO: 2416482
gacacacgugaacucacuc

SEQ ID NO: 2416484 - RNA, 19 nt, Artificial Sequence
  Description of Artificial Sequence: Synthetic oligonucleotide
  Sense strand starting at position 2875 of SEQ ID NO: 1886539
acuugauuaucugucaggu

SEQ ID NO: 2416485 - RNA, 19 nt, Artificial Sequence
  Description of Artificial Sequence: Synthetic oligonucleotide
  Antisense strand to SEQ ID NO: 2416484
accugacagauaaucaagu

SEQ ID NO: 2416486 - RNA, 19 nt, Artificial Sequence
  Description of Artificial Sequence: Synthetic oligonucleotide
  Sense strand starting at position 2903 of SEQ ID NO: 1886539
aggcaauggguauacuuua

SEQ ID NO: 2416487 - RNA, 19 nt, Artificial Sequence
  Description of Artificial Sequence: Synthetic oligonucleotide
  Antisense strand to SEQ ID NO: 2416486
uaaaguauacccauugccu

SEQ ID NO: 2416488 - RNA, 19 nt, Artificial Sequence
  Description of Artificial Sequence: Synthetic oligonucleotide
  Sense strand starting at position 3049 of SEQ ID NO: 1886539
acucaacauccuugcgacu

SEQ ID NO: 2416489 - RNA, 19 nt, Artificial Sequence
  Description of Artificial Sequence: Synthetic oligonucleotide
  Antisense strand to SEQ ID NO: 2416488
agucgcaaggauguugagu

SEQ ID NO: 2416490 - RNA, 19 nt, Artificial Sequence
  Description of Artificial Sequence: Synthetic oligonucleotide
  Sense strand starting at position 3313 of SEQ ID NO: 1886539
acaagaucucauugacagu

SEQ ID NO: 2416491 - RNA, 19 nt, Artificial Sequence
  Description of Artificial Sequence: Synthetic oligonucleotide
  Antisense strand to SEQ ID NO: 2416490
acugucaaugagaucuugu

SEQ ID NO: 2416492 - RNA, 19 nt, Artificial Sequence
  Description of Artificial Sequence: Synthetic oligonucleotide
  Sense strand starting at position 3387 of SEQ ID NO: 1886539
gcagcaaugggcugaaaua

SEQ ID NO: 2416493 - RNA, 19 nt, Artificial Sequence
  Description of Artificial Sequence: Synthetic oligonucleotide
  Antisense strand to SEQ ID NO: 2416492
uauuucagcccauugcugc

SEQ ID NO: 2416494 - RNA, 19 nt, Artificial Sequence
  Description of Artificial Sequence: Synthetic oligonucleotide
  Sense strand starting at position 3418 of SEQ ID NO: 1886539
ggagcauuccucuaccaaa

SEQ ID NO: 2416495 - RNA, 19 nt, Artificial Sequence
  Description of Artificial Sequence: Synthetic oligonucleotide
  Antisense strand to SEQ ID NO: 2416494
uuugguagaggaaugcucc

SEQ ID NO: 2416496 - RNA, 19 nt, Artificial Sequence
  Description of Artificial Sequence: Synthetic oligonucleotide
  Sense strand starting at position 3484 of SEQ ID NO: 1886539
gucuaaauuccaugggugu

SEQ ID NO: 2416497 - RNA, 19 nt, Artificial Sequence
  Description of Artificial Sequence: Synthetic oligonucleotide
  Antisense strand to SEQ ID NO: 2416496
acacccauggaauuuagac

SEQ ID NO: 2416498 - RNA, 19 nt, Artificial Sequence
  Description of Artificial Sequence: Synthetic oligonucleotide
  Sense strand starting at position 3485 of SEQ ID NO: 1886539
ucuaaauuccauggguguu

SEQ ID NO: 2416499 - RNA, 19 nt, Artificial Sequence
  Description of Artificial Sequence: Synthetic oligonucleotide
  Antisense strand to SEQ ID NO: 2416498
aacacccauggaauuuaga

SEQ ID NO: 2416500 - RNA, 19 nt, Artificial Sequence
  Description of Artificial Sequence: Synthetic oligonucleotide
  Sense strand starting at position 3495 of SEQ ID NO: 1886539
auggguguuaguggauaau

SEQ ID NO: 2416501 - RNA, 19 nt, Artificial Sequence
  Description of Artificial Sequence: Synthetic oligonucleotide
  Antisense strand to SEQ ID NO: 2416500
auuauccacuaacacccau

SEQ ID NO: 2416502 - RNA, 19 nt, Artificial Sequence
  Description of Artificial Sequence: Synthetic oligonucleotide
  Sense strand starting at position 3523 of SEQ ID NO: 1886539
uaaguagcacaagauguua

SEQ ID NO: 2416503 - RNA, 19 nt, Artificial Sequence
  Description of Artificial Sequence: Synthetic oligonucleotide
  Antisense strand to SEQ ID NO: 2416502
uaacaucuugugcuacuua

SEQ ID NO: 2416504 - RNA, 19 nt, Artificial Sequence
  Description of Artificial Sequence: Synthetic oligonucleotide
  Sense strand starting at position 3536 of SEQ ID NO: 1886539
auguuaaucccacaggucu

SEQ ID NO: 2416505 - RNA, 19 nt, Artificial Sequence
  Description of Artificial Sequence: Synthetic oligonucleotide
  Antisense strand to SEQ ID NO: 2416504
agaccugugggauuaacau

SEQ ID NO: 2416506 - RNA, 19 nt, Artificial Sequence
  Description of Artificial Sequence: Synthetic oligonucleotide
  Sense strand starting at position 3595 of SEQ ID NO: 1886539
gauguauuggcacaccuuu

SEQ ID NO: 2416507 - RNA, 19 nt, Artificial Sequence
  Description of Artificial Sequence: Synthetic oligonucleotide
  Antisense strand to SEQ ID NO: 2416506
aaaggugugccaauacauc

SEQ ID NO: 2416508 - RNA, 19 nt, Artificial Sequence
  Description of Artificial Sequence: Synthetic oligonucleotide
  Sense strand starting at position 3612 of SEQ ID NO: 1886539
uuguuauugggugagccuu

SEQ ID NO: 2416509 - RNA, 19 nt, Artificial Sequence
  Description of Artificial Sequence: Synthetic oligonucleotide
  Antisense strand to SEQ ID NO: 2416508
aaggcucacccaauaacaa

SEQ ID NO: 2416510 - RNA, 19 nt, Artificial Sequence
  Description of Artificial Sequence: Synthetic oligonucleotide
  Sense strand starting at position 3618 of SEQ ID NO: 1886539
uugggugagccuugauuca

SEQ ID NO: 2416511 - RNA, 19 nt, Artificial Sequence
  Description of Artificial Sequence: Synthetic oligonucleotide
  Antisense strand to SEQ ID NO: 2416510
ugaaucaaggcucacccaa

SEQ ID NO: 2416512 - RNA, 19 nt, Artificial Sequence
  Description of Artificial Sequence: Synthetic oligonucleotide
  Sense strand starting at position 3724 of SEQ ID NO: 1886539
acuggcauucucuggagga

SEQ ID NO: 2416513 - RNA, 19 nt, Artificial Sequence
  Description of Artificial Sequence: Synthetic oligonucleotide
  Antisense strand to SEQ ID NO: 2416512
uccuccagagaaugccagu

SEQ ID NO: 2416514 - RNA, 19 nt, Artificial Sequence
  Description of Artificial Sequence: Synthetic oligonucleotide
  Sense strand starting at position 3744 of SEQ ID NO: 1886539
gaggauggcuacccauaga

SEQ ID NO: 2416515 - RNA, 19 nt, Artificial Sequence
  Description of Artificial Sequence: Synthetic oligonucleotide
  Antisense strand to SEQ ID NO: 2416514
ucuauggguagccauccuc

SEQ ID NO: 2416516 - RNA, 19 nt, Artificial Sequence
  Description of Artificial Sequence: Synthetic oligonucleotide
  Sense strand starting at position 3784 of SEQ ID NO: 1886539
ccucauaaccucugagaag

SEQ ID NO: 2416517 - RNA, 19 nt, Artificial Sequence
  Description of Artificial Sequence: Synthetic oligonucleotide
  Antisense strand to SEQ ID NO: 2416516
cuucucagagguuaugagg

SEQ ID NO: 2416518 - RNA, 19 nt, Artificial Sequence
  Description of Artificial Sequence: Synthetic oligonucleotide
  Sense strand starting at position 3798 of SEQ ID NO: 1886539
agaagagucacaugugauc

SEQ ID NO: 2416519 - RNA, 19 nt, Artificial Sequence
  Description of Artificial Sequence: Synthetic oligonucleotide
  Antisense strand to SEQ ID NO: 2416518
gaucacaugugacucuucu

SEQ ID NO: 2416520 - RNA, 19 nt, Artificial Sequence
  Description of Artificial Sequence: Synthetic oligonucleotide
  Sense strand starting at position 2151 of SEQ ID NO: 1886540
ccgguauuauuauaagaaa

SEQ ID NO: 2416521 - RNA, 19 nt, Artificial Sequence
  Description of Artificial Sequence: Synthetic oligonucleotide
  Antisense strand to SEQ ID NO: 2416520
uuucuuauaauaauaccgg

SEQ ID NO: 2416522 - RNA, 19 nt, Artificial Sequence
  Description of Artificial Sequence: Synthetic oligonucleotide
  Sense strand starting at position 2348 of SEQ ID NO: 1886541
gaggaaagcgcuuaugcca

SEQ ID NO: 2416523 - RNA, 19 nt, Artificial Sequence
  Description of Artificial Sequence: Synthetic oligonucleotide
  Antisense strand to SEQ ID NO: 2416522
uggcauaagcgcuuuccuc

SEQ ID NO: 2416524 - RNA, 19 nt, Artificial Sequence
  Description of Artificial Sequence: Synthetic oligonucleotide
  Sense strand starting at position 2483 of SEQ ID NO: 1886541
gcuuguagaaccuguggga

SEQ ID NO: 2416525 - RNA, 19 nt, Artificial Sequence
  Description of Artificial Sequence: Synthetic oligonucleotide
  Antisense strand to SEQ ID NO: 2416524
ucccacagguucuacaagc

SEQ ID NO: 2416526 - RNA, 19 nt, Artificial Sequence
  Description of Artificial Sequence: Synthetic oligonucleotide
  Sense strand starting at position 2587 of SEQ ID NO: 1886541
gggucagucaccuggcgau

SEQ ID NO: 2416527 - RNA, 19 nt, Artificial Sequence
  Description of Artificial Sequence: Synthetic oligonucleotide
  Antisense strand to SEQ ID NO: 2416526
aucgccaggugacugaccc

SEQ ID NO: 2416528 - RNA, 19 nt, Artificial Sequence
  Description of Artificial Sequence: Synthetic oligonucleotide
  Sense strand starting at position 2951 of SEQ ID NO: 1886541
ccaggugcuucuguagaca

SEQ ID NO: 2416529 - RNA, 19 nt, Artificial Sequence
  Description of Artificial Sequence: Synthetic oligonucleotide
  Antisense strand to SEQ ID NO: 2416528
ugucuacagaagcaccugg

SEQ ID NO: 2416530 - RNA, 19 nt, Artificial Sequence
  Description of Artificial Sequence: Synthetic oligonucleotide
  Sense strand starting at position 3121 of SEQ ID NO: 1886541
ggacgaaaccuccagucuu

SEQ ID NO: 2416531 - RNA, 19 nt, Artificial Sequence
  Description of Artificial Sequence: Synthetic oligonucleotide
  Antisense strand to SEQ ID NO: 2416530
aagacuggagguuucgucc

SEQ ID NO: 2416532 - RNA, 19 nt, Artificial Sequence
  Description of Artificial Sequence: Synthetic oligonucleotide
  Sense strand starting at position 3295 of SEQ ID NO: 1886541
guccuucuccugcaaggaa

SEQ ID NO: 2416533 - RNA, 19 nt, Artificial Sequence
  Description of Artificial Sequence: Synthetic oligonucleotide
  Antisense strand to SEQ ID NO: 2416532
uuccuugcaggagaaggac

SEQ ID NO: 2416534 - RNA, 19 nt, Artificial Sequence
  Description of Artificial Sequence: Synthetic oligonucleotide
  Sense strand starting at position 3432 of SEQ ID NO: 1886541
ggucaaaggucaggguaga

SEQ ID NO: 2416535 - RNA, 19 nt, Artificial Sequence
  Description of Artificial Sequence: Synthetic oligonucleotide
  Antisense strand to SEQ ID NO: 2416534
ucuacccugaccuuugacc

SEQ ID NO: 2416536 - RNA, 19 nt, Artificial Sequence
  Description of Artificial Sequence: Synthetic oligonucleotide
  Sense strand starting at position 3433 of SEQ ID NO: 1886541
gucaaaggucaggguagau

SEQ ID NO: 2416537 - RNA, 19 nt, Artificial Sequence
  Description of Artificial Sequence: Synthetic oligonucleotide
  Antisense strand to SEQ ID NO: 2416536
aucuacccugaccuuugac

SEQ ID NO: 2416538 - RNA, 19 nt, Artificial Sequence
  Description of Artificial Sequence: Synthetic oligonucleotide
  Sense strand starting at position 3883 of SEQ ID NO: 1886541
gccagugagucuucaggac

SEQ ID NO: 2416539 - RNA, 19 nt, Artificial Sequence
  Description of Artificial Sequence: Synthetic oligonucleotide
  Antisense strand to SEQ ID NO: 2416538
guccugaagacucacuggc

SEQ ID NO: 2416540 - RNA, 19 nt, Artificial Sequence
  Description of Artificial Sequence: Synthetic oligonucleotide
  Sense strand starting at position 2746 of SEQ ID NO: 1886542
aguguaaguacacaugauu

SEQ ID NO: 2416541 - RNA, 19 nt, Artificial Sequence
  Description of Artificial Sequence: Synthetic oligonucleotide
  Antisense strand to SEQ ID NO: 2416540
aaucauguguacuuacacu

SEQ ID NO: 2416542 - RNA, 19 nt, Artificial Sequence
  Description of Artificial Sequence: Synthetic oligonucleotide
  Sense strand starting at position 2755 of SEQ ID NO: 1886542
acacaugauugccagcuau

SEQ ID NO: 2416543 - RNA, 19 nt, Artificial Sequence
  Description of Artificial Sequence: Synthetic oligonucleotide
  Antisense strand to SEQ ID NO: 2416542
auagcuggcaaucaugugu

SEQ ID NO: 2416544 - RNA, 19 nt, Artificial Sequence
  Description of Artificial Sequence: Synthetic oligonucleotide
  Sense strand starting at position 148 of SEQ ID NO: 1886545
ccuuaacugugcuauaguu

SEQ ID NO: 2416545 - RNA, 19 nt, Artificial Sequence
  Description of Artificial Sequence: Synthetic oligonucleotide
  Antisense strand to SEQ ID NO: 2416544
aacuauagcacaguuaagg

SEQ ID NO: 2416546 - RNA, 19 nt, Artificial Sequence
  Description of Artificial Sequence: Synthetic oligonucleotide
  Sense strand starting at position 1086 of SEQ ID NO: 1886545
auggacgcaucuucuaaga

SEQ ID NO: 2416547 - RNA, 19 nt, Artificial Sequence
  Description of Artificial Sequence: Synthetic oligonucleotide
  Antisense strand to SEQ ID NO: 2416546
ucuuagaagaugcguccau

SEQ ID NO: 2416548 - RNA, 19 nt, Artificial Sequence
  Description of Artificial Sequence: Synthetic oligonucleotide
  Sense strand starting at position 1146 of SEQ ID NO: 1886545
agcgccaacucucuaaaua

SEQ ID NO: 2416549 - RNA, 19 nt, Artificial Sequence
  Description of Artificial Sequence: Synthetic oligonucleotide
  Antisense strand to SEQ ID NO: 2416548
uauuuagagaguuggcgcu

SEQ ID NO: 2416550 - RNA, 19 nt, Artificial Sequence
  Description of Artificial Sequence: Synthetic oligonucleotide
  Sense strand starting at position 1147 of SEQ ID NO: 1886545
gcgccaacucucuaaauac

SEQ ID NO: 2416551 - RNA, 19 nt, Artificial Sequence
  Description of Artificial Sequence: Synthetic oligonucleotide
  Antisense strand to SEQ ID NO: 2416550
guauuuagagaguuggcgc

SEQ ID NO: 2416552 - RNA, 19 nt, Artificial Sequence
  Description of Artificial Sequence: Synthetic oligonucleotide
  Sense strand starting at position 1418 of SEQ ID NO: 1886545
ggugaagcgacucaggauu

SEQ ID NO: 2416553 - RNA, 19 nt, Artificial Sequence
  Description of Artificial Sequence: Synthetic oligonucleotide
  Antisense strand to SEQ ID NO: 2416552
aauccugagucgcuucacc

SEQ ID NO: 2416554 - RNA, 19 nt, Artificial Sequence
  Description of Artificial Sequence: Synthetic oligonucleotide
  Sense strand starting at position 1524 of SEQ ID NO: 1886545
agggaguguugggcucgaa

SEQ ID NO: 2416555 - RNA, 19 nt, Artificial Sequence
  Description of Artificial Sequence: Synthetic oligonucleotide
  Antisense strand to SEQ ID NO: 2416554
uucgagcccaacacucccu

SEQ ID NO: 2416556 - RNA, 19 nt, Artificial Sequence
  Description of Artificial Sequence: Synthetic oligonucleotide
  Sense strand starting at position 1996 of SEQ ID NO: 1886545
cuggucagcccuuguagaa

SEQ ID NO: 2416557 - RNA, 19 nt, Artificial Sequence
  Description of Artificial Sequence: Synthetic oligonucleotide
  Antisense strand to SEQ ID NO: 2416556
uucuacaagggcugaccag

SEQ ID NO: 2416558 - RNA, 19 nt, Artificial Sequence
  Description of Artificial Sequence: Synthetic oligonucleotide
  Sense strand starting at position 2038 of SEQ ID NO: 1886545
ggaaguuccauccgggaaa

SEQ ID NO: 2416559 - RNA, 19 nt, Artificial Sequence
  Description of Artificial Sequence: Synthetic oligonucleotide
  Antisense strand to SEQ ID NO: 2416558
uuucccggauggaacuucc

SEQ ID NO: 2416560 - RNA, 19 nt, Artificial Sequence
  Description of Artificial Sequence: Synthetic oligonucleotide
  Sense strand starting at position 181 of SEQ ID NO: 1886546
ggccuagacugucuaacuu

SEQ ID NO: 2416561 - RNA, 19 nt, Artificial Sequence
  Description of Artificial Sequence: Synthetic oligonucleotide
  Antisense strand to SEQ ID NO: 2416560
aaguuagacagucuaggcc

SEQ ID NO: 2416562 - RNA, 19 nt, Artificial Sequence
  Description of Artificial Sequence: Synthetic oligonucleotide
  Sense strand starting at position 220 of SEQ ID NO: 1886546
aagugucaugcccaaaugu

SEQ ID NO: 2416563 - RNA, 19 nt, Artificial Sequence
  Description of Artificial Sequence: Synthetic oligonucleotide
  Antisense strand to SEQ ID NO: 2416562
acauuugggcaugacacuu

SEQ ID NO: 2416564 - RNA, 19 nt, Artificial Sequence
  Description of Artificial Sequence: Synthetic oligonucleotide
  Sense strand starting at position 229 of SEQ ID NO: 1886546
gcccaaauguaaugaugaa

SEQ ID NO: 2416565 - RNA, 19 nt, Artificial Sequence
  Description of Artificial Sequence: Synthetic oligonucleotide
  Antisense strand to SEQ ID NO: 2416564
uucaucauuacauuugggc

SEQ ID NO: 2416566 - RNA, 19 nt, Artificial Sequence
  Description of Artificial Sequence: Synthetic oligonucleotide
  Sense strand starting at position 349 of SEQ ID NO: 1886546
caggcaugcgugugagaug

SEQ ID NO: 2416567 - RNA, 19 nt, Artificial Sequence
  Description of Artificial Sequence: Synthetic oligonucleotide
  Antisense strand to SEQ ID NO: 2416566
caucucacacgcaugccug

SEQ ID NO: 2416568 - RNA, 19 nt, Artificial Sequence
  Description of Artificial Sequence: Synthetic oligonucleotide
  Sense strand starting at position 356 of SEQ ID NO: 1886546
gcgugugagauguacacua

SEQ ID NO: 2416569 - RNA, 19 nt, Artificial Sequence
  Description of Artificial Sequence: Synthetic oligonucleotide
  Antisense strand to SEQ ID NO: 2416568
uaguguacaucucacacgc

SEQ ID NO: 2416570 - RNA, 19 nt, Artificial Sequence
  Description of Artificial Sequence: Synthetic oligonucleotide
  Sense strand starting at position 358 of SEQ ID NO: 1886546
gugugagauguacacuaau

SEQ ID NO: 2416571 - RNA, 19 nt, Artificial Sequence
  Description of Artificial Sequence: Synthetic oligonucleotide
  Antisense strand to SEQ ID NO: 2416570
auuaguguacaucucacac

SEQ ID NO: 2416572 - RNA, 19 nt, Artificial Sequence
  Description of Artificial Sequence: Synthetic oligonucleotide
  Sense strand starting at position 364 of SEQ ID NO: 1886546
gauguacacuaauagcaga

SEQ ID NO: 2416573 - RNA, 19 nt, Artificial Sequence
  Description of Artificial Sequence: Synthetic oligonucleotide
  Antisense strand to SEQ ID NO: 2416572
ucugcuauuaguguacauc

SEQ ID NO: 2416574 - RNA, 19 nt, Artificial Sequence
  Description of Artificial Sequence: Synthetic oligonucleotide
  Sense strand starting at position 2046 of SEQ ID NO: 1886546
uuuggaugauaaugagaau

SEQ ID NO: 2416575 - RNA, 19 nt, Artificial Sequence
  Description of Artificial Sequence: Synthetic oligonucleotide
  Antisense strand to SEQ ID NO: 2416574
auucucauuaucauccaaa

SEQ ID NO: 2416576 - RNA, 19 nt, Artificial Sequence
  Description of Artificial Sequence: Synthetic oligonucleotide
  Sense strand starting at position 2326 of SEQ ID NO: 1886546
aaggcaacauggugaaauu

SEQ ID NO: 2416577 - RNA, 19 nt, Artificial Sequence
  Description of Artificial Sequence: Synthetic oligonucleotide
  Antisense strand to SEQ ID NO: 2416576
aauuucaccauguugccuu

SEQ ID NO: 2416578 - RNA, 19 nt, Artificial Sequence
  Description of Artificial Sequence: Synthetic oligonucleotide
  Sense strand starting at position 2504 of SEQ ID NO: 1886546
gagccagaccuugacuuua

SEQ ID NO: 2416579 - RNA, 19 nt, Artificial Sequence
  Description of Artificial Sequence: Synthetic oligonucleotide
  Antisense strand to SEQ ID NO: 2416578
uaaagucaaggucuggcuc

SEQ ID NO: 2416580 - RNA, 19 nt, Artificial Sequence
  Description of Artificial Sequence: Synthetic oligonucleotide
  Sense strand starting at position 2506 of SEQ ID NO: 1886546
gccagaccuugacuuuaaa

SEQ ID NO: 2416581 - RNA, 19 nt, Artificial Sequence
  Description of Artificial Sequence: Synthetic oligonucleotide
  Antisense strand to SEQ ID NO: 2416580
uuuaaagucaaggucuggc

SEQ ID NO: 2416582 - RNA, 19 nt, Artificial Sequence
  Description of Artificial Sequence: Synthetic oligonucleotide
  Sense strand starting at position 2709 of SEQ ID NO: 1886546
gaaggugaaugguggguaa

SEQ ID NO: 2416583 - RNA, 19 nt, Artificial Sequence
  Description of Artificial Sequence: Synthetic oligonucleotide
  Antisense strand to SEQ ID NO: 2416582
uuacccaccauucaccuuc

SEQ ID NO: 2416584 - RNA, 19 nt, Artificial Sequence
  Description of Artificial Sequence: Synthetic oligonucleotide
  Sense strand starting at position 3078 of SEQ ID NO: 1886546
agacuuugcuuccugauca

SEQ ID NO: 2416585 - RNA, 19 nt, Artificial Sequence
  Description of Artificial Sequence: Synthetic oligonucleotide
  Antisense strand to SEQ ID NO: 2416584
ugaucaggaagcaaagucu

SEQ ID NO: 2416586 - RNA, 19 nt, Artificial Sequence
  Description of Artificial Sequence: Synthetic oligonucleotide
  Sense strand starting at position 3082 of SEQ ID NO: 1886546
uuugcuuccugaucaaugu

SEQ ID NO: 2416587 - RNA, 19 nt, Artificial Sequence
  Description of Artificial Sequence: Synthetic oligonucleotide
  Antisense strand to SEQ ID NO: 2416586
acauugaucaggaagcaaa

SEQ ID NO: 2416588 - RNA, 19 nt, Artificial Sequence
  Description of Artificial Sequence: Synthetic oligonucleotide
  Sense strand starting at position 3083 of SEQ ID NO: 1886546
uugcuuccugaucaaugua

SEQ ID NO: 2416589 - RNA, 19 nt, Artificial Sequence
  Description of Artificial Sequence: Synthetic oligonucleotide
  Antisense strand to SEQ ID NO: 2416588
uacauugaucaggaagcaa

SEQ ID NO: 2416590 - RNA, 19 nt, Artificial Sequence
  Description of Artificial Sequence: Synthetic oligonucleotide
  Sense strand starting at position 3689 of SEQ ID NO: 1886546
ccaccauugugauuaguuu

SEQ ID NO: 2416591 - RNA, 19 nt, Artificial Sequence
  Description of Artificial Sequence: Synthetic oligonucleotide
  Antisense strand to SEQ ID NO: 2416590
aaacuaaucacaauggugg

SEQ ID NO: 2416592 - RNA, 19 nt, Artificial Sequence
  Description of Artificial Sequence: Synthetic oligonucleotide
  Sense strand starting at position 236 of SEQ ID NO: 1886548
cuucuuaggugaucuggga

SEQ ID NO: 2416593 - RNA, 19 nt, Artificial Sequence
  Description of Artificial Sequence: Synthetic oligonucleotide
  Antisense strand to SEQ ID NO: 2416592
ucccagaucaccuaagaag

SEQ ID NO: 2416594 - RNA, 19 nt, Artificial Sequence
  Description of Artificial Sequence: Synthetic oligonucleotide
  Sense strand starting at position 303 of SEQ ID NO: 1886548
cgacuuguauaucuaacuu

SEQ ID NO: 2416595 - RNA, 19 nt, Artificial Sequence
  Description of Artificial Sequence: Synthetic oligonucleotide
  Antisense strand to SEQ ID NO: 2416594
aaguuagauauacaagucg

SEQ ID NO: 2416596 - RNA, 19 nt, Artificial Sequence
  Description of Artificial Sequence: Synthetic oligonucleotide
  Sense strand starting at position 417 of SEQ ID NO: 1886548
ggaguuaaccuugguuccu

SEQ ID NO: 2416597 - RNA, 19 nt, Artificial Sequence
  Description of Artificial Sequence: Synthetic oligonucleotide
  Antisense strand to SEQ ID NO: 2416596
aggaaccaagguuaacucc

SEQ ID NO: 2416598 - RNA, 19 nt, Artificial Sequence
  Description of Artificial Sequence: Synthetic oligonucleotide
  Sense strand starting at position 496 of SEQ ID NO: 1886548
auauaugcugaauggaauu

SEQ ID NO: 2416599 - RNA, 19 nt, Artificial Sequence
  Description of Artificial Sequence: Synthetic oligonucleotide
  Antisense strand to SEQ ID NO: 2416598
aauuccauucagcauauau

SEQ ID NO: 2416600 - RNA, 19 nt, Artificial Sequence
  Description of Artificial Sequence: Synthetic oligonucleotide
  Sense strand starting at position 642 of SEQ ID NO: 1886548
gauucuccugaguagcaga

SEQ ID NO: 2416601 - RNA, 19 nt, Artificial Sequence
  Description of Artificial Sequence: Synthetic oligonucleotide
  Antisense strand to SEQ ID NO: 2416600
ucugcuacucaggagaauc

SEQ ID NO: 2416602 - RNA, 19 nt, Artificial Sequence
  Description of Artificial Sequence: Synthetic oligonucleotide
  Sense strand starting at position 1273 of SEQ ID NO: 1886548
gcugauaccuucuuuauug

SEQ ID NO: 2416603 - RNA, 19 nt, Artificial Sequence
  Description of Artificial Sequence: Synthetic oligonucleotide
  Antisense strand to SEQ ID NO: 2416602
caauaaagaagguaucagc

SEQ ID NO: 2416604 - RNA, 19 nt, Artificial Sequence
  Description of Artificial Sequence: Synthetic oligonucleotide
  Sense strand starting at position 1955 of SEQ ID NO: 1886548
gggagucucgacugacuga

SEQ ID NO: 2416605 - RNA, 19 nt, Artificial Sequence
  Description of Artificial Sequence: Synthetic oligonucleotide
  Antisense strand to SEQ ID NO: 2416604
ucagucagucgagacuccc

SEQ ID NO: 2416606 - RNA, 19 nt, Artificial Sequence
  Description of Artificial Sequence: Synthetic oligonucleotide
  Sense strand starting at position 2869 of SEQ ID NO: 1886548
auuaacagcccuggaauua

SEQ ID NO: 2416607 - RNA, 19 nt, Artificial Sequence
  Description of Artificial Sequence: Synthetic oligonucleotide
  Antisense strand to SEQ ID NO: 2416606
uaauuccagggcuguuaau

SEQ ID NO: 2416608 - RNA, 19 nt, Artificial Sequence
  Description of Artificial Sequence: Synthetic oligonucleotide
  Sense strand starting at position 2916 of SEQ ID NO: 1886548
gcaccuuugcuauaaacga

SEQ ID NO: 2416609 - RNA, 19 nt, Artificial Sequence
  Description of Artificial Sequence: Synthetic oligonucleotide
  Antisense strand to SEQ ID NO: 2416608
ucguuuauagcaaaggugc

SEQ ID NO: 2416610 - RNA, 19 nt, Artificial Sequence
  Description of Artificial Sequence: Synthetic oligonucleotide
  Sense strand starting at position 2923 of SEQ ID NO: 1886548
ugcuauaaacgauaaccau

SEQ ID NO: 2416611 - RNA, 19 nt, Artificial Sequence
  Description of Artificial Sequence: Synthetic oligonucleotide
  Antisense strand to SEQ ID NO: 2416610
augguuaucguuuauagca

SEQ ID NO: 2416612 - RNA, 19 nt, Artificial Sequence
  Description of Artificial Sequence: Synthetic oligonucleotide
  Sense strand starting at position 2973 of SEQ ID NO: 1886548
gccuguauccucuauagga

SEQ ID NO: 2416613 - RNA, 19 nt, Artificial Sequence
  Description of Artificial Sequence: Synthetic oligonucleotide
  Antisense strand to SEQ ID NO: 2416612
uccuauagaggauacaggc

SEQ ID NO: 2416614 - RNA, 19 nt, Artificial Sequence
  Description of Artificial Sequence: Synthetic oligonucleotide
  Sense strand starting at position 3001 of SEQ ID NO: 1886548
gggugacaaauguauuguu

SEQ ID NO: 2416615 - RNA, 19 nt, Artificial Sequence
  Description of Artificial Sequence: Synthetic oligonucleotide
  Antisense strand to SEQ ID NO: 2416614
aacaauacauuugucaccc

SEQ ID NO: 2416616 - RNA, 19 nt, Artificial Sequence
  Description of Artificial Sequence: Synthetic oligonucleotide
  Sense strand starting at position 3200 of SEQ ID NO: 1886548
cccagaucuuaacuguaag

SEQ ID NO: 2416617 - RNA, 19 nt, Artificial Sequence
  Description of Artificial Sequence: Synthetic oligonucleotide
  Antisense strand to SEQ ID NO: 2416616
cuuacaguuaagaucuggg

SEQ ID NO: 2416618 - RNA, 19 nt, Artificial Sequence
  Description of Artificial Sequence: Synthetic oligonucleotide
  Sense strand starting at position 3203 of SEQ ID NO: 1886548
agaucuuaacuguaagcuu

SEQ ID NO: 2416619 - RNA, 19 nt, Artificial Sequence
  Description of Artificial Sequence: Synthetic oligonucleotide
  Antisense strand to SEQ ID NO: 2416618
aagcuuacaguuaagaucu

SEQ ID NO: 2416620 - RNA, 19 nt, Artificial Sequence
  Description of Artificial Sequence: Synthetic oligonucleotide
  Sense strand starting at position 3299 of SEQ ID NO: 1886548
acuggaauuccagagccuu

SEQ ID NO: 2416621 - RNA, 19 nt, Artificial Sequence
  Description of Artificial Sequence: Synthetic oligonucleotide
  Antisense strand to SEQ ID NO: 2416620
aaggcucuggaauuccagu

SEQ ID NO: 2416622 - RNA, 19 nt, Artificial Sequence
  Description of Artificial Sequence: Synthetic oligonucleotide
  Sense strand starting at position 3335 of SEQ ID NO: 1886548
ggcaucauagcccaggaau

SEQ ID NO: 2416623 - RNA, 19 nt, Artificial Sequence
  Description of Artificial Sequence: Synthetic oligonucleotide
  Antisense strand to SEQ ID NO: 2416622
auuccugggcuaugaugcc

SEQ ID NO: 2416624 - RNA, 19 nt, Artificial Sequence
  Description of Artificial Sequence: Synthetic oligonucleotide
  Sense strand starting at position 3357 of SEQ ID NO: 1886548
ggucucuugcucgaaauac

SEQ ID NO: 2416625 - RNA, 19 nt, Artificial Sequence
  Description of Artificial Sequence: Synthetic oligonucleotide
  Antisense strand to SEQ ID NO: 2416624
guauuucgagcaagagacc

SEQ ID NO: 2416626 - RNA, 19 nt, Artificial Sequence
  Description of Artificial Sequence: Synthetic oligonucleotide
  Sense strand starting at position 3366 of SEQ ID NO: 1886548
cucgaaauacuuuaugugu

SEQ ID NO: 2416627 - RNA, 19 nt, Artificial Sequence
  Description of Artificial Sequence: Synthetic oligonucleotide
  Antisense strand to SEQ ID NO: 2416626
acacauaaaguauuucgag

SEQ ID NO: 2416628 - RNA, 19 nt, Artificial Sequence
  Description of Artificial Sequence: Synthetic oligonucleotide
  Sense strand starting at position 3369 of SEQ ID NO: 1886548
gaaauacuuuaugugugag

SEQ ID NO: 2416629 - RNA, 19 nt, Artificial Sequence
  Description of Artificial Sequence: Synthetic oligonucleotide
  Antisense strand to SEQ ID NO: 2416628
cucacacauaaaguauuuc

SEQ ID NO: 2416630 - RNA, 19 nt, Artificial Sequence
  Description of Artificial Sequence: Synthetic oligonucleotide
  Sense strand starting at position 3371 of SEQ ID NO: 1886548
aauacuuuaugugugagga

SEQ ID NO: 2416631 - RNA, 19 nt, Artificial Sequence
  Description of Artificial Sequence: Synthetic oligonucleotide
  Antisense strand to SEQ ID NO: 2416630
uccucacacauaaaguauu

SEQ ID NO: 2416632 - RNA, 19 nt, Artificial Sequence
  Description of Artificial Sequence: Synthetic oligonucleotide
  Sense strand starting at position 3372 of SEQ ID NO: 1886548
auacuuuaugugugaggaa

SEQ ID NO: 2416633 - RNA, 19 nt, Artificial Sequence
  Description of Artificial Sequence: Synthetic oligonucleotide
  Antisense strand to SEQ ID NO: 2416632
uuccucacacauaaaguau

SEQ ID NO: 2416634 - RNA, 19 nt, Artificial Sequence
  Description of Artificial Sequence: Synthetic oligonucleotide
  Sense strand starting at position 3435 of SEQ ID NO: 1886548
ucuggauuucuguguuucu

SEQ ID NO: 2416635 - RNA, 19 nt, Artificial Sequence
  Description of Artificial Sequence: Synthetic oligonucleotide
  Antisense strand to SEQ ID NO: 2416634
agaaacacagaaauccaga

SEQ ID NO: 2416636 - RNA, 19 nt, Artificial Sequence
  Description of Artificial Sequence: Synthetic oligonucleotide
  Sense strand starting at position 3551 of SEQ ID NO: 1886548
auuuaugugugacacacaa

SEQ ID NO: 2416637 - RNA, 19 nt, Artificial Sequence
  Description of Artificial Sequence: Synthetic oligonucleotide
  Antisense strand to SEQ ID NO: 2416636
uugugugucacacauaaau

SEQ ID NO: 2416638 - RNA, 19 nt, Artificial Sequence
  Description of Artificial Sequence: Synthetic oligonucleotide
  Sense strand starting at position 3646 of SEQ ID NO: 1886548
gagacagugugaucuguuu

SEQ ID NO: 2416639 - RNA, 19 nt, Artificial Sequence
  Description of Artificial Sequence: Synthetic oligonucleotide
  Antisense strand to SEQ ID NO: 2416638
aaacagaucacacugucuc

SEQ ID NO: 2416640 - RNA, 19 nt, Artificial Sequence
  Description of Artificial Sequence: Synthetic oligonucleotide
  Sense strand starting at position 3648 of SEQ ID NO: 1886548
gacagugugaucuguuuag

SEQ ID NO: 2416641 - RNA, 19 nt, Artificial Sequence
  Description of Artificial Sequence: Synthetic oligonucleotide
  Antisense strand to SEQ ID NO: 2416640
cuaaacagaucacacuguc

SEQ ID NO: 2416642 - RNA, 19 nt, Artificial Sequence
  Description of Artificial Sequence: Synthetic oligonucleotide
  Sense strand starting at position 3670 of SEQ ID NO: 1886548
ugguuuaagggcgaauaca

SEQ ID NO: 2416643 - RNA, 19 nt, Artificial Sequence
  Description of Artificial Sequence: Synthetic oligonucleotide
  Antisense strand to SEQ ID NO: 2416642
uguauucgcccuuaaacca

SEQ ID NO: 2416644 - RNA, 19 nt, Artificial Sequence
  Description of Artificial Sequence: Synthetic oligonucleotide
  Sense strand starting at position 3690 of SEQ ID NO: 1886548
accaauaacggaugugaaa

SEQ ID NO: 2416645 - RNA, 19 nt, Artificial Sequence
  Description of Artificial Sequence: Synthetic oligonucleotide
  Antisense strand to SEQ ID NO: 2416644
uuucacauccguuauuggu

SEQ ID NO: 2416646 - RNA, 19 nt, Artificial Sequence
  Description of Artificial Sequence: Synthetic oligonucleotide
  Sense strand starting at position 3735 of SEQ ID NO: 1886548
gaaggccucuuuguugaua

SEQ ID NO: 2416647 - RNA, 19 nt, Artificial Sequence
  Description of Artificial Sequence: Synthetic oligonucleotide
  Antisense strand to SEQ ID NO: 2416646
uaucaacaaagaggccuuc

SEQ ID NO: 2416648 - RNA, 19 nt, Artificial Sequence
  Description of Artificial Sequence: Synthetic oligonucleotide
  Sense strand starting at position 3736 of SEQ ID NO: 1886548
aaggccucuuuguugauau

SEQ ID NO: 2416649 - RNA, 19 nt, Artificial Sequence
  Description of Artificial Sequence: Synthetic oligonucleotide
  Antisense strand to SEQ ID NO: 2416648
auaucaacaaagaggccuu

SEQ ID NO: 2416650 - RNA, 19 nt, Artificial Sequence
  Description of Artificial Sequence: Synthetic oligonucleotide
  Sense strand starting at position 3802 of SEQ ID NO: 1886548
cagauaucagagugaagug

SEQ ID NO: 2416651 - RNA, 19 nt, Artificial Sequence
  Description of Artificial Sequence: Synthetic oligonucleotide
  Antisense strand to SEQ ID NO: 2416650
cacuucacucugauaucug

SEQ ID NO: 2416652 - RNA, 19 nt, Artificial Sequence
  Description of Artificial Sequence: Synthetic oligonucleotide
  Sense strand starting at position 3803 of SEQ ID NO: 1886548
agauaucagagugaagugu

SEQ ID NO: 2416653 - RNA, 19 nt, Artificial Sequence
  Description of Artificial Sequence: Synthetic oligonucleotide
  Antisense strand to SEQ ID NO: 2416652
acacuucacucugauaucu

SEQ ID NO: 2416654 - RNA, 19 nt, Artificial Sequence
  Description of Artificial Sequence: Synthetic oligonucleotide
  Sense strand starting at position 3840 of SEQ ID NO: 1886548
guugauacauucuucggaa

SEQ ID NO: 2416655 - RNA, 19 nt, Artificial Sequence
  Description of Artificial Sequence: Synthetic oligonucleotide
  Antisense strand to SEQ ID NO: 2416654
uuccgaagaauguaucaac

SEQ ID NO: 2416656 - RNA, 19 nt, Artificial Sequence
  Description of Artificial Sequence: Synthetic oligonucleotide
  Sense strand starting at position 3842 of SEQ ID NO: 1886548
ugauacauucuucggaaau

SEQ ID NO: 2416657 - RNA, 19 nt, Artificial Sequence
  Description of Artificial Sequence: Synthetic oligonucleotide
  Antisense strand to SEQ ID NO: 2416656
auuuccgaagaauguauca

SEQ ID NO: 2416658 - RNA, 19 nt, Artificial Sequence
  Description of Artificial Sequence: Synthetic oligonucleotide
  Sense strand starting at position 3888 of SEQ ID NO: 1886548
gaagaacuuuaagagauag

SEQ ID NO: 2416659 - RNA, 19 nt, Artificial Sequence
  Description of Artificial Sequence: Synthetic oligonucleotide
  Antisense strand to SEQ ID NO: 2416658
cuaucucuuaaaguucuuc

SEQ ID NO: 2416660 - RNA, 19 nt, Artificial Sequence
  Description of Artificial Sequence: Synthetic oligonucleotide
  Sense strand starting at position 3898 of SEQ ID NO: 1886548
aagagauagugccuacauu

SEQ ID NO: 2416661 - RNA, 19 nt, Artificial Sequence
  Description of Artificial Sequence: Synthetic oligonucleotide
  Antisense strand to SEQ ID NO: 2416660
aauguaggcacuaucucuu

SEQ ID NO: 2416662 - RNA, 19 nt, Artificial Sequence
  Description of Artificial Sequence: Synthetic oligonucleotide
  Sense strand starting at position 3917 of SEQ ID NO: 1886548
uucggaguccuuugauuag

SEQ ID NO: 2416663 - RNA, 19 nt, Artificial Sequence
  Description of Artificial Sequence: Synthetic oligonucleotide
  Antisense strand to SEQ ID NO: 2416662
cuaaucaaaggacuccgaa

SEQ ID NO: 2416664 - RNA, 19 nt, Artificial Sequence
  Description of Artificial Sequence: Synthetic oligonucleotide
  Sense strand starting at position 3920 of SEQ ID NO: 1886548
ggaguccuuugauuagaaa

SEQ ID NO: 2416665 - RNA, 19 nt, Artificial Sequence
  Description of Artificial Sequence: Synthetic oligonucleotide
  Antisense strand to SEQ ID NO: 2416664
uuucuaaucaaaggacucc

SEQ ID NO: 2416666 - RNA, 19 nt, Artificial Sequence
  Description of Artificial Sequence: Synthetic oligonucleotide
  Sense strand starting at position 3958 of SEQ ID NO: 1886548
uucuguaacugagcuugau

SEQ ID NO: 2416667 - RNA, 19 nt, Artificial Sequence
  Description of Artificial Sequence: Synthetic oligonucleotide
  Antisense strand to SEQ ID NO: 2416666
aucaagcucaguuacagaa

SEQ ID NO: 2416668 - RNA, 19 nt, Artificial Sequence
  Description of Artificial Sequence: Synthetic oligonucleotide
  Sense strand starting at position 3961 of SEQ ID NO: 1886548
uguaacugagcuugauaug

SEQ ID NO: 2416669 - RNA, 19 nt, Artificial Sequence
  Description of Artificial Sequence: Synthetic oligonucleotide
  Antisense strand to SEQ ID NO: 2416668
cauaucaagcucaguuaca

SEQ ID NO: 2416670 - RNA, 19 nt, Artificial Sequence
  Description of Artificial Sequence: Synthetic oligonucleotide
  Sense strand starting at position 3978 of SEQ ID NO: 1886548
ugcauagugcuaggaagau

SEQ ID NO: 2416671 - RNA, 19 nt, Artificial Sequence
  Description of Artificial Sequence: Synthetic oligonucleotide
  Antisense strand to SEQ ID NO: 2416670
aucuuccuagcacuaugca

SEQ ID NO: 2416672 - RNA, 19 nt, Artificial Sequence
  Description of Artificial Sequence: Synthetic oligonucleotide
  Sense strand starting at position 49 of SEQ ID NO: 1886547
ggaguuaaccuugguuccu

SEQ ID NO: 2416673 - RNA, 19 nt, Artificial Sequence
  Description of Artificial Sequence: Synthetic oligonucleotide
  Antisense strand to SEQ ID NO: 2416672
aggaaccaagguuaacucc

SEQ ID NO: 2416674 - RNA, 19 nt, Artificial Sequence
  Description of Artificial Sequence: Synthetic oligonucleotide
  Sense strand starting at position 128 of SEQ ID NO: 1886547
auauaugcugaauggaauu

SEQ ID NO: 2416675 - RNA, 19 nt, Artificial Sequence
  Description of Artificial Sequence: Synthetic oligonucleotide
  Antisense strand to SEQ ID NO: 2416674
aauuccauucagcauauau

SEQ ID NO: 2416676 - RNA, 19 nt, Artificial Sequence
  Description of Artificial Sequence: Synthetic oligonucleotide
  Sense strand starting at position 274 of SEQ ID NO: 1886547
gauucuccugaguagcaga

SEQ ID NO: 2416677 - RNA, 19 nt, Artificial Sequence
  Description of Artificial Sequence: Synthetic oligonucleotide
  Antisense strand to SEQ ID NO: 2416676
ucugcuacucaggagaauc

SEQ ID NO: 2416678 - RNA, 19 nt, Artificial Sequence
  Description of Artificial Sequence: Synthetic oligonucleotide
  Sense strand starting at position 905 of SEQ ID NO: 1886547
gcugauaccuucuuuauug

SEQ ID NO: 2416679 - RNA, 19 nt, Artificial Sequence
  Description of Artificial Sequence: Synthetic oligonucleotide
  Antisense strand to SEQ ID NO: 2416678
caauaaagaagguaucagc

SEQ ID NO: 2416680 - RNA, 19 nt, Artificial Sequence
  Description of Artificial Sequence: Synthetic oligonucleotide
  Sense strand starting at position 1587 of SEQ ID NO: 1886547
gggagucucgacugacuga

SEQ ID NO: 2416681 - RNA, 19 nt, Artificial Sequence
  Description of Artificial Sequence: Synthetic oligonucleotide
  Antisense strand to SEQ ID NO: 2416680
ucagucagucgagacuccc

SEQ ID NO: 2416682 - RNA, 19 nt, Artificial Sequence
  Description of Artificial Sequence: Synthetic oligonucleotide
  Sense strand starting at position 2501 of SEQ ID NO: 1886547
auuaacagcccuggaauua

SEQ ID NO: 2416683 - RNA, 19 nt, Artificial Sequence
  Description of Artificial Sequence: Synthetic oligonucleotide
  Antisense strand to SEQ ID NO: 2416682
uaauuccagggcuguuaau

SEQ ID NO: 2416684 - RNA, 19 nt, Artificial Sequence
  Description of Artificial Sequence: Synthetic oligonucleotide
  Sense strand starting at position 2548 of SEQ ID NO: 1886547
gcaccuuugcuauaaacga

SEQ ID NO: 2416685 - RNA, 19 nt, Artificial Sequence
  Description of Artificial Sequence: Synthetic oligonucleotide
  Antisense strand to SEQ ID NO: 2416684
ucguuuauagcaaaggugc

SEQ ID NO: 2416686 - RNA, 19 nt, Artificial Sequence
  Description of Artificial Sequence: Synthetic oligonucleotide
  Sense strand starting at position 2555 of SEQ ID NO: 1886547
ugcuauaaacgauaaccau

SEQ ID NO: 2416687 - RNA, 19 nt, Artificial Sequence
  Description of Artificial Sequence: Synthetic oligonucleotide
  Antisense strand to SEQ ID NO: 2416686
augguuaucguuuauagca

SEQ ID NO: 2416688 - RNA, 19 nt, Artificial Sequence
  Description of Artificial Sequence: Synthetic oligonucleotide
  Sense strand starting at position 2605 of SEQ ID NO: 1886547
gccuguauccucuauagga

SEQ ID NO: 2416689 - RNA, 19 nt, Artificial Sequence
  Description of Artificial Sequence: Synthetic oligonucleotide
  Antisense strand to SEQ ID NO: 2416688
uccuauagaggauacaggc

SEQ ID NO: 2416690 - RNA, 19 nt, Artificial Sequence
  Description of Artificial Sequence: Synthetic oligonucleotide
  Sense strand starting at position 2633 of SEQ ID NO: 1886547
gggugacaaauguauuguu

SEQ ID NO: 2416691 - RNA, 19 nt, Artificial Sequence
  Description of Artificial Sequence: Synthetic oligonucleotide
  Antisense strand to SEQ ID NO: 2416690
aacaauacauuugucaccc

SEQ ID NO: 2416692 - RNA, 19 nt, Artificial Sequence
  Description of Artificial Sequence: Synthetic oligonucleotide
  Sense strand starting at position 2832 of SEQ ID NO: 1886547
cccagaucuuaacuguaag

SEQ ID NO: 2416693 - RNA, 19 nt, Artificial Sequence
  Description of Artificial Sequence: Synthetic oligonucleotide
  Antisense strand to SEQ ID NO: 2416692
cuuacaguuaagaucuggg

SEQ ID NO: 2416694 - RNA, 19 nt, Artificial Sequence
  Description of Artificial Sequence: Synthetic oligonucleotide
  Sense strand starting at position 2835 of SEQ ID NO: 1886547
agaucuuaacuguaagcuu

SEQ ID NO: 2416695 - RNA, 19 nt, Artificial Sequence
  Description of Artificial Sequence: Synthetic oligonucleotide
  Antisense strand to SEQ ID NO: 2416694
aagcuuacaguuaagaucu

SEQ ID NO: 2416696 - RNA, 19 nt, Artificial Sequence
  Description of Artificial Sequence: Synthetic oligonucleotide
  Sense strand starting at position 2931 of SEQ ID NO: 1886547
acuggaauuccagagccuu

SEQ ID NO: 2416697 - RNA, 19 nt, Artificial Sequence
  Description of Artificial Sequence: Synthetic oligonucleotide
  Antisense strand to SEQ ID NO: 2416696
aaggcucuggaauuccagu

SEQ ID NO: 2416698 - RNA, 19 nt, Artificial Sequence
  Description of Artificial Sequence: Synthetic oligonucleotide
  Sense strand starting at position 2967 of SEQ ID NO: 1886547
ggcaucauagcccaggaau

SEQ ID NO: 2416699 - RNA, 19 nt, Artificial Sequence
  Description of Artificial Sequence: Synthetic oligonucleotide
  Antisense strand to SEQ ID NO: 2416698
auuccugggcuaugaugcc

SEQ ID NO: 2416700 - RNA, 19 nt, Artificial Sequence
  Description of Artificial Sequence: Synthetic oligonucleotide
  Sense strand starting at position 2989 of SEQ ID NO: 1886547
ggucucuugcucgaaauac

SEQ ID NO: 2416701 - RNA, 19 nt, Artificial Sequence
  Description of Artificial Sequence: Synthetic oligonucleotide
  Antisense strand to SEQ ID NO: 2416700
guauuucgagcaagagacc

SEQ ID NO: 2416702 - RNA, 19 nt, Artificial Sequence
  Description of Artificial Sequence: Synthetic oligonucleotide
  Sense strand starting at position 2998 of SEQ ID NO: 1886547
cucgaaauacuuuaugugu

SEQ ID NO: 2416703 - RNA, 19 nt, Artificial Sequence
  Description of Artificial Sequence: Synthetic oligonucleotide
  Antisense strand to SEQ ID NO: 2416702
acacauaaaguauuucgag

SEQ ID NO: 2416704 - RNA, 19 nt, Artificial Sequence
  Description of Artificial Sequence: Synthetic oligonucleotide
  Sense strand starting at position 3001 of SEQ ID NO: 1886547
gaaauacuuuaugugugag

SEQ ID NO: 2416705 - RNA, 19 nt, Artificial Sequence
  Description of Artificial Sequence: Synthetic oligonucleotide
  Antisense strand to SEQ ID NO: 2416704
cucacacauaaaguauuuc

SEQ ID NO: 2416706 - RNA, 19 nt, Artificial Sequence
  Description of Artificial Sequence: Synthetic oligonucleotide
  Sense strand starting at position 3003 of SEQ ID NO: 1886547
aauacuuuaugugugagga

SEQ ID NO: 2416707 - RNA, 19 nt, Artificial Sequence
  Description of Artificial Sequence: Synthetic oligonucleotide
  Antisense strand to SEQ ID NO: 2416706
uccucacacauaaaguauu

SEQ ID NO: 2416708 - RNA, 19 nt, Artificial Sequence
  Description of Artificial Sequence: Synthetic oligonucleotide
  Sense strand starting at position 3004 of SEQ ID NO: 1886547
auacuuuaugugugaggaa

SEQ ID NO: 2416709 - RNA, 19 nt, Artificial Sequence
  Description of Artificial Sequence: Synthetic oligonucleotide
  Antisense strand to SEQ ID NO: 2416708
uuccucacacauaaaguau

SEQ ID NO: 2416710 - RNA, 19 nt, Artificial Sequence
  Description of Artificial Sequence: Synthetic oligonucleotide
  Sense strand starting at position 3067 of SEQ ID NO: 1886547
ucuggauuucuguguuucu

SEQ ID NO: 2416711 - RNA, 19 nt, Artificial Sequence
  Description of Artificial Sequence: Synthetic oligonucleotide
  Antisense strand to SEQ ID NO: 2416710
agaaacacagaaauccaga

SEQ ID NO: 2416712 - RNA, 19 nt, Artificial Sequence
  Description of Artificial Sequence: Synthetic oligonucleotide
  Sense strand starting at position 3183 of SEQ ID NO: 1886547
auuuaugugugacacacaa

SEQ ID NO: 2416713 - RNA, 19 nt, Artificial Sequence
  Description of Artificial Sequence: Synthetic oligonucleotide
  Antisense strand to SEQ ID NO: 2416712
uugugugucacacauaaau

SEQ ID NO: 2416714 - RNA, 19 nt, Artificial Sequence
  Description of Artificial Sequence: Synthetic oligonucleotide
  Sense strand starting at position 3278 of SEQ ID NO: 1886547
gagacagugugaucuguuu

SEQ ID NO: 2416715 - RNA, 19 nt, Artificial Sequence
  Description of Artificial Sequence: Synthetic oligonucleotide
  Antisense strand to SEQ ID NO: 2416714
aaacagaucacacugucuc

SEQ ID NO: 2416716 - RNA, 19 nt, Artificial Sequence
  Description of Artificial Sequence: Synthetic oligonucleotide
  Sense strand starting at position 3302 of SEQ ID NO: 1886547
ugguuuaagggcgaauaca

SEQ ID NO: 2416717 - RNA, 19 nt, Artificial Sequence
  Description of Artificial Sequence: Synthetic oligonucleotide
  Antisense strand to SEQ ID NO: 2416716
uguauucgcccuuaaacca

SEQ ID NO: 2416718 - RNA, 19 nt, Artificial Sequence
  Description of Artificial Sequence: Synthetic oligonucleotide
  Sense strand starting at position 3322 of SEQ ID NO: 1886547
accaauaacggaugugaaa

SEQ ID NO: 2416719 - RNA, 19 nt, Artificial Sequence
  Description of Artificial Sequence: Synthetic oligonucleotide
  Antisense strand to SEQ ID NO: 2416718
uuucacauccguuauuggu

SEQ ID NO: 2416720 - RNA, 19 nt, Artificial Sequence
  Description of Artificial Sequence: Synthetic oligonucleotide
  Sense strand starting at position 3367 of SEQ ID NO: 1886547
gaaggccucuuuguugaua

SEQ ID NO: 2416721 - RNA, 19 nt, Artificial Sequence
  Description of Artificial Sequence: Synthetic oligonucleotide
  Antisense strand to SEQ ID NO: 2416720
uaucaacaaagaggccuuc

SEQ ID NO: 2416722 - RNA, 19 nt, Artificial Sequence
  Description of Artificial Sequence: Synthetic oligonucleotide
  Sense strand starting at position 3434 of SEQ ID NO: 1886547
cagauaucagagugaagug

SEQ ID NO: 2416723 - RNA, 19 nt, Artificial Sequence
  Description of Artificial Sequence: Synthetic oligonucleotide
  Antisense strand to SEQ ID NO: 2416722
cacuucacucugauaucug

SEQ ID NO: 2416724 - RNA, 19 nt, Artificial Sequence
  Description of Artificial Sequence: Synthetic oligonucleotide
  Sense strand starting at position 3435 of SEQ ID NO: 1886547
agauaucagagugaagugu

SEQ ID NO: 2416725 - RNA, 19 nt, Artificial Sequence
  Description of Artificial Sequence: Synthetic oligonucleotide
  Antisense strand to SEQ ID NO: 2416724
acacuucacucugauaucu

SEQ ID NO: 2416726 - RNA, 19 nt, Artificial Sequence
  Description of Artificial Sequence: Synthetic oligonucleotide
  Sense strand starting at position 3472 of SEQ ID NO: 1886547
guugauacauucuucggaa

SEQ ID NO: 2416727 - RNA, 19 nt, Artificial Sequence
  Description of Artificial Sequence: Synthetic oligonucleotide
  Antisense strand to SEQ ID NO: 2416726
uuccgaagaauguaucaac

SEQ ID NO: 2416728 - RNA, 19 nt, Artificial Sequence
  Description of Artificial Sequence: Synthetic oligonucleotide
  Sense strand starting at position 3474 of SEQ ID NO: 1886547
ugauacauucuucggaaau

SEQ ID NO: 2416729 - RNA, 19 nt, Artificial Sequence
  Description of Artificial Sequence: Synthetic oligonucleotide
  Antisense strand to SEQ ID NO: 2416728
auuuccgaagaauguauca

SEQ ID NO: 2416730 - RNA, 19 nt, Artificial Sequence
  Description of Artificial Sequence: Synthetic oligonucleotide
  Sense strand starting at position 3520 of SEQ ID NO: 1886547
gaagaacuuuaagagauag

SEQ ID NO: 2416731 - RNA, 19 nt, Artificial Sequence
  Description of Artificial Sequence: Synthetic oligonucleotide
  Antisense strand to SEQ ID NO: 2416730
cuaucucuuaaaguucuuc

SEQ ID NO: 2416732 - RNA, 19 nt, Artificial Sequence
  Description of Artificial Sequence: Synthetic oligonucleotide
  Sense strand starting at position 3530 of SEQ ID NO: 1886547
aagagauagugccuacauu

SEQ ID NO: 2416733 - RNA, 19 nt, Artificial Sequence
  Description of Artificial Sequence: Synthetic oligonucleotide
  Antisense strand to SEQ ID NO: 2416732
aauguaggcacuaucucuu

SEQ ID NO: 2416734 - RNA, 19 nt, Artificial Sequence
  Description of Artificial Sequence: Synthetic oligonucleotide
  Sense strand starting at position 3552 of SEQ ID NO: 1886547
ggaguccuuugauuagaaa

SEQ ID NO: 2416735 - RNA, 19 nt, Artificial Sequence
  Description of Artificial Sequence: Synthetic oligonucleotide
  Antisense strand to SEQ ID NO: 2416734
uuucuaaucaaaggacucc

SEQ ID NO: 2416736 - RNA, 19 nt, Artificial Sequence
  Description of Artificial Sequence: Synthetic oligonucleotide
  Sense strand starting at position 3593 of SEQ ID NO: 1886547
uguaacugagcuugauaug

SEQ ID NO: 2416737 - RNA, 19 nt, Artificial Sequence
  Description of Artificial Sequence: Synthetic oligonucleotide
  Antisense strand to SEQ ID NO: 2416736
cauaucaagcucaguuaca

SEQ ID NO: 2416738 - RNA, 19 nt, Artificial Sequence
  Description of Artificial Sequence: Synthetic oligonucleotide
  Sense strand starting at position 3610 of SEQ ID NO: 1886547
ugcauagugcuaggaagau

SEQ ID NO: 2416739 - RNA, 19 nt, Artificial Sequence
  Description of Artificial Sequence: Synthetic oligonucleotide
  Antisense strand to SEQ ID NO: 2416738
aucuuccuagcacuaugca

SEQ ID NO: 2416740 - RNA, 19 nt, Artificial Sequence
  Description of Artificial Sequence: Synthetic oligonucleotide
  Sense strand starting at position 3689 of SEQ ID NO: 1886547
ugauuauaccaguaacagc

SEQ ID NO: 2416741 - RNA, 19 nt, Artificial Sequence
  Description of Artificial Sequence: Synthetic oligonucleotide
  Antisense strand to SEQ ID NO: 2416740
gcuguuacugguauaauca

SEQ ID NO: 2416742 - RNA, 19 nt, Artificial Sequence
  Description of Artificial Sequence: Synthetic oligonucleotide
  Sense strand starting at position 3706 of SEQ ID NO: 1886547
gcguguuuagauguuucac

SEQ ID NO: 2416743 - RNA, 19 nt, Artificial Sequence
  Description of Artificial Sequence: Synthetic oligonucleotide
  Antisense strand to SEQ ID NO: 2416742
gugaaacaucuaaacacgc

SEQ ID NO: 2416744 - RNA, 19 nt, Artificial Sequence
  Description of Artificial Sequence: Synthetic oligonucleotide
  Sense strand starting at position 3743 of SEQ ID NO: 1886547
ugacuacuguucucacuuu

SEQ ID NO: 2416745 - RNA, 19 nt, Artificial Sequence
  Description of Artificial Sequence: Synthetic oligonucleotide
  Antisense strand to SEQ ID NO: 2416744
aaagugagaacaguaguca

SEQ ID NO: 2416746 - RNA, 19 nt, Artificial Sequence
  Description of Artificial Sequence: Synthetic oligonucleotide
  Sense strand starting at position 3772 of SEQ ID NO: 1886547
gaaccuaguuugccauuga

SEQ ID NO: 2416747 - RNA, 19 nt, Artificial Sequence
  Description of Artificial Sequence: Synthetic oligonucleotide
  Antisense strand to SEQ ID NO: 2416746
ucaauggcaaacuagguuc

SEQ ID NO: 2416748 - RNA, 19 nt, Artificial Sequence
  Description of Artificial Sequence: Synthetic oligonucleotide
  Sense strand starting at position 3974 of SEQ ID NO: 1886547
uugaucaagcgcugaagaa

SEQ ID NO: 2416749 - RNA, 19 nt, Artificial Sequence
  Description of Artificial Sequence: Synthetic oligonucleotide
  Antisense strand to SEQ ID NO: 2416748
uucuucagcgcuugaucaa

SEQ ID NO: 2416750 - RNA, 19 nt, Artificial Sequence
  Description of Artificial Sequence: Synthetic oligonucleotide
  Sense strand starting at position 3975 of SEQ ID NO: 1886547
ugaucaagcgcugaagaaa

SEQ ID NO: 2416751 - RNA, 19 nt, Artificial Sequence
  Description of Artificial Sequence: Synthetic oligonucleotide
  Antisense strand to SEQ ID NO: 2416750
uuucuucagcgcuugauca

SEQ ID NO: 2416752 - RNA, 19 nt, Artificial Sequence
  Description of Artificial Sequence: Synthetic oligonucleotide
  Sense strand starting at position 8 of SEQ ID NO: 1886549
gagcuuuauccauggccac

SEQ ID NO: 2416753 - RNA, 19 nt, Artificial Sequence
  Description of Artificial Sequence: Synthetic oligonucleotide
  Antisense strand to SEQ ID NO: 2416752
guggccauggauaaagcuc

SEQ ID NO: 2416754 - RNA, 19 nt, Artificial Sequence
  Description of Artificial Sequence: Synthetic oligonucleotide
  Sense strand starting at position 9 of SEQ ID NO: 1886549
agcuuuauccauggccacu

SEQ ID NO: 2416755 - RNA, 19 nt, Artificial Sequence
  Description of Artificial Sequence: Synthetic oligonucleotide
  Antisense strand to SEQ ID NO: 2416754
aguggccauggauaaagcu

SEQ ID NO: 2416756 - RNA, 19 nt, Artificial Sequence
  Description of Artificial Sequence: Synthetic oligonucleotide
  Sense strand starting at position 99 of SEQ ID NO: 1886549
uauuguggaacugaucgua

SEQ ID NO: 2416757 - RNA, 19 nt, Artificial Sequence
  Description of Artificial Sequence: Synthetic oligonucleotide
  Antisense strand to SEQ ID NO: 2416756
uacgaucaguuccacaaua

SEQ ID NO: 2416758 - RNA, 19 nt, Artificial Sequence
  Description of Artificial Sequence: Synthetic oligonucleotide
  Sense strand starting at position 178 of SEQ ID NO: 1886549
gauuguauggcugauaccu

SEQ ID NO: 2416759 - RNA, 19 nt, Artificial Sequence
  Description of Artificial Sequence: Synthetic oligonucleotide
  Antisense strand to SEQ ID NO: 2416758
agguaucagccauacaauc

SEQ ID NO: 2416760 - RNA, 19 nt, Artificial Sequence
  Description of Artificial Sequence: Synthetic oligonucleotide
  Sense strand starting at position 643 of SEQ ID NO: 1886549
cuucuuaggugaucuggga

SEQ ID NO: 2416761 - RNA, 19 nt, Artificial Sequence
  Description of Artificial Sequence: Synthetic oligonucleotide
  Antisense strand to SEQ ID NO: 2416760
ucccagaucaccuaagaag

SEQ ID NO: 2416762 - RNA, 19 nt, Artificial Sequence
  Description of Artificial Sequence: Synthetic oligonucleotide
  Sense strand starting at position 710 of SEQ ID NO: 1886549
cgacuuguauaucuaacuu

SEQ ID NO: 2416763 - RNA, 19 nt, Artificial Sequence
  Description of Artificial Sequence: Synthetic oligonucleotide
  Antisense strand to SEQ ID NO: 2416762
aaguuagauauacaagucg

SEQ ID NO: 2416764 - RNA, 19 nt, Artificial Sequence
  Description of Artificial Sequence: Synthetic oligonucleotide
  Sense strand starting at position 824 of SEQ ID NO: 1886549
ggaguuaaccuugguuccu

SEQ ID NO: 2416765 - RNA, 19 nt, Artificial Sequence
  Description of Artificial Sequence: Synthetic oligonucleotide
  Antisense strand to SEQ ID NO: 2416764
aggaaccaagguuaacucc

SEQ ID NO: 2416766 - RNA, 19 nt, Artificial Sequence
  Description of Artificial Sequence: Synthetic oligonucleotide
  Sense strand starting at position 903 of SEQ ID NO: 1886549
auauaugcugaauggaauu

SEQ ID NO: 2416767 - RNA, 19 nt, Artificial Sequence
  Description of Artificial Sequence: Synthetic oligonucleotide
  Antisense strand to SEQ ID NO: 2416766
aauuccauucagcauauau

SEQ ID NO: 2416768 - RNA, 19 nt, Artificial Sequence
  Description of Artificial Sequence: Synthetic oligonucleotide
  Sense strand starting at position 1049 of SEQ ID NO: 1886549
gauucuccugaguagcaga

SEQ ID NO: 2416769 - RNA, 19 nt, Artificial Sequence
  Description of Artificial Sequence: Synthetic oligonucleotide
  Antisense strand to SEQ ID NO: 2416768
ucugcuacucaggagaauc

SEQ ID NO: 2416770 - RNA, 19 nt, Artificial Sequence
  Description of Artificial Sequence: Synthetic oligonucleotide
  Sense strand starting at position 1260 of SEQ ID NO: 1886549
uuugucuuacagugcaaca

SEQ ID NO: 2416771 - RNA, 19 nt, Artificial Sequence
  Description of Artificial Sequence: Synthetic oligonucleotide
  Antisense strand to SEQ ID NO: 2416770
uguugcacuguaagacaaa

SEQ ID NO: 2416772 - RNA, 19 nt, Artificial Sequence
  Description of Artificial Sequence: Synthetic oligonucleotide
  Sense strand starting at position 1271 of SEQ ID NO: 1886549
gugcaacagucuccuaaca

SEQ ID NO: 2416773 - RNA, 19 nt, Artificial Sequence
  Description of Artificial Sequence: Synthetic oligonucleotide
  Antisense strand to SEQ ID NO: 2416772
uguuaggagacuguugcac

SEQ ID NO: 2416774 - RNA, 19 nt, Artificial Sequence
  Description of Artificial Sequence: Synthetic oligonucleotide
  Sense strand starting at position 1680 of SEQ ID NO: 1886549
gcugauaccuucuuuauug

SEQ ID NO: 2416775 - RNA, 19 nt, Artificial Sequence
  Description of Artificial Sequence: Synthetic oligonucleotide
  Antisense strand to SEQ ID NO: 2416774
caauaaagaagguaucagc

SEQ ID NO: 2416776 - RNA, 19 nt, Artificial Sequence
  Description of Artificial Sequence: Synthetic oligonucleotide
  Sense strand starting at position 2362 of SEQ ID NO: 1886549
gggagucucgacugacuga

SEQ ID NO: 2416777 - RNA, 19 nt, Artificial Sequence
  Description of Artificial Sequence: Synthetic oligonucleotide
  Antisense strand to SEQ ID NO: 2416776
ucagucagucgagacuccc

SEQ ID NO: 2416778 - RNA, 19 nt, Artificial Sequence
  Description of Artificial Sequence: Synthetic oligonucleotide
  Sense strand starting at position 3276 of SEQ ID NO: 1886549
auuaacagcccuggaauua

SEQ ID NO: 2416779 - RNA, 19 nt, Artificial Sequence
  Description of Artificial Sequence: Synthetic oligonucleotide
  Antisense strand to SEQ ID NO: 2416778
uaauuccagggcuguuaau

SEQ ID NO: 2416780 - RNA, 19 nt, Artificial Sequence
  Description of Artificial Sequence: Synthetic oligonucleotide
  Sense strand starting at position 3320 of SEQ ID NO: 1886549
ugugcaccuuugcuauaaa

SEQ ID NO: 2416781 - RNA, 19 nt, Artificial Sequence
  Description of Artificial Sequence: Synthetic oligonucleotide
  Antisense strand to SEQ ID NO: 2416780
uuuauagcaaaggugcaca

SEQ ID NO: 2416782 - RNA, 19 nt, Artificial Sequence
  Description of Artificial Sequence: Synthetic oligonucleotide
  Sense strand starting at position 3323 of SEQ ID NO: 1886549
gcaccuuugcuauaaacga

SEQ ID NO: 2416783 - RNA, 19 nt, Artificial Sequence
  Description of Artificial Sequence: Synthetic oligonucleotide
  Antisense strand to SEQ ID NO: 2416782
ucguuuauagcaaaggugc

SEQ ID NO: 2416784 - RNA, 19 nt, Artificial Sequence
  Description of Artificial Sequence: Synthetic oligonucleotide
  Sense strand starting at position 3330 of SEQ ID NO: 1886549
ugcuauaaacgauaaccau

SEQ ID NO: 2416785 - RNA, 19 nt, Artificial Sequence
  Description of Artificial Sequence: Synthetic oligonucleotide
  Antisense strand to SEQ ID NO: 2416784
augguuaucguuuauagca

SEQ ID NO: 2416786 - RNA, 19 nt, Artificial Sequence
  Description of Artificial Sequence: Synthetic oligonucleotide
  Sense strand starting at position 3344 of SEQ ID NO: 1886549
accaucuguguccgaggua

SEQ ID NO: 2416787 - RNA, 19 nt, Artificial Sequence
  Description of Artificial Sequence: Synthetic oligonucleotide
  Antisense strand to SEQ ID NO: 2416786
uaccucggacacagauggu

SEQ ID NO: 2416788 - RNA, 19 nt, Artificial Sequence
  Description of Artificial Sequence: Synthetic oligonucleotide
  Sense strand starting at position 3347 of SEQ ID NO: 1886549
aucuguguccgagguaaug

SEQ ID NO: 2416789 - RNA, 19 nt, Artificial Sequence
  Description of Artificial Sequence: Synthetic oligonucleotide
  Antisense strand to SEQ ID NO: 2416788
cauuaccucggacacagau

SEQ ID NO: 2416790 - RNA, 19 nt, Artificial Sequence
  Description of Artificial Sequence: Synthetic oligonucleotide
  Sense strand starting at position 3380 of SEQ ID NO: 1886549
gccuguauccucuauagga

SEQ ID NO: 2416791 - RNA, 19 nt, Artificial Sequence
  Description of Artificial Sequence: Synthetic oligonucleotide
  Antisense strand to SEQ ID NO: 2416790
uccuauagaggauacaggc

SEQ ID NO: 2416792 - RNA, 19 nt, Artificial Sequence
  Description of Artificial Sequence: Synthetic oligonucleotide
  Sense strand starting at position 3408 of SEQ ID NO: 1886549
gggugacaaauguauuguu

SEQ ID NO: 2416793 - RNA, 19 nt, Artificial Sequence
  Description of Artificial Sequence: Synthetic oligonucleotide
  Antisense strand to SEQ ID NO: 2416792
aacaauacauuugucaccc

SEQ ID NO: 2416794 - RNA, 19 nt, Artificial Sequence
  Description of Artificial Sequence: Synthetic oligonucleotide
  Sense strand starting at position 3421 of SEQ ID NO: 1886549
auuguuuguuccuccacca

SEQ ID NO: 2416795 - RNA, 19 nt, Artificial Sequence
  Description of Artificial Sequence: Synthetic oligonucleotide
  Antisense strand to SEQ ID NO: 2416794
ugguggaggaacaaacaau

SEQ ID NO: 2416796 - RNA, 19 nt, Artificial Sequence
  Description of Artificial Sequence: Synthetic oligonucleotide
  Sense strand starting at position 3493 of SEQ ID NO: 1886549
acuuuaauucucuguggcu

SEQ ID NO: 2416797 - RNA, 19 nt, Artificial Sequence
  Description of Artificial Sequence: Synthetic oligonucleotide
  Antisense strand to SEQ ID NO: 2416796
agccacagagaauuaaagu

SEQ ID NO: 2416798 - RNA, 19 nt, Artificial Sequence
  Description of Artificial Sequence: Synthetic oligonucleotide
  Sense strand starting at position 3495 of SEQ ID NO: 1886549
uuuaauucucuguggcuga

SEQ ID NO: 2416799 - RNA, 19 nt, Artificial Sequence
  Description of Artificial Sequence: Synthetic oligonucleotide
  Antisense strand to SEQ ID NO: 2416798
ucagccacagagaauuaaa

SEQ ID NO: 2416800 - RNA, 19 nt, Artificial Sequence
  Description of Artificial Sequence: Synthetic oligonucleotide
  Sense strand starting at position 3607 of SEQ ID NO: 1886549
cccagaucuuaacuguaag

SEQ ID NO: 2416801 - RNA, 19 nt, Artificial Sequence
  Description of Artificial Sequence: Synthetic oligonucleotide
  Antisense strand to SEQ ID NO: 2416800
cuuacaguuaagaucuggg

SEQ ID NO: 2416802 - RNA, 19 nt, Artificial Sequence
  Description of Artificial Sequence: Synthetic oligonucleotide
  Sense strand starting at position 3610 of SEQ ID NO: 1886549
agaucuuaacuguaagcuu

SEQ ID NO: 2416803 - RNA, 19 nt, Artificial Sequence
  Description of Artificial Sequence: Synthetic oligonucleotide
  Antisense strand to SEQ ID NO: 2416802
aagcuuacaguuaagaucu

SEQ ID NO: 2416804 - RNA, 19 nt, Artificial Sequence
  Description of Artificial Sequence: Synthetic oligonucleotide
  Sense strand starting at position 3618 of SEQ ID NO: 1886549
acuguaagcuuuguaauac

SEQ ID NO: 2416805 - RNA, 19 nt, Artificial Sequence
  Description of Artificial Sequence: Synthetic oligonucleotide
  Antisense strand to SEQ ID NO: 2416804
guauuacaaagcuuacagu

SEQ ID NO: 2416806 - RNA, 19 nt, Artificial Sequence
  Description of Artificial Sequence: Synthetic oligonucleotide
  Sense strand starting at position 3706 of SEQ ID NO: 1886549
acuggaauuccagagccuu

SEQ ID NO: 2416807 - RNA, 19 nt, Artificial Sequence
  Description of Artificial Sequence: Synthetic oligonucleotide
  Antisense strand to SEQ ID NO: 2416806
aaggcucuggaauuccagu

SEQ ID NO: 2416808 - RNA, 19 nt, Artificial Sequence
  Description of Artificial Sequence: Synthetic oligonucleotide
  Sense strand starting at position 3742 of SEQ ID NO: 1886549
ggcaucauagcccaggaau

SEQ ID NO: 2416809 - RNA, 19 nt, Artificial Sequence
  Description of Artificial Sequence: Synthetic oligonucleotide
  Antisense strand to SEQ ID NO: 2416808
auuccugggcuaugaugcc

SEQ ID NO: 2416810 - RNA, 19 nt, Artificial Sequence
  Description of Artificial Sequence: Synthetic oligonucleotide
  Sense strand starting at position 3761 of SEQ ID NO: 1886549
caaggucucuugcucgaaa

SEQ ID NO: 2416811 - RNA, 19 nt, Artificial Sequence
  Description of Artificial Sequence: Synthetic oligonucleotide
  Antisense strand to SEQ ID NO: 2416810
uuucgagcaagagaccuug

SEQ ID NO: 2416812 - RNA, 19 nt, Artificial Sequence
  Description of Artificial Sequence: Synthetic oligonucleotide
  Sense strand starting at position 3762 of SEQ ID NO: 1886549
aaggucucuugcucgaaau

SEQ ID NO: 2416813 - RNA, 19 nt, Artificial Sequence
  Description of Artificial Sequence: Synthetic oligonucleotide
  Antisense strand to SEQ ID NO: 2416812
auuucgagcaagagaccuu

SEQ ID NO: 2416814 - RNA, 19 nt, Artificial Sequence
  Description of Artificial Sequence: Synthetic oligonucleotide
  Sense strand starting at position 3763 of SEQ ID NO: 1886549
aggucucuugcucgaaaua

SEQ ID NO: 2416815 - RNA, 19 nt, Artificial Sequence
  Description of Artificial Sequence: Synthetic oligonucleotide
  Antisense strand to SEQ ID NO: 2416814
uauuucgagcaagagaccu

SEQ ID NO: 2416816 - RNA, 19 nt, Artificial Sequence
  Description of Artificial Sequence: Synthetic oligonucleotide
  Sense strand starting at position 3764 of SEQ ID NO: 1886549
ggucucuugcucgaaauac

SEQ ID NO: 2416817 - RNA, 19 nt, Artificial Sequence
  Description of Artificial Sequence: Synthetic oligonucleotide
  Antisense strand to SEQ ID NO: 2416816
guauuucgagcaagagacc

SEQ ID NO: 2416818 - RNA, 19 nt, Artificial Sequence
  Description of Artificial Sequence: Synthetic oligonucleotide
  Sense strand starting at position 3773 of SEQ ID NO: 1886549
cucgaaauacuuuaugugu

SEQ ID NO: 2416819 - RNA, 19 nt, Artificial Sequence
  Description of Artificial Sequence: Synthetic oligonucleotide
  Antisense strand to SEQ ID NO: 2416818
acacauaaaguauuucgag

SEQ ID NO: 2416820 - RNA, 19 nt, Artificial Sequence
  Description of Artificial Sequence: Synthetic oligonucleotide
  Sense strand starting at position 3776 of SEQ ID NO: 1886549
gaaauacuuuaugugugag

SEQ ID NO: 2416821 - RNA, 19 nt, Artificial Sequence
  Description of Artificial Sequence: Synthetic oligonucleotide
  Antisense strand to SEQ ID NO: 2416820
cucacacauaaaguauuuc

SEQ ID NO: 2416822 - RNA, 19 nt, Artificial Sequence
  Description of Artificial Sequence: Synthetic oligonucleotide
  Sense strand starting at position 3778 of SEQ ID NO: 1886549
aauacuuuaugugugagga

SEQ ID NO: 2416823 - RNA, 19 nt, Artificial Sequence
  Description of Artificial Sequence: Synthetic oligonucleotide
  Antisense strand to SEQ ID NO: 2416822
uccucacacauaaaguauu

SEQ ID NO: 2416824 - RNA, 19 nt, Artificial Sequence
  Description of Artificial Sequence: Synthetic oligonucleotide
  Sense strand starting at position 3779 of SEQ ID NO: 1886549
auacuuuaugugugaggaa

SEQ ID NO: 2416825 - RNA, 19 nt, Artificial Sequence
  Description of Artificial Sequence: Synthetic oligonucleotide
  Antisense strand to SEQ ID NO: 2416824
uuccucacacauaaaguau

SEQ ID NO: 2416826 - RNA, 19 nt, Artificial Sequence
  Description of Artificial Sequence: Synthetic oligonucleotide
  Sense strand starting at position 3842 of SEQ ID NO: 1886549
ucuggauuucuguguuucu

SEQ ID NO: 2416827 - RNA, 19 nt, Artificial Sequence
  Description of Artificial Sequence: Synthetic oligonucleotide
  Antisense strand to SEQ ID NO: 2416826
agaaacacagaaauccaga

SEQ ID NO: 2416828 - RNA, 19 nt, Artificial Sequence
  Description of Artificial Sequence: Synthetic oligonucleotide
  Sense strand starting at position 3956 of SEQ ID NO: 1886549
ccauuuaugugugacacac

SEQ ID NO: 2416829 - RNA, 19 nt, Artificial Sequence
  Description of Artificial Sequence: Synthetic oligonucleotide
  Antisense strand to SEQ ID NO: 2416828
gugugucacacauaaaugg

SEQ ID NO: 2416830 - RNA, 19 nt, Artificial Sequence
  Description of Artificial Sequence: Synthetic oligonucleotide
  Sense strand starting at position 3958 of SEQ ID NO: 1886549
auuuaugugugacacacaa

SEQ ID NO: 2416831 - RNA, 19 nt, Artificial Sequence
  Description of Artificial Sequence: Synthetic oligonucleotide
  Antisense strand to SEQ ID NO: 2416830
uugugugucacacauaaau

SEQ ID NO: 2416832 - RNA, 19 nt, Artificial Sequence
  Description of Artificial Sequence: Synthetic oligonucleotide
  Sense strand starting at position 67 of SEQ ID NO: 1886550
ggaucuuugaucuguagga

SEQ ID NO: 2416833 - RNA, 19 nt, Artificial Sequence
  Description of Artificial Sequence: Synthetic oligonucleotide
  Antisense strand to SEQ ID NO: 2416832
uccuacagaucaaagaucc

SEQ ID NO: 2416834 - RNA, 19 nt, Artificial Sequence
  Description of Artificial Sequence: Synthetic oligonucleotide
  Sense strand starting at position 68 of SEQ ID NO: 1886550
gaucuuugaucuguaggaa

SEQ ID NO: 2416835 - RNA, 19 nt, Artificial Sequence
  Description of Artificial Sequence: Synthetic oligonucleotide
  Antisense strand to SEQ ID NO: 2416834
uuccuacagaucaaagauc

SEQ ID NO: 2416836 - RNA, 19 nt, Artificial Sequence
  Description of Artificial Sequence: Synthetic oligonucleotide
  Sense strand starting at position 71 of SEQ ID NO: 1886550
cuuugaucuguaggaaaug

SEQ ID NO: 2416837 - RNA, 19 nt, Artificial Sequence
  Description of Artificial Sequence: Synthetic oligonucleotide
  Antisense strand to SEQ ID NO: 2416836
cauuuccuacagaucaaag

SEQ ID NO: 2416838 - RNA, 19 nt, Artificial Sequence
  Description of Artificial Sequence: Synthetic oligonucleotide
  Sense strand starting at position 2346 of SEQ ID NO: 1886550
gggaguuguuaccuggaag

SEQ ID NO: 2416839 - RNA, 19 nt, Artificial Sequence
  Description of Artificial Sequence: Synthetic oligonucleotide
  Antisense strand to SEQ ID NO: 2416838
cuuccagguaacaacuccc

SEQ ID NO: 2416840 - RNA, 19 nt, Artificial Sequence
  Description of Artificial Sequence: Synthetic oligonucleotide
  Sense strand starting at position 2347 of SEQ ID NO: 1886550
ggaguuguuaccuggaaga

SEQ ID NO: 2416841 - RNA, 19 nt, Artificial Sequence
  Description of Artificial Sequence: Synthetic oligonucleotide
  Antisense strand to SEQ ID NO: 2416840
ucuuccagguaacaacucc

SEQ ID NO: 2416842 - RNA, 19 nt, Artificial Sequence
  Description of Artificial Sequence: Synthetic oligonucleotide
  Sense strand starting at position 2349 of SEQ ID NO: 1886550
aguuguuaccuggaagaug

SEQ ID NO: 2416843 - RNA, 19 nt, Artificial Sequence
  Description of Artificial Sequence: Synthetic oligonucleotide
  Antisense strand to SEQ ID NO: 2416842
caucuuccagguaacaacu

SEQ ID NO: 2416844 - RNA, 19 nt, Artificial Sequence
  Description of Artificial Sequence: Synthetic oligonucleotide
  Sense strand starting at position 3027 of SEQ ID NO: 1886550
uuacaauccugcgcugagu

SEQ ID NO: 2416845 - RNA, 19 nt, Artificial Sequence
  Description of Artificial Sequence: Synthetic oligonucleotide
  Antisense strand to SEQ ID NO: 2416844
acucagcgcaggauuguaa

SEQ ID NO: 2416846 - RNA, 19 nt, Artificial Sequence
  Description of Artificial Sequence: Synthetic oligonucleotide
  Sense strand starting at position 3263 of SEQ ID NO: 1886550
ccaggauguuugccugcaa

SEQ ID NO: 2416847 - RNA, 19 nt, Artificial Sequence
  Description of Artificial Sequence: Synthetic oligonucleotide
  Antisense strand to SEQ ID NO: 2416846
uugcaggcaaacauccugg

SEQ ID NO: 2416848 - RNA, 19 nt, Artificial Sequence
  Description of Artificial Sequence: Synthetic oligonucleotide
  Sense strand starting at position 3267 of SEQ ID NO: 1886550
gauguuugccugcaacaca

SEQ ID NO: 2416849 - RNA, 19 nt, Artificial Sequence
  Description of Artificial Sequence: Synthetic oligonucleotide
  Antisense strand to SEQ ID NO: 2416848
uguguugcaggcaaacauc

SEQ ID NO: 2416850 - RNA, 19 nt, Artificial Sequence
  Description of Artificial Sequence: Synthetic oligonucleotide
  Sense strand starting at position 3836 of SEQ ID NO: 1886550
ucuugucaaguguguccaa

SEQ ID NO: 2416851 - RNA, 19 nt, Artificial Sequence
  Description of Artificial Sequence: Synthetic oligonucleotide
  Antisense strand to SEQ ID NO: 2416850
uuggacacacuugacaaga

SEQ ID NO: 2416852 - RNA, 19 nt, Artificial Sequence
  Description of Artificial Sequence: Synthetic oligonucleotide
  Sense strand starting at position 3837 of SEQ ID NO: 1886550
cuugucaaguguguccaaa

SEQ ID NO: 2416853 - RNA, 19 nt, Artificial Sequence
  Description of Artificial Sequence: Synthetic oligonucleotide
  Antisense strand to SEQ ID NO: 2416852
uuuggacacacuugacaag

SEQ ID NO: 2416854 - RNA, 19 nt, Artificial Sequence
  Description of Artificial Sequence: Synthetic oligonucleotide
  Sense strand starting at position 3867 of SEQ ID NO: 1886550
aggucacucucuggguuaa

SEQ ID NO: 2416855 - RNA, 19 nt, Artificial Sequence
  Description of Artificial Sequence: Synthetic oligonucleotide
  Antisense strand to SEQ ID NO: 2416854
uuaacccagagagugaccu

SEQ ID NO: 2416856 - RNA, 19 nt, Artificial Sequence
  Description of Artificial Sequence: Synthetic oligonucleotide
  Sense strand starting at position 3868 of SEQ ID NO: 1886550
ggucacucucuggguuaau

SEQ ID NO: 2416857 - RNA, 19 nt, Artificial Sequence
  Description of Artificial Sequence: Synthetic oligonucleotide
  Antisense strand to SEQ ID NO: 2416856
auuaacccagagagugacc

SEQ ID NO: 2416858 - RNA, 19 nt, Artificial Sequence
  Description of Artificial Sequence: Synthetic oligonucleotide
  Sense strand starting at position 3869 of SEQ ID NO: 1886550
gucacucucuggguuaauu

SEQ ID NO: 2416859 - RNA, 19 nt, Artificial Sequence
  Description of Artificial Sequence: Synthetic oligonucleotide
  Antisense strand to SEQ ID NO: 2416858
aauuaacccagagagugac

SEQ ID NO: 2416860 - RNA, 19 nt, Artificial Sequence
  Description of Artificial Sequence: Synthetic oligonucleotide
  Sense strand starting at position 3877 of SEQ ID NO: 1886550
cuggguuaauucuuauuau

SEQ ID NO: 2416861 - RNA, 19 nt, Artificial Sequence
  Description of Artificial Sequence: Synthetic oligonucleotide
  Antisense strand to SEQ ID NO: 2416860
auaauaagaauuaacccag

SEQ ID NO: 2416862 - RNA, 19 nt, Artificial Sequence
  Description of Artificial Sequence: Synthetic oligonucleotide
  Sense strand starting at position 3878 of SEQ ID NO: 1886550
uggguuaauucuuauuaug

SEQ ID NO: 2416863 - RNA, 19 nt, Artificial Sequence
  Description of Artificial Sequence: Synthetic oligonucleotide
  Antisense strand to SEQ ID NO: 2416862
cauaauaagaauuaaccca

SEQ ID NO: 2416864 - RNA, 19 nt, Artificial Sequence
  Description of Artificial Sequence: Synthetic oligonucleotide
  Sense strand starting at position 3880 of SEQ ID NO: 1886550
gguuaauucuuauuaugca

SEQ ID NO: 2416865 - RNA, 19 nt, Artificial Sequence
  Description of Artificial Sequence: Synthetic oligonucleotide
  Antisense strand to SEQ ID NO: 2416864
ugcauaauaagaauuaacc

SEQ ID NO: 2416866 - RNA, 19 nt, Artificial Sequence
  Description of Artificial Sequence: Synthetic oligonucleotide
  Sense strand starting at position 3892 of SEQ ID NO: 1886550
uuaugcaacuagugaaaga

SEQ ID NO: 2416867 - RNA, 19 nt, Artificial Sequence
  Description of Artificial Sequence: Synthetic oligonucleotide
  Antisense strand to SEQ ID NO: 2416866
ucuuucacuaguugcauaa

SEQ ID NO: 2416868 - RNA, 19 nt, Artificial Sequence
  Description of Artificial Sequence: Synthetic oligonucleotide
  Sense strand starting at position 3920 of SEQ ID NO: 1886550
cucaguacccagugguaau

SEQ ID NO: 2416869 - RNA, 19 nt, Artificial Sequence
  Description of Artificial Sequence: Synthetic oligonucleotide
  Antisense strand to SEQ ID NO: 2416868
auuaccacuggguacugag

SEQ ID NO: 2416870 - RNA, 19 nt, Artificial Sequence
  Description of Artificial Sequence: Synthetic oligonucleotide
  Sense strand starting at position 3921 of SEQ ID NO: 1886550
ucaguacccagugguaaua

SEQ ID NO: 2416871 - RNA, 19 nt, Artificial Sequence
  Description of Artificial Sequence: Synthetic oligonucleotide
  Antisense strand to SEQ ID NO: 2416870
uauuaccacuggguacuga

SEQ ID NO: 2416872 - RNA, 19 nt, Artificial Sequence
  Description of Artificial Sequence: Synthetic oligonucleotide
  Sense strand starting at position 3923 of SEQ ID NO: 1886550
aguacccagugguaauauu

SEQ ID NO: 2416873 - RNA, 19 nt, Artificial Sequence
  Description of Artificial Sequence: Synthetic oligonucleotide
  Antisense strand to SEQ ID NO: 2416872
aauauuaccacuggguacu

SEQ ID NO: 2416874 - RNA, 19 nt, Artificial Sequence
  Description of Artificial Sequence: Synthetic oligonucleotide
  Sense strand starting at position 3943 of SEQ ID NO: 1886550
gcacccuucucauggaguu

SEQ ID NO: 2416875 - RNA, 19 nt, Artificial Sequence
  Description of Artificial Sequence: Synthetic oligonucleotide
  Antisense strand to SEQ ID NO: 2416874
aacuccaugagaagggugc

SEQ ID NO: 2416876 - RNA, 19 nt, Artificial Sequence
  Description of Artificial Sequence: Synthetic oligonucleotide
  Sense strand starting at position 3956 of SEQ ID NO: 1886550
ggaguugcuguggagauca

SEQ ID NO: 2416877 - RNA, 19 nt, Artificial Sequence
  Description of Artificial Sequence: Synthetic oligonucleotide
  Antisense strand to SEQ ID NO: 2416876
ugaucuccacagcaacucc

SEQ ID NO: 2416878 - RNA, 19 nt, Artificial Sequence
  Description of Artificial Sequence: Synthetic oligonucleotide
  Sense strand starting at position 3968 of SEQ ID NO: 1886550
gagaucaagugaguuaaug

SEQ ID NO: 2416879 - RNA, 19 nt, Artificial Sequence
  Description of Artificial Sequence: Synthetic oligonucleotide
  Antisense strand to SEQ ID NO: 2416878
cauuaacucacuugaucuc

SEQ ID NO: 2416880 - RNA, 19 nt, Artificial Sequence
  Description of Artificial Sequence: Synthetic oligonucleotide
  Sense strand starting at position 46 of SEQ ID NO: 1886551
ggccacgagugauuagcaa

SEQ ID NO: 2416881 - RNA, 19 nt, Artificial Sequence
  Description of Artificial Sequence: Synthetic oligonucleotide
  Antisense strand to SEQ ID NO: 2416880
uugcuaaucacucguggcc

SEQ ID NO: 2416882 - RNA, 19 nt, Artificial Sequence
  Description of Artificial Sequence: Synthetic oligonucleotide
  Sense strand starting at position 53 of SEQ ID NO: 1886551
agugauuagcaaugacauu

SEQ ID NO: 2416883 - RNA, 19 nt, Artificial Sequence
  Description of Artificial Sequence: Synthetic oligonucleotide
  Antisense strand to SEQ ID NO: 2416882
aaugucauugcuaaucacu

SEQ ID NO: 2416884 - RNA, 19 nt, Artificial Sequence
  Description of Artificial Sequence: Synthetic oligonucleotide
  Sense strand starting at position 88 of SEQ ID NO: 1886551
cccgaagcgggcuguaaau

SEQ ID NO: 2416885 - RNA, 19 nt, Artificial Sequence
  Description of Artificial Sequence: Synthetic oligonucleotide
  Antisense strand to SEQ ID NO: 2416884
auuuacagcccgcuucggg

SEQ ID NO: 2416886 - RNA, 19 nt, Artificial Sequence
  Description of Artificial Sequence: Synthetic oligonucleotide
  Sense strand starting at position 99 of SEQ ID NO: 1886551
cuguaaaugacauguaugu

SEQ ID NO: 2416887 - RNA, 19 nt, Artificial Sequence
  Description of Artificial Sequence: Synthetic oligonucleotide
  Antisense strand to SEQ ID NO: 2416886
acauacaugucauuuacag

SEQ ID NO: 2416888 - RNA, 19 nt, Artificial Sequence
  Description of Artificial Sequence: Synthetic oligonucleotide
  Sense strand starting at position 101 of SEQ ID NO: 1886551
guaaaugacauguauguua

SEQ ID NO: 2416889 - RNA, 19 nt, Artificial Sequence
  Description of Artificial Sequence: Synthetic oligonucleotide
  Antisense strand to SEQ ID NO: 2416888
uaacauacaugucauuuac

SEQ ID NO: 2416890 - RNA, 19 nt, Artificial Sequence
  Description of Artificial Sequence: Synthetic oligonucleotide
  Sense strand starting at position 108 of SEQ ID NO: 1886551
acauguauguuauucuguu

SEQ ID NO: 2416891 - RNA, 19 nt, Artificial Sequence
  Description of Artificial Sequence: Synthetic oligonucleotide
  Antisense strand to SEQ ID NO: 2416890
aacagaauaacauacaugu

SEQ ID NO: 2416892 - RNA, 19 nt, Artificial Sequence
  Description of Artificial Sequence: Synthetic oligonucleotide
  Sense strand starting at position 203 of SEQ ID NO: 1886551
ugugucaugccacugcuua

SEQ ID NO: 2416893 - RNA, 19 nt, Artificial Sequence
  Description of Artificial Sequence: Synthetic oligonucleotide
  Antisense strand to SEQ ID NO: 2416892
uaagcaguggcaugacaca

SEQ ID NO: 2416894 - RNA, 19 nt, Artificial Sequence
  Description of Artificial Sequence: Synthetic oligonucleotide
  Sense strand starting at position 222 of SEQ ID NO: 1886551
cuaugauuauggucauuag

SEQ ID NO: 2416895 - RNA, 19 nt, Artificial Sequence
  Description of Artificial Sequence: Synthetic oligonucleotide
  Antisense strand to SEQ ID NO: 2416894
cuaaugaccauaaucauag

SEQ ID NO: 2416896 - RNA, 19 nt, Artificial Sequence
  Description of Artificial Sequence: Synthetic oligonucleotide
  Sense strand starting at position 225 of SEQ ID NO: 1886551
ugauuauggucauuagcua

SEQ ID NO: 2416897 - RNA, 19 nt, Artificial Sequence
  Description of Artificial Sequence: Synthetic oligonucleotide
  Antisense strand to SEQ ID NO: 2416896
uagcuaaugaccauaauca

SEQ ID NO: 2416898 - RNA, 19 nt, Artificial Sequence
  Description of Artificial Sequence: Synthetic oligonucleotide
  Sense strand starting at position 308 of SEQ ID NO: 1886551
gguucugagggcuguauaa

SEQ ID NO: 2416899 - RNA, 19 nt, Artificial Sequence
  Description of Artificial Sequence: Synthetic oligonucleotide
  Antisense strand to SEQ ID NO: 2416898
uuauacagcccucagaacc

SEQ ID NO: 2416900 - RNA, 19 nt, Artificial Sequence
  Description of Artificial Sequence: Synthetic oligonucleotide
  Sense strand starting at position 409 of SEQ ID NO: 1886551
cuggaagaauaucagagau

SEQ ID NO: 2416901 - RNA, 19 nt, Artificial Sequence
  Description of Artificial Sequence: Synthetic oligonucleotide
  Antisense strand to SEQ ID NO: 2416900
aucucugauauucuuccag

SEQ ID NO: 2416902 - RNA, 19 nt, Artificial Sequence
  Description of Artificial Sequence: Synthetic oligonucleotide
  Sense strand starting at position 411 of SEQ ID NO: 1886551
ggaagaauaucagagauga

SEQ ID NO: 2416903 - RNA, 19 nt, Artificial Sequence
  Description of Artificial Sequence: Synthetic oligonucleotide
  Antisense strand to SEQ ID NO: 2416902
ucaucucugauauucuucc

SEQ ID NO: 2416904 - RNA, 19 nt, Artificial Sequence
  Description of Artificial Sequence: Synthetic oligonucleotide
  Sense strand starting at position 831 of SEQ ID NO: 1886551
ggcccacacucagagaaau

SEQ ID NO: 2416905 - RNA, 19 nt, Artificial Sequence
  Description of Artificial Sequence: Synthetic oligonucleotide
  Antisense strand to SEQ ID NO: 2416904
auuucucugagugugggcc

SEQ ID NO: 2416906 - RNA, 19 nt, Artificial Sequence
  Description of Artificial Sequence: Synthetic oligonucleotide
  Sense strand starting at position 887 of SEQ ID NO: 1886551
gacaucagaucagaugaga

SEQ ID NO: 2416907 - RNA, 19 nt, Artificial Sequence
  Description of Artificial Sequence: Synthetic oligonucleotide
  Antisense strand to SEQ ID NO: 2416906
ucucaucugaucugauguc

SEQ ID NO: 2416908 - RNA, 19 nt, Artificial Sequence
  Description of Artificial Sequence: Synthetic oligonucleotide
  Sense strand starting at position 1392 of SEQ ID NO: 1886551
ugaggucaaucugaugaca

SEQ ID NO: 2416909 - RNA, 19 nt, Artificial Sequence
  Description of Artificial Sequence: Synthetic oligonucleotide
  Antisense strand to SEQ ID NO: 2416908
ugucaucagauugaccuca

SEQ ID NO: 2416910 - RNA, 19 nt, Artificial Sequence
  Description of Artificial Sequence: Synthetic oligonucleotide
  Sense strand starting at position 2124 of SEQ ID NO: 1886551
ggaacuaucuuucccagga

SEQ ID NO: 2416911 - RNA, 19 nt, Artificial Sequence
  Description of Artificial Sequence: Synthetic oligonucleotide
  Antisense strand to SEQ ID NO: 2416910
uccugggaaagauaguucc

SEQ ID NO: 2416912 - RNA, 19 nt, Artificial Sequence
  Description of Artificial Sequence: Synthetic oligonucleotide
  Sense strand starting at position 2128 of SEQ ID NO: 1886551
cuaucuuucccaggaugcu

SEQ ID NO: 2416913 - RNA, 19 nt, Artificial Sequence
  Description of Artificial Sequence: Synthetic oligonucleotide
  Antisense strand to SEQ ID NO: 2416912
agcauccugggaaagauag

SEQ ID NO: 2416914 - RNA, 19 nt, Artificial Sequence
  Description of Artificial Sequence: Synthetic oligonucleotide
  Sense strand starting at position 2292 of SEQ ID NO: 1886551
gucauuuccucaucuguuc

SEQ ID NO: 2416915 - RNA, 19 nt, Artificial Sequence
  Description of Artificial Sequence: Synthetic oligonucleotide
  Antisense strand to SEQ ID NO: 2416914
gaacagaugaggaaaugac

SEQ ID NO: 2416916 - RNA, 19 nt, Artificial Sequence
  Description of Artificial Sequence: Synthetic oligonucleotide
  Sense strand starting at position 2299 of SEQ ID NO: 1886551
ccucaucuguucgcuuaca

SEQ ID NO: 2416917 - RNA, 19 nt, Artificial Sequence
  Description of Artificial Sequence: Synthetic oligonucleotide
  Antisense strand to SEQ ID NO: 2416916
uguaagcgaacagaugagg

SEQ ID NO: 2416918 - RNA, 19 nt, Artificial Sequence
  Description of Artificial Sequence: Synthetic oligonucleotide
  Sense strand starting at position 2357 of SEQ ID NO: 1886551
ugaaauagcucccugaguc

SEQ ID NO: 2416919 - RNA, 19 nt, Artificial Sequence
  Description of Artificial Sequence: Synthetic oligonucleotide
  Antisense strand to SEQ ID NO: 2416918
gacucagggagcuauuuca

SEQ ID NO: 2416920 - RNA, 19 nt, Artificial Sequence
  Description of Artificial Sequence: Synthetic oligonucleotide
  Sense strand starting at position 2504 of SEQ ID NO: 1886551
gccagaauuugaggacuac

SEQ ID NO: 2416921 - RNA, 19 nt, Artificial Sequence
  Description of Artificial Sequence: Synthetic oligonucleotide
  Antisense strand to SEQ ID NO: 2416920
guaguccucaaauucuggc

SEQ ID NO: 2416922 - RNA, 19 nt, Artificial Sequence
  Description of Artificial Sequence: Synthetic oligonucleotide
  Sense strand starting at position 2553 of SEQ ID NO: 1886551
cugagagcuguauaggcau

SEQ ID NO: 2416923 - RNA, 19 nt, Artificial Sequence
  Description of Artificial Sequence: Synthetic oligonucleotide
  Antisense strand to SEQ ID NO: 2416922
augccuauacagcucucag

SEQ ID NO: 2416924 - RNA, 19 nt, Artificial Sequence
  Description of Artificial Sequence: Synthetic oligonucleotide
  Sense strand starting at position 2737 of SEQ ID NO: 1886551
gcaguagacucucccacau

SEQ ID NO: 2416925 - RNA, 19 nt, Artificial Sequence
  Description of Artificial Sequence: Synthetic oligonucleotide
  Antisense strand to SEQ ID NO: 2416924
augugggagagucuacugc

SEQ ID NO: 2416926 - RNA, 19 nt, Artificial Sequence
  Description of Artificial Sequence: Synthetic oligonucleotide
  Sense strand starting at position 2739 of SEQ ID NO: 1886551
aguagacucucccacauuu

SEQ ID NO: 2416927 - RNA, 19 nt, Artificial Sequence
  Description of Artificial Sequence: Synthetic oligonucleotide
  Antisense strand to SEQ ID NO: 2416926
aaaugugggagagucuacu

SEQ ID NO: 2416928 - RNA, 19 nt, Artificial Sequence
  Description of Artificial Sequence: Synthetic oligonucleotide
  Sense strand starting at position 2787 of SEQ ID NO: 1886551
gagagagccgcaugaaaug

SEQ ID NO: 2416929 - RNA, 19 nt, Artificial Sequence
  Description of Artificial Sequence: Synthetic oligonucleotide
  Antisense strand to SEQ ID NO: 2416928
cauuucaugcggcucucuc

SEQ ID NO: 2416930 - RNA, 19 nt, Artificial Sequence
  Description of Artificial Sequence: Synthetic oligonucleotide
  Sense strand starting at position 2860 of SEQ ID NO: 1886551
caagguguucccuggcuuu

SEQ ID NO: 2416931 - RNA, 19 nt, Artificial Sequence
  Description of Artificial Sequence: Synthetic oligonucleotide
  Antisense strand to SEQ ID NO: 2416930
aaagccagggaacaccuug

SEQ ID NO: 2416932 - RNA, 19 nt, Artificial Sequence
  Description of Artificial Sequence: Synthetic oligonucleotide
  Sense strand starting at position 2936 of SEQ ID NO: 1886551
cuuggauucugagcagagu

SEQ ID NO: 2416933 - RNA, 19 nt, Artificial Sequence
  Description of Artificial Sequence: Synthetic oligonucleotide
  Antisense strand to SEQ ID NO: 2416932
acucugcucagaauccaag

SEQ ID NO: 2416934 - RNA, 19 nt, Artificial Sequence
  Description of Artificial Sequence: Synthetic oligonucleotide
  Sense strand starting at position 2939 of SEQ ID NO: 1886551
ggauucugagcagagugau

SEQ ID NO: 2416935 - RNA, 19 nt, Artificial Sequence
  Description of Artificial Sequence: Synthetic oligonucleotide
  Antisense strand to SEQ ID NO: 2416934
aucacucugcucagaaucc

SEQ ID NO: 2416936 - RNA, 19 nt, Artificial Sequence
  Description of Artificial Sequence: Synthetic oligonucleotide
  Sense strand starting at position 3011 of SEQ ID NO: 1886551
cugagucuccaauggucaa

SEQ ID NO: 2416937 - RNA, 19 nt, Artificial Sequence
  Description of Artificial Sequence: Synthetic oligonucleotide
  Antisense strand to SEQ ID NO: 2416936
uugaccauuggagacucag

SEQ ID NO: 2416938 - RNA, 19 nt, Artificial Sequence
  Description of Artificial Sequence: Synthetic oligonucleotide
  Sense strand starting at position 3046 of SEQ ID NO: 1886551
uggaaaugcuucuuauacc

SEQ ID NO: 2416939 - RNA, 19 nt, Artificial Sequence
  Description of Artificial Sequence: Synthetic oligonucleotide
  Antisense strand to SEQ ID NO: 2416938
gguauaagaagcauuucca

SEQ ID NO: 2416940 - RNA, 19 nt, Artificial Sequence
  Description of Artificial Sequence: Synthetic oligonucleotide
  Sense strand starting at position 3109 of SEQ ID NO: 1886551
uaaauuguucugucgcgca

SEQ ID NO: 2416941 - RNA, 19 nt, Artificial Sequence
  Description of Artificial Sequence: Synthetic oligonucleotide
  Antisense strand to SEQ ID NO: 2416940
ugcgcgacagaacaauuua

SEQ ID NO: 2416942 - RNA, 19 nt, Artificial Sequence
  Description of Artificial Sequence: Synthetic oligonucleotide
  Sense strand starting at position 3123 of SEQ ID NO: 1886551
gcgcagucuggagagaagu

SEQ ID NO: 2416943 - RNA, 19 nt, Artificial Sequence
  Description of Artificial Sequence: Synthetic oligonucleotide
  Antisense strand to SEQ ID NO: 2416942
acuucucuccagacugcgc

SEQ ID NO: 2416944 - RNA, 19 nt, Artificial Sequence
  Description of Artificial Sequence: Synthetic oligonucleotide
  Sense strand starting at position 3351 of SEQ ID NO: 1886551
ugggauuagagaugagcca

SEQ ID NO: 2416945 - RNA, 19 nt, Artificial Sequence
  Description of Artificial Sequence: Synthetic oligonucleotide
  Antisense strand to SEQ ID NO: 2416944
uggcucaucucuaauccca

SEQ ID NO: 2416946 - RNA, 19 nt, Artificial Sequence
  Description of Artificial Sequence: Synthetic oligonucleotide
  Sense strand starting at position 3430 of SEQ ID NO: 1886551
agccaagagacuuguguga

SEQ ID NO: 2416947 - RNA, 19 nt, Artificial Sequence
  Description of Artificial Sequence: Synthetic oligonucleotide
  Antisense strand to SEQ ID NO: 2416946
ucacacaagucucuuggcu

SEQ ID NO: 2416948 - RNA, 19 nt, Artificial Sequence
  Description of Artificial Sequence: Synthetic oligonucleotide
  Sense strand starting at position 3434 of SEQ ID NO: 1886551
aagagacuugugugauuau

SEQ ID NO: 2416949 - RNA, 19 nt, Artificial Sequence
  Description of Artificial Sequence: Synthetic oligonucleotide
  Antisense strand to SEQ ID NO: 2416948
auaaucacacaagucucuu

SEQ ID NO: 2416950 - RNA, 19 nt, Artificial Sequence
  Description of Artificial Sequence: Synthetic oligonucleotide
  Sense strand starting at position 3437 of SEQ ID NO: 1886551
agacuugugugauuaugau

SEQ ID NO: 2416951 - RNA, 19 nt, Artificial Sequence
  Description of Artificial Sequence: Synthetic oligonucleotide
  Antisense strand to SEQ ID NO: 2416950
aucauaaucacacaagucu

SEQ ID NO: 2416952 - RNA, 19 nt, Artificial Sequence
  Description of Artificial Sequence: Synthetic oligonucleotide
  Sense strand starting at position 3468 of SEQ ID NO: 1886551
cuuggaggagccugauuaa

SEQ ID NO: 2416953 - RNA, 19 nt, Artificial Sequence
  Description of Artificial Sequence: Synthetic oligonucleotide
  Antisense strand to SEQ ID NO: 2416952
uuaaucaggcuccuccaag

SEQ ID NO: 2416954 - RNA, 19 nt, Artificial Sequence
  Description of Artificial Sequence: Synthetic oligonucleotide
  Sense strand starting at position 3471 of SEQ ID NO: 1886551
ggaggagccugauuaaauc

SEQ ID NO: 2416955 - RNA, 19 nt, Artificial Sequence
  Description of Artificial Sequence: Synthetic oligonucleotide
  Antisense strand to SEQ ID NO: 2416954
gauuuaaucaggcuccucc

SEQ ID NO: 2416956 - RNA, 19 nt, Artificial Sequence
  Description of Artificial Sequence: Synthetic oligonucleotide
  Sense strand starting at position 3544 of SEQ ID NO: 1886551
ugcugagggcucugcacau

SEQ ID NO: 2416957 - RNA, 19 nt, Artificial Sequence
  Description of Artificial Sequence: Synthetic oligonucleotide
  Antisense strand to SEQ ID NO: 2416956
augugcagagcccucagca

SEQ ID NO: 2416958 - RNA, 19 nt, Artificial Sequence
  Description of Artificial Sequence: Synthetic oligonucleotide
  Sense strand starting at position 3976 of SEQ ID NO: 1886551
acuugaggucaaggguuua

SEQ ID NO: 2416959 - RNA, 19 nt, Artificial Sequence
  Description of Artificial Sequence: Synthetic oligonucleotide
  Antisense strand to SEQ ID NO: 2416958
uaaacccuugaccucaagu

SEQ ID NO: 2416960 - RNA, 19 nt, Artificial Sequence
  Description of Artificial Sequence: Synthetic oligonucleotide
  Sense strand starting at position 989 of SEQ ID NO: 1886552
auaaauuacugacacgaga

SEQ ID NO: 2416961 - RNA, 19 nt, Artificial Sequence
  Description of Artificial Sequence: Synthetic oligonucleotide
  Antisense strand to SEQ ID NO: 2416960
ucucgugucaguaauuuau

SEQ ID NO: 2416962 - RNA, 19 nt, Artificial Sequence
  Description of Artificial Sequence: Synthetic oligonucleotide
  Sense strand starting at position 1201 of SEQ ID NO: 1886552
cuagaaaccguccaauacu

SEQ ID NO: 2416963 - RNA, 19 nt, Artificial Sequence
  Description of Artificial Sequence: Synthetic oligonucleotide
  Antisense strand to SEQ ID NO: 2416962
aguauuggacgguuucuag

SEQ ID NO: 2416964 - RNA, 19 nt, Artificial Sequence
  Description of Artificial Sequence: Synthetic oligonucleotide
  Sense strand starting at position 1217 of SEQ ID NO: 1886552
acugcuguguccuucccaa

SEQ ID NO: 2416965 - RNA, 19 nt, Artificial Sequence
  Description of Artificial Sequence: Synthetic oligonucleotide
  Antisense strand to SEQ ID NO: 2416964
uugggaaggacacagcagu

SEQ ID NO: 2416966 - RNA, 19 nt, Artificial Sequence
  Description of Artificial Sequence: Synthetic oligonucleotide
  Sense strand starting at position 1221 of SEQ ID NO: 1886552
cuguguccuucccaaggga

SEQ ID NO: 2416967 - RNA, 19 nt, Artificial Sequence
  Description of Artificial Sequence: Synthetic oligonucleotide
  Antisense strand to SEQ ID NO: 2416966
ucccuugggaaggacacag

SEQ ID NO: 2416968 - RNA, 19 nt, Artificial Sequence
  Description of Artificial Sequence: Synthetic oligonucleotide
  Sense strand starting at position 1661 of SEQ ID NO: 1886552
ccugguugagucggucaaa

SEQ ID NO: 2416969 - RNA, 19 nt, Artificial Sequence
  Description of Artificial Sequence: Synthetic oligonucleotide
  Antisense strand to SEQ ID NO: 2416968
uuugaccgacucaaccagg

SEQ ID NO: 2416970 - RNA, 19 nt, Artificial Sequence
  Description of Artificial Sequence: Synthetic oligonucleotide
  Sense strand starting at position 1662 of SEQ ID NO: 1886552
cugguugagucggucaaac

SEQ ID NO: 2416971 - RNA, 19 nt, Artificial Sequence
  Description of Artificial Sequence: Synthetic oligonucleotide
  Antisense strand to SEQ ID NO: 2416970
guuugaccgacucaaccag

SEQ ID NO: 2416972 - RNA, 19 nt, Artificial Sequence
  Description of Artificial Sequence: Synthetic oligonucleotide
  Sense strand starting at position 1664 of SEQ ID NO: 1886552
gguugagucggucaaacug

SEQ ID NO: 2416973 - RNA, 19 nt, Artificial Sequence
  Description of Artificial Sequence: Synthetic oligonucleotide
  Antisense strand to SEQ ID NO: 2416972
caguuugaccgacucaacc

SEQ ID NO: 2416974 - RNA, 19 nt, Artificial Sequence
  Description of Artificial Sequence: Synthetic oligonucleotide
  Sense strand starting at position 2457 of SEQ ID NO: 1886552
ggcagagcucggcauaaug

SEQ ID NO: 2416975 - RNA, 19 nt, Artificial Sequence
  Description of Artificial Sequence: Synthetic oligonucleotide
  Antisense strand to SEQ ID NO: 2416974
cauuaugccgagcucugcc

SEQ ID NO: 2416976 - RNA, 19 nt, Artificial Sequence
  Description of Artificial Sequence: Synthetic oligonucleotide
  Sense strand starting at position 2467 of SEQ ID NO: 1886552
ggcauaaugucuugccaaa

SEQ ID NO: 2416977 - RNA, 19 nt, Artificial Sequence
  Description of Artificial Sequence: Synthetic oligonucleotide
  Antisense strand to SEQ ID NO: 2416976
uuuggcaagacauuaugcc

SEQ ID NO: 2416978 - RNA, 19 nt, Artificial Sequence
  Description of Artificial Sequence: Synthetic oligonucleotide
  Sense strand starting at position 2532 of SEQ ID NO: 1886552
cgagaaaucugucugcuug

SEQ ID NO: 2416979 - RNA, 19 nt, Artificial Sequence
  Description of Artificial Sequence: Synthetic oligonucleotide
  Antisense strand to SEQ ID NO: 2416978
caagcagacagauuucucg

SEQ ID NO: 2416980 - RNA, 19 nt, Artificial Sequence
  Description of Artificial Sequence: Synthetic oligonucleotide
  Sense strand starting at position 3697 of SEQ ID NO: 1886552
gcggcacuccuggagaacu

SEQ ID NO: 2416981 - RNA, 19 nt, Artificial Sequence
  Description of Artificial Sequence: Synthetic oligonucleotide
  Antisense strand to SEQ ID NO: 2416980
aguucuccaggagugccgc

SEQ ID NO: 2416982 - RNA, 19 nt, Artificial Sequence
  Description of Artificial Sequence: Synthetic oligonucleotide
  Sense strand starting at position 3799 of SEQ ID NO: 1886552
gagccauugugaggacucu

SEQ ID NO: 2416983 - RNA, 19 nt, Artificial Sequence
  Description of Artificial Sequence: Synthetic oligonucleotide
  Antisense strand to SEQ ID NO: 2416982
agaguccucacaauggcuc

SEQ ID NO: 2416984 - RNA, 19 nt, Artificial Sequence
  Description of Artificial Sequence: Synthetic oligonucleotide
  Sense strand starting at position 3808 of SEQ ID NO: 1886552
ugaggacucucccagccaa

SEQ ID NO: 2416985 - RNA, 19 nt, Artificial Sequence
  Description of Artificial Sequence: Synthetic oligonucleotide
  Antisense strand to SEQ ID NO: 2416984
uuggcugggagaguccuca

SEQ ID NO: 2416986 - RNA, 19 nt, Artificial Sequence
  Description of Artificial Sequence: Synthetic oligonucleotide
  Sense strand starting at position 3829 of SEQ ID NO: 1886552
ucguaaucgcuggugcuga

SEQ ID NO: 2416987 - RNA, 19 nt, Artificial Sequence
  Description of Artificial Sequence: Synthetic oligonucleotide
  Antisense strand to SEQ ID NO: 2416986
ucagcaccagcgauuacga

SEQ ID NO: 2416988 - RNA, 19 nt, Artificial Sequence
  Description of Artificial Sequence: Synthetic oligonucleotide
  Sense strand starting at position 3830 of SEQ ID NO: 1886552
cguaaucgcuggugcugaa

SEQ ID NO: 2416989 - RNA, 19 nt, Artificial Sequence
  Description of Artificial Sequence: Synthetic oligonucleotide
  Antisense strand to SEQ ID NO: 2416988
uucagcaccagcgauuacg

SEQ ID NO: 2416990 - RNA, 19 nt, Artificial Sequence
  Description of Artificial Sequence: Synthetic oligonucleotide
  Sense strand starting at position 3894 of SEQ ID NO: 1886552
uggguagagugcugaaaca

SEQ ID NO: 2416991 - RNA, 19 nt, Artificial Sequence
  Description of Artificial Sequence: Synthetic oligonucleotide
  Antisense strand to SEQ ID NO: 2416990
uguuucagcacucuaccca

SEQ ID NO: 2416992 - RNA, 19 nt, Artificial Sequence
  Description of Artificial Sequence: Synthetic oligonucleotide
  Sense strand starting at position 3930 of SEQ ID NO: 1886552
gggccagggccucaucaaa

SEQ ID NO: 2416993 - RNA, 19 nt, Artificial Sequence
  Description of Artificial Sequence: Synthetic oligonucleotide
  Antisense strand to SEQ ID NO: 2416992
uuugaugaggcccuggccc

SEQ ID NO: 2416994 - RNA, 19 nt, Artificial Sequence
  Description of Artificial Sequence: Synthetic oligonucleotide
  Sense strand starting at position 344 of SEQ ID NO: 1886553
uuaacaucuugguuuguau

SEQ ID NO: 2416995 - RNA, 19 nt, Artificial Sequence
  Description of Artificial Sequence: Synthetic oligonucleotide
  Antisense strand to SEQ ID NO: 2416994
auacaaaccaagauguuaa

SEQ ID NO: 2416996 - RNA, 19 nt, Artificial Sequence
  Description of Artificial Sequence: Synthetic oligonucleotide
  Sense strand starting at position 351 of SEQ ID NO: 1886553
cuugguuuguauccuagau

SEQ ID NO: 2416997 - RNA, 19 nt, Artificial Sequence
  Description of Artificial Sequence: Synthetic oligonucleotide
  Antisense strand to SEQ ID NO: 2416996
aucuaggauacaaaccaag

SEQ ID NO: 2416998 - RNA, 19 nt, Artificial Sequence
  Description of Artificial Sequence: Synthetic oligonucleotide
  Sense strand starting at position 355 of SEQ ID NO: 1886553
guuuguauccuagauggcu

SEQ ID NO: 2416999 - RNA, 19 nt, Artificial Sequence
  Description of Artificial Sequence: Synthetic oligonucleotide
  Antisense strand to SEQ ID NO: 2416998
agccaucuaggauacaaac

SEQ ID NO: 2417000 - RNA, 19 nt, Artificial Sequence
  Description of Artificial Sequence: Synthetic oligonucleotide
  Sense strand starting at position 416 of SEQ ID NO: 1886553
guggaaucaugacucuguu

SEQ ID NO: 2417001 - RNA, 19 nt, Artificial Sequence
  Description of Artificial Sequence: Synthetic oligonucleotide
  Antisense strand to SEQ ID NO: 2417000
aacagagucaugauuccac

SEQ ID NO: 2417002 - RNA, 19 nt, Artificial Sequence
  Description of Artificial Sequence: Synthetic oligonucleotide
  Sense strand starting at position 616 of SEQ ID NO: 1886553
cuuugauucccacaaggcu

SEQ ID NO: 2417003 - RNA, 19 nt, Artificial Sequence
  Description of Artificial Sequence: Synthetic oligonucleotide
  Antisense strand to SEQ ID NO: 2417002
agccuugugggaaucaaag

SEQ ID NO: 2417004 - RNA, 19 nt, Artificial Sequence
  Description of Artificial Sequence: Synthetic oligonucleotide
  Sense strand starting at position 624 of SEQ ID NO: 1886553
cccacaaggcugugagaua

SEQ ID NO: 2417005 - RNA, 19 nt, Artificial Sequence
  Description of Artificial Sequence: Synthetic oligonucleotide
  Antisense strand to SEQ ID NO: 2417004
uaucucacagccuuguggg

SEQ ID NO: 2417006 - RNA, 19 nt, Artificial Sequence
  Description of Artificial Sequence: Synthetic oligonucleotide
  Sense strand starting at position 931 of SEQ ID NO: 1886553
uggcgagaaugacuugaua

SEQ ID NO: 2417007 - RNA, 19 nt, Artificial Sequence
  Description of Artificial Sequence: Synthetic oligonucleotide
  Antisense strand to SEQ ID NO: 2417006
uaucaagucauucucgcca

SEQ ID NO: 2417008 - RNA, 19 nt, Artificial Sequence
  Description of Artificial Sequence: Synthetic oligonucleotide
  Sense strand starting at position 933 of SEQ ID NO: 1886553
gcgagaaugacuugauaaa

SEQ ID NO: 2417009 - RNA, 19 nt, Artificial Sequence
  Description of Artificial Sequence: Synthetic oligonucleotide
  Antisense strand to SEQ ID NO: 2417008
uuuaucaagucauucucgc

SEQ ID NO: 2417010 - RNA, 19 nt, Artificial Sequence
  Description of Artificial Sequence: Synthetic oligonucleotide
  Sense strand starting at position 1251 of SEQ ID NO: 1886553
acguguacccugggaagaa

SEQ ID NO: 2417011 - RNA, 19 nt, Artificial Sequence
  Description of Artificial Sequence: Synthetic oligonucleotide
  Antisense strand to SEQ ID NO: 2417010
uucuucccaggguacacgu

SEQ ID NO: 2417012 - RNA, 19 nt, Artificial Sequence
  Description of Artificial Sequence: Synthetic oligonucleotide
  Sense strand starting at position 1274 of SEQ ID NO: 1886553
ggaugcauuuccguuccca

SEQ ID NO: 2417013 - RNA, 19 nt, Artificial Sequence
  Description of Artificial Sequence: Synthetic oligonucleotide
  Antisense strand to SEQ ID NO: 2417012
ugggaacggaaaugcaucc

SEQ ID NO: 2417014 - RNA, 19 nt, Artificial Sequence
  Description of Artificial Sequence: Synthetic oligonucleotide
  Sense strand starting at position 1298 of SEQ ID NO: 1886553
gccucacuuccuuagaaag

SEQ ID NO: 2417015 - RNA, 19 nt, Artificial Sequence
  Description of Artificial Sequence: Synthetic oligonucleotide
  Antisense strand to SEQ ID NO: 2417014
cuuucuaaggaagugaggc

SEQ ID NO: 2417016 - RNA, 19 nt, Artificial Sequence
  Description of Artificial Sequence: Synthetic oligonucleotide
  Sense strand starting at position 1437 of SEQ ID NO: 1886553
uuuccuuucugggucauga

SEQ ID NO: 2417017 - RNA, 19 nt, Artificial Sequence
  Description of Artificial Sequence: Synthetic oligonucleotide
  Antisense strand to SEQ ID NO: 2417016
ucaugacccagaaaggaaa

SEQ ID NO: 2417018 - RNA, 19 nt, Artificial Sequence
  Description of Artificial Sequence: Synthetic oligonucleotide
  Sense strand starting at position 1487 of SEQ ID NO: 1886553
cuggaagucuuuguggagu

SEQ ID NO: 2417019 - RNA, 19 nt, Artificial Sequence
  Description of Artificial Sequence: Synthetic oligonucleotide
  Antisense strand to SEQ ID NO: 2417018
acuccacaaagacuuccag

SEQ ID NO: 2417020 - RNA, 19 nt, Artificial Sequence
  Description of Artificial Sequence: Synthetic oligonucleotide
  Sense strand starting at position 1569 of SEQ ID NO: 1886553
uugaauguguucucccaaa

SEQ ID NO: 2417021 - RNA, 19 nt, Artificial Sequence
  Description of Artificial Sequence: Synthetic oligonucleotide
  Antisense strand to SEQ ID NO: 2417020
uuugggagaacacauucaa

SEQ ID NO: 2417022 - RNA, 19 nt, Artificial Sequence
  Description of Artificial Sequence: Synthetic oligonucleotide
  Sense strand starting at position 1647 of SEQ ID NO: 1886553
aggugacuggauugauguu

SEQ ID NO: 2417023 - RNA, 19 nt, Artificial Sequence
  Description of Artificial Sequence: Synthetic oligonucleotide
  Antisense strand to SEQ ID NO: 2417022
aacaucaauccagucaccu

SEQ ID NO: 2417024 - RNA, 19 nt, Artificial Sequence
  Description of Artificial Sequence: Synthetic oligonucleotide
  Sense strand starting at position 1648 of SEQ ID NO: 1886553
ggugacuggauugauguua

SEQ ID NO: 2417025 - RNA, 19 nt, Artificial Sequence
  Description of Artificial Sequence: Synthetic oligonucleotide
  Antisense strand to SEQ ID NO: 2417024
uaacaucaauccagucacc

SEQ ID NO: 2417026 - RNA, 19 nt, Artificial Sequence
  Description of Artificial Sequence: Synthetic oligonucleotide
  Sense strand starting at position 1663 of SEQ ID NO: 1886553
guuauuauugugggaguga

SEQ ID NO: 2417027 - RNA, 19 nt, Artificial Sequence
  Description of Artificial Sequence: Synthetic oligonucleotide
  Antisense strand to SEQ ID NO: 2417026
ucacucccacaauaauaac

SEQ ID NO: 2417028 - RNA, 19 nt, Artificial Sequence
  Description of Artificial Sequence: Synthetic oligonucleotide
  Sense strand starting at position 1712 of SEQ ID NO: 1886553
auguguucucuugccaugu

SEQ ID NO: 2417029 - RNA, 19 nt, Artificial Sequence
  Description of Artificial Sequence: Synthetic oligonucleotide
  Antisense strand to SEQ ID NO: 2417028
acauggcaagagaacacau

SEQ ID NO: 2417030 - RNA, 19 nt, Artificial Sequence
  Description of Artificial Sequence: Synthetic oligonucleotide
  Sense strand starting at position 1746 of SEQ ID NO: 1886553
guuacuaugcagcaagaag

SEQ ID NO: 2417031 - RNA, 19 nt, Artificial Sequence
  Description of Artificial Sequence: Synthetic oligonucleotide
  Antisense strand to SEQ ID NO: 2417030
cuucuugcugcauaguaac

SEQ ID NO: 2417032 - RNA, 19 nt, Artificial Sequence
  Description of Artificial Sequence: Synthetic oligonucleotide
  Sense strand starting at position 1838 of SEQ ID NO: 1886553
auuguaaguuauccacuuu

SEQ ID NO: 2417033 - RNA, 19 nt, Artificial Sequence
  Description of Artificial Sequence: Synthetic oligonucleotide
  Antisense strand to SEQ ID NO: 2417032
aaaguggauaacuuacaau

SEQ ID NO: 2417034 - RNA, 19 nt, Artificial Sequence
  Description of Artificial Sequence: Synthetic oligonucleotide
  Sense strand starting at position 2117 of SEQ ID NO: 1886553
aagugaucugcccauguua

SEQ ID NO: 2417035 - RNA, 19 nt, Artificial Sequence
  Description of Artificial Sequence: Synthetic oligonucleotide
  Antisense strand to SEQ ID NO: 2417034
uaacaugggcagaucacuu

SEQ ID NO: 2417036 - RNA, 19 nt, Artificial Sequence
  Description of Artificial Sequence: Synthetic oligonucleotide
  Sense strand starting at position 2315 of SEQ ID NO: 1886553
auaggaaacuaggaaguua

SEQ ID NO: 2417037 - RNA, 19 nt, Artificial Sequence
  Description of Artificial Sequence: Synthetic oligonucleotide
  Antisense strand to SEQ ID NO: 2417036
uaacuuccuaguuuccuau

SEQ ID NO: 2417038 - RNA, 19 nt, Artificial Sequence
  Description of Artificial Sequence: Synthetic oligonucleotide
  Sense strand starting at position 2349 of SEQ ID NO: 1886553
agaguuagauaagcagaua

SEQ ID NO: 2417039 - RNA, 19 nt, Artificial Sequence
  Description of Artificial Sequence: Synthetic oligonucleotide
  Antisense strand to SEQ ID NO: 2417038
uaucugcuuaucuaacucu

SEQ ID NO: 2417040 - RNA, 19 nt, Artificial Sequence
  Description of Artificial Sequence: Synthetic oligonucleotide
  Sense strand starting at position 2438 of SEQ ID NO: 1886553
gugugugauguagacuauu

SEQ ID NO: 2417041 - RNA, 19 nt, Artificial Sequence
  Description of Artificial Sequence: Synthetic oligonucleotide
  Antisense strand to SEQ ID NO: 2417040
aauagucuacaucacacac

SEQ ID NO: 2417042 - RNA, 19 nt, Artificial Sequence
  Description of Artificial Sequence: Synthetic oligonucleotide
  Sense strand starting at position 2491 of SEQ ID NO: 1886553
acaagaaccugguugcaau

SEQ ID NO: 2417043 - RNA, 19 nt, Artificial Sequence
  Description of Artificial Sequence: Synthetic oligonucleotide
  Antisense strand to SEQ ID NO: 2417042
auugcaaccagguucuugu

SEQ ID NO: 2417044 - RNA, 19 nt, Artificial Sequence
  Description of Artificial Sequence: Synthetic oligonucleotide
  Sense strand starting at position 2587 of SEQ ID NO: 1886553
uucugaugcugcuugaaua

SEQ ID NO: 2417045 - RNA, 19 nt, Artificial Sequence
  Description of Artificial Sequence: Synthetic oligonucleotide
  Antisense strand to SEQ ID NO: 2417044
uauucaagcagcaucagaa

SEQ ID NO: 2417046 - RNA, 19 nt, Artificial Sequence
  Description of Artificial Sequence: Synthetic oligonucleotide
  Sense strand starting at position 2709 of SEQ ID NO: 1886553
ggucauugaugacucaaug

SEQ ID NO: 2417047 - RNA, 19 nt, Artificial Sequence
  Description of Artificial Sequence: Synthetic oligonucleotide
  Antisense strand to SEQ ID NO: 2417046
cauugagucaucaaugacc

SEQ ID NO: 2417048 - RNA, 19 nt, Artificial Sequence
  Description of Artificial Sequence: Synthetic oligonucleotide
  Sense strand starting at position 2867 of SEQ ID NO: 1886553
uaaucauagcaguaguaag

SEQ ID NO: 2417049 - RNA, 19 nt, Artificial Sequence
  Description of Artificial Sequence: Synthetic oligonucleotide
  Antisense strand to SEQ ID NO: 2417048
cuuacuacugcuaugauua

SEQ ID NO: 2417050 - RNA, 19 nt, Artificial Sequence
  Description of Artificial Sequence: Synthetic oligonucleotide
  Sense strand starting at position 2897 of SEQ ID NO: 1886553
ggaggauucccagguuuga

SEQ ID NO: 2417051 - RNA, 19 nt, Artificial Sequence
  Description of Artificial Sequence: Synthetic oligonucleotide
  Antisense strand to SEQ ID NO: 2417050
ucaaaccugggaauccucc

SEQ ID NO: 2417052 - RNA, 19 nt, Artificial Sequence
  Description of Artificial Sequence: Synthetic oligonucleotide
  Sense strand starting at position 2938 of SEQ ID NO: 1886553
aaagacauagcagguuuau

SEQ ID NO: 2417053 - RNA, 19 nt, Artificial Sequence
  Description of Artificial Sequence: Synthetic oligonucleotide
  Antisense strand to SEQ ID NO: 2417052
auaaaccugcuaugucuuu

SEQ ID NO: 2417054 - RNA, 19 nt, Artificial Sequence
  Description of Artificial Sequence: Synthetic oligonucleotide
  Sense strand starting at position 2974 of SEQ ID NO: 1886553
aggauagagucagaaagga

SEQ ID NO: 2417055 - RNA, 19 nt, Artificial Sequence
  Description of Artificial Sequence: Synthetic oligonucleotide
  Antisense strand to SEQ ID NO: 2417054
uccuuucugacucuauccu

SEQ ID NO: 2417056 - RNA, 19 nt, Artificial Sequence
  Description of Artificial Sequence: Synthetic oligonucleotide
  Sense strand starting at position 3388 of SEQ ID NO: 1886553
aggagauauuccuucucuu

SEQ ID NO: 2417057 - RNA, 19 nt, Artificial Sequence
  Description of Artificial Sequence: Synthetic oligonucleotide
  Antisense strand to SEQ ID NO: 2417056
aagagaaggaauaucuccu

SEQ ID NO: 2417058 - RNA, 19 nt, Artificial Sequence
  Description of Artificial Sequence: Synthetic oligonucleotide
  Sense strand starting at position 3415 of SEQ ID NO: 1886553
augucugauuuagauagga

SEQ ID NO: 2417059 - RNA, 19 nt, Artificial Sequence
  Description of Artificial Sequence: Synthetic oligonucleotide
  Antisense strand to SEQ ID NO: 2417058
uccuaucuaaaucagacau

SEQ ID NO: 2417060 - RNA, 19 nt, Artificial Sequence
  Description of Artificial Sequence: Synthetic oligonucleotide
  Sense strand starting at position 3540 of SEQ ID NO: 1886553
gugagcaauucccuuagag

SEQ ID NO: 2417061 - RNA, 19 nt, Artificial Sequence
  Description of Artificial Sequence: Synthetic oligonucleotide
  Antisense strand to SEQ ID NO: 2417060
cucuaagggaauugcucac

SEQ ID NO: 2417062 - RNA, 19 nt, Artificial Sequence
  Description of Artificial Sequence: Synthetic oligonucleotide
  Sense strand starting at position 3549 of SEQ ID NO: 1886553
ucccuuagagaugggcaua

SEQ ID NO: 2417063 - RNA, 19 nt, Artificial Sequence
  Description of Artificial Sequence: Synthetic oligonucleotide
  Antisense strand to SEQ ID NO: 2417062
uaugcccaucucuaaggga

SEQ ID NO: 2417064 - RNA, 19 nt, Artificial Sequence
  Description of Artificial Sequence: Synthetic oligonucleotide
  Sense strand starting at position 3550 of SEQ ID NO: 1886553
cccuuagagaugggcauau

SEQ ID NO: 2417065 - RNA, 19 nt, Artificial Sequence
  Description of Artificial Sequence: Synthetic oligonucleotide
  Antisense strand to SEQ ID NO: 2417064
auaugcccaucucuaaggg

SEQ ID NO: 2417066 - RNA, 19 nt, Artificial Sequence
  Description of Artificial Sequence: Synthetic oligonucleotide
  Sense strand starting at position 3651 of SEQ ID NO: 1886553
cagagauaaugggacauaa

SEQ ID NO: 2417067 - RNA, 19 nt, Artificial Sequence
  Description of Artificial Sequence: Synthetic oligonucleotide
  Antisense strand to SEQ ID NO: 2417066
uuaugucccauuaucucug

SEQ ID NO: 2417068 - RNA, 19 nt, Artificial Sequence
  Description of Artificial Sequence: Synthetic oligonucleotide
  Sense strand starting at position 3678 of SEQ ID NO: 1886553
uugcuaugugcccaagaaa

SEQ ID NO: 2417069 - RNA, 19 nt, Artificial Sequence
  Description of Artificial Sequence: Synthetic oligonucleotide
  Antisense strand to SEQ ID NO: 2417068
uuucuugggcacauagcaa

SEQ ID NO: 2417070 - RNA, 19 nt, Artificial Sequence
  Description of Artificial Sequence: Synthetic oligonucleotide
  Sense strand starting at position 3697 of SEQ ID NO: 1886553
gccuucugagaaugaagaa

SEQ ID NO: 2417071 - RNA, 19 nt, Artificial Sequence
  Description of Artificial Sequence: Synthetic oligonucleotide
  Antisense strand to SEQ ID NO: 2417070
uucuucauucucagaaggc

SEQ ID NO: 2417072 - RNA, 19 nt, Artificial Sequence
  Description of Artificial Sequence: Synthetic oligonucleotide
  Sense strand starting at position 3976 of SEQ ID NO: 1886553
guaagucucacaugaguug

SEQ ID NO: 2417073 - RNA, 19 nt, Artificial Sequence
  Description of Artificial Sequence: Synthetic oligonucleotide
  Antisense strand to SEQ ID NO: 2417072
caacucaugugagacuuac

SEQ ID NO: 2417074 - RNA, 19 nt, Artificial Sequence
  Description of Artificial Sequence: Synthetic oligonucleotide
  Sense strand starting at position 174 of SEQ ID NO: 1886554
gagguguguggguaaggau

SEQ ID NO: 2417075 - RNA, 19 nt, Artificial Sequence
  Description of Artificial Sequence: Synthetic oligonucleotide
  Antisense strand to SEQ ID NO: 2417074
auccuuacccacacaccuc

SEQ ID NO: 2417076 - RNA, 19 nt, Artificial Sequence
  Description of Artificial Sequence: Synthetic oligonucleotide
  Sense strand starting at position 309 of SEQ ID NO: 1886554
aagaaauacugggagauga

SEQ ID NO: 2417077 - RNA, 19 nt, Artificial Sequence
  Description of Artificial Sequence: Synthetic oligonucleotide
  Antisense strand to SEQ ID NO: 2417076
ucaucucccaguauuucuu

SEQ ID NO: 2417078 - RNA, 19 nt, Artificial Sequence
  Description of Artificial Sequence: Synthetic oligonucleotide
  Sense strand starting at position 505 of SEQ ID NO: 1886554
uuuagugauaagugcuguu

SEQ ID NO: 2417079 - RNA, 19 nt, Artificial Sequence
  Description of Artificial Sequence: Synthetic oligonucleotide
  Antisense strand to SEQ ID NO: 2417078
aacagcacuuaucacuaaa

SEQ ID NO: 2417080 - RNA, 19 nt, Artificial Sequence
  Description of Artificial Sequence: Synthetic oligonucleotide
  Sense strand starting at position 569 of SEQ ID NO: 1886554
cuuugagaaauucgagcca

SEQ ID NO: 2417081 - RNA, 19 nt, Artificial Sequence
  Description of Artificial Sequence: Synthetic oligonucleotide
  Antisense strand to SEQ ID NO: 2417080
uggcucgaauuucucaaag

SEQ ID NO: 2417082 - RNA, 19 nt, Artificial Sequence
  Description of Artificial Sequence: Synthetic oligonucleotide
  Sense strand starting at position 612 of SEQ ID NO: 1886554
cccacaugugagcagguau

SEQ ID NO: 2417083 - RNA, 19 nt, Artificial Sequence
  Description of Artificial Sequence: Synthetic oligonucleotide
  Antisense strand to SEQ ID NO: 2417082
auaccugcucacauguggg

SEQ ID NO: 2417084 - RNA, 19 nt, Artificial Sequence
  Description of Artificial Sequence: Synthetic oligonucleotide
  Sense strand starting at position 737 of SEQ ID NO: 1886554
ggaccaaggaguuggcauu

SEQ ID NO: 2417085 - RNA, 19 nt, Artificial Sequence
  Description of Artificial Sequence: Synthetic oligonucleotide
  Antisense strand to SEQ ID NO: 2417084
aaugccaacuccuuggucc

SEQ ID NO: 2417086 - RNA, 19 nt, Artificial Sequence
  Description of Artificial Sequence: Synthetic oligonucleotide
  Sense strand starting at position 783 of SEQ ID NO: 1886554
cuuauaggccaggguuaga

SEQ ID NO: 2417087 - RNA, 19 nt, Artificial Sequence
  Description of Artificial Sequence: Synthetic oligonucleotide
  Antisense strand to SEQ ID NO: 2417086
ucuaacccuggccuauaag

SEQ ID NO: 2417088 - RNA, 19 nt, Artificial Sequence
  Description of Artificial Sequence: Synthetic oligonucleotide
  Sense strand starting at position 792 of SEQ ID NO: 1886554
caggguuagaaguguccua

SEQ ID NO: 2417089 - RNA, 19 nt, Artificial Sequence
  Description of Artificial Sequence: Synthetic oligonucleotide
  Antisense strand to SEQ ID NO: 2417088
uaggacacuucuaacccug

SEQ ID NO: 2417090 - RNA, 19 nt, Artificial Sequence
  Description of Artificial Sequence: Synthetic oligonucleotide
  Sense strand starting at position 852 of SEQ ID NO: 1886554
uuggcuguugucuggagaa

SEQ ID NO: 2417091 - RNA, 19 nt, Artificial Sequence
  Description of Artificial Sequence: Synthetic oligonucleotide
  Antisense strand to SEQ ID NO: 2417090
uucuccagacaacagccaa

SEQ ID NO: 2417092 - RNA, 19 nt, Artificial Sequence
  Description of Artificial Sequence: Synthetic oligonucleotide
  Sense strand starting at position 854 of SEQ ID NO: 1886554
ggcuguugucuggagaaug

SEQ ID NO: 2417093 - RNA, 19 nt, Artificial Sequence
  Description of Artificial Sequence: Synthetic oligonucleotide
  Antisense strand to SEQ ID NO: 2417092
cauucuccagacaacagcc

SEQ ID NO: 2417094 - RNA, 19 nt, Artificial Sequence
  Description of Artificial Sequence: Synthetic oligonucleotide
  Sense strand starting at position 855 of SEQ ID NO: 1886554
gcuguugucuggagaaugg

SEQ ID NO: 2417095 - RNA, 19 nt, Artificial Sequence
  Description of Artificial Sequence: Synthetic oligonucleotide
  Antisense strand to SEQ ID NO: 2417094
ccauucuccagacaacagc

SEQ ID NO: 2417096 - RNA, 19 nt, Artificial Sequence
  Description of Artificial Sequence: Synthetic oligonucleotide
  Sense strand starting at position 1235 of SEQ ID NO: 1886554
gacagugauggccagacuu

SEQ ID NO: 2417097 - RNA, 19 nt, Artificial Sequence
  Description of Artificial Sequence: Synthetic oligonucleotide
  Antisense strand to SEQ ID NO: 2417096
aagucuggccaucacuguc

SEQ ID NO: 2417098 - RNA, 19 nt, Artificial Sequence
  Description of Artificial Sequence: Synthetic oligonucleotide
  Sense strand starting at position 1287 of SEQ ID NO: 1886554
agguuugggagcugagaca

SEQ ID NO: 2417099 - RNA, 19 nt, Artificial Sequence
  Description of Artificial Sequence: Synthetic oligonucleotide
  Antisense strand to SEQ ID NO: 2417098
ugucucagcucccaaaccu

SEQ ID NO: 2417100 - RNA, 19 nt, Artificial Sequence
  Description of Artificial Sequence: Synthetic oligonucleotide
  Sense strand starting at position 1300 of SEQ ID NO: 1886554
gagacagauucugaaggca

SEQ ID NO: 2417101 - RNA, 19 nt, Artificial Sequence
  Description of Artificial Sequence: Synthetic oligonucleotide
  Antisense strand to SEQ ID NO: 2417100
ugccuucagaaucugucuc

SEQ ID NO: 2417102 - RNA, 19 nt, Artificial Sequence
  Description of Artificial Sequence: Synthetic oligonucleotide
  Sense strand starting at position 1402 of SEQ ID NO: 1886554
auuguauuguuuccaagua

SEQ ID NO: 2417103 - RNA, 19 nt, Artificial Sequence
  Description of Artificial Sequence: Synthetic oligonucleotide
  Antisense strand to SEQ ID NO: 2417102
uacuuggaaacaauacaau

SEQ ID NO: 2417104 - RNA, 19 nt, Artificial Sequence
  Description of Artificial Sequence: Synthetic oligonucleotide
  Sense strand starting at position 1653 of SEQ ID NO: 1886554
cacagacuucggcaucaca

SEQ ID NO: 2417105 - RNA, 19 nt, Artificial Sequence
  Description of Artificial Sequence: Synthetic oligonucleotide
  Antisense strand to SEQ ID NO: 2417104
ugugaugccgaagucugug

SEQ ID NO: 2417106 - RNA, 19 nt, Artificial Sequence
  Description of Artificial Sequence: Synthetic oligonucleotide
  Sense strand starting at position 1777 of SEQ ID NO: 1886554
ggugauucugaggagcagu

SEQ ID NO: 2417107 - RNA, 19 nt, Artificial Sequence
  Description of Artificial Sequence: Synthetic oligonucleotide
  Antisense strand to SEQ ID NO: 2417106
acugcuccucagaaucacc

SEQ ID NO: 2417108 - RNA, 19 nt, Artificial Sequence
  Description of Artificial Sequence: Synthetic oligonucleotide
  Sense strand starting at position 1788 of SEQ ID NO: 1886554
ggagcagucugggcugaga

SEQ ID NO: 2417109 - RNA, 19 nt, Artificial Sequence
  Description of Artificial Sequence: Synthetic oligonucleotide
  Antisense strand to SEQ ID NO: 2417108
ucucagcccagacugcucc

SEQ ID NO: 2417110 - RNA, 19 nt, Artificial Sequence
  Description of Artificial Sequence: Synthetic oligonucleotide
  Sense strand starting at position 1907 of SEQ ID NO: 1886554
gaggauggguaugaugcaa

SEQ ID NO: 2417111 - RNA, 19 nt, Artificial Sequence
  Description of Artificial Sequence: Synthetic oligonucleotide
  Antisense strand to SEQ ID NO: 2417110
uugcaucauacccauccuc

SEQ ID NO: 2417112 - RNA, 19 nt, Artificial Sequence
  Description of Artificial Sequence: Synthetic oligonucleotide
  Sense strand starting at position 2165 of SEQ ID NO: 1886554
ggcucacagacuugauguu

SEQ ID NO: 2417113 - RNA, 19 nt, Artificial Sequence
  Description of Artificial Sequence: Synthetic oligonucleotide
  Antisense strand to SEQ ID NO: 2417112
aacaucaagucugugagcc

SEQ ID NO: 2417114 - RNA, 19 nt, Artificial Sequence
  Description of Artificial Sequence: Synthetic oligonucleotide
  Sense strand starting at position 2318 of SEQ ID NO: 1886554
ccaagaaauugagccuuga

SEQ ID NO: 2417115 - RNA, 19 nt, Artificial Sequence
  Description of Artificial Sequence: Synthetic oligonucleotide
  Antisense strand to SEQ ID NO: 2417114
ucaaggcucaauuucuugg

SEQ ID NO: 2417116 - RNA, 19 nt, Artificial Sequence
  Description of Artificial Sequence: Synthetic oligonucleotide
  Sense strand starting at position 2322 of SEQ ID NO: 1886554
gaaauugagccuugaggac

SEQ ID NO: 2417117 - RNA, 19 nt, Artificial Sequence
  Description of Artificial Sequence: Synthetic oligonucleotide
  Antisense strand to SEQ ID NO: 2417116
guccucaaggcucaauuuc

SEQ ID NO: 2417118 - RNA, 19 nt, Artificial Sequence
  Description of Artificial Sequence: Synthetic oligonucleotide
  Sense strand starting at position 2629 of SEQ ID NO: 1886554
gaaauugagccuugaggag

SEQ ID NO: 2417119 - RNA, 19 nt, Artificial Sequence
  Description of Artificial Sequence: Synthetic oligonucleotide
  Antisense strand to SEQ ID NO: 2417118
cuccucaaggcucaauuuc

SEQ ID NO: 2417120 - RNA, 19 nt, Artificial Sequence
  Description of Artificial Sequence: Synthetic oligonucleotide
  Sense strand starting at position 2674 of SEQ ID NO: 1886554
gguccucuaccuggacaau

SEQ ID NO: 2417121 - RNA, 19 nt, Artificial Sequence
  Description of Artificial Sequence: Synthetic oligonucleotide
  Antisense strand to SEQ ID NO: 2417120
auuguccagguagaggacc

SEQ ID NO: 2417122 - RNA, 19 nt, Artificial Sequence
  Description of Artificial Sequence: Synthetic oligonucleotide
  Sense strand starting at position 2680 of SEQ ID NO: 1886554
cuaccuggacaauguuaua

SEQ ID NO: 2417123 - RNA, 19 nt, Artificial Sequence
  Description of Artificial Sequence: Synthetic oligonucleotide
  Antisense strand to SEQ ID NO: 2417122
uauaacauuguccagguag

SEQ ID NO: 2417124 - RNA, 19 nt, Artificial Sequence
  Description of Artificial Sequence: Synthetic oligonucleotide
  Sense strand starting at position 2699 of SEQ ID NO: 1886554
gcaguuagacacuaaggua

SEQ ID NO: 2417125 - RNA, 19 nt, Artificial Sequence
  Description of Artificial Sequence: Synthetic oligonucleotide
  Antisense strand to SEQ ID NO: 2417124
uaccuuagugucuaacugc

SEQ ID NO: 2417126 - RNA, 19 nt, Artificial Sequence
  Description of Artificial Sequence: Synthetic oligonucleotide
  Sense strand starting at position 2714 of SEQ ID NO: 1886554
gguaauugaagcuaucgau

SEQ ID NO: 2417127 - RNA, 19 nt, Artificial Sequence
  Description of Artificial Sequence: Synthetic oligonucleotide
  Antisense strand to SEQ ID NO: 2417126
aucgauagcuucaauuacc

SEQ ID NO: 2417128 - RNA, 19 nt, Artificial Sequence
  Description of Artificial Sequence: Synthetic oligonucleotide
  Sense strand starting at position 2720 of SEQ ID NO: 1886554
ugaagcuaucgauagcuaa

SEQ ID NO: 2417129 - RNA, 19 nt, Artificial Sequence
  Description of Artificial Sequence: Synthetic oligonucleotide
  Antisense strand to SEQ ID NO: 2417128
uuagcuaucgauagcuuca

SEQ ID NO: 2417130 - RNA, 19 nt, Artificial Sequence
  Description of Artificial Sequence: Synthetic oligonucleotide
  Sense strand starting at position 2724 of SEQ ID NO: 1886554
gcuaucgauagcuaaagca

SEQ ID NO: 2417131 - RNA, 19 nt, Artificial Sequence
  Description of Artificial Sequence: Synthetic oligonucleotide
  Antisense strand to SEQ ID NO: 2417130
ugcuuuagcuaucgauagc

SEQ ID NO: 2417132 - RNA, 19 nt, Artificial Sequence
  Description of Artificial Sequence: Synthetic oligonucleotide
  Sense strand starting at position 2748 of SEQ ID NO: 1886554
ggaaacauauaugaugagu

SEQ ID NO: 2417133 - RNA, 19 nt, Artificial Sequence
  Description of Artificial Sequence: Synthetic oligonucleotide
  Antisense strand to SEQ ID NO: 2417132
acucaucauauauguuucc

SEQ ID NO: 2417134 - RNA, 19 nt, Artificial Sequence
  Description of Artificial Sequence: Synthetic oligonucleotide
  Sense strand starting at position 3238 of SEQ ID NO: 1886554
aaggauaaggcauggucau

SEQ ID NO: 2417135 - RNA, 19 nt, Artificial Sequence
  Description of Artificial Sequence: Synthetic oligonucleotide
  Antisense strand to SEQ ID NO: 2417134
augaccaugccuuauccuu

SEQ ID NO: 2417136 - RNA, 19 nt, Artificial Sequence
  Description of Artificial Sequence: Synthetic oligonucleotide
  Sense strand starting at position 3254 of SEQ ID NO: 1886554
caucguccucaggagcaua

SEQ ID NO: 2417137 - RNA, 19 nt, Artificial Sequence
  Description of Artificial Sequence: Synthetic oligonucleotide
  Antisense strand to SEQ ID NO: 2417136
uaugcuccugaggacgaug

SEQ ID NO: 2417138 - RNA, 19 nt, Artificial Sequence
  Description of Artificial Sequence: Synthetic oligonucleotide
  Sense strand starting at position 3432 of SEQ ID NO: 1886554
gcaauuauuuaagaaggac

SEQ ID NO: 2417139 - RNA, 19 nt, Artificial Sequence
  Description of Artificial Sequence: Synthetic oligonucleotide
  Antisense strand to SEQ ID NO: 2417138
guccuucuuaaauaauugc

SEQ ID NO: 2417140 - RNA, 19 nt, Artificial Sequence
  Description of Artificial Sequence: Synthetic oligonucleotide
  Sense strand starting at position 3457 of SEQ ID NO: 1886554
caauguuagccuggagcuu

SEQ ID NO: 2417141 - RNA, 19 nt, Artificial Sequence
  Description of Artificial Sequence: Synthetic oligonucleotide
  Antisense strand to SEQ ID NO: 2417140
aagcuccaggcuaacauug

SEQ ID NO: 2417142 - RNA, 19 nt, Artificial Sequence
  Description of Artificial Sequence: Synthetic oligonucleotide
  Sense strand starting at position 3508 of SEQ ID NO: 1886554
aucaguagucacuaccuga

SEQ ID NO: 2417143 - RNA, 19 nt, Artificial Sequence
  Description of Artificial Sequence: Synthetic oligonucleotide
  Antisense strand to SEQ ID NO: 2417142
ucagguagugacuacugau

SEQ ID NO: 2417144 - RNA, 19 nt, Artificial Sequence
  Description of Artificial Sequence: Synthetic oligonucleotide
  Sense strand starting at position 3511 of SEQ ID NO: 1886554
aguagucacuaccugauga

SEQ ID NO: 2417145 - RNA, 19 nt, Artificial Sequence
  Description of Artificial Sequence: Synthetic oligonucleotide
  Antisense strand to SEQ ID NO: 2417144
ucaucagguagugacuacu

SEQ ID NO: 2417146 - RNA, 19 nt, Artificial Sequence
  Description of Artificial Sequence: Synthetic oligonucleotide
  Sense strand starting at position 3614 of SEQ ID NO: 1886554
cucuuuaucuguccaugca

SEQ ID NO: 2417147 - RNA, 19 nt, Artificial Sequence
  Description of Artificial Sequence: Synthetic oligonucleotide
  Antisense strand to SEQ ID NO: 2417146
ugcauggacagauaaagag

SEQ ID NO: 2417148 - RNA, 19 nt, Artificial Sequence
  Description of Artificial Sequence: Synthetic oligonucleotide
  Sense strand starting at position 3735 of SEQ ID NO: 1886554
cccugaugacucugccaau

SEQ ID NO: 2417149 - RNA, 19 nt, Artificial Sequence
  Description of Artificial Sequence: Synthetic oligonucleotide
  Antisense strand to SEQ ID NO: 2417148
auuggcagagucaucaggg

SEQ ID NO: 2417150 - RNA, 19 nt, Artificial Sequence
  Description of Artificial Sequence: Synthetic oligonucleotide
  Sense strand starting at position 3736 of SEQ ID NO: 1886554
ccugaugacucugccaaug

SEQ ID NO: 2417151 - RNA, 19 nt, Artificial Sequence
  Description of Artificial Sequence: Synthetic oligonucleotide
  Antisense strand to SEQ ID NO: 2417150
cauuggcagagucaucagg

SEQ ID NO: 2417152 - RNA, 19 nt, Artificial Sequence
  Description of Artificial Sequence: Synthetic oligonucleotide
  Sense strand starting at position 3746 of SEQ ID NO: 1886554
cugccaaugugcucuccaa

SEQ ID NO: 2417153 - RNA, 19 nt, Artificial Sequence
  Description of Artificial Sequence: Synthetic oligonucleotide
  Antisense strand to SEQ ID NO: 2417152
uuggagagcacauuggcag

SEQ ID NO: 2417154 - RNA, 19 nt, Artificial Sequence
  Description of Artificial Sequence: Synthetic oligonucleotide
  Sense strand starting at position 266 of SEQ ID NO: 1886555
uggagauaguucuggagaa

SEQ ID NO: 2417155 - RNA, 19 nt, Artificial Sequence
  Description of Artificial Sequence: Synthetic oligonucleotide
  Antisense strand to SEQ ID NO: 2417154
uucuccagaacuaucucca

SEQ ID NO: 2417156 - RNA, 19 nt, Artificial Sequence
  Description of Artificial Sequence: Synthetic oligonucleotide
  Sense strand starting at position 267 of SEQ ID NO: 1886555
ggagauaguucuggagaaa

SEQ ID NO: 2417157 - RNA, 19 nt, Artificial Sequence
  Description of Artificial Sequence: Synthetic oligonucleotide
  Antisense strand to SEQ ID NO: 2417156
uuucuccagaacuaucucc

SEQ ID NO: 2417158 - RNA, 19 nt, Artificial Sequence
  Description of Artificial Sequence: Synthetic oligonucleotide
  Sense strand starting at position 308 of SEQ ID NO: 1886555
ccuguagguacugaagagu

SEQ ID NO: 2417159 - RNA, 19 nt, Artificial Sequence
  Description of Artificial Sequence: Synthetic oligonucleotide
  Antisense strand to SEQ ID NO: 2417158
acucuucaguaccuacagg

SEQ ID NO: 2417160 - RNA, 19 nt, Artificial Sequence
  Description of Artificial Sequence: Synthetic oligonucleotide
  Sense strand starting at position 317 of SEQ ID NO: 1886555
acugaagaguuuccauguu

SEQ ID NO: 2417161 - RNA, 19 nt, Artificial Sequence
  Description of Artificial Sequence: Synthetic oligonucleotide
  Antisense strand to SEQ ID NO: 2417160
aacauggaaacucuucagu

SEQ ID NO: 2417162 - RNA, 19 nt, Artificial Sequence
  Description of Artificial Sequence: Synthetic oligonucleotide
  Sense strand starting at position 339 of SEQ ID NO: 1886555
uugcauaggacuugucaag

SEQ ID NO: 2417163 - RNA, 19 nt, Artificial Sequence
  Description of Artificial Sequence: Synthetic oligonucleotide
  Antisense strand to SEQ ID NO: 2417162
cuugacaaguccuaugcaa

SEQ ID NO: 2417164 - RNA, 19 nt, Artificial Sequence
  Description of Artificial Sequence: Synthetic oligonucleotide
  Sense strand starting at position 439 of SEQ ID NO: 1886555
uagugucucagugggacau

SEQ ID NO: 2417165 - RNA, 19 nt, Artificial Sequence
  Description of Artificial Sequence: Synthetic oligonucleotide
  Antisense strand to SEQ ID NO: 2417164
augucccacugagacacua

SEQ ID NO: 2417166 - RNA, 19 nt, Artificial Sequence
  Description of Artificial Sequence: Synthetic oligonucleotide
  Sense strand starting at position 440 of SEQ ID NO: 1886555
agugucucagugggacauu

SEQ ID NO: 2417167 - RNA, 19 nt, Artificial Sequence
  Description of Artificial Sequence: Synthetic oligonucleotide
  Antisense strand to SEQ ID NO: 2417166
aaugucccacugagacacu

SEQ ID NO: 2417168 - RNA, 19 nt, Artificial Sequence
  Description of Artificial Sequence: Synthetic oligonucleotide
  Sense strand starting at position 669 of SEQ ID NO: 1886555
agcucugguuucuccagaa

SEQ ID NO: 2417169 - RNA, 19 nt, Artificial Sequence
  Description of Artificial Sequence: Synthetic oligonucleotide
  Antisense strand to SEQ ID NO: 2417168
uucuggagaaaccagagcu

SEQ ID NO: 2417170 - RNA, 19 nt, Artificial Sequence
  Description of Artificial Sequence: Synthetic oligonucleotide
  Sense strand starting at position 673 of SEQ ID NO: 1886555
cugguuucuccagaacucu

SEQ ID NO: 2417171 - RNA, 19 nt, Artificial Sequence
  Description of Artificial Sequence: Synthetic oligonucleotide
  Antisense strand to SEQ ID NO: 2417170
agaguucuggagaaaccag

SEQ ID NO: 2417172 - RNA, 19 nt, Artificial Sequence
  Description of Artificial Sequence: Synthetic oligonucleotide
  Sense strand starting at position 947 of SEQ ID NO: 1886555
ccuuaccauggcgaugaau

SEQ ID NO: 2417173 - RNA, 19 nt, Artificial Sequence
  Description of Artificial Sequence: Synthetic oligonucleotide
  Antisense strand to SEQ ID NO: 2417172
auucaucgccaugguaagg

SEQ ID NO: 2417174 - RNA, 19 nt, Artificial Sequence
  Description of Artificial Sequence: Synthetic oligonucleotide
  Sense strand starting at position 949 of SEQ ID NO: 1886555
uuaccauggcgaugaaucu

SEQ ID NO: 2417175 - RNA, 19 nt, Artificial Sequence
  Description of Artificial Sequence: Synthetic oligonucleotide
  Antisense strand to SEQ ID NO: 2417174
agauucaucgccaugguaa

SEQ ID NO: 2417176 - RNA, 19 nt, Artificial Sequence
  Description of Artificial Sequence: Synthetic oligonucleotide
  Sense strand starting at position 1228 of SEQ ID NO: 1886555
ggagucgagcccugugaca

SEQ ID NO: 2417177 - RNA, 19 nt, Artificial Sequence
  Description of Artificial Sequence: Synthetic oligonucleotide
  Antisense strand to SEQ ID NO: 2417176
ugucacagggcucgacucc

SEQ ID NO: 2417178 - RNA, 19 nt, Artificial Sequence
  Description of Artificial Sequence: Synthetic oligonucleotide
  Sense strand starting at position 1253 of SEQ ID NO: 1886555
cgggcuaaccuauaugaac

SEQ ID NO: 2417179 - RNA, 19 nt, Artificial Sequence
  Description of Artificial Sequence: Synthetic oligonucleotide
  Antisense strand to SEQ ID NO: 2417178
guucauauagguuagcccg

SEQ ID NO: 2417180 - RNA, 19 nt, Artificial Sequence
  Description of Artificial Sequence: Synthetic oligonucleotide
  Sense strand starting at position 1293 of SEQ ID NO: 1886555
ggcucagaccuacagugaa

SEQ ID NO: 2417181 - RNA, 19 nt, Artificial Sequence
  Description of Artificial Sequence: Synthetic oligonucleotide
  Antisense strand to SEQ ID NO: 2417180
uucacuguaggucugagcc

SEQ ID NO: 2417182 - RNA, 19 nt, Artificial Sequence
  Description of Artificial Sequence: Synthetic oligonucleotide
  Sense strand starting at position 1322 of SEQ ID NO: 1886555
aacugcauuugaggaugau

SEQ ID NO: 2417183 - RNA, 19 nt, Artificial Sequence
  Description of Artificial Sequence: Synthetic oligonucleotide
  Antisense strand to SEQ ID NO: 2417182
aucauccucaaaugcaguu

SEQ ID NO: 2417184 - RNA, 19 nt, Artificial Sequence
  Description of Artificial Sequence: Synthetic oligonucleotide
  Sense strand starting at position 1353 of SEQ ID NO: 1886555
gugugauugucggcuccca

SEQ ID NO: 2417185 - RNA, 19 nt, Artificial Sequence
  Description of Artificial Sequence: Synthetic oligonucleotide
  Antisense strand to SEQ ID NO: 2417184
ugggagccgacaaucacac

SEQ ID NO: 2417186 - RNA, 19 nt, Artificial Sequence
  Description of Artificial Sequence: Synthetic oligonucleotide
  Sense strand starting at position 1407 of SEQ ID NO: 1886555
agagcuucuaaugguaaag

SEQ ID NO: 2417187 - RNA, 19 nt, Artificial Sequence
  Description of Artificial Sequence: Synthetic oligonucleotide
  Antisense strand to SEQ ID NO: 2417186
cuuuaccauuagaagcucu

SEQ ID NO: 2417188 - RNA, 19 nt, Artificial Sequence
  Description of Artificial Sequence: Synthetic oligonucleotide
  Sense strand starting at position 1482 of SEQ ID NO: 1886555
gggcacgaugcauguuuau

SEQ ID NO: 2417189 - RNA, 19 nt, Artificial Sequence
  Description of Artificial Sequence: Synthetic oligonucleotide
  Antisense strand to SEQ ID NO: 2417188
auaaacaugcaucgugccc

SEQ ID NO: 2417190 - RNA, 19 nt, Artificial Sequence
  Description of Artificial Sequence: Synthetic oligonucleotide
  Sense strand starting at position 1515 of SEQ ID NO: 1886555
ugcaaagguucuguuugaa

SEQ ID NO: 2417191 - RNA, 19 nt, Artificial Sequence
  Description of Artificial Sequence: Synthetic oligonucleotide
  Antisense strand to SEQ ID NO: 2417190
uucaaacagaaccuuugca

SEQ ID NO: 2417192 - RNA, 19 nt, Artificial Sequence
  Description of Artificial Sequence: Synthetic oligonucleotide
  Sense strand starting at position 1518 of SEQ ID NO: 1886555
aaagguucuguuugaauag

SEQ ID NO: 2417193 - RNA, 19 nt, Artificial Sequence
  Description of Artificial Sequence: Synthetic oligonucleotide
  Antisense strand to SEQ ID NO: 2417192
cuauucaaacagaaccuuu

SEQ ID NO: 2417194 - RNA, 19 nt, Artificial Sequence
  Description of Artificial Sequence: Synthetic oligonucleotide
  Sense strand starting at position 1771 of SEQ ID NO: 1886555
gcgagccucaggcaugaau

SEQ ID NO: 2417195 - RNA, 19 nt, Artificial Sequence
  Description of Artificial Sequence: Synthetic oligonucleotide
  Antisense strand to SEQ ID NO: 2417194
auucaugccugaggcucgc

SEQ ID NO: 2417196 - RNA, 19 nt, Artificial Sequence
  Description of Artificial Sequence: Synthetic oligonucleotide
  Sense strand starting at position 2331 of SEQ ID NO: 1886555
ggugacauaagccguuaca

SEQ ID NO: 2417197 - RNA, 19 nt, Artificial Sequence
  Description of Artificial Sequence: Synthetic oligonucleotide
  Antisense strand to SEQ ID NO: 2417196
uguaacggcuuaugucacc

SEQ ID NO: 2417198 - RNA, 19 nt, Artificial Sequence
  Description of Artificial Sequence: Synthetic oligonucleotide
  Sense strand starting at position 2334 of SEQ ID NO: 1886555
gacauaagccguuacaguu

SEQ ID NO: 2417199 - RNA, 19 nt, Artificial Sequence
  Description of Artificial Sequence: Synthetic oligonucleotide
  Antisense strand to SEQ ID NO: 2417198
aacuguaacggcuuauguc

SEQ ID NO: 2417200 - RNA, 19 nt, Artificial Sequence
  Description of Artificial Sequence: Synthetic oligonucleotide
  Sense strand starting at position 2364 of SEQ ID NO: 1886555
aggcaugugacaugcaguu

SEQ ID NO: 2417201 - RNA, 19 nt, Artificial Sequence
  Description of Artificial Sequence: Synthetic oligonucleotide
  Antisense strand to SEQ ID NO: 2417200
aacugcaugucacaugccu

SEQ ID NO: 2417202 - RNA, 19 nt, Artificial Sequence
  Description of Artificial Sequence: Synthetic oligonucleotide
  Sense strand starting at position 2366 of SEQ ID NO: 1886555
gcaugugacaugcaguuga

SEQ ID NO: 2417203 - RNA, 19 nt, Artificial Sequence
  Description of Artificial Sequence: Synthetic oligonucleotide
  Antisense strand to SEQ ID NO: 2417202
ucaacugcaugucacaugc

SEQ ID NO: 2417204 - RNA, 19 nt, Artificial Sequence
  Description of Artificial Sequence: Synthetic oligonucleotide
  Sense strand starting at position 2377 of SEQ ID NO: 1886555
gcaguugagcccugcucaa

SEQ ID NO: 2417205 - RNA, 19 nt, Artificial Sequence
  Description of Artificial Sequence: Synthetic oligonucleotide
  Antisense strand to SEQ ID NO: 2417204
uugagcagggcucaacugc

SEQ ID NO: 2417206 - RNA, 19 nt, Artificial Sequence
  Description of Artificial Sequence: Synthetic oligonucleotide
  Sense strand starting at position 2481 of SEQ ID NO: 1886555
ggucaacucuaauggauga

SEQ ID NO: 2417207 - RNA, 19 nt, Artificial Sequence
  Description of Artificial Sequence: Synthetic oligonucleotide
  Antisense strand to SEQ ID NO: 2417206
ucauccauuagaguugacc

SEQ ID NO: 2417208 - RNA, 19 nt, Artificial Sequence
  Description of Artificial Sequence: Synthetic oligonucleotide
  Sense strand starting at position 2561 of SEQ ID NO: 1886555
caugacacauugguagaua

SEQ ID NO: 2417209 - RNA, 19 nt, Artificial Sequence
  Description of Artificial Sequence: Synthetic oligonucleotide
  Antisense strand to SEQ ID NO: 2417208
uaucuaccaaugugucaug

SEQ ID NO: 2417210 - RNA, 19 nt, Artificial Sequence
  Description of Artificial Sequence: Synthetic oligonucleotide
  Sense strand starting at position 2562 of SEQ ID NO: 1886555
augacacauugguagauaa

SEQ ID NO: 2417211 - RNA, 19 nt, Artificial Sequence
  Description of Artificial Sequence: Synthetic oligonucleotide
  Antisense strand to SEQ ID NO: 2417210
uuaucuaccaaugugucau

SEQ ID NO: 2417212 - RNA, 19 nt, Artificial Sequence
  Description of Artificial Sequence: Synthetic oligonucleotide
  Sense strand starting at position 3061 of SEQ ID NO: 1886555
gugcccauuccugaagaug

SEQ ID NO: 2417213 - RNA, 19 nt, Artificial Sequence
  Description of Artificial Sequence: Synthetic oligonucleotide
  Antisense strand to SEQ ID NO: 2417212
caucuucaggaaugggcac

SEQ ID NO: 2417214 - RNA, 19 nt, Artificial Sequence
  Description of Artificial Sequence: Synthetic oligonucleotide
  Sense strand starting at position 3073 of SEQ ID NO: 1886555
gaagaugcaugagagcuuu

SEQ ID NO: 2417215 - RNA, 19 nt, Artificial Sequence
  Description of Artificial Sequence: Synthetic oligonucleotide
  Antisense strand to SEQ ID NO: 2417214
aaagcucucaugcaucuuc

SEQ ID NO: 2417216 - RNA, 19 nt, Artificial Sequence
  Description of Artificial Sequence: Synthetic oligonucleotide
  Sense strand starting at position 3117 of SEQ ID NO: 1886555
gcagcuuucuggccauuga

SEQ ID NO: 2417217 - RNA, 19 nt, Artificial Sequence
  Description of Artificial Sequence: Synthetic oligonucleotide
  Antisense strand to SEQ ID NO: 2417216
ucaauggccagaaagcugc

SEQ ID NO: 2417218 - RNA, 19 nt, Artificial Sequence
  Description of Artificial Sequence: Synthetic oligonucleotide
  Sense strand starting at position 3118 of SEQ ID NO: 1886555
cagcuuucuggccauugau

SEQ ID NO: 2417219 - RNA, 19 nt, Artificial Sequence
  Description of Artificial Sequence: Synthetic oligonucleotide
  Antisense strand to SEQ ID NO: 2417218
aucaauggccagaaagcug

SEQ ID NO: 2417220 - RNA, 19 nt, Artificial Sequence
  Description of Artificial Sequence: Synthetic oligonucleotide
  Sense strand starting at position 3271 of SEQ ID NO: 1886555
uguucaugaucugggaaga

SEQ ID NO: 2417221 - RNA, 19 nt, Artificial Sequence
  Description of Artificial Sequence: Synthetic oligonucleotide
  Antisense strand to SEQ ID NO: 2417220
ucuucccagaucaugaaca

SEQ ID NO: 2417222 - RNA, 19 nt, Artificial Sequence
  Description of Artificial Sequence: Synthetic oligonucleotide
  Sense strand starting at position 3272 of SEQ ID NO: 1886555
guucaugaucugggaagac

SEQ ID NO: 2417223 - RNA, 19 nt, Artificial Sequence
  Description of Artificial Sequence: Synthetic oligonucleotide
  Antisense strand to SEQ ID NO: 2417222
gucuucccagaucaugaac

SEQ ID NO: 2417224 - RNA, 19 nt, Artificial Sequence
  Description of Artificial Sequence: Synthetic oligonucleotide
  Sense strand starting at position 3624 of SEQ ID NO: 1886555
uguucuccugucuguauga

SEQ ID NO: 2417225 - RNA, 19 nt, Artificial Sequence
  Description of Artificial Sequence: Synthetic oligonucleotide
  Antisense strand to SEQ ID NO: 2417224
ucauacagacaggagaaca

SEQ ID NO: 2417226 - RNA, 19 nt, Artificial Sequence
  Description of Artificial Sequence: Synthetic oligonucleotide
  Sense strand starting at position 3625 of SEQ ID NO: 1886555
guucuccugucuguaugaa

SEQ ID NO: 2417227 - RNA, 19 nt, Artificial Sequence
  Description of Artificial Sequence: Synthetic oligonucleotide
  Antisense strand to SEQ ID NO: 2417226
uucauacagacaggagaac

SEQ ID NO: 2417228 - RNA, 19 nt, Artificial Sequence
  Description of Artificial Sequence: Synthetic oligonucleotide
  Sense strand starting at position 3678 of SEQ ID NO: 1886555
uagcaugugcccuaggaau

SEQ ID NO: 2417229 - RNA, 19 nt, Artificial Sequence
  Description of Artificial Sequence: Synthetic oligonucleotide
  Antisense strand to SEQ ID NO: 2417228
auuccuagggcacaugcua

SEQ ID NO: 2417230 - RNA, 19 nt, Artificial Sequence
  Description of Artificial Sequence: Synthetic oligonucleotide
  Sense strand starting at position 3680 of SEQ ID NO: 1886555
gcaugugcccuaggaauga

SEQ ID NO: 2417231 - RNA, 19 nt, Artificial Sequence
  Description of Artificial Sequence: Synthetic oligonucleotide
  Antisense strand to SEQ ID NO: 2417230
ucauuccuagggcacaugc

SEQ ID NO: 2417232 - RNA, 19 nt, Artificial Sequence
  Description of Artificial Sequence: Synthetic oligonucleotide
  Sense strand starting at position 3728 of SEQ ID NO: 1886555
ggguuagacaagugucuug

SEQ ID NO: 2417233 - RNA, 19 nt, Artificial Sequence
  Description of Artificial Sequence: Synthetic oligonucleotide
  Antisense strand to SEQ ID NO: 2417232
caagacacuugucuaaccc

SEQ ID NO: 2417234 - RNA, 19 nt, Artificial Sequence
  Description of Artificial Sequence: Synthetic oligonucleotide
  Sense strand starting at position 212 of SEQ ID NO: 1886556
uugccaguucuugacuagu

SEQ ID NO: 2417235 - RNA, 19 nt, Artificial Sequence
  Description of Artificial Sequence: Synthetic oligonucleotide
  Antisense strand to SEQ ID NO: 2417234
acuagucaagaacuggcaa

SEQ ID NO: 2417236 - RNA, 19 nt, Artificial Sequence
  Description of Artificial Sequence: Synthetic oligonucleotide
  Sense strand starting at position 215 of SEQ ID NO: 1886556
ccaguucuugacuaguuaa

SEQ ID NO: 2417237 - RNA, 19 nt, Artificial Sequence
  Description of Artificial Sequence: Synthetic oligonucleotide
  Antisense strand to SEQ ID NO: 2417236
uuaacuagucaagaacugg

SEQ ID NO: 2417238 - RNA, 19 nt, Artificial Sequence
  Description of Artificial Sequence: Synthetic oligonucleotide
  Sense strand starting at position 218 of SEQ ID NO: 1886556
guucuugacuaguuaauua

SEQ ID NO: 2417239 - RNA, 19 nt, Artificial Sequence
  Description of Artificial Sequence: Synthetic oligonucleotide
  Antisense strand to SEQ ID NO: 2417238
uaauuaacuagucaagaac

SEQ ID NO: 2417240 - RNA, 19 nt, Artificial Sequence
  Description of Artificial Sequence: Synthetic oligonucleotide
  Sense strand starting at position 325 of SEQ ID NO: 1886556
ucagucaacuuucuuagua

SEQ ID NO: 2417241 - RNA, 19 nt, Artificial Sequence
  Description of Artificial Sequence: Synthetic oligonucleotide
  Antisense strand to SEQ ID NO: 2417240
uacuaagaaaguugacuga

SEQ ID NO: 2417242 - RNA, 19 nt, Artificial Sequence
  Description of Artificial Sequence: Synthetic oligonucleotide
  Sense strand starting at position 513 of SEQ ID NO: 1886556
gggcucuuaucaguuauga

SEQ ID NO: 2417243 - RNA, 19 nt, Artificial Sequence
  Description of Artificial Sequence: Synthetic oligonucleotide
  Antisense strand to SEQ ID NO: 2417242
ucauaacugauaagagccc

SEQ ID NO: 2417244 - RNA, 19 nt, Artificial Sequence
  Description of Artificial Sequence: Synthetic oligonucleotide
  Sense strand starting at position 521 of SEQ ID NO: 1886556
aucaguuaugaagggacuu

SEQ ID NO: 2417245 - RNA, 19 nt, Artificial Sequence
  Description of Artificial Sequence: Synthetic oligonucleotide
  Antisense strand to SEQ ID NO: 2417244
aagucccuucauaacugau

SEQ ID NO: 2417246 - RNA, 19 nt, Artificial Sequence
  Description of Artificial Sequence: Synthetic oligonucleotide
  Sense strand starting at position 545 of SEQ ID NO: 1886556
gggacuugucacgacacca

SEQ ID NO: 2417247 - RNA, 19 nt, Artificial Sequence
  Description of Artificial Sequence: Synthetic oligonucleotide
  Antisense strand to SEQ ID NO: 2417246
uggugucgugacaaguccc

SEQ ID NO: 2417248 - RNA, 19 nt, Artificial Sequence
  Description of Artificial Sequence: Synthetic oligonucleotide
  Sense strand starting at position 735 of SEQ ID NO: 1886556
auaggugagcucugaugac

SEQ ID NO: 2417249 - RNA, 19 nt, Artificial Sequence
  Description of Artificial Sequence: Synthetic oligonucleotide
  Antisense strand to SEQ ID NO: 2417248
gucaucagagcucaccuau

SEQ ID NO: 2417250 - RNA, 19 nt, Artificial Sequence
  Description of Artificial Sequence: Synthetic oligonucleotide
  Sense strand starting at position 758 of SEQ ID NO: 1886556
guuuaaauucuaggucuac

SEQ ID NO: 2417251 - RNA, 19 nt, Artificial Sequence
  Description of Artificial Sequence: Synthetic oligonucleotide
  Antisense strand to SEQ ID NO: 2417250
guagaccuagaauuuaaac

SEQ ID NO: 2417252 - RNA, 19 nt, Artificial Sequence
  Description of Artificial Sequence: Synthetic oligonucleotide
  Sense strand starting at position 764 of SEQ ID NO: 1886556
auucuaggucuacagguaa

SEQ ID NO: 2417253 - RNA, 19 nt, Artificial Sequence
  Description of Artificial Sequence: Synthetic oligonucleotide
  Antisense strand to SEQ ID NO: 2417252
uuaccuguagaccuagaau

SEQ ID NO: 2417254 - RNA, 19 nt, Artificial Sequence
  Description of Artificial Sequence: Synthetic oligonucleotide
  Sense strand starting at position 861 of SEQ ID NO: 1886556
acuccaagucccgagaacu

SEQ ID NO: 2417255 - RNA, 19 nt, Artificial Sequence
  Description of Artificial Sequence: Synthetic oligonucleotide
  Antisense strand to SEQ ID NO: 2417254
aguucucgggacuuggagu

SEQ ID NO: 2417256 - RNA, 19 nt, Artificial Sequence
  Description of Artificial Sequence: Synthetic oligonucleotide
  Sense strand starting at position 1007 of SEQ ID NO: 1886556
uuguaacuauccuuguaga

SEQ ID NO: 2417257 - RNA, 19 nt, Artificial Sequence
  Description of Artificial Sequence: Synthetic oligonucleotide
  Antisense strand to SEQ ID NO: 2417256
ucuacaaggauaguuacaa

SEQ ID NO: 2417258 - RNA, 19 nt, Artificial Sequence
  Description of Artificial Sequence: Synthetic oligonucleotide
  Sense strand starting at position 1008 of SEQ ID NO: 1886556
uguaacuauccuuguagau

SEQ ID NO: 2417259 - RNA, 19 nt, Artificial Sequence
  Description of Artificial Sequence: Synthetic oligonucleotide
  Antisense strand to SEQ ID NO: 2417258
aucuacaaggauaguuaca

SEQ ID NO: 2417260 - RNA, 19 nt, Artificial Sequence
  Description of Artificial Sequence: Synthetic oligonucleotide
  Sense strand starting at position 1070 of SEQ ID NO: 1886556
ggcuacuggcaucaauauu

SEQ ID NO: 2417261 - RNA, 19 nt, Artificial Sequence
  Description of Artificial Sequence: Synthetic oligonucleotide
  Antisense strand to SEQ ID NO: 2417260
aauauugaugccaguagcc

SEQ ID NO: 2417262 - RNA, 19 nt, Artificial Sequence
  Description of Artificial Sequence: Synthetic oligonucleotide
  Sense strand starting at position 1124 of SEQ ID NO: 1886556
cccugcacuccagguaaua

SEQ ID NO: 2417263 - RNA, 19 nt, Artificial Sequence
  Description of Artificial Sequence: Synthetic oligonucleotide
  Antisense strand to SEQ ID NO: 2417262
uauuaccuggagugcaggg

SEQ ID NO: 2417264 - RNA, 19 nt, Artificial Sequence
  Description of Artificial Sequence: Synthetic oligonucleotide
  Sense strand starting at position 1354 of SEQ ID NO: 1886556
aagaguagcguugagguuu

SEQ ID NO: 2417265 - RNA, 19 nt, Artificial Sequence
  Description of Artificial Sequence: Synthetic oligonucleotide
  Antisense strand to SEQ ID NO: 2417264
aaaccucaacgcuacucuu

SEQ ID NO: 2417266 - RNA, 19 nt, Artificial Sequence
  Description of Artificial Sequence: Synthetic oligonucleotide
  Sense strand starting at position 1583 of SEQ ID NO: 1886556
gggauacgguuugccauuu

SEQ ID NO: 2417267 - RNA, 19 nt, Artificial Sequence
  Description of Artificial Sequence: Synthetic oligonucleotide
  Antisense strand to SEQ ID NO: 2417266
aaauggcaaaccguauccc

SEQ ID NO: 2417268 - RNA, 19 nt, Artificial Sequence
  Description of Artificial Sequence: Synthetic oligonucleotide
  Sense strand starting at position 1609 of SEQ ID NO: 1886556
aagaaauggguuugacagu

SEQ ID NO: 2417269 - RNA, 19 nt, Artificial Sequence
  Description of Artificial Sequence: Synthetic oligonucleotide
  Antisense strand to SEQ ID NO: 2417268
acugucaaacccauuucuu

SEQ ID NO: 2417270 - RNA, 19 nt, Artificial Sequence
  Description of Artificial Sequence: Synthetic oligonucleotide
  Sense strand starting at position 3105 of SEQ ID NO: 1886556
gucaucuucuugcuggaaa

SEQ ID NO: 2417271 - RNA, 19 nt, Artificial Sequence
  Description of Artificial Sequence: Synthetic oligonucleotide
  Antisense strand to SEQ ID NO: 2417270
uuuccagcaagaagaugac

SEQ ID NO: 2417272 - RNA, 19 nt, Artificial Sequence
  Description of Artificial Sequence: Synthetic oligonucleotide
  Sense strand starting at position 3180 of SEQ ID NO: 1886556
guggcauucuaauuacuuc

SEQ ID NO: 2417273 - RNA, 19 nt, Artificial Sequence
  Description of Artificial Sequence: Synthetic oligonucleotide
  Antisense strand to SEQ ID NO: 2417272
gaaguaauuagaaugccac

SEQ ID NO: 2417274 - RNA, 19 nt, Artificial Sequence
  Description of Artificial Sequence: Synthetic oligonucleotide
  Sense strand starting at position 3440 of SEQ ID NO: 1886556
aggugaaauuccuuuacug

SEQ ID NO: 2417275 - RNA, 19 nt, Artificial Sequence
  Description of Artificial Sequence: Synthetic oligonucleotide
  Antisense strand to SEQ ID NO: 2417274
caguaaaggaauuucaccu

SEQ ID NO: 2417276 - RNA, 19 nt, Artificial Sequence
  Description of Artificial Sequence: Synthetic oligonucleotide
  Sense strand starting at position 3463 of SEQ ID NO: 1886556
ccacaagaaugugucagaa

SEQ ID NO: 2417277 - RNA, 19 nt, Artificial Sequence
  Description of Artificial Sequence: Synthetic oligonucleotide
  Antisense strand to SEQ ID NO: 2417276
uucugacacauucuugugg

SEQ ID NO: 2417278 - RNA, 19 nt, Artificial Sequence
  Description of Artificial Sequence: Synthetic oligonucleotide
  Sense strand starting at position 3564 of SEQ ID NO: 1886556
aagacauaacuggguuguu

SEQ ID NO: 2417279 - RNA, 19 nt, Artificial Sequence
  Description of Artificial Sequence: Synthetic oligonucleotide
  Antisense strand to SEQ ID NO: 2417278
aacaacccaguuaugucuu

SEQ ID NO: 2417280 - RNA, 19 nt, Artificial Sequence
  Description of Artificial Sequence: Synthetic oligonucleotide
  Sense strand starting at position 3565 of SEQ ID NO: 1886556
agacauaacuggguuguua

SEQ ID NO: 2417281 - RNA, 19 nt, Artificial Sequence
  Description of Artificial Sequence: Synthetic oligonucleotide
  Antisense strand to SEQ ID NO: 2417280
uaacaacccaguuaugucu

SEQ ID NO: 2417282 - RNA, 19 nt, Artificial Sequence
  Description of Artificial Sequence: Synthetic oligonucleotide
  Sense strand starting at position 3569 of SEQ ID NO: 1886556
auaacuggguuguuaacua

SEQ ID NO: 2417283 - RNA, 19 nt, Artificial Sequence
  Description of Artificial Sequence: Synthetic oligonucleotide
  Antisense strand to SEQ ID NO: 2417282
uaguuaacaacccaguuau

SEQ ID NO: 2417284 - RNA, 19 nt, Artificial Sequence
  Description of Artificial Sequence: Synthetic oligonucleotide
  Sense strand starting at position 3691 of SEQ ID NO: 1886556
uuccuacuaguguaucuaa

SEQ ID NO: 2417285 - RNA, 19 nt, Artificial Sequence
  Description of Artificial Sequence: Synthetic oligonucleotide
  Antisense strand to SEQ ID NO: 2417284
uuagauacacuaguaggaa

SEQ ID NO: 2417286 - RNA, 19 nt, Artificial Sequence
  Description of Artificial Sequence: Synthetic oligonucleotide
  Sense strand starting at position 3694 of SEQ ID NO: 1886556
cuacuaguguaucuaaauu

SEQ ID NO: 2417287 - RNA, 19 nt, Artificial Sequence
  Description of Artificial Sequence: Synthetic oligonucleotide
  Antisense strand to SEQ ID NO: 2417286
aauuuagauacacuaguag

SEQ ID NO: 2417288 - RNA, 19 nt, Artificial Sequence
  Description of Artificial Sequence: Synthetic oligonucleotide
  Sense strand starting at position 3713 of SEQ ID NO: 1886556
guuuaagugaaucagagug

SEQ ID NO: 2417289 - RNA, 19 nt, Artificial Sequence
  Description of Artificial Sequence: Synthetic oligonucleotide
  Antisense strand to SEQ ID NO: 2417288
cacucugauucacuuaaac

SEQ ID NO: 2417290 - RNA, 19 nt, Artificial Sequence
  Description of Artificial Sequence: Synthetic oligonucleotide
  Sense strand starting at position 3718 of SEQ ID NO: 1886556
agugaaucagagugagaug

SEQ ID NO: 2417291 - RNA, 19 nt, Artificial Sequence
  Description of Artificial Sequence: Synthetic oligonucleotide
  Antisense strand to SEQ ID NO: 2417290
caucucacucugauucacu

SEQ ID NO: 2417292 - RNA, 19 nt, Artificial Sequence
  Description of Artificial Sequence: Synthetic oligonucleotide
  Sense strand starting at position 3723 of SEQ ID NO: 1886556
aucagagugagaugguuua

SEQ ID NO: 2417293 - RNA, 19 nt, Artificial Sequence
  Description of Artificial Sequence: Synthetic oligonucleotide
  Antisense strand to SEQ ID NO: 2417292
uaaaccaucucacucugau

SEQ ID NO: 2417294 - RNA, 19 nt, Artificial Sequence
  Description of Artificial Sequence: Synthetic oligonucleotide
  Sense strand starting at position 3730 of SEQ ID NO: 1886556
ugagaugguuuacucugaa

SEQ ID NO: 2417295 - RNA, 19 nt, Artificial Sequence
  Description of Artificial Sequence: Synthetic oligonucleotide
  Antisense strand to SEQ ID NO: 2417294
uucagaguaaaccaucuca

SEQ ID NO: 2417296 - RNA, 19 nt, Artificial Sequence
  Description of Artificial Sequence: Synthetic oligonucleotide
  Sense strand starting at position 3733 of SEQ ID NO: 1886556
gaugguuuacucugaaagg

SEQ ID NO: 2417297 - RNA, 19 nt, Artificial Sequence
  Description of Artificial Sequence: Synthetic oligonucleotide
  Antisense strand to SEQ ID NO: 2417296
ccuuucagaguaaaccauc

SEQ ID NO: 2417298 - RNA, 19 nt, Artificial Sequence
  Description of Artificial Sequence: Synthetic oligonucleotide
  Sense strand starting at position 3744 of SEQ ID NO: 1886556
cugaaaggugcuggacuuu

SEQ ID NO: 2417299 - RNA, 19 nt, Artificial Sequence
  Description of Artificial Sequence: Synthetic oligonucleotide
  Antisense strand to SEQ ID NO: 2417298
aaaguccagcaccuuucag

SEQ ID NO: 2417300 - RNA, 19 nt, Artificial Sequence
  Description of Artificial Sequence: Synthetic oligonucleotide
  Sense strand starting at position 3790 of SEQ ID NO: 1886556
gaguccuacuuaguaauug

SEQ ID NO: 2417301 - RNA, 19 nt, Artificial Sequence
  Description of Artificial Sequence: Synthetic oligonucleotide
  Antisense strand to SEQ ID NO: 2417300
caauuacuaaguaggacuc

SEQ ID NO: 2417302 - RNA, 19 nt, Artificial Sequence
  Description of Artificial Sequence: Synthetic oligonucleotide
  Sense strand starting at position 3872 of SEQ ID NO: 1886556
ggcaacauuaccugaggua

SEQ ID NO: 2417303 - RNA, 19 nt, Artificial Sequence
  Description of Artificial Sequence: Synthetic oligonucleotide
  Antisense strand to SEQ ID NO: 2417302
uaccucagguaauguugcc

SEQ ID NO: 2417304 - RNA, 19 nt, Artificial Sequence
  Description of Artificial Sequence: Synthetic oligonucleotide
  Sense strand starting at position 3873 of SEQ ID NO: 1886556
gcaacauuaccugagguac

SEQ ID NO: 2417305 - RNA, 19 nt, Artificial Sequence
  Description of Artificial Sequence: Synthetic oligonucleotide
  Antisense strand to SEQ ID NO: 2417304
guaccucagguaauguugc

SEQ ID NO: 2417306 - RNA, 19 nt, Artificial Sequence
  Description of Artificial Sequence: Synthetic oligonucleotide
  Sense strand starting at position 3947 of SEQ ID NO: 1886556
auucuuagagcagggcuaa

SEQ ID NO: 2417307 - RNA, 19 nt, Artificial Sequence
  Description of Artificial Sequence: Synthetic oligonucleotide
  Antisense strand to SEQ ID NO: 2417306
uuagcccugcucuaagaau

SEQ ID NO: 2417308 - RNA, 19 nt, Artificial Sequence
  Description of Artificial Sequence: Synthetic oligonucleotide
  Sense strand starting at position 3948 of SEQ ID NO: 1886556
uucuuagagcagggcuaau

SEQ ID NO: 2417309 - RNA, 19 nt, Artificial Sequence
  Description of Artificial Sequence: Synthetic oligonucleotide
  Antisense strand to SEQ ID NO: 2417308
auuagcccugcucuaagaa

SEQ ID NO: 2417310 - RNA, 19 nt, Artificial Sequence
  Description of Artificial Sequence: Synthetic oligonucleotide
  Sense strand starting at position 3957 of SEQ ID NO: 1886556
cagggcuaauguguuagaa

SEQ ID NO: 2417311 - RNA, 19 nt, Artificial Sequence
  Description of Artificial Sequence: Synthetic oligonucleotide
  Antisense strand to SEQ ID NO: 2417310
uucuaacacauuagcccug

SEQ ID NO: 2417312 - RNA, 19 nt, Artificial Sequence
  Description of Artificial Sequence: Synthetic oligonucleotide
  Sense strand starting at position 3969 of SEQ ID NO: 1886556
guuagaauugagugcuaaa

SEQ ID NO: 2417313 - RNA, 19 nt, Artificial Sequence
  Description of Artificial Sequence: Synthetic oligonucleotide
  Antisense strand to SEQ ID NO: 2417312
uuuagcacucaauucuaac

SEQ ID NO: 2417314 - RNA, 19 nt, Artificial Sequence
  Description of Artificial Sequence: Synthetic oligonucleotide
  Sense strand starting at position 179 of SEQ ID NO: 1886557
uucugauucugauuauugu

SEQ ID NO: 2417315 - RNA, 19 nt, Artificial Sequence
  Description of Artificial Sequence: Synthetic oligonucleotide
  Antisense strand to SEQ ID NO: 2417314
acaauaaucagaaucagaa

SEQ ID NO: 2417316 - RNA, 19 nt, Artificial Sequence
  Description of Artificial Sequence: Synthetic oligonucleotide
  Sense strand starting at position 180 of SEQ ID NO: 1886557
ucugauucugauuauugua

SEQ ID NO: 2417317 - RNA, 19 nt, Artificial Sequence
  Description of Artificial Sequence: Synthetic oligonucleotide
  Antisense strand to SEQ ID NO: 2417316
uacaauaaucagaaucaga

SEQ ID NO: 2417318 - RNA, 19 nt, Artificial Sequence
  Description of Artificial Sequence: Synthetic oligonucleotide
  Sense strand starting at position 197 of SEQ ID NO: 1886557
uacuguguucuguaagaaa

SEQ ID NO: 2417319 - RNA, 19 nt, Artificial Sequence
  Description of Artificial Sequence: Synthetic oligonucleotide
  Antisense strand to SEQ ID NO: 2417318
uuucuuacagaacacagua

SEQ ID NO: 2417320 - RNA, 19 nt, Artificial Sequence
  Description of Artificial Sequence: Synthetic oligonucleotide
  Sense strand starting at position 535 of SEQ ID NO: 1886557
aagaaaugguccuugcucu

SEQ ID NO: 2417321 - RNA, 19 nt, Artificial Sequence
  Description of Artificial Sequence: Synthetic oligonucleotide
  Antisense strand to SEQ ID NO: 2417320
agagcaaggaccauuucuu

SEQ ID NO: 2417322 - RNA, 19 nt, Artificial Sequence
  Description of Artificial Sequence: Synthetic oligonucleotide
  Sense strand starting at position 536 of SEQ ID NO: 1886557
agaaaugguccuugcucuu

SEQ ID NO: 2417323 - RNA, 19 nt, Artificial Sequence
  Description of Artificial Sequence: Synthetic oligonucleotide
  Antisense strand to SEQ ID NO: 2417322
aagagcaaggaccauuucu

SEQ ID NO: 2417324 - RNA, 19 nt, Artificial Sequence
  Description of Artificial Sequence: Synthetic oligonucleotide
  Sense strand starting at position 539 of SEQ ID NO: 1886557
aaugguccuugcucuuaga

SEQ ID NO: 2417325 - RNA, 19 nt, Artificial Sequence
  Description of Artificial Sequence: Synthetic oligonucleotide
  Antisense strand to SEQ ID NO: 2417324
ucuaagagcaaggaccauu

SEQ ID NO: 2417326 - RNA, 19 nt, Artificial Sequence
  Description of Artificial Sequence: Synthetic oligonucleotide
  Sense strand starting at position 1166 of SEQ ID NO: 1886557
cgugucugggcucaagagu

SEQ ID NO: 2417327 - RNA, 19 nt, Artificial Sequence
  Description of Artificial Sequence: Synthetic oligonucleotide
  Antisense strand to SEQ ID NO: 2417326
acucuugagcccagacacg

SEQ ID NO: 2417328 - RNA, 19 nt, Artificial Sequence
  Description of Artificial Sequence: Synthetic oligonucleotide
  Sense strand starting at position 1173 of SEQ ID NO: 1886557
gggcucaagagucaucauu

SEQ ID NO: 2417329 - RNA, 19 nt, Artificial Sequence
  Description of Artificial Sequence: Synthetic oligonucleotide
  Antisense strand to SEQ ID NO: 2417328
aaugaugacucuugagccc

SEQ ID NO: 2417330 - RNA, 19 nt, Artificial Sequence
  Description of Artificial Sequence: Synthetic oligonucleotide
  Sense strand starting at position 1181 of SEQ ID NO: 1886557
gagucaucauuuccguaac

SEQ ID NO: 2417331 - RNA, 19 nt, Artificial Sequence
  Description of Artificial Sequence: Synthetic oligonucleotide
  Antisense strand to SEQ ID NO: 2417330
guuacggaaaugaugacuc

SEQ ID NO: 2417332 - RNA, 19 nt, Artificial Sequence
  Description of Artificial Sequence: Synthetic oligonucleotide
  Sense strand starting at position 1183 of SEQ ID NO: 1886557
gucaucauuuccguaacuu

SEQ ID NO: 2417333 - RNA, 19 nt, Artificial Sequence
  Description of Artificial Sequence: Synthetic oligonucleotide
  Antisense strand to SEQ ID NO: 2417332
aaguuacggaaaugaugac

SEQ ID NO: 2417334 - RNA, 19 nt, Artificial Sequence
  Description of Artificial Sequence: Synthetic oligonucleotide
  Sense strand starting at position 1228 of SEQ ID NO: 1886557
uagugauacgcaugaauac

SEQ ID NO: 2417335 - RNA, 19 nt, Artificial Sequence
  Description of Artificial Sequence: Synthetic oligonucleotide
  Antisense strand to SEQ ID NO: 2417334
guauucaugcguaucacua

SEQ ID NO: 2417336 - RNA, 19 nt, Artificial Sequence
  Description of Artificial Sequence: Synthetic oligonucleotide
  Sense strand starting at position 1267 of SEQ ID NO: 1886557
acgcguguagguaaauguu

SEQ ID NO: 2417337 - RNA, 19 nt, Artificial Sequence
  Description of Artificial Sequence: Synthetic oligonucleotide
  Antisense strand to SEQ ID NO: 2417336
aacauuuaccuacacgcgu

SEQ ID NO: 2417338 - RNA, 19 nt, Artificial Sequence
  Description of Artificial Sequence: Synthetic oligonucleotide
  Sense strand starting at position 1475 of SEQ ID NO: 1886557
gcagcaugugcgucagauc

SEQ ID NO: 2417339 - RNA, 19 nt, Artificial Sequence
  Description of Artificial Sequence: Synthetic oligonucleotide
  Antisense strand to SEQ ID NO: 2417338
gaucugacgcacaugcugc

SEQ ID NO: 2417340 - RNA, 19 nt, Artificial Sequence
  Description of Artificial Sequence: Synthetic oligonucleotide
  Sense strand starting at position 1559 of SEQ ID NO: 1886557
agcaaaggaucuguauuau

SEQ ID NO: 2417341 - RNA, 19 nt, Artificial Sequence
  Description of Artificial Sequence: Synthetic oligonucleotide
  Antisense strand to SEQ ID NO: 2417340
auaauacagauccuuugcu

SEQ ID NO: 2417342 - RNA, 19 nt, Artificial Sequence
  Description of Artificial Sequence: Synthetic oligonucleotide
  Sense strand starting at position 1603 of SEQ ID NO: 1886557
ugaagaggugucuggaacu

SEQ ID NO: 2417343 - RNA, 19 nt, Artificial Sequence
  Description of Artificial Sequence: Synthetic oligonucleotide
  Antisense strand to SEQ ID NO: 2417342
aguuccagacaccucuuca

SEQ ID NO: 2417344 - RNA, 19 nt, Artificial Sequence
  Description of Artificial Sequence: Synthetic oligonucleotide
  Sense strand starting at position 1817 of SEQ ID NO: 1886557
gguggucacguccacauau

SEQ ID NO: 2417345 - RNA, 19 nt, Artificial Sequence
  Description of Artificial Sequence: Synthetic oligonucleotide
  Antisense strand to SEQ ID NO: 2417344
auauguggacgugaccacc

SEQ ID NO: 2417346 - RNA, 19 nt, Artificial Sequence
  Description of Artificial Sequence: Synthetic oligonucleotide
  Sense strand starting at position 2143 of SEQ ID NO: 1886557
gggacagaguugucaccau

SEQ ID NO: 2417347 - RNA, 19 nt, Artificial Sequence
  Description of Artificial Sequence: Synthetic oligonucleotide
  Antisense strand to SEQ ID NO: 2417346
auggugacaacucuguccc

SEQ ID NO: 2417348 - RNA, 19 nt, Artificial Sequence
  Description of Artificial Sequence: Synthetic oligonucleotide
  Sense strand starting at position 2188 of SEQ ID NO: 1886557
ucauucuuauugcuauagu

SEQ ID NO: 2417349 - RNA, 19 nt, Artificial Sequence
  Description of Artificial Sequence: Synthetic oligonucleotide
  Antisense strand to SEQ ID NO: 2417348
acuauagcaauaagaauga

SEQ ID NO: 2417350 - RNA, 19 nt, Artificial Sequence
  Description of Artificial Sequence: Synthetic oligonucleotide
  Sense strand starting at position 2808 of SEQ ID NO: 1886557
guuucuuguccagcaugca

SEQ ID NO: 2417351 - RNA, 19 nt, Artificial Sequence
  Description of Artificial Sequence: Synthetic oligonucleotide
  Antisense strand to SEQ ID NO: 2417350
ugcaugcuggacaagaaac

SEQ ID NO: 2417352 - RNA, 19 nt, Artificial Sequence
  Description of Artificial Sequence: Synthetic oligonucleotide
  Sense strand starting at position 3042 of SEQ ID NO: 1886557
uguuaaucaggcuagucuu

SEQ ID NO: 2417353 - RNA, 19 nt, Artificial Sequence
  Description of Artificial Sequence: Synthetic oligonucleotide
  Antisense strand to SEQ ID NO: 2417352
aagacuagccugauuaaca

SEQ ID NO: 2417354 - RNA, 19 nt, Artificial Sequence
  Description of Artificial Sequence: Synthetic oligonucleotide
  Sense strand starting at position 3045 of SEQ ID NO: 1886557
uaaucaggcuagucuugaa

SEQ ID NO: 2417355 - RNA, 19 nt, Artificial Sequence
  Description of Artificial Sequence: Synthetic oligonucleotide
  Antisense strand to SEQ ID NO: 2417354
uucaagacuagccugauua

SEQ ID NO: 2417356 - RNA, 19 nt, Artificial Sequence
  Description of Artificial Sequence: Synthetic oligonucleotide
  Sense strand starting at position 3199 of SEQ ID NO: 1886557
uggacuaagacagguguca

SEQ ID NO: 2417357 - RNA, 19 nt, Artificial Sequence
  Description of Artificial Sequence: Synthetic oligonucleotide
  Antisense strand to SEQ ID NO: 2417356
ugacaccugucuuagucca

SEQ ID NO: 2417358 - RNA, 19 nt, Artificial Sequence
  Description of Artificial Sequence: Synthetic oligonucleotide
  Sense strand starting at position 3406 of SEQ ID NO: 1886557
guccacucccuuugagauc

SEQ ID NO: 2417359 - RNA, 19 nt, Artificial Sequence
  Description of Artificial Sequence: Synthetic oligonucleotide
  Antisense strand to SEQ ID NO: 2417358
gaucucaaagggaguggac

SEQ ID NO: 2417360 - RNA, 19 nt, Artificial Sequence
  Description of Artificial Sequence: Synthetic oligonucleotide
  Sense strand starting at position 3474 of SEQ ID NO: 1886557
cuuagaugagcugaaaugu

SEQ ID NO: 2417361 - RNA, 19 nt, Artificial Sequence
  Description of Artificial Sequence: Synthetic oligonucleotide
  Antisense strand to SEQ ID NO: 2417360
acauuucagcucaucuaag

SEQ ID NO: 2417362 - RNA, 19 nt, Artificial Sequence
  Description of Artificial Sequence: Synthetic oligonucleotide
  Sense strand starting at position 3482 of SEQ ID NO: 1886557
agcugaaaugucugagaag

SEQ ID NO: 2417363 - RNA, 19 nt, Artificial Sequence
  Description of Artificial Sequence: Synthetic oligonucleotide
  Antisense strand to SEQ ID NO: 2417362
cuucucagacauuucagcu

SEQ ID NO: 2417364 - RNA, 19 nt, Artificial Sequence
  Description of Artificial Sequence: Synthetic oligonucleotide
  Sense strand starting at position 3485 of SEQ ID NO: 1886557
ugaaaugucugagaaggag

SEQ ID NO: 2417365 - RNA, 19 nt, Artificial Sequence
  Description of Artificial Sequence: Synthetic oligonucleotide
  Antisense strand to SEQ ID NO: 2417364
cuccuucucagacauuuca

SEQ ID NO: 2417366 - RNA, 19 nt, Artificial Sequence
  Description of Artificial Sequence: Synthetic oligonucleotide
  Sense strand starting at position 3491 of SEQ ID NO: 1886557
gucugagaaggaggaguua

SEQ ID NO: 2417367 - RNA, 19 nt, Artificial Sequence
  Description of Artificial Sequence: Synthetic oligonucleotide
  Antisense strand to SEQ ID NO: 2417366
uaacuccuccuucucagac

SEQ ID NO: 2417368 - RNA, 19 nt, Artificial Sequence
  Description of Artificial Sequence: Synthetic oligonucleotide
  Sense strand starting at position 3504 of SEQ ID NO: 1886557
gaguuacagcuuugauucu

SEQ ID NO: 2417369 - RNA, 19 nt, Artificial Sequence
  Description of Artificial Sequence: Synthetic oligonucleotide
  Antisense strand to SEQ ID NO: 2417368
agaaucaaagcuguaacuc

SEQ ID NO: 2417370 - RNA, 19 nt, Artificial Sequence
  Description of Artificial Sequence: Synthetic oligonucleotide
  Sense strand starting at position 3520 of SEQ ID NO: 1886557
ucuacaucugucugaauag

SEQ ID NO: 2417371 - RNA, 19 nt, Artificial Sequence
  Description of Artificial Sequence: Synthetic oligonucleotide
  Antisense strand to SEQ ID NO: 2417370
cuauucagacagauguaga

SEQ ID NO: 2417372 - RNA, 19 nt, Artificial Sequence
  Description of Artificial Sequence: Synthetic oligonucleotide
  Sense strand starting at position 3541 of SEQ ID NO: 1886557
gccauacaguugucuaaac

SEQ ID NO: 2417373 - RNA, 19 nt, Artificial Sequence
  Description of Artificial Sequence: Synthetic oligonucleotide
  Antisense strand to SEQ ID NO: 2417372
guuuagacaacuguauggc

SEQ ID NO: 2417374 - RNA, 19 nt, Artificial Sequence
  Description of Artificial Sequence: Synthetic oligonucleotide
  Sense strand starting at position 3542 of SEQ ID NO: 1886557
ccauacaguugucuaaaca

SEQ ID NO: 2417375 - RNA, 19 nt, Artificial Sequence
  Description of Artificial Sequence: Synthetic oligonucleotide
  Antisense strand to SEQ ID NO: 2417374
uguuuagacaacuguaugg

SEQ ID NO: 2417376 - RNA, 19 nt, Artificial Sequence
  Description of Artificial Sequence: Synthetic oligonucleotide
  Sense strand starting at position 3644 of SEQ ID NO: 1886557
gccaaauucugggccaagu

SEQ ID NO: 2417377 - RNA, 19 nt, Artificial Sequence
  Description of Artificial Sequence: Synthetic oligonucleotide
  Antisense strand to SEQ ID NO: 2417376
acuuggcccagaauuuggc

SEQ ID NO: 2417378 - RNA, 19 nt, Artificial Sequence
  Description of Artificial Sequence: Synthetic oligonucleotide
  Sense strand starting at position 3654 of SEQ ID NO: 1886557
gggccaaguuugcuauaaa

SEQ ID NO: 2417379 - RNA, 19 nt, Artificial Sequence
  Description of Artificial Sequence: Synthetic oligonucleotide
  Antisense strand to SEQ ID NO: 2417378
uuuauagcaaacuuggccc

SEQ ID NO: 2417380 - RNA, 19 nt, Artificial Sequence
  Description of Artificial Sequence: Synthetic oligonucleotide
  Sense strand starting at position 3870 of SEQ ID NO: 1886557
agaauucuagauuguuuga

SEQ ID NO: 2417381 - RNA, 19 nt, Artificial Sequence
  Description of Artificial Sequence: Synthetic oligonucleotide
  Antisense strand to SEQ ID NO: 2417380
ucaaacaaucuagaauucu

SEQ ID NO: 2417382 - RNA, 19 nt, Artificial Sequence
  Description of Artificial Sequence: Synthetic oligonucleotide
  Sense strand starting at position 3872 of SEQ ID NO: 1886557
aauucuagauuguuugagu

SEQ ID NO: 2417383 - RNA, 19 nt, Artificial Sequence
  Description of Artificial Sequence: Synthetic oligonucleotide
  Antisense strand to SEQ ID NO: 2417382
acucaaacaaucuagaauu

SEQ ID NO: 2417384 - RNA, 19 nt, Artificial Sequence
  Description of Artificial Sequence: Synthetic oligonucleotide
  Sense strand starting at position 3873 of SEQ ID NO: 1886557
auucuagauuguuugaguu

SEQ ID NO: 2417385 - RNA, 19 nt, Artificial Sequence
  Description of Artificial Sequence: Synthetic oligonucleotide
  Antisense strand to SEQ ID NO: 2417384
aacucaaacaaucuagaau

SEQ ID NO: 2417386 - RNA, 19 nt, Artificial Sequence
  Description of Artificial Sequence: Synthetic oligonucleotide
  Sense strand starting at position 3877 of SEQ ID NO: 1886557
uagauuguuugaguuuguu

SEQ ID NO: 2417387 - RNA, 19 nt, Artificial Sequence
  Description of Artificial Sequence: Synthetic oligonucleotide
  Antisense strand to SEQ ID NO: 2417386
aacaaacucaaacaaucua

SEQ ID NO: 2417388 - RNA, 19 nt, Artificial Sequence
  Description of Artificial Sequence: Synthetic oligonucleotide
  Sense strand starting at position 3880 of SEQ ID NO: 1886557
auuguuugaguuuguuaca

SEQ ID NO: 2417389 - RNA, 19 nt, Artificial Sequence
  Description of Artificial Sequence: Synthetic oligonucleotide
  Antisense strand to SEQ ID NO: 2417388
uguaacaaacucaaacaau

SEQ ID NO: 2417390 - RNA, 19 nt, Artificial Sequence
  Description of Artificial Sequence: Synthetic oligonucleotide
  Sense strand starting at position 3881 of SEQ ID NO: 1886557
uuguuugaguuuguuacaa

SEQ ID NO: 2417391 - RNA, 19 nt, Artificial Sequence
  Description of Artificial Sequence: Synthetic oligonucleotide
  Antisense strand to SEQ ID NO: 2417390
uuguaacaaacucaaacaa

SEQ ID NO: 2417392 - RNA, 19 nt, Artificial Sequence
  Description of Artificial Sequence: Synthetic oligonucleotide
  Sense strand starting at position 3902 of SEQ ID NO: 1886557
acacguaucuuuguaacua

SEQ ID NO: 2417393 - RNA, 19 nt, Artificial Sequence
  Description of Artificial Sequence: Synthetic oligonucleotide
  Antisense strand to SEQ ID NO: 2417392
uaguuacaaagauacgugu

SEQ ID NO: 2417394 - RNA, 19 nt, Artificial Sequence
  Description of Artificial Sequence: Synthetic oligonucleotide
  Sense strand starting at position 35 of SEQ ID NO: 1886558
acagcaacugcuuaaugaa

SEQ ID NO: 2417395 - RNA, 19 nt, Artificial Sequence
  Description of Artificial Sequence: Synthetic oligonucleotide
  Antisense strand to SEQ ID NO: 2417394
uucauuaagcaguugcugu

SEQ ID NO: 2417396 - RNA, 19 nt, Artificial Sequence
  Description of Artificial Sequence: Synthetic oligonucleotide
  Sense strand starting at position 188 of SEQ ID NO: 1886558
cugugauucuuugcugaau

SEQ ID NO: 2417397 - RNA, 19 nt, Artificial Sequence
  Description of Artificial Sequence: Synthetic oligonucleotide
  Antisense strand to SEQ ID NO: 2417396
auucagcaaagaaucacag

SEQ ID NO: 2417398 - RNA, 19 nt, Artificial Sequence
  Description of Artificial Sequence: Synthetic oligonucleotide
  Sense strand starting at position 191 of SEQ ID NO: 1886558
ugauucuuugcugaauuaa

SEQ ID NO: 2417399 - RNA, 19 nt, Artificial Sequence
  Description of Artificial Sequence: Synthetic oligonucleotide
  Antisense strand to SEQ ID NO: 2417398
uuaauucagcaaagaauca

SEQ ID NO: 2417400 - RNA, 19 nt, Artificial Sequence
  Description of Artificial Sequence: Synthetic oligonucleotide
  Sense strand starting at position 254 of SEQ ID NO: 1886558
auacuagacuguuuccaga

SEQ ID NO: 2417401 - RNA, 19 nt, Artificial Sequence
  Description of Artificial Sequence: Synthetic oligonucleotide
  Antisense strand to SEQ ID NO: 2417400
ucuggaaacagucuaguau

SEQ ID NO: 2417402 - RNA, 19 nt, Artificial Sequence
  Description of Artificial Sequence: Synthetic oligonucleotide
  Sense strand starting at position 256 of SEQ ID NO: 1886558
acuagacuguuuccagacu

SEQ ID NO: 2417403 - RNA, 19 nt, Artificial Sequence
  Description of Artificial Sequence: Synthetic oligonucleotide
  Antisense strand to SEQ ID NO: 2417402
agucuggaaacagucuagu

SEQ ID NO: 2417404 - RNA, 19 nt, Artificial Sequence
  Description of Artificial Sequence: Synthetic oligonucleotide
  Sense strand starting at position 282 of SEQ ID NO: 1886558
ggguuaaaguuuguuaaau

SEQ ID NO: 2417405 - RNA, 19 nt, Artificial Sequence
  Description of Artificial Sequence: Synthetic oligonucleotide
  Antisense strand to SEQ ID NO: 2417404
auuuaacaaacuuuaaccc

SEQ ID NO: 2417406 - RNA, 19 nt, Artificial Sequence
  Description of Artificial Sequence: Synthetic oligonucleotide
  Sense strand starting at position 283 of SEQ ID NO: 1886558
gguuaaaguuuguuaaaug

SEQ ID NO: 2417407 - RNA, 19 nt, Artificial Sequence
  Description of Artificial Sequence: Synthetic oligonucleotide
  Antisense strand to SEQ ID NO: 2417406
cauuuaacaaacuuuaacc

SEQ ID NO: 2417408 - RNA, 19 nt, Artificial Sequence
  Description of Artificial Sequence: Synthetic oligonucleotide
  Sense strand starting at position 322 of SEQ ID NO: 1886558
guuucagacggcugaauau

SEQ ID NO: 2417409 - RNA, 19 nt, Artificial Sequence
  Description of Artificial Sequence: Synthetic oligonucleotide
  Antisense strand to SEQ ID NO: 2417408
auauucagccgucugaaac

SEQ ID NO: 2417410 - RNA, 19 nt, Artificial Sequence
  Description of Artificial Sequence: Synthetic oligonucleotide
  Sense strand starting at position 340 of SEQ ID NO: 1886558
uaaguaaugcuugugcugu

SEQ ID NO: 2417411 - RNA, 19 nt, Artificial Sequence
  Description of Artificial Sequence: Synthetic oligonucleotide
  Antisense strand to SEQ ID NO: 2417410
acagcacaagcauuacuua

SEQ ID NO: 2417412 - RNA, 19 nt, Artificial Sequence
  Description of Artificial Sequence: Synthetic oligonucleotide
  Sense strand starting at position 346 of SEQ ID NO: 1886558
augcuugugcuguugcgaa

SEQ ID NO: 2417413 - RNA, 19 nt, Artificial Sequence
  Description of Artificial Sequence: Synthetic oligonucleotide
  Antisense strand to SEQ ID NO: 2417412
uucgcaacagcacaagcau

SEQ ID NO: 2417414 - RNA, 19 nt, Artificial Sequence
  Description of Artificial Sequence: Synthetic oligonucleotide
  Sense strand starting at position 360 of SEQ ID NO: 1886558
gcgaaugcucaccauuaaa

SEQ ID NO: 2417415 - RNA, 19 nt, Artificial Sequence
  Description of Artificial Sequence: Synthetic oligonucleotide
  Antisense strand to SEQ ID NO: 2417414
uuuaauggugagcauucgc

SEQ ID NO: 2417416 - RNA, 19 nt, Artificial Sequence
  Description of Artificial Sequence: Synthetic oligonucleotide
  Sense strand starting at position 400 of SEQ ID NO: 1886558
gcacuaaauucugucugau

SEQ ID NO: 2417417 - RNA, 19 nt, Artificial Sequence
  Description of Artificial Sequence: Synthetic oligonucleotide
  Antisense strand to SEQ ID NO: 2417416
aucagacagaauuuagugc

SEQ ID NO: 2417418 - RNA, 19 nt, Artificial Sequence
  Description of Artificial Sequence: Synthetic oligonucleotide
  Sense strand starting at position 454 of SEQ ID NO: 1886558
ggcuucgucgccuccauua

SEQ ID NO: 2417419 - RNA, 19 nt, Artificial Sequence
  Description of Artificial Sequence: Synthetic oligonucleotide
  Antisense strand to SEQ ID NO: 2417418
uaauggaggcgacgaagcc

SEQ ID NO: 2417420 - RNA, 19 nt, Artificial Sequence
  Description of Artificial Sequence: Synthetic oligonucleotide
  Sense strand starting at position 464 of SEQ ID NO: 1886558
ccuccauuauagcucagua

SEQ ID NO: 2417421 - RNA, 19 nt, Artificial Sequence
  Description of Artificial Sequence: Synthetic oligonucleotide
  Antisense strand to SEQ ID NO: 2417420
uacugagcuauaauggagg

SEQ ID NO: 2417422 - RNA, 19 nt, Artificial Sequence
  Description of Artificial Sequence: Synthetic oligonucleotide
  Sense strand starting at position 486 of SEQ ID NO: 1886558
uggagaaacagucaguguu

SEQ ID NO: 2417423 - RNA, 19 nt, Artificial Sequence
  Description of Artificial Sequence: Synthetic oligonucleotide
  Antisense strand to SEQ ID NO: 2417422
aacacugacuguuucucca

SEQ ID NO: 2417424 - RNA, 19 nt, Artificial Sequence
  Description of Artificial Sequence: Synthetic oligonucleotide
  Sense strand starting at position 498 of SEQ ID NO: 1886558
caguguuccggccucguua

SEQ ID NO: 2417425 - RNA, 19 nt, Artificial Sequence
  Description of Artificial Sequence: Synthetic oligonucleotide
  Antisense strand to SEQ ID NO: 2417424
uaacgaggccggaacacug

SEQ ID NO: 2417426 - RNA, 19 nt, Artificial Sequence
  Description of Artificial Sequence: Synthetic oligonucleotide
  Sense strand starting at position 499 of SEQ ID NO: 1886558
aguguuccggccucguuaa

SEQ ID NO: 2417427 - RNA, 19 nt, Artificial Sequence
  Description of Artificial Sequence: Synthetic oligonucleotide
  Antisense strand to SEQ ID NO: 2417426
uuaacgaggccggaacacu

SEQ ID NO: 2417428 - RNA, 19 nt, Artificial Sequence
  Description of Artificial Sequence: Synthetic oligonucleotide
  Sense strand starting at position 501 of SEQ ID NO: 1886558
uguuccggccucguuaauu

SEQ ID NO: 2417429 - RNA, 19 nt, Artificial Sequence
  Description of Artificial Sequence: Synthetic oligonucleotide
  Antisense strand to SEQ ID NO: 2417428
aauuaacgaggccggaaca

SEQ ID NO: 2417430 - RNA, 19 nt, Artificial Sequence
  Description of Artificial Sequence: Synthetic oligonucleotide
  Sense strand starting at position 528 of SEQ ID NO: 1886558
acacccuauuuguagaagu

SEQ ID NO: 2417431 - RNA, 19 nt, Artificial Sequence
  Description of Artificial Sequence: Synthetic oligonucleotide
  Antisense strand to SEQ ID NO: 2417430
acuucuacaaauagggugu

SEQ ID NO: 2417432 - RNA, 19 nt, Artificial Sequence
  Description of Artificial Sequence: Synthetic oligonucleotide
  Sense strand starting at position 539 of SEQ ID NO: 1886558
guagaaguaucauuaaagg

SEQ ID NO: 2417433 - RNA, 19 nt, Artificial Sequence
  Description of Artificial Sequence: Synthetic oligonucleotide
  Antisense strand to SEQ ID NO: 2417432
ccuuuaaugauacuucuac

SEQ ID NO: 2417434 - RNA, 19 nt, Artificial Sequence
  Description of Artificial Sequence: Synthetic oligonucleotide
  Sense strand starting at position 553 of SEQ ID NO: 1886558
aaaggcuaauuugaugaga

SEQ ID NO: 2417435 - RNA, 19 nt, Artificial Sequence
  Description of Artificial Sequence: Synthetic oligonucleotide
  Antisense strand to SEQ ID NO: 2417434
ucucaucaaauuagccuuu

SEQ ID NO: 2417436 - RNA, 19 nt, Artificial Sequence
  Description of Artificial Sequence: Synthetic oligonucleotide
  Sense strand starting at position 555 of SEQ ID NO: 1886558
aggcuaauuugaugagaua

SEQ ID NO: 2417437 - RNA, 19 nt, Artificial Sequence
  Description of Artificial Sequence: Synthetic oligonucleotide
  Antisense strand to SEQ ID NO: 2417436
uaucucaucaaauuagccu

SEQ ID NO: 2417438 - RNA, 19 nt, Artificial Sequence
  Description of Artificial Sequence: Synthetic oligonucleotide
  Sense strand starting at position 835 of SEQ ID NO: 1886558
gaacgcuguguucaaaggu

SEQ ID NO: 2417439 - RNA, 19 nt, Artificial Sequence
  Description of Artificial Sequence: Synthetic oligonucleotide
  Antisense strand to SEQ ID NO: 2417438
accuuugaacacagcguuc

SEQ ID NO: 2417440 - RNA, 19 nt, Artificial Sequence
  Description of Artificial Sequence: Synthetic oligonucleotide
  Sense strand starting at position 883 of SEQ ID NO: 1886558
cccugcuauguagacuuaa

SEQ ID NO: 2417441 - RNA, 19 nt, Artificial Sequence
  Description of Artificial Sequence: Synthetic oligonucleotide
  Antisense strand to SEQ ID NO: 2417440
uuaagucuacauagcaggg

SEQ ID NO: 2417442 - RNA, 19 nt, Artificial Sequence
  Description of Artificial Sequence: Synthetic oligonucleotide
  Sense strand starting at position 920 of SEQ ID NO: 1886558
aauaacuuaggauguguga

SEQ ID NO: 2417443 - RNA, 19 nt, Artificial Sequence
  Description of Artificial Sequence: Synthetic oligonucleotide
  Antisense strand to SEQ ID NO: 2417442
ucacacauccuaaguuauu

SEQ ID NO: 2417444 - RNA, 19 nt, Artificial Sequence
  Description of Artificial Sequence: Synthetic oligonucleotide
  Sense strand starting at position 934 of SEQ ID NO: 1886558
ugugaaagucuauauaggu

SEQ ID NO: 2417445 - RNA, 19 nt, Artificial Sequence
  Description of Artificial Sequence: Synthetic oligonucleotide
  Antisense strand to SEQ ID NO: 2417444
accuauauagacuuucaca

SEQ ID NO: 2417446 - RNA, 19 nt, Artificial Sequence
  Description of Artificial Sequence: Synthetic oligonucleotide
  Sense strand starting at position 941 of SEQ ID NO: 1886558
gucuauauagguuacaacu

SEQ ID NO: 2417447 - RNA, 19 nt, Artificial Sequence
  Description of Artificial Sequence: Synthetic oligonucleotide
  Antisense strand to SEQ ID NO: 2417446
aguuguaaccuauauagac

SEQ ID NO: 2417448 - RNA, 19 nt, Artificial Sequence
  Description of Artificial Sequence: Synthetic oligonucleotide
  Sense strand starting at position 1481 of SEQ ID NO: 1886558
acagcugguuucuccuaau

SEQ ID NO: 2417449 - RNA, 19 nt, Artificial Sequence
  Description of Artificial Sequence: Synthetic oligonucleotide
  Antisense strand to SEQ ID NO: 2417448
auuaggagaaaccagcugu

SEQ ID NO: 2417450 - RNA, 19 nt, Artificial Sequence
  Description of Artificial Sequence: Synthetic oligonucleotide
  Sense strand starting at position 1487 of SEQ ID NO: 1886558
gguuucuccuaauuuagca

SEQ ID NO: 2417451 - RNA, 19 nt, Artificial Sequence
  Description of Artificial Sequence: Synthetic oligonucleotide
  Antisense strand to SEQ ID NO: 2417450
ugcuaaauuaggagaaacc

SEQ ID NO: 2417452 - RNA, 19 nt, Artificial Sequence
  Description of Artificial Sequence: Synthetic oligonucleotide
  Sense strand starting at position 1519 of SEQ ID NO: 1886558
aucuaaugucguuacaauu

SEQ ID NO: 2417453 - RNA, 19 nt, Artificial Sequence
  Description of Artificial Sequence: Synthetic oligonucleotide
  Antisense strand to SEQ ID NO: 2417452
aauuguaacgacauuagau

SEQ ID NO: 2417454 - RNA, 19 nt, Artificial Sequence
  Description of Artificial Sequence: Synthetic oligonucleotide
  Sense strand starting at position 2067 of SEQ ID NO: 1886558
ccgccuuugaggcaagagu

SEQ ID NO: 2417455 - RNA, 19 nt, Artificial Sequence
  Description of Artificial Sequence: Synthetic oligonucleotide
  Antisense strand to SEQ ID NO: 2417454
acucuugccucaaaggcgg

SEQ ID NO: 2417456 - RNA, 19 nt, Artificial Sequence
  Description of Artificial Sequence: Synthetic oligonucleotide
  Sense strand starting at position 2075 of SEQ ID NO: 1886558
gaggcaagaguuuggagaa

SEQ ID NO: 2417457 - RNA, 19 nt, Artificial Sequence
  Description of Artificial Sequence: Synthetic oligonucleotide
  Antisense strand to SEQ ID NO: 2417456
uucuccaaacucuugccuc

SEQ ID NO: 2417458 - RNA, 19 nt, Artificial Sequence
  Description of Artificial Sequence: Synthetic oligonucleotide
  Sense strand starting at position 2321 of SEQ ID NO: 1886558
ucccuuagcagcggauaaa

SEQ ID NO: 2417459 - RNA, 19 nt, Artificial Sequence
  Description of Artificial Sequence: Synthetic oligonucleotide
  Antisense strand to SEQ ID NO: 2417458
uuuauccgcugcuaaggga

SEQ ID NO: 2417460 - RNA, 19 nt, Artificial Sequence
  Description of Artificial Sequence: Synthetic oligonucleotide
  Sense strand starting at position 2322 of SEQ ID NO: 1886558
cccuuagcagcggauaaau

SEQ ID NO: 2417461 - RNA, 19 nt, Artificial Sequence
  Description of Artificial Sequence: Synthetic oligonucleotide
  Antisense strand to SEQ ID NO: 2417460
auuuauccgcugcuaaggg

SEQ ID NO: 2417462 - RNA, 19 nt, Artificial Sequence
  Description of Artificial Sequence: Synthetic oligonucleotide
  Sense strand starting at position 2333 of SEQ ID NO: 1886558
ggauaaaucggguguccga

SEQ ID NO: 2417463 - RNA, 19 nt, Artificial Sequence
  Description of Artificial Sequence: Synthetic oligonucleotide
  Antisense strand to SEQ ID NO: 2417462
ucggacacccgauuuaucc

SEQ ID NO: 2417464 - RNA, 19 nt, Artificial Sequence
  Description of Artificial Sequence: Synthetic oligonucleotide
  Sense strand starting at position 2398 of SEQ ID NO: 1886558
uugguuauuuguguccuua

SEQ ID NO: 2417465 - RNA, 19 nt, Artificial Sequence
  Description of Artificial Sequence: Synthetic oligonucleotide
  Antisense strand to SEQ ID NO: 2417464
uaaggacacaaauaaccaa

SEQ ID NO: 2417466 - RNA, 19 nt, Artificial Sequence
  Description of Artificial Sequence: Synthetic oligonucleotide
  Sense strand starting at position 2400 of SEQ ID NO: 1886558
gguuauuuguguccuuaau

SEQ ID NO: 2417467 - RNA, 19 nt, Artificial Sequence
  Description of Artificial Sequence: Synthetic oligonucleotide
  Antisense strand to SEQ ID NO: 2417466
auuaaggacacaaauaacc

SEQ ID NO: 2417468 - RNA, 19 nt, Artificial Sequence
  Description of Artificial Sequence: Synthetic oligonucleotide
  Sense strand starting at position 2596 of SEQ ID NO: 1886558
uguguccucagaggacaua

SEQ ID NO: 2417469 - RNA, 19 nt, Artificial Sequence
  Description of Artificial Sequence: Synthetic oligonucleotide
  Antisense strand to SEQ ID NO: 2417468
uauguccucugaggacaca

SEQ ID NO: 2417470 - RNA, 19 nt, Artificial Sequence
  Description of Artificial Sequence: Synthetic oligonucleotide
  Sense strand starting at position 3255 of SEQ ID NO: 1886558
cgccgagucccgagagaac

SEQ ID NO: 2417471 - RNA, 19 nt, Artificial Sequence
  Description of Artificial Sequence: Synthetic oligonucleotide
  Antisense strand to SEQ ID NO: 2417470
guucucucgggacucggcg

SEQ ID NO: 2417472 - RNA, 19 nt, Artificial Sequence
  Description of Artificial Sequence: Synthetic oligonucleotide
  Sense strand starting at position 3974 of SEQ ID NO: 1886558
agaaacgcucgccaaauau

SEQ ID NO: 2417473 - RNA, 19 nt, Artificial Sequence
  Description of Artificial Sequence: Synthetic oligonucleotide
  Antisense strand to SEQ ID NO: 2417472
auauuuggcgagcguuucu

SEQ ID NO: 2417474 - RNA, 19 nt, Artificial Sequence
  Description of Artificial Sequence: Synthetic oligonucleotide
  Sense strand starting at position 8 of SEQ ID NO: 1886559
gcugguguuauuuaccagu

SEQ ID NO: 2417475 - RNA, 19 nt, Artificial Sequence
  Description of Artificial Sequence: Synthetic oligonucleotide
  Antisense strand to SEQ ID NO: 2417474
acugguaaauaacaccagc

SEQ ID NO: 2417476 - RNA, 19 nt, Artificial Sequence
  Description of Artificial Sequence: Synthetic oligonucleotide
  Sense strand starting at position 21 of SEQ ID NO: 1886559
accaguaaugcuuggagaa

SEQ ID NO: 2417477 - RNA, 19 nt, Artificial Sequence
  Description of Artificial Sequence: Synthetic oligonucleotide
  Antisense strand to SEQ ID NO: 2417476
uucuccaagcauuacuggu

SEQ ID NO: 2417478 - RNA, 19 nt, Artificial Sequence
  Description of Artificial Sequence: Synthetic oligonucleotide
  Sense strand starting at position 22 of SEQ ID NO: 1886559
ccaguaaugcuuggagaaa

SEQ ID NO: 2417479 - RNA, 19 nt, Artificial Sequence
  Description of Artificial Sequence: Synthetic oligonucleotide
  Antisense strand to SEQ ID NO: 2417478
uuucuccaagcauuacugg

SEQ ID NO: 2417480 - RNA, 19 nt, Artificial Sequence
  Description of Artificial Sequence: Synthetic oligonucleotide
  Sense strand starting at position 79 of SEQ ID NO: 1886559
guuguuucuguguuuguca

SEQ ID NO: 2417481 - RNA, 19 nt, Artificial Sequence
  Description of Artificial Sequence: Synthetic oligonucleotide
  Antisense strand to SEQ ID NO: 2417480
ugacaaacacagaaacaac

SEQ ID NO: 2417482 - RNA, 19 nt, Artificial Sequence
  Description of Artificial Sequence: Synthetic oligonucleotide
  Sense strand starting at position 251 of SEQ ID NO: 1886559
uauuaagaguuccuaagga

SEQ ID NO: 2417483 - RNA, 19 nt, Artificial Sequence
  Description of Artificial Sequence: Synthetic oligonucleotide
  Antisense strand to SEQ ID NO: 2417482
uccuuaggaacucuuaaua

SEQ ID NO: 2417484 - RNA, 19 nt, Artificial Sequence
  Description of Artificial Sequence: Synthetic oligonucleotide
  Sense strand starting at position 522 of SEQ ID NO: 1886559
uuugcuggccuccagauaa

SEQ ID NO: 2417485 - RNA, 19 nt, Artificial Sequence
  Description of Artificial Sequence: Synthetic oligonucleotide
  Antisense strand to SEQ ID NO: 2417484
uuaucuggaggccagcaaa

SEQ ID NO: 2417486 - RNA, 19 nt, Artificial Sequence
  Description of Artificial Sequence: Synthetic oligonucleotide
  Sense strand starting at position 529 of SEQ ID NO: 1886559
gccuccagauaauuaguaa

SEQ ID NO: 2417487 - RNA, 19 nt, Artificial Sequence
  Description of Artificial Sequence: Synthetic oligonucleotide
  Antisense strand to SEQ ID NO: 2417486
uuacuaauuaucuggaggc

SEQ ID NO: 2417488 - RNA, 19 nt, Artificial Sequence
  Description of Artificial Sequence: Synthetic oligonucleotide
  Sense strand starting at position 570 of SEQ ID NO: 1886559
ccuuacauuguguaauaua

SEQ ID NO: 2417489 - RNA, 19 nt, Artificial Sequence
  Description of Artificial Sequence: Synthetic oligonucleotide
  Antisense strand to SEQ ID NO: 2417488
uauauuacacaauguaagg

SEQ ID NO: 2417490 - RNA, 19 nt, Artificial Sequence
  Description of Artificial Sequence: Synthetic oligonucleotide
  Sense strand starting at position 592 of SEQ ID NO: 1886559
uucuguuaauaugugaaug

SEQ ID NO: 2417491 - RNA, 19 nt, Artificial Sequence
  Description of Artificial Sequence: Synthetic oligonucleotide
  Antisense strand to SEQ ID NO: 2417490
cauucacauauuaacagaa

SEQ ID NO: 2417492 - RNA, 19 nt, Artificial Sequence
  Description of Artificial Sequence: Synthetic oligonucleotide
  Sense strand starting at position 597 of SEQ ID NO: 1886559
uuaauaugugaauguccau

SEQ ID NO: 2417493 - RNA, 19 nt, Artificial Sequence
  Description of Artificial Sequence: Synthetic oligonucleotide
  Antisense strand to SEQ ID NO: 2417492
auggacauucacauauuaa

SEQ ID NO: 2417494 - RNA, 19 nt, Artificial Sequence
  Description of Artificial Sequence: Synthetic oligonucleotide
  Sense strand starting at position 600 of SEQ ID NO: 1886559
auaugugaauguccaugaa

SEQ ID NO: 2417495 - RNA, 19 nt, Artificial Sequence
  Description of Artificial Sequence: Synthetic oligonucleotide
  Antisense strand to SEQ ID NO: 2417494
uucauggacauucacauau

SEQ ID NO: 2417496 - RNA, 19 nt, Artificial Sequence
  Description of Artificial Sequence: Synthetic oligonucleotide
  Sense strand starting at position 604 of SEQ ID NO: 1886559
gugaauguccaugaagguu

SEQ ID NO: 2417497 - RNA, 19 nt, Artificial Sequence
  Description of Artificial Sequence: Synthetic oligonucleotide
  Antisense strand to SEQ ID NO: 2417496
aaccuucauggacauucac

SEQ ID NO: 2417498 - RNA, 19 nt, Artificial Sequence
  Description of Artificial Sequence: Synthetic oligonucleotide
  Sense strand starting at position 616 of SEQ ID NO: 1886559
gaagguugguugguauaua

SEQ ID NO: 2417499 - RNA, 19 nt, Artificial Sequence
  Description of Artificial Sequence: Synthetic oligonucleotide
  Antisense strand to SEQ ID NO: 2417498
uauauaccaaccaaccuuc

SEQ ID NO: 2417500 - RNA, 19 nt, Artificial Sequence
  Description of Artificial Sequence: Synthetic oligonucleotide
  Sense strand starting at position 682 of SEQ ID NO: 1886559
cugcuuuaaguagaaacau

SEQ ID NO: 2417501 - RNA, 19 nt, Artificial Sequence
  Description of Artificial Sequence: Synthetic oligonucleotide
  Antisense strand to SEQ ID NO: 2417500
auguuucuacuuaaagcag

SEQ ID NO: 2417502 - RNA, 19 nt, Artificial Sequence
  Description of Artificial Sequence: Synthetic oligonucleotide
  Sense strand starting at position 807 of SEQ ID NO: 1886559
cauugucaucauggaauug

SEQ ID NO: 2417503 - RNA, 19 nt, Artificial Sequence
  Description of Artificial Sequence: Synthetic oligonucleotide
  Antisense strand to SEQ ID NO: 2417502
caauuccaugaugacaaug

SEQ ID NO: 2417504 - RNA, 19 nt, Artificial Sequence
  Description of Artificial Sequence: Synthetic oligonucleotide
  Sense strand starting at position 851 of SEQ ID NO: 1886559
ggugauaaaucucuccuua

SEQ ID NO: 2417505 - RNA, 19 nt, Artificial Sequence
  Description of Artificial Sequence: Synthetic oligonucleotide
  Antisense strand to SEQ ID NO: 2417504
uaaggagagauuuaucacc

SEQ ID NO: 2417506 - RNA, 19 nt, Artificial Sequence
  Description of Artificial Sequence: Synthetic oligonucleotide
  Sense strand starting at position 948 of SEQ ID NO: 1886559
cagguacaucagugaguaa

SEQ ID NO: 2417507 - RNA, 19 nt, Artificial Sequence
  Description of Artificial Sequence: Synthetic oligonucleotide
  Antisense strand to SEQ ID NO: 2417506
uuacucacugauguaccug

SEQ ID NO: 2417508 - RNA, 19 nt, Artificial Sequence
  Description of Artificial Sequence: Synthetic oligonucleotide
  Sense strand starting at position 949 of SEQ ID NO: 1886559
agguacaucagugaguaau

SEQ ID NO: 2417509 - RNA, 19 nt, Artificial Sequence
  Description of Artificial Sequence: Synthetic oligonucleotide
  Antisense strand to SEQ ID NO: 2417508
auuacucacugauguaccu

SEQ ID NO: 2417510 - RNA, 19 nt, Artificial Sequence
  Description of Artificial Sequence: Synthetic oligonucleotide
  Sense strand starting at position 951 of SEQ ID NO: 1886559
guacaucagugaguaauag

SEQ ID NO: 2417511 - RNA, 19 nt, Artificial Sequence
  Description of Artificial Sequence: Synthetic oligonucleotide
  Antisense strand to SEQ ID NO: 2417510
cuauuacucacugauguac

SEQ ID NO: 2417512 - RNA, 19 nt, Artificial Sequence
  Description of Artificial Sequence: Synthetic oligonucleotide
  Sense strand starting at position 952 of SEQ ID NO: 1886559
uacaucagugaguaauagu

SEQ ID NO: 2417513 - RNA, 19 nt, Artificial Sequence
  Description of Artificial Sequence: Synthetic oligonucleotide
  Antisense strand to SEQ ID NO: 2417512
acuauuacucacugaugua

SEQ ID NO: 2417514 - RNA, 19 nt, Artificial Sequence
  Description of Artificial Sequence: Synthetic oligonucleotide
  Sense strand starting at position 1456 of SEQ ID NO: 1886559
uguaccacauguuuaagau

SEQ ID NO: 2417515 - RNA, 19 nt, Artificial Sequence
  Description of Artificial Sequence: Synthetic oligonucleotide
  Antisense strand to SEQ ID NO: 2417514
aucuuaaacaugugguaca

SEQ ID NO: 2417516 - RNA, 19 nt, Artificial Sequence
  Description of Artificial Sequence: Synthetic oligonucleotide
  Sense strand starting at position 1457 of SEQ ID NO: 1886559
guaccacauguuuaagaua

SEQ ID NO: 2417517 - RNA, 19 nt, Artificial Sequence
  Description of Artificial Sequence: Synthetic oligonucleotide
  Antisense strand to SEQ ID NO: 2417516
uaucuuaaacaugugguac

SEQ ID NO: 2417518 - RNA, 19 nt, Artificial Sequence
  Description of Artificial Sequence: Synthetic oligonucleotide
  Sense strand starting at position 1465 of SEQ ID NO: 1886559
uguuuaagauaguccauau

SEQ ID NO: 2417519 - RNA, 19 nt, Artificial Sequence
  Description of Artificial Sequence: Synthetic oligonucleotide
  Antisense strand to SEQ ID NO: 2417518
auauggacuaucuuaaaca

SEQ ID NO: 2417520 - RNA, 19 nt, Artificial Sequence
  Description of Artificial Sequence: Synthetic oligonucleotide
  Sense strand starting at position 1475 of SEQ ID NO: 1886559
aguccauauccacauugua

SEQ ID NO: 2417521 - RNA, 19 nt, Artificial Sequence
  Description of Artificial Sequence: Synthetic oligonucleotide
  Antisense strand to SEQ ID NO: 2417520
uacaauguggauauggacu

SEQ ID NO: 2417522 - RNA, 19 nt, Artificial Sequence
  Description of Artificial Sequence: Synthetic oligonucleotide
  Sense strand starting at position 2049 of SEQ ID NO: 1886559
ucaauaccagucuggguaa

SEQ ID NO: 2417523 - RNA, 19 nt, Artificial Sequence
  Description of Artificial Sequence: Synthetic oligonucleotide
  Antisense strand to SEQ ID NO: 2417522
uuacccagacugguauuga

SEQ ID NO: 2417524 - RNA, 19 nt, Artificial Sequence
  Description of Artificial Sequence: Synthetic oligonucleotide
  Sense strand starting at position 2052 of SEQ ID NO: 1886559
auaccagucuggguaacau

SEQ ID NO: 2417525 - RNA, 19 nt, Artificial Sequence
  Description of Artificial Sequence: Synthetic oligonucleotide
  Antisense strand to SEQ ID NO: 2417524
auguuacccagacugguau

SEQ ID NO: 2417526 - RNA, 19 nt, Artificial Sequence
  Description of Artificial Sequence: Synthetic oligonucleotide
  Sense strand starting at position 2431 of SEQ ID NO: 1886559
ugucauuuauaauaggauc

SEQ ID NO: 2417527 - RNA, 19 nt, Artificial Sequence
  Description of Artificial Sequence: Synthetic oligonucleotide
  Antisense strand to SEQ ID NO: 2417526
gauccuauuauaaaugaca

SEQ ID NO: 2417528 - RNA, 19 nt, Artificial Sequence
  Description of Artificial Sequence: Synthetic oligonucleotide
  Sense strand starting at position 2490 of SEQ ID NO: 1886559
augcaagaucuguacauug

SEQ ID NO: 2417529 - RNA, 19 nt, Artificial Sequence
  Description of Artificial Sequence: Synthetic oligonucleotide
  Antisense strand to SEQ ID NO: 2417528
caauguacagaucuugcau

SEQ ID NO: 2417530 - RNA, 19 nt, Artificial Sequence
  Description of Artificial Sequence: Synthetic oligonucleotide
  Sense strand starting at position 2492 of SEQ ID NO: 1886559
gcaagaucuguacauugag

SEQ ID NO: 2417531 - RNA, 19 nt, Artificial Sequence
  Description of Artificial Sequence: Synthetic oligonucleotide
  Antisense strand to SEQ ID NO: 2417530
cucaauguacagaucuugc

SEQ ID NO: 2417532 - RNA, 19 nt, Artificial Sequence
  Description of Artificial Sequence: Synthetic oligonucleotide
  Sense strand starting at position 2495 of SEQ ID NO: 1886559
agaucuguacauugagaac

SEQ ID NO: 2417533 - RNA, 19 nt, Artificial Sequence
  Description of Artificial Sequence: Synthetic oligonucleotide
  Antisense strand to SEQ ID NO: 2417532
guucucaauguacagaucu

SEQ ID NO: 2417534 - RNA, 19 nt, Artificial Sequence
  Description of Artificial Sequence: Synthetic oligonucleotide
  Sense strand starting at position 2667 of SEQ ID NO: 1886559
agaacuugaugagcuaauu

SEQ ID NO: 2417535 - RNA, 19 nt, Artificial Sequence
  Description of Artificial Sequence: Synthetic oligonucleotide
  Antisense strand to SEQ ID NO: 2417534
aauuagcucaucaaguucu

SEQ ID NO: 2417536 - RNA, 19 nt, Artificial Sequence
  Description of Artificial Sequence: Synthetic oligonucleotide
  Sense strand starting at position 2756 of SEQ ID NO: 1886559
agacuuaccuugucauacu

SEQ ID NO: 2417537 - RNA, 19 nt, Artificial Sequence
  Description of Artificial Sequence: Synthetic oligonucleotide
  Antisense strand to SEQ ID NO: 2417536
aguaugacaagguaagucu

SEQ ID NO: 2417538 - RNA, 19 nt, Artificial Sequence
  Description of Artificial Sequence: Synthetic oligonucleotide
  Sense strand starting at position 2775 of SEQ ID NO: 1886559
ucaagacuucuguaaagua

SEQ ID NO: 2417539 - RNA, 19 nt, Artificial Sequence
  Description of Artificial Sequence: Synthetic oligonucleotide
  Antisense strand to SEQ ID NO: 2417538
uacuuuacagaagucuuga

SEQ ID NO: 2417540 - RNA, 19 nt, Artificial Sequence
  Description of Artificial Sequence: Synthetic oligonucleotide
  Sense strand starting at position 2795 of SEQ ID NO: 1886559
caaguaagacugugugaga

SEQ ID NO: 2417541 - RNA, 19 nt, Artificial Sequence
  Description of Artificial Sequence: Synthetic oligonucleotide
  Antisense strand to SEQ ID NO: 2417540
ucucacacagucuuacuug

SEQ ID NO: 2417542 - RNA, 19 nt, Artificial Sequence
  Description of Artificial Sequence: Synthetic oligonucleotide
  Sense strand starting at position 2796 of SEQ ID NO: 1886559
aaguaagacugugugagau

SEQ ID NO: 2417543 - RNA, 19 nt, Artificial Sequence
  Description of Artificial Sequence: Synthetic oligonucleotide
  Antisense strand to SEQ ID NO: 2417542
aucucacacagucuuacuu

SEQ ID NO: 2417544 - RNA, 19 nt, Artificial Sequence
  Description of Artificial Sequence: Synthetic oligonucleotide
  Sense strand starting at position 2806 of SEQ ID NO: 1886559
gugugagauuaaccaaaga

SEQ ID NO: 2417545 - RNA, 19 nt, Artificial Sequence
  Description of Artificial Sequence: Synthetic oligonucleotide
  Antisense strand to SEQ ID NO: 2417544
ucuuugguuaaucucacac

SEQ ID NO: 2417546 - RNA, 19 nt, Artificial Sequence
  Description of Artificial Sequence: Synthetic oligonucleotide
  Sense strand starting at position 2877 of SEQ ID NO: 1886559
uuuacagaugccugaguaa

SEQ ID NO: 2417547 - RNA, 19 nt, Artificial Sequence
  Description of Artificial Sequence: Synthetic oligonucleotide
  Antisense strand to SEQ ID NO: 2417546
uuacucaggcaucuguaaa

SEQ ID NO: 2417548 - RNA, 19 nt, Artificial Sequence
  Description of Artificial Sequence: Synthetic oligonucleotide
  Sense strand starting at position 2880 of SEQ ID NO: 1886559
acagaugccugaguaauuc

SEQ ID NO: 2417549 - RNA, 19 nt, Artificial Sequence
  Description of Artificial Sequence: Synthetic oligonucleotide
  Antisense strand to SEQ ID NO: 2417548
gaauuacucaggcaucugu

SEQ ID NO: 2417550 - RNA, 19 nt, Artificial Sequence
  Description of Artificial Sequence: Synthetic oligonucleotide
  Sense strand starting at position 2889 of SEQ ID NO: 1886559
ugaguaauucgagggagaa

SEQ ID NO: 2417551 - RNA, 19 nt, Artificial Sequence
  Description of Artificial Sequence: Synthetic oligonucleotide
  Antisense strand to SEQ ID NO: 2417550
uucucccucgaauuacuca

SEQ ID NO: 2417552 - RNA, 19 nt, Artificial Sequence
  Description of Artificial Sequence: Synthetic oligonucleotide
  Sense strand starting at position 3633 of SEQ ID NO: 1886559
acauuuguuugacaaagaa

SEQ ID NO: 2417553 - RNA, 19 nt, Artificial Sequence
  Description of Artificial Sequence: Synthetic oligonucleotide
  Antisense strand to SEQ ID NO: 2417552
uucuuugucaaacaaaugu

SEQ ID NO: 2417554 - RNA, 19 nt, Artificial Sequence
  Description of Artificial Sequence: Synthetic oligonucleotide
  Sense strand starting at position 6 of SEQ ID NO: 1886560
gcugguguuauuuaccagu

SEQ ID NO: 2417555 - RNA, 19 nt, Artificial Sequence
  Description of Artificial Sequence: Synthetic oligonucleotide
  Antisense strand to SEQ ID NO: 2417554
acugguaaauaacaccagc

SEQ ID NO: 2417556 - RNA, 19 nt, Artificial Sequence
  Description of Artificial Sequence: Synthetic oligonucleotide
  Sense strand starting at position 19 of SEQ ID NO: 1886560
accaguaaugcuuggagaa

SEQ ID NO: 2417557 - RNA, 19 nt, Artificial Sequence
  Description of Artificial Sequence: Synthetic oligonucleotide
  Antisense strand to SEQ ID NO: 2417556
uucuccaagcauuacuggu

SEQ ID NO: 2417558 - RNA, 19 nt, Artificial Sequence
  Description of Artificial Sequence: Synthetic oligonucleotide
  Sense strand starting at position 20 of SEQ ID NO: 1886560
ccaguaaugcuuggagaaa

SEQ ID NO: 2417559 - RNA, 19 nt, Artificial Sequence
  Description of Artificial Sequence: Synthetic oligonucleotide
  Antisense strand to SEQ ID NO: 2417558
uuucuccaagcauuacugg

SEQ ID NO: 2417560 - RNA, 19 nt, Artificial Sequence
  Description of Artificial Sequence: Synthetic oligonucleotide
  Sense strand starting at position 349 of SEQ ID NO: 1886560
ucuugucaagucguauguu

SEQ ID NO: 2417561 - RNA, 19 nt, Artificial Sequence
  Description of Artificial Sequence: Synthetic oligonucleotide
  Antisense strand to SEQ ID NO: 2417560
aacauacgacuugacaaga

SEQ ID NO: 2417562 - RNA, 19 nt, Artificial Sequence
  Description of Artificial Sequence: Synthetic oligonucleotide
  Sense strand starting at position 427 of SEQ ID NO: 1886560
uuuggaucccagcaucaga

SEQ ID NO: 2417563 - RNA, 19 nt, Artificial Sequence
  Description of Artificial Sequence: Synthetic oligonucleotide
  Antisense strand to SEQ ID NO: 2417562
ucugaugcugggauccaaa

SEQ ID NO: 2417564 - RNA, 19 nt, Artificial Sequence
  Description of Artificial Sequence: Synthetic oligonucleotide
  Sense strand starting at position 478 of SEQ ID NO: 1886560
gugggauuguguuuggaaa

SEQ ID NO: 2417565 - RNA, 19 nt, Artificial Sequence
  Description of Artificial Sequence: Synthetic oligonucleotide
  Antisense strand to SEQ ID NO: 2417564
uuuccaaacacaaucccac

SEQ ID NO: 2417566 - RNA, 19 nt, Artificial Sequence
  Description of Artificial Sequence: Synthetic oligonucleotide
  Sense strand starting at position 479 of SEQ ID NO: 1886560
ugggauuguguuuggaaac

SEQ ID NO: 2417567 - RNA, 19 nt, Artificial Sequence
  Description of Artificial Sequence: Synthetic oligonucleotide
  Antisense strand to SEQ ID NO: 2417566
guuuccaaacacaauccca

SEQ ID NO: 2417568 - RNA, 19 nt, Artificial Sequence
  Description of Artificial Sequence: Synthetic oligonucleotide
  Sense strand starting at position 519 of SEQ ID NO: 1886560
uuugcuggccuccagauaa

SEQ ID NO: 2417569 - RNA, 19 nt, Artificial Sequence
  Description of Artificial Sequence: Synthetic oligonucleotide
  Antisense strand to SEQ ID NO: 2417568
uuaucuggaggccagcaaa

SEQ ID NO: 2417570 - RNA, 19 nt, Artificial Sequence
  Description of Artificial Sequence: Synthetic oligonucleotide
  Sense strand starting at position 526 of SEQ ID NO: 1886560
gccuccagauaauuaguaa

SEQ ID NO: 2417571 - RNA, 19 nt, Artificial Sequence
  Description of Artificial Sequence: Synthetic oligonucleotide
  Antisense strand to SEQ ID NO: 2417570
uuacuaauuaucuggaggc

SEQ ID NO: 2417572 - RNA, 19 nt, Artificial Sequence
  Description of Artificial Sequence: Synthetic oligonucleotide
  Sense strand starting at position 589 of SEQ ID NO: 1886560
uucuguuaauaugugaaug

SEQ ID NO: 2417573 - RNA, 19 nt, Artificial Sequence
  Description of Artificial Sequence: Synthetic oligonucleotide
  Antisense strand to SEQ ID NO: 2417572
cauucacauauuaacagaa

SEQ ID NO: 2417574 - RNA, 19 nt, Artificial Sequence
  Description of Artificial Sequence: Synthetic oligonucleotide
  Sense strand starting at position 594 of SEQ ID NO: 1886560
uuaauaugugaauguccau

SEQ ID NO: 2417575 - RNA, 19 nt, Artificial Sequence
  Description of Artificial Sequence: Synthetic oligonucleotide
  Antisense strand to SEQ ID NO: 2417574
auggacauucacauauuaa

SEQ ID NO: 2417576 - RNA, 19 nt, Artificial Sequence
  Description of Artificial Sequence: Synthetic oligonucleotide
  Sense strand starting at position 597 of SEQ ID NO: 1886560
auaugugaauguccaugaa

SEQ ID NO: 2417577 - RNA, 19 nt, Artificial Sequence
  Description of Artificial Sequence: Synthetic oligonucleotide
  Antisense strand to SEQ ID NO: 2417576
uucauggacauucacauau

SEQ ID NO: 2417578 - RNA, 19 nt, Artificial Sequence
  Description of Artificial Sequence: Synthetic oligonucleotide
  Sense strand starting at position 601 of SEQ ID NO: 1886560
gugaauguccaugaagguu

SEQ ID NO: 2417579 - RNA, 19 nt, Artificial Sequence
  Description of Artificial Sequence: Synthetic oligonucleotide
  Antisense strand to SEQ ID NO: 2417578
aaccuucauggacauucac

SEQ ID NO: 2417580 - RNA, 19 nt, Artificial Sequence
  Description of Artificial Sequence: Synthetic oligonucleotide
  Sense strand starting at position 613 of SEQ ID NO: 1886560
gaagguugguugguauaua

SEQ ID NO: 2417581 - RNA, 19 nt, Artificial Sequence
  Description of Artificial Sequence: Synthetic oligonucleotide
  Antisense strand to SEQ ID NO: 2417580
uauauaccaaccaaccuuc

SEQ ID NO: 2417582 - RNA, 19 nt, Artificial Sequence
  Description of Artificial Sequence: Synthetic oligonucleotide
  Sense strand starting at position 679 of SEQ ID NO: 1886560
cugcuuuaaguagaaacau

SEQ ID NO: 2417583 - RNA, 19 nt, Artificial Sequence
  Description of Artificial Sequence: Synthetic oligonucleotide
  Antisense strand to SEQ ID NO: 2417582
auguuucuacuuaaagcag

SEQ ID NO: 2417584 - RNA, 19 nt, Artificial Sequence
  Description of Artificial Sequence: Synthetic oligonucleotide
  Sense strand starting at position 753 of SEQ ID NO: 1886560
agcacuguugccuggauuu

SEQ ID NO: 2417585 - RNA, 19 nt, Artificial Sequence
  Description of Artificial Sequence: Synthetic oligonucleotide
  Antisense strand to SEQ ID NO: 2417584
aaauccaggcaacagugcu

SEQ ID NO: 2417586 - RNA, 19 nt, Artificial Sequence
  Description of Artificial Sequence: Synthetic oligonucleotide
  Sense strand starting at position 805 of SEQ ID NO: 1886560
auugucaucguggaauuga

SEQ ID NO: 2417587 - RNA, 19 nt, Artificial Sequence
  Description of Artificial Sequence: Synthetic oligonucleotide
  Antisense strand to SEQ ID NO: 2417586
ucaauuccacgaugacaau

SEQ ID NO: 2417588 - RNA, 19 nt, Artificial Sequence
  Description of Artificial Sequence: Synthetic oligonucleotide
  Sense strand starting at position 848 of SEQ ID NO: 1886560
ggugauaaaucucuccuua

SEQ ID NO: 2417589 - RNA, 19 nt, Artificial Sequence
  Description of Artificial Sequence: Synthetic oligonucleotide
  Antisense strand to SEQ ID NO: 2417588
uaaggagagauuuaucacc

SEQ ID NO: 2417590 - RNA, 19 nt, Artificial Sequence
  Description of Artificial Sequence: Synthetic oligonucleotide
  Sense strand starting at position 944 of SEQ ID NO: 1886560
ucagguacaucagugagua

SEQ ID NO: 2417591 - RNA, 19 nt, Artificial Sequence
  Description of Artificial Sequence: Synthetic oligonucleotide
  Antisense strand to SEQ ID NO: 2417590
uacucacugauguaccuga

SEQ ID NO: 2417592 - RNA, 19 nt, Artificial Sequence
  Description of Artificial Sequence: Synthetic oligonucleotide
  Sense strand starting at position 945 of SEQ ID NO: 1886560
cagguacaucagugaguaa

SEQ ID NO: 2417593 - RNA, 19 nt, Artificial Sequence
  Description of Artificial Sequence: Synthetic oligonucleotide
  Antisense strand to SEQ ID NO: 2417592
uuacucacugauguaccug

SEQ ID NO: 2417594 - RNA, 19 nt, Artificial Sequence
  Description of Artificial Sequence: Synthetic oligonucleotide
  Sense strand starting at position 946 of SEQ ID NO: 1886560
agguacaucagugaguaau

SEQ ID NO: 2417595 - RNA, 19 nt, Artificial Sequence
  Description of Artificial Sequence: Synthetic oligonucleotide
  Antisense strand to SEQ ID NO: 2417594
auuacucacugauguaccu

SEQ ID NO: 2417596 - RNA, 19 nt, Artificial Sequence
  Description of Artificial Sequence: Synthetic oligonucleotide
  Sense strand starting at position 948 of SEQ ID NO: 1886560
guacaucagugaguaauag

SEQ ID NO: 2417597 - RNA, 19 nt, Artificial Sequence
  Description of Artificial Sequence: Synthetic oligonucleotide
  Antisense strand to SEQ ID NO: 2417596
cuauuacucacugauguac

SEQ ID NO: 2417598 - RNA, 19 nt, Artificial Sequence
  Description of Artificial Sequence: Synthetic oligonucleotide
  Sense strand starting at position 949 of SEQ ID NO: 1886560
uacaucagugaguaauagu

SEQ ID NO: 2417599 - RNA, 19 nt, Artificial Sequence
  Description of Artificial Sequence: Synthetic oligonucleotide
  Antisense strand to SEQ ID NO: 2417598
acuauuacucacugaugua

SEQ ID NO: 2417600 - RNA, 19 nt, Artificial Sequence
  Description of Artificial Sequence: Synthetic oligonucleotide
  Sense strand starting at position 1284 of SEQ ID NO: 1886560
guugccuuccuggagaaac

SEQ ID NO: 2417601 - RNA, 19 nt, Artificial Sequence
  Description of Artificial Sequence: Synthetic oligonucleotide
  Antisense strand to SEQ ID NO: 2417600
guuucuccaggaaggcaac

SEQ ID NO: 2417602 - RNA, 19 nt, Artificial Sequence
  Description of Artificial Sequence: Synthetic oligonucleotide
  Sense strand starting at position 1304 of SEQ ID NO: 1886560
gauuaaagaugauauagag

SEQ ID NO: 2417603 - RNA, 19 nt, Artificial Sequence
  Description of Artificial Sequence: Synthetic oligonucleotide
  Antisense strand to SEQ ID NO: 2417602
cucuauaucaucuuuaauc

SEQ ID NO: 2417604 - RNA, 19 nt, Artificial Sequence
  Description of Artificial Sequence: Synthetic oligonucleotide
  Sense strand starting at position 1453 of SEQ ID NO: 1886560
uguaccacauguuuaauua

SEQ ID NO: 2417605 - RNA, 19 nt, Artificial Sequence
  Description of Artificial Sequence: Synthetic oligonucleotide
  Antisense strand to SEQ ID NO: 2417604
uaauuaaacaugugguaca

SEQ ID NO: 2417606 - RNA, 19 nt, Artificial Sequence
  Description of Artificial Sequence: Synthetic oligonucleotide
  Sense strand starting at position 1454 of SEQ ID NO: 1886560
guaccacauguuuaauuaa

SEQ ID NO: 2417607 - RNA, 19 nt, Artificial Sequence
  Description of Artificial Sequence: Synthetic oligonucleotide
  Antisense strand to SEQ ID NO: 2417606
uuaauuaaacaugugguac

SEQ ID NO: 2417608 - RNA, 19 nt, Artificial Sequence
  Description of Artificial Sequence: Synthetic oligonucleotide
  Sense strand starting at position 2103 of SEQ ID NO: 1886560
uuguacugacauuguaaga

SEQ ID NO: 2417609 - RNA, 19 nt, Artificial Sequence
  Description of Artificial Sequence: Synthetic oligonucleotide
  Antisense strand to SEQ ID NO: 2417608
ucuuacaaugucaguacaa

SEQ ID NO: 2417610 - RNA, 19 nt, Artificial Sequence
  Description of Artificial Sequence: Synthetic oligonucleotide
  Sense strand starting at position 2427 of SEQ ID NO: 1886560
ugucauuuauaauaggauc

SEQ ID NO: 2417611 - RNA, 19 nt, Artificial Sequence
  Description of Artificial Sequence: Synthetic oligonucleotide
  Antisense strand to SEQ ID NO: 2417610
gauccuauuauaaaugaca

SEQ ID NO: 2417612 - RNA, 19 nt, Artificial Sequence
  Description of Artificial Sequence: Synthetic oligonucleotide
  Sense strand starting at position 2486 of SEQ ID NO: 1886560
augcaagaucuguacauug

SEQ ID NO: 2417613 - RNA, 19 nt, Artificial Sequence
  Description of Artificial Sequence: Synthetic oligonucleotide
  Antisense strand to SEQ ID NO: 2417612
caauguacagaucuugcau

SEQ ID NO: 2417614 - RNA, 19 nt, Artificial Sequence
  Description of Artificial Sequence: Synthetic oligonucleotide
  Sense strand starting at position 2662 of SEQ ID NO: 1886560
agaacuugaugagcuaauu

SEQ ID NO: 2417615 - RNA, 19 nt, Artificial Sequence
  Description of Artificial Sequence: Synthetic oligonucleotide
  Antisense strand to SEQ ID NO: 2417614
aauuagcucaucaaguucu

SEQ ID NO: 2417616 - RNA, 19 nt, Artificial Sequence
  Description of Artificial Sequence: Synthetic oligonucleotide
  Sense strand starting at position 2751 of SEQ ID NO: 1886560
agacuuaccuugucauacu

SEQ ID NO: 2417617 - RNA, 19 nt, Artificial Sequence
  Description of Artificial Sequence: Synthetic oligonucleotide
  Antisense strand to SEQ ID NO: 2417616
aguaugacaagguaagucu

SEQ ID NO: 2417618 - RNA, 19 nt, Artificial Sequence
  Description of Artificial Sequence: Synthetic oligonucleotide
  Sense strand starting at position 2770 of SEQ ID NO: 1886560
ucaagacuucuguaaagca

SEQ ID NO: 2417619 - RNA, 19 nt, Artificial Sequence
  Description of Artificial Sequence: Synthetic oligonucleotide
  Antisense strand to SEQ ID NO: 2417618
ugcuuuacagaagucuuga

SEQ ID NO: 2417620 - RNA, 19 nt, Artificial Sequence
  Description of Artificial Sequence: Synthetic oligonucleotide
  Sense strand starting at position 2791 of SEQ ID NO: 1886560
aaguaagauugugugagau

SEQ ID NO: 2417621 - RNA, 19 nt, Artificial Sequence
  Description of Artificial Sequence: Synthetic oligonucleotide
  Antisense strand to SEQ ID NO: 2417620
aucucacacaaucuuacuu

SEQ ID NO: 2417622 - RNA, 19 nt, Artificial Sequence
  Description of Artificial Sequence: Synthetic oligonucleotide
  Sense strand starting at position 2801 of SEQ ID NO: 1886560
gugugagauuaaccaaaua

SEQ ID NO: 2417623 - RNA, 19 nt, Artificial Sequence
  Description of Artificial Sequence: Synthetic oligonucleotide
  Antisense strand to SEQ ID NO: 2417622
uauuugguuaaucucacac

SEQ ID NO: 2417624 - RNA, 19 nt, Artificial Sequence
  Description of Artificial Sequence: Synthetic oligonucleotide
  Sense strand starting at position 2845 of SEQ ID NO: 1886560
augugaaguauauggacau

SEQ ID NO: 2417625 - RNA, 19 nt, Artificial Sequence
  Description of Artificial Sequence: Synthetic oligonucleotide
  Antisense strand to SEQ ID NO: 2417624
auguccauauacuucacau

SEQ ID NO: 2417626 - RNA, 19 nt, Artificial Sequence
  Description of Artificial Sequence: Synthetic oligonucleotide
  Sense strand starting at position 2872 of SEQ ID NO: 1886560
uuuacagaugccugaguaa

SEQ ID NO: 2417627 - RNA, 19 nt, Artificial Sequence
  Description of Artificial Sequence: Synthetic oligonucleotide
  Antisense strand to SEQ ID NO: 2417626
uuacucaggcaucuguaaa

SEQ ID NO: 2417628 - RNA, 19 nt, Artificial Sequence
  Description of Artificial Sequence: Synthetic oligonucleotide
  Sense strand starting at position 2875 of SEQ ID NO: 1886560
acagaugccugaguaauuc

SEQ ID NO: 2417629 - RNA, 19 nt, Artificial Sequence
  Description of Artificial Sequence: Synthetic oligonucleotide
  Antisense strand to SEQ ID NO: 2417628
gaauuacucaggcaucugu

SEQ ID NO: 2417630 - RNA, 19 nt, Artificial Sequence
  Description of Artificial Sequence: Synthetic oligonucleotide
  Sense strand starting at position 2884 of SEQ ID NO: 1886560
ugaguaauucgagggagaa

SEQ ID NO: 2417631 - RNA, 19 nt, Artificial Sequence
  Description of Artificial Sequence: Synthetic oligonucleotide
  Antisense strand to SEQ ID NO: 2417630
uucucccucgaauuacuca

SEQ ID NO: 2417632 - RNA, 19 nt, Artificial Sequence
  Description of Artificial Sequence: Synthetic oligonucleotide
  Sense strand starting at position 2915 of SEQ ID NO: 1886560
uuacaucaguggucuuaga

SEQ ID NO: 2417633 - RNA, 19 nt, Artificial Sequence
  Description of Artificial Sequence: Synthetic oligonucleotide
  Antisense strand to SEQ ID NO: 2417632
ucuaagaccacugauguaa

SEQ ID NO: 2417634 - RNA, 19 nt, Artificial Sequence
  Description of Artificial Sequence: Synthetic oligonucleotide
  Sense strand starting at position 8 of SEQ ID NO: 1886561
gcugguguuauuuaccagu

SEQ ID NO: 2417635 - RNA, 19 nt, Artificial Sequence
  Description of Artificial Sequence: Synthetic oligonucleotide
  Antisense strand to SEQ ID NO: 2417634
acugguaaauaacaccagc

SEQ ID NO: 2417636 - RNA, 19 nt, Artificial Sequence
  Description of Artificial Sequence: Synthetic oligonucleotide
  Sense strand starting at position 21 of SEQ ID NO: 1886561
accaguaaugcuuggagaa

SEQ ID NO: 2417637 - RNA, 19 nt, Artificial Sequence
  Description of Artificial Sequence: Synthetic oligonucleotide
  Antisense strand to SEQ ID NO: 2417636
uucuccaagcauuacuggu

SEQ ID NO: 2417638 - RNA, 19 nt, Artificial Sequence
  Description of Artificial Sequence: Synthetic oligonucleotide
  Sense strand starting at position 22 of SEQ ID NO: 1886561
ccaguaaugcuuggagaaa

SEQ ID NO: 2417639 - RNA, 19 nt, Artificial Sequence
  Description of Artificial Sequence: Synthetic oligonucleotide
  Antisense strand to SEQ ID NO: 2417638
uuucuccaagcauuacugg

SEQ ID NO: 2417640 - RNA, 19 nt, Artificial Sequence
  Description of Artificial Sequence: Synthetic oligonucleotide
  Sense strand starting at position 79 of SEQ ID NO: 1886561
guuguuucuguguuuguca

SEQ ID NO: 2417641 - RNA, 19 nt, Artificial Sequence
  Description of Artificial Sequence: Synthetic oligonucleotide
  Antisense strand to SEQ ID NO: 2417640
ugacaaacacagaaacaac

SEQ ID NO: 2417642 - RNA, 19 nt, Artificial Sequence
  Description of Artificial Sequence: Synthetic oligonucleotide
  Sense strand starting at position 251 of SEQ ID NO: 1886561
uauuaagaguuccuaagga

SEQ ID NO: 2417643 - RNA, 19 nt, Artificial Sequence
  Description of Artificial Sequence: Synthetic oligonucleotide
  Antisense strand to SEQ ID NO: 2417642
uccuuaggaacucuuaaua

SEQ ID NO: 2417644 - RNA, 19 nt, Artificial Sequence
  Description of Artificial Sequence: Synthetic oligonucleotide
  Sense strand starting at position 522 of SEQ ID NO: 1886561
uuugcuggccuccagauaa

SEQ ID NO: 2417645 - RNA, 19 nt, Artificial Sequence
  Description of Artificial Sequence: Synthetic oligonucleotide
  Antisense strand to SEQ ID NO: 2417644
uuaucuggaggccagcaaa

SEQ ID NO: 2417646 - RNA, 19 nt, Artificial Sequence
  Description of Artificial Sequence: Synthetic oligonucleotide
  Sense strand starting at position 529 of SEQ ID NO: 1886561
gccuccagauaauuaguaa

SEQ ID NO: 2417647 - RNA, 19 nt, Artificial Sequence
  Description of Artificial Sequence: Synthetic oligonucleotide
  Antisense strand to SEQ ID NO: 2417646
uuacuaauuaucuggaggc

SEQ ID NO: 2417648 - RNA, 19 nt, Artificial Sequence
  Description of Artificial Sequence: Synthetic oligonucleotide
  Sense strand starting at position 570 of SEQ ID NO: 1886561
ccuuacauuguguaauaua

SEQ ID NO: 2417649 - RNA, 19 nt, Artificial Sequence
  Description of Artificial Sequence: Synthetic oligonucleotide
  Antisense strand to SEQ ID NO: 2417648
uauauuacacaauguaagg

SEQ ID NO: 2417650 - RNA, 19 nt, Artificial Sequence
  Description of Artificial Sequence: Synthetic oligonucleotide
  Sense strand starting at position 592 of SEQ ID NO: 1886561
uucuguuaauaugugaaug

SEQ ID NO: 2417651 - RNA, 19 nt, Artificial Sequence
  Description of Artificial Sequence: Synthetic oligonucleotide
  Antisense strand to SEQ ID NO: 2417650
cauucacauauuaacagaa

SEQ ID NO: 2417652 - RNA, 19 nt, Artificial Sequence
  Description of Artificial Sequence: Synthetic oligonucleotide
  Sense strand starting at position 597 of SEQ ID NO: 1886561
uuaauaugugaauguccau

SEQ ID NO: 2417653 - RNA, 19 nt, Artificial Sequence
  Description of Artificial Sequence: Synthetic oligonucleotide
  Antisense strand to SEQ ID NO: 2417652
auggacauucacauauuaa

SEQ ID NO: 2417654 - RNA, 19 nt, Artificial Sequence
  Description of Artificial Sequence: Synthetic oligonucleotide
  Sense strand starting at position 600 of SEQ ID NO: 1886561
auaugugaauguccaugaa

SEQ ID NO: 2417655 - RNA, 19 nt, Artificial Sequence
  Description of Artificial Sequence: Synthetic oligonucleotide
  Antisense strand to SEQ ID NO: 2417654
uucauggacauucacauau

SEQ ID NO: 2417656 - RNA, 19 nt, Artificial Sequence
  Description of Artificial Sequence: Synthetic oligonucleotide
  Sense strand starting at position 604 of SEQ ID NO: 1886561
gugaauguccaugaagguu

SEQ ID NO: 2417657 - RNA, 19 nt, Artificial Sequence
  Description of Artificial Sequence: Synthetic oligonucleotide
  Antisense strand to SEQ ID NO: 2417656
aaccuucauggacauucac

SEQ ID NO: 2417658 - RNA, 19 nt, Artificial Sequence
  Description of Artificial Sequence: Synthetic oligonucleotide
  Sense strand starting at position 616 of SEQ ID NO: 1886561
gaagguugguugguauaua

SEQ ID NO: 2417659 - RNA, 19 nt, Artificial Sequence
  Description of Artificial Sequence: Synthetic oligonucleotide
  Antisense strand to SEQ ID NO: 2417658
uauauaccaaccaaccuuc

SEQ ID NO: 2417660 - RNA, 19 nt, Artificial Sequence
  Description of Artificial Sequence: Synthetic oligonucleotide
  Sense strand starting at position 682 of SEQ ID NO: 1886561
cugcuuuaaguagaaacau

SEQ ID NO: 2417661 - RNA, 19 nt, Artificial Sequence
  Description of Artificial Sequence: Synthetic oligonucleotide
  Antisense strand to SEQ ID NO: 2417660
auguuucuacuuaaagcag

SEQ ID NO: 2417662 - RNA, 19 nt, Artificial Sequence
  Description of Artificial Sequence: Synthetic oligonucleotide
  Sense strand starting at position 807 of SEQ ID NO: 1886561
cauugucaucauggaauug

SEQ ID NO: 2417663 - RNA, 19 nt, Artificial Sequence
  Description of Artificial Sequence: Synthetic oligonucleotide
  Antisense strand to SEQ ID NO: 2417662
caauuccaugaugacaaug

SEQ ID NO: 2417664 - RNA, 19 nt, Artificial Sequence
  Description of Artificial Sequence: Synthetic oligonucleotide
  Sense strand starting at position 851 of SEQ ID NO: 1886561
ggugauaaaucucuccuua

SEQ ID NO: 2417665 - RNA, 19 nt, Artificial Sequence
  Description of Artificial Sequence: Synthetic oligonucleotide
  Antisense strand to SEQ ID NO: 2417664
uaaggagagauuuaucacc

SEQ ID NO: 2417666 - RNA, 19 nt, Artificial Sequence
  Description of Artificial Sequence: Synthetic oligonucleotide
  Sense strand starting at position 948 of SEQ ID NO: 1886561
cagguacaucagugaguaa

SEQ ID NO: 2417667 - RNA, 19 nt, Artificial Sequence
  Description of Artificial Sequence: Synthetic oligonucleotide
  Antisense strand to SEQ ID NO: 2417666
uuacucacugauguaccug

SEQ ID NO: 2417668 - RNA, 19 nt, Artificial Sequence
  Description of Artificial Sequence: Synthetic oligonucleotide
  Sense strand starting at position 949 of SEQ ID NO: 1886561
agguacaucagugaguaau

SEQ ID NO: 2417669 - RNA, 19 nt, Artificial Sequence
  Description of Artificial Sequence: Synthetic oligonucleotide
  Antisense strand to SEQ ID NO: 2417668
auuacucacugauguaccu

SEQ ID NO: 2417670 - RNA, 19 nt, Artificial Sequence
  Description of Artificial Sequence: Synthetic oligonucleotide
  Sense strand starting at position 951 of SEQ ID NO: 1886561
guacaucagugaguaauag

SEQ ID NO: 2417671 - RNA, 19 nt, Artificial Sequence
  Description of Artificial Sequence: Synthetic oligonucleotide
  Antisense strand to SEQ ID NO: 2417670
cuauuacucacugauguac

SEQ ID NO: 2417672 - RNA, 19 nt, Artificial Sequence
  Description of Artificial Sequence: Synthetic oligonucleotide
  Sense strand starting at position 952 of SEQ ID NO: 1886561
uacaucagugaguaauagu

SEQ ID NO: 2417673 - RNA, 19 nt, Artificial Sequence
  Description of Artificial Sequence: Synthetic oligonucleotide
  Antisense strand to SEQ ID NO: 2417672
acuauuacucacugaugua

SEQ ID NO: 2417674 - RNA, 19 nt, Artificial Sequence
  Description of Artificial Sequence: Synthetic oligonucleotide
  Sense strand starting at position 1456 of SEQ ID NO: 1886561
uguaccacauguuuaagau

SEQ ID NO: 2417675 - RNA, 19 nt, Artificial Sequence
  Description of Artificial Sequence: Synthetic oligonucleotide
  Antisense strand to SEQ ID NO: 2417674
aucuuaaacaugugguaca

SEQ ID NO: 2417676 - RNA, 19 nt, Artificial Sequence
  Description of Artificial Sequence: Synthetic oligonucleotide
  Sense strand starting at position 1457 of SEQ ID NO: 1886561
guaccacauguuuaagaua

SEQ ID NO: 2417677 - RNA, 19 nt, Artificial Sequence
  Description of Artificial Sequence: Synthetic oligonucleotide
  Antisense strand to SEQ ID NO: 2417676
uaucuuaaacaugugguac

SEQ ID NO: 2417678 - RNA, 19 nt, Artificial Sequence
  Description of Artificial Sequence: Synthetic oligonucleotide
  Sense strand starting at position 1465 of SEQ ID NO: 1886561
uguuuaagauaguccauau

SEQ ID NO: 2417679 - RNA, 19 nt, Artificial Sequence
  Description of Artificial Sequence: Synthetic oligonucleotide
  Antisense strand to SEQ ID NO: 2417678
auauggacuaucuuaaaca

SEQ ID NO: 2417680 - RNA, 19 nt, Artificial Sequence
  Description of Artificial Sequence: Synthetic oligonucleotide
  Sense strand starting at position 1475 of SEQ ID NO: 1886561
aguccauauccacauugua

SEQ ID NO: 2417681 - RNA, 19 nt, Artificial Sequence
  Description of Artificial Sequence: Synthetic oligonucleotide
  Antisense strand to SEQ ID NO: 2417680
uacaauguggauauggacu

SEQ ID NO: 2417682 - RNA, 19 nt, Artificial Sequence
  Description of Artificial Sequence: Synthetic oligonucleotide
  Sense strand starting at position 2049 of SEQ ID NO: 1886561
ucaauaccagucuggguaa

SEQ ID NO: 2417683 - RNA, 19 nt, Artificial Sequence
  Description of Artificial Sequence: Synthetic oligonucleotide
  Antisense strand to SEQ ID NO: 2417682
uuacccagacugguauuga

SEQ ID NO: 2417684 - RNA, 19 nt, Artificial Sequence
  Description of Artificial Sequence: Synthetic oligonucleotide
  Sense strand starting at position 2052 of SEQ ID NO: 1886561
auaccagucuggguaacau

SEQ ID NO: 2417685 - RNA, 19 nt, Artificial Sequence
  Description of Artificial Sequence: Synthetic oligonucleotide
  Antisense strand to SEQ ID NO: 2417684
auguuacccagacugguau

SEQ ID NO: 2417686 - RNA, 19 nt, Artificial Sequence
  Description of Artificial Sequence: Synthetic oligonucleotide
  Sense strand starting at position 2431 of SEQ ID NO: 1886561
ugucauuuauaauaggauc

SEQ ID NO: 2417687 - RNA, 19 nt, Artificial Sequence
  Description of Artificial Sequence: Synthetic oligonucleotide
  Antisense strand to SEQ ID NO: 2417686
gauccuauuauaaaugaca

SEQ ID NO: 2417688 - RNA, 19 nt, Artificial Sequence
  Description of Artificial Sequence: Synthetic oligonucleotide
  Sense strand starting at position 2490 of SEQ ID NO: 1886561
augcaagaucuguacauug

SEQ ID NO: 2417689 - RNA, 19 nt, Artificial Sequence
  Description of Artificial Sequence: Synthetic oligonucleotide
  Antisense strand to SEQ ID NO: 2417688
caauguacagaucuugcau

SEQ ID NO: 2417690 - RNA, 19 nt, Artificial Sequence
  Description of Artificial Sequence: Synthetic oligonucleotide
  Sense strand starting at position 2492 of SEQ ID NO: 1886561
gcaagaucuguacauugag

SEQ ID NO: 2417691 - RNA, 19 nt, Artificial Sequence
  Description of Artificial Sequence: Synthetic oligonucleotide
  Antisense strand to SEQ ID NO: 2417690
cucaauguacagaucuugc

SEQ ID NO: 2417692 - RNA, 19 nt, Artificial Sequence
  Description of Artificial Sequence: Synthetic oligonucleotide
  Sense strand starting at position 2495 of SEQ ID NO: 1886561
agaucuguacauugagaac

SEQ ID NO: 2417693 - RNA, 19 nt, Artificial Sequence
  Description of Artificial Sequence: Synthetic oligonucleotide
  Antisense strand to SEQ ID NO: 2417692
guucucaauguacagaucu

SEQ ID NO: 2417694 - RNA, 19 nt, Artificial Sequence
  Description of Artificial Sequence: Synthetic oligonucleotide
  Sense strand starting at position 2667 of SEQ ID NO: 1886561
agaacuugaugagcuaauu

SEQ ID NO: 2417695 - RNA, 19 nt, Artificial Sequence
  Description of Artificial Sequence: Synthetic oligonucleotide
  Antisense strand to SEQ ID NO: 2417694
aauuagcucaucaaguucu

SEQ ID NO: 2417696 - RNA, 19 nt, Artificial Sequence
  Description of Artificial Sequence: Synthetic oligonucleotide
  Sense strand starting at position 2756 of SEQ ID NO: 1886561
agacuuaccuugucauacu

SEQ ID NO: 2417697 - RNA, 19 nt, Artificial Sequence
  Description of Artificial Sequence: Synthetic oligonucleotide
  Antisense strand to SEQ ID NO: 2417696
aguaugacaagguaagucu

SEQ ID NO: 2417698 - RNA, 19 nt, Artificial Sequence
  Description of Artificial Sequence: Synthetic oligonucleotide
  Sense strand starting at position 2775 of SEQ ID NO: 1886561
ucaagacuucuguaaagua

SEQ ID NO: 2417699 - RNA, 19 nt, Artificial Sequence
  Description of Artificial Sequence: Synthetic oligonucleotide
  Antisense strand to SEQ ID NO: 2417698
uacuuuacagaagucuuga

SEQ ID NO: 2417700 - RNA, 19 nt, Artificial Sequence
  Description of Artificial Sequence: Synthetic oligonucleotide
  Sense strand starting at position 2795 of SEQ ID NO: 1886561
caaguaagacugugugaga

SEQ ID NO: 2417701 - RNA, 19 nt, Artificial Sequence
  Description of Artificial Sequence: Synthetic oligonucleotide
  Antisense strand to SEQ ID NO: 2417700
ucucacacagucuuacuug

SEQ ID NO: 2417702 - RNA, 19 nt, Artificial Sequence
  Description of Artificial Sequence: Synthetic oligonucleotide
  Sense strand starting at position 2796 of SEQ ID NO: 1886561
aaguaagacugugugagau

SEQ ID NO: 2417703 - RNA, 19 nt, Artificial Sequence
  Description of Artificial Sequence: Synthetic oligonucleotide
  Antisense strand to SEQ ID NO: 2417702
aucucacacagucuuacuu

SEQ ID NO: 2417704 - RNA, 19 nt, Artificial Sequence
  Description of Artificial Sequence: Synthetic oligonucleotide
  Sense strand starting at position 2806 of SEQ ID NO: 1886561
gugugagauuaaccaaaga

SEQ ID NO: 2417705 - RNA, 19 nt, Artificial Sequence
  Description of Artificial Sequence: Synthetic oligonucleotide
  Antisense strand to SEQ ID NO: 2417704
ucuuugguuaaucucacac

SEQ ID NO: 2417706 - RNA, 19 nt, Artificial Sequence
  Description of Artificial Sequence: Synthetic oligonucleotide
  Sense strand starting at position 2877 of SEQ ID NO: 1886561
uuuacagaugccugaguaa

SEQ ID NO: 2417707 - RNA, 19 nt, Artificial Sequence
  Description of Artificial Sequence: Synthetic oligonucleotide
  Antisense strand to SEQ ID NO: 2417706
uuacucaggcaucuguaaa

SEQ ID NO: 2417708 - RNA, 19 nt, Artificial Sequence
  Description of Artificial Sequence: Synthetic oligonucleotide
  Sense strand starting at position 2880 of SEQ ID NO: 1886561
acagaugccugaguaauuc

SEQ ID NO: 2417709 - RNA, 19 nt, Artificial Sequence
  Description of Artificial Sequence: Synthetic oligonucleotide
  Antisense strand to SEQ ID NO: 2417708
gaauuacucaggcaucugu

SEQ ID NO: 2417710 - RNA, 19 nt, Artificial Sequence
  Description of Artificial Sequence: Synthetic oligonucleotide
  Sense strand starting at position 2889 of SEQ ID NO: 1886561
ugaguaauucgagggagaa

SEQ ID NO: 2417711 - RNA, 19 nt, Artificial Sequence
  Description of Artificial Sequence: Synthetic oligonucleotide
  Antisense strand to SEQ ID NO: 2417710
uucucccucgaauuacuca

SEQ ID NO: 2417712 - RNA, 19 nt, Artificial Sequence
  Description of Artificial Sequence: Synthetic oligonucleotide
  Sense strand starting at position 3633 of SEQ ID NO: 1886561
acauuuguuugacaaagaa

SEQ ID NO: 2417713 - RNA, 19 nt, Artificial Sequence
  Description of Artificial Sequence: Synthetic oligonucleotide
  Antisense strand to SEQ ID NO: 2417712
uucuuugucaaacaaaugu

SEQ ID NO: 2417714 - RNA, 19 nt, Artificial Sequence
  Description of Artificial Sequence: Synthetic oligonucleotide
  Sense strand starting at position 6 of SEQ ID NO: 1886562
gcugguguuauuuaccagu

SEQ ID NO: 2417715 - RNA, 19 nt, Artificial Sequence
  Description of Artificial Sequence: Synthetic oligonucleotide
  Antisense strand to SEQ ID NO: 2417714
acugguaaauaacaccagc

SEQ ID NO: 2417716 - RNA, 19 nt, Artificial Sequence
  Description of Artificial Sequence: Synthetic oligonucleotide
  Sense strand starting at position 19 of SEQ ID NO: 1886562
accaguaaugcuuggagaa

SEQ ID NO: 2417717 - RNA, 19 nt, Artificial Sequence
  Description of Artificial Sequence: Synthetic oligonucleotide
  Antisense strand to SEQ ID NO: 2417716
uucuccaagcauuacuggu

SEQ ID NO: 2417718 - RNA, 19 nt, Artificial Sequence
  Description of Artificial Sequence: Synthetic oligonucleotide
  Sense strand starting at position 20 of SEQ ID NO: 1886562
ccaguaaugcuuggagaaa

SEQ ID NO: 2417719 - RNA, 19 nt, Artificial Sequence
  Description of Artificial Sequence: Synthetic oligonucleotide
  Antisense strand to SEQ ID NO: 2417718
uuucuccaagcauuacugg

SEQ ID NO: 2417720 - RNA, 19 nt, Artificial Sequence
  Description of Artificial Sequence: Synthetic oligonucleotide
  Sense strand starting at position 349 of SEQ ID NO: 1886562
ucuugucaagucguauguu

SEQ ID NO: 2417721 - RNA, 19 nt, Artificial Sequence
  Description of Artificial Sequence: Synthetic oligonucleotide
  Antisense strand to SEQ ID NO: 2417720
aacauacgacuugacaaga

SEQ ID NO: 2417722 - RNA, 19 nt, Artificial Sequence
  Description of Artificial Sequence: Synthetic oligonucleotide
  Sense strand starting at position 427 of SEQ ID NO: 1886562
uuuggaucccagcaucaga

SEQ ID NO: 2417723 - RNA, 19 nt, Artificial Sequence
  Description of Artificial Sequence: Synthetic oligonucleotide
  Antisense strand to SEQ ID NO: 2417722
ucugaugcugggauccaaa

SEQ ID NO: 2417724 - RNA, 19 nt, Artificial Sequence
  Description of Artificial Sequence: Synthetic oligonucleotide
  Sense strand starting at position 478 of SEQ ID NO: 1886562
gugggauuguguuuggaaa

SEQ ID NO: 2417725 - RNA, 19 nt, Artificial Sequence
  Description of Artificial Sequence: Synthetic oligonucleotide
  Antisense strand to SEQ ID NO: 2417724
uuuccaaacacaaucccac
